United States Patent Application Publication US 2026/0103690 A1 - sequence listing, part 71

SEQ ID NO: 347655 - protein, 417 aa, unidentified
MSVTEMGPLARPAAPTGGVDWAKDEHAVSIVGPDGEQIERFSVEHTAAGLRTLVRRLLRAGVDDVAIERPDGPVVEALRQGGLSVYVIAPNQLKNLRSRYGSAGNKDDRFDAYVLADTLRTDRRRLRPLVPDTDQSVTLRMTCRARKDLVGHRIALANQLRAHLQLVFPGTVGLFHDLDSAISLRFLARFPSQDKADWLSPKRFDAWLRGAGYCGRKTGAELHARLGAAPRGASGPDSEARAHITLALLAALRAVSDQIDALVAQISEQLDLHPDAPIFQSLPRSGTVRAARLLAEIGDARGRFPTPESLTCLAGVAPSTRASGKVRSVTFRWAADKQLRDAVTDFAGDTRHANPWAADLYARAIARGHDHPHATRILARAWLHIIWKCWQTNTPYDPSRHGALQTLLTQQHHADAA

SEQ ID NO: 347656 - protein, 401 aa, unidentified
MVSDFRKGRYNLMKIYVGIDIAKLNHFAAAISSDGEIILEPFKFTNDADGFQLLVSKLESFDKNSIIIGLESTAHYGDNLVRYLVAEFYQVCVLNPIQTCQMRKNNIRKTKTDKVDTFVIAKTLMMQDDLRFITFFDLDMMDLKALGRFRQKTIKQRTRLKIQLTTYVDQVFPEIQYFFKSGLHQNAVYALLKEAPSPKEIASMHMTHLANLLKVNSHGHFTKEQAKELRVLAQKSVGANDSAISIQITQTIQQIELLDSQLEKIEVEMTDIMKFNDSVIMTIPGIGYINGGMILGEIGDIHRFSNPNKLLAFAGLDPSVYQSGNFQAKTTRMSKRGSRVLRYALVNAAWNVVRNNATFKAYYDAKRAEGRSHYNALGHCAGKLVRVIWKMLTDEVEFNLE

SEQ ID NO: 347657 - protein, 421 aa, unidentified
MIVSFEVEGVVMETVVEHPAALDVHKAQVTVCVRAPAPGGGREQQVAEFATTVPGLLALRDWLKAHGVTQVAMEASGVYWKPPWAILEDEFECLLVNARHVKQVPGRKTDVSDAAWLCQLLEAGLLKASFVPPKPIRTLRNLTRYRKAQIQERQREANRLHKILEDSAIKLDCVATDILGASARAMLDALVAGSTDPVVLAELARGRLRAKIPALREALQGRFDSEHALVVGAILAHIDFLDEQITLLCDAIEEQIRPFAQAVELLCTIPGVQRRTAEVIVAEIGVDMSVFPSAGHLASWAGLCPGNDESAGKRRSGRTRKGSAWLGIALTEAAQAVSRTKHTYLAAQYRRLRARRGHKKAIGAVKHSIIVACWHMLTTGELYRDPGADHFTRLDPDKQTRRLIAQLERLGHTVTLQKAAA

SEQ ID NO: 347658 - protein, 336 aa, unidentified
MTVSVIGIDIAKRVFQLHGVDDHGRTVLRKRLTRATFLMEMATHPACVVGMEAGSGAHHWGRCLAEMGHDVRLMPPQYVRPYVKGNKHDASDAEACCEAVQRPGMRFIPVKSETQQATLMLHRVRDHFIRRRTGAINALRGHLAEFGLVSASQRAGLNQLLLAVEDSDSAIPGEVKELLGMITSEIRAYDRSIAELDKRLKAKCKKADVSRRLREVPGVGPVIATAMPAFLTAGGSFDSASSFAAWLGITPRQHSSGGKERTFGITKRGNTYLRRQLINGARAVVRVARGRKGGMWDWINKMLDRRHFNVVTVAVANKMARIMWSMITKGTHYKMA

SEQ ID NO: 347659 - protein, 386 aa, unidentified
MMTTTCRHESTAPSTTTITLLLAFELGERRWKLGFTTGLGQRPRIRSVPAGAVDQVLEEIARAKRRLKVSEETAVMSCYEAGRDGFWLHRYLVAHGVTNHVVDSSSIEVNRRARRAKTDKLDLAGLLNLLARYLIGDRRVWRVVRVPSVAEEDARQLHRTWESVQQDRSRLLCRLQGLLVTQGVRLRIGDDFLQRLDGARLWDGRAVPGLKHRVQRAWAQLVLVNTQLEELEAARTTLVPDHETATGRYVEVLPTLRGIGPIGAWVLATEIFGWREIRNRRELGALVGLVPAPYQSGDTDHDQGITRAGNKHVRRLMVQLAWSWVHYQQASALTRWYQGRFGSGSKRVRRIGIVALARKLLIALWRYVEQGEIPEGAIVKTPAPAV

SEQ ID NO: 347660 - protein, 318 aa, unidentified
MTAFVGIDIANQKFDVAVLYGKNSYKCSSFSNSTQGFIAFTNWLQVYGEIHICMEATGAYSTPLATFFDEISVPVSVENPARIHAFAQSELTRNKTDKSDAKMIARYCRLYHPPLWKPAPLYIRQLLSLMSRLDNLKEMLRMEQNRLLTADVIITVSLQENINSLSRQIVVIQQAVKEHINANKELKKNKALLTSIPGVGDILSCMFLAYVGDVSKFSNNKKLVAWVGLNPMQQESGLWKGRSKISKKGNIELRKALYMPAVAALTHNPILIDLKNRLKVKNKSGKSIVCTGMKKLLQLMYGVLKSGVPFDAKKSFAN

SEQ ID NO: 347661 - protein, 393 aa, unidentified
MICVGIDVAKDKYDCFILSSEGEVLADVFTIPNNAEGFDTLLQTIRRCARPEDKIKVGLEATGHYSYNILGFLLNEGLDTYVINPLHTNLYRKSLSLRKTKTDRVDARTIAAMLMSDVDLKSYTDTAYHNEELKSLTRYRFDKVRERAKLKQSVSRLVTILFPELEKLVSTLHTASVYALLSEFPGAKQVAGAHLTHLKAVLHDASKGRYGRDMATTFRDAARCSVGSVMPAKSLELRHTIRLIHELDAEIEDIEAAIQSMMDDIQSPITTIPGMGVRMGAMILAEIGDFSRFDSPDKILAYAGMSPSTYQSGQFSLSGAYSHMEKRGSRYLRYALYNATKYVCLWNPTFAAYLAKKRAEDKHYNVALSHAAKKLVRLIYALEKSKRPYSTAA

SEQ ID NO: 347662 - protein, 357 aa, unidentified
MKKNYRLQDHVVKGKEIFVGLEDSKKTWKLAVRSEKMLIQQVSMEARYPVLIRYLRNKFPDCTIHLLYEAGFKGFNLYDQLTEDGIDCVVIPPHVVTEPKVNRIKTDKRDARRLAKVLENHDFKESCYVPDKERREDRQVSRTLVALQKDVVRTRNRIRKFLDFHGIEVSFTGRWDREEFRALTKLELSEPLRISLDILLTQLEELWAHQLSLRAALKKLCKKERYHKAYTIAHSLPGIGWFTAIRLVLELGEDLSRFGSGKKMASFVGLTPSENSSGETEHKGRITGMGPGYIRAILIENSWIAIRKDPVLLAKFNRVWHASGNRKKGIVAVARMLIVRLRTCVMSGTPYRVGIAA

SEQ ID NO: 347663 - protein, 339 aa, unidentified
MRLYAAIDLHSNNSVLVVQDEEDRVVCEQRLPNKLEAILPQLAPYKERVQAVAVESTFNWYWLVDGLMDAGYEVKLVNTAAVKQYEGIKYTGDEHDARHLAHLLRLGILPTGYIQPKEDRAVRDLLRKRAQLVRFRTTQMLCVQSLANRNTGERISGELVKKFNEEHIQRFSGGDEVKALAMRSNLNTLRCLDEQIAGLEAVVLKRAKLKPEFKRLLTVDGIWRILGMTIMYEAGEMSRFKKVGHFASYARCVGSSRWSNGKKKGEGNRKNGNKYLAWAFIEAAYFAVRYNERIRSFYDRKKAKTNKIVAAKAVAHKLARACYHVLKDGTPFDETRAFA

SEQ ID NO: 347664 - protein, 385 aa, unidentified
MAPIRMPEAVIGLDVGKSSHWACVATRDGEILLSAPVANREDDLDSLFGRFPDALVVVDQSRNIGALALARARAAGMSAAYLPGLAAHGAARLFAGDAKTDERDAMVIAKTALGIPDALLPVGDPGPTIAAARALAAQRNFLTCENTRNKNRLRSILLESCPAFEALVDLSDGPQLRLMASLGGAWSVADAGPRRAAALTRGAARGKIEALVRSTTSSTRPDASAIAAEDRAVRLLARRISENSAEIEAITAEISALLEGDDTYRCLLTVPGIGPKTASELAISIDIEDFPSHDRLASYCGLAPRNRQSGTSISSVTASRQGNKRLKNLLIFSCNCLTRTEGRWGDYYTRCRERGMSHGKALKALARKRLKVIYAVMRDRVPYAA

SEQ ID NO: 347665 - protein, 343 aa, unidentified
MQTITTIGLDIAKSVFQVHGVDAGGQVIVRRQLKRRYVLSFFQKLTPCLVGIEACASSHHWSRELQTLGHTVRLMPPAYVKPYVKRQKNDATDAEAICEAVTRTNMRFVPTKTAEQQSGLVLHRARHLFIRQQTSVINAIRAHLAEFGIVAPVGRHGVEELLNVVADPSDRRVPEMARACLLAFGAQLSRIKEQILEFDRLIRAWHRSNEMSMRLDEAPGVGPVLATALVAAVADPKSFRSGRNFSAWIGIVPKQHSSGGKNRLGNISKQGDRYLRGLFVAGALSVIRYAKIHGTKHRPWLTALLARRPTKVAAIALANKIARMVWAMMVKGERYKEPVALAR

SEQ ID NO: 347666 - protein, 365 aa, unidentified
MLYLAIDQHKRQLTVDLRSEDGSVILKRQVSTEWERVRAFFADLAEKARPEGGFLAILEVCGMNPWLLAMLKEYGCRETVVIQPTERSRQKTDRRDAGDLSHLLWVHRQQFLEGKHPQGLRRVQPPTAQEADDRQLTALRARLTKKRTAVLNGIHKILRKHNLEQHCPTKKFQTQKVRRWLTEIELPALDRLELNLLLPQWELLDAQLEVVEAKIAERAAGDAQVKLLESVPGLGHYSAVAIASRIGNIDRFRRPDSLANYFGLTPGCRNSGEATQRLGSITKQGSKMVRYLLNQAVIKVLRFDGAMRAWFKRIKKRRGSKIARVAVMRRLATILWHMLKWKQKYRYESPIKKHQEFEAFEGAAA

SEQ ID NO: 347667 - protein, 350 aa, unidentified
MELATMNTEYVCSIDLHSKSMYICVMDQKGSIKLHRNIRNDFDFFKSLIEDFNGNISVGCESIHNYYWLADGCIDNNIPFYLGHAYYMKAIHGGKKKDDKLDSKKIADLMRANHLPIGYVYPKDFRATRDLLRRRIRFMTLRAEAYAHIQTTFRQNCIIISPKDVKDKKNRRELITKLNDKHIQKNIEMDLDVIDNFDRLLIPIEAEIRAQAKLHDRTTLNLLLTVPGIGDMMSLVILYEIGHIQRFPSAQKFSSYSRLVICNRESGGKKSKGGFQKIGNPYLKWAIGEIIIHAPSTSPMIKNFYERLINKAGKKNAQRIITHKFGTAIYYMLKNKQGFDEQRFIQSDMK

SEQ ID NO: 347668 - protein, 390 aa, unidentified
MYIVGIDIGKNNHEATIINETGVIIGKSIKFTNSHSGANKLIEQINKNIGNENVVFGLEATGHYWLSLYSFLLEKSYLINVINPIQSDSFRNLYIRQTKNDTKDSFIIAEVIRFGRFTTTQLADEKILSLRQLCRFRLSLVDSVSELKCRIITVLDQVFPEYEKLFSDTWAISSKKLLEKYQTPEEILELDTSKLAEFLKEHSRGQLGLAKAEKIQEAAQNTFGIKFAQDAFKFQLKQLIKQVLFIEDQIKDLDSEIEIYYNQFDCHLESIPGIGKVTAAIILSEIGDVTRFKSAKALVAYAGIDPTVKQSGQFLANNNKMSKRGSPYLRRALFLCASTCTLHESPLNNYYTKKRSEGKHHLTAVRAVAHKLTHIIFAILRDNKDYEPVS

SEQ ID NO: 347669 - protein, 450 aa, unidentified
MGNASGVSRGDRNRNARLARLRSLVPVTNAIVGIDLADAKQMVVVTDHDWKVLARKTFRCRAWDLGAALGWAAERAAAKGFSGVTVACEPTGHRWRVLGQLAADRSMPFVCVQPMLSSWARRSEDLTSDKTDEKDAVLIARLTAQLRCYVPEPVDETWGRLRHLGARREQVIVEMVSQIQQMRALLECVWPAALDTAKQPFRSKTWVAAMSAICERDGGDLDRTRRLGPARFEQAVRREILKRGGQKPSLRIARRLFAALTDPTGVIAHRPGALERVAFLLVDWHTAGDKLTDTEARMISVLGELKLTALATSIPGLSPVGAAAILAETGDPNRFASGRALVKHAGLAPREKLSGTFVGRTKLTGAGRPGLRLAAWRAVWGTQRGNTVYAARYRHLTSREQNKLTATQAQTVIAAAILRQLHAVITTGQAWDPDIATHGTGHRKQMPIAA

SEQ ID NO: 347670 - protein, 474 aa, unidentified
MKEHKKTKAKTKSQANKSIREHQPNAAGIDLGAEEIWVAVPAERDQNPVRRFEAFTQDLKAIAKWLVDCGVQSVAMEATNVYWIPLYQLLEEAGLKVCLVNARHVKNVPGRKSDLSDCQWLQYLHSEGLLLGSFRPAQVICATRCIYRYRQNLLSLAGQHLQHMQAALDQMNIKLHHVIDDLSGLTGQSIIEAILKGQRDPAQLAKLRDKRIQASEEKIVKSLEGDWRKEHLFVLAKAWAQHQEVQKQIQDCDRELLEYTQQLEACTTLSKPLKVMHLKAELLGAQPLSTPVPKKKARKKTSKNQPLGPWQQELERFFGVDLTLIPGISVLTGLTLMTELGNDLSAFKTQHHFASWLCLCPANETSASKILRRHTRRSQNRVRQALRMAASSLHHDKSFLGDKYRRLRARLGPPKAITAMAHQLARLIWTLITHRVAFDLSFFAHQQKLNDQRRLKRLAASARQMGYQLTPFAA

SEQ ID NO: 347671 - protein, 341 aa, unidentified
MDIAVLGIDLGKNSCSMVGLDGSGKVILRRRMQRKTIVAVAAKLSPCIIAMEACCGAHHLGRVLAAQGHTIRLMSPEYVRPYVKAQKNDDRDAEAIAEAATRPTMRFVALKSEEQLDMQILHRVRDRAVGERTSLMNQLRAVLLERGVIVPQGRAKLRLRVTELLQQGAGELSSRIQLLIEDMLTRWLTLDERIAAFDAEFAAEAKRDEAARRLTSIPGIGALNATALVAAVGDAETFARGRNLAAWLGLVPRQATTGGKPRLLGITKRGSKYLRKMLIQGARVALPTLSRSNTRLGQWLRGLLARAHSNTVVVALAAKMARIVWALLRYGTTFEPRAIAI

SEQ ID NO: 347672 - protein, 339 aa, unidentified
MKLYAGIDLHSSNSYLAIIDETGKRIFHRKLPNDAATIIETLSLYEGSIAGIVVESTYNWYWLVDALMTEGYKLHLANPSAIKKYEGLKHANDKHDAFWLAEMLRLGILPEGYIYPKEQRPIRDLLRKRSHLVNLRTSLIISLKNIISRNCGLTLKANDVRRMREDKVSPLLAYNEDLALAGQVSKDSIDFLTKEIWQIETFIGNKIKLHEPYSNLVTLPGVGKILSFTIMLETGPIDRFHDVGNYASYCRKVSSKWTSNGKSKGSGNKKNGNKYLAWAFSEAAELARRFDPDARAYYNRKLQKTNFMIAHSALAHKLARAAYYIMRDNVPFMPEKLFT

SEQ ID NO: 347673 - protein, 330 aa, unidentified
MKNYQEAVGIDVSKKTIDVKCHIAGEHKVFNNDYKGYLGMFRWVEKVTGGSRVFYCFENTGNYSLKLATHLSQNAVPYVEESPITIKRSSGLVREKSDKIDSAMIARYAWLHREELEPSKLRGAVFQEMGRLIGLRDQLVRNRAGLMGTLKETKQLLNSPSTDVGCVVLKRSIDYLSKQIKATEARLYELITKEESLNKSFKLLLSMKGIGFVLACQLIYHTHNFNRFKSWRQFSSYCGLAPFEYSSGTSIHRRKKCHYLGDRKMKSLLSMASISAIQHDQELRMYYKSKVAEGKPKMVALNNVRNKLLARAFAVVKRGTPYVLLNQYAA

SEQ ID NO: 347674 - protein, 412 aa, unidentified
MTGNMEVVYERACGIDVHKNEIAVCLITGQRKTDTRKFGTLTKDLREMVEWLKSENVQMVAMESTGSYWKPLYNIFELEDIEAIIVNPQHMKAIPGRKTDINDAQWIAKLLRHGLLRASFIPDKEQREYRELTRYRNSRIEERAREINRLQKFLEGANIKLASKISDITSLTAIRMIRLIIGDEEMTIDHITEARSNRCNSSAEEFLDAMTGIVSDLQRRLLNEVLQVIEEQTKQIERIEAMVKTYTNKEYDIAAKALEVIPGIGRISAEQIIAEIGVDMTRFPTAHHLCSWVGLSPGDNESAGKRKSGRTRKGNKTLKKTLVQCATTAVKNKDTFFHAQYQRLVVRKGGKKAVVAVAHSILIAIYHVLLGCEYRDLGADYYTQFNKDKKIQSHLKQLKKLGWEQPCPVIAS

SEQ ID NO: 347675 - protein, 310 aa, unidentified
MTIICGVDVSKAWLDAWIEPAGHRRFANTAEGVAELGAWCREHDAELLVMEASGGIEQPAFLALWQDGQPCAIANARSVRKFAEAMGYLEKTDRIDAMMIARFAATKRMVATPPPSAEQQRLTALATRLRQVTSDLGVQKQRLHSARDPLARQSIKEAIAFFTAQADLLAGEIASLIEVDPLWTALDREFRSVKGVADRTVGYTLADLPEIGTLSNRAITKLVGLAPLPDDSGKRQGQRSIRGGRAGIRSILFLVADGARKYDPSLAGFRERLLAKGLSKMQVRVALARKLLVRLNAKARDVRAELAHAL

SEQ ID NO: 347676 - protein, 345 aa, unidentified
MRKVVKQVAGIDVAQKELVVTLGRMLDDFSIELFSYKVFKNNDSGVKLLVDWVNKLTGYEVPVRYVMEATGVYHQKFAYYLVDNGCEISIVLPNKISNYIRTLELKTITDKSCSQAIAQFGLERKLDKWAKPKSIYKELQQLTRERDQIVQERSVIKNQIHAEKTESEPNQKSLERMQARIRFLNSQEKEIKADITDIVSKDSDLKQVINNITTIPGVGELTAVIVLAETNGFELIRNKSQLSSYAGLDVKEKQSGTSVKGKPRISKKGNRNLRKSMHLPSLTAVKWDENFKNIYARLISKNGIKMKALVAVQRKILELIYILFKNETVYDKEYITKNSAQTQMV

SEQ ID NO: 347677 - protein, 414 aa, unidentified
MEVIHPRCCGIDVHKESVVACLRLQDGRRVKTEVQRFGTTTAELLRLSEWLAQAACTHVAMESTSVYWKPVFNLLEGSFEVVLANAWHIKAVPGRKTDVKDCEWIADLLAHGLIRASFIPPAPIRDLRDLTRHRKSLVRDRVKATNRVHKLLETANIKLANVVSDVLGVSGRAMLDALAAGETDPEHLAKLARGSLIPKVKPLAEALCGRFTSHHAFLLGQMLTQLDQLAALIARCDVRILEVAKPFEPEIQRLQTIVGVGRRAAEVLVSEIGVDMSQFSTAGHLASWARICPGNYESAGKRRSVGTGTGNNWLRTVLLECAWAAAHSRKSYLGAQFRRISKRRGPKRAGIAVAHSILVIAYHMLRNGVDFHDLGADYFDRMNTAKLKRYHLRRLAELGCDVSPLAAFTEGSRG

SEQ ID NO: 347678 - protein, 460 aa, unidentified
MRSLYRRCAGLDIHKKTVSVCIRMRARGSPKFDIEEAVFGTFTQELEQLGRWLKQRKVRQVAMESTGVYWRPIWNILEQPKYGLHLTLVNPATVRALQGCKTDRIDARRIAEYLQYGLLRGSFIPPKPVRHLPELTRMRVHLQQDRNRVINRIGRLLETANIKLGSVATNIVGKSGRAMLALLADGVVRPERLANQALSSLRTKIPELILALDGRTDEHFQWMLARLLRKLEGLDAEVSDLDARLEAEMAEHTELIHRLCTIPGIERITAQVLIAELGTDMTQFPSSAHAASWAGLCPGNAESAGKRFSGKTRKGDRYLRRILVQSAWAAARTRDCFFAALFYRIAQRRGIKKAAVAVAHRLLKVVYLLIAEGGAYRERGGDYFDRRNPARTARKLAGRLEKIGFHVALTRRPIDPVPAAQAVPAEVCSKCNRWRLARCIHDSPRPKRTRKPRQSTESAT

SEQ ID NO: 347679 - protein, 412 aa, unidentified
MLKIVYPICCGLDVHKDFVYACIATSVNGVTTYKSHRFSTFTKGIRELLSWLLEHNCKDVCMESTGKYWIPVYNILETDCKIVLAHPKYVKAIRGKKTDKKDAKWIADIFKHDLVSGSFIPPADIRQLRDLVRYHTKLTNFTTGEKNRAQNCLTVSNLKLDSVFSDVFGKASSNIIGHILANPSEKLSDVSAFRTKHMKATDDAILEAIDGEFCPEQAEKLRIIREHMSNLDLCKLNLQSLILTTAEKYISEIELVCTVPGISTFSAISVIGEIGVDMSVFPTSKQLCSWAGLTPQNDQSAGKKKTTRISRAGAYIKPLLVQCALAAIKAKNKHPEIFNRYSALKKRRGHKKAIIAIARMLLTAIYNILKKREPYNPELYRKSDVPPEHRNVSVDEAIFILQRQGYLVSSPT

SEQ ID NO: 347680 - protein, 418 aa, unidentified
MWFAGIDWADEHHAGAIVDEAGHQHGTLRVAPSAAGVEALVTFLRGYSQRTAHADALPAPAPDPEQVAGISETTHGLLITALLEAGFPVYPVYPVNPKTLAHWRQPAGAKTDRLDASLLARKGRSDLGEVRRLEPDSPRVQELQLLTRDQDALVQTQTRLVNHLTAGLTAYFPSALPLFGKRHQGATLAFLQRYPTREQAEAAAVEEVTAFLRAQPRFPSPAAAAPRIPGCVHQSHRRADPVTTRVKARLTQALVAQLVPVVEQIAASDAEIERRLRRHPDAALFVRRPAAGKRLAPRLLVGWGDDRGRYTSAQRMQGLAGTAPVAFQRGKYSQAQKRYACIKPLRNARYQFAWQSTREAWALAYYQRKRQEGKSQSVALRALANQWVRLIHAIWHTQRPYDEAVFRAAQQAHALPAA

SEQ ID NO: 347681 - protein, 430 aa, unidentified
MEEVDEQELHVERVAALDLGKAALEACVRVPHESKPGRRLQEVRGYATTTGALLELADWLHSWGVTRVVMESTSDYWKGVYWLLEAEGFECWLVNARDVKNVPGRPKTDRQDAIWLAKVAERGMCRPSLVHPRPIRQLRDLTRYRRSLIHDRTREMQRVEKLLEDAQIKLSSVVSDSFGVSGRAMLEALVAGQRDPKVLAQMAKARMRAKLAELEEALRGFFTDHHAAILRMMLDNIDRHSAQIAALDTKIEQAIAPFARQVAQLDEITGVGATAAQELIAEVGVDMGRFPSHAHLVSWAKFCPQVHESAGKAKPKGRGKGNPWLAGTLGNVVATAARTDSFLGARYRRIAKRRGKQKAMVATGNSVLVIVYHLLGDPDARFGDLGAEHYDARINKQRRARNLAAQLQAITGQRIMIRNGKAVIVEPEAA

SEQ ID NO: 347682 - protein, 320 aa, unidentified
MMAQSDLHVVGIDVAKDKVDACVRSPAQRQTFSSSAEGRRELIAWLRRHKVNKAVMEASGGYERDWAKALRIAGIEVRIVDPKRVRNFARSAGRLAKNDAIDAEMIAWFAETFGDAPNQVHDAERERLAQIVNARQGLLDMRTELQNRNEHSVPEVVQKMHARLLKNIAVEVAKLEAAIAAMIKATRHFAELAAIIESVPGLGEGTSAGLIATMPELGHVSNKVAAALLGVAPYDDDSGKRRGERQIKGGRRKVRNLFYMACLGAATRHNPALNAFYRRLIAKGKEKKIALVACMRKLIVILNTMIARRQRWDASLHLAR

SEQ ID NO: 347683 - protein, 436 aa, unidentified
MEEVTDEPLYRDRVCGIDIGKAGMTATIRVPSDENPARRASETREFATTKRGVLALADWLRAWQVPAVVMEATSEYWKPVFYRLEAEGFECVLADARQVKNLPGRPERDPSDSRWLAACFERGAVRSCFVPDPEFRIIRLHTRYRRDLTDERTREKNRTDKLLESAAIKLSSVVTDLHGVTGRDIMEHLIAGERNPKVLAQLARARARRKITELEHALDGAEFFTPEHAALLTTMLERIDRLTGDITRLSGVIEQLLAPYEEQLQQAESMPGWGRRSAEDAVAETGVDMSKFPTGGHLSSWAGRTPLDSQSGKRTGRARHKKGNKYLAAVTGETAVAAGKTATRDGARYRKLARSRGKGKAQVALGNTQLKVYHKLLSSPGMRYQDLGPDYYERQAAIRRKIAYHVREIEALGLDVTLTRPAPEPGPDEPANTPAA

SEQ ID NO: 347684 - protein, 454 aa, unidentified
MSNATGLTRGDRRRNERRARLRTLVPASGAVVGIDLGEDRQMLVVCDHDSQVLARKVISAKAAGLGPALDWAVQRAEAAGFTSVTVACEPTGSRWMHLQDLTAERELTYVCVQPLATHRAREEEDYTRDKSDYKDAVLIARLTAELRCYVPESCEGDWAMLRHLGRRRAELIDRSSVATLQLRDLLALAWPAVLAAAVRPTESKTWLAALAVVVERCDGEPARLRRLGLARFTDAVRRELPFWDGSKVCHRIAQAVFVCLADTDGAVTRQRRGALQRAGWALTDLRTASLHRRTVEADMVAVLDALGLTVSLTGIPGLSAAAAAQILAEAGDPTRYASARSLVKHAGLNPAENTSATFRGRARTSKRGRPGLRLAAWRAAWAVIQHNPVLAARYAHLTGREHNRLTRGQAQVACAAALLRWIHAVATTGRPWDPRIAAGELNHTTAVTTGPVAA

SEQ ID NO: 347685 - protein, 323 aa, unidentified
MMAQDDLVVVGIDVAKDKVDACIRAFALRQVFPSAAQGHRKLIAWLRKHKVTKAVMEASGGYERDWAKVLRQAGIEVRIVDPKRVRSFALSAGRLAKNDAIDAEMIAWFAETFSEAPSQRHDAAHEELLALVKARKALLDLKTRLQSQNEHAAPGPVQKAHARVVKSLATEIAKLEAAISAKIKATPDFAERTEIIESVPGFAETTSANLIAGMPELGQVSNKIAAALLGAAPYDDDSGHRRGERHIKGGRRWVRNAIYMPCLGAATQNNPVLKAFYHRLIAKGKPPKVALVACMRKLIIILNSLIARRQKWDPSRYPHSERA

SEQ ID NO: 347686 - protein, 344 aa, unidentified
MAIVGGLDIHRRPITHDYLDTGSGETRRGQLSPATRLELRAWLARFAGQQANFALEATTGWRFVAEELERAGSAAHLAEPADTRALRGPKRRAKTDRTDARHLRELLRAGTLPESWMPPAHIADARTQVRLRRALVGERTGWYQRIHAILFHHGLPERSQLLTADGRAWLARAELPAVARQAVELALRLIDHLEVELDLLDGELARIARAQPGCQALMGRYGIGWLTAVAIWAEFGDVRRFANSRQAVRFCGLDITITESDGKRARGHLARQGSPVLRWALHEAAMCAARPSSPDHPYYLQVKQRLGGKRAALSVARKLAREAYHTLRQLGDQALVPAKLPTAA

SEQ ID NO: 347687 - protein, 323 aa, unidentified
MDKSTKFLGIDISKDVFDVMDPKDRHFQYVNMQKGFRKFSKILDTHSVCVMEATGYYHLQLAYYLIDKGFKVAVVNPLSVKRFIQMKLSKIKTDKSDSRMIRLYGESNEMRLWNGGSKNRKESLQILSLLAIYTKQTTALKNKIHGEKTLGTPSTVVIKSLIRSLKQLQKEQSILEERLTELVREENRELLTNLESIPGLGRKTAIMLIVIADGFQRFDSASALCSYCGLTPVIRKSGTSVNGRPRISKMGNQKLRNLLFLCSFTAYKYNKACSDIYQRITNKGKSKKLALIAVSNKLLKQAFAIAKSGIPYDATYRSVLPVH

SEQ ID NO: 347688 - protein, 479 aa, unidentified
MNGKAKRTKKQVNVENTVINIFKQEELVKKANEIMNDLKSSTWRDLETRGKFTKNDKLTFISDDMLILGCDIGSETHYVRAIDSRGRELSRNVFSFSNTGEGFQNAKSWAIELAAKNDKKQIVLGLEPTGHYWFCLSTWMIANGISVVQVNPYAVKQTKELEDNSQLKDDRKDPKLIANLVKDGNYGMPYLPEGLYADLRRLSMFRDQLTEDRIRNINRLHREMKIYFPEYMDAFGKLEGAFTLEVLKKAPFPKDILALGTEGIRDIWHEVKLRGRGYSRASGIVRYAGESVGLTDGTDVGKITVKWFAEKIAELDKQLAGIEIILHQKCKEIPYVENILEISGIGENILAGIIAEIGDISRFDDVKEIQKLSGMGLVACSSGKHKGATKISHRGRKRLRYWLFQGAKSAVSHADEFKQIHAYYTTRADNPLKKMQSLIAIACKLLRIIYAILKTGTRYDPKKMLKDIKLPATGQVQAA

SEQ ID NO: 347689 - protein, 371 aa, unidentified
MSELPAETRLARLKVEASPRPPGARKPETELGAVSTTAVPHPDSRSGPSPHLQGRVMDEQRTVFVGIDVSKDRLDVHLRPSGEAFCVPREGKGMDDLVIRLQGLSVALVVLEATGGFEATVAAALAGVGLPLCVVNPRQIRDFARAMGRLAKTDTLDAEVIALFAERVRPQARPLREPERVHLAELVGRRRQIIEMIGMETNRGRQAIDKPLARRLARHVAYLQKELDAIDHDIGDAIKHSPAWREAEALLKSVPCIGDVTARTLLAELPELGTVSRHQVAALVGVAPINRDSGLMRGRRAIAGGRTSVRAVLYMAALTAIRRRSPFRAFYDQLTAHGRPKKVALVAVMRKLLTILNAILRDHTPWRPLNA

SEQ ID NO: 347690 - protein, 483 aa, unidentified
MKNQPPQSSKKGSRQPTSQKPWSEMNRKQRREMQRKIQSQDLNLEVLHPDAAGIDIGNQVHYVAVPANRSSEAVRRFGCTTAELRAMADWLKQCGIQTVAMQSTGVYWIAVFDILEEAGLEVYLVNARETKNLPGRKSDVQESQWLMKLHTYGLLRNSFRPPQEIRTLRTYWRQRNDLVRAAGRHIQRMQKALTQMNIQLANVLSDISGKSGQAIIKAILQGERDPGELAALCNGRVQASQEEVAGSLEGNWQDDLLFLLQQEQDGYEFCQKQMAECDRHLEQCLQHRADRSQGASLPVEKRKERRKKKKGNKPQFDLRTALFRMAGTDLTLMDSVDVMTAMTILSEVGWDMSKWKTEDHFVSWLRLCPDNRISGDKIIGKGRLPTNNRVTIALKMAASTLRTSQTYLGAQFRRLRTKLGSPVAIKAMAAKLARLVYRMLRFGMQYVDQGAEFYEAQHRKLQISHLKRKASQLGFQIIEASAA

SEQ ID NO: 347691 - protein, 426 aa, unidentified
MDIVHPRVAGIDVHKKIIWVAVRLPGEEPGQRAVTVRRFATFWRPLQQMAAWLASLGVTDVAMESTGVYWWPVYHALAGAGIEVCVCNAAHMRNVPGRKTDLRDCQWIAELHEHGLLRPSFIPAAEVAALRQRTRYRKKLIESRSSELQRLAKMLEDGGVKIDSVASSLTTLSARDMIEALIAGERDPAVLAGLARGVMRKKIPELQMACDGRFTASHAQMCRLHLDAYDHLTAKIAGLDALVAEAAAPFAALIARLITIPGIGPRTAQVIVAETGGDMRRFATAARLAAWAGLAPGDNESAGKRKHAAARKGNQHLRAALTESAWTVGRTATRPGARFRRLTRRFGRGNEKKAATAVAHTLLCIAWAVMKYDADYAEAGADYYDRRDQRNHEHLVRHHQQALARLGYQVTLTPPGDGSPPPAQAA

SEQ ID NO: 347692 - protein, 416 aa, unidentified
MKIVRPICCGMDVHKNIIVATIGITNKKTRITEYIQETFSTLNPDLLNLKQWLINHKCFDACMESTGKYWIPIFNILEDEINIYLTHPKYVKAIKGKKTDKKDSKWICDLFKHDLIKFSFIPPKEIRALREISRYRYKLVGMRSSERNRYQNCMTVSNIGIGSVFSDSFGKSAQAIMKEVLESDIIEDEKILKCIHGSCKNKDKILDSIKHCNIETDQRFKMNESMTHMEELQVHINNCEIEIMKRAAPMFDRFMHITQLPGISTLSAILIISEIGVDMKQFESDKQLACWAGLAPANNESANKKKSVRISKAGQYLKPLLVQCALGAIKDKEGYFGIKYSRIKKRRGHKKAIIAIARMMLVSIYHMILTGETFNPSDYESFKNPKPPIKQQVLTEESAIEFLKKSGFDVSKLTKP

SEQ ID NO: 347693 - protein, 411 aa, unidentified
MDVVYERAAGLDISKRDAKVCLRLPAGWRNQFTKTVTTYGSTVSAIECLRQDLESAEVEIVVMEATGDYWKPFFFTLAETLNVELVNARQVKNMPGRRTDVLDAQWLAELAAHNMLRSSFVPPERIRELRDLTRTRRHLGQEQHREWARLEKNLEDSGIKISSVLSTLGSQTGRRILDALVAGEREPETLAALAHASLAKKTTALIESLRGRFRDHHAFMVRLHLRRIDAITTNIAAITEQIERVIEPFRGTRELLMTIPGIKENAADTIIAEIGADMSVFPTAGHLASWAGVAPGLHQSAGRIKSAHINPGDAYLKAALGTVVFIIIRSKNGRLYAKYRRVSYRTGGLKAVVAIEHTLLTIICNMLRNGVLYDELGADYYRPRHPERTRDNALRTLATLGYDITLTPRTA

SEQ ID NO: 347694 - protein, 422 aa, unidentified
MKNTAARKVRQVPERYLIVGIDPHKKKHAAVAITQDLDVRDKFKFDNTMEGFEFLLRRVRDQMTKANCRGVMFAIETGGHYWRNIAYHLDAKGIPFRFINQFTLKRRREGKDLNHRKNDYRDSEVAAQLLCTGEFVESGLPQGVYADLRTTHNAYRRLVKERTRITNLVKGLLDGVFPEFVHVFKDPCAVTALCILSCCLTPGEIAGMAPDKFSAIVEANYQGHRLMRTKLALLHKVARTSIGIAAGARSVATEITFLVEKLELIKKHIRSIDTTLVGLVDQTEEGKYLLSITGLNYIAVAGLIAELGCFKAYRSAKQMIKMAGSNPTESESAGKKSSRTPMSKQGRPVLRYCAWNSVIPMLRFNTDFRAWAKQRRERPAHANPLSGREIVGAALNKLLRLAFSMVKHQTFYWAPQLEPITS

SEQ ID NO: 347695 - protein, 423 aa, unidentified
MHSNLTKIGTPGSKEGERAMEEMYARCCGIDVHKKKFTACYREGGKNEIREYETTSEGIRGFVGWLKERGAQISAMESTGVYWKSLYNIMEENGLEVIVVNAGHMKAVPGRKTDKNDAEWIAELLACGLLKASYIPDREQREMREITRYRKSLSEERARELNRLQKVLEGANIKLSCVVSDINGQSARRIIGALVGEKGNPKREEVVDLLDERMKPKADEIMKAIDGYVTPMQKQLIRAITAHIDDMSKRIKELDKLIDDEMNKHRNNTRRLDEIPGIGKRTAETILSEIGSDMQRFPTEAHLSSWSGLSPGNNESAGKRHSGKTNKGNRTLKTALIQAARAAVHGDNYFRAQYERLLVKRGKNRAVVAVAHSMLIVIYHMLKDGTRYQELGSDYYAKRDPRKEIARLQKKMDYLNTLIQTPV

SEQ ID NO: 347696 - protein, 368 aa, unidentified
MKNSITFVGLDAHKKMLAVAMLVPGKEEPLTWQVANEAGAVRRMAKKILREAEGPVRVCYEAGPCGYALQRILKSLALECVVIAPSLIPRKPGDRIKTDKRDARKLASLFRAGLLTEVHPPTLGEEAIRDLSRCREDAKEDLLRARHRLGKMLLRRGMIWESSNWTQAHRAWLRKVQFDHPADRLVFQDYLLAIEHLEERIKNLDEALEAVMQEDRDKKPVGALRCFQGIDTVSAVTLVAELHDFSRFRSARELMGYLGLVPSEDSSSDRRRLGSITKAGNSHVRRILVEIAWHYRHAPRLYKALRERRKGQAPEVIAVADKAAQRLHRKFEKLQTRGKPVTKAVVAVARELAGFIWAALYPMSVRAA

SEQ ID NO: 347697 - protein, 339 aa, unidentified
MNEHSVIGLDIAKSVFQVHSVDTTTGQIVRTKLRRKQVLAFFAKQPPQRVALEACGSAHWWARQLASLGHRVTLLPPRLVRPFVLRNKTDAADAQAIWTAAQQPGIKVVAVKSPLQQSILALHRIRAQLLKMRIMQSNAVRGLLYEFGIILPQSDRAMSQQLPAQWAALERQVPAFLLESLREQWQRVCEFNHQLAAIDRRLEHIRQQDPHCEAVSAIPGVGVLTATAAVAAMGDPRTFRSGREFAAWLGLVPRQSGTGGRVRQLGISKRGDAYLRTLLMHAARSIIIRRPNSTWLIELLKRRPFNVAVAALANKLARTIWAVLAHGRPYEPLLHGEFT

SEQ ID NO: 347698 - protein, 416 aa, unidentified
MSLQRSKVCGIDVHKTFFVAAVLSDTGEFWIDRFSHDRPGLLALKDWILDHRCEVVAVESTGVYWYSIYSTLEDSVPVIVANPYLIKNIPGRKTDVIDAQWIAELTLNNLIKPSRIFPKDDRELRNLTRARENLVQNRTRLKNRIHRSLESASIKLSSVLSDIFGKSGQYILEHLLQGTPIDEIIQGIPSQKIRDKEEALRNAIQYHLSDDQILIIEQSLEEIGMINRQIQELDDAIQVRLEDRNEDLQIAMSMPGIGWTSGVTILAEIGDYRDFDSPDKLAAWAGLVPTVYQSADKLRTGRITKQGSKHLRWILVEAAQAAAKKRGSVLRRFFLRIKKRKGYNVAIVALARKILCILWHILVKKEYYTEENIPSKKVRIPHRIGITQKSLEQSIELLVQAGYLVWKQNIIDPGGR

SEQ ID NO: 347699 - protein, 342 aa, unidentified
MKKASIIGLDLAKRSFEAHGALADGSVAFRKKLTREKVLGFLAEQPSCVVAMEACGSAHHWGRAIRDAGHEVRLIPPAYVKPFVKRQKNDAADAEAIAEAASRPTMRFVAVKTAEQQARAMLFRTRDLLVRQRTQLINALRGQLSEHGVVAPQGPANVAILAQAIDDITPSLPLLVVELARVYLDQIEGLSEKVAGLEKAIACEAKRGAMTRRLQTMPGVGPITAMAIETFAPPIEVFRRGRDFAAWLGLVPVQHSTGGKQVFGKTSKMGQRDIRRLLITGAMVIVRWACRKGAQEGTWLHRMLGRKPRMLVAIALANKMARSIWAMLTKGEDYRGPVATTL

SEQ ID NO: 347700 - protein, 322 aa, unidentified
MAQDDLVVVGIDVAKDKVDACIRAFALRQVFPSAAQGHRKLIAWLRKHKVTKAVMEASGGYERDWAKVLRQAGIEVRIVDPKRVRSFALSAGRLAKNDAIDAEMIAWFAETFSEAPSQRHDAAHEELLALVKARKGLLDLKTRLQSQNEHAAPGPVQKAHARVVKSLATEIAKLEAAISAKIKATPDFAERTEIIESVPGFAETTSANLIAGMPELGQVSNKIAAALLGAAPYDDDSGHRRGERHIKGGRRWVRNAIYMPCLGAATQNNPVLKAFYHRLIAKGKPPKVALVACMRKLIIILNSLIARRQKWDPSRYPHSERA

SEQ ID NO: 347701 - protein, 339 aa, unidentified
MDTIRFLAIDLAKNVFQVHGVDAAGKLVLRRRVGRAQLTELVLRLAPCTIGMEACSSAHHWARQFLQQGHTVKLISPQFVKPFVKGNKTDGNDAEAICEALQRPSIRFVPIKSVEQQDVQSLHRARSRLVSNRTGLVSQMRGILAERGIVFAQSITRARREIPVIVADTSNALTPLAREMLADLMDQLRELDRRIAGFDRRIDLVFKASETCQRIAQIEGVGPKTATAIVAAVSDPKGFRNGRHFAAWLGLVPRQSSSGDRTHLLGISKRGDRHLRTLLIHGARAVLRTALTKHDKKHAWALALKARRGANRAIVAIANKMARVIWSMLATGQSYQKAG

SEQ ID NO: 347702 - protein, 401 aa, unidentified
MAALRDQAFIGLDIGKTHHWVCVLDGEGKPLLSRKIANDETEIVTFLTTASALAHQLVWAVDIIGAPSALILSLLTRARQPVRYASGRIVSAMSRAYPGEGKTDAKDAYVIAETARIRRDLPMIDQDTDLVRNLAVLTGYRADLIADRVRMINRLRDLMTSVFSSLEREFDYSSHKGALVLLTGYASPDRIRRVGQTRLTGWLRHRKVRDSAGIAARAVDAAKAQSTVLPGQDLAATIVAELAASILALDERLKSLDEQIEQTFKQHPQAQIIQSMPGFGPFLGAALLVGAGDLRAFPSAGHLAAAAGLVPVPNDSGRRTGNLHRPHRYSRPLRHVFYLSAQTSMMRAGPNRDYYLKKRAHGHTHSQAVISLARRRVDVLWSLLRDNRRWVTNPPEHAQAA

SEQ ID NO: 347703 - protein, 387 aa, unidentified
MPQPNDLSRSLVALDQNSTIIAVVEMSQSSWLVAGILPGIERQPRKKLEPSPERLLALLHRWRDEVVKAGRTITRIALAFEAGRDGFWLARWLEARGVEAHVIHASSLAVSREHRRAKTDRLDTELLKRGFLGWLRGERGHCSMARVPTLAEEDAKRPNRERDCLVGERTRIVNRIKSTLVRLGIRNFKPTLRKAAERLATVHTPEGTPLPPNTLAELQRDMARLGFVVSQIREIEEARQKRLEQQHETGAHDMVRQLARIVGVGVETADLLVHELLSRPMRDRRAVARYAGLTGSPDESGARRREQGLARAGNARVRRSMIQLAWRFLMFQKESALALWYRARTADSRSGTRKTMIVALARKLIIALWRFVTTGEPLEGVVLRPAS

SEQ ID NO: 347704 - protein, 391 aa, unidentified
MTYVGIDVAKDKHDCYIANSNGEILADVFTIPNDQIGFNLLFQTLQSVAPDLSKVKVGLEATGHYSYNILGFLLGKGLTTFVINPLHTNLFRKSTSLRRTKTDKVDARTIAAMLASNVVLTSYTAISYHNEELKSLTRYRFDKVQERAKLKSSVARLVNILFPELEKLVPTLHMNSVYALLSEFPGAKQIASCHLTRLVHLLSESSKGRYKRDKAVQIREAARTSIGSVMPAKSLELKHTIQLIEILTEEIDEIETSIREIMDRNPSPILTIPGINYRMGAMILAEIGDFSRFDSPDKILAYAGLSPSTYQSGKLDNAYPHMEKRGSKYLRYALYNATKYVCMWDPSFAAYLSKKRAEGKHYNVAISHAAKKLVRVICAIQTSGKPYCLTT

SEQ ID NO: 347705 - protein, 362 aa, unidentified
MKKTIRERESEWKEKPDRTVGVDLGDRFSHYCVLNGDGEVLEEGRVRTSEEAFRRHWEAEPRQRIVMETGTHSPWISRLLRGFGHQVIVANARKVRAISENESKNDRQDAEMLARLGYCNPRLLKPIQHRSAERQRDLNLIRARDTLVRARTMLINTMRGLVKSAGGRLPPASSESFAARVSAAVPAELGTATQPLLRQIAGLTAEIRDLDQVIENLTERYPEIRILRTVPGVGPVIAAAYVLTLDGVDAVEHSRSVGAFLGLRPKQSQSGDSDPEHNISKTGNIYLRRLLVQAAQYILGRYGPDSALRRWGLKLAQGGKRTKKRAVVAVARKLAVLLHHLWRTGQNYRPFPEAAVAAGSAA

SEQ ID NO: 347706 - protein, 326 aa, unidentified
MRKKGYLVMGHIPNSFVGVDVSKATLDVVVKPSGEYFQVPNTPEGCHQLVERLRTLTVGCVVLEATGGYERPCTAALVDAGLPVAVINPRRARDMARGLGKRAKTDRIDAAVLAYCAEHCEVQKTVKTPEKQAQLEALVLRRRQLVAMCAIDQTRLGQTTDKQALKNVKQTVTFLQKHIDKLEKQIADLIDSDEYWGKLSELIRTVPGIGPTTAAVLLAEMPELGTLNRQEIAALAGVAPYHHDSGKRKGKRSIYGGRETLRTSLYMAVLTARTHNPRIRAFHEHLTALGKPFKVAMVACIRKLLAALNQMVKNRQKWNEHLLRTH

SEQ ID NO: 347707 - protein, 352 aa, unidentified
MQTITTIGLDIAKSVFQVHGVDAAGRVVIGRQLKRRHVLAFFQRLRPCLIGIEACASSHHWSRELQAVGHTVRLMPPVYVKPYVKRQKNDATDAEAICEAVARANMRFVPTKTPEQQSGLVLHRTRHLFVRQQTSVINVIRAHLAEFGIVAPVGRHGVEELLGIVADPSDKRVPEVARACLAALGAQLRVLKAQILEFDRMITAWHRSSETSRRLDDCPGVGPALATALVATVADPKAFRSGRNFSAWIGLVPKQHSSGGKDRLGSISKQGDRYLRSLFVAGALAVIRYAKIHGTKHRPWLTALLARRPTKVAAIALANKIARMAWAMMAKGERYKQPVALAGKRDRAGYSA

SEQ ID NO: 347708 - protein, 346 aa, unidentified
MGEYVGLDVSMEETSVCVLSAAGEIVWEGKVATEPGALVRVLHRRAPTAEKVGLETGPLSTWLWHALREADVPVVCLDARHAQAALSMRINKTDRNDAAGLAQLVRMGWYREVKVKRLAAHVDGALLASRALLVQQRCELENQIRGLLKNFGLRVRATKGRAFGQSVADLSAKRPVVHQVVMALLAAWSSLRVQIAVLSRQVEQQAMGDPVCRRLMTMSGVGKLTALAFRATIDDPSRFRRSASVGAYLGLTPRRYASGEIDRMGRISRCGDALMRSYLYEAANVMLTRARGSSPLKSWGMKLAKRAGFKKARVALARKMAVILHRMWRDGSDFGMPNAEASAERS

SEQ ID NO: 347709 - protein, 409 aa, unidentified
MNAVGIDVSKGKSTVTIRKPGDVVILAPQDYRHTQSSINELIRTIKGLEGETKVCMEHTGRYYEPVASWLTSAGIYVSAVNPALVKEFGNESIRTPKTDKADAKKMARFALDRWTKLRQYSRMDELRNQLKTMNRQFSFYMEQKTAMKNNLIALLDQTFPGANDFFNSPARSDGSQKWVDFVCTYWHVDCVRSKSLASFTEHYRSWCKRKKYNFSAGKAEEVYLAAADLIAVFPKDDNTKMLIRQAVAMLNTASETVETLRVKMDLAASLLPEYPVVMEMDGVGHTLGPQLIAEIGDVTRFLHRGALTAFAGVDPRPNESGDFKRKSNPTTKKGSPHLRKTLFQIMDSLIKRSPVNDPVYAFMDKKRAQGKPYYVYMTAGANKFLRIYYGRVKEYLASPEGPSAVDSKG

SEQ ID NO: 347710 - protein, 360 aa, unidentified
MSRMAKICGPVTGGVDTHADVHVAAVVDRVGRVLGTGSFPADQAGYAGLLAWLTAHGELARVGVEGTGSYGAGLARHLAAAGVTVLEVPRPDRGRRRRHGKSDPVDAVSAALAALRGEDCGTPKSGDGPAESIRALRVARAGALKARVQAGNQLRDLVTTAPSPLRAQLAGLSTPRRVRAAAALLPGDPADPAAGVTAAMASIAARWLGLDAEVTRLEAAIEDLVRQIAAPGFLARTGVAPLSVSALIAAAGDNPGRIATEAACAALCGVSTVDCSSGKQRRHRLNRGGDRQANAALWRIAVTRLRCDPRTQDYAARRTAAGKTRKEIIRELKRYIAREAYRDLIRPGFLTAADAPRQAA

SEQ ID NO: 347711 - protein, 343 aa, unidentified
MPIVGGLDIHRKQITFDYLDTATGEVRRGQIVPADREHLAAWLAGRFTGQDAHFAVEGCTGWRYVVEELAAAGVTAHVAEPADTAALRGRKRHAKTDKTDSRHLRQLLADGRLPECWIPPSHILECRALLETYHDLRVEHTAWTQRIHAALFHQGAPQLGGRLRTGEGLAALQAIAAQLSPTGQLQIAVALDKLAALDRHLDVLRRRLLEAARQLAGAKELHARLYGVGPVTALALVCWLGGEGRFSSARKAVRFAGLDITVWSSDRKGPPGRLSRQGPEVLRWCVYEAGKTHARGSAPDHGYYASVKDRIDGKRAALSEARKIIRQAVHILAELGDGALAPA

SEQ ID NO: 347712 - protein, 412 aa, unidentified
MDIVHERAAGLDISKRDAKVCLRLPGQRAGTYTSTVTTWGATTGQILALRDFLEGEHVTTVVMEATSDYWKPFFYLLEETLPVMLVNAKAARNIPGRKTDVSDAAWLAQLGAHGLLRASFVPPEPIRELRDLTRARAIAIRDRTREIQRLEKFLEGSGIKLSSVVSDLTGVSSRAMLEALVSGERDPEVLAGLAKGTLRSRIPELVEALTGRFKAHHAFMARLHLDQIDAQSRIIDALTGRIEEAMEPFRAAREFLATIPGVSLKVADVIIAETGADMSRFETPGRLASWTGVCPGANESAGRIKSAHILPGNKYLKGALGIAALSASRSKNTYLAAKYWRIAARRGPMKATVALEHSILTAVWHMLADGECYADPGADHFTRLDPIKAKNNAIKKLNNLGFNVTITPATAA

SEQ ID NO: 347713 - protein, 360 aa, unidentified
MKRIIAQDADIAMGIDAGKSHLTITVVANGEVVKQATIAYSRVAIESFLSRFSGCRIRAAYEAGCFGYWLADTLRELGVMVTVTPPSKLERAPGDKVKTERRDSRRLGEQLAAGRLKAVAIPTEAERATRQLVRTYGQLKRTRGQAMCRITSFLEFHHVLVPREVGRRWTKRFLHWLETLSFADRPEGKYLRLSLDQLLLAYRNLTVQVNELKKEVGRMAETPRYKRAATVLAANDGIGELSAMIILTETQNVGRFRISQRFTSNLGLTPSEHSTGDQQHRGHITKAGNRHIRGILIQCAWAWIRKDAAARARYRRLSRLRGPKRAIVAMARRLAVKIYWQLRAIHFGQRSLASETQRAA

SEQ ID NO: 347714 - protein, 375 aa, unidentified
MGKLARIGVDTSKSVFQLHGVDEGDCVVLKRRLRRGEFLAFMAKQEVTTIGIEACGASHHWARELRKLGHTMMLIPAQYVKAYVVRGKNDAADAEAICEAMSRPHLKRRLVPVKSADQSAAQMLMGTREHLIRRRTQLSNMIRGHASEFGVVSAKGLDKLEALLERIAEDDSLPALGKEMFATLGEELAELAVRLATIDARLKAWHRANELSQRLVKIPTIGPIGACLLAIKVADPKAFRSGRMCAAWLGLTPKDHSTGGKQKLGGITRAGDEILRATLVAGATAYLQQVRRGRTEPSPWLAELLKRKPPKLVAVALANKSARIAWKLMVSGQSYDHDRAVARKGLAASQCGGSASSPLLHRTTASKAKRALIAA

SEQ ID NO: 347715 - protein, 392 aa, unidentified
MNRIVYIGMDVHTSNYTLCSLDPGYGVEKDNYFAEVQFTNDFIKNVVNYVTNLKKKLKDCEFVCGYEAGCLGYSTYKDLTKVGIKCVLMAPSTMAVQKGGKKVKNDRRDARVIAQCLAYQTYKEVYVLSEHDEAVRGYLRMRDSHNKALKRIKQQIIAFCTGHGLFSPTKSNWTVAHLKWLKDLKFNDPVEQEILNEYLSSLTFLSDKIKAMDVRIEELASEKQYCENVKKLRCIKGIETNVALTLLAEIGDFNRFSKPTDFAAYLGLIPGEQSSGDKVRGTGITKAGNSTLRRKLTESAKGYWRGRIGIKSATFKKLEKELPKEVTEYALKANTRLQRKFFNMTHVKGKNMNVAASACAREMACFVWGLITNHYEKAPAVPKTDEELLDLN

SEQ ID NO: 347716 - protein, 432 aa, unidentified
MNPFSVFPEPSPVAAWVGLDWADQQHVICLYEVATGQSTLTRLEQKPEALQDWLSQLRQRFGGAPVAIVLEQARGAVIYALLSADFVRLYPVNPQSLASYRKAYAPSGAKGDSADAVLLMEMVRKSPERFRVWKPDDADTRSLQLLTQNRRQLVNQKTALTNQLTSLLKTYYPLALELAGALDSLQACDFLKQWPTLEALQQARAGQIRQLYREHGHPSPEQLDRRLEQIRQARPLTADPAALLSGAMMVEALVQQLRPLLGAIERFDRQIAVLFRKHPDRPLFDNLPGAGAVLAPRLVAAFGTDRDRFHSAQQAQELFGIAPVTEQSGKQRWVHWRWACPKFLRQTFHEFAGHSRHWCGWAKALYQQLRRRGKGHHAALRVLAFKWIRILFHCWKTRTGYDEQIYLKALQKRNPTLWAEIQLLPQPKKKVA

SEQ ID NO: 347717 - protein, 417 aa, unidentified
MKRAPIASDEKRFIGLDVHKHYVTVGGMNAQQEIVLRPRDVEMGRFREWAKQNLLPSDEVVLEATTSTWDIYDTVAPLVSRVVVANAAEVKQIANARVKTDNQDVLRLVRLLILNMVPEVWVPPAEVRQLRALIAYRWRLVKMGTMIQNRLHSLLQGHNIEAPEGKIHTEENLAWWQKITLSPLEDLRLKQELGMLEQVRANIKAVESELGRLSNTEPWASQAVYLMQIPGVGVVITMTILSAIGDIRRFEDPRHLVGYAGLGAGVDDSGHKHRGKGITKSGRKELRWAVIEAAWQAIRSNPQLRAEYDRLCKRKPVHQAIVAIARKLLVSVWYVLSEKEPYNRSSEEDLAYKMLTWAWHVDKTALAGMTPQQFAKYGLVRLGVGVQLTRIVRSGSPRRIAPVEEVLALRPELKYPQ

SEQ ID NO: 347718 - protein, 381 aa, unidentified
MQTVKTWVGIDVSAKTLAAERWRENEGKEKSREFDNDPAGHGELLKWIGKGARVCMEATGIYHLQLALMLVGAGVEVMVINPRVAKDFGGALANRSKTDRVDAWTLLEYLRRMEFVSWKVPSAAVLELRELGRRLSELVQAGADEKNRFHAKKVAAISRTVVNDVQAHVAQIEKRVKQIEQAAVVVIRGDAGLREQFAILTKVPGVGRRSAILLLTELAVLDPMMTVKQVVGHAGLDPREYESGSSVQKAPRISKVGNARLRAILYMNAITAIRHDRGARLFFAQLVARGKKKMQAIVAVMRKLLHGIWIVLQRRVGFESAILFAASLAKAESSDSAVAANQPEPRQDHPKGRSEAEELRQQLDPVSAQATSSRRKRSKAA

SEQ ID NO: 347719 - protein, 520 aa, unidentified
MVRTRSRCRPSRRQSPSSLGKPRGVLHPRVERVGPEHFGIVCFDCAKARSKFLLADFYGQLLLPPTVVTHDRQGLDGAVVQVRQAMATHDLRDCLVAIERTGRYHRIVQRAFAAAGFETRILHPFVTKQYRQPVDPGNKTDDTDLAAIHRATVTGCALLEVTRDEAWTTLQLLIRHRRDLVRKGAALNCQIRDHLEAAWPGFAACFDKLWESPVPWHLLRHYATAGSLLEAGVTTLCHSLRRAGIRFQQRTVQTVVDWAEQAAPGDIAAAQHLRIALALYDDRQRKTSEIQALEREIAGRLVQTPYVLLLSFPGINVVSAADFAGEMGPVEHYANAKSITGRAGLRPSRYQSDQVDKANGRLVRNGNRALRAAILGIADNLIVCNHHFQALATQWAAQGRDPRDSRVKVAMRFCRIAFQIVAGRQVFRHPCIQGRHYILDKLTAFHRAHDTGMDEVLRDLQAASDQLPPREYAAEAKPLYEELKRIQDGHRRGPQVLGDILPVVLARLGVGAVQSPESGE

SEQ ID NO: 347720 - protein, 340 aa, unidentified
MNEITTVGLDLAKNVFQVHGVDAEGATVLRKQLRRVQVLAFFSRLPRCLVGLEACATAHYWARELSALGHEVRLMPAQYVKAYVKRNKNDAADAEAICEAVVRPTMRFVPAKTAEQQAAVLLHRGRERLVRQRTMLVNALRAHLAEFGVIAPQGLRNVGRLIAIVRDEDDTCLPDLARQVLQVLALQIEQIEAAVATLEKQLMAWHKNNPVSQRLATIPGIGPIIATAIAAMVAEPSGFRSGREFAAWLGLVPRQNSTGGKTRLGGISKRGNQYLRRLLINGASANLLRSKATNADPWVIGLRRRRPSMVVAVALANKTARIAWAVMHRQEDYQRMAAAA

SEQ ID NO: 347721 - protein, 341 aa, unidentified
MKPNVSTVGIDLAKKIFHLVGTDTTGRIVWRKRLTRNALVPFMAQLPPVTIGMEACGGAHYWARQFHQQGHQVKLMAPQFVKPYVKSNKNDMRDAEAIAEAVTRPTMRFVPLKDVDQQDLQALHRVRERLIGERTALINEVHGLMNEYGIVIPKGVSKFRQAVVEKLESEQDKLTPLSQEMFWRLVKEFATWEEHIATDQEKLDTLAKTHPESQRLMTIPGIGPITATALIAAVGDVGVLKNGRQFAAWLGLVPKQRSTGGQTHLLGISKRGDSYLRKLLIHGARATLRWVGLQTNSRSRWIRGLLRRRGWNRTAVAVANKNARIVWALLSRGGAYSETAS

SEQ ID NO: 347722 - protein, 413 aa, unidentified
MSVLGVALDPATVVVAVDPGKVMNRIWLSDGTGLLEEPVSLPMSRTGIEHLEALLAAHPGAGPVIAIEATGSLHRALAAELERRHPGALRLFAPSETKAARAQLGSGRFKTDDRDCAALTYLARQGAGRRHQEEARIDGLLAAVRHRRCLVAERKTAQQRLHDQLNALCPGLSAPTGHGELGRSLAIESPTGQAVLACAVAFTGRAPTVRSLIARSPGRLTRATAEYWVARWRGRLPSPPDAEQRAVRLGRDLGRYRALLVDIAVQDHEIEVLLGGTDGQVLTSLPGVAAIRAAAFAAHSLPISRFPDAEHLYSATGLAPAMYQSATLRKRGRISRQGLAEHRDALMGIAWGLSTYSSSFAQRDAEYRARGMAPMQARVALARHACRLTYRLLKTQQPFDEERYRRGRLIPGR

SEQ ID NO: 347723 - protein, 349 aa, unidentified
MYYVGVDYHKRYSVATVVDSDGLMLARKRLDNQLEAFREFLQPYDKAELEAVVEATRSWGVAVDILEQVADKVVLANPGQVKLIAKARISTDKIDSLALAKLLRVGWVPEAYLRPRTNREHQLILRVRCFFVQLRTRVKNRIHDLIDRQSELVRETATGFSDLFGKKGMTWLKTLELSHPGGTLLGQLLAAYDALDAQVRQSDRLVAELFTADDDCKLLKKTPGIGVFFAVLIKTEVGSIERFSSSARFCSYAGVVPSTQSSGGKVWHGRIIKQSNRWLRWALVEAVIPATVADAGLRAHYEYYRRTKGSKVAKVVTARRLGCIVYRVLKERKPYYERPVQSRGYRQAG

SEQ ID NO: 347724 - protein, 462 aa, unidentified
MMNIQEQREMVEKANRILSEMRSFTWRDLETQGKFSKNEKLSFISDDMLIVGCDIGSETHYVRAIDTRGRELSKKALAFENDAEGFQKARDWAVQLAAANDKKQIVLGLEPTGHYWFCLAAWMISNGISVVQVNPYAVKQTKELEDNSQQKDDRKDPKLIANLVKDGNYGMPYLPEKVYAELRRLSMFREQLMEDRNRHMNRLHREMKIYFPEYKDAFGKIDGAFCIAVLKEAPFPEDILRLGAEGLRDIWHKAKLRGRGYSRAAEIVKYAETSIGLKDGTAAGREAVRWFAEKIMELDEELAEVENKLNEKCREIPHAENVLEIPGIGGKILSGILAEMGDISRFDDAKELQKLSGLGLVSCSSGKHKGETRISHRGRKRLRYWLFQAARSAVAHGEEYKWIHAHYTTRAGNALQKMQSLIVIACKLLRVIYTMLKTGKPYDPEKLLKDIRYPENVQTAAA

SEQ ID NO: 347725 - protein, 391 aa, unidentified
MISVGIDVAKDKHDCFIINSEGEVFADVFTIPNSLGGFQHLLQRIRDCSSHQGKIKVGLEATGHYSYNILGFLLNNGLATYVLNPLHTNLYRKSLSLRKTKTDRVDARTIAAMLLSDVGLKPYTDTAYYNEELKSLTRYRFDKVKERGRLKQSITRLVCILFPELEKLVPTLHIVSIYALLEEFPGAKQIAEANLTRLKTLLYNASKGRYGQDMAVKIREAARKSIGSVMPAKSLELRHTIHLIRELDAEIDEIETAIQKIMNELHSPITTIPGIGSRMGAMILAEVGDFSRFGSPDKLLAYAGLSPSTYQSGQLKNCYAHMEKRGSRYLRFAIFNAAKYVCHWDRGFAAYLAKKRAEGKHYNVAISHAAKKLVRLIYALEKSGEPYRLAA

SEQ ID NO: 347726 - protein, 345 aa, unidentified
MEIDILGIDLAKQVFQLHGADRRGRVLHRAKVSRGSLFESVRTLKPRLVVMEACSSAHHWARRFQSLGTEVRLISPQYVAPFVKTNKNDRNDAEAIVEAASRPTMRFVPVKSVEQQDIQAAHRMRAILLRHRTALINQMRGLLGERGFAISRSPEEFKRAVPELLRANADELTSFCRTLLTELLVHLRAIEERIHFIEISIHSFMKRSALCAKIAQIPGIGPITATAIVAAVGDARQFRNGRHLAAWLGLVPRQYSSGGRSRLYHISRRGDTYLRTLLIHGARAVLRFVKTKTDVRSVWLQQLIARRGYNCTAVALANHNARVIQALLSSDASYVARGITGRFQG

SEQ ID NO: 347727 - protein, 342 aa, unidentified
MVKITLMGQVEKHQVYVGLDYHQAFVQVCVMDASGQVQSNQRCPNTVQAVRRVVERQGVVVQAAIEACNGAADLAEELVQAGWQVSLAHTAYVHRLKQSPDKTDWSDARLLADLLRVGYLPKVWLAPRELRQLRHLVRHRQQLAQARRATKLRVTALLRSERVELTGARWTKAWIQAVRTCADLGEQGLWIVNELLDEIIHLQQQIDRTEARLEQLTQDDPFVKQLLGYHGIGLVTAVTLKAELGTMGRFRSGKQLSRFCALSPRNASSGTKQADAGVIQAGNRELRRVLIETAHRLMRCDPRWQTLGQSLKARGKPGNVAAVAVANRWMRWLYHQLLPLAA

SEQ ID NO: 347728 - protein, 403 aa, unidentified
MSAFFAGLDWASQSHAVCIIDDHGNVRERLDIAHSAAGLTQLQRCLVRYERPPIAIERPSGIVVDTLLDAGFTVIPIHPNAVKATRPRYRSHGAKSDASDAYLLADLLRTDGHRFTPLAAQGTDIRALRALVRGRDDLVAARTQLANQLRSLLESFWPGAAEVFADVDSPIALAFIERYPTPESAYRLGPRRMAAFCAQHAYSGRRSAHDLLARLHEAPVCVCGEMEMEAKGELARSLARVLAQLVDQIRLLSSRIEHHVASLDDGRIVMSFPRAGRICAAQILAELGSVRERFANDARLAAEAGICPVTYESGKSKAVTFRWACNHRLRAALTCLADNSRHASAWAADVYNNARARGCDHPHAVRILARAWVRVIWRAWMDRKPYDPTRHRAAQLLAKSARS

SEQ ID NO: 347729 - protein, 384 aa, unidentified
MVTIAVDPHKRLNVVEVVDGASTVLGRQQFDHSTAGFKELIRFARTWRRRQWAIEGATGVGKNLAQRLVAADEVVLDVPSRKSSLVRAFSASSGRKSDEVDAHAVALAALNSPDLERVHADDHATALRLLASRRKELVGLRTQAVNRVHRELQILSPGGAKRGLSATRAKAMLSSVRPRDEVGKLRKALVADQIADLVAIDKRLADIKKQINAAVTAAPTTLPELRGVGPVITAIVVGEVRDVARFVDEDHFASYNGTAPTTWGSAGDTRPCVNPGGNRVLNHAIHMAAVTQLRNPGPGRDYYQRKIASGKKPKAALRCLKRRVSDAIYRRLVADAEKELGGPGGHVGATRNTSATGSTPTAGSSVKPQPGPRRNATPAVAHAS

SEQ ID NO: 347730 - protein, 409 aa, unidentified
MGLLFVGDDWAEDHHDVYLMDEDGRRLAAGRLSEGLAGISRLHRLVADHATDPNLVVVGIETDRGLWVQALVAAGYRVFAVNPLAVARYRDRHHVGGAKSDTADAKLLADLVRTDRHNHRSVAADSDAAEGIKVLARAHQNLIWARTRHTNQLRHALREYYPAALEAFPDLADRDALAVLGRAPDPATAARLTRKQIVAVLRKAGRQRLLNHRADEIQDALRSDQLAAPPMVTKAFAATTTATVGIISALNTQIDQLAEELSAHFEQHPDTAIYRSLPGLGEILGARVLGEFGDDPERYATAKCRKNYAGTSPLTVASGKKRAVLARHVRNRRLYDAIDQWAFCSLNTSPGCRAFYDQRRQTGDLHHTALRALGNRLVGILHGCLRNHTCYDEDTAWGHRQSTSELTAA

SEQ ID NO: 347731 - protein, 343 aa, unidentified
MGEVSTIGLDIAKSVFQVHGVDSCGEVVVCKRVRRSKLLEFFAALPPCLIGIEACPSAHYWGRELQALGHKVRLIPPSYVKAYVKRNKNDANDAAAICEAVTRPSMRFVPTKSEQQQSGLMLHRSRQLLVRQRTMLSNAIRGHLAELGVVSAKGRNGMAELLGIIANEDSNCIPAIARLSLEVLARQYAAIAAEIGTIEKHIHAWHRSCEASRRLEEIPGVGPIIATALVAEVGDWKAFSSGRNLAAWIGLVPKQHSTGGKDRLGGISKQGNRYLRWLLVAGAMAVIRYARRHGTKRSWLVRLMERRPPKVAAVALANKIARMAWALMVRGERFTEAKLLPAT

SEQ ID NO: 347732 - protein, 335 aa, unidentified
MHYLYYVGLDVSKETFDASLVAFEDANEMAHRKFANSRKGICSCLHWVEKRHGIRLDDVIFCAEDMGSYISEMAVCASDRTLTFNFSLISPLVIKYSMGIARGKTDRVDARRIAEYAITHYRKIALYLPAEKELCQLRTWLILRAHLAKQRVAKLVLLEKLDYKEKFADVSIQRSMLQEEIAYAETHMKTIEREMKELIAADSNICRNYKLLTSIKGVGPITAIVMLCSTLNFTKITDHRKFACYCGLAPFEHSSGTSVRGGCHTSSMANRDIKVQLNRSALIAIRCDPQLKAYYERKAAEGKHKFSVLNAVRAKIAARCFAVVRRVTPYVALQI

SEQ ID NO: 347733 - protein, 328 aa, unidentified
MGIDVAKATLDFCLLSKNATLLWRGQLANESQAIAQFLAQLQARGYKLAQIHFCCESTGVYGQRLVEALDQSALACSVLNPAQVKFFAISVLRRTKNDKVDAEIIARFCRERQPLATRPLRPIEAELKLLVHERESRVNEQNRERNRAQKDPYQIALPKLIGQQRKSRLKQLAKEIAQFDAAIASLMASDESLTNQSRLLCSIPGIAKVTAAKLLCELAGKEFQSARQLAAYAGLTPQECRSGYSSYGKTVLCKIGNAFLRKALYLPAAVAKRWCKPLQPWIALLESRKLHTLSIRGAIMRKLLHIAFGVLANQQPFNPSLVFIPKTP

SEQ ID NO: 347734 - protein, 410 aa, unidentified
MEVVLERCAGLDVHQASVVCCVLIGAPGRKPQKLLRSLGTTTRELEALRAWLAEHGVTHVGMESTGVYWKPVYAVLEGHFDLIVGNAHHIKNVPGRKTDVKDAEWIAQLVRHGLVAKSFVPPPAIRDLRELVRYRRTLIETRTAVRNRVLKLLEGANIKLSGVASDVFGVSGMAMLEALAAGTNNASEMAGLARGRMRRKHAALEAALDGRMREHQCFLLGMQLRSLGTIDQDLDALDARIGAQLEPYQAQHRLLMQIPGVDGVTAASIIAEIGIDMDVFASARRLAAWAGVAPGNYESAGKPKGAGTRRGNVFLKSALCAAASAAVRTKGSYYRDKYNRLRARRGPVRAIMAVAHKLLIAAFHMLSTGEAFRDLGEGYLDQVARKRSTAKLVQRLSNLGYDVMLVPKTA

SEQ ID NO: 347735 - protein, 346 aa, unidentified
MLYAGLDLSRKRLDFHLLDSDGATIEVGAAPPDADGLLGLTRRLDRHRQPIRAAIESMNGARFVHDRLELAGWQVEIADAQKVKGLAPLACKTDRIDAWVLAELTRRDLVPAIWLPDPMVRAERERARWRLHLVRHRSSLKQRVHAVLLTHGRPCPVSDLFGVRGRQLLAGLGLPEPWQGTIEASLRLIDELEREITDCERELRQLGADHRYVPLLLTVPGIGSVLAYTIAAEIGDISRFASPRKLAGYTGLCPRVYQSGERDLRGPLSKQGPKYLRWALVEAATHACTAPVYRDRYQQTKARIGKQRGAKVAQIDLARRLSEAIWHMLSRDQPFAPKGATDPLAA

SEQ ID NO: 347736 - protein, 343 aa, unidentified
MQSISTIGLDIAKSVFQVHGADAAGQVVLRRQLKRRHVLAFFEKLPSCLVGIEACASSHHWSRELQAMGHTVRLMPPAYVKPYVKRQKNDTTDAEAICEAVTRPNMRFVPTKTVEQQSCLMLHRARHLFIRQQTAVINSIRAYLAEFGIVAPVGRRGVEQLLEVVADTADRRLPEVARACLAALASQLRALKAQILEFDRRIIAWHRSNATSKRLDAIPGVGPALATALVASIADPVAFRSGRDFSAWVGLVPKQNSSGGKDKLGSISKQGDRYLRSLFTAGALAVIRYAKIHGTGHRPWLTGLLARRPTKIAAIALANKLARMAWAMMARNERYREPAALAA

SEQ ID NO: 347737 - protein, 425 aa, unidentified
MVDYFATTFCLNYPYSWTIRAGQGLAMSLRGSTRAEDGMWDPPRHGRSGTTALAPTIKRRGDVHQELEEDPMGIVGGIDIHRRQLTFDIVDLATGENVRGRVSPADRVELRRVLAGLGGAGGDVAMEGCTGWRYVTEELERAGFRAHVAEPADTAALRGNKRRAKTDRGDARHLRKLLMTGELPESWIPPRHVLEARGVVRLYKDLADQRVAWTQRLHATLYHQGVPMLGCPVAGEQAKALLHDAELSPAARRAVEVALAQIEVVNEMLAPIKLDLARLSRHQPGCQALTAHYGIGPVTSVAIWCEMGDTRRFSSSSDAVRHAGLDVTVYQSDSNRAKGHLARQGPGLLRWALYEAAMSSTKKASPDHEYFCSLRERLGTQRAALAVARKLARWCHHALRAAGDEPGPRPPERRLLPCASRPQSQ

SEQ ID NO: 347738 - protein, 401 aa, unidentified
MNAVGIDVSKGKSMVCVMRPFGEVVLEPFEVLHTAQNLNDLAGKLKALDGETRVVLEATGNYHKAVAFVLHDAGLFVSVVNPVLIHDYDNNSLRRVKTDRKDSVKIANYTLDKWTRLRQYLPEDDTRLALKNCYRQYQQAVAIRTMLKNNLISSLDLTFPDVNKLFSSPAKNNGCEKWVDFIGDFWHSECVSSLSPDAFSKKYLKWCQKHGYNFTRSKSDEIFACAVNAASLPKSPTSKLLIQQQVAQLKAVSQSVAAFQQEMLRLSQQLPEFDTVMEMYGVGPSLGPQLMAEIGDVRRFSSKKSLIAFAGIEPQPNDSGKVVGNDKGISKVGSAVLRRTLFLIMTVILQTQPQDEPVFQFMNKKRSEGKPYKVYMMASANKFLRIYYARVKSVMDSECSQ

SEQ ID NO: 347739 - protein, 402 aa, unidentified
MNTEDIEVFIGIDVGKSEHWATALSREGRKVFDKALPNDEERLRALYKKLVDHGHLLVVVDQPATIGALAVAVAQDMGITVGYLPGLSMRRIADLTPGSAKTDAKDAAVITQAARSMPHTLRAINASDEDAAALSMLTGFDLDLARQVNQSANRIRGLYTQIHPTLEQVLGPWLEHDAVLEVIAAWPTPADLKRAGKARIDARLKKHGCRRHATWAGQIVSALEHQTVVVAGTDAAAVVLPHLARQLISLHAQRADVAAQVEALVEAHPLYEVLISMPGIGVRTAAVFLAETLGKTFDTGAQLASYAGLAPVTRRSGSSIRGEHVSHGGNKRLKRAMFLSAFASLRSDPVSQAYYQRKRQQGKRHNQAVLALAHRRILTLHAMIRDGALYDPQPATKLPAAA

SEQ ID NO: 347740 - protein, 419 aa, unidentified
MSFKILKFNCCGLDVHKTWIYACIGITDSNNRTEYKQARFSSFTKGLNELCDWLAKYNCKDVCMESTGKYWIPVFNILEQHNLWVTLSHPKYTKPMKGNKTDRKDAKWICDLYMCGMVKPSFIPPADIRELRDLVRYRFKLTCMITGEKNRAQNCLTVSNLKLDDVFSDVFGKSSRSITEQILKHPGETFDVTPFVDGRCKTPIEEIQAAVDGAISKEQAVKLRQCLDHIDELNKHISEVEQEILRLSDKYETALNLIRTVPGFDKNPLTAVQVLSEIGGDMSVFPTAKHLVSWAGCCPRNDQSNQKIKSTRISRAGSYFKPILVQVANALIKSKKHPEFTTRYKRIKARRGHKKAIIAICRMILTAIWHILSDLEPYTPEGFLESRPVKEEKVLSTSQALNLLKQRGYIIKDEPLAVS

SEQ ID NO: 347741 - protein, 405 aa, unidentified
MFEIEDVGVFLGLDVGKSAHHGHGLTPAGKKVFDKPLPNSEPKLRAVFDKLAAKFGTVLVIVDQPASIGALPLTVARDAGCKVAYLPGLAMRRIADLYPGEAKTDAKDAAVIADAARTMPHTLRSLELTDEITAELTVLTGFDQDLAAEATRTSNRIRGLLTQFHPSLERVLGPRLDHQAVTWLLERYGSPAALRKAGRRRLVELIRPKAPRMAARLIDDVFDALDEQTVVVPGTNTLDIVIPSLAGQLAAVHTQRRAMEAQINSLLEAHPLSKVLTSMPGVGVRTAAVLLVTVGDGTSFPTAAHLASYAGLAPTTKSSGTSIHGEHAPRGGNRQLKRAMFLSAFACMNADPASRTYYDKQRARGKTHTQALLRLARQRISVLFAMLRDGTFYEPRTPEDVELAA

SEQ ID NO: 347742 - protein, 448 aa, unidentified
MQNRNVKMEVVNPNAAGIDVGSRSHFAAVGQGKEDIKEYGVYNEDHQQLIKWFLENEIKTVAMESTGTYWQNLYSALIAAGFHVILCNGKFTKNIKGKKTDVKDAQWIQKLHSIGLLTGSFLPDEATEQLRTYCRHRTNLVQQAADATRKMQKYLRLLNLRLDVVVKDVTGLTGLAIIDAICKGEKTPEKLAELRHGNCKKSEDEIAKALQSNGRKDYLFGLKQEYQLYVNFQQKMKECDVEIEKLLNEQINSDNEKKQHFIDKKVYKKINKNTPKNLDINLLSYQYFGGVDLLAIEGVSHATALAVMSEVGNGIRKFETADQFASWLRLAPNNKISGGKMLSSRIPKGSNRLKIALRNAANSIGNLKDTALSNFFNRIAYRKGRPAAISATARKLAVIIWNMIVKGVPYKPQNDYEFLDQKRKRKVQEMKKLIHKFDININDLGLQI

SEQ ID NO: 347743 - protein, 372 aa, unidentified
MDRVCGLDVHKDSVFMCILTEKGEKIEEVFGTLTPELDRLRDFLVSQGVGKVAMESTSVYWIPIWRVLESDFDVKLVNPYFIRQLPGRKTDVKDAQWIATVLQKELIKGSYVPDSSIQELRQYNRRMFQLVRGKQKAESCIDLTLQRCNIRLSNYVSDIGCKSLQKVVKALIQGETDADQLLSLVHKRIRNKHSNEVIKSSLIGIVSLADRDMLRMSLEEVELYDRQLLECEEKMRIICQEHYRQEIDILQTVPGIKEESAMRIIAETGVDMKAFLTASALVGWAGLRPRNDQSAGKIKGRKTLHGNKYLRVMLTQCAWGASRTQSSRFYNRYYTLKKRMNHNKALIANARKLLVVIWNLLAKKQPYIPLAA

SEQ ID NO: 347744 - protein, 391 aa, unidentified
MILVGIDVAKDKHDCFISNSDGEVLFDVFTISNSIDGFNELYENISSVTEDLAKVKVGLEATGHYSYNIMGYVLNKGLTTYVINPLHTNLFRKGQSLRKTKTDRIDARSIALMLLTDSSLEPYSLTSYHNEELKSLTRYRFTKVQERAKYKTSVARLVNILFPELEKLVPVLHMKSIYALLSEFPGASHIASAHLTRLTHLLQSESKGHYGKAKAIEIREAARSSIGSIMPAKSLELSHTINLINILSSEIDEIETEIRRIMDEIGSPIMSIPGISYRMGAMILAEIGDFERFSSPDQILAYAGMSPSTYQSGQLTSSYAHMEKRGSKYLRYALFNTTKYVCQWDPSFASYLAKKRSEGKHYYVAITHAAKKLVRLIYALEKSGEQYRLAA

SEQ ID NO: 347745 - protein, 369 aa, unidentified
MTDLTLFVGLDVHKKTISVALVEGAAGAAVRFYGTIANTPDSVRTLCRKLSRDGQRLHFCYEAGPCGYGVQRQLSRLGHRCDVVAPALIPRKVGDRVKTDRRDAMMLAQTLRAGQLTAVWVPDEAHEAMRDLVRLRAQAMRDLRKSRQHLLSFLLRHGLISPYGHWTKMHRRWLGELTFAHPAQHLAHEEMLQRIERAEALCDRLKGAILELVPQWTLAPVVQAIQALRGVSLIVASVIVAEVGCFSRFDSPRQLMAYLGLNPSEHSSGATVRRGAITKTGNVLARTCLVEAAWTYRFAPRVSQIIRDRLKELPEPIRAVAWKAQVRLSARYRKLIAAGKPGPKVVVAIARELVGFIWAIARMVEPKFA

SEQ ID NO: 347746 - protein, 317 aa, unidentified
MNKPLLPDPAGVDVSKDTLQLHLRGRQYLLPNTPAGYAQLLKLVQAGGAVQLICEATGGYEQGLVAACHVAGQLISVVNPARVRHLALAQGQRAKNDPIDATVLTAYGQALRPAPTAPADPVQQEMRALVTWRDHLQENLIRARQTLEHGVPAFVGRQQKKLVAHLEKQLAAVDAALTAALARAPQLQAQVQALAQLDGVGVRTALHVLSWMPELGTLGRQEATALAGLAPWVRQSGRWQGQRHIGGGRAPVRHALYMPAVVLARMSGTKLGQFYAHLRAEGKPAKVALTAVMRKLLLQMNRVLKELAAPQPTPKIA

SEQ ID NO: 347747 - protein, 398 aa, unidentified
MLSIGIDVSKGKSTVCGMKPGGEIVYTPFEVQHTREGMSELVSLLRGSGEEVRVVLESTGSYHCPVVAALLENGIFVSVVNSLRMKRFCSQSIRRVKTDQIDAMQIALYGLAYWQELQPTRLPENTYRELQLLARQYYQMTSMLIKAKVDFNALCDQVLPGMQELMNDHAGRHKLSDFVLRYRHTTHILEMGETRFRKDYCKWAEKKGYRNRERMAALIFATAQNGIPVLPNAPSTQIVITEAIRVLHTVEASRDAILTQMQALAKTLPEYSLVREMPCIGDTLAPRLIAEIGDVRRFHSKRALIAYAGIDAPPYQSGKFSANNRHISKRGNRYLRKTGYEVMQSYVMHKPANDPIFTFIEKKRSEGKSGKLAMVAGLNKFLRVYYGKVTELYRSLPQ

SEQ ID NO: 347748 - protein, 346 aa, unidentified
MRIIGCDLHARQQTISMVDIETGEVTEKVLLHEGEAVREFYAALPKPVLVGLEATGSMYWFLRLLEELGIEYRVGHPAAIRKAETRKQKHDRRDAELIRRLLEEKRFPQIWLPTVEQRDLRTLLQHRQQLVRMRVMTQNGLQGLALSQGLRRGAKLWSQAGQQELQGLGLAGFAATRREQLQQLRQELTERLRQLDQAVKEQAEQRAGARLLLSHPGVGTITALATEVFLGDARRFPNGKAVASYVGLIPSEHSSGGKQRNGRLSKQGNPLLRQLWVEAARAAARKDARLKQFYRKKLVQKGLGKAVVATARKLGIRLWILLRDQIDYTEFCRRAEQRCPHAGMPE

SEQ ID NO: 347749 - protein, 350 aa, unidentified
MELATMNTEYVCGIDLHSRSNYICVMNQKGDIQLHRNIRNDFQFFKSLIEDYKGNISVGCESMHSYYWLADGCIENDIPFYLGHAYYMKTIHGGKKKNDKLDSKKIADLMRANHLPVGYVYPKKFRATRDLLRRRIRFMTIRAEAYAHIQTTFRQNCLLISPGDVKNKKTRRELISKIDDREIQKNIELDLDVIDNFDALLKPIEAKIRAQAKLHDRTSLNLLLTIPGIGDMMSLIILYEIGDINRFASHQNFSSYCRLVICDRESGGKKSRGGFQKIGNPYLKWAISEIIIHAPSTSPVIKNYYDKLIDKVGKKRAQRIITHKFGVAIYYILKNKQGFDELKFIQSDMK

SEQ ID NO: 347750 - protein, 448 aa, unidentified
MLNRDVKMDVINPNAAGIDVGSRSHFAAIGQGKEEIKEFGVYNEDHQQLIKWFLDNEIQTVAMESTGTYWQNLYSALIAAGFQVILCNGKFTKNIKGKKTDVKDAQWIQKLHTIGLLTGSFLPDEATEQLRTYCRHRSNLVRQSADTTRKMQKYLRLLNLRLDVVVKDVTGLTGLAIIGTICKGEKNPEKLAALRHGNCKKSEEEIAKALQSNGRKDYLFGLKQEYQLYVNFQEKMKECDVEIEKLLNEQINNDDEKKQHYIDKKVYKKVNKNTPKNLDINLLSYQYFGGVDLLAIEGVSHATALSLMSEVGNGIHKFETAKQFASWLRLAPNNKISGGKILSNRIPKGSNRLKIALRNAANAIGNLKDTALSNFFNRIAYRKGRPAAISATARKLAVIIWNMIVKGVPYKTENDYEFLDQKRKRKVQEMKKLIHKFDIKINDLGLQV

SEQ ID NO: 347751 - protein, 405 aa, unidentified
MTVYIGIDWGEKKHDVVCLNAAGAVITQFPIVHSAEGLLHLDSKLRQLAPSPEHLRIGLETAHTLLIDWLWERGYSQVYVIPPLLTRSCQRRYRQSGARSDRRDAYLIADLLRTDGQRLYPWHPDSALTLQLRTQVRWGLRLGCQQRRLSNQLRAVLLRYYPAALQVFGALDSQITLHFIQTYPTPQAAARVTWEEFAAFAQAHRYPSQRLLACFARLQARQPAAAPAVVQAYQPQAVHLATSLLDTVRTLASVRRAVTALFRQHPDHPIFASLPGTGELLAPALLAKFGDDRARFPQASTLQALAGTCPVTEQSGQRRRVFFRQACDREFRQIAQQWAKCSIEHSDWAASYFHEAQQRGQSASHAYRCLANRWLAIAWTLWQRRQPYDEAYHLQQRAARSRPRS

SEQ ID NO: 347752 - protein, 371 aa, unidentified
MKSIIYIGMDVHKKTYSLCALLKETGEIIGETKIPADVSLIIKFIENAKKSVDSDDVQIKTGYEAGCLGYSLYWQLAAKGIECDILAPSTMHRSAKNKVVKNDRRDAKNIAANLANGTYKSVYVPTDEDVEIKEYIRMMHDFKIELKKVKQHINAFLLRFGHHYPGKSKWIPAHIKWLKELELSDMYREILDEYLSQFEILSEKIERFKYRLEELSQKEIYNEKIGQLRCIKGIDTTAAMTMHAETSDFDRFPTANAFASYCGLTPGEDSSGDSYHRLGITKQGNSMIRTTLVEAAQTLVRGTIGKKGKKVKSKQKDQDVKVIDYADKAVIRLQKKYHRMIFRGVKRNIAITAVARELACFVWGIETGHIS

SEQ ID NO: 347753 - protein, 423 aa, unidentified
MENTAARKRKQVPEGYLVIGIDPHKKRHAAVAITQDFTTRDKFKFDNTREGLETMLRRARTEMVKSGCRGVMFAIETGGHYWRNVAYFLDERGIPFRFINQFTLKRRREGKDLNRRKNDYRDSEVAAQLLCTGEFTESKIPQGVYAELRTAHNAYRRLVKERTRIINLVKGLLDALFPEFTQVFKDPCALTALSVLSICPIPRVIAGMTEDEFVATIEAQHKGRLMRKKLRALHYSARTSIGITAGAKSAATEISFLVEKLELIRRHIRVIEGTLVKLVDETEEGKYLLSIRGLHYIAVGGLLAELGCFKSYHSAKQMIKMAGSNPTESESAGKKGTHTPMSKQGRPVLRYCAWTSVIPMLRLNPDFRAWAKRLRERPAHANPLNGREVVGAALNRLLRLAFAMVKNQTYYQVSKPEQTLVAV

SEQ ID NO: 347754 - protein, 385 aa, unidentified
MMNLDRTNTPAGDNYATVYVAFELSNAKWRLGIILPGARKMSRYTIDGGDTAGLSARLSQARAKAATCGKPVRIQSCYEAGFDGHWLHRWLTEQGVISYEVDPSSIEVNRRARRAKTDRIDLDKLMRTFLAYIRGEPRVCSMLHVPTVEDEDRKRLTRERERLLKERTAHTNRIKGLLHAHGIRDAMPMKRGFIESLATVRTADGRPLSRWLKEEITREHERLCLVEKHICALEKTSTAELRAAAPGSADAKVIQLAELKGIGLTSGQKLVNEVFYRSFDNRRQVGSCFGLTDTPYHSGTSRHDQGISKAGNRRARTLAVELAWLWTIHQPDSELTRWFRERVGKIKGRIRRIAIVALARKLMVALWRYLTTGVVPAGAALHRAC

SEQ ID NO: 347755 - protein, 326 aa, unidentified
MTAPKLGIDISKKTFDVALIRDPETMKVKQRQFSNTPDGFRALQTWLAKQGVGRVHAVMEATGAYGLDLAECLHGAGHPVSIVNPAQIKAFGQSELQRNKTDRADAALIARFGWRHNPAPWTPPEPEQQELQSLVRHLDDLIEQRTQVSNRLSDARLTKLVRESWEEILQALNERIAEVKRQINQHFDDHPTLKRQRELLDSIPGIGPETAARLLAEMPQLGEFDSARAAAAHTGLTPKRHESGTSIKAPARISKIGNPRVRYALYMPAMAALRSSKEFKELAARLTERGKKKMQVIAAAMHKLVRIAYGVLKSQRPYDPSYATAA

SEQ ID NO: 347756 - protein, 400 aa, unidentified
MRAVFGIDVSKASSAVAILVNGEKVHGYTMSNDAIGFARLLGDLRTVHKPEIIFEATGVYSRRLQTFLEDNGYAYTRLNPLEAKKQLDSLRVRKTDQIDAEKLAQSQFVLNRKPTYVQEEVYQELRDLSRFYQNLTEDIVRAKNRLHKVLQVTFPEIETVLSKPTGEQYWNLVTAFPYKDFVLDLSKDELLESIRQSTSKRISDKRVAYLAEKLIALANQSYCAVKKTSPIMEEVRYYAKELLRLSEQRQTVLDQMVELAQPLPEYDILLSIPGIAETTATSIIGELGDIRRFQSANQINAFIGIDLRHYESGNFLAKEHITKRGNPYARKILFKCIHNIASASHTNPCHIADFYEKRKRQSQTTSTKPHTIASIHRLIRTMYYLITHNKLYDYRSTQNQ

SEQ ID NO: 347757 - protein, 455 aa, unidentified
MAKQKIHKTPAIETVNVGAAAVDIGSREHMAAVNPEVTDAPVRAFGTFTHDLHDLANWFKSHGVTSIAMESTGVYWIPAYEILEQQGFEVILVNARYAKNVPGRKTDVSDASWLRQLHSYGLLRGSFRPTAEIATLRAYLRQRERLVEYAAAHIQHMQKALMEMNLQLHHVVSDITGVTGMKIIRAMVAGERDLDVLASHRDVRCRVSTETIKAALNGNDRAEHIFALTQSLELYDFYQSKMLECDRRLEATLAALGADTAHDPSELPRPRTKTKQVSTPSFDVRAALYGVLGVDLTQIHGMGPSLSLKLVGECGTDLRAWPSAKHFTSWLCLAPGNKISGGKVLSSRTRRSSSRAAALLRLAAVTIGRSDTALGAFYRRLAARAGKAKAVTATARKIAVLFYNALRHGMTYQDPGASHYEERYRDRVLGNLKRRAKSFGYDLRELPPEEEMTVS

SEQ ID NO: 347758 - protein, 395 aa, unidentified
MPWAVGYRVLCARFWLQSARTNGMDAPTRTDIDVPKWKCQQPLELKGASTMKITTVGIDLAKNVFQVHAVDEHGKVALRKQLRRDQMTAFFVNLPPCLIGMEACGSAHHWARTLQDFGHTVRLMSPQFVKPYVKSNKNDVADAEAICEAVTRPSMRFVPVKSVEQQAVLSLHRARQGFVIARTAQANQIRSLLGEFGLVIPKGICHVAKQVPELLEDASNQLPGTFRRLIARLTEHLKELDKLVDEFEDQIKAWHRSSELSLRLEKIPGIGPLGASALVASIADANSFDNGRQLSAWLGLVPRQHSSGGKPTLLGISKRGDVYLRTLLIHGARSAIVAAQRKAVNTNVWLASLLNRRHPNVAAVALANKNVRTVWALLAHGREFRPNYVPPQLAA

SEQ ID NO: 347759 - protein, 431 aa, unidentified
MPCTALASTDSGRLRRRERNQLDVFCGIDWAEDHHDIALVNRDGGLVARLRVSDDAAGLARLLELLAAHGDSAEVPVPVAIETPRGLLVACLRATRPVYPVNPMAVARYRDRHSVAGRKSDHGDAVVLANVLRTDLHAHRPLPADSELAQAVAVLARAQQDAVWDRVQAQNKLRSHLREYFPGFLAAFAAAKGGITRPEARAVLAAAPTPADAAKLTPAQLRALLRKAGRSRGIDAEAARLRGAFRQEQMRQLPLVEQAMGRQSLALLRQLDAACASADDLEQAAVESFSQHPDAGIITSFPGIGALTGARVLAEIGDDRSRFQDARGLKAYAGAAPVTRASGKSRSVTHRRVKNNRLAAAGYIWAFSAITASPGARAHYDRRREAGDRHAAAQRNLFGRLLGCLHHCLATGQHYDEATAFLAKAAPPAAA

SEQ ID NO: 347760 - protein, 353 aa, unidentified
MPAALSPTAPLKYVVGLDIAKDTFVACFGRIEVSQQLRFGKEATFDNTSAGFAALLAWTTKQQATTAPLWFVVEATGVYYENLAYFLSDTGQALSVLLPNKVKHFAQSTEQKSKTDQLDARLLCRLGLERALPAWQPPTPALRQLRALSRERQSLTRQGARLKTQHHAYAHSYQPDTRTLERLSARQQLVAQQLKAVDQDLAALLEAEPELARKLAHLTSVPGIGLTTAIVVVAETNGFVLIENERQLASYAGLDVVQRQSGLAAQATRISRRGNVHLRQALYLPAVSSLRYNPQQMAFYARLRARQPSGKPGVIAVMRKLLLLCFSLWKNDRPYDSHYHPAHLAEKEVAPAT

SEQ ID NO: 347761 - protein, 347 aa, unidentified
MIIIGCDLHTRFEQIAMLDTETGELVEKRVEHESGEAKRFYEGLKEPALVGIEATGFTRWFTDMLAELGHELVVGEAGKIRAQETRRQKHDRRDAEHILNLLVRGDFPKIWLPSAEERDVRVLVEHRHQLVELRTRARNGLHAIALSYGLRRRQRLWSKVGQEERKKIPLREGMERRRADLLQLLGQLNTWVKELDPRIEQEAARREDARRLMTHPGVGPQTALATVLVLGPVERFPDDRHLTSYLGLIPQEDSSAGRQRFGHLTKQGNRLMRFLLVEAAQTASRYDPGLRRMYRRLAFRKGAALAKVAVARKLAIRLYIMWRDKIDYPEFCRRGSHAGMLGDVALV

SEQ ID NO: 347762 - protein, 344 aa, unidentified
MQITTIGLDLAKNVFQVHGVDATGQVVVRKSLRRSQMLPFFAKLPACLVGIEACGTSHHWARELIKLGHEVRLMPPAYVKPYVKRGKTDAADAEAVCEAVTRPTMRFVPVKSPEQQAALSMHRTRDLLVKQRTQLINMIRGLLAEFGVDIPKGLERALLMARQIVDGKSPDVPIEAAKIVGTLSQQALDIHVRLREIDRDLAVWLRGNDVARRLMTIPGIGPVGATALAASVTDPHQFRSGRQFAAWLGLTPLQKSSGGKERLGRITKMGDKYLRKLLVVGMTSLVRRAKYNPGKIDPRLADLLARKPTRVATVAMANKTARTIWAIMARGETYRTGHRPALAA

SEQ ID NO: 347763 - protein, 345 aa, unidentified
MEIHTIGIDLGKTVFHLVGLNACGEVVVRKKCSRDQILRFTANLHVSLIGMEACGGAHFLARALREQGHDARLMPAKYVKPYVKTNKNDYIDAEAIAEAVGRARMRFVPIKTDDQLDLQSLHRVRERWVSGRTAVINQIRGLLLERGITIRKGRRHIEESLPGILEDADNKLSGALRVLLTQLRLEMQYLQRQVDECDKLILRIGDELEDCRRMLSVPGIGPMTATATIAAIGNGSAFKKGRGFAAWLGVVPGEHSTGGKQTLTDTSRRGNRYLRKLFVQGAHAVLQQRMKQSNGLNTWLAQLTSRKRIQVAAVALANKMARMVWAVLSKGEAYRPPLSVETAAV

SEQ ID NO: 347764 - protein, 404 aa, unidentified
MKAKSTRFCGIDIGKQKHVACVIDADGKPLVRSQSFLNDARGYQLILARLQQCGGPAKVLIGMEATGHYWYALHDFLTRQGYRVAVLNPIQTAQQAAMGIRKNKTDRLDAHHIAVLIKNDGHRPALVPGELAMTCRQLTRLRSSLIRQGSKIKQLLWSRLQPVWPEYEGLFADPFSPTGRKLLAAAPTPADVLAMQPEVLSELIRRASRGKFADAKARQILQSAQTSVGMRRGLAGARLGIQTLLTALDAQRPVRQQLEADIAGLADQLPRHVLTLPGANAIRAVSLYGETAPITNFPSPDQLVAFAGLDCVVFQTGQYEAPRRRIGKRGSPFLRQTLWAMASIAVRTEGPLREFYLRKRRAGLHYLATVTAVAVKVCRISWRILTDERDYVPSACPTRTASLS

SEQ ID NO: 347765 - protein, 350 aa, unidentified
MPLVAEVIDAVVGGDTHRDTHALEMTAPTGATIATIAIDNDEDGFADALAWIAEHAPGSRVVVGLEGTRSYGIGLARAVQAAGLVVVEVERPRRPNRRHGKSDPIDAHLAALHVLRLDADQLPTPRADGDREAQRILLGARRELTIVRTMQVNRLRALLLTGDEADRHLSRGPLSDARLSAISRRRIKADATVEFSTRRIEARRLAIAIREAGKELKQNKKQLAAMAHDLAPRLQDKIGVGPVSAAQAIVSWSHSGRCRNDAAFAALAGASPIPASSGRVVRHRYNRGGDRSLNRALHDITLTRWRACPRTHAYIARRRAEGKSDNEIRRSLKRYIARELFRTLEATTAA

SEQ ID NO: 347766 - protein, 347 aa, unidentified
MTEAYDGRQVVGMDLHRRRSVLVRMTEDGRKLETVRIENSPQALRAVLARAGNNPRVVVEATYGWYWAVDVLEEAGAEVHLAHPLGVKAFTYRRVKDDERDAADLADLLRMGRLPEAWIAPPEIRELRELTRYRHKLVGLRTSCRDQVHAVLAKLGVPVTHSDIFGVHGQAWLDGLRLPQPYAGKVASLRQLNGELSAEITLLEQVIGDLLAGHEGYRAIQALPGIGPVLGAVIVAEIGDIRRFPGPGQLGSWAGLTPRHRESDTKVSRGHVTKQGSRMLRWAVTEAVQRQPAGTRPRQVKDGIIARRGTQAKNTAKVAAARELLTMVFYSMRDGHIRRASRPGQAA

SEQ ID NO: 347767 - protein, 327 aa, unidentified
MRYIGIDVSKATFMVAYPLNEKEYKTREFGNNAKGIHQFIHTLKEGDHCVMEATGNYSYLLLYLLNQANITTSMENALKVKNFARTMLSVTKTDKADARLLSLYGERMRPVPFKMPPDSILLLKQKRAAMRQFQKQLHATNNLRKSLEVLPQRDAATFKSIDKIIETLEKQIRKIEEDLVALTQKEFDRQLQKLTSIKGIGASLAAALIIATGGFTYFDNAKQVSRYLGICPTYQQSGTSVNVKGHINRNGDSHLRSQLYVASWSMSLYNKECRNLYLRMKEKGKPGKLIMIAVANKVLRQCFAVVKHDTDYIDGFVSRKPISSIDG

SEQ ID NO: 347768 - protein, 312 aa, unidentified
MQKSTEQPKYLAVDVSKQELLVCFGKKTWAVANTAQACAALLKTATPGAHVVCEATGGYEQHLVEAAHAAGNPVSVIMPKRVRYYAYAAGLLAKNDRIDARLIARYAEAMKPPAQPKPERWQAELRELMRARNMLVVELNQQASRGERPSPIALVAELDKARAELLENHLKQIEQAIDSLIQANETLRQKAETIQQIKGVGEVSARIIVAEMPYLGSLEQGQAASALGVAPHPQESGGCKGKRYIAGGNARVRKVLYMAAVCASQHNPVLSAFYARLIAKGKPPKVAFVAIMRKLIELINRLLKNPNFVLAG

SEQ ID NO: 347769 - protein, 318 aa, unidentified
MQEPTLFIGVDVSKAELVISMGAERRPRSVANDAPSIARWLRELPPHALVAMESTGRYHGLLAQMASQAGLTVYVLNARDVYYYARALGTRAKTDGVDSGVIARYLAEHHKHLHPWQPPSPAQQELQTLLLCRAQVVVHRTALRQILKDVPPDSTPLQAGFESVLKNFDDRIEKLIASDAQLAQGCRRLRTITGIGPQTAALLATLLSRLDFANADALVAYVGLDPRPNDSGAKRGKRYLSKKGPPLLRRQIYLAGFAASHSKALKPLYQSIRAKGFATTQAFIILGRKLLRVAFAVWNGTESFDPARMGPQIDLKKT

SEQ ID NO: 347770 - protein, 339 aa, unidentified
MDLYGGMDLHGDNVFCTLMDRDYKPVFEQRLPNDLPTVLAALAPYRAHLAGVAVESTYNWYWLVDGLQANQYSTRLANPARMQENIGLKSANDKTDARFLAKQMVMGVLPEGYIYPKEERPVRDLLRRRMRLVHMRTGEWLSLEGLVARQSGQDLGIQALQGLEAGALSKLLGNDPLVLQAAQISYRHIAFLDQEIRPIEKAVEGRVKLADGYERLLGVPGIGRILAMTIMLETGPIGRFPGPGNYASYCRAVKTEHTSNERKKGEGNGKSGNRYLAWAYVEAANFAVRYSPELRAWYQRKAARTKRVVALKALANKLAKACYFIMRDGVEFDVKKLVG

SEQ ID NO: 347771 - protein, 352 aa, unidentified
MISSQITAIPKLFIGMDVHKKSWTIHFKTDLFDNKTITMPADPSSLINYVQKNFQDHTVSCCYEAGCCGYWIARAFQQHGWEVKVVNPADVPRNNKQDWQKTDRIDSRNLCKHLSDGNLTGIYIPGEEQEQLRSLFRRRIHLARQLRTIKNHIKSQLLYYGIKLPDQYDNPNWSREMKNWISNLQWQYNSAASCMQSRLRQLEFTWYEELHISNELRAYCRKHYRKDYYLLKSVPGIGGITASAILAELGDIRRFNRLDELAAIVGLVPGIYQSSDNKIDLGLTKRSNHQLRSLLVEASWVAVRADMALQHYYRKHAHKEPNKAIIKVAHKLLSRIRAVINSGISYESGLAK

SEQ ID NO: 347772 - protein, 406 aa, unidentified
MEGPIITVDVSKGSCHYQPFIENGHPMRKPKQLSATIDGFQKLGQTIKDLEAKTEREDIPVIFEATGVYHRPLQKYLEDHKIRYYIISPLLSATYRKTDLHSNKTDALDCAHIAKAYYCEKELRQYQAQPQEHKRLYQLSRIYESGLVHLRKRKVSLRSMLDIIYPRIDKTFKGNQNLYDPIPMEILKRYPHPSLLLSHREDTIVKNVGHRTGHLKGYTERIVHKIYEKAKECYSGCEINDIEVLKLPSLIENVQEQKKKCDSLLKEMIEIARTCPYFVSVVSIVGIGENLAARIIAELGDVSRFDNRAAIVAYAGLNPKIQQSGDIDGLHLKISKKGNKHLRCLLYLGAQCNYRLRKEDPLYEFTKKKRQQTQCPLSSKAAYTASAHKLLVIIYSLCKNGTLYHS

SEQ ID NO: 347773 - protein, 342 aa, unidentified
MGEIITIGVDLAKNIFQVHGVDAEGAVIVRRQLRRAQVLPFFTKQPACLVGMEACATAHHWARELTGLGHAVKLMPPRYVKPYVKRNKNDAADAEAICEAVTRPTMRFVAVKSTDQQGVLMLHRSRELLVRQRTMLVNAIRAHMAEFGIVVPAGIQRVKTLLVVIADAEDDRLPSVARFCLEGLARQLASLHEEITVLEKRIHAWHRSSEVSQRLQTIPGIGPITTSALVASIGDPSLFKSGREMAAWIGLVPRQNSSGGKERLGRISKQGDQYLRWLLVAGAMSVVKQARMRDTPSWLTQMIATKPAKVVAVAQANKTARIVWALLQHGGIYQAPPLKQAA

SEQ ID NO: 347774 - protein, 362 aa, unidentified
MNETYYIGFDVHKKSVSYCVKTASGEIVQEGQFTARREVLRMWAAAQPGPWQGAMEATLFSAWIYDTLKPYAQQLHMGHPARMKAISAGKKKSDRLDARTLADLLRCNLFPDCYVLSPEMRDLRRLLRYRHLIVRESVRMQNKMAGLLMETGTPFVKAKLHGKRYFTQLLQTLEEVPESVKDLLKMSRGALEMFEATQKRLVKHLLADPVLQARVERLCTIPAVGAITALTWALEIVDPFRFPSIGDAVSYCGLTGPFRSSADQVQRAPLSKQRNAWLQSTLIEAAKLAPRWNPPLAVLHQKELERGHRNRATLQVARKLVAYLLAVDKSGQPFQMRSSPAPARVLSTNKGLKAARATLQPV

SEQ ID NO: 347775 - protein, 310 aa, unidentified
MANFPTPGEGVIGIDVAKASVTFYDQLSDTHGTVPNELDALIAAFTLFRDRSLAICEATGGHEDRLLVALHSLGIPVHRADGRRVSAYARSLHPGKTDRIDAQALARYGTERAAQLERHTPAEQAHIRLTALVSRRLACIEARKIERTRAKGPRAWLVADLIEQTLAFLDAQIAELDARIADILAHAPQLAQRRAVLETIPGIGTVTAITLMATMPELGTLTRRQAASLAALAPHPRDSGTSNLPRRTTGGRRHLRPVLFIAALSTIRTKNPLAAFYQRLIANRKPKRLAIVAVMRKIITIANARLAQLT

SEQ ID NO: 347776 - protein, 366 aa, unidentified
MTSTCGVVQAAAAVDPTVGSSVEVTGGVDTHLNTHTVAAVDGAGRMLGSAQFPADRAGYAGLLSWLRSFGTLVLVGIEGTGAYGAGLTAFLQAEQIELVEVDRPDRKARRWQGKSDPVDAEAAARAALGRVRTGTPKRRDGRVEALRALRVARRCAITHRADLQRRLKMLLVTAPEPLRAALRDLPTRQLLETCAALRPDPELVDDPTTAAKVALRSLARRHRHLTIEIDDLDTLIAPLVKRINPRLLATPGIGTDVAGQLLVTAGQNTNRLRSEAAFAMLCGAAPLPASSGKTIRHRLNRGGDRQANCALWRIVITRMATDPTTRAYVARRTSEGLSKTEIIRCLKRYVAREVHALLTANDLDEP

SEQ ID NO: 347777 - protein, 379 aa, unidentified
MTTTIDTRDVCCAALELSKTSWVCAFSAPGDSKATVHKIRPGDVNRLIDILNSSKEKAQCHLGRQLQIVLCYEIGYDGFWLARVLIARGIRTVVFDPASFLMPRRGRLAKTDRLDAEGMTRTLRTWLSGDREVARDVQIPSVEQEDAKRIERERKYLVEERISIVGRIKGLLALHGIWLSGKRVGKGLRERLDTMRTGDGRPLAPFLRREIERMLRRHDFVSQQIEEVVADRKEALADNSGRFPQAEKVRRLTTLDAVGETTATVLVAEVYHRSFETRRHVASFVGLAPSPYRSGDTDRDRGISKAGTKLARQTLVELAWFWLRYQPNSWLSLWWHERFGDKGMRGRKVGIVALARKLAIALWRFVEEGVVPEGATLKV

SEQ ID NO: 347778 - protein, 313 aa, unidentified
MKVVAGVDVGKRSLDVSVSGASPRRFDNNQKEIARLLAWLRSCSVTHLVYETTGGYERPLVRALRASEIKEHPVHPNRVRNFARIVGNQAKTDRLDAQMLSRYGETFELSNTMSLNTEEEELRDLLSRRRQLVQERTREKNRLDKGVSKDARSSIQLHIKWIDNEIQRLDKECHKRLHQCQSLTRKTDLYQSVPGVGQHTSAILAAYLPELGLYNGRQLSSLVGLAPWSKDSGARKGYRSIRGGRAKVRSALYMAALSAVRHNDDLKCFYQRLRRRGKSGKLALTAVMRKLLLLLSAVAHRGTPWVPNPSPTT

SEQ ID NO: 347779 - protein, 319 aa, unidentified
MKMAKSTTSTGGIDTSKATLDLAVHGGSAALCVTSDEAGWKSTAAHFKRAGVTLVGIEATGGYERGVTRYLQKAGFTVIVMQPVQVKSFAKLHLKRAKTDKIDAVLIAACAHVLGDGHKLPPDARFDALADHLTFIEQLEEDIVRIKTRLEHIADKRLRRIAESDIKRLSKRCNDELQRLQVALRQYDDLAARFDLVQSVPSIGARTALCIVIRMPELGQVSREQIAALAGLAPFDQKSGKHDGQAHIGGGRARVRRALYIAALPGAFRWNQELKALYARLTANGKTHKCALIACARKLLLFANTVVARKTPWEVKAAT

SEQ ID NO: 347780 - protein, 458 aa, unidentified
MKNVYLGADVSKGYCDFMLLDAKKRRIEKDFQLDDTFDGHQKLYHILSALCDQHPNAQIYAAVESTGGYENNWFDAMIKFQSSLPLKTARLNPCGVHNNSKAGLQRNITDPISAENVAKYLIEHPENVTYQQQDPLASLRKQWSFVKMLSKQKTQLLNQLESNLYAANPEVLAYCKNGVPNWVFSLLARFPTAATLAKAKKSSLALIPYVTEQKAKELIQRAKKSVASATDPITAQIIKATVKQILQLAKAIEAQEKILTETCSIPEVQLLKTFPGISDISAIGLILEIGSVERFATAKKLASFFGLHPRYKQSGDGSWGFHMSKQGRVVPRQILYMVAMVAIQCNPLIAEIYLKHTEKGMKKKAALGLCMHKICRIIYGMLKHNMAFDANIDRNNRKKSHKGNTAKIRQDKRRRYQSFDAKAPISGKHNKKRKERKQSQSDNIAHNGIIEASVPASV

SEQ ID NO: 347781 - protein, 340 aa, unidentified
MQPYFVGLDVHKQVIAFCVKTADGGIVSEGKILATRAALDEWVQTVPRPWQGAMEATMFSHWIYWHLKPHAAELKMGHPARMKAIFTGKNKSDKIDTRGISDLLRCNLLPECYVISPELGALRQQLRFRRLMIEQQVMFKNKTAGLLMEAGVEYERKRLHGKRYFAELLAQNEWIRSEMRPLLKYNREQIEHLQEMDRRLLQMLERHPRLQARIEALQEIDGVGPVTALTWALEVGTPERFSSLKKAMSYCGLTSALRESAGKQKRGPISKQRNRHLQCALIEVAKIAPLNNEKLQETHRKAMEKGAHKNRATLAVARKLVAYLLAADRAFSHKCAAIPA

SEQ ID NO: 347782 - protein, 281 aa, unidentified
MARKLVVGIDVGKKRYAVSLFDGERFRDFSVPSSPEELLRRITPYLPGKMRSVLFVMEATGVYHLKLALFLKERGYPVSVVNPFVVKKYAEMLQKKAKTDPVDARILAQFGFFASPPPFVPRDEKAYLLEEIQKTIEDYQKRRTEILNHLEALRHHPFPHPRLQKLYKEELQRIEETLKTLEKEAEDLALQYAPRAYELLLSIPGVGKRLACAILGILSPLTRFRRSKELASFLGLAPQIDQSGKRKERAWMKKGESLPAETPLSFRSQCFPVQRAVQGAL

SEQ ID NO: 347783 - protein, 311 aa, unidentified
MTEQVIGIDVGKEKLDVGLTTEKKVRDWTNDEAGRAELSDWVVGQGASLVVVEASGGYEAALVSELVGRGQEVALVNPTRVRAFARAEGILAKTDKIDARVIARFGATMKPQARARREADQVALNEQITRRRQLVLMLTAEKNRLHTASAVMQAHIAHHITWLQAEMEALEAQLSQAIKANPTWAETAKRVDSVPGVGFITAATLVADLPELGQLNRQKIAALVGVAPFNHDSGKHRGKRRIFGGRASVRSVLYMATLSAIKHNPVIKAFYQHLLDKGKLKKVALTACMRKLLVIINTMIKTGQDWHPSIS

SEQ ID NO: 347784 - protein, 346 aa, unidentified
MHYIGMDCHITTLDFAVVNEAGRLVKANSVATSVNGFMEFVKTVPPPRTIYMEEGTLAAWVLETCVRFREKLVITDAKKNHWIGSSGQKGDSIDALKLAQLARGGYIKEIHHPVGQRRRFRELMIAYHDTVRSTTRIKNKIKAKFRQNGIQCNGVTVYSETYREEWKGKLPQEATLLLILEGLWRQLEQSEQTEKELLAAARAQAKHYPEIKHFEALPGIGFISAATISAILETPYRFADKRKVWMYAGLGIMTRSSGGKIYSEKLSTDYNRLLKYTLKQAAEAAIQAKDSPFRRKYLDMTLLHGIAPHRAKLTIARDMLATMWAMWRKGEKYSPEMREKAAYKQG

SEQ ID NO: 347785 - protein, 350 aa, unidentified
MDEYIAFDAHKRYTWVEREQVATGQTSHCRLEHSRGVIRRYLSRCQPATPVAVEATGNWYWIIEEIEQAGLQPQLVHPRKAKLMTGQINKTDKLDAHGLNTLQRNGTLPTVWIPPGPLRDRRELTRTRLVLVGQRTRLKNRITATLAKYGLASQASDPYGKRARAELEEQLKQLPAQTRWVTEQLLAQLDFVTLQIHQVEERLEELVEVTPAMQRLRSLPGIGVILAATIALEIGDVGRFPSAAHLASYAGTTPRVHASGGKVRYGHLRPDVNQYLKWALVEAANSVAVNHTRCPQRHVSRLYWRLRQRKGHSKAVGAVARHLAEAAFYVLRRQEGYRDPLLGAGRSSEV

SEQ ID NO: 347786 - protein, 342 aa, unidentified
MDHFAGLDVSVKETSVCIVNDTGRIVREVKVASEPEALLAVLKNPAYHFERIGLEAGPLSQWLFSALAEAELPVVCVETRHMQAVLKAQINKTDRNDARGIAQMIRVGLYRPVHVKTLLSQKLRMLLTHRKLLQSKAIAIENDLRGTLRNFGLKVGMVGKVRFEARIQELVENLPDLAELVEPLLIVRRALREQIVILHRRLLAIVRDDEVCRRLMTTPGVGPVVALTYRATVDVPARFRKSKSVGAVFGLTCSKYQSGEIDRSGSISRCGDEMMRVMLYEAAQSMLRSKKWSWLKAWAMQIARRRGMKKAIVALARRLAVIMHRIWVDGTEFRWTREAAAA

SEQ ID NO: 347787 - protein, 318 aa, unidentified
MRMAQEQVVVGIDVAKGKIDAAIRRGAEGCFANDPQGRRQLLAWLKAHAVGKAVMEASGGYERGWAQLLRGAGVEVVIVDPKRVRHFAKSAGQLAKNDPIDARMIAWFGEAFEHRGKPEDAAREELDQLVTARRAISRLKEKIDNWTEHEQPRAVQKAYQALLKEVARQQARLEAVIADRIEETESFAQRAEIIQSVPGLAGNSAAALLAFLPELGQVDRQAASALLGVAPFDDDSGKRRGHRHIQGGRRKLRCLLFTPILGAATQHNPVLKACYRRLIAKGKEHKVALVACMRKLVCILNTMLQRSEKWDPNRHALA

SEQ ID NO: 347788 - protein, 374 aa, unidentified
MENSITHVAMDTHKKQHKIALHYPCREEIVEFTINNTVRDIKKMVNKIKKHAPGKVEFCYEAGVCGFTLKRRIEQFDCRCSVIAPSLVPRKPGERVKTDRRDAKKLLMMFQAGLLTEVNAPSEHQEAARELTRLRETAKDNLKRIRHQLLKFLTRHGYVYSNGNHWTQKHITWLRTIEFTEPMLTNVFESYFDEMIYCIGRLKALDKEVELLAGSQEYKEIVGLLRCFHGIDTLTAITIITEIFEFGRFESPRHLMSYLGLTPSENSSGDKQKKGSITKTGNKRIRRLLNETSWHYRHRYVPSKVLKKRRKGQPQWAVEIADAAGRRLSKRHRHLVNKGKMPCKANIAVARELAGFIWFVVTQYHARKNIKDAA

SEQ ID NO: 347789 - protein, 417 aa, unidentified
MENKTVIFSAFIGLDWADQKHDVSISPAAGGEPVHNVIAHTPEALNEWFGKLRQQFPEGQIAVCLEQSRGALIFHLLGYDFLTLFPINPKSLARFREAFTASGAKSDYSDADYLREIVKVHHERLRPWKPDDEQSRTISFLAEGRRKAVDDRTRLINRLRSTLKMYFPQAIELVGETLHSSMALDFLHKWPQLLDIQRAKSKTIHKFYTVHNCRFPERIKERLALISSAVPLTTDRAVITSCLITLKMLIGQVYQLNSAIDEFDKELKSLYDKHPDKDIFDSFPGSGEQLGPRLLSAWGTDRDRYDSPESMQKYSGTAPVTKASGKSKIIVRRLACPKFLLQTFHEFANCSRRSSVWAQAYYEMLREHGKTHHAATRSLAFKWIRIMYRCWQDRTQYDEVKYLQALKKTNSPLLKFI

SEQ ID NO: 347790 - protein, 407 aa, unidentified
MTVAVGIDIGSCSHAVAVCHEGAQEAERKGLKIAANRGGFDDLDAWLRRQPEPVARVVMESSGHYWFNLASHLRRQGYPVAVVNPLEAKYFGKRRLQRSKSDPADARTLATFAMVDQPPTRELLVGAELREASRFAMRLTREQGQVCQRILRLVDIGFPEFAEVWDDPTCVSALAVLRRAPTARAVARMSVEKLAQLRRPGSGGRAIGPSKAAELKRLAATSVAAPELEAQVGFEMRLLIGQYDLLEQQIEEADRRVAALLDGEVAQRLLTIPWVGPSTAGTLMAEIGDIWRFADVDQLLAYAGVHPREQSSGKKGANPETSWVMAKTGNAFLREAAYRMAVVGIQHNPVIRAHYARKRAAGKSRMNAVGHCMSKALSLVWGVWRGGKAFDAAHGSAAKAPPTAPEA

SEQ ID NO: 347791 - protein, 334 aa, unidentified
MEKITTVGIDLAKSVFSLHGVDGAGRTVLRRTVRRDQLERAVAGLSPCLIGMEACSGAHEWARRFERHGHTVRLMAPKFVIPYRKSGKNDGNDAEAICEAVSRPSMRFVPVKSVEQQALLALHRVRQGFVVERTATINRLRGLMAEFGVVLPLRSVTVRRQAALAAEALPELARRMVGELLEQLHLLDERIGAHDRELGAQARLSEPAQRLMKIRGIGPITALAIVATVGNAREFDNGRQFAAWLGLVPGQYSTGGRARLGRITKRGDAYLRNLLVYGARSVLHTAAGHRDRISRWALELQARCGYHRTLVAIANKNARIAWALLARDEALRPE

SEQ ID NO: 347792 - protein, 355 aa, unidentified
MNDAKYIGLDVHQATTTAAVRDATGNLVMEAVLETKTETILQFFRGLRGSLHVIFEEGTWSAWLHDLLKPHVARVVVSDPRKNALLKDGNKNDRIDARKLSELLYLNRFTPVYHGEHGLRTLKELARSYLTITKDLTRVMGRIKAIYRGWGIPCAGQQVYAPGHRAEWLAKLSEAGVHRRAEIYYQQFDGLAPIRQQARSELLAEGRKHAAVKLLRQIPSIGPIRAALLVALLQTPNRFRTKRQLWAYVGLALRTYTSGEYRFEHGQLKRSKKVLAIRGLNRNHNHDLKNIFKGAATWAAGNTGPFQNFYEACIARGMKPHLARLTLARKIAAITLLVWKKGVCFDAKHLTQQAA

SEQ ID NO: 347793 - protein, 473 aa, unidentified
MRRHLGVDLAVTADHRACVTDEAGNVLVERRWRTSRADLDALHEAATEGMGPDDELVVILEPTANSWVAPAAYFRSRGARVHLVPPEQSADLRRYYTKHVKNDRIDAKLLARLPLLHPDGLHEALLPAGAQGTLKRVVGRRARLVREVSQHRQRIRSMLQLAMPGLNEVLGEDLGKGAMALLSRAGDPRRMLRLGCARLAAILKKATRGAWREPKAEQILACARAAVALWEGLEGCDFAEVAEDLAAECRLIRALDAEVADCDARAAGLLAELDPEGLHLSLPGFGERTATTVAGRLGGVERFHNNARVRAFTGAIPGTSESGEAGGRPRLTKAGDRTLRTALFLAAEQARRLDPQLAQIYWRQMVQKGNHHTKAVCAVMTALTSRLAVVLREGRSYEVRDIDGSPVDRATAKRIIAERYTVPAELRASHRPPRASQRMKGRSADGVRSKTSPPSPHGNGASAIHATSSAKGG

SEQ ID NO: 347794 - protein, 402 aa, unidentified
MANSPTRFFGLDIHKEYFVAVGVNADREVVFGPQRVSNYQLDDWISRVLTLNDAVVLEMTTNTYLFYDTLLPQVHSVIAVHPPSVALVTNAQVKTDKKAALALAELHAAGMLTGVWIPPHKVRDLRALIARREKMVRLSTIAKNRLHSILHRNHVTLPEKPFSPEQRTWWEGLPLSETEQFLVRSDLDTLAFAQKQVAQAEECLQKESAQDERIPLLVQLPGVAMLTAITILAAIGDSARFPTAKNLVGYAGLGTRVHNSGMTHSSGRITKTGRRDLRRAMVNAANHAIEHHPHWKKEFERLEPHLGRSKAVVAIARKLLVAVWHVLNKKAADRFADPRNVACSFFALAYRVGVRNLPEGQSALVFTREQLDRLGIGKDLQEIPWGSIHRKLPPSKLLIEKK

SEQ ID NO: 347795 - protein, 347 aa, unidentified
MVHVGLDLSRTRLDVHVMDESGAPLAVTTALPEAGGLAALVGRIGAEFGGPVYAAIESMNGARFVHDQLELAGWQVEIADAQKVKGLAPLACKTDKIDSWVLAELSRRDLVPAIWLPTPTVRAERERARWRLHLVRHRTALKNRIHATLLAFGHPCPVSDLFGTGGRELLARLALPEPWAADTTAALHLIDELDHEIAECERVLRQVGADHRYVPLLMTTPGIGWVLGYTVAAEIGDISRFASPTKLAGYTGLCPRVYQSGGKDHRGPLAKNGPKYLRWALIEAAVHAARHPVYAERYRRTKTRLGRQRGPKIARVDLARRLAEAIWHMLTTNRPFAPAGAVQSLAS

SEQ ID NO: 347796 - protein, 489 aa, unidentified
MAKRQTATTEPAHQRKNFRRRKAQAAARLQARQQAEIQRVEGLPVTHAHAAGIDIGSWSHWVCVGADQARHIREFPAPTDGLHALVAFWQEQHVDTVALESTGIYWIPLYELLEAHGIEVLLVDPSYTKHVRGRPKSDRRDCQWIYRLHSVGLLAAAFRPDEKTCQLRSYLRQRANVVRYAAQHIQHMQKALEQMNLKLTEIISDITGTTGRRIIQAILRGVRDPAKLAKYRDGRCKASEAEIAQALTGSYRAEHLFALRQASQAWQFYQQQRDQLDLQIEQQLGRMKQDRALPPLPARKRTYGRKPHEPRFDVRRALYYVVGLDLTEIEGIGEMTALTIISEIGPEVSKFATVKRFCSWLGLCPQLKKSGGRVLSSRTRPGVNRAAAAFRIAASSLHASKGALGAFLRHKKAHLGAPKAVTAAAHKLARLVYLALKHGLPYVRQTQEEYEAKVRAQQLRALKKKTKQLGLTVLEPAPAEPTTAAPASS

SEQ ID NO: 347797 - protein, 388 aa, unidentified
MSKPFDLSKSLAALEPDSTLIVVIEMSQSSWLVAARAPGLARDPLKKLPPDPEQLFKLMDRWREESRRAGRVVRRVCVAFEAGRDGFWLARLLRQHDIEAYVIHPTSIPVKRDHRRAKTDRLDTELLMRAFLGWLRGEADHCSMAAIPTLAEEDAKRPTRERESRVNARSRLVNRMKGALARLGIRGFNPKLRKAAEKLEELRTGAGEPLPPNTLAELRRDMAQLRFVADQIKQIEKAREARLEKAPREGAHPMVLMLASIKGVGLETAEMLVAEVLSRKLRDRRAVARYGGLTGSPDESGSRSREKGLARSGNARVRRGMIQLAWRFLMFQKESALAKWFEARTANGPRGVRKTMIVALARKLLIDLWRFVEDGTVPVGVELFDSRA

SEQ ID NO: 347798 - protein, 364 aa, unidentified
MDNCITWVGIDDSVKTLNIAVFYGGEENPRFESVYPNDSTGLGRLAKKLKTLPGEVRCVYEAGINGYNLHRFLTKHRIFCDIAAPSLTPRQAGKRVKTDKLDARKLARFYRAGMLTSIVIPETDQESLRDMIRAREDALEDLQRARHRLLRFLTRRGYRFIGGKNWSLGHLKWIKGIVFEKPLDQMVLDEYRLTLSEEAERLKKFEKMIEELGSQEPYKKRVSYLMALKGIKVLTAMTIIAEALDLRRFTDAPAFMAAIGVVPSENSSGEREIKGSITKTGNRHLRRVLIESAWNYQRSAVVGKTIRKRREGLPANILEIAQRCDRRLNYKFRHLVNAGKDRRKAAVAVARELAGFIWAIGQVA

SEQ ID NO: 347799 - protein, 328 aa, unidentified
MKYIGLDVHKEYIHGTVLDESGRVMKSGKFKYAKEGFEEFFQELGKAKVAMEAGYCWQPCYELLEDMGHDVSLAHPLKTRLIADVKIKTDAKASEALAQLLLMGWLPTSYVPPGDIRRLRELVRLREYLVNIQTRFKNKVHSALMKEGIRGQRGIFAKKRRGLLQSFEIDEVNRCVSILDVLDKHIRELSAMIKSIAGESQEAKWFMSIQGVGYYSAVAVLAEIGDVSRFSDPEKLCAYAGLVPSTQESGGKSAHGKITHQGSPILRWVLIECVWNHLINAEDTSLTRFFHRVARNRGKQKAAVATARKLLKVMYVLLKEKREFRDFR

SEQ ID NO: 347800 - protein, 384 aa, unidentified
MDNLYYVGLDIHKKIITFCVKKSDGEIIEEGGLPATREALRSWQGDIQYSWIGGMEATMFTGWVYDTLKPYTKELKVANPKMLKAIVASKKKNDRIDARKIADALRADLLPECYMAPAEIRDLRRCIRYRNFLVRQATRLKNKTAGLLMECGVEYNKRKLHGKRYFNNLVEGLWKIDEIPESMIEMLKFNRHILEIYVPIQKRIIAGLQKHPLLKERVERLQTIDGVGEVLSLSWALEIGDPHRFSSIKKAISYCGLCSGEKSSAGKNKRGPISKERNKHIQWVLIEAAKIAIRYNPRLAEVYEKELKGGNKNSASLAVARKLVAYLLAIDKSGKKFEYRTGGDRKAVLLDHRSARDKKRRGHRAPKPPRPIATFSPNRFVLDS

SEQ ID NO: 347801 - protein, 487 aa, unidentified
MSSCDTPQHENASEGVYDRLDLCRAKAGNLWCGKPAKQSGPDIAPNPTLSPRLGESTRSRLFSLSMSSGAGRREPIMENIYPCCAGLDVHKESVEACVRRMGPNGRLDQQTRPWGTMTRDLLAMSDWMAAQGVTHVAMESTGVYWKPIYNILESRFTVLLVNARHLKQVPGRKSDVRDCQWIAQLLQHGLLKPSFIPPQAQRELRDLTRHRTQLAEERTRTVNRLHKVLEDANIKLASVATDILGVSGRAMLSALMAGEESPVKLADLAERQLRGKIPELERALQGQVTKHHRFMLRLLWKQLAQQEELIAELDARIEEQTRPFADEIERLDAVPGVDRRVAEVVLAEVGADMNPFPSHRHLACWAGMCPGNEESAGKRTRRRIPPGNRWLKRSLVQAAWAASHTKHTYLASQYRRLVGRRGRKRALVAVGHSLLVIFYHVLKRRTTYADLGGDFFDRLEPERLTRYFVRRLQALGHKVTLESAVAA

SEQ ID NO: 347802 - protein, 372 aa, unidentified
MKTVHTKRTGQAGRPSVGADRCVARVVPSLLPKSSNSCQGYPSPHLSQGRASLEQIKSIKEDCLLEAPLIFVGIDVSKAQLDVAIRPSAQSLSVTNDRAGIKSLIKHLKKLGPQLVVLEATGGLERQVLSALIAGEIPVVMANPRHIRDFAKSIGQLAKTDRIDASVIAHYAEAVRPKPRPLPDEASLELRALSARRRQVVDMIVAEKNRLATASKVVKKRITAHIAYLEQELNDADQDLDRFIEKNAAWKENQQILCSTPSIGPVSSRTLLVELPELGALDRKKISALVGVAPFPRDSGTLKGRRTIWGGRASVRSALFMATVVATRFNPVIRDFYKRLKAKGKPSKVCLVACMHKLLTILNAMIKQNSLV

SEQ ID NO: 347803 - protein, 317 aa, unidentified
MTPAKFYVGVDVAKDWLDVAQRPEGAPWRVSNDERGIAALVERLVQLRPALVVLEATGGMEMPVVGALVVAQLPTAVVNPRQVREFARATGRLAKTDAIDAQVLAQFGEAVRPELRPFPDAATQELSALLARRRQLVGMLTAEKNRLRTATKAVRADVQEHIRWLERRLSDLDGQLAQSIRSSPSWRELDNLLKSTPGVGPVLSVTLLAELPELGTLGRKEIAALVGVAPLNWDSGHLRGKRRVWGGRSRVRAALYMAALVAARRNPVLRAFYERLVEAGKPKKVALTACMHKLLTILNAMIRHRTPWSVEHHALQP

SEQ ID NO: 347804 - protein, 419 aa, unidentified
MRTTRQEFAAYIGIDWADQKHDICLSASVEGKAEYKRISSAPEALSEWLSQLRQRFPKGKIAICLEQSRGSLVYHLMIYDFIVLFPVNPMTLSRYRKAFNTSGAKDDKPDADLLRELICVHRKHLRPWYPDDETSRSLALLAEARRKAVNDRAKYTNRLQAVLKTFFPQALELTGARLYDKVSLAFLERWEQLEDIQRAQDKTIRKFYTSLRSRSTRLINERLHLIRSATPLTKDNAIIKSSIITVRLLVRQLLSLQESISEYDLALTEMFEQHPDKDIFGSFPGVGEVLKPRLLAAFGTDRRRFEKAENIQEYSGIAPVTKRSGKTTIVHRRLACSKFLLQTFHEFARCSLKKSVWAKAFYEMQREKGKGHHTAIRSLAFKWIRIIHRCWRDRVCYDEVIYLKSLQRNQSPLLKYIAN

SEQ ID NO: 347805 - protein, 405 aa, unidentified
MTTESSVAKVVAGVDTHADTHHVAVLDAATGGVLADKKFPTGRAGYTALIAFVCAFGQVLRFGVEGTNSYGAGLSRHLRVAGHTVVEVVRPNRAERRLRGKSDPLDAITAARTAMAPERLPMPKTSDGVVEAIRVLLTTRRSAVKARTGAMQQICSILVSAPDTLRQQYEPLPAKSRLERLRRLHPGTDPTDVHAVTSRCLKQLATRCADLDREVDAIDASMRHAITDHAPALLAAHGVGVVTAATLLVTAGDNPERVTSEAGLAALCGVSPIPASSGKTTRHRLNRGGDRQANCAIHQIALVRMSSDERTRAYIAKKRAEGKSTKEAMRCLKRAICREVYRLLINPPEVPRIDDLRPLRQARGITLTTAAKHFAVWPAVISTLERGLRRDDNLATAYRQWLTAA

SEQ ID NO: 347806 - protein, 414 aa, unidentified
MTKIIRIGMDTSKSVFVLHGVDEAERPVLRRKLRRKQVLEFFAQLEPTKVGLEACGAAHYWARELRALGHEVVLVPPQYVKPYVKRNKNDAADAEAICEAMSRPTMRFVPVKTAEQQAALMLAGTRDALIRRRTQLSNTIRGYAAEFGLTAAKGLDKIEPLLARIAEAALPELAKEMFVTYAREYARLKVEIVKIEAKLMAWHKDNELSRRLEEVPGIGPIGASLAAMKVPDPHAFRCGRDFSAWLGLTPKDHSTAGKTRLGVITRAGDEALRRVLVVGATAVIQKVKQGKGQPSPWLVELLRRKPPKLAAIALANKNARIIWKLMVSGERYNPARAIAARGEGMEVPSCPSVTPCSPPSRTLRAAAGGGPTGPSLTAAALGATGPRQVGTEKRPPGRTKKLKPVQVSATIASH

SEQ ID NO: 347807 - protein, 387 aa, unidentified
MSTIYCGVDFHARQQTVCYLKIEDGEQVTIELKHQHKDEVRAFYAQFEGRVIVGLEASGYSPWFERLLEAQGHEVWLGDASEIRRRARWRQKNDRRDAELILELMVADQFPRLNRPTPQSSEILRMLRYRQKLVKLRTIGKNSLQALALQSGLSLRTKLFTKAGKQQLCTAEMSPVMAQQRDQWLALLETFDQRILETMLWLKQQTQDDQRITRLRTHPGIGLLTSLGLVHTLWPVSRFRNQRKVTAYAGLEPMERSSAERKKFLGISKAGSRLLRYLVIEAAHTAVKKDDELKRFYRHLEERRGRPKAKVAVARKLLVRSYIMLRDEIDYAEFQQRAVAARLARQSTRPTMPVSLIGQPASALRQERATETISNRGSEDIRDTRSA

SEQ ID NO: 347808 - protein, 324 aa, unidentified
MTDAVLGIDVSKNTFDTNLGAGTKARSKSFANSPAGWHHLIAWLGEHKIGQVHACLEATGRHGLGIALALHQAGHVVSVVNPAQIRDFARTKLGRNKTDQVDAVHIREYAELFKPRPWTPPSPAMRRLCELQTIRAGTVAGLTEWKNRRHSGIMDDLAQSLAKTTIQHFTSQLEAVDQAIAETIDNDVELSAKRDLLVSVNGVGEALAGIVLAELPGPDILGSNAAVTAYAGLNPQQHQSGISVNRPVRISKIGNAVLRTALYMPALSAMRYNPAVAALVDRLKAQGRLKGKQIVIAAMRKLLVLCFGVLKTGKEFDPAMAMGK

SEQ ID NO: 347809 - protein, 343 aa, unidentified
MEHYAGIDVSLERSSVCVVDGTGRIVREAKVASEPEALVAFFEQLGLPLTRVGLEAGPLSQWLHAGLSEAGYEAVLLETRHVKAALSAMVVKTDRKDARGIAQLLRMGWYRPVHRKSPPAQEIRALLAGRKLLQAKLRDVELSVRGLLRGFGLRVGEVSKGRFAARANELIAGHEMLEEVIGAMLRAREGLRAEFARLHRRMLAVARGDAVCRRLMTVPGVGALVAITFKTAVDDPARFRAAKAVGAHFGPTPKRYQSGETGVTGGIGKVGDATVRTALYEAANAMLTRTARGSALRRWALEVARRRGMKRAKVALARKLAGVLQRMWANATDFRWGEEEAIA

SEQ ID NO: 347810 - protein, 343 aa, unidentified
MDYYAGIDVSLEQSSVCIVSKDGKIVREMKVASEPDALVEFFGQLGLPLSSIGLEAGPLSQWLHAGLTAAGYETILLETRHVKAALSAMTVKTDRKDARGIAQLLRMGWFRPVHRKTDSAQEIRALLVGRKLLQGKMMDMELGIRGLLRGFGLKVGVISKGRFMARVRELIAGHSMLEKVVEPMLRARDALRAEFNLLHRQMLAIVRADELCRRLMTVPGVGPLVALTFKTGVDDPHRFTSSKTVGAHFGLTPKKYQSGETDITGGITRAGDAMVRVALYEAAQTLLTRSQRFSTLKRWAMDVAKRRGMQRAKVALARKLATVLHRMWIDGSEFRWGKEAVAA

SEQ ID NO: 347811 - protein, 304 aa, unidentified
MNGIGIDVSKRQLDVGTTDRETLQVSNSPSGFVELNAWLKKRPAIQIVLEATGGYEQPVLDFLHKAGHRVVRANAFRARKLAQGLGQIAKTDRLDAYALAQMAALVKLPAYQPLEPWQQKLREFVRARRQMMQALTVARQQQEMVRDRELRRLLQTNITRLQTLVERLGKQIAEQVAQQPQLTILKSMKGVGPGLQAVLASYLPELGQISGKAIASLVGVAPMSHDSGTIRGKRSIHGGRAEIRQVLYMASMSALQHEPRLRDFYRSLRARGKEGKVAIVAVMRKMLVILNARVRDAQSGPIPA

SEQ ID NO: 347812 - protein, 340 aa, unidentified
MSKHVVRGGEVAGLLERFAQLREKTRARTGEVFPFIVIQEAGLDGFWIDRALRNEGIESHVVDPASIATSRRRRRAKTDRIDGEALVRALLAYKRGEPRVCAMVKAPTPEEEDRRRLCRERKVLIAERVRHVNRVKGLLFSQGISGYEPLRRDRRVRLDTLQTGDGRLLPDHLRAQVRRELDRLELLLEQIKAVEAERDVALAEQQAPSAMLLGIKGIGPEFAAILWSEGLFRHFDNRRQVASYAGLAPTPWQSGSVDREQGLSKAGNPRLRTTLIQLAWLWLRHQPQSTLALWFEERVRRNGGRLKKTTIVALARKLLVALWKYVTAGVVIEGAVMKVA

SEQ ID NO: 347813 - protein, 358 aa, unidentified
MAVYPEETHVIGGVDTHKDLHVAAVVDHRDRVLGTESFPTTRHGYRLMLAWMRSFGDLRRVGVECSGSYGAGLLRYLQAAGVEVLEVTAPDKLDRRRRGKNDDYDAESAAHAAFAERHTVTPRSRDGMVESLRVLRVCRKTAVQARRIALQMIQMTIVCAPDRIREPLRSMTRMQLIRTLAAWRPDLTAYRQVEEAYRISLKSLARRYLELHDEVADLDDMIEAIVKDLAPELLAQTAIGLNSAAQLLLTAGDNPDRLKSEASFAALCGVSPVPASSGKTVRHRLNRGGDRAANSALHIIAIGRLRLDARSQAYVARRIAAGNSKLEAIRCLKRYIARDVFGIIMRRHREINQSQIAA

SEQ ID NO: 347814 - protein, 318 aa, unidentified
MLIHYIDIAKRNFVIAVSSLSKTKTETNNPKGIAHTIEYLKKHKVALVVTESTGGLEIPAAKAIRRAGIAVIIANPRQTHQFAQSQPLTKTDAKDAKMPAFFAQMTAQKEDSQTMPYQPPTEAEEVLEALVNRRNQPADMRTAEKNRLHQVHETQVGSVKQLIAHFDRLIDELDKQIDNHTHTHFDGKDQVAEQIKGIGSITTATLMAMLPELGRLSHKRIAGLAGIAPHPRESGETKFKSRCFGGRSAVRKALHMATVAATRFEPLIRDFHQRPLSEGKPYKAAVTACMRKLLTISNARMRDYFAENDTAENGIRTA

SEQ ID NO: 347815 - protein, 396 aa, unidentified
MPEIWAGVDIGKEHHHCVVINADGDRLLSRRVLNDESELLQLIGDVLAISTDVLWAVDLNHGGAALLIGMLLSHDQPMACLTGLAVHRASATYRGEGKTDAKDAFVIADQARVRRDLGLLRPGDEIAVDLRTLTNRRLDVVFDRTRQINRLRAQLLEIFPALERSLELVNKGPVMLLTGYQTPAAIRRAGVRRIETWLKNRKVRSAAALAKTAVEAAQAQQTALPGEKLAAAMVVRLAKGVMALDEEIAELDALIEARFREHPHAEVIRSLPGMGAKLGAEFIAATGGDMDAFGSADRLAGFAGLAPRPRDSGRVSGNLRRPRRYHRGLLRAMYLSAMVSITTCPASKAYYQRKRSEGKGHKQALLALARRRLNVLWAMLRDGQCYQGSPPVTAAA

SEQ ID NO: 347816 - protein, 339 aa, unidentified
MALYCGIDLHSRKSWIAIVDDRLEVVRETGVENDLVRILEVLNSYREELVGVVVESTWNWYWLVDGLMEAGYRVHLTNTWAAKQWDGLKYTDDRHDARWLAVLLKLGILPEGYIYPKEERPVRDLLRRRAFLVRKRTSFLLSMRGAFECRTGMRTNSNDIKRWTAADIEAHIDDAAAALGITCLLEPMRVLTEQIQAVEKEVLAHAKLRDEFALLQTVWGIGKIVALSVMYEVGDIGRFPKVGDFASYCRLVKTARLSVGKSKGSGNRRNGNPYLSWAFSEAAHHAIRHYDIAQRYFQRKRSKTNGIIASRALAHKLARASYHVLRDQVDFDPVKAFGG

SEQ ID NO: 347817 - protein, 402 aa, unidentified
MIFINCLGIDIGKSESVVAHYKDEVLVKEMVIQNNQNGYRYLKNYIKHLDSLFILFESTGIYSRGMKRFCEIHKIDYLEMNPLEAKFKTSSLRSWKTDKSDAHKLALLAFRMKDSKVQRQSEEIYFELRERARFHLEMEINQNRLKVELVETLHQTFPGLEKLFTNRYSKIALSIAKAFPHPDFVSTLTHDELVEKVLHSTDKGISVNKAHKYAQKLIEIQINSFPNVDKSSFLLQKVQYLCDKLLIGIEEMKEFDQEMIDLAKNTTEFENIISIPGIGELTAALLIGELGNIREFKTNKQLNAFVGIDIKRYQSGTSKSRDTINKRGNKKARRLLYLIIMNIIRGRNHYQSHIVDYYYKLREQPHGKTHKTAVIASINRLLKTIHYLIVNNKLYDYQKAPH

SEQ ID NO: 347818 - protein, 316 aa, unidentified
MTSFVGIDVSKAQLDVAVRPSGERMRVGNSEQGIAELIARLSGVGPTLVIVEATGGYQAALVASLAIAKLPTAVVNPRQVRDFAKATGRLAKTDAIDADVLAHFGEVLRPEPKPLLDEQTLALEALITRRRQVVEMITAEKNRLAQTHKSLRASIKSHINFLQRELQDIHRDLDEMLRQSPLWREQEDLLRSAKGVGRTTVATLFAELPELGKLDRKQIAALVGVAPINRDSGTYRGKRMIWGGRASVRAALYMAALVATRHNPTIRAFYERLCAAGKPKKLALTACMRKLLTILNAMVRTNTSWRSLPATAQDSC

SEQ ID NO: 347819 - protein, 430 aa, unidentified
MPELIPLVALLGIDWADQSHELSLQPVAPPGGDARVERHQLPHTPEAIGAWMSELRARFPAGAVGVAIESSRGPLIHALLDYDWVVLYPVNPRSLARFRETFTPSGAKDDAPDADLLRELLAKHRDRLRPWMPDTEATRGLRRLVESRRHAVDLRTTFTQQLTAALKEYFPQALEWAGADLGSEMACDFLLAWPTLEAVQRVRPQRLRSFYTRHHCRRPDRIEARLAAIREATPLTVDRAVIESGTLVVQMLARQLETLGASIRRFDTEIAARFAAHEDAALFSVLPGAGAALGPRLLAAFGSDRTRFPQASDLQAFSAIAPVRERSGKSWVIHWRWSGPTFVRQTFHEFAQQSIRYSGWARGYYALQRSRGKDHHAAVRALAFKWIRVIWRCWQDRTPYDEARYLRALADRRSPLTAHLPSPSTDSLAA

SEQ ID NO: 347820 - protein, 388 aa, unidentified
MHIVTDRPHAPTAIRTDLGAIFISLELSRSTWLITSLSPGGGEKMSKHTVRSGDVAGLWARFSQLKDKVQVRTGQGVPIIVIQEAGLDGFWIHRLLQDKRVESYVVDPASIATSRRRRRAKTDKIDGEALVRALLAYKRGEPRVCAMVRAPTPQEEDRRRICRERKTLTAERVEHVNRIKGLLFAQGITDYEPLSRKRRERLEELRTGDGRPLPEHLKAQIGRELDRLELTLQQIKSVETERDAMLSPSDEGTRAPGAMLQNLKGIGAEFAGVLWSEGLFRSFSNRRQVAAYAGLAPTPWRSGSVAHEQGVSKAGNPRLRTTMIQLAWLWVRHQPRSILTLWFHQRVALNGGRARKILIVALARKLLIAFWKYVTTGVVLEGAETTAS

SEQ ID NO: 347821 - protein, 347 aa, unidentified
MSEFYEGQQFVGIDLHRRRSVLVRMTETGERLETVRISNDPEYLRQVMARAGEHPEVVLEATYGWYWAADCLAELGASVHLAHPLGVKMFSLRRVKNDERDAADLADLLRMGRLPEAWIAPPATRELRGWVRHRAKLVGLRSNLKCQVHAILAAAGVQVPMSDLFGAAGQQLLATVGLAAESRARIDSLLRLITALDFEVELFAKLVAGRLRTHPGYLAIQAIPGVGPVLAAVFVAEIGDITRFHRPAQLASWAGLTPKHHESDTTVHRGRITKQGSRLVRWAAVEAVQRVGAHTGLGQVREQVGARRGRNIGVVAAARELTELVFYGMRDGRIRRLAPPPSRTPAA

SEQ ID NO: 347822 - protein, 360 aa, unidentified
MNNNTLYVGCDVSSDDNYFCFLLGDGTKLDTKCFDNNKSGANKLVKLILKHLETNSLSALIFGVEATSNYHFHLLNFIAYNELLADYDVKVYQLNAKIIKNFKDAYSDKSKTDKYDAFIIADKLRFGRLPEEYTPFNEYEPLKRLTRTRFHLAENLRREMNYFISNLFLKFSEYKKLPFSNTFGATSVALFTEFDVEEIADLSIQELIDFLVEKGKNRFSDPEGYAKEIKRIARNCYNIDRDIQDAVNLTLETSLDTIKALKSSLKRVNKAIEREVSKFQQTLDSIPGIGPIFTSGIIAEIGNISNFTDEAKLAKYAGLVWNHKQSNDYKSDETGMSKYGNKYLRYYLIQAANSVKKLLP

SEQ ID NO: 347823 - protein, 344 aa, unidentified
MEHFAGLDVSVNETSVCIVDEMGRIVRETKVASEPDALLAALKSGVYHFKRIGLEAGPLSQWLYNALGEANLPVICVETRHMRAVLKAQINKTDRNDARGIAQMMRAGLYRPVHVKTLRSQKLRMLLTHRKLLQSKAIAIENDLRGTLRNFGLKVGVAGAGKFEARIRELVETFPDLTVLVEPLLIVRRVLREQIAVLHRRVLAVVCDDEVCRRLMTIPGVGPVVALTYRATVDVPSRFRRSRAVGAVFGLTPARHQSGESDRPGGISRCGDEMMRVMLYEAAQIMLTRTNKWSWLKAWAMQIARRRGMKKAIVALARRLAVIMHRIWVDGTEFCWTRPESAAA

SEQ ID NO: 347824 - protein, 344 aa, unidentified
MDYHPRMQEVALVETETGEYDERQLSHDHGEAEKFYCDQRGVNVRVGMEATGHARWFERLMAELGFALWIGDPAEINATRVRKQKRDREDARLLLKLLRENRFPRVWVPPPENRDLRQLLWHRHRLVQMRTRIMNQLQAIAMGEGVRLRKSLWSRSGRAKLESLQLAPWAAKRRKDLLELLDHLTPKIEELNVAFEQEAWNRPEVRHLMTHPGVGPVTALAFVLIIGTPGRFACGKQIGSYLGLIPCEDSSGGRQRLGHISKQGSSLLRFLLVEAAQQAVRFDADWKRQYLHLAMRREKRIAKVAMARRLGVRLYWMWRTGWDGKQALQVGSHAGQLVRSHGLT

SEQ ID NO: 347825 - protein, 392 aa, unidentified
MEPNLISCAGMDVHEKKVDVCIAHGPLDKPPVFEIRTYSTMTSDLEDLKSWLKEHGVIAIAMESTGVYWKSIFNIMEDEFEVVLANPQHIKALRMNKTDIKDCKRIANLLRHGLVPKSFIPPRGIRELRDLNRTRRKLVGIMVSEKNRVVKVLEDANIKLSSVVTRIYGVSSLNMIRALLEKDKLSREEISDLAKGKLKKKVDVLEKALNGRLTDHHRFLLRMHLENIQYHAGQIKKLDEEIQQKMVPFQKEAKLIQTLPGISEVSASAILAEIGADMSQFPDEAHLCSWAGVCPGNSESAGKRKSGKTRKGNSFLKAALTEAAWAASRTKGSAYYAIYNNLAKRIGRKKALVAVAHRMLIDIYYVLKTGEPYQDVGAKVADERAIQRRASI

SEQ ID NO: 347826 - protein, 347 aa, unidentified
MRFYKQTHRFYCGVDLHARSMFVHVLDHEGQTLFEKDLPAGPDAFRAAVAPYRTGLVVGCECMFAWYWLADLCEDESIPFTLGHALYMKAIHGGKAKNDQIDAAKIAGLLRGGMFPMAYVYPRDMRETRDLLRRRTYFVRQRAQLIAHIQNTNSQYNLPPFDRKLSRHPDYSELAERFPHASTKLSIGADATLINHYHQTIAELERHLVRHAKVHDPATYHLLQSLPGIGKVLGLILLYEIHDIGRFPEDGNFLSYARLVRCDHESAGKKKGAGCRKIGNAHLKWAFSEAACLMLRALPAAKAWVGRQERKRGKKKALAILEAKIGRAVYQVWKKQQPFDAQKFLTH

SEQ ID NO: 347827 - protein, 346 aa, unidentified
MLHAGLDLSRRRLDVCLLDESGAAVAQTAAPPDADGLAGLVRRLGRHGEPVRAAIESMTGARFIHDELERHGWSVEIADAQKAKGLAPLACKTDRIDAWVLAELSRRELVPAIWLPDPEVRGARERARFRLHLVRQRARLKQRTHQTLMTHGRRCPVSDLFGVQGRELLERLELPEPWRSTVAASVRLIDDTEREIAAIERELRTLGAEHRYMSLLMSTPGIAWVLGYTIAAEIGEIERFASPGKLVGYTGLRPRVYQSGASDRRGPLAKNGPKYLRWALCEAATPACKHPVYRDRHERTKRRLGPQRGPKVANVDTARRLAQAIWHMLTRNQPFAPAGATLPLAA

SEQ ID NO: 347828 - protein, 411 aa, unidentified
MNNTLFVGIDISKRSNVATFMNCEGKVVGRLTFSNNGPGADRLVAKILSYYEKGDFEAIRIGLENTSVYSKNLVWFLYEHEALNEHKLSIIPLNALMVANYKKSFLDMDKDDITDSFTIADFIRIRTKLQPFKLDDRQEALKIMTRSRYNYVQALSRMKSQFLTRLFLSFSEMEAGKPFYSIFSKTSLSLLEEAFTLDELAEKPIPELVEFLQEKGGGKFQNPEEIAKVLKKAASSSYRVPAMVRESLNRTMASDMEIMRILENEIHNCDKNIEKLMKSVPAILVSIPGIGPVLAAGIMSEIGDISRFQKQESLGKMAGFKWKRNQSGKKESEDKAAVLSGNKKLRYYLVEAANRVRIHDPVFEAYYRKKYAESKTHAHKRALILTARKLVRVIFYLLKENKLYKPDVGIS

SEQ ID NO: 347829 - protein, 446 aa, unidentified
MADRVRPQALEVAHPNAAGIDIGSGSHFVAVRADADETPVRKFPSFTEDLECLAQWLTQCGVDVVAMESTGVYWIPLYELLESRGFTLYLVNSRHVKNVSGRKSDVLDCQWLQQLMSYGLLSGAFRPQEEICVLRAVARQRDMLVQYQAKHIQHMQKALTQMNVQLDNVISDIVGVTGLKIVRAILAGERDALTLAKLRHGSIRASEADIVKSLQGNWRAEHLFALKQAVSLYDSYEISIAECDEQLAQVLGRLAVHEDAPEPPKSGRGRPVKVEKFDLRKALYRACGVDLTRIEGIDVGTALTMIAEVGPDLSRFKTVKHFASWLGLCPGTKISGGKVLSGVSKRIANRLAQALRMAALAAGRSHSALGAYHRRLAARLGKAKAIRATAHKLARLIYTLMTKGEAYVDQGQDYFEQQHQQRVMKNLKKKALAMGFVLTAIEPVAA

SEQ ID NO: 347830 - protein, 341 aa, unidentified
MLYSGIDLHKRSLVIHTLDADGTTTREAQLKSDRGAVLAYFGTLSGPHRAVVECVQSWYWLRDLLGPTGVDLRLAHAKYVKAISYAKVKTDRVDARMLAQLLRTGLVPEAHMIGAEHRETRDLLRSRLQLVTRAVRCRHAVGSLLEKYNVPTPEELPELARMQAALQEEQRTLIRTHVRRVEAVLKTRLLPTADVQRLVWIPGIGKLSAYALVLEIDTISRFPTVRHFHSYCRLVPGADNSAGKVRHKRSRDGNRYLKQVFHTAAIRAAQYHPEIRQEYRRLSRRKGKIVARALIAKELASSVYWVLRKQEAFNGTFRGHVLTAKPAVWPRLASPESLTDA

SEQ ID NO: 347831 - protein, 345 aa, unidentified
MSIVGGFDVHRKQITFDYVDTETGEVSCGQVTSADRRRLAEWLERFAGRDDVAFAAEACTGWRYVIEELQHAGVVPHLADPAETAAARGRKRRAKTDRADAKLLRTLLDQGRLPECYIPPTEVLEYRALLELYHDLRREHTSWLQRIHAVLFHQGAQRLGEGGLSTPEGRNRLVEVAAGQLSAAGQVQVATGMDMLEATEAQLEELRRKLIGIAHQVRGAKSLSDSIYGVGPITALALTCWLGGADRFSSARKAVRFAGLDVTVYSSAGKRSPGHLSRQGPPVLRWCLYEAGKTHARDTAADHGYYTNVKDRIDGKRAALSEARKIVRRACHILTDLGDDAYVRV

SEQ ID NO: 347832 - protein, 425 aa, unidentified
MSEKIIVGIDVSKAFSDICILSPNNDIIKRLKISNDITGMKSLIYVLEKVEDEYEDRAVIIMEATAHYHQILANFFRKHNYEVIVINPIQSGALKNINIRKIKSDKTDAYNIALLYRIKNYNETITHSDTVNSIKKLCRQHKELTDEIVEHINRLIAFLDISFPDFKKVFTDLQGKTPLSLLEKYSTIQEVLSPENKQDIIQLIKENSHKSSSYAEVKYEKLLEAAEKSIEVCIVNLSSAVLIQTTVKVIFSLQEALKAIDDEIKRLSLLDEKFHKEIVLLQSIPGVGEYTACVVLSELGDISNFSKPKELVAFFGLDPGVSQSGTYNRKNNKISKRGSPHVRSILHMLAKSNVYPNRNREYLNPIMRAYFEKKIAEKPYKVVMCAIMRKMVQIIFAVLRNQKSFELRTPEEHQKLIREKSKLVA

SEQ ID NO: 347833 - protein, 325 aa, unidentified
MIDGILGIDVSKNTLDASMSSCNNRVRARSFANSSDGWRHLLNWLTSQKIRRVHACMESTGRYSLGIACALYEVGHIVSIVNPAQIRDFARTKLGRNKTDGVDAAHIREYCELFKPQPWAPPSEAHRRLGELQTIRSGIVAGLTEWKNRKSSGMVDAVAQSLADVTISHFTSQLGAVDEAIAQTIDNDSGLRRKRDLLLSISGVGETLAGVVMAELPGPDVLRSSAEVVAYAGLNPRQHQSGTSIDRVTRISKIGNAVLRAALYMPAMSAMRYNPAIVALVARLKSRGRLKPKQIVVAAMRKLLVLCFGVLKTGKPFDPAIAMSC

SEQ ID NO: 347834 - protein, 418 aa, unidentified
MFKIFRKNCCGLDVHKTWIYACIGITDVNSRTSYHEARFSSFSKGLRELSLWLQMYDCKEVCMESAGKYWIPVYNILEQSCFVTLAHPKYTKPQRGNKTDRKDAKWICDLFMCDMIKPSFIPPAEIRHLRDLVRYHDKLTNTLTGEKNRVRNCLTVSNLKLDDVFSDVFGKSARSITEFILAHPGESFDVSPFIDHRCKTPITEIQAAVDGAVSHEQAVKLRECLDHIDQLELHKSRIESEIMRIAEPYSVFLDLLRSVPSFNADPFTAIAILSEIGCDMSVFPSAKHLCSWAGCCPRNDQSGGKIKSTRISRAGTYLKPRLVQIANALIRSKQHPEFGERYRRIKSRRGHRKAIIAVCKMLLTAIYSILSKLVPYSPDGFLPVARPINESKVLTRTQGLQLLRLRGYTFKDDPPLTA

SEQ ID NO: 347835 - protein, 393 aa, unidentified
MDMIYVGIDVAKNKHDCCILGSSGAVLREAFTLSNDRKGFQELFSAIHEALLQEGTDQIKAGLEATGHYSENLVAFLRNSGIQPVVFNPLQVNLFRKSQSLRRTKTDKVDAKCIAQLLMSAESTPVPASYQIQELKTLTRHRSRLVSQRTKLKQCISRLVDILFPELPSVCCSATQASIRTLLLALPSARQIAVCRIDRLTNLLYAASKGRYSREKALEIKQLAQQSIGANSPASEMELRLTLQQLDFLLAQLKQLEKAIQTIVAEIHSPILSIPGIGPTLAAIILAEIGDIHRFSSPDKLLAFAGLDPSTYQSGKFTAGHTPMVKHGSTYLRWALMQAARLASIHCATFRDYMDSKLAQGKHYFVALGHVSKKLVRVIFHILTTNEAFVPQA

SEQ ID NO: 347836 - protein, 397 aa, unidentified
MATIGIDIGGRSHAVARCREGLVRADREVLRVSQSRAGFAALDTWLERQAEPVSLVTMESSGHYWMPLASHLRRQDVPVAVVNPLSAKYFARSRLARTKSDPADARSLAEMGMRDQPAARDPLAGAELRQAARFAMTLVDEQAKVCQRLIRLVELGFPELGELFDDPTCRTAREVLRIAPTARAATKRRTTTLANANAGPGHRRLGQTKAERLQAAAADSIAVPELDAEVAFEVGILLDQYDLLERQIEVADARVAGLLDGETARRLRTIPAVGPAIAATFLAEIGDIDRFSDFDQLLAFAGVHPAERSSGRKGSNPETAWHMSKAGNSHLRAAAYRMAAVVGVQHNPVIRAHYERKRAAGKSKMNALGHCMRKALSLVWGVWRNGQDFDPNWGLEA

SEQ ID NO: 347837 - protein, 412 aa, unidentified
MKTVHTKRTGQAGRPSVGADRCVARVVPSLLPKSSNSCQGYPSPHLSQGRASLEQIKSIKEDCLLEAPLIFVGIDVSKAQLDVAIRPSAQSLSVTNDRAGIKSLIKHLKKLRPQLVVLEATGGLERQVLSALIAGEIPVVMANPRHIRDFAKSIGQLAKTDRIDASVIAHYAEAVRPKPRPLPDEASLELRALSARRRQVLDMIVAEKNRLATASKVVKKRITAHIAYLEQELNDADQDLDRFIEKNAAWKQNQQILCSTPSIGPVSSPTLLVELPELGALDRKKISALVGVAPFPRDSATLKGRRTIWGGRASVRSALFMATVVATRFNPVIRDFYKRLKAKGKPSKVCLVACMHKLLTILNAMIKNKIRWSENLLTRPLDMKHSCYISGLRLRLARSCTGEFIPSADCGF

SEQ ID NO: 347838 - protein, 481 aa, unidentified
MKTKPPEKIQKATSPSTRGHWNEMNRKQRREMMRQIQSEDLSLEVVHPHAAGIDIGNESHYVAVPPTRDSQPVRHFGCTTVELKALAEWLKQCGIRTVAMQSTGVYWIAVYDILETAGLDVYLVNARDTKNLPGRKSDVQESQWLMKLHTYGLLRNSFRPSQEIRTMRTYWRQRNDLIRAAVSHIQRIQKALTQMNIQLGNVLSDVSGVTGQAILKAILAGERDPHKLAALRDPRVKASEEQIARYLEGNWQEDLLFVLKQEQEAYEFCQQQMAECDRQLQQYLQQREDRSQGASLPQEMRKGRLVRKKGNKPMFALRPELFRITGTDLTQVDGIDVVTAATILSEAGWDMSKWEDEHHFVSWLRLCPDNRISGNKVLGKGRLPTNNRASIALRMAASTLRLSNTYLGAQFRRFRTKLGAPVAIKAMAAKLARLVYRMLRYGMKYVDQGAKIYEAQHRQRQIGQLKWNAAKLGFRVVEAAT

SEQ ID NO: 347839 - protein, 338 aa, unidentified
MKLYCGIDLHSNNSVVVILDEADKVIYQKRLDNNLELILSQLSVYKNKITAVAIESTFNWYWLVDGLIEVGYTVKLVNTAAVQTYSGLKHTDDKDDARWLAHLMRLKILPTGFIYPKKERAVRDLLRKRSQLVRQSSTNILSLQNILARNTARSLSSYKIKKLDDEQAETLIEDPNITLSLKSNLNVIRCLQSTISDIEAAVLKQTRMRSEFKKILTVSGIGEILGLTIMLESGDMSRFHKVGNFSSYCRCVKSERFSNGKKKGEGNRKNGNKYLAWAFIEAANFAVRYNDKIKSFYQKKKAKTNGIIAIKAVANKLARACYHVLKDQVAFDVDKAFS

SEQ ID NO: 347840 - protein, 367 aa, unidentified
MQVLRYGIGLDMAMEKFDACISVIDADQKVTIKASRSFNNNPKGHQQLYKWVTSHCCLAVPVIFLMEATGIYHETLAYYLYSHGCSISVVLPNKAKKYKQALGLRSKTDGIDAKSLSRMICEQALPAWVPMSKTIYLLRAITRQIESVSKDITRTKCQLHAQKFAMYKNKAVINCMKQQLKLFQKQKDQLQQQALLIIESDAALNEKFEKICRIKGVGKLSLAVIIAETNGFSLFEKVGQVVSYSGYDVIENQSGKHVGKTRISKQGNGRIRRILHMPAFNVVRLKQKPFSDLYQRVHDRSKIKMKAYTAVQKKLLILIYILWKKDAAYDPSYLQTSREKEPVLSFVTADVLTRQKNSSAVEQSYTR

SEQ ID NO: 347841 - protein, 365 aa, unidentified
MRIIGMDIHRVAAEAVALLDGKLEKLGRIPMLRESLEEFARRELTHDDHVIVEATGNAAAVVELLSPHVDRVVIANPKQVRLIAHAKIKTNAIDAAVLAKLYATGFLPEVWVPDEATLALRRQVARRTQLIRHESAAEEPHPVHFIPPCPHGNLTGISGRKWIAAQRLPDDERAAVQRHLAQIDLIEGSLKDVEADIASATMSDPVIRRLMTLPGVDMAVASGVAAAIGDMRRFKDLTELVGYLGLNPSTRQSGEGPAYHGRITKQGRGQARGMLVEAAWAAARSPGPLRAFFQRVAAKRGKPIAAVATARKLTMVIWHMLTKGEYYLWVRQTLSHAPMAAACSRRCATEEAPTGPQWNAKPGRV

SEQ ID NO: 347842 - protein, 442 aa, unidentified
MRLLNANANEHPLRIKLSAHIRTGIIMEPQRNKVCGIDVHKRFLIAAILSRDGKKDTQRFSVTLEDLLKFRDWVIENGCEQVAIESTGIYWHPVHSVLEGKMDLIVANSYKIKHTPGRKTDVSDSEWIAELCLNGMIEPSRIFPKDDRELRRLTRAREGYVKQMTQEKNKIHQSLDSACIKLASVISDIFGKSGMYLLNCVLEGRDIDEIIEGIPSGRLKKKADQIKESIKSRLEISQVILIRGSLSLMKSIQERIDELDGEISARIQYRKNDLAIAMSIPGTGFVSATAILAEIGNYNDFKKPEQLAAWCGLVPSLYQSAEKTILGGITKQGSKHIRRMLIQVAYAISRTKDSKLKKFFLRIQAKKGSKVAAVALARKILCILHHLLTNKEMYIEDRDKKNKRQKPLTQPSPIEMPIQEMIDYIVRAGYVVMKSDSIGGFG

SEQ ID NO: 347843 - protein, 393 aa, unidentified
MFFVGIDIAKKSHEATVIDSNGNYSVKPFKFANSIDGLTKLLNALSAVSETISDFEFGMEATGHYWLNLYTKLTELGATVHVINPVQSDALRGLYIRQTKNDAKDAFIIAELIRFGRYSETSISDSDLLCLREMTRQRFYLVDCISDAKRKVISCIDKLFPEYQSVFSDTFGATSVELLSTYTSPDVIAELDTELFATFLKSVSRGRFGLAKAQELQTLAKNTFGSFLFADSASLAIRQFLQQIKLLEEQVDELDEFIAEKFAKFDNQLTSINGIGNTLAASLLAEIGDINRFDAPEKLAAFAGIDPSVKQSGEFNGTKCHMSKRGSPYLRRTFWLAALAGIKFNPAFRALYDKKRAQGKAHNVALSVVMRKICNIVYVILKTNKPYRIVLPN

SEQ ID NO: 347844 - protein, 302 aa, unidentified
MMLIGCDFHPSWQQISWFDEATGEIGEQKLVHATGEAEKFYRQLPAPTRIGMEATGNCQWFVEMATAAGHEVWIGDAAKIRASDVRQQKHDKRDADLLLKLLREKRFPRIWTPSSQQRDLRQLLIHRYKLVQLRAQAKNGLQHLAMNQGVQKKRHRWSKAGQKVLRELPLQPWASRRREDLLSAIAMFDQQIQSLDLAVIEAAEKDPHARLLMTQPGVGPVTSLAFVLTVGDVSRFPRSKQVASYLGLIPREYSSDEAGVFAPLSSEAEGRGEGGSGAQVGHTVVLDAAHPESVSSNRFYRE

SEQ ID NO: 347845 - protein, 620 aa, unidentified
MTNINKRHDPRNEKKKNPCRRETPIPRYDRTAEPVRHLGVGIDTARYGHHVTFLREDKELAAPPLPITESRSGYQKLQARLEQLHQRHPTAHIHLRIDAAGQYAANLETFLRSLDHLPMTVSVGEPKRNKDYHRAHSPKRKNDASESLAMARYAVVERPDASFGKPAEFAVLRRVASRVQGQTKQTTRLTNQLHETLSAAFPELATIVNDITAGWVLKLLEKYPTAQRIAAARLSSLEKIPFLGPEMARKLHDTAKHSVGTLSGQVAQELVAELVCELRHSLAEEKRWKELLEKAFDALPHGSHRQIETIKGIGKQTAAAIVATAVSIDRFETENHLVGYYGVFPEELQSGVDKFGRPIPPGKKIMCRKGNDLVRGLLWQCAKCASAANGGNPAVRELYLRRLAAGDTPQVAWGYCMTKLLRQVFGVWTTGTPFDPEHESKKQKKTETSGHKEQSSVGKEVIEAPASLEPVSAEADQPSPAHSAPNAPTRQASSGSRRSIDYQAFRDQVTFDQVLAATGHPVGSASQHRGPCPLHEPESTSGRSFSVNLKRNIFRCFDSACRAQGNVLEFWMAYRKLPRYEAAEDLARTLHIDLPTNQQQTPPTNKTKDRKLAGITPPST

SEQ ID NO: 347846 - protein, 343 aa, unidentified
MDEISMIGLDIAKNVFQIHGVNASGAPVLRRQLRRGQVEKFFAKLAPTLVGLEACGSAHHWARVIGRYGHQVRLMHPGYVKAYVKRNKNDGRDAEAICEAVGRPNMRFVAVKSVEQQATLAVHNTRDLLVRQRTAAANALRGMLSELGIVAAQGTKGLCTLMQQLEQPSETIPELMRNALLLLARQWQALNAAERVLQQQITRAANADQEARRLMAVPTVGPIIASTMLAKVPNPRMFRSGRDFAAWIGLTGRDHGTGGKHRVGRISKQGDRMLRRLLINGASAYLLHQKRRGVTDPWLRDLLARRPYKVVMVALANKTARIIWAMLAKGEEYRVRASVPAAA

SEQ ID NO: 347847 - protein, 390 aa, unidentified
MEHPMQKLNDLSRSLTALEPDGTLIAVIEMSLSSWLVAGIVPGVERQPLKKLAVDESALLKLLHRWREEAEKAGRRIERIVVAFEAGRDGFWLARWLKARSIEAHVIHAASVAVSREHRRAKTDRLDSELLKRAFLGWLRGERDHCKMVAIPTIKDEDAKRPNRERESLVGEQSRIVNRMKAALVRLGIRGFNPKLKKAAGRLEDLRTPEDEPIPPNTLAELRRDMERRRLVRDQIRQIEEARLVRLDHAPSDGPHAMVRLLARVIGVGIETADMLVHEVLSRNMRDRRAVARYAGLTGSPDESGRKRREKGLARSGNGRVRRGMIQLAWRFLMHQKNSALAQWFRARTENARGTRKPMIVALARKLLIALWRLVRQGVVPDGVVLRPAQ

SEQ ID NO: 347848 - protein, 352 aa, unidentified
MIIIGVDFHPEFQQIASVDTDTGEFQEKRLGHREDAEAFYRALAGQKVRVGMEASGHARWFERLVAELQFELWIGDAAEIRTKRVRKQKTDRQDAQLILRLLLEDRFPQIWVPSWENRDLRQLLWHRHRMVQARTRIMNQLQAVVLNEGLRCKKRLWREHGRQQLESFRLAPWASRRRRDLLELLDRLNPTIAELSQAIEQEVEKCPEAERLSTHPGVGALTALAFVLIIGRTERFHCGKPVASYLGLVPLEESSGNRRRRGHITKQGSSMLRFLLVEAAQVTVRSVPEWRSKYLHLMMRRGRKTAKVAMARKLAVRLYWMWRKGWDYEQVKKFGSHAGQPGNRDGVPSNTE

SEQ ID NO: 347849 - protein, 323 aa, unidentified
MQGKVSPERSAMTPVYVGIDVCKDRLDVYIHPVGLRLEFANSPEGIKRLKRSLKLHQVALVVMEATGKFHRAAHRSLHAAGFAVAVVNPLRSRLFAEAAGALAKTDRVDCRMLAILGESLEPDAVAPPSALMESLQDLVRCREAASDARTALLNQLGATTVWPAVAEIKRQLRAAETAIENLGAEIERRIAADPFLTRRMAILTSIPGVGIATAIALIAGLAEIGSLSAKEAAMLVGLAPIACDSGQSSGPRHIKGGRAHVRRALYMAALSAARFNPALRAFHDRLIKKGKLAKVALTAVMRKLLVLANTLVRENRKWEPLHA

SEQ ID NO: 347850 - protein, 362 aa, unidentified
MAMKAMSLVGLDVHARQTHAAVLVPDTGEVRVSKLRMAPVEVVGFLEGLGPLRAVYEAGPTGFGLARAARERGIDVRVAAPGSIPKGPGDRVKTDRRDAIRLARLLAAGELGFAFVPSVEDECFRDLVRCIEDVRGDLMRARHRLSKFMLRRGLRYPGPGRAWTAAHGRWLHACAFEDACSRAAFVDYLAAVELLAARRGTLIGTLEQQVPASSHAIVVARLRCFRGLDTLAGAGVAAEVGDFRRFPQPNRVSGFLGIVPSERTSDTKRRQGAITKAGPGHARRLLVEAAQHYRYPPRIGPTLARRQAGQDPRVIAIAWRAQQRLHQRWQHLHYERRKPAGVVAIAVARELAAFCWEAATLD

SEQ ID NO: 347851 - protein, 395 aa, unidentified
MFIVGIDVAKRSHEVCMITSDGQTVQRPFSIRNNCTGYNLMLEKIRKHTNIKSQIVFAMESTAHYWLALFTRLRKDGYHVILLNPIQTSAMRDMFIRKIKTDAKDSFIIAELIRFGRYAESNVAQDRLLALKELCRNRFYLVDMAGDLKRKLIALIDRVFPEYEALFDTIFCKSSVALLKKYPTPQKLSNAHLDKLTELLWNSSNGHFGEWKARELRELARNSFGVEDCDGAYSTLILLMLDQIQSLSEKADALEKEISRLFQSFDTTVTTIPGVGPIIGAVILSEAGDISRFSSADKLAAYIGVDPSVNQSGEFQAAHAHMSKRGSPYLRRCIWMASQVAVQRDPMFRAYYEKKAAEGLKYMTIIGHVTRKMTAVVFAILRDHKVYEPVLPTAA

SEQ ID NO: 347852 - protein, 408 aa, unidentified
MQVVYERCCGLDVHKKNVVACVLTPQGSQVRTFGTMTRGLLRLLDWLQEEGLTHLAMESTGVYWKPVHNLLEGHGIELMVVNPRHIKAVPGRKTDVKDAEWMADLLRHGLLRPSRIFERPQRELQEAVRYRKSLVEMRGDEVRRLQKVLEEANIKLGDVATDVMGLSGRSMVRALAEGEQDSSRLAGMARGKMRPKRQELRLALEGSVRPHQRFMLRHLLEHIEFLEARIEQVCAEIEERMRPFEAALRLLQDIPGVGSRVAETILAEVGRDMSHWPTHQHFASWARLCPGNNESAGKRRFSAIGSGHSSLRGTLVEAALAAARTKNTYFAALHRRIAARRGNKRAVIAVAHAILVVVYHCLKEGTIYQDLGANYFQEIDREAIVKRTVRRLERLGYAVTLQEAPSAA

SEQ ID NO: 347853 - protein, 367 aa, unidentified
MKKHTTMNKPVSATDVSVCTTVAVDLAKKVFQVAGEDALGQLAYEQRIKSREAFQAFLQKLPESVTVLMETGPGAQAWARLLQAQGNPVRILPAQRVAEHRSGAKNDRNDAHAILRAGRDSSIASVPVKSVAALAMQAWHRVRRGYVQRRTAMGNQIRGLLLEQGIALAQGDVGLKQGVTRVLEDARQPLPALLRELIDEMLNEWQRLGERIAALTGRLEACAAADPTAKRLMTVRGIGPITATALLAKQVEPERFANARQFAAYFGIVPDQHSSGQKVRLGKMTKRGDAYVRSLMVVGSHAVLKQLRPDSEHPDDRRLQRWLQRLGRKGAAVRLANRNLRIAWVLLCSEQTYQRKPNACREMEMSH

SEQ ID NO: 347854 - protein, 538 aa, unidentified
MPDSASSFSVGIDWATAAQHVSGLRPARHLTAECSLAHCGQPLAQLAALASRARYYGSTRRPRRGVPGAPGAVSTASGLAPRRETLWCTSSGESRLERQYRDRRGTKGPTGIKGGTMSDSAYSFYVGIDWATTAHQVSVLDPERHLIAERSIAHTGEALAELADWLTALVGGAPERIAVAIEVPRGAVVETLLQRGFHVFALNPKQLDRFRDRHTVAGAKDDRRDTFVLGDALRTDRPAFRRVHPENPLIVQLRELSRMDDDLPQELTRLTNRLREQLIRFYPQPLALCPAADELWLWALLEIAPTPAAAQRLTRPRVDRLLRTYRIRRFTTDALLTQLRTQALHVAPGTAEAASAHIALLVPRLLLLRDQRTDCARQIEGLLTQLEECPTVEEHPGTHRDGAILRSLPGVGRTITATMLAEAGWALAARDYHALRAQTGIAPVTKQSGKRLLVLMRLGCNNRLRYAAYHWGRGAILLDPRARAHYERLRQRGHSHGRALRGVVDRLLAMLIAMLRAGTLYDPNRRQLAILDAGEKTA

SEQ ID NO: 347855 - protein, 336 aa, unidentified
MTTFLLIGQTKVMKNIENVIGIDVSKLKFDAWDYRTSRRHTFSNDVKGFVQFSKWMTNKDSFVCFENTGYYSLALAVFLLEQHIVFAMVSPLQIKRSLGLVRGKNDVIDAGQIARYGWLHREELEPSAIPAKIVLELSQLLHVREQLVKQKVALDNMLEAYEQLPNMGSKAAIKLLKLQLKQTCQHIKKAEEAIDQLLTQTDLVTNYELLSSIKGVGRILAAQIIVHTNNFESFDNWRQFACYAGLAPFPYQSGTSIKGRTKVHPIADKKLKRLFNMAALSGIQHDPELKLYFQRKVQQGKSKMCVLNAVRCKILARAFAVVHRQTPFVPLCGFAA

SEQ ID NO: 347856 - protein, 356 aa, unidentified
MDYYAGIDVSLELSSVCIVDAAGKVVKESKVETHPDALVKFFKNLGLPLTRIGLEAGPLSQWLHGGLIAAGFETVLMETRHVKKALSASMVKTDRRDARGIAQLLRLGWFRPVHAKSLGSQEVRALLVARKQLQHKLTDIELSIRGILRGFGLKVGKVTDSTFEGRIGQLVTGHKTLEEIAAAMLSARATLLTEFTKLHKAVLDIVRGDEVCRRFMTTPSVGAIVAITYKSALDDPHRITKSKNAGPLFGLTPSRYQSGETDVSGGITRVGDEMVRTALYEAANVLLSPRTRFSPLKRWGLEVAKRRGSKRAKVAVARKLAVILHRMWIDGTAQEMPPWPSRHSPTGFDHKGRKSY

SEQ ID NO: 347857 - protein, 412 aa, unidentified
MEVVYPCCGGLDVHKKSITACVLWAEAKGKSRKEKKRFGTFTHDLLQLADWLAERGVTHLAMESTGVYWKPVWNILAEQFEVLLVNAQHIKAVPGRKTDQKDSEWIADLLQHGLLRGSFVPPQPTRELRDLTRYRVSLVQEINRIANRIQKVLEDANIKLASVATDALGASGRAMLEAMLAGEEDAARLAEMARGKLRNKIPELQLALEGRMTEHHRFLLRQLFEHLRFTESKRSEIEQEIDKRMRPFEDKVTRLCTIPGVDRVTAWGMLAEIGMNMNQFPSSGHLASWACLCPGSFESAGKRLSGKMRKGNVSLRRCLAQAAWAISMMKNNYLSALYRRIAARRGAKRAVMAVAHALLEIAYHMLKRKEDYRELGADHFDRIDVIRTRRSLVRRLERLGHKVTLEPLAQTA

SEQ ID NO: 347858 - protein, 370 aa, unidentified
MKESITSFVGLDVHKDSIAVAVAEAGRQAPRFIGTVVPRLASLHKVLRDIGHASRTLVVYEAGPCGYGLARRLSAEGYKCEVVAPARIARSPIDQRIKTDRRDALLLARESRAGNLVAVVVPDERDEALRDLSRTREDVLAARLRAHQQMKALLLRHGLTCPARTVWSAAHERTLGKVRLPHPAQEIAFVEYRNTIKDAHERLERILEALRLQSSQWRLHPLVRALMCLRGFDFIAAFTLVAEIGDPRRFAHPTALMAYLGLVPSEFSSGKTRRQGSITKAGNTHARRILIEAAWTYCHSPRVSRDLEVRQQGQLKAVRDISWRAQLRLTKRFRHLRMGRKLPQNKVCVAIARELCGFIWDIARQIKPLA

SEQ ID NO: 347859 - protein, 500 aa, unidentified
MLQLNFALLATLRQEDISVTFLSKDARQLEGARYFGIDLAKRETQLAVLDADGVQISQKRFATKRDEFLSLAGELREGDTVALEVTTNSTSIARLIRDNSNGARIIVSNPIKTKVIAQAKIKTDKIDARVLAELARVGYLPEVWLPDEDTEALRQFITDRTSLVRRRTECKNCVHSILHRNLVSQTKTDLFGTGGRHWLETIIAGTSPDGQLIPELDRLRLGSLLNEIDRIDALVADLESVIASYVAVRPHLKEQMDRLLSITGVNLVVAAGLIATIGDITRFPDKKKLAAYLGVVPSTYQSGDSSRNGRITKQGRAEARWLLIEAAEHLRRSPGPARALFTRVAKKRGHNVAVVAVARKLIELVHHLLTHNEDYIYRLPRLTQEKRARVRFLARKKLGVEIKSAAAKSAGRTALYGTGIGIQGRKLKGDIAKQAASHAERLYQAIVEQRKAKLSDPNAPLIPATDLVFDPTRPNETDWEKILSAATAKLLEKHKNKTRT

SEQ ID NO: 347860 - protein, 339 aa, unidentified
MKLYAGIDLHSSNNYVGIIDENDSRLYQKRLPNRLENILPALEPFKNNLEGVVVESTYNWYWLVDGLQEGGYKVHLANPSAIKQYEGLKHTDDKWDSFWLAHMERLGILPEGYIYPKGERHVRDALRRRLLFVRHRTSHILSLQSAITRNLGIKMPVKEIKKLNKIDADQLFDNPFLILTARNQISAIGFLSDRIKEIEKEVKSHVKIKPEFEYLLTMPGIGDILGLTIMLEVGDIGRFPNVGNYSSYCRTVKSEKLSDSKKKGEGNRKNGNKYLAWAYVEAANFARRHYPEFQSFYQRKKAKRNGVVAIKALSNKLARASYYVMRDRVPYDANYLFRS

SEQ ID NO: 347861 - protein, 359 aa, unidentified
MPFAGVDAHKRYSTVVVKDETGSLLCRASLQNDVGSFREFFGAIDGPTKAVLEAGRDWGVIYDLLEGIGVEPVLANPVKTRAIAEARIKTDTVDATILADLPRADLIPVVHVPSREVRIQKNLLRQRLWLVELQTRIKNRIHNIMDRNHVKPPPVASLFGQSGRRFLDQVQLPIPEHRLLRAHLDLLDLVQRQIGKAGEWIDEALSQRPEVAILRTLPGVGKVLSALVALEIDDVHRFSHPGKLCAYAGLVPTTYASGGKVRHGRLLPNCNRWLRWAFVEAAWAAQRSSAYCRAYFDRIKRRKGANCAVTALARRLCEITWHCLTDNRAYEERVMMRTRKELPRPPSLVLGRLGTSYQD

SEQ ID NO: 347862 - protein, 447 aa, unidentified
MPDASRSRRRRARLKVVNPRSAGIDIGSRFHVVAIPTELDDEPLRKFLSFTSDLKRMVEWLLAVNITTVAMESTGIYWVPLYEILVANGIEVFLVNARHAKNIPGRKTDINDAQWLQQLHSYGLVRASFQPDPCIAKLRAYFRQRDVLVRYRSSHQQHIQKALMQMNLQLHHVVKDITGLTARRIIDAILSGERDPKKLAALRDRRCKESVETIAAALDGNYQEEHLFELKVAVEMFDVYSAKIQECELAGQSVLQELAGDDYVEPERQASDSRIKGNGFSFNPQELIKSLAGHDLLALPGLGPATVITLISECGLDMTRWPSAKHFVSWLGLSPQNKISGGRVLSSRTRQGTTRAGSAFWMAAVPLSRTSTALGAFQRRLSARVGKSKALIATARKLAILYYKTIRYGMEFQEHGDLAYQQASRERQIHGLERRAKALGYQLVATG

SEQ ID NO: 347863 - protein, 405 aa, unidentified
MTSPRRVVIGADTHLDTIHLAAITDTGQLLGDAEFRTNPTGYWAAICWARSLGDIVSVGVEGTSSYGAGLTQALQANDIHVVEVNRPDRAARRRQGKSDPLDAHSAARAVLAGEGLAVPKDPHTNALKALLTARRGAVKARTAAIQQIKDLLVTAPAELRERYRRYTTTLTLVTALSGCRPATHKDPVAVSVLIACKALAHRVTFLQGQADELTAELDTLTATINPALRAAYGVGPDTAAQLIITAGTNPQRLRSEASFAMLAGVAPIPASSGKTTRHRLSRGGDRAANNALYRIALVRMSHDQRTRDYVTRQTAAGRSKKEVLRLLKRAIAREMFTHLTAPCPIDDYSDLRPTRQAQNITLTAAATHFGLWPTQISRLERGLKRDDTLVANYRQWLNAQLNNAA

SEQ ID NO: 347864 - protein, 340 aa, unidentified
MYNILKQVFGIDVSMDSFTVRFGTTDTKQDQQISKEETFKNTTLGFKKFIKWTKKHIISNDIPLFFVMEATGVYYEKLAYFLYSNNYNVSVVLPGKIRNYAKSLQTKSKTDPIDAANITSFGLERKLNLWKPANSTIKPVKELCREYHSTKIIITEIKNQLHAKNHSYQPDKQTILRKKQLIRMLEKQTKEIENQIKAVIKQDKELSDKIDRAVKIKGLGFISVVTAVAETNGFELVSNQKQLASYAGLDVVYNDSGIKKGKTSISKKGNKFLRKAVFMPALSASKHNQKMKELYVRLVSKGKNKKLALIAVARKLLLLIYTIWKNNTDYIPNYNPCLRK

SEQ ID NO: 347865 - protein, 333 aa, unidentified
MNKFKHFVGIDVSKEFFDAVVILDGARDKSVHNQFLNNCNGIKALCKWLKEHGSNSENTLICLEHTGMYGKLIIKYLSSSNFSLWVEMSLKIIRSIGLQRGKNDKIDAERIAYYAMKNSNEAIIYSVPRKEIDSIKNLLSLREKLVTTKASLLSNIKELKLFDKEVARLSEKLQKSTIKGIDSDLKKIEKQLNDIVNNDENLSHIFKLATSVTGIGKVTALFLICFTNEFTMYQSPRQLACYAGVAPFEHTSGKSIRSKPKVHFMANKKLKKQFHLCAMSAIMSDPELKHYYKRKVEEGKNKMLVINNVRNKLIHRICACIKNDKLYERRAVA

SEQ ID NO: 347866 - protein, 324 aa, unidentified
MTTSPTEASKLSGLSVGIDVSKDRLDVAFSDDRPAFSVDNTPEGHARIVQTLKEVSARRIVLEATGRYERVLVAELGAAGLPVVVVNPRQVRNFARATGRLAKTDAIDAKVLALFGALIQPPLRPLNDAQTQAFADLLARRRQLIHMRVAEAQRLAQARDRRVRESIEKVIELLHRQIASIDDDLDRRLQNSPIWKEKEDLLTSVKGVGTTTARTLLAELPELGKASRQEIAALVGVAPFNRDSGRFRGQRMIVGGRAVIRHVLYMATLVATRFNPVIREHYQRLLAKGKRKKVALVACMRKLLTILNAILRTQKPWRSPAMNP

SEQ ID NO: 347867 - protein, 414 aa, unidentified
MRKVYERCCGIDVHKKIIIACFLCEDKQEVREFATNTRNLRELSLWLASNGCQMIAMESTGAYWKPLYNIFELSGLDAIVVNAGHVKNVPGRKTDVNDAEWIADLLSHGLLKASYVPSREQRELREISRYRMSLVEERSRELNRLQKMLEGANIKLSGVVSTINGASSRRIIQTLIEGRTLCSEEVSELLHVSMRGRLEEIMAAIDGIISPLQRKMIACVCSHIDDMSERIAQMDDLIISNIKDYEEAIERIDEVPGIGRRSAETILAEIGMDMSRFPTSGQLCRWSGVAPGNNESAGKRKSGRTTKGNSTLKKTLVQCAVAAVKNKASFFYAQYCRIAVRRGKRRAILAVAHSMLTSIYSMLKKGERYRELGADYYDHFNTQRKINGHLRKLMALGWTPEDTIQPRETIITTS

SEQ ID NO: 347868 - protein, 338 aa, unidentified
MNLSRIGLDLAKQVFQVHGVDRHEHVVCRRQLKRAQVRDFFRQLPPCLVAMEACGSAHYWARELRELGHTVRLIAPQFVKPYVKGDKHDAHDAEAICEAASRPSMRYVPVKSAEQQAVQSMHRVRSRLVRARTALCNEVRGLLGEFGLIATRRGRAATMALLETVMATEPASLPAPMGELLRELKDELQTLEARIARLERQIQAHVRGDARIQRLLAVEGIGPISASAVAASAGDTRQFRTGRQFAAWLGLVPRQHSTGGQQRLGNISKRGDTYLRTLLIHGARAVVRCCANKTDARSRWLQGLLQRRPANVVAVALANKNARILWALLSRETCYRPG

SEQ ID NO: 347869 - protein, 357 aa, unidentified
MQEKLYVGVDLHKTQFTICVINEEGDSFEAGTKFPMDKEGYIAFAGKMKKLSRRHDGATVSIAIESTANARFFRDIMEAKGFEVTVVNTLRFKVVNLSTKKTDKNDAKTLAEFLARDILPKSHLCRPESESLRRVLKSRTLMVQDAVALKNQAHAVMLAYGYITQPAQFQSKSSRTKLLARLPAKVKEIIEIIFETLDLVESQTHVLERRLRRITIDNECVNLLMTIPGIGIVNACTIYAYTDDIDRFESYKNFSAYCGLVPWVQTSNESVYYGKITKRGPQELRTALVQCVVAMVRMPGKTADLGIMKQYHQLKDDKSSGKAIIATARKLSRIIYVMLKTMTPFDSAKLIKDDPKE

SEQ ID NO: 347870 - protein, 325 aa, unidentified
MFNLGIDGSKLKLDCVLLLETISFKIKHKVVDNSPEGYLILQQWVSAHIPQGEAWQAIMEATGVYHERLAYALHHANIPVAIINPAQLRLFALSLAVKSKNDRLDAVVIARFGAERHPKQWQPPSQEVRGLTQLLSRSEAIAKELQRESNRLEKASVTDTHAFVNESLTKSILFLKQQLKDIQQAIDELIQAEKSMKQDKALLETIPAVGDKTSTYMTMLFHQHHFEDAPQVTAFLGLIPVEHTSGSSVYKRPHLAKSGHSRLRCILYMAALVAITHNPHLRDFYQRLLAKGKAKKAALGAVMRKLVHICYGVFKHQTPYQINTS

SEQ ID NO: 347871 - protein, 465 aa, unidentified
MQHQPRRRAPKPRHSPAALERLHPHAAGIDCGAAEHFVAVPPDRDATPVQSFPTFTGDLHRLADWLTACRITHVAMEATGVYWIPIFEILDARGFQVILVNARHVKNLPGRKSDVSDCEWLRDLHVLGLLRGSFRPADGIVALRGYLRHRTTLIESAGALVQRMQKALVQMNVQLPLVVSDITGVTGLRILRDIVAGQRDPQHLAQHRDVRCRASEAELIAALRGNYRAEHVFVLQQNLELFDIYQQQLAACDRTIEGHLAQLAVTASSASPLPAARRRPRTAKDNEPAFDLRTPLHQLTGVDLSQIDGIGPYNALRLLSELGTDMTRWPTVKHFTSWLTLAPQNRISGGRLLSSRTQPSANRAATILRMAAMALGRSQTALGAFYRRLAFRIGKAKAITATARKLAILVYRTLKDHLVYNDPGAEAYEAQDRSRVVRRLRQRAEHLGFGLVNLSTGEVTPGAVS

SEQ ID NO: 347872 - protein, 337 aa, unidentified
MKVTLIGIDLAKSIFQVCGVNQVGKRVFNRQLRRAKLMAFLLQHPDATIAMEACSGSNYWGRTLQQHGFKVMLIPPQHVKPFVKGNKNDRNDAFAITEAARRPDLKCVEPRTLAQTDMIQVHRVLDRMTRQRTALINQIRGFLNEYGIVVAQGKEKLLSAMPDLLEDAENELTAPARLLYQQLLEQWRQANEAIKRIEKGLKGQASTSEDARRLMKVRGVAVKISTATVAHAGNGHGYKSGRHFSANLGLVPKERSSGGKQILGGITKRGNQYLRRLLIQGAWSVVRNADKNDDRLSRWARQLVERRGKHKAVVAVANKMARIMWSMLYHQTEYRAN

SEQ ID NO: 347873 - protein, 310 aa, unidentified
MGGVNAAVEVGKHELHVALGSAGELLSERNEPRAVKRLAKRLAEEDCARVLIEGGSYQNLLVAALRAAQLPVVIINPRRVREFAKSIGQLAKTDHLDARVLALYGEKIEPAVRQLPDEQTQALRALWVRREQLIEMLVMEQNRLEHAPKALHHDLRAHIDYLRKQIKRADDDLDRAVRNSALWDKYELLRSVPGVGPVLSVALLSNLPELGRLNRGEIAALAGVAPFNHDSGGLRGARTIQGGRGKLRRVLFIATLAAVRCNPVLKPFFQRLRAAGKPHKVALVAAMRRLLLILNAMLKTKTAWRPPCPA

SEQ ID NO: 347874 - protein, 447 aa, unidentified
MKSLSIINPHVAGIDVGSEQLHVSIAGDEPVVFGTVTDEVYRLRDYLRAQGVKSVVMEATGVYWLYAYSVLEAAGLEVVVVNGRHVRNLPGRKTDMADCQWLATLHAHGLLRGGFVPSAAIRRLQDYQRLRADHIIGAGSQVQKMQQALERMNIKFHDVISDLNGVSGLKVVRAIVAGERNPAALLKLCDPQIQKRKGERVLQSLKGTWAPEHLFALGQALSAWEFYQKLLTECDQQIEGVLKELAGPPPSNTDKIGTANKPQGKNCPQIDQLHQLLVRLCGGRDVTVIGGIGDHLLLQLVAETGTDLKAWPTEKHFTAWTGLAPGTHQSGKRKGSVKRQRNRTGRLFCAGARSLVKSVDKALGGFYRRLAARKGGLVAMKALARKMAQLYYRVLRYGLAYAEEGLRVYEQKYAETQKRLLAKLAAKQGFKLISLSLADASDLKIDS

SEQ ID NO: 347875 - protein, 414 aa, unidentified
MEKQWNIVCGADIHKKFLIATILSRDGTKITKRFGMTLDELLNFKNWVIENGCEQVAVESTGTYWVPIHTVLEGSIGLIVGNAYKIKHTPGNKNDLGDADWIAELCLNGMIEPSRIFPKADRDLRRLTRIREGYVNDMTREKNRIHNALESCGIKLSSVLSDVFGKAGQSILSGLLEGRTIDDILKGVNLKRIKATAEEIREAIKGSLDFTQILLIRGSLEQMEAIQKRIDEICREIKSRIAYRKEDLKIAMSIPGVGFTSASTLLAEIGDITDFKKPEQLAAWAGLVPSVYQSAGKLITGSITKHGSRHIRWILVQVARVIARGRNSKLKRFFLRVKSKKGSNVAVVALARKILCILHHLLTNREMYKEDGINKKIKIDIGNEFSQREMDLEEMIKYIVRAGYEVRKGSAGGG

SEQ ID NO: 347876 - protein, 404 aa, unidentified
MSVHVAPVTSSTIVVAVDVGKTSAMLSVTDGARKRVFGPVEFSMTRSGLVATVHRVEAVVVASAQVKVGVEAAGHYHRPVLDYGWPTGWEVLELNPAHVAEQRRVVGRRRIKTDAIDLEAITDLLLAGRGQLITEREVLIGELSAWAGQRSRRVATRSATKNQLLAQLDRAFPGLTLALPDVLGTKIGRLITAEFADPARLCAVGVSRLIRFAAARDIQLRRAVAERLVTAAREALPTRDGVVARRVLAADLGLLADLDTQIETAERELAALLPASPYATLTSVPGWGVVRVSNYAAALGDPDRWPGPRQIYRASGLSPMQYESAGKRRDGTISREGSVALRRALIDLGLGLWLTEPAAKAYAAELRSRGKPGGIIGCALAHRATRIAFAMVRDHTSYDPSRWA

SEQ ID NO: 347877 - protein, 391 aa, unidentified
MDRVWAGIDAGKEFHWARVLDASGAEVFSRRVENDEADLSKLIDEVLSIEEDVVWATDQPGGSAALLLALLWEKGQRVLYIPGLTVDRARDAYRGESKTDARDAHVIADQARMRSDFGRLIASEGDLAELQLLLARRRDLVADRTRSVTRLRETLLALFPALERALDLNSRGALTLVAHYQSPTAICRMGHKRLASFLRNRNVKGADALAGKALAAARAQSVTLPAEDVAARIVVELAGEALDLKEKVEALDEELRLRFFARPEAKIVASLPGMGPILGAEFLVETGDLSAFESADRLAAYAGLVPAAHDSGKRVGNDRRMRRGNKVLKRVFYQSAFASLRSAPESRAFYDRKRREGKRHTQALIALARRRVNVLWAMLRDGTTFRAPSAA

SEQ ID NO: 347878 - protein, 401 aa, unidentified
MAPTAGIDWASEAHEVCVSEEGRVNSRFSATHDEAGIADLTRRLTQAGVARVAIERPDGILVERLLAAGLEVLAIHPNQLKAARPRYAVAHGKSDRFDAYVLAELARTDVHRFRALLPDSDETKALRALTRAREDLVGARVELANQLRAQLQAFWPGALIFADVDSRVALAFIARYPSPADAKGLGAKRMAAFLQRNGYSGRTDPAELVARMNAAPKGTAGQAEQGARRAVVASLVAALGPIAEEITRLSAQIRSALAAHPDAAIFRPLFRDPKTAICPATLVAEIGDCRQRYPTEAALAADAGMSPVALESGKLRVATFRRACDKRLRFTVATLADTTRHWHPWAKEVYRRARARGQDHPHAIRTLGRAWIRVLWRCWHEKVPYDPARHGNFCRLQTAGG

SEQ ID NO: 347879 - protein, 368 aa, unidentified
MTRMPDKADLDQDREVFAGVDTHKELHVAAVIDTDDNVLGTRSFPTTRNGYRTMLTWIGEYGNLIRIGIEGTGSYGAGLTRHLAKAGVTVLEVDRPDRSDRRRKGKNDDLDAINAARAAKTNRRTTTPKSKDGAVESLRVLRVTRAHSVRERRSALQLWRMTIISAPDELREQVRDLTRMQLIRLLAAWRPDVSNATDPVTAYRVSLKSLARRYLELTDEIADLDELINPIVKALAPQLLERVGIGIEVAGQMLVTAGDNSDRMKSEAAFAMLCGVAPLPASSGMTQRHRLNRGGDRQANRALHLAVIGRIRLDPKTQAYVEKKTSEGHSKLETIRCLKRYLAREVYYLLNPGPQTITPNTRHHRKAA

SEQ ID NO: 347880 - protein, 358 aa, unidentified
MEKVYFVGLDIAKNIFQVFLADKKGRELGNRKVRRAAMTELFTQMPPCIIGIEACGTAHHWARKLEAMGHEVKLIQPQRVKAFLGQRSKTDAADAKAICEALMHPGTRFVRAKTIEQQDTDHLLSRRERLVGNRTQLVNQTRSFLAERGIVVPQGRHKFEQAIPLICAEYWEEFGGDFQAVLTENFAEFKELSAKIEEIDELIKSRATKSEVCQRLMQINGFGPLIATALVAHVGDARQFKNGRQMSAYLGMTPKEHSSGGKRHLLGISKRGNIRLRTLFILGARSAMLGLERRKKGEDGLPLRLSALERWILSLKNRVGIFKAAVALANKMVRMAWVLLAKEEAFEASKACMIRPAM

SEQ ID NO: 347881 - protein, 348 aa, unidentified
MYSFYLGIDLHRRKTYAVLIDKAGEVIDERQIMNDEAIPYLEEHVPEDTFAVLEATRNWPFMYDLLAKHVVRVELATPKELKAISAAAVKTDRIDANVLAQLARLNYLPTAYAAPKEIRDLRLYVRHREFLIRQRTQCKNRIHAVLVRYNLISPSADLFGVAGREWLAQLIDGGQLRPAAIRVIAEHLELIDQINEHIKAIEQSLELAPGQEAAVKLLTSVPGVGKTIATTIVAEIGDVERFHSPKALCNCAGLTPRVRNSGTVMRHGRISKEGSTFLRGAMTRAAMVASRSSKRWYLVHEDLLKRCGRKGAKVAVARRLLTVVYHMLTRNEPYQENYRQKQTAHRGA

SEQ ID NO: 347882 - protein, 338 aa, unidentified
MNIVFLGIDLAKNVFQLCGLNQAGKPVYTKRTGRKELLQTLANIPACLIGIEASTGAFYWQREFEKLGHKVKIISPQYVKPFVRGQKNDGNDAQAIAVALMQPTMQFVPPKSPEQQDIQALHRARQRIVNHRTATVCQIRGLLLDRGIPIGSAVSRARRAIPLILEDAENGLSSRMRRTIAELYDLFNDLGRRIHFFDKEIETVFRQSEACQRIAKVKGIGPETATAVVAAIGKGTEFKNGRHFAAWLGLVPRQHSSGDRQVLMNMTKKGDKHLRTLFIHGARAVVRVATNNNDGHMNQWVNQLKERRGFNKTTVAVANKNARIIWSMLRNDTGYQVV

SEQ ID NO: 347883 - protein, 405 aa, unidentified
MNAVGIDVSKGKSTVTIRKPGDVVLMSPCDIPHTQSAINDLIKQIKSLEGETKVCMEHTGRYYEPVATWLSDAGIFVSAVNPILIRDFGDDSLRTPKTDKADSKKIARYTLDRWAKLKQYGIMDKTRNQLKTMNRQFGFYMAQKTAMKNNLIALIDQVYPGANDFFDSPARNDGSQKWVDFIHTYWHVDCVRSKSLNAFTEHYQNWCKRKNYNFSAEKAAKIYRISSDLIAIFPKDDITKMLIWQAVALLNTASKTVESLRSKMNELASTLPEYPVVMDMNGVGATLGPQLIAEIGDVSRFTHREALTAFAGVDPGKNDSGKHIQNSVRTSKKGSSYLRKALFQIMDSLIKRSPVDDPVYAFMDKKRSEGKSYYVYMTAGANKFLRIYYGRVREYLSNLSNNETI

SEQ ID NO: 347884 - protein, 358 aa, unidentified
MNNSKYRYIGLDVHQATTSIAVLDGKGTLLMEVTIPTHASRLLEFLGGLQGTLHLTFEEGTQAAWLYDLLSPRVEQAVVCDPCYNSLLRSGNKNDRTDARKLADLLRTGMLKPVCHAPGSGGRRLQELSRSYFTLVQDTTRVMNRLKAIFRGRGMACRGRQVYSTAARSHWLQQLREPGARQRATLLYQQLDLLQALRREARRALLTASRKHPAYRVLLSVPGLGPIWVALLLARMQTPYRFRTKRHFWAYAGLALVTRTSADYRIGPGGLERSRKPVAVRGLNQNHNHDLKEVFKSAALRASRLPGPWREFFTARVAQGMKPELARLTLARKLAAITLTLWKKGERYDAQKLIAQAA

SEQ ID NO: 347885 - protein, 407 aa, unidentified
MLLIGDDWAEDHHDVELQDESGRKLATANLPEGVAGIAKLHELIARHGGELEPAEVVVGIETDRGSWVQALVASGYQVYAINPRQVARFKERYASSGAKSDKGDAHALADMVRIDRDRLRSVAGDSDAAQAVKVVARAHQTLIWERTRTFQRLRSTLREYFPAALAAYADLTLTSTDALELLIKAPTPATGAKLTRTQITAVLARHRRRNRDAKAATVRTALRERQLALPEQVTAAYAATVTAHARLLIALNEQIAVMEEQVKAHFLKHPDAEIYLSMPGIAEITGARVLAEFGDDPDRYASAKARKNYAGTSPVTRASGKSHTVQARYVRNNRLADALQTQAFCALRASPGARRYYDKQRAREIGYNPALRQLGNRLVGILHGCLKTRTTYDEATAWSHHAYPQPA

SEQ ID NO: 347886 - protein, 368 aa, unidentified
MNDIIRIGVDTSKSVFQLHGVDAAEQPVLRRKLRRRDLLTFFERLPATKVGLEACGGSHHWARQLQTLGHEVKLLPAQHVKPYVRRNKNDRNDAEAICEAMSRPRMTFVPVKTTEHQAAQMLMTTRDRLVAYRTQLINTIRGHAAEFGLTAAKGPAHVEPLLARIAEDATVPELARELFAMHGQEYGRLKLQLREIETKLKAWHRQNETSRRLAEVDAIGPIGGCLLTIKVADPKAFRCGRDFAAWMGLTPKDHSTAGKVRLGVITRAGDEALRRTLVLGATSVIKQVSTGKGSPSPWLRDLVARKPPKLAAVALANKVARIAWKLMVSGERYDAARAGILAPRPSVAPCSPRQGRCAPPAAVASGQP

SEQ ID NO: 347887 - protein, 321 aa, unidentified
MQTQNAVVYAGVDVAKATLQLHLQGQQSEFSNTPKGRHQLCAQLQKAPSVHVVCEATGGYERALVKALQQEQIPVSVTNPARVRAAAQAQGQRAKSDPIDARGLTDYGQRYQPEPTPPTSATQDQLVALTQWLKQLIHGRALAKTQAEHHQDPFVRRQHAKLMTHLQSQIEAVEKQIEALLEQDAALQQRVTCLDEIQGVGPRTAWMVLAHMPELGRLNRHEAAALAGLAPWTRDSGTMKGMRCIGGGRPEVRLALYMAALSAARCNPVLRALYKRLRAKGKLAKVALTAVMRRLLTYMNHRIKALLSETATAKAQELKMA

SEQ ID NO: 347888 - protein, 408 aa, unidentified
MGRVVEAVAPSSSMRTDGGCPVAQVNDLSRSLTTFDPISTLVVVVEMSKASWLISGAVPGVDRQPLKKLEPDATALLRLIERWRDEAVRAGRPISRIVLAYEAGRDGFWLARWLIARGIEAHVIHSASVAVSRERKRAKTDRLDVAMLMRVFLGWLRGERGHCGMVAIPTMEEEDARRPSRERESLVNERSRITNRMKSALARLGVRGFKPHLRKAPERLAGLRTAEGTGLPTNIIEEFRRDMARLALVREQINSIEKTRAERLERAPDTGPHAMVRLLARVIGIGIETADMLVREILSRKLRDRRAVARYAGLTGSPDESGLKRREKGLSKAGNARVRRGLIQLAWRFLMFQKDSALARWYRTRTEGPSGARKTTMIVALARKLLIALWRLVTHGEVPDGVELRPAA

SEQ ID NO: 347889 - protein, 385 aa, unidentified
MTIQVQVPKFIPGDYDVFAGLDVDKRSMSVVFADHDGSQRALRMAHQAGPLLNYVRKHYPGQRVAFAYEAGPTGFGLHDELVRQAYTCVVAAPSKVPRAPSERVKTNRLDSRKLAESLRGGQLQGIHVPPVIYRDLRHLVQLRDTHVRQLTASKLRIKSLLLYEGIPFPDPQEKWTARAMRELQTLPCSETVRFKLDDLLETLHFHFQAAARGTKQIRQHCLHDPELQQSIDWLLSLPGIGWIVASHLVARLGDPQQIKNGKQIAGFLGIVSSEHSTGDKENRGEITRSGDSRLRNKLIQSAWTAIRKDPELRAFYRRIYQRHPKKVAARKAIVAVARKLTQRIYVVLKEQRPYVVRLDSSIAPLTAEETVGPRDRLDAAQNDQP

SEQ ID NO: 347890 - protein, 325 aa, unidentified
MNQSITSTLGIDISKKKFDVALHLPSGKWKHKAFTNNREGFQKLTHWLNQLDVEQTHACMEATNVYGNALAEYLYDQNHKVSVVNPTRIKGFAQSELLRIKNDKQDAALIARFCESLLPDLWQPEPLSTRQLKAMVRRLDMLIDMRQQEVNRLDVSDEVVQGDIHQHIKELEQRINNIRGEIEDHINLDPDLKRKKKLLLSIPGIGAKTMATVLSYFSAIHKFASAKKLASFCGVAPREYQSGTSIKGRGPMSKIGSAHVRKSLFLPAMVALKYNPALKGLKERLSKKGKTKMVIIGAAMRKLIHIIYGVLKSNEPFDKNKVFNA

SEQ ID NO: 347891 - protein, 478 aa, unidentified
MTVICRRCAGLDVHRDKIAVCVRIRSNGKYEEHHEVFGSFNCDLKKLARWLKEHKVRRVAMESTGVYWMPVWNVLEQYRFGFDLLLVNPAQVRALNGHKTDRIDCARIAEFLQHGRLAGSFIPPVAVRQARALERRRVNLQQDRNRVTNRIGKLLQTANVKLSSVLSNIVGVSGEKILRALAAGERDGEKLAGLVHYSLAGKREAIVRSLEGRFDGHFRYLLTELLSELDHLDRKLESTTARLALYMAPHQDLFLRLCTVPGIDKIVAWTILAEIGADVSAFPDAKHLASWAALCPGNNESAGKRKSGRTNKGNKYLRRALIQAAWAAGRSKNTFLSALFLRITRRHGMKKAAVAVAHRMLVYIFHIIRDGGSYVEKGGDYFDRRNPERAASRLLARLDALDYDTSGIIRKVHKPEQPAELRSGRGRPCKCAERGFPCPRPPRLFRTLPGPKQPPPEGQLCRKCNRWGIACIHLVPKK

SEQ ID NO: 347892 - protein, 326 aa, unidentified
MDAAFSPPVVGIDVSKATLAVCHQVEAQLRHLEVANTQAGFAQLVQVCGANSLFVLEATGTYYLALAYYLHARGAQVAVLNPLVIKRFIQMHLSKGKSDRKDAQWLLRYGQQQVTPRWQPDEALLVECRQLEQVSEQLLKQKTMVSNSLEALVQQPVISQVALHQLQQTKQLLEEQLRTIENELLALLEERYAQEMTLLRSIPGIGRKTAGMLLLFAGGFTPYTNHRQLVAKAGLSPREHTSGTSIRGKVRITKMGGGLIRTKLYLCSLSAKRANAGCKALYDRLVAKGKNGKLALIAVCNKLLKQAFAIVKSGVPYQADFARAAV

SEQ ID NO: 347893 - protein, 428 aa, unidentified
MSVKDYNKQVEKRQRIRDTTLVVGVDIGNAFNALGYMNKEGKVLGSCAKLYNNRKDFEHFVEMTERLKAQYKLKDVLIGMEPTGHYWRKLAYFAREQGYEVRFIRTTAVKHHREIDESSSAKNDPRDALTIANITREGKYIDTVIGDGAMRQLRTLAKTRERLLRYSVSAKNALHAALDDYFPELHEIFKAMGTRSLWAILQSSPFPCDVLTKKVSFFQNLIAKSSRKKAGSAEKARALYQAAHRSIGLKSVGDADRFRVKICLEEVKRTVLTLKDIDRQMKEIVKEMPSAPYLLSIPGIGHLSAAVFLGELGNPAHFHNARQIVKYAGYDPQETDSGSWVSRKFISKKGRWLLRKYLFFMSMRVVVLSKYFQEYYQRKLEIKNRVGQQPKRKEILCAVAIKLIKVIFALLRDKRKFQDKVSVIAVHN

SEQ ID NO: 347894 - protein, 340 aa, unidentified
MSSLTCGLDVHSDWTDVTVRRNHDGKIVRSVRRLPNGRILEFLKENPDISRIAMEASTSTVPLYRELEGAGYDDVLVSHPKKTRLIAESVIKTDRVDSEALSELARLNALPLAWIPDQETAKLREKVRRRAYLVRMRTRMKNKIRMQLLYEGIKDPGFGVFTKRGVGWLHSLGLDSVESYLPVMSVLSEQVEKLSKELMAMAPADEDAKLLMTVPGVGYYSALLIKSEVGRIDRFPDGEHLCSYAGLVTSVSQTGRSKRYGPITKQGSSWLRWIMVQCAIIHVRKYDTSITRAYHAIAQSKGKNKARVAAARRLLMCCDSVLRNRRQYYDPSGHYKPDDE

SEQ ID NO: 347895 - protein, 401 aa, unidentified
MNAVGIDVSKGKSMVCVMRPFGEVVLEPFEVLHTAQNLHDLAEKLKALDGETRVVLEATGNYHKPVAFVLHDAGLFVSVVNPVLIHDYDNNSLRRVKTDRKDAVKIANYTLDKWTRLRQYLPEDDTRLALKNCYRQYQQAVAIRTMLKNNLISSLDLTFPDANKLFTSPAKSNGCEKWVDFIGDFWHSECISSLSANAFAKKYLKWCQKHGYVFTRSKSDEIYACAVNSASLPKSPTSKLLIQQQVAQLKAVSQSVAAFRQEMLRLSQQLPEFDTVMEMYGVGPSLGPQLMAEIGDVRRFSSKKSLIAFAGIEPQPNDSGKVVGNDKGISKVGSAVLRRTLFLIMTVILQTQPQDEPVFQFMNKKRSEGKPYKVYMMASANKFLRIYYAKVKAVMDSERSQ

SEQ ID NO: 347896 - protein, 417 aa, unidentified
MNSSPETIPIQRYVAIDSHKEYVFIGGMNDRQKWILRPRRVQMSRFRDWARKNLKPGDAVVLETTGNVWDIYDVVAPLVTKTVVAHAGKVRQIAEARVKTDKEDVKRLITLLIANIVPEVWVPPMHVRELRSLISFRWRLSKQITMSKNRLHSVVQRFNLNPPEGQLLADSNLSWWDQQDFSDLTDFQVECDRGIVDYLETQKAKVDQKLAELSNTEPWAADMVFLMQIPGFGLLFSMIVLSAIGDISRFESPKKLVGYAGLGAGVHDSGKKHQDKSITKEGRKELRWALVEAAWAAVRSDPYRKAQYEHFIQTKHPNKAIVAVARKMLVSVWYILTHREPYCHVDDDTLAYKMVIWSQRMDPKALNGMTRQQFVKYGLLRLGTGQHLTRIVKNGSPRRIAPADEVFALKPELRPPS

SEQ ID NO: 347897 - protein, 470 aa, unidentified
MISAQKEKDKRMLEPGSGKEPEPDGIPVLRPLVAGMDVGSKSHWVCAPTIDGSGREVKEFGATTPELEKLGQWLGERKVESVAMESTGVYWIAPHEVLERQGYEVLLVCTRHMAQVPGRRKTDRIDCKWIQRLHSCGLLRGSFRPAEQICMLRTLVRDKSNLVAEQADWIRRMQKSLDQMNVRVHRAVSDIQGATGMAIIRAIVGGERDPAKLAELRDPGCHKSAAEIAEQLSGHWRQDHLFSLEQSLKMYTAIGERIQAYDQEILKQLEKLEPAQRHGQPAPALKNSNKAKMIRQRGEEPMRQALFRMSGVDLAAIDAVGVGVAQVVLTEYGPDLSRFPSERHFVSHLTLAPQQAVSGGRPLQKKKKRGSASHRVAAARRSAALSLQHSRTALGAYFRHTANRLGADVAAFATARKLATHIYRLIRWGQAYIDSGADAYEKSYQAARINRLRTNATQLGYELVAKASSA

SEQ ID NO: 347898 - protein, 459 aa, unidentified
MGNARARKVPAQLVEDEDYQLRHERVAGIDVAKAKADVCTRLPPARDGGRRASRVEEVPARAMEILDLAARLVADGVELVVMESTSDYWRIWFYLLEAAGLSVQLVNSSHARQLAGRPKTDRLDAQWIARLAEMGLLRPSFVPPPEIRALRDLTRTRLQLVRDRTREWQRLEKLLEGALVKLSSAVSSLARTKTARVILEALAGGERDPKALAALAAGQVKGGRAAIERSLDGMQIGARHPMLIRVHLDHITFLDRSVAALEDEIEAALDAIPAAWGISADGEAGPDAGHGPDAPALAAADRLAEIPGISPGLARAIIAETGLDMTRFQTADHLVSWAGLAPVTRQSGPRSRRPGKGQGDAYLKGYCTQAAAGAARTDTFLGERLRRLSRRTGALRARCAVARSILVIVWHLLNDPEARYRDLGADWHERSGDRDRKIQAHLRQLQALGLEVTITSPAA

SEQ ID NO: 347899 - protein, 348 aa, unidentified
MKQVTTIGLDIAKSVFLVHGVDAAGEAVLRQKLSRSRVLEFFAKLPRCLVGIEACASSHYWARELMALGHEVKLMPAQYVKPYVKRGKNDAADAEAICEAVARPTMRFVGVKTPEQQSIMMLHRVRLILTRQRTQLSNALRSHLAEFGIVSPIGREGLDRLLTIVADTDDGRVPAEARASLEMLAVQLEGVKAQILANDRRIIASARATEVGRRLLEVPGIGPVLASAFVASVADPAIFKSGRDLAAWIGLVPRQNSSGGKERLGGITKAGNGYLRQMLMVGAIAVIRYPQRNSARRPWLVQLMGRRPTKVAAIALANKTARTVWALMSSGERYRDPQAIPAAVSATL

SEQ ID NO: 347900 - protein, 421 aa, unidentified
MTPPNEVVWAGIDTHTDTHTIALLDERGRPLGAETFTADPDGYDRLIGMLPGPGRVAAVGVEGTNSFGAALARRLTAAGYEVREVLRPRRSVRRRDGKSDPLDAVAAARSVMAGDGTSLPKSSDGWVEALRHLNARRSQLVSAMTAIPDSTNGLLAAAPEPIRERYRGLRSETRMNRLAECRPAGGLVERSVLAALKSAAKAWKALKRQAGLLEERMRLILEEHARPLLDMYCAGAVIAATLAIVAGDNPERIRSEAAFAKLCGVCPIPASSGRTNRHRLNKGGNRQGNMALHRIAIVRLRYHKPTRDYMAKKTREGKGKLEIIRCVKRFIAREAYRALISIRNGEVGRGTPAERGAKLRELRVSRNITQQQIGEALCVPSSRISEIERGARDLPELEQRAIQWIHSTTNPKQHTQTLDNV

SEQ ID NO: 347901 - protein, 347 aa, unidentified
MKIMRIGIDLAKTVFQIHGVDAQEKPVCRRQLRRRQLLEFFTNREPCLIGMEACSSSHHWARKLQAMGHTVKLIAPQFVKPYVKGNKNDANDAEAICEAVGRPSMCFVTVKTVEQQDLQALHRIRSELIRQRTAKVNQIRGLLGEYGIVVAQHVPALCKALPEILEDAENGLSVYFRTLLDGLRADLVYLDEQIDRPDQDMQHQGSTNALARKLQQLRGVGPITATALVAAIGQNAGQFKRGRDLAAWLGLTPAQHSSGGKDRLLDISKRGDAYLRTLLIHGARAVVRTAAGRSDRLSLWIQNLCNRRNKNVAAVALANKTARLVWALLSRKVDYDPAYGLEGCKTT

SEQ ID NO: 347902 - protein, 339 aa, unidentified
MEIKRIGLDLAKNVFEVHGVDEAERVVLRKTLRRGKVLEFFAQLPACVVGMEACGGGHHWARKLSELGHDARLMAPQFVAPYRKSNKSDRNDAEAICEAVGRGSMRFVPVKDEQQQAVQMLHRMRSLQIAERTALVNQTRGLLAEFGIVVAQGLGRLRARLPEILEDGENALPDLARELFADLRERLVALDAQIGAYDRRIEQLARASAVAQRLMRLEGIGAVTATALIAGAGDGRQFANGRQFAAWLGLVPREYSSGGKIRRGRISKRGDAYLRTLLIHGARVVYRHLGERADRKSQWLRQLAARRGVNKAVVALAAKHARILWALLSRGGDYQPVAA

SEQ ID NO: 347903 - protein, 376 aa, unidentified
MNNVRFVGLDVHAETIAVAVAESGGEVRSLGVIPNRAESVGRVIRKLGKPESLRVCYEAGPTGYVLYWQLSELGVKCEVVAPTLIPVKVGDRVKTDRRDAEKLARCYRAGDLTAVWVPDAAHEALRDLVRARLAAKRDQLRARHRLGKFLLRHGRRATEGLSAWSAKYLAWVKTQHFDHAAQETTLLDYLHEVEHAAERIARLERAIDAAIDTLPVKLRAVIEALQSLRGIAQLSAVSIMAELGELSRFEHPRQLMGYSGAVSREHSSGERIRRGAISKAGNAHLRRIVVEAAWAYRHRPAVGKTLTARQRHCSAAVTALAWKAQHRLHKRYVCLMARGKCKQQTVTAVGRELLGFIWDIGVQVERDVKVPLRQAA

SEQ ID NO: 347904 - protein, 347 aa, unidentified
MKHYAGIDVSLNSSSVCVVDESGKIVREVKVPSEPVALIHCIQSFGVRVERIGLEAGPLSQWLYGALRECELPVELLETRHVKAALSAMPVKTDRNDARGLAQLMRLGWFRPVHCKSMAAQEVRALLTARKLVQSKLYDIEMSLRGILRGFGLKVGPTTSRSFAARINHLAAGHPSLEMVAEALLSTHAAALCAFKNLEKNVRQISRADARVRLLMSTPGVGPVVALTYISAIDDPKRFTSSKPVGAHFGLTPKKYQSGETDISGRISKTGDSSVRAVLYEAAHIILTRPIHGGALKSWAMRLAKRAGMKKAKVALARKLAVVLHRMWISASTFDFEKANGCMRAAA

SEQ ID NO: 347905 - protein, 310 aa, unidentified
MNSISVGIDVSKGLLVSSINQAKPFELANSLQGSRTLASMLPEGSIVHLEATGGFERQVRKTLMESGFTVRVHNPCNARRMNQALSVRAKTDPVDAVSLSRSGHLLPEREPKSVEREMLADHSRAIEAISETIADFKRRLKQPNLDDVAATAYLKVVDDLTQRKLELKKSFAQRILNSSLREQYKLAQSLPGVGAYTAARVLVELPENYLEVDPDQIASYAGLAPMDHSSGKYKGTARVGMGNPHLKGALFMGTQSLIARDAKVKAKYHRLRERGHAHQKAMVALMRHRMTLLIRVLQRGTPWQKEPPTP

SEQ ID NO: 347906 - protein, 314 aa, unidentified
MSASTCFIGIDVSKDQLDVAIRPTDEKMSFANEDDGIDMLIKRLLPLQPHLIVLEATGPYHQLVLGRLLASGLPAIAINPRQSRDFARAIGRLAKTDSIDANVLAEFADKIRPELRSLPDDATQQLDAICTRRRQLVMMLAAEKNRHHSGPAAIRAQIKKHIVWLEKQIAELQRDLDKLIRSTPAWREKDDLLRSCKGVGPTTSHTMLASLPELGTLSRHRIAALVGVAPFNSDTGKHRGQRHVQGGRIDVRCVLYMATLAAIRSNPVIRAFHQRLVQAGKAKKVAITACMRKLLTILNAMVRTNTRWTPNFVS

SEQ ID NO: 347907 - protein, 349 aa, unidentified
MYNAVGIDVSKGKSTVAVLQPAGVIIRKPFNVNHTSSELDELAKYIGSLEGETRVVLECTGRYHEPVVKTLSEAGLFVSAVNPHLIKNFGNNSIRKVKSDPADAKKIARYTLDNWIELRQYSSMDNTRTQLKTLNSQFSFFMKQKVAAKANLIALLDNTYPGVNKLFDSPVRDDGSEKWVDYAYSFWHVDCVRKIGLKTFTERYQAFCKKHHYNFQPAKPAELFLASKDLIAVFPKEASYKLLIQQSIQQLNLASSHVEELRSKMNELASTLPEYATVMGMYGVGKTFGPQLIAEIGDISNFSHREALTAFAGVDPGVDQSGTHNSKSNKASKCGSNMAVQNLCPKSQS

SEQ ID NO: 347908 - protein, 368 aa, unidentified
MKKYKLKQDSIAISQEIWIGIDAHKKTLHFSVINEDDEVLWQNSVPHGRSHVQSVIDRLPGCKIVAVYESGPTGYSLRHWLKEMGCTAFVTPVSKVPENKGGKQIKTDKRDSLQLARLARAGLLDEVHDLGKERYCQRELTRTREQLMQQRSKICSQIKSKLVFHSIETPKGMKSNWSKKYLAWLANNPSGNPSLDVALNVMVGMYRALTTQIKRLDKEIKELAETDEFEEEVELLTTVPQVGVLTAMIFLLELGDISRFDRCEEFSSFLGLVPGEWSTGEKRRQTSRVRWGNKRARTALVETSWWLIGKDPRMRKTYDRIKYRSGHSGTAIVAVARRLGLAMRAMLREGKAYDYPGAQQEKTEEAES

SEQ ID NO: 347909 - protein, 348 aa, unidentified
MTAGLDLGDKYSHMCLIDTDTSEVIEEGRLRTTPEALRRRFDSEQPLKIAIEVGTHSPWVSRLLEECGHEVLVANARKLRLIYGSKRKTDKLDAENLARLARLDPKLLYPLKHRSEASQAHLAMIRSREALVGSRTQLINHVRGAVKSFGARLPRCSARSFHKKVAEDLPKELVSVLGPLLETIGELTERIREYERKLEEITSEHYPETELLRQVAGVGALTSLTFVLTLEDPHRFSKSRSVGAYLGLVPGEDQSGDSDPQQQISKEGDEMLRRLMVGSAHYILGPFAPDSDLRRHALKIAEGGGKSAKRRAVVAVARKLSVLLHHLWVTGEVYEPLHNAQRSGDQAA

SEQ ID NO: 347910 - protein, 367 aa, unidentified
MEEGTTYVGMDSHKRTIAVSVRYPGGGRDERTIPYETRAVNRLVRKLKREAPGRILCAYEAGPCGYGLQRELQKQGLECQVIAPSLIPRKPGDRIKTDRRDARMLAELLEGGLLTEVHPPSPEDEAVRDLCRAREDAKEDQVRARHRLSKFLLRRELRWGRKNWTIAHQQWLRGLRLPHPADQAIFDAYCIALDQATERVRMVDLALKDWALIEPYATPVSWLRCFHGIDTVSAMTLVTELHDFRRFRRPRELMSYLGLIPSEHSSGGRTQRGGITKTGNGHARRILIECAWHYRHSARVSRALRKRREGQPARVIAIADKAHRRLSDRYRRMTARDKEHNKVVVAIARELVGFLWATLAVEERTAA

SEQ ID NO: 347911 - protein, 350 aa, unidentified
MLIIGCDFHPTFQQIAYVDTETGEELQRRLNHPVGAEQFYRSLAGRQVRVGIEATGNFRWFRRRMAELGFELWVGDPSAISASNPRKQRTDKRDAEHILRLLLEDRFPRVWMPSPAEEEIRGLLVHRCRLVRLRTRVMNQLDGMAKNEGLIGIRVYTGQGRQRFQAVALGGWQQQQRRDLYALLDDLNGRIVPLDREVAAVAEARVEAKLLMTHPGVGPNVSLAFVLAIGPWQRFPRGKQVASYLGLIPAEASSGKKRRLGKLTKQGNSMVRWLLVQAASLAQNKDATWHRQYRRLALTKHHGIAKLAIAHKLAIRLYWMLRSGQNYEQVRERGSHAGQSGCLTGKTTCR

SEQ ID NO: 347912 - protein, 347 aa, unidentified
MSEHTPTTMGIDISDQWSTVCVLDTDGEVMEESRFRSTRAGLGRYLEHRAPMRVVLEVGTHSPWMSRQIEELGHEVFVANPRQLRLIYQSDRKCDAVDAEALARLGRVDPKLLRPIRHRAADTQLARAQLRVRDMLVAARTRFILSVRGMAKSMGEVIPRASAESFHVGVPGAVSAPVWQVVEPLVEAVGGLTAKIKGCDAALEELSLTRYPETAALRQISGVGPITALAFVTTIEDPHRFARNRSVGAYLGLCPRRDQSGASDPSLRITKAGDPYLRRLLVGCAHYILGPFGPDSDLRRWGLAYAGRGTNSKKRAVVAVARKLAVLLLSLWKTGETYEPTRHAAAA

SEQ ID NO: 347913 - protein, 367 aa, unidentified
MSSIAHRGFVHLGMDVSRDAIAVAVLSPDRDTAEVDKVFHDADSVRRLVKRLGRPKGIWACYEAGPTGYDLQRLLTSLGVRCDVVAPSLIPKGSGDRVKTDRRDARRLAGLHRAGELTPVAIPTPAQEGVRDLCRTRGDMVQDLTRARNRLSGFLLRHSVVWRGGSPWTERHRRWLATLAFDDPAIATTYSHYLATVQLRDSALESVEADLLPWCAKDPFGDQVQRLAAYRGVTRIGGLCLAAEVFDWRRFPRARGFMSFTGLVPGENSTGLTQRRGSITRAGNAHLRGQLCEAAWSYQHSPNVGVGIRERQVDVPPETVARSWAAQVRLSRRFRQLAAHKNVRSVVAAAIARELAGFLWAEMVAQV

SEQ ID NO: 347914 - protein, 371 aa, unidentified
MKSIIDIGMDVHKKTYSLCAVLKESGEVLSETRIPADPDLIIKFIENAKSIINQPDAEIKAGYEAGCLGYSLYWQLAQRGIDCDILAPSTMQRSAKNKVLKNDRRDARNIAVNLAGGTYKSVHIPTEEDVEIKEYIRMMHDFKIESKKVKQHINAFILRFGHQYPGKSRWIPAHIKWLKELKLNDMHREILDEYLSQLDILTEKIERFQNRLEELSQKETYREKIGQLRCIKGIDTTVAMTLHAETSDFDRFPNAKAFASYCGLTPSEDSSGDKIRRLGITKQGNSMIRTALVEAAQVLVRGTIGKKGKKLKSKQKDQDVKVIDYADKAMVRLQKKYHRMILKGVSRNIAITAIARELSCFVWGIETGHLD

SEQ ID NO: 347915 - protein, 429 aa, unidentified
MSYRIAGIDVHKKMLAVVVSDVEVDAEFQFERGMFGSNPEQLRALAAWFVEQEVEEVVMESTAQYWKPVWEALERYWKPLCEKREGAKRRSGRLHLAQAESNRGRRGRKRDFVDAERLVKRLVARELTLSFVPDAEQRLWRTVTRKKFQLRRARIRLQNQLESLLEEAHIKLSSFVSDLLGFSARRMLKALAEGETNPAALAALADERLRATPEPLSDALGACTELNDVYRRLLQMALEECRLIDEQIGKLDQEMASLLSQHQDAVERLAEVPGLGVDSAQQIIAEVGPTAATFPSEKCLSSWVGACPGEEESAGVNYSHRSPKGNRHMRRLLNQAANAAARTKGSIFEIVYRRAVPRLGHNQAIGVIAHRQCRLIWLILHQRVRYEERGPAVSKRSKQLRTWKMIRDLRRLGYRIESPNLQPSQAQAQ

SEQ ID NO: 347916 - protein, 352 aa, unidentified
MQSQITAIPKLFIGMDIHKKSWSVHVRTDLFDHKGFSMPADAEKLWEYVNHHFAGYEVSLTYEAGCCGFSAARYFLNVGWQVKVVNPGDVPRSDKQQYQKTDKLDCRNLCKQLQQDQLQGIYIPSEEMEQLRSLLRQRNQIVKQLRKAKSHIKSLLLFHGIIVPEQYDNPHWSKDFIKWLTSIKWEHTTGAACLQSKLRILALLNSEYQQTSNELRAYCRKHYTKDYYLLKSIPGIGGILAAAILSELGDIRRFTNEKAFSNYIGLVPSIHQSSETDNKKGISPRCKALLRSYLIESSWVAIRTDPQIQAYYRKHVGRNPKNVIVKVAHKMCRRILSVIKNETPYQVNYSKG

SEQ ID NO: 347917 - protein, 389 aa, unidentified
MKYVGIDLHKKTISGCVVVKERGQKKIAARKRLECRDEAGIKSWFSELGKFEVVVEATASYEWFVKLVEPLAQRVVLAHPKKLRIIAESKRKSDKLDAQVLAEFLASDEIPLAYRPGPRVREHRTLVRWRNYIQRRLTSVKNKLRHILAAYNADVPHLFTAEGRAHLATVKLSAADRFVAEQLVVELEQHQERLVTANCRLREFAASASLAEREARAILDSIPSVGPVTTDVILAELGDWRRFRSQAEVASYAGLAPGFRESAGKAKQLGITKEGSRLLRWVMIEFAWRMVGASRKWGGHYHRLEARVGAKKAIVAIARRLLGMIFALLRTGRKYSLALESPRPASCRSKSPRDTNPSELACLRGQPRQASSLGAGVYYGGPLSVPERE

SEQ ID NO: 347918 - protein, 346 aa, unidentified
MEQISRVGMDTSKRFFQLHGVNAAEEVVLRKKLRRKEMVEFFRALAPTVIGIEACGSSHHWARLLRSFGHEVKLIAPQLVKPYVKRGKNDGADAEALCEAMSRPTMRFVPIKTAEQQAALMLIGLRERLIGNCTQLSNAIRGYAAEFGFTAAKGMAHLDPLLERIQADESLPLAARELFAVQSKEYAQLRGQINEVEAKLKAWHKSDECSQRLIKIPGVGPIGAVLLKMKTPAPEQFRTGRQFAAWIGLTPQDHSTAGKVRHGGITRAGDEALRAVLVAGATAVIQQAVRYGGRASPWLDALLKRKPPKLAAVALANKMARVAWKLMVTGDSYSTKSAPAALASRV

SEQ ID NO: 347919 - protein, 358 aa, unidentified
MQTKGTKINFKGQKIYIGIDVHLKSWTVTIMIENIVFKTFSMDPSPEILANYIQKNFPGGHYFAAYEAGFCGFSAHREIEKLGIHCIVVNPADIPTKDKEKKQKEDKRDSRKLAKSLHNGDLEGIYVPSKKMEELRGLIRYRKTLVKEISRNKCRIKSYLYLNGIRIPESLNTASQHWSGKFTQWLKTIRFTTGYGDMVLLETLDTTEHLRKKLLKINRELRMINKDSEHSRILKLIQTVPGIGLIMAITLIAELENILRFKNLDKLCSFIGLVPSTKSSGEKERTGPITSRANMNLRSNIVECAWTAIRNDPSLAYSYNELCKRMKSCEAIIRIAKKLLNRIRYVIKNETEYVQSVI

SEQ ID NO: 347920 - protein, 429 aa, unidentified
MNYTQNEKIEQVTDSTIVVGVDIGSQIHYARAFDNRGRELTKRVFSFHNDLEGFNSFNLWAETLKSENKKTAVLIGCEPTGHYWFAFAKYVKDHQKRLVMVNPFSVKKIKELDDNSPKKTDSKDPKTIAKLVVDGRYSIPYVPEGIYAEIRDLVYSRDRIMKQHNISANRIQRWLAIHFPEYLGLYTIFDAASGLAVLEKAPTPKDVIALGVNGIRKIWHDKKMRGRGVTEDRAKTLVGAAHNSVGLDGGIGTKSELYMLLEEYRLWTSQLEAVNKVLEEMILKVPHVEKLLAIKGVGSITIAGFIAEVGDIRRFDSPKQIQKYAGLELVENSSGKHKGRTRISKRGRRKLRKILYQVMVPLLARNREFREIYDYYVTRVKNSLKRRQAMVAVSCKLIRVFYAVLTKGMEYDRFKMMSDIHRKSDIIAA

SEQ ID NO: 347921 - protein, 394 aa, unidentified
MLQQRDIGRSTAAFAPDETLVVVVEMSRSTWLIAGLLPGVNRRPLKKLKPDENVLMRLLEGWRQEALAAGRTIARVVVAYEAGRDGFWLARWLRAHGIEAHVIHATSVTVSRDRRRAKTDRLDTALLMRVLLGWLRGEVGHCTMAAVPEISEEDAKRPTRERENLVAERTRLVNRMKAALARLGIRDVNPALRKTAGRLDTLRTAEGTKIPGNTLAEMRRDIARLRLVEDQIAEIERERLQRLAKLNPERSRAAAMVHMLSRVVGLGVETADMLAHEILLRDLRDRRAVARYAGLTGSPDDSGARRRERGLSRAGNARVRRGMVQLAWRFLVFQKESALVAWYRERTADGRTRTRMAMIVALARKLLIALWRMVKTGELPEGVRVRPHATAAAA

SEQ ID NO: 347922 - protein, 342 aa, unidentified
MEYGAIDLHTQDSQIRIVSEDGAVVLDRRIRTRTDRFAAVFGDRATMRILLETGTESEWVAQCLEGLGHTVVVADPNYAAMYGARVRRIKTDRRDVAALAEANRRGVYRATHRASAAAQHLRRQLQVRAHLVTMRTELINLVRAQVRAAGYRVPSGGADAFGARIARLHLPAALQATLTPALAALAALQPLIATEDRQARATAAADPIATCLQTAPGVGPITALTFRATLDDVRRFAGPGPVTSYLGLVPREHSSGAHQRQGSITKTGPGQLRALLVQSAWSIWRVPTSSPRLHAWVHRLAARRGRGVAIVALARRLARILYAMWRDGRPFVAARLHDRVAA

SEQ ID NO: 347923 - protein, 351 aa, unidentified
MEIIALDAHKRYSLAQVEDAQGKVIRRARIEHQRGQIQHFLRHCTSGSTVALETIGNWYWIVDEIEAAGMRPVLVHARKAKLMMGKVNKTDRLDVLGLNWLQRAGTLPEVWIPPKELRDKRDLSRTRMVLTGMRTKIKNRIHSVFAKYALHDFGEVSDIFCKGNRNMIEERTKELPPETRFTTQCILEELDALQGRIVHIETRMRNAVEETQEIKLLMTLPGVGFILAVVIAYEMGDVERFPSPGHFAAYAGTTPRVHASGGKARHGSLRPDVNRYLKWAFIEAANAICLNKELHPYWHVSRLYKRIHERKGHPKAIGAIARHLAEAAYCMMKKREPYKDKGVASVSSRKA

SEQ ID NO: 347924 - protein, 413 aa, unidentified
MRVMIERVVGLDVHQETVVACVLIGKPGERPTKEVRTFRTMTRDLEALREWLLSLGVTHVGMESTGISWKPVYAVLEGSFELIVGNARHIRNVPGRKTDVKDAEWIADLVRHGLIAKSFVPPPPLRELRDLLRYRRKLVESQAAERNRLLKLLETANIKLASVLSDVFGVSGRAMLKALIEGTASAQAMADLAKGQLRRKRADLVLALEGRVEEHHRFLLGRQLRRLEAAEEEIAALDARIDEKLEPYRAPHTLLMQIPGVDRLVAAVLIAEIGIDMSVFLSVYHLASWAGVCPGNHESAGKQKSGRARNGNVHLRTMLVGAAISASRAKGSYLKDKFYRLKARRGSMRAALAIAHKILVAAFHMLAKGVGYREIGEADLDQISQTRTVANLKRRLERLGFHVTLQSKAQPAA

SEQ ID NO: 347925 - protein, 315 aa, unidentified
MSIAPMSTRTLFVGIDVSKEKLEVYFQNKSFELLNQPAALAKFMHQLLELEVPVQIICEATAGYEEALLQSAHHHGVPICCVQPLRVRQFALSKGLLAKNDRLDARLLADFGQSIQPRLTPPTSALQKQIGELLTFNRLLIEQRTAVSNELEHFHSAQARRLVQKVLKNLQTQIERISQKLKALIAKETPTAQRIQRLCSIKGVGFQTALSVSCFLPEIGSISTKQLAALVGVAPFVRDSGPRCAKRSIRGGRAKLRSQLYMAALTASRYNPILRDVYQRLIQRGKPKKVALVALIRKLLIAMHYILKKPSLVSS

SEQ ID NO: 347926 - protein, 342 aa, unidentified
MARSSSHYRLFVGIDVAATTCAVAWMHATTSPSRAISIDQTAAGFAALQHKLLSIEPDPQAILIVMEATGTYWMRLASSLVAASFAVAVINPAQAHDFAKALLKRSKTDAIDAQTLTELGARLQPQCWTPPPQVFTELQQRLVHRDGLVAARTQFRNQLHALVQQPIVIASVQTRLETLITTLDKEIATLEQEIAAALQQEDAWAAAAARLASVTGLGTLTIAWILTTTINFSLTITPEAAANYAGLAPQLRQSGSSVRGRPRVGHGGNARLRRALYMASLSAIQHNPVIKAFYTRLRAAGKPRKVAVCAAARKLLRIAWAVATKEQDFDPAYATSSRQEVA

SEQ ID NO: 347927 - protein, 370 aa, unidentified
MSSVSHRGFTHLGLDVSKDSISVAVLEPDRDRAAVRKISHDEGSVRRLIVGFGDRSRLWACYEAGPTGYELYRLLTGFGVRCDVVAPSLVPKRRGDRVKTDDRDARKLAGLHRAGELAVVAVPSPAQEAVRDLCRTRGDMVEDLTQARNRLNHFLLRHAIVWRDGSNWTLRHRRWLAGLHFDDRALATTFGHYRAAVEVREHSLEAVEGDLARYYDEPPFGAQSHRLAAYRGVTRMGGLCLAAEIFDWHRFPAARSFMSFTGLVPSEHSSGLHEHRGNITHAGNRHVRAQLVEAAWSYRHRPHIGAGIAARHQGLAPEVIARAWHAQLRLSRRFHHLAARKNVRSVVAAAVARELAGFLWAEMTADTASP

SEQ ID NO: 347928 - protein, 412 aa, unidentified
MEGETVIAGVDTHKDVHVLCLLDGLGRKIWSGSFGADPEGYDRLAEAIGDPGSCMVVGVEGTASYGAGLTRRLVELGYNVVEVLRPKRDKVRPGEGKSDPLDAERAARKAASGKGCSVPKSQDGWVEAVRQLYVARRLAVATSTSCVACAKSMLTTAPSALRERFRGRERPKDLMPLLARGRKAGDALEESVLASLRSVAAVWKEARSQVESLDERIRALLEANAPALLGVEGCGTTTAAALVVAAGDNPGRLKDEAAFSMMCGASPIPASSGKTDRHRLNRGGNRQANWALYEIAIKRMAYDERTRRYVARRTSEGKSRREAVRCLKRYIAREVYHVLMDPNPDGAAPEGPELAKMRKAMRVTQKKAAAELGLSAATLGHLERGKRRSTKLERRYYELLCELERALPQTAS

SEQ ID NO: 347929 - protein, 394 aa, unidentified
MVVSVGIDVSKDKHDCFLISSEGEVLADAFTIPNTLDGFHGLLQRIQDCTEPQDKIKVGLEATGHYSYNLLGFLLDNGLATYVLNPLRTNLYRKSLSLRKTKTDRVDARTIASMLLSDAGLKPYTDIAYHNEELKSLTRYRFGKVKERAKLKSSVSRLVCILFPELEKLVPSLHLASVYTLLEEFPGAKQVAAAHLTRLKALLETASKGRYRRDMALEIRDAARNSIGSRMPAKSLELQHTIRLIRELDREIAEIEEQIQAIMNELRSPITTISGLGFRMAAMILAEVGDFTRFDSPDKLLAYAGMSPSTYQSGQLKNCYPHMEKRGSRYLRYALYNATKYVCHWDPAFADYLAKKRAEGKHYNIAISHAAKKLVRLIFALEKSRQPYYSTALV

SEQ ID NO: 347930 - protein, 339 aa, unidentified
MIEVTTIGVDLAKKVFQVHGVDALGKVVIDRAVRRRQVVAYFAKLPPCLVGIEACATSHYWARELSKLGHTVRLIPPAYAKAYVRRNKNDRADAAAICEAVSRPSMRFVAIKTAEQQAAAGIHKVREMLMKQRTMLMNALRGLMAEFGIVVAEGPQHIHELVELLVEPADSPIPAPLHVGLVQLAEALNGLEQRLAIVDKQILEWGRSNPTCRHLISAPGYGPILSSAMAAMVIDPTSFRNARDFAASLGLVPRQEGTGGKVKLGPISKRGNGYLRRLLVNGAMAVLNSKRARQDPWLVKLLQTKNRKVAAVALANKMARIGWALMMRRENFRVMPVAA

SEQ ID NO: 347931 - protein, 460 aa, unidentified
MTRKRRKSTKVHCDAPVIRKDAAGIDIGARQIHVAVPADRDSEPVRTFAVFTEDLLALADWLQAVGIGTVAMESTGVYWIPLYQILEARGIEVYLVNARHVKNVPGRKSDVSDCQWLQFLHSVGLLNGSFRPEQDICVVRALLRQRDSLVRMAASHVQQMQKALNQMNVQIHHVISDLTGQTGLAIVDAILAGRRDPQELARLRDRRIKASPETIAKSLVGDYRPEHLFTLKQALSSYRHGQQMMAGCDQEISQHLVQLEALCEPLPAEPAPAAPVKRGPGRPRGSNTAEAKLQRQLHRIFGVDLTKVPGFNVTTVLTLFTEVGPDLSQFRCAPALASWLGLCPGNKVSGGKILDAKTRRVQSRAAEAFRMAAFSLHGSQSCLGSFYRRMRAKLGAPKAITAAAHKLARIFFHLVTTKQPYDASVFAQQEAAHRNRREQRLKAEARACGYQLTPIAATAE

SEQ ID NO: 347932 - protein, 476 aa, unidentified
MVVPNEEPKKPTRRKKPAKPSKSRERSLPVPVPASAAALSVINPDAAGIDVHSNMHMVCVPADRDANPVRQFGANTADLHELAAWLKKCRITTVALESTGVYWIPLFELLESEGFVVNLVEPGQLSRCGARPKTDVLDAQWIQRLHSYGLLRASFRPPDSVLALRAYWRQRQMQVRYAASHVQHMQKALDQMNVKLTQVVSDITGVTGMLIIGAILEGERDPIQLARLRDERCHHTEEQIALALEGTWRPEHLFELRQAHDLYQFHHRQITECDQQVQAELGRFPNRAGEKTRDAKPRKRGRKRNDVRFEAAGPLFQALGVDLTLIEGIDVGTALVILAEIGVDVSRFPTEKHFASWLRLCPPQNQSNQTKKRPGHRKGTSRVTIALRMAARSVGKTMTPLGLFYRRIRSRIGGLGAVKATAHKLACLVYRMLKYGQEYVTQSMEEYEAKVKANLLKALKRKAAAMGFELSPLPTR

SEQ ID NO: 347933 - protein, 367 aa, unidentified
MMGWMAPLRHLSAKLLSDRISSEWEPSMGEVTTIGLDLAKHVFQVHGVDAEGATVLRKQLRRAQVLAFFSRLPPCLVGLEACATAHYWGRELRALGHEVRLMPAQYVKAYVKRNKHDAADAEAICEAVVRPTMRFVPVKTADQQAAVLLHRGRERLVRQRTGLVNALRGHLAEFGVIAPQGLRNVGKLIAIVRDERDARLPDLARQVLQVLAAQIEQLEAAVAAIEKQLMAWHKSNPVSQRLASVPGIGPIIATAIAATVVEPSGFRSGREFAAWLGLVPRQNSTGGKHRLGGISKRGNQYLRRLLINGASANLLRSKATNADPWVIGLRRRRPPLVVAVALANKTARIAWAVMHRHENYQRVAAAA

SEQ ID NO: 347934 - protein, 452 aa, unidentified
MRKPQLIKDEGHQQVHERVAGIDVAKASAAVCLRTPDKPGCSQVWTEVAATMGSVTELGRMLLKERTELVVMEATSDYWKIWFYVLESLGLMVQLVDPAQVRQLRGRPKTDKLDAQWLARLAGWGMLRPCFVPAAPVRVLREYTRARADLVRDRTRCWQRLEKLLEGALIKVSSVASKINTESVKDMIRAMTEGERDPQVLAGLARTRMKAKHGALVQALTGMWQEHHGVLARQLLDQAAYLDTLIGEVEGQIAVTVAAIPAAWGVDADGVTGPGAGHGPDAARLDAVTRLDEVTGISAQRAMAVIGEIGLDMTRFPTPGHLVSWTGLCQAANQSGPRLRKGKKKHGNHYLRSILCQAATGTRDTSTFLGERYRRIRRRRGAAVAQTAVARSILVIIWHLLADPDARYTDLGEDYYTSRISKEKKIRGHLSQLRALGVDLITAPPKDSAPAA

SEQ ID NO: 347935 - protein, 349 aa, unidentified
MNILAMDLGKYKTVFCEYSAIDGEHTFATVKTTPREIHDLIVEKEPDRVVMEVCSIAGWIGDITEALGIETEIANPMHEAWRWKNVKKKTDKEDALKLAKLSAMGQLPTVHMPPKPVREKRALIKHRQRLVHYRTSLKNAIRAIFARQGIAITRGAAIWSREGLQWLKGEAREFAQISDAAELWRGQLQVELKLLRAVTDSLKVVEGKLDKMGAADRQIKRLQTIHGVGPRLAETVVAFLDDPKRFKSGKEVGSYAGLVPRQYQSGQMERQGRTGGRGNKMLRNLLIEVCWASLASNAWARDTYKRLLRGSPSRKKIAITGLARRLVVRCWAMLRDEQNWKEPMPTSTG

SEQ ID NO: 347936 - protein, 348 aa, unidentified
MTVYCGVDFHARKQTISYLTTEDGEVQQAELHHEQDNIRGFYAKLLRQGPVIVGFETSGYAAWFEELLEDLGCEIWIGMPAAIRRQARRRQKNDRRDADLILELMLRGDFPRLHRYTPASREVLQQLRYRHRLVKLRTIVVNSLQYLALSRGVSLRTKLLTGRGQQRMKELKLPSHLAKQRDEMCELLQELTAKIETAESWLELKAKQDAQVERLMSHPGIGPLTGLCLVYTLEQVERFANPRKVTAYIGFDPVEDSSGERQRIGSISKQGSRLLRFLLVEAGQVAVRTDPDLKAAYWRVQLRRNHQKAKVAVARRLLVRAFIMLRDEIDYAEFQRRGVAARSTRRTA

SEQ ID NO: 347937 - protein, 338 aa, unidentified
MSRYVGVDLHRRRSQVVILEEDGEKVSSVKIDNGDPAGFVGAVLGAGEGSDVVLEATWGWYWAADLLKEAGFIVHLAHPLGVKGFQNRRVKNDDRDATLLADLLRMGSLPEAWIAPPELRELRELVRYRHKLCELRSGLKSQIHAVLGKEGVIPQLVELWGPAGARWLDSLELGDSYRDRIVSLRRLVGYFDREIKRLDREIHSWLRDDVGYHEIQRLDGVGPVLAAVFIAEIGDVSRFTSAKQLSSWAGLTPRHRESDTTVNRGPITKQGSVLVRWAAVEAVARYQGGPPIRDAYQRIAQRRGNKVARVAAARKLLTLVFYGIRDGEIRCLQHEAAA

SEQ ID NO: 347938 - protein, 424 aa, unidentified
MNLTQNDRLKQVTSDTLIVGVDVGSQTHFCRAFDWRGFELSRRVFKFSNTGMGFLTFLRWTEELMNKTEMKKVIVGCEPTGCYWLTFQKFLQDHAIQLVTVNPFTVNRSMELDDNSPEKSDLKDPKTIALLVKDGRYSTSYLPSGVYAEIREASVCRDQIMKQHVRLSNQIQGWLQKFFPEYFECYAEWDSTSGLMLLKEAPLPQDILKIGAGGINQIWRDAKVRAAGIKRAQTLVEAAQNSVGLEAGEAARLEIWVLVNDYILKAEQLKRLDEYLEEKVKEVPNVEKLLAIKGVGMSTVIGFIAEVGDIGRFTDPKQIQKLAGLEIVKKSSGKKKGQPRISKRGRRKLRRTMYESAKALMLWNPAFQDVFLYYRNRTRNPLGGMQAKIAVACKAIRVFYVVLQTGCDFDEEKFRKDIIRPEAA

SEQ ID NO: 347939 - protein, 455 aa, unidentified
MTRDKKKQKAIRVNEEMPVMNPNAAGIDIGSTEIWVSIPPDRDEQPIRQYETFTRDLYAMADWLKQRGIESVAMESNGVYWIPVFEILEGQGIHVVLVNAKYAKNVAGRKSDWLDCQWLRMLHAFGLLPASFRPAAEIAVLRSYLRHRQMLIDYAAAHIQHMQKALTQMNVQLANVVSDITGTTGMQIIRAILKGERDPHRLAAMRNYRTKNDEDTIAKALEGHYEAQHVFALKQAVEIFDFYQQQRLACDQEIAQHLKSLESRIDVDSHPIQPARAQKKNRRNSPGFNCRYEAYRISGADLTQIDGISESSALTILSEIGTDLTPWKTEKHFASWLTLCPNNRISGGKILQRRTRKSSNRVHDVLCVCAQTLLNSRSALGAYARRMRSRLGPQKAIVATAHKLALLIYRLIRFGKDYVDIGQDAYEHQYQQRTLKSLARKAKEFGFQLVALTET

SEQ ID NO: 347940 - protein, 416 aa, unidentified
MKCFVGIDVSSEKLDSCFLDDEKNILCQTSYVNDTLGATALKKQILQLHQIYDFDKVVIGMEATSMYSYHPAMNFHQDEQLQEIQAITTIENPHRIKQYAKMFDTDKTDTIDAFMIADYLRNQHYTTSPVKEEKYMALQRLTRARYQTVCQLVEVKQHFIENLSYKCNTLKKELRDAPGSTTVFSAAIMELFTQDLSMDDLAQLPLDDLADWLQKKGRGRFKDPQDLAKTIQKAVRTSYRLDKAVNQSVDIVLSVFVREIRGLEKAIKDLDKAIEDLVQAIPEYQCVTSIPGVGKVYAAGLLAEIGQIERFKDQAHLAKYAGLFWKKHESGKHSRENTPLTKKGNRYFRYYLVEAANSVRRYLPEYQMYYRKKYQETPKHQHKRAIVLTARKFVRLVDTLLRNHQLYTPPRSVIEK

SEQ ID NO: 347941 - protein, 343 aa, unidentified
MQIRSVGIDLGKTTFHLVALGDNGKALLKKKFTQKQLITFTANLQTSLIGMEACSGAHFLGRALRAQGHDVKLIPAQFVKPFVKSNKNDFIDAEAIAEAVDRQNMRFVPIKTDDQLDLQALHRVRDRLIARRTSVINQLRAFLLERGLVFTKSPAKLRERMPEILENATEDLTPRMRNLLALLWNEWKDLEQQVVDLNQEVELIASSDAACARLRQIPGIGPLVATAIVAAIDNGAAFRKGREFAAWMGLVPKQYSTGGKAKLAGISKRGNRYLRKILIHGARAVVLRSKRERITMGAWMTALEARAPRNVLIVATANKLARIAWAVLSTGQDYQAVQEPVPA

SEQ ID NO: 347942 - protein, 367 aa, unidentified
MKKLTTTMMQETLNKYDGRLTVGLDLGDRSSFYCVLDGTGDVLLEQKVSTTPKALNEIFGAMPRSRIAVETGTHSPWVSRLLSELGHETIVAHARSVRLIGESRRKDDRLDAMTLARLVRIDPRLLCPVKHRSAEAQADLTVIRARAALVRTRTMLVNAARGLTKSYGERLRGCNARGMKSKAAQDLSPELKYALEPMMHEIESASERICQYDQMLESMARNRYPKAERLKQIKGVGTLIALTYMLTLEDPCRFRKSRDAACYVGLQPGRRNSGQSEPQMHISKEGDPYLRALLVQAAHHVLGPWGVDSDLRRWGMRLAEHGGKRGKKRAVIAVARKLAVLLHRLWVSGDRYVPLRPGGHATLPAVA

SEQ ID NO: 347943 - protein, 428 aa, unidentified
MIDSEDSRLKQFRQLKKEIRGSTQYLIVGIDVAKEKHHAFFGTPNGKTLFKRLVFENSIEGFERLLIQVDALKTQHALDKVVFGLEPTASYHKSLAEHLIKCGYMVVMVGGESIKSNRKLLDGRWNSNDTKDAANVADLISQGKCLFYEYPAMALRELRSLLSLKKRFKKQEHGLRVRIRNNLLAQYFPELDKYYGSAERQILSIVQWCLNPSVIAGLEYDQFRRQVAPQLRTPAQKKRIESIWRLAVDSIGCDAGESLDFEGKMMVAALKQTREAIQKMDDKIEEICLELPEYSYLLTIPGFGPDVSSRVLAAIGNPLRFQNTHQVLKLAGLDLSAKRSGESSDRAVPVISKKGKADLRYALYQAALVASTRNPHFIAYFTATLRGREREKGIKTKMRVKLEAKMLIIAWTLMKKKEPFDPSYLKAE

SEQ ID NO: 347944 - protein, 343 aa, unidentified
MDHFAGLDVSVKETSVCIVDDTGRIVREVKVASEPEALLAVLTNPNYHFKRIGLEAGPLSQWLYSALAEAGLPVICVETRHMRAVLKAQINKTDRNDARGIAQMMRVGPYRPVHVKTLRSQKLRMLLTHRKLLQAKAIAIENDLRSTLRNFGLKVGMVGNVKFEGRIKELVENLPDLAILVEPLLIVRRVLHEQLGILHRRLLDIVRNDDVCRRLMTVPGVGPVVALTYRATVDVPARFKNSKAVGASFGLTPSRHQSGESDRPGSISRCGDEMMRMMLYEAAQVMLTRTNKWSWLKAWAMKIARHRGMKKAIVALARRLAVIMHRMWVDGTEFRWTQDVAAA

SEQ ID NO: 347945 - protein, 369 aa, unidentified
MEHDTIYVGLDDSKRKLVVAILRPGATEPEEREMPKDPSHIQRLFRRLQREGPVRVCYEAGVSGYDLYRQITACGGTCQVIAPALTPRRPGQRIKTDRRDARKLVRLLRAGELTPIHVPDEAEEAARDLVRCREAVRRDVVRWRHRLLKLLDRHGRLWVTEKNWTQRHWRWIHAQHFELLALQRAFEATVFALEQALARQAELDKEIEALANTAPYRDPIGWLRCFRGIGTLSAMVLLAEIVDFQRFRRPRELMAYLGLVPSEYSSGETQRRGALTKAGNTHARRVLIEAAWHYRHRPGVGRALASRSQAQPEEVVGQAWRAQQRLHRRYRHLVGHGKRPPGAVAAIARELVGFLWAAMTRRETRAHVA

SEQ ID NO: 347946 - protein, 403 aa, unidentified
MNSVGIDISKGRSTVAVMRPFGEVVISPFEVHHTDSELSALARRLKSLNGETRVVMEATGNYHAPVAKLLHDAGLYVSVVNAKLVHGYGNNELRRVKTDKKDAVKLANYGLDRWLTLPRYVPEEGARLLLKNCYRQYRQYSKVQTVLKNNLISLLDTVFPNVNRLFSSPIRGDGSEKWVDFVAEFWHCRCVSEKSEKAFANKYQRWCKKHGYNFSVAKAHTIHAEASGHIGVMPKSETTKLLVEQAVAQLRATSVALTALKREMLTLAAQLPEYPVVMGMFGVGPTLGPQLIAEIGDVRRFYSKKALVAYAGLDAPPNDSGDVTGKHKSMSKIGASSLRRTLFLVMSVYLRSAPLDEPVYQFMDRKRAEGKPYRVYMMASANKFLRIYYATVKAYLESLEHTI

SEQ ID NO: 347947 - protein, 445 aa, unidentified
MSERTIACEAPCISMTTDSAAVRATKGKPMKPWIEITHYAGFDWARDHHDVVIVDRQGQIVADFRIEHSLAGWQEFRDKVKLYPALAVAIETNQGAAVDQLLPLDCAIYPVNPLSAKSYRERKAPSGHKTDRLDAWSLAEALRLEGQQWKALQPLDPLTQQLQLLCRDEIGLIEQRTALINQLQQALVEYYPAALQSFEDWTQPFCWDFIIQFPTPETLVAAGRRRWEKFLHTQKLWRPETASKRMEIFQNACQFTSSAAVTSAKSLLALSLAKLLNALQLQLDQYRRQIEGLFKQHPDHDLFGSLPGAGRTLGPRLLGEIGGNPQRFEDTEALQCVAGTAPVSFQSGQIHRVRVRYQCNKILRHTVHLWAQCSLRACPWADVYYRQKRAEGKSHACALRCLGQRLLKILWRMIQTRKLYDADLHARNQKQHGSWVLTLTTQKAG

SEQ ID NO: 347948 - protein, 330 aa, unidentified
MKNYEEVVGIDVSKKTLDAYCHQAQVHKVFVNDIMGYKSLLKWVLKVTKESKVFYCFENTGYYSLKLALYLDSQDIVYVEESPLKIKRSSGIVKEKTDQLDAFLIARYAWLYREELEPSIVKSASHLELGRLLALRDQLVRNNAGLKGSLKELKILLSSPTTDCGCISLKRSIDYLEKQVKGLETRIKEILSEDASMSKNYELLTSLKGVGLVVACQLIYHTGNFTRFASWRAFSSYCGTAPFKHESGTSIHRRKQCHYLGDRKMKSLLSMASVSAIQHDSELRLYYKRKLAEGKDKMLAINNVRNKLIARAFAVVKRGTPYVVLQQHAA

SEQ ID NO: 347949 - protein, 430 aa, unidentified
MDLKPIAGIDVSKYFSEMVVISPTNEILARLTIRHNNPSDFDRAIEILKKVEEDFAARPIIVMEATGHYHKILSRFFNCRGWDVSIINPLQSNSIKNAGVRKVKNDKIDALWIALTFRLTNSAIAQPSSETLDCLKNLCRQYYNLSDELTSYKYRLTSCVDQIMLNFKEVFPDICSKTSLAILENYPTPNDILSADSEKLISIIQQTSKKSYQWAKEKYELLIQKAKQFKPFSISDLATVTMLKVYINMVLTLQQNIDKIFEAINQLVQQSSQTQPSISENINLLQSIPGIGFLTAATILAEIGDFKKFSKPNKLVAFFGIDPSVNQSGQFVGSKNKMSKRGSKILRRILFTIALANIRTKRDSKPCNPVLLEYYQKKCQQKPKKVALGAVMRKLICIIFAVMRDKKPFELRTPEEHIQKCFNKTAVCCV

SEQ ID NO: 347950 - protein, 320 aa, unidentified
MTIELFVGIDVSKDTLDYALRPTGTQAQTPNSTDGVAQLVTALQPLCPTLVVVEATGGLERAVVAALSAAQIPVVVINPRRARAFAKAMGYLAKTDRIDAAGLAELGDRLRPEVRALPDATAQELAALVTRRQQLVALHTAEVNRWHTALPAIQPGIAAHLTWLETAQAEVEQEIAARIAAHTTWQETAAIVDSAPGIGPVTAAVLVATVPELGHLSGKCIAALVGVAPIAQDSGKRHGKRYIQGGRSAVRAVLYMATLAATRHNPVIKAFYERLLKAGKLKKVALTACMRKFLVILNAMVKNGTYWDSGAEQAPESTTA

SEQ ID NO: 347951 - protein, 424 aa, unidentified
MKVTYQTCCGVDVHKSFLVATIVKTTGGIEPSYQKKRFSTFNNSILEFKQWLINNNCHDVCMESTGKYWIPVFNLLEDQINVTIANPKWVKAVKGNKDDTKDSKWIGDLFRLGLVKGSYIPCKIVRILREYTRYRYKLVSCRSSEKNRYQNALTVCNVALDSVVSDIFGKSSTSIIDYLLEQSGTSINHEEIASKLLRSLKSKEDAVIESVEGYQMTDAQKYRMRLVRAHMDYITAEINDVDKMIENMISSNPDFENAIQFLCTIPGVKRDSAITIISEIGTDMSQFSSSKRLCCWAGLTPGSNESAGKKKSVRITRAGVYLKPALVQCAHAAVKSDKSPYYKKKYESLVKRRGKKRSIIAIARMILTAIYQMLSTGEQWNPSDLYKIDMPVALVEKQKAKAIKQAKKLLQREGLLPPDEPLAS

SEQ ID NO: 347952 - protein, 318 aa, unidentified
MTSTPARFVGIDVSKSTLDVHVRPDATAHQFANTDAGCRALIEWLTPLAPSLVVLEATGGYEGTVVAHLSLAGLLLSVVNPKRVRDFAKALGRLAKTDAIDAAVLAEFAEVVRPPVRPLPDANAKRSQAILARRGQLIGMRTAETNRPGGETDAFTRASIAAVLRTVGRLIGRVDRELDTAIRSCPAWAAKDDLLQSIPGIGPVVSRTLLAEMPELGTLTRGEVAALAGVAPMNRDSGQQRGKRRIAGGRAAVRSVLYLASQAARQGNKQWRAFSDRLKAAGKAPKVIRIALARKLLIVANAVLRSGQAFREIEPKIA

SEQ ID NO: 347953 - protein, 412 aa, unidentified
MEGETVIAGVDTHKDVHVLCLLDGLGRKIWSGSFGADPEGYDRLAEAIGDPGSCMVVGVEGTASYGAGLTRRLVELGYNVVEVLRPKRDKVRPGEGKSDPLDAERAARKAASGKGCSVPKSQDGWVEAVRQLYVARRLAVATSTSCVACAKSMLTTAPGALRERFRGRERPKDLMPLLARGRKAGDALEESVLASLRSVAAVWKEARSQVESLDERIRALLEANAPALLGVEGCGTTTAAALVVAAGDNPGRLKGEAAFSMMCGASPIPASSGKTDRHRLNRGGNRQANWALHEIAIKRMAYDERTRRYVARRTSEGKSRREAVRCLKRYIAREVYHVLMDPNPDGAAPEGPELAKMRKAMRVTQKKAAAELGLSAATLGHLERGRRRSTKLERRYYELLCELERALPQTAS

SEQ ID NO: 347954 - protein, 349 aa, unidentified
MTPFEGASVAEASTIGLDIAKHVFQAHGADSSGRVVFRKKITRAKLMQFFASQPRCLVALEACGGAHYWGREIGKLGHTVRLIPPAYVKPFVKRQKNDAADAEAICEAAQRPSMRFVPVKDEAQQANSVVFRARDLLVRQRTQCINALRGHLTEYGHVVPQGTAHVDTLVALVEDATSSVPESARTILTVLIGTFRALQTQITQLDAEIARRAKADPVARRLMTIPGIGPIAATAITALVPAPEGFRTGRDFAAWLGLTPLQKSTGGKQKLGAISKMGERTIRRLLILGASAVVRWATQRGAAEGSWLARMLGRKPRMLVTVALANKMARIVWALLVKGGTYRVPAAAA

SEQ ID NO: 347955 - protein, 393 aa, unidentified
MNKTVHYIGLDVHKETIAVSIAPQSTTEVRRYGIIGGTLEAVDKLLKKLAQPEVELRVVYEAGPCGFVLCRHLRSRGIHCDLVSPSLIPRKASDRVKTDRRDADQLARLYRAGELTAIHVPDQEDEAVRDLIRARYAAVDDLRKLRNRLKGFLLRLGFRYTGKSSWNDAHKRYLSGLVMPQPPQQIIFQECIHALDDTSERLERLTQAVLDALPEWKWEPVVRALMSLRGVQELTAMTLVAEVGDFSRFTDAGSLMHFFGLTPSEYTSSDKRVQGGITKCGNTHCRRVLTEAAWQYRLRPKVSEAMQKRQEHQSKAVRLIAWKAQERLHKRFKQLAVRKKSVVAATAIARELAGFVWAIACKVKTADQPAAPEIIRTCRGKVYRLDAEKKFQK

SEQ ID NO: 347956 - protein, 339 aa, unidentified
MRLYAAIDLHSNNSVLVVLDAKDKVVYEKRHPNDLQTILAQLKPHKKNIQAIAVESTYNWYWLADGLMAAGYEVKLVNTVAIKTYDGLKYSSDEHDARHLAHLLRLGILPTAYIYPKEERAVRDLLRKRSQLVRNRTMHILSIQNLVTRNSGKPITQGGIRKLDEKALDLYCEGNALRIMAIKSSLEILRCLDGQVALLERKVLEQARLKPEFKQITSIDGVGEIIGMTIMYEAGDLERFEKVGQFASYARCVESSRWSNGKKKGEGNRKNGNRYLSWAFIEAAHHAVHYNERIRKYYQRKKAKTNGVIACKAVAHKLARACYHVVRDQMAFDEARAFA

SEQ ID NO: 347957 - protein, 338 aa, unidentified
MNNSHIIGIDLGKNSFHLVGHDHAGNQLFKKKLTRQKLLEFLSCHKPVIIAMDSCGGSHWLARKCTEFGHTAKLIPPQYVKPYVKTNKNDFIDADAIAEAASRPTMRFSSVKTESAQVISTIRKIRSGYIRERTACMNRIGSILLEFGVSLPKGHASMKGLFQWLADKNQNLPPLIIFELSELHEHYQNLNERIDSQADKVEKILADNEQMKQLQSVPGIGPVIASTCLSSVGNPNDFKNGRNFAAWIGLVPIQYSTGGKSTLLGISKRGNKELRTLFIHAARSILWRDKSVEKYFGSWLVELKKRKPFNVAVVALANKIARIAWAVLVSKKSFEIRT

SEQ ID NO: 347958 - protein, 399 aa, unidentified
MKNVYPRVRASGVDVHYKFSTVTMRDQEGCVVRRERLDHRDRAALRAKLSRWPREAPVVMEASFGWGWLADLMQEMGLRPELSNCFKLEQMRKARGWGKTNKKDADLLSLLPYEADRWWKVWMAPREVRDRRELMRYRSSLVGVQTQTKNRICALFHRHGILHEFSDLFGVAGRQFQKQLCRTGQVGEVVLPPGALAALRGLQELLEHVRGQLAMIARQLRRQLDRSQTARRLDGIPGIGLILAHTLMAEIGMIERFADHRALASYSLLAPMAHDTGEHPGHRPLGRHLGHRGHRTLKWAFLEAAHGAVKTGGKWRRLFEAATEGGRTNRNRGYIKVARELVKVVYVVWTKQVEYTPTPPARPGSSAGRRRAARRTRPRTGQLSRPMAAVRQDVRPLRK

SEQ ID NO: 347959 - protein, 367 aa, unidentified
MEHCIIVGCDVHTKNTLLKAAADRDEPVKRLFRSNRRGQAKMLGWLREWSAKLGGARVVVVYESSLTGFVLYDAVVAAGLECYVLATSKLARSWKNRVHKTDERDAQMLFEQARAHVLAGNPLPVVVVPDPELRDHREVTRARTDLAQKVTRVKNQVQGLLKRYGLERPAGTGKSWTKAFRAWLDALVGSEELGWGARVALSTLLAQLRSLEDEMKYVDEQLAVLAQHPRHAAAVEAIAKFPGVSVGVALTFLTEMGDLERFANRRCLASYLGLVPRSDESGETDDRKGHITHHGPPRVRRALCLAVQQWIRWSPAAKARYERLVARGGRRCKKIAKVALMRLLGIRLWHAALNAQGAARAAQGSSS

SEQ ID NO: 347960 - protein, 530 aa, unidentified
MAGTTSKNRRKRRKSNSKSKQRNTLNLQKPSGVIGPRVKRVGGEKFAIVCVDPAKHRSEWMMADYFGNLLIERQTLEHQAAFFRLAVEQIREAQQQHDIQDTIVVLERTGNYHLPPKRAFAKAGFETRVVHPFATKQYRVPADPGIKTDGTDLNAQHRAAVAGFGLREFELESPYRELQLRARHRRNLVEKAAAMACQIREHLHLAMPGFSALFDHLLDHKSAMAIARRCASPAVALELGQAGLSQHLRETMVRSQPRTIDKVLAWASQAACDTIQDGALHHAIWTDLEELYQRFQRRIRVHERELAGDLVQTPYVRLLAIPGINVVSAAELAGEMGPITRYANANAITGRSGLYPSRHQSDQTDKDRGPIIRQANRRLRCALMRIADNLVCHCAYYRGLAGVDRSRGIKERAIRVKTAKKFSRLAYACVAGDEPMKHPAMRQPDSILEKLREFHRVHQTPMDQVLVDLQTTVAQLPYHTQNREAEVVAEVLRQHTARRRGPVAIGTLLLAVLARLEVKTTEDTKTRGRS

SEQ ID NO: 347961 - protein, 404 aa, unidentified
MYNAVGIDVSKGKSTVTVLQPGGTVIRKPFDVSHTSPNLNELAEYLDSLDGDTRIVMECTGRYHEPILKTLSEAGLFVSVVNPHLIKNFGTNSLRKVKSDPADARKIARYTLDNWNQLRQYSGMDNTRTQLKTLNSQFSFFMKQKVAAKANLIALLDNTYPGVNKLFDSPAREDGSEKWVDYAYSFWHVDCVRGIGLKAFTERYRAFCKRHHYNFQADKPEKLFHASKELVAVFPKEKTYKLLIRQSIQQLNLASAHVERLRREMNELASTLPEYNTVMGIYGVGKTYGPQLIAEIGDVSRFTHREALTAFAGVDPGVNESGQHKSRSNRASKVGSARLRKTLFQIMTTLLQNAPEDDPVYRFLDKKRSEGKPYYVYMTAGANKFLRIYYGKVKECLRNLEQES

SEQ ID NO: 347962 - protein, 382 aa, unidentified
MTAQVEFPQFFDRCAGLDVHKDSVVATIKINDFPDQTRTFGTFTEDLVELKDWLVSHQIKHLAMESTGVYWKPVFNILEDFFEIMLVNARHIKYVPGHKTDCKDSAWIAKLLMSGLLKGSFIPPQQIREMRELYRYKKKLVSQRVAERNRLQKILEDANLKLSSVVSDVFGKTGWTIICSLIDGHTDPAFLASLAKGSLKKKIKQLISALNGKITDHHRFMLETSKLALENIQQQTDRIDRRLEEYIQLHTTKVEMLETIPGVSHETVKGIVSEIGFDMSVFPTAQHLASWAGVCPGNNESAGKKKTSRVTQGNRILKTVLVESAWAASRMKQGWMQDKYHKLAARRGKKRALMAIAHKILNAVYYVLQNMVPYRDGVNLRN

SEQ ID NO: 347963 - protein, 338 aa, unidentified
MTLYCGIDLHSNNNYLGIYDQDDRAVLSKRLPNELGVVLSYLEPYRTELKGIAVESTYNWYWLVDGLMEQGYRVSLANPAGNEQYSGLKYTDDRHDSRWLARMLRLGILATGYIYPKEERPVRDLLRKRMRLVQHRTAHIVSVLNTITRNTGICVSWTKIEQMTEDQISKLLGDGLIGMAPRASLAVIKSLGEQITKIEKTAKAQARLRRDYELLKTVWGVGTILGLTIMYETGEISRFAQVGDYCSYARCVGSARISNGKKKGENNSKNGNRYLSWAFVEAANFATRFYPRAHRFVQRKRAKGNHTLAVKALGHKLARAAYYVMRDQVEFDPDRLFG

SEQ ID NO: 347964 - protein, 349 aa, unidentified
MRNDKIVKLIGMDVHKDSISLAIAENGSPGEVRLYGTIKNTKEALDKVIRKLISTGDELQFVYEAGPCGFGIFRHLKGNGFRCIVAAPSLIPKKSGVRIKNDSRDAVSLARLLRAVELTGIYVPDLEDEAIRDLTRARGDARIAERKAKQRLHCFLLRNDFIYGGKTTWIKPHFDWLATLKMKHSVQQIAFQEYIDAVHECSQRIARLNEQLQKAALEWRWAPTVKALQALRGVSLLTAIITVAEIGDFSRFQNPKELMAYLGLVPSEHSSGDTIRRGGITKTGNSHARRLCVESAWAYRYPARVTSLLLKRQEGLPGKILEVAWKAQLRLCTRFRRLRARGKRSRSLL

SEQ ID NO: 347965 - protein, 438 aa, unidentified
MDSTSSKVRIISGKSPANSIVKELLRMKDLLEISCGLDVHKEKIVACILTGPLGKPTHSEIREFSTLIPDMIALRDWIVSRNCHHVAMESTGIYWMPIYEILEDAFSGDITLLVVNARHMKNVPGKKTDMRDSEWISTLLRAGLLNGSFIPEKRIREFRDLNRYRKSIIRDITSQKNRIEKFLQSSGFRLSSFISDIFGASGKNIILHLIEHGQIDRTALDSCLKTKTRNHIDEILMSVNGTLSEHQKKFLKILMNHYDSLKEHLNEIEKDLEQDIEPFILQVQQLNSIYGISTTASCAIIAEIGVDMKPFKTAEHICSWAGLCPGNNESAGKRKSTSVTKGNPYIKSMLCEIAWVIAGKRNTYLSAWYWRIKQKKGAKKAIVALARKLLVIIYTMLKQGTLFDESCFEARRKNCEQKQLSRYIRELEKHGYHVEAQG

SEQ ID NO: 347966 - protein, 452 aa, unidentified
MQQNTPAFDEIRRNVAGIDIAGCADHYVCGPRRDDGQTDICHFGTNTSELHRMLTWLKERHVASVAMESTSVYWIPVADLMESAGIEVVLVDTREVRMVPGRKSDVKDCQWLQKLHSCGLLRGAFRPPESITAVRTLLREKENLTTARTQWVQQMQKSCDQMNIRIHHAVSDIDGKTGLAIVAAIIKGQRDPVELAKLRDKRCKKTEAQIADELTGTWREEHLFNLEQAYKMLMFTDEQIARYDEKIAEMYQRIAKASGRQAPPAAPGDVPASVKTARDQAGKADLQRIMGFDMTVIPGIGYDTAAVIVSELGSDLSRFPTEKHFAAYIGLAPSLGKSAGKNVRQRKRCRNTSKAGRALRMAASTLHKSQTEIGAFFRSVARRSDRKTAVKATARRMAHRIYRGVRFGAAYLDKGAESFETRLRMRTIKTVKSLVKRHNISALELQAAFAAG

SEQ ID NO: 347967 - protein, 416 aa, unidentified
MDTNCRILFYWRYSMNSVGIDVSKGKSMVAIMRPFGEVVASPFEVTHTGSELSELANSLKSLHGETKIVMECTGSYYYPIAYALHEAGLFVSAIHAKLIHDFGNNSIRKVKTDKADAFKIAQYGITHWLDLPEYIPEEDIRRMLKAFSRQYTKYGKLRIMLKNNFISLTDDSFPGVNELFSSPPRKSDGHEKWLDFALKFWHCECVCGLSQKEFKERYQKWCKRAGYNFCEDKALDIYASACGHLVGMPKNETTKMLVTQAVNQINAISETIAVIAKEMKRLAQSLPEYPVVSEFYGVGDILAPQLMAEIGDIYRYRNKGSLVCFAGLEAPPYQSGKFESTNRNISKKGSPHLRKALFQVMDTFIKRSPVDEPVYQFLDRKRAEGKHYYSYMTAGSAKFLRIYYARVKEYLDCLEN

SEQ ID NO: 347968 - protein, 413 aa, unidentified
MNGRIYVGVDVASLEHQIEAQAESGEVLWRARVPNTQEGCQTVVERVRVWQEEGHEVWVGLEGLGGYASPLDRLLFAAGAFVVGVHPTQAARFRELLRVQPDKDDRLDAGLLAEWLRWQARNGELEPSVVRDEYFEAVREAARAFQEATTLKVRLQNQLVHKVRIYWPDLLVGKEFFERTDAAGLLALLSQYPTPEAVVKAGVKRIEKVLREASRRDSRELAGQLMEQARRLAGAVPMAPATALVVKQLACDVADAASHVRKWEGILTQLLEQHPFGRFLLDLPGVGPRTGGCFLGEAGDLGRFEDDAKLARYSGTAPVKVQSGKSPSRHYDGHRYNHHLKRAVLLMVRSMVQHDERSQAYTAKQRLAGKTYWQAIKKLARYILRFLWKSWQQIVQSKANNLDLSPAERALLP

SEQ ID NO: 347969 - protein, 387 aa, unidentified
MQKPHDDSKMCLAAFEQDRTLVVVVEMSLSSWLVAGLIPGVSREPLKKINPDPERLLQLLYRWRDEAVAAGRKISRIAVAYETGRDGFWLARWLRNRGIDAHVIHATSVAISREHRRAKTDRIDTAMLRRGFLGWLRGEPGHCSMAVVPSVAEEDAKRPHRERDTLIHERTSIVNRMKSILIQFGVRNFNPVLRKASEKLDAVRTPEGVPLPANAVAALRRLMDRFRVIKEQVKAIEQTRLQRMERDPTDKMNTMVFLLVRIIGMGVETAEQLVREMLFRNFRDRKAVARYAGLTGSPDESGSKRREKGLSRSGNRRVRNILIQLSWRMLQFQADSGLVIWYKKRTESARGSRKPMIVALARKLIIALWRYVNTGVVPDGFALRPAV

SEQ ID NO: 347970 - protein, 366 aa, unidentified
MSFARADGEGPTETEVHALMNVLIGVDPHKRSLAVAAVDEAKGELLERASFPQSRTGLRSLERWAKRFPERRWAVENAGGLGRHLAGRLAAASESVVDVPPKLSARVRVLSTGNARKNDGLDALATALAASRNEQLAPVDPEVGSEVLRLLSERREDLVAERTRALNRLHALLRDLVPGGVARMLSAERAARILRGIRPKGGASARLRRRLASEVLRDVRTLDRKIADLERRIEAEVEASGTTLTEIFGIGPILAARIIGTVGDVTRFPTKAHFASYCGTAPLEASSGEVVRHRLSLVGNRKLNYALHMIAICQARSDARGGAYYRKKIDEGKSRKEALRCLKRRVSDAVFRSLMADSLVPSSSAA

SEQ ID NO: 347971 - protein, 341 aa, unidentified
MSVMIGIDPAKGSHAAAAVNGGEVAVAELEVRATRRQTSELLVWAQRFPQRQWAIESANGHGYLLAQQLVSAGEHVVDVPSTLSARVRVLDSTRSQKNDANDARSVAIVALCNPGLRIVSAEDHVAVLRMLAKRHKQLASLKTQAAARLHAVLAALIPGGLGKEMVPRQASGLLRRVRLTSMVETERKRLAHQHLAEVRRLEKELVASKQRLRDAVEASGTTLTEIYGVGPVVAGLLIGYSGDVTRFPTRHHYATYNGSAPIDASSGSNQRHRLNPRGNRMLNHALHLIAITQLRYPNTQGRVFYEHKLAEGKTKKEAIRSLKRRLSDVVYRHLQADQQTR

SEQ ID NO: 347972 - protein, 348 aa, unidentified
MTEAYDGQEVVGMDLHRRRSVLVRMTGDGRKLETARITNSPEELRRAIARAGAHPRVVLEATYGWYWAADTLAEAGAEVHLAHPLGVKGFAYRRVKNDERDAADLADLLRMGRLPEAWVAPHQVRELRELSRYRHKLVRLRTSCKDQVHAILAKLGIPVTCSDIFGVWGSTWLDGLALPQPYAGKMASLRKVCAVLAGEIALLEAAIAGLLEHHQGYRAVRALPGIGPVLGAVIVAEIGDITRFPRPAELCSWAGLTPRHRESDVKVSRGHITKQGSRILRWALIEAIQHVPAGHPLRQRKEDIITRRGAQARNIAKVAMARQLLTWIFYAMRDGQVRSLAAAARQAG

SEQ ID NO: 347973 - protein, 410 aa, unidentified
MNVIYERCCGMDVHKKTIVACVLSSKKKEIRSFSTMTASLLSLVDWLKSVDCQCVAMEATGSYWKPIYNLLEMEGMPALVVNAQHIKAVPGRKTDVKDSEWIADLLRHGLLNGSFIPKREQRELKELVRYRRSMVQERARELNRIQKVLEGANIKLSSVVSEIDGKSSRDMLTMLAAGCKDVKAMANLARRQMRKKIPQLEDALHGFMCEHQRLMLYIMLKHIDFLESHVLSLDKEIHGKMKPVSEQIFLVDSIPGIGERSAQVIIAEIGINMNQFPSAAHLASWAGLCPGNNESAGKRKSGKTRKGSDILKATLIECAKVSGHLKNTYFSAQYSRIAARRGKNRATVAVAHTILTIVYHMLKANATYQELGPDFFEQRRKTEIVKKSVKRLEAFGYTVTIDQQVRASTA

SEQ ID NO: 347974 - protein, 338 aa, unidentified
MPLYSGIDLHANNSVVVLLNEQDQVIYQRRLANHLPEILEALAPYQADVSGVVVESTYNWYWLVDGLMEAGYRVHLANPAAMQQYSGLKYTNDHSDARWLAHLLRLGVLPEGYIYPKAERAVRDLLRKRAHLVRQHTAQVLSVHNLMVRNTGVRFGAKRIEELTPSELVSMLSNPEQVLAVTSSLAVLHCLGQQIKTLEKAVQKRLKHTPAYVQLQTVDGIGTILAQTIVLETGDVGRFPPVGNYASYCRCVGSTKISNGKRKGQGNVKNGHPYLEWAYMEAAQFAMRFSPTVQRFYQRKQAKSHLMIARKAVAHKLARACYDIMRDLIPFDVHKAFG

SEQ ID NO: 347975 - protein, 445 aa, unidentified
MDVIFTHCAGLDVHKKTVMACRVTPDPTGGQADGIMEVREFGTLTRDLLVLSDGLAEAGITHVAMESTGEYWKPIFNILEGTCEVFLVNAAHVKNVPGRKTDRADARWLAKLMRHGLLQASFIPPAGQRDLRDLTRYRTKLVQERGREVNRMQGVLERANIKLASVATDVMGVSGRAILAALVEGRADPATMAELAKGRMRNKIPLLEQALTGLVRDHHRQLLAMQLAHIDFLDEQIDTLSVAITGRLTELSAGDPPATPADTAGAMGGAGDANAPAAPLTFTRAITVLDTIPGVDQRGAELMVAEWGIDMGRFGTAERLSAWSGVAPGNDESAGKQRSGKTRKGNRALRTGLTQLAHAAARSKDTYLSALYHRLAARRGKKRAIMAVAHAIAVSAFHMLSRNEPYHELGANYFDEHQREHLVDRLTRRLQHLGYRVSLEPVPAV

SEQ ID NO: 347976 - protein, 331 aa, unidentified
MKNYTNFIGIDVAKLTLDYCMITPNPQPEQGLNTQKSVDKFLKTLKKAGCQMNETLFVFENTGIYSSLLALVLSENKLDYAQVPALEIKRSLGITRGKSDKVDAKEIANYARRNTDKIALSALPELSLQQLKIVFAEREKTIAAIKSFERTMENEMYLNKKVFTSVKAINRQTVKQLKKQLAALDDRIKTLIREDEILYKQQQLLKSIPGIGEITSVYLLMVTKGFTAFTNGRKFACYSGVVPFEHTSGTSVKGKTRVSHLADKKMKSLLHMAALTAIKYDPELKAYYRRKKEEGKHTMLVLNNIKCKMVYRIFAVIARETSFVNLHKFAA

SEQ ID NO: 347977 - protein, 408 aa, unidentified
MEVVHPRCGGIDVHQASLAVCVSIKEKGMNEKHKLRCGTTTAELLRLADWLHGHQVTHVGMEATGVYWKPVWHILEGQFELLLANPTQVQALRGRKTDLKDGERISDFLQHGLLQGSFVPPKPIQQLRDLTRSRTTLKQEQVRIGNRIRKVLEDANIKLSSVMSDVMGISGRAMLRAMVRGESDPETLAQLARKRLRGKIPVLQQAAAGSLNEHHRFLLEQWLAHWDELTERIAKFDRRIEEQIAPFAVAAETWDSLPGIDRITAWTLVAEMGPNMNQFPTVAHAASWAGLCPGQEESAGKRKSGRTRRGNVWLRGALTQAAWGASKTKGSYFKAFYHRLAARKGKKRAIVAVAHALLSTGYMLLWTGQRFSDLGEGYFDRLDRERLTKRLVKRLEKLGHQVSIQPAA

SEQ ID NO: 347978 - protein, 384 aa, unidentified
MFMKDKYSIGIDISKSDFKACFAMISSNQSITIKGSRTFSNTLKGFESFNNWSNKFQKGKRPLIFVMEATGSYHEHLAWFLYRKKHQISIVLPNRAKAYMVSLGFKSKNDKVDAKGLANMGAVQKLKEWSPISKHLYNLRQITRHLEDLQIIRTSLLSQKEQTVFAMYNLKTVTKSITNTLKTIDKQIANCKKQIASIIEKDKKLSKKVAYITTIKGVSTITAAIVIGETNGFALINNVKQLVSYAGYDVRENQSGTRTGKTRITKKGNAHIRRAMHLPAFNTVRYLKTFENLYSRVYKKSGVKMKGYVAVQSKLLRMMYTLWENETNFDPNYQTSGIQKPKLLCSVASIEAQTKETKTAPKAIEAALDELPCNQSPKVLCSVV

SEQ ID NO: 347979 - protein, 342 aa, unidentified
MDHYAGIDVSLESASVCVVDASGKIVREGKVASEPAALISWFGAIGLRLARIGLEAGPLSQWLYAAMKEGGLAMELLETRHVRTALATMPVKSDRNDARGIAQLMRLGWFRPVHCKSIGAQEIRAVLTARKLAQSKLRDVENSLRGILRGFGLKVGKTTNRSFGGRVRELVVNHESLQMIAAALLSVHAVLLRELKTFERQVRSMARSDANAKLLMSAPAVGPIVALTYASAIDDPGRFKSSKRVGAHFGLTPKKYQSGEIDYTGRISKIGDASVRTALYEAAHIMLIKPIKGCTALKSWAMRIARRSGMKKAKVALARKLAVILHRMLANGTPFNAAAAAA

SEQ ID NO: 347980 - protein, 352 aa, unidentified
MSMKKVKVNSTIVNEDYKKNLSEYDNYIALDWSKNTMAIARLTRRTTNPKVIEVPSDIKELKVYLQRLTGKKIMTFEETTTSHWLYVELLDYVDRIVICDPYRNRLLSDGPKDDKIDAGKLSILLKGGMLKEIFHTTDKIYKLRRYISAYDDLIKYGIRLLNQKSAIYLSQGLTSRKEVIRKEAITKFIIEKIDKAIEVYEENKYQYKELFKKISKNNNLVRNQLAIPGIGEVFAVKIVSTVVDARRFKNAGHYLVYCGLVKHEKLSGGKSYGKRKPRCNRSMKAVYKMAALASIRSKGPMRQYYEYLLKKGLPEHNARNAVARYIAKVSYGMMKNQEKYQPYKWRRETETA

SEQ ID NO: 347981 - protein, 335 aa, unidentified
MKKFTYYVGIDVSKLKLDVTILYETNGVTKSDYQVIENKDKSITQFVRTLQKMYSSEQILFCFEDTGVYSLPLACCLSDNSLSYWQVPAIEIKRSKGICRGKSDKTDSKDIAFYAYSHMHKFSPSSLSPKSIQKLRILFAEREKILKSLSSFERTKENQDFVPKEVFQCVTAINRSVVSQLDKALKLTEAKMMEVIDSELRLKQQYRLLLSIPGIGMQTAIYLMIATKAFESFDNWRQLACYAGVAPFPYQSGSSIHGRTKVHPLADKKLKSLLNMCAIVAVRYDKELKTYYERKLAQGKPKMLTINNVRCKLLGRVFAVINRESPFINTLKFAS

SEQ ID NO: 347982 - protein, 348 aa, unidentified
MDVIIGIDPHKNSHTAVALDAAGQVLGELRVTAGKAQNQELRTFAAEWPQRRWAVEGANGLGRLLSQQLVAAGEPVTDVPATLSARVRLLSGGSARKSDSHDARSTAIAALHGRQLRTVGAEDVTVVLRMLSDRRDQLSASRNRIVCRLHNHLRHLRPGGAALHLTAEKASRLLQGIRPEGIVAVQRKQLTRELVADLRKIDKQLVEIDGRIAEAVTASRTTLTDIVGVGPILAATIIGHAGDIHRFPSRAHFASYAGTAPIEASSGDVSRHRLSRRGNRRLNAAIHMIVLSQLSHTSPGRLYVDRRLAEGKSRREAMRALKRQLCNVIYRHLVADAAAARPAVAPAA

SEQ ID NO: 347983 - protein, 409 aa, unidentified
MERQVERCCGLDVHKETVAACVRVGGRTGQAEQHVQTFGTTVGELLVLRDWLAAHGVTHVAMESTGVYWKPVFYTLESDFTCLLVNAAHIKQVPGRKTDVKDCVWIAQLLEHGLLRGSFVPPAPIRDLRDLTRYRKAVIQDRTRVANRLHKALEEAGMKLAAVASDILGVSGRAMLAALVQGTTDPAVLADLARGRLRGKLPALRQALANRFRPHHAFVLGQLLTHLDYLDEAIATLSTEIERVMAPLAEPLRRLDTIPGINQRTAEVILAEIGPDMRVFPSARHLASWAALCPGHHESGGKHKSGKTRKGNRWLRTALIEAAAGASRAKHSALQARFRRVLRHRGPKKAVVAVAHALLRMVYHVLADGTVYREAGADSYDRHHSQRVTRRALQALERQGYRVTLEPAA

SEQ ID NO: 347984 - protein, 386 aa, unidentified
MGTSATSRIEQDTLPQPTLSLAFELGQNTWKLGFTIGVAQPPRERTIPAGDVARLQQEITRAKQRFGLPEDARVVSCYEAGRDGFWLHRYLVAHGIQNHVIDSARIEVNRRQRRAKTDRLDVRKLLTMLLRHMAGERKVWRVVRVPSVEEEDRRQLHRELTTAKQDRTRVINRIKGLLAGHGVQLALQGDVDAQLDQVHQWDGSPLPSALRTRLKRAWQQGGFLTAHIQTLEAERRALLRRREDPVLDQVRQLFTLRGIGVNSAWLYVMECFAWRDFQTPKQVGALAGLTPTPYQSGQSRRELGIAKAGNRHIRAMAIEIAWAWRRFQPDSALSQWYERRFGAGSARLRKLGIVALARKLLIALWRFVKTGVLPEGAVLKTAAPGR

SEQ ID NO: 347985 - protein, 400 aa, unidentified
MLSIGIDVSKGKSTVCGMKPGGEIVYTPFEVQHTREGMSELVSLLRSSGEEVRAVLESTGSYHCPVVAALLENGIFVSVVNSLRMKRFCSQSIRKVKTDRIDAMQIALYGLAYWQELQPTKLPEDTYRELQLLARQYYQMTSLLIKAKVDFNAICDQVLPGMQELMSDHAGRHKLSDFVLRYCHTTHILEMGETRFRKDYCKWAEKKGYRNCERMAALIFATAQNGIPVLPNAPSTQIVITEAIRVLHTVEASRDAILTQMQALAKTLPEYSLVREMPCIGDTLAPRLIAEIGDVRRFHSKRALIAYAGIDAPPYQSGKFCANNRHISKRGNRYLRKTGYEVMQSYVMHKPANDPIFTFIEKKRGEGKSGKLAMVAGLNKFLRVYYGKVTELYRSLPAIE

SEQ ID NO: 347986 - protein, 341 aa, unidentified
MKLRTIGIDLAKNVFQVCGVNEHMKPQFNKRLKRNQLLDFMRQQEPTMVVMEACYSSHYWAREIAKLGHDVKLIPAQHVTPFVRGNKNDSNDAFAITEASQRPHIRFVPIKTENQQEVNCLHRIRERLIKSKSALSNQSRGLLSEFGVVFPCGHAALLNGLTSIIDNPQYSHQLQDMVIDMLSEYKNTLKRLKSIDQQLGTFVDASESGKILLSIPGIGVINASAFLAAIDKGQAFNTPKEFAVWLGLTPKQHASGDMNKMGGITKRGDCYLRKQLIHGARSVVSRATKSTDPLALWAMKLRATKPFNKVAVAVAHRLARLIWILLTRQEHYRALPSPVSA

SEQ ID NO: 347987 - protein, 320 aa, unidentified
MDAVVGVDVAKASFDVTLLDEQGRKRRKHLRNTEAGFQQLQRWIERHTKSEVHVCMESTSIYWEELAEYLHAAGYRVSVVNPRRIKGYAMSQMRRSKTDPLDGDVIADFCRTQQPNAWTPPTPDEKKLRALVRHLKALQKSRTQQTNRLGTCRDEEVRASLETVIAVIDAEIEQIEARLRRFFDDHPDLQEKKQLLESIKGIGDKTATHILAEMYDLVRYKNAKAAAADVGLTASHFQSGTSVRKRSKMSRMGKAAIRGAMYWPAISAIQSNPLVRTLTDRLEAKGKHKGTIRVAAMRKLIHIAYGVLKSGKPFDPAYGM

SEQ ID NO: 347988 - protein, 312 aa, unidentified
MDAMVVGIDVSKDWLDVAVRPTGESFAFKRTAAGIEDLVERLKDLSPALVAIEATGGFEAVVAAALAGAGLPVVVVNPAQVRAFAVALGKRAKTDPIDAAVIAHFAEATKPQLRQLPDEKTRFLADLIARRRQIVEMLAAESQRARRISDHRLTRSITRLRQALEEELAELERLIADHMRRSTVWVEKEKLLASVPGVGKTIARTLIAELPELGSLDRRQIAALVGLAPWTRQSGQWRGKSFIGGGRKTVRSALFVGAMVAARYNPQLKQFRDKLVAAGKPKLLALVAVARKLITILNAILRDRRPWHPNPA

SEQ ID NO: 347989 - protein, 317 aa, unidentified
MSDNNIICAGIDIGKRRLDVAVCGAKASLEVDNTSAGHEKLVTWLQRHKVERVGVEATGGYEQEVVRALRREGFPVVVFQPIQVRAYARFRLKLAKNDKIDARLIAACVASVDNVRTAPDPRFEAFAAAQTLIDQLTDDIVLYKTRLETARDEFSRAFWKGEIAGRKAQLRGVLKTLRTDMRAHTDIAAKLDLITSVEGIAEKTAIAVLIRMPEIGTLSREQVAALAGLAPYDDDSGRRAGSRHIQGGRTRLRSSLYAAALPAAFFWNPQLITFYKRLRANGKTHKMALVACARKLLIFINTVVARATPWQPKPAAI

SEQ ID NO: 347990 - protein, 345 aa, unidentified
MFVAGIDAHATYSVIAIVSNTGELVQKPVRIRNSEADRLDALLEPFRPLEVVVETSPAWPWLFDRLEGPGVHFVLAHAKRLRVIAESNYKSDDIDAELLARMRLAGLIPEVHTKSVEQREQAVLLRGRARLVRQRTQMANRIHSQLHNVGLCLERGHLLTQGGRAWVRTEAWPRLGEERRMFITMQWALIDQLEPMIKTLDRRVERMGRDNPAVALLETIPGIGAYRALVIATETLPITRFRTPAHLVSYAGLAPRSSQSGMRPIRHKSIPAGANRWLRGTFVRAVVSHVANAPDSWLSESYEQMKQRLGWQVARVATARRLARAVHAMLRTGEVWRDQPVSQQN

SEQ ID NO: 347991 - protein, 343 aa, unidentified
MRTITTIGLDIAKSVFQVHGVGANGDVVVRRQLKRRYVLSFFQKLPPCLIGIEACASSHYWSRELQALGHTVRLMPPAYVKPYVKRQKNDAADAEAICEAVTRPNMRFVPTKTPEQQSCLMLHRTRHLFIRQQTALINSIRAHLAEFGIVAPVGRNGVEQLLEVVADANDARLPEIARACVAALGSQLQALKAQILAFDRCIMAWHRSNETSKRLDAIPGVGPALATALVASVADPKAFRSGRDFSAWIGLVPKQNSSGGKDKLGSISKQGDRYLRSLFTAGALAVIRYAKLHGTKHRPWLTALLARRPTKVAAIALANKMARMAWAMMTRGERYKEPVALAA

SEQ ID NO: 347992 - protein, 315 aa, unidentified
MVDVPCFVGIDVAKAQLDIALRPAGERWAVPNDASGIAPLVDRLQALQPTLIVLEATGGLERAATVALAAAGLPVVVINPRHARDFARATGQLAKTDALDARALAHFADVIRPTPRPLPDAQTQELRALLGRRQQLIGMRTAEQNRLAGASERLTKDITAHITWLNADIATLDNDLETLLRASPLWRENDDLLQSAKGIGPVSAHTLLLELPELGTLTRQQIAALVGVAPLNCDSGTMRGKRTIWGGRAHVRTVLYMSTLVATRFNPQIKTFYERLLAAGKVKKVALTACMHKFLTILNAMLKHRTRWQPQEVQS

SEQ ID NO: 347993 - protein, 425 aa, unidentified
MRSIGLDVHRDFCEVAIAEAGEVRSAGRVVTAPAELELFARSLAADDEVVLEATGNALSIARIIEPHVARVVLADPKTVKGVTQGGAKTDRIDARMLARLLAGGFVPEVWPVDEPTRVLRRRIARRAQLVKHRTREKNQVHAILIRNLRPRPPVTDVFGVQGRVWLAQQPLPSDEREMLDACLRQIDFLDTEVVACDRVLAELALASGQMRRLMTLPGVSFVTAAALMAAIGDVTRFHSARQLVSYLGLDPRVRQSGAEPARHGRISKQGPGEVRHLLVEAAWHAARTTGPLRVFAERVTARRGSKIAVVAVARKLVVIAWHMLSRGEDYAFARPSLVREKMRRAELLVGAERRQGKRNPVRVFATTEQHRLEKQLAAQAEIAYRRLVQDWQPAIKSAGAAPGRATRGPSNGQAARQDTAPRPAL

SEQ ID NO: 347994 - protein, 345 aa, unidentified
MKIIGCDFHPSFQQIAMCDSETGEFQERKLSHADGQAERFYLELGGPALIGIEATGNSQWFLDLVGRLGYEIRVGDAAKIRASYVRKQSTDKRDARHLLTLLLEKRFPQLWTPSAAMRDQRQLLRHRDKLVEIRTKVKNSLQHLAMNRGMQKKSRLWTRLGMEQFQQLAMPGWAGVRREDLSHLLKQLNGQIETLDRAVEQAACQHPQAQLLMSQPGVGPVTALAFVLTIGEVTRFAGSKQLSSYLGLVPSEHSSGSKRRLGAITKQGNRFLRKLLVEAAQTAVRKDEGFRKEYQHRCRRRPKGVAKVAAARKLAVRLYWMLRSNVSYPEIVRVESNPRVPLGDV

SEQ ID NO: 347995 - protein, 400 aa, unidentified
MNSTVRFVGLDVHKDTVVIAVAEEGAAPAEIFAEVPHEPARLMARLKRLGTPESLRVCYEAGPTGYGLQRILTQAGISCVVVAPSLVPTESGRRVKTDRIDARRLAQFLRSGHLTAVWVPDEQTEALRDLERARDDAKRAEKTVKHQLAKFLLRQGRRYSEGKQWTQRHWRWIEVQKFSHEAHRRVVVDSIQAVRQAAERVARLERDLGELIEGWVLEPLVRNLQAFRGVAQLTAVGLAAEIGDFRRFPTAGKFMAFVGLVPSEYSSGGQRRLGGITKTGNGHVRRLLIEAGWQYYHWPLRISLALHERRQGVPQPVIDIADRAMHRLGRKAYKMRERGLSSKTIVTALARELAGFLWAAATCAVDSVPPGPRGRHRGPEVRRMPASPIGTESPSHVAAR

SEQ ID NO: 347996 - protein, 238 aa, unidentified
MQLHSIGIDLGKTTFHLCGAGAAGKVLVKKKFTQKLLLAYTANLQTSLIGLEACSGAHFLGRALWKQGHDVGLIAAQFVKPFVKSNKNDFVDAEAIAEAVDRKNMRFVPIKTDDQLDLPVVATAIVAAIGNGAAFRKGREFAAWWGIVPRQYSTGGKAKLLGISKRGNVYLRKILIHGARAAVLRIKRDRVPIGAWLDRLDARAHKNVVVVAMANKLARIAWAVLLSGNEYRPTAVPA

SEQ ID NO: 347997 - protein, 348 aa, unidentified
MLRSLVSTWQKNIFELAVAGSDWRITQRQRLARAKFLSFFVHLAPCEVVMEACGSAHFWARLISALGHTVRLLPAHYVKAYVRRNKTDQADAGALIEAARCAEIREVPVKTIEAQQIQSLHRLRSQWMSTRQRCVNTLRGILREFGFAIPLGVNVAKAQIGLALSDTETEIPAALRETLAEMFQQIAVLEEKILSVERQLNALTRTDVRVQQLRQIPGIGALTSTALRAIVGDIQRFPSGRHFASWLGLTPNERSSAEKRRLGRISKQGDVYLRTLLVHGARSALLAAHRALRAGRPLDRLRQWALDCERQRGHNKATVALANRIARIVWATWKYERPFDGNWSPEAH

SEQ ID NO: 347998 - protein, 356 aa, unidentified
MSRDVKYIGMDVHKEATVIAVLNGNGDLVMESIVETKASSLLQFIHGLRGELHVTWEEGTWAAWLYDLLKPQVQQVLVCDPRRNALFKEGNKSDKVDARKLADLLRTGMLRPVYHGENGLRTLRELGRSYQTISQDLNRVMNRMKALYRGWGIACAGTRVYAPRYRQEWLQKIEQAGVRRRAELLYQQLDGLQELRRTLRPELLAESRKHKASKLLRQIPCIGPIRAARLLALMQTPHRFRSKRQLWTYSGLGIETRDSAQYRFVDGQLRRAKKPQQIRGLNRNHNHEMKDIFKGAATRASCGVGPFREFYVGLLDKGMEPEMARLTLARKIAAIALTLWKKEERFDAEQLKAQAA

SEQ ID NO: 347999 - protein, 273 aa, unidentified
MNEVTMMGVDLAKSVFQAHGATAAGEPVFRKKLSRGQFLKFLGEQPSCVVAMEACASSHYWGREIMKLGQEVRLIPPIYVKPFVKRQKNDANDAEAIAEAAVRPTMRFVPVKSAEQQSRSMIFKTRDLFVRQRNAIINALRDHLMEYGIIAPPGLTFVKKLAEQIDDPESDLPPIVIELSRVHLDQLSIITDKVVAIERRLKEESKSDSETVRLQTAPGIGPISAMAIKAFPPPLEGFKRGRDYAAWLGLVPVQKSTGGRQINIGQDIKDGAT

SEQ ID NO: 348000 - protein, 426 aa, unidentified
MPPSDPVLWIGIDWADQKHCLVTCLPNGSQRQMHWIEQKPQALDDFFLGLRKKHPNGHLSVVLEQKRGALLYALLKYDFLRLFPVNPRCLADFRDALRASGAKDDPTDAELLSLLGAKHGEHLRELKLDDPATRQLILLGEQRRDIIDEQTALSNKLTDALKCYYPLAGELFAEDIVSPLALAFLKRWPNLSAAKKAKEGVLRAFFHAQNCRSEEKIQLRLEAIKAAKPLTEDASLIRTMELLVKSLGERLKAVQWSIELYDERIAEVFATHAKASVFASFPGAGKVLAPRLAAAFGTRSENFPSPTSMQCWSGVAPVLKKSGKTEVVLFRWARPIFLHQTFVEYARSSVKYSDWAQAFFNEKVQKGWGRFRIYRALAFKWIRIMWCCWRNNEKYDEAQYLKTLQKRGIKTYSGLSAKATAPSTPA

SEQ ID NO: 348001 - protein, 342 aa, unidentified
MNEVSIIGLDLAKNVFQAHGAGTDGAVVFRRKLSRAQLLKFLGEQPPCVVAMEACASAHHWGRAIGDLGHEIRLIPPAYVKPFVKRQKNDMADAEAIAEAASRPTMRFVAVKSEEQQAAAMAYRTRDLLVRQRTQTINALRAHLAEQGIVAPAGPAHVGRLAAVVDGDDGALPATVRDLARLLLAQIADLSEKVAGLDVDLHRRAGTDDTARRLTTIPGVGPITAAAITTFAPPMETFSKGRDFAAWVGLTPRQHSSGGKERLGRTSKMGQRDIRRLLIIGAVAIVRWAARKGAPEGSWLARMLERKPKMLVAVALANRMARTAWALMRKGEDYRDPTMATA

SEQ ID NO: 348002 - protein, 353 aa, unidentified
MKNYYIGMDVHKATIAIAALDASGKLVAQSIIETSTQTVRDFLHSVRGEVHVTFEEGNHAAWLYDIVEPLVKRVVVCNPKHNSKLMSGSKSDRIDARKLAELLRLNAVKAVYHGEHGTRTLKPLMRSYECFVSDITRVKNRLKGLYNSQAIMNRGRELYHTSKRQMWLEKLVNAGQRSRAELLFVQLEDLKELKRVAQKAMVAESTRHEAHKILSQVPELGPVRVAQIIATVDTPYRFRTKRPFWNYLGLAVETRSSSDHEVEDGRVKRKKKVIQTRGLNEDYNRRLKSIFKSAAVHACGCGVYKQYYEGLLKTGMRPEMARLGVARKLAATVLAVWKSGEAFDEGRIMSQAA

SEQ ID NO: 348003 - protein, 420 aa, unidentified
MNSLIQQEFTAFIGIDWADTKHDICLQPAHSQQREFDQLPHQVHAIEQWAYSLQKRFGGTIAVVLELSKGPIVYALQKYDFFVLFPVNPSTLAKYREAFKPSRAKDDPTDAELALDLLLCHGDRFKPIKPQSVEMRTLTYLVEQRRQLVGDKTRLVNRLCNTLKQYFPQTLDWFEHRDTVLFCDFMTRWPTLTQVKRARKASLETFFKTHNVRFDTVIATRISGIRAATPLTLDVAVLTAHQLQAMAQVNQLRTTLQAIDQFDDAIARLAPTLPDYALFNALPGAGPHLAPRLLVAFGEQRERFTSAAQLQQYAGVAPVTERSGKKCWVHWRWQCPTFLRQTMVEWAAQTINKSFWAGAYYRQQRDKGCSHQTAVRALAFKWIRILYRCWQNRTPYDESKYLNALKRRDSPLLKQVATTS

SEQ ID NO: 348004 - protein, 348 aa, unidentified
MTIVADIYPYVVGVDTHARSHTFAILSRGRLVDTQTFPTNQAGLARAVDWIGRRTAGEISDTVVSAEGTSSYGAQLAGMLAEHGYRVVEAPTPHRGRDGKTDALDAQRAARGVIDLEDTALRDHRRHGDLRDAIAALSTLRAHYTDQRTALINMLTALLRVTDLGIDARGPLTATQITQIAGWRPRREPEPLHIQRQIAIAHARDIGDLDRRLAANKSQLADLTARHSPQLLDIYGVGPVSAAVIIAAWSHPGRVRSEAAFAKLAGVCPIPASSGNTTRHRLNRGGDRRLNWALHQIITTRLSHDPRTKAYVARREAEGKTPKEIRRCLKRYLARQIYRTLTAPLDNT

SEQ ID NO: 348005 - protein, 410 aa, unidentified
MELLHRRCCGLDVHKETVVACLRLVADGKVTTEVRTFQTTTADLLRLSEWLAANDCTHVAMEATGVYWKPVWHILEDGEFELVLANAAHVKNVPGRKTDVNDAMWLAELLAHGLIRASFVPDTQTQEMRNLLRTRKQLVREQSSHVLRVQKTLEDANIKLDSVLTDLMGKSGRAMIEALIAGETNPTKLASLADRRAKASHEEFREALRGRVTKHHRFLLRLHLNQIDALNAAMATLDAQVEANLGPFRTAVEQIISIPGIKNLGAHVIVSEIGIDMSRFPSDAHLISWAGICPRNDESAGKRRSNRLRKGAPWLKTTLVQCAWAAVKKKDSYLQAQFHRIKARRGPKKAIMAVAASILTAIYHMLKNGTMYKDLGRDHFDRRSTDQQKHRLVKRLADLGYAVDIKPLAA

SEQ ID NO: 348006 - protein, 453 aa, unidentified
MQMNKKVSMQIINPNAAGIDVGSRSHFVAIGQGCGDVREFGVYNEDLKAIAEWLLSNEVKTVAMESTGTYWQSLFAVLQNAGLQVILCNGKFTKNIKGKKTDVQDCQWIQKLHTIGLLSGSFLPDEATEQLRTYCRHRGNLLDNAADTTRKMQKYLRLLNLRLDVVVKDVTGLTGLAIIEAICKGETNAEMLASLRHGNCKKSEEEIAKALQTNGRKDYLFALKHEYNMYQSLQSAIKDCDIEIEKMLNEQINNNEDKRQHYVDKKVHKKVNKNAPKNIDINLMSYQYFEGVDLMAIEGVSHSTVLTVMSEVGLEGLKKFGTAKQFASWLRLVPNNKISGGKVLSHKVPKGSNRLKIALRNAANAIGNLKDTPLSNFFNRINFRKGRVSAISATARKLAVIIWNMVIKKLPYNNEHGYEFLDQKRKRKVQEMKKLIHKFDIKTDELGLQLNAL

SEQ ID NO: 348007 - protein, 412 aa, unidentified
MEVLHPHCAGLDVHKDMVVASVRHMVAANVEREVQTFKTTTRELLALSEWLSAEGCTQIVMEATGIYWKPVWHILSDGEFELVLANAAHVKNVPGRKTDVNDATWLADLIAHGLVRGSFVPDEQTQEMRNFLRTRKQFVRERTCHIQRLQKTLEDANIKLDSVITDIVGVSGRRMLEAMIAGETNPDVLAGLAHRRIRATPAELEAALRGRLTEHHRFMLRLHLNHLDALNAAIDQIDQEVDAHVEPFRTAIEILSTIPGVSQLSAEVIVAEIGIDMGRFATEGHLISWAGLCPRNDESAGKRRSTRMRKGAPWLKTTLIQCAWAAARTKESYLQAQFHRLRARRGAKKAIGAVAASILTSAYHMLKNGTLYEDLGADHFDNRAKGKQIQRLVSRLQNLGFTVQLQPVEAAA

SEQ ID NO: 348008 - protein, 355 aa, unidentified
MGPGSLSSDWTARKGLYDILLRQLFETAFRTQSMVPAMPKCVGIDISKDHLDWALRSEQEGLLQTGRVSNTPDQREQLSKRLAEAGPDRVVCEATGGLERPLAAALVAEGLPVAVVNPERTSDFAGALGREEKSDPIDAEVLALFGERIRPEIRPLPSEQTQRMRALVKRRRQLVEMIGAEENRLERADDSARPSIERHLDFLQEELAETEKKLEETLQQSEAWKVQERLLCSVPGLGQTTARTLLALLPELGQANREEIAKLAGVAPIVQESGRWKGERHIEGGRPAVRHVLYMATMTAIQHNQRIREFYERLRERGKAGKVALVAAMRKLLVILNTMMKNETPWQPNHSPAHA

SEQ ID NO: 348009 - protein, 362 aa, unidentified
MEFFSGLDVSMERTAICVVDDKGEVQMQTEVVTDPDAIAAALKPFLPRLRRAGHEAGSLSPWLHPELLKVGLPAVCLETKHVRAAMSAQRNKTDAADALGLAHIVRTGWFRRAHIKTESCYRLRLLLTQRRNLKRKVLDLENTIRHSLKAFGIRIKGTGRTGFDKAVREAVADDALTSELMDAMLVARAMLWKQYCRLHDLVVKFVARHELCRRFMAIPGVGPVTALSFVTAIDDPSRFRRSRDVAAYFGLTSRRWQSGTSIDVQGRISKAGDPDVRRALYEAASALMTRFKGRDKVQTWGLALAKRSCHRKATVAVARKLAVIMHAMWTDGTCYVGDAAASASDLAARAAVKDSKLLGAQA

SEQ ID NO: 348010 - protein, 408 aa, unidentified
MNAYNELSHFGGLDWAKDHHDVVILDPQGQIVEERTFPHSAAGWQQWRERVKRYPRMGVAIETSSGPVVEQLLDSGVKVYPMNPKSAQRYRDRHVPSGSKTDRVDAWSFADALRVDGHGWRPLSPLDPVIQELRLLCRDEVGLIQQRTALVNQLQEALQAYYPTALACFEDWTAPYAWAFVQKFPTPEVLAKAGTGRWHNFLHQHKLYRPQTVKQRLEQFAQAQEFAGGAAVTRAKSRLAVSLAKTLVTLEKQLQEYRSAIAKLFAEHPDQHLFGSLPGAGEKLAPRLLSEVGQDRNLFADPQSLQCVAGTAPVSFQSGQIKQARIRWHCNRHLRAAVHLWADCSRHFCAWAQTYYQAHRHKGSTHAAALRRLGQRWLKILWTMWQENPTTANATPSTNKNTARGCSN

SEQ ID NO: 348011 - protein, 355 aa, unidentified
MTASYEYHIGVDYHKSYSHLVVQDSSGKTLRSGRVKNDRQSLGGFLERYRENSHAVVEATRNWMVIYDWLDDICDDVVLAHPLKVKAIADAKIKTDKIDATVLAHLLRADLVPEAWAPSERSRDLRVALRERMFYVRLRTMTKNRIVTVFDRYPEQTAQLKKLGDLFGKAGRVQLAQVNVSEIDRIQIDRGLAFIGDIDMRIKQSEATIRAMTKANANVKLLKTIPGIGEFFARLIDAEIDDISRFRQPKKLAAYAGLVPSTYSSGGKTFHGKIIKQGNKWLRWAFVEAVTPAIASDPQLRAQYEHLKIKGINKARVAIARKLLTIAFQILRDQRAYEPRGESTMEGASTISRLS

SEQ ID NO: 348012 - protein, 323 aa, unidentified
MSQPNPLCVGIDVSKTTLDIATANNEFAQFTAGNDTDGFELIIAELRKHSVALVLMEATGGLEAAVACSLQAEGFDIAVINPRQARNFSRAMGYLAKTDRIDAKVLSQMAEVINRHPERERFIKAIPDAERQILAAMVVRRRQLITMLVAERNRLHPAHPQNRKSINTIIKALEDELSRIDEAMNNHIKTHFKELAARLSSIKGVGAMTVATLLSEVPELGSLSRREISALIGVAPVNRDSGTMRGRRTIFGGRAGVRTALYMAALVATRFNPVIKNFYTRLITAGKVRKVALVACMRKLLTILNAMIRKNEEWSDSYHKFSL

SEQ ID NO: 348013 - protein, 411 aa, unidentified
MEVMVERPAALDVHKAQVTACVRVPGKGGAREQEVVQFQTTVRGLLTLRDWLKAQRVTQVAMEATGVFWKPVWAVLEDDFELLLVNARHVKQVPGRKTDVSDAAWLCQLLEAGLLRASFVPPKPIRALRQLTRYRKAQIKERQREANRLHKALEDTGIKLDCVATDILGVSGRAMLDALVRGTTDPEVLADLARGRLRKKLPALREALEGRFDSLHALLIGSILAHLDFLDEQIDRLSDAIEQQLRPFAPAVELLRSIPGVERRTAQVIIAEIGADMSVFPTAGHLASWAGQCPGNHQSAGKRRSGRTRKGSKWLNQALKEAAMAALRSNDSYLQALYRRKKPQLGHGRALGAVKHSIICACWHMLTTGELYNDLGGDYYTRRDPERQTRRLIAQLERLGHTVTLQEANAA

SEQ ID NO: 348014 - protein, 382 aa, unidentified
MQASNECTPTQGHHGTIFVAIELSQRKWLVTMHSPDRDRFSRHKLEGGDHAGLLGLIESVRSRVARQLGGVPMVVSCYEAGYDGFWLHRLLTQAGIANLVFDPASIAVEQRSRRVKTDRIDGELLLRTLMAHLRGEPRVVRIVRVPSVEQEDARRLNRERDRLVKEQTAHTNRIKALLRLVGMAVGNPRRSDWLRWLEGQRDWQGCPMPRELLAEVTREHARLMLVRDQLAALEQAPEASEASVTAPNSKNRDLLLRLKGIGSVFATTMANEVFYKDFHNRRQVGGYIGLASSPWASGGTEREQGISKAGNPRARLKAIELAWLWLIHQPDSALSRWYRERTANASKRVRRIMIVALARRLMVALWRYLTTGLTPEGAVLKA

SEQ ID NO: 348015 - protein, 403 aa, unidentified
MNAVGIDVSKGKSMVTILRPFGEIVSSPFEIKHTSSDILSLIKLIHSIEGESRIVMEHTGHYYEVLAQQFSAAGLFVSAVNPKLVKNFNNDSLRKVKSDKADSIKIARYALDKWQNLKPYSIVDELRTQLKAMNRQFHFYVKQKTAMKNNLINLIDQTYPNANTYFNSPPRSDGSQKWVDFAYTYWHVDCVRKMSLNSFVKHYQNWCKQKKYIFNKSKAEEIYTKATELVPVFPKNEITKRIIRQAIAQLNSTSATVETIRILMNETASKLPEYPIVMQFKGIGPSLGPQLMAEIGDITRFTHKGALTAFAGVDPGVNESGSYAQKSVPTSKRGSSNLRKTLFQVMDVLIKTMPQDDPVYQFMDRKRAQGKPYYVYMTAGANKFLRIYYGRVKEYLCILSESS

SEQ ID NO: 348016 - protein, 356 aa, unidentified
MHARSVSAAAIDGVTGELIRQRLVPDPAVILDWLRALPGPVAVTYEAGPTGFGLARALTGAGIRCQVAAPSKINRPSGDRVKTDARDAVLLARLLRLDDIVTVRVPTVAQEAARDLVRAREDVRGDLMRIRHRISKLLLRHGQVYYGGAAWTGKHEAWLGQIRFAGLERAGTRAAYDADREALTLAVLRRQRLDAQITALAADSEFTAVTRRLCCLRGISTLTGFALAVEIGDWHRLTGTGIGAYLGLVPGEHSTGGSRRQLGITKTGNTHVRRLLIEAAWHHKPAYRIGATMRARWAQAPAAAQARGHAGNQRLHIRWTQLAERKKTHTVACVAIARELAGWCWSLATLPELPTA

SEQ ID NO: 348017 - protein, 315 aa, unidentified
MKETPTYAGIDVAKDRLDVVLRPRGQYVEATNDERGIRSVVRRLRKENVALAVLEATGGLEQSAAAALALAGVPVAIVNPRQVRDFAKATGKLAKTDRIDAAVLAHFAEAVSPEPRPLADEHARELSAVVLRRRQILAMTTAEANRARTAPKAVRKRIEAHLRWLRKELARIDGELERVVNESLVWKERVSLLMSVPGVGPTLSATLLAELPELEYLDRRRLAALVGVAPLNRDSGTLRGIRTVWGGRSGVRTTLYMATLCATRHNPTIREFYGRLVASGKPKKVALTACMRKLLSILGAILRNRTPWQPQLVAA

SEQ ID NO: 348018 - protein, 352 aa, unidentified
MNQITTVGVDLAKELIVACAADAAGRTQFYKRFGFHGFAAWAANLPPCTIAMEACSSAHYWARTLSALGHNVKLLAPDLVKPFRKSQAAKNDRNDAQAIVIAALQPDMRFVSVKSLEQQSILAVHRMREGWKSERTALINRVRGLLAEFGIWLGRSPETLARRLPQLMHEEQLPARVRALLAQAHGQLLQLEALMQQCELDIQAHARHSEAAQRLSALNGIGPISASAIVATIGNAADFRNGRQMAAWSGLVPKQSSSGGKERLGKITKRGDTYLRGLLTQGARSTLNAALARPPDKRSQLEHWIVALRHRVGYHKSLVAIANKHARICWALLARAERYDPHAASRHVRKAA

SEQ ID NO: 348019 - protein, 427 aa, unidentified
MSEIGLIKPEPEFAAFIGIDWADQKHIWCLQAAGSAKRESGELEHTPEAVESWVAHLYQRFAQRPIAVAVEQSRGALVFMLSKYELLHLFPVAPHMASSMRQALYPSGAKDDPRDADLLLDLLLQHRNKLRRLSPDSEATRRVQNLVEERRKLVDEKTAQINRLTDHLKVYFPQMLEWFGRLDSDVVCALLERWPALEELQKAPPASLRAFFRKHRCRDREQIEHRMEAIRQGVPAIHDRAVIEAKSAAVRVIVRVVRVLGEGIEDLDGQIEEAAAAHPDFFIFNSLPGAGPVMAPRLLAAFGSQRERYRSADEVQSFSGIAPLTETSGKRKWVHFRWACPKFLRQSFHEWAGHSIAQSEWARAYYQQQRSKGNTHHEAVRALAFKWIRIVFRCWQDRVAYDENTYLAALVKRGSPLGAIVATGKTL

SEQ ID NO: 348020 - protein, 439 aa, unidentified
MLRIRSLPTIGSYPVAQVKNKKGDIMKTCLFVGVDTHKYSHTAAVLDGYFEVVATISFDNSTEGFNHLFDKLKKLISGRDLVFGLEDSQGLGSFLAQYLIRNGHLALEINPVYTDRGRRRTVSREKSDKRDAIVIAKTLIRERANLHPVRMERNSVALREMVGYRQTLVNESTRIKNRLHMALFNQYKGVLGQFGSLFGKCALAFFTRYPDPFLLKKVDPDTLSVFLKANSKGRYSIKKARAILSSIDNSIVDSLTGTRAHIIVAHTQRLVQIGKELKKIQDILEELVEASSYGCLVSIPGIDTVTASKIIASVMDISRFSSSSKLARFCGIAPAEKSSGRKKRYEKSKYGNKSLHSTIYFMALAHISRTRDGRDKNPISRTYYLKKISEGKTKKEALTCLSRRLVDLIYAVMRDRSIYNFSKSTFTKQQDVALHAAVA

SEQ ID NO: 348021 - protein, 351 aa, unidentified
MMNITTVGVDLAKEVITVCSMDTHGHVLKTRDLRVTEFSAWLLQLPANTILGMESCSSAHHWARKMQTMGLVPKLMAAEFVQPFRKSRSSKNDHNDAEAIAIAVKQPQMRFVTIKTEAQQARLAWHRCREGWKEERTALINRTRGLLLEFGHPLARSSKAFTIGLQAALHHDALPTQFRTLLTHVQQQLQQLDQQLAQCDRSIALSAKQDDPSQRLQAQPGIGPISADALTATVGNARDFKNGRQFAAWLGLTPRQYSSGGKTKLGRISRRGDAYLRTLLVQGAKSTLQSVLKKAPHLLSHMQQWILKLYGRVGYHKTLVAIANKHARQVWAILTKGEAYDQDAWKRIVST

SEQ ID NO: 348022 - protein, 317 aa, unidentified
MVQTSTTTAGIDTSKDKLDIAVHGQSGCWEVANDLCGWRRLMQLLTKAGVRRVGIEATGGYERGVVEHLRAAGFIVLVLQPIQVKAFGRARLRRAKNDKLDAALIATFTASLEQVWDAPDPRLVELAEQLTFLEQAEEDIKRFKTRLEHMTEPGLRRLVLDDIARLKARRISQIRNIAKQLRAHHDLAARLDLVLSIPGIGERTALALLVRMPELGRISREQAAALAGLAPFDNDSGQYKGQRRIAGGRARLRRSLFAAALPAAFRWNKAVMALYARLTAAGKAHNAALIACARKLLIYANTVLQRGTPWTEKLLGV

SEQ ID NO: 348023 - protein, 428 aa, unidentified
MKYNTQNAKIKSITEKTLIVGIDVGSETHFARAFDWRNYKYSKKPLEFSNTEAGFMTLKAWMADFAEKYGKNVVIPGMEPTGHYWFNLGAYLQDNGMKPVHVNPHHVKKSKELDDNNPNKNDRKDPKTIAALVNEGRFSYPYIPTGIYAEIRSLSNLRLQTQEEITRIKNRIARWFSIYFPEIKDVYRNPDSVSGLMILKEAPLPQDIVKLGVDGINKIWRDAKLRAAGLKRAKTLVTAAEHSIGSQEAPDSARIELKNLLNDYEIYKNREEDLMSLTEEKLSEIPHIDKLLEIKGVGLKTVSGFVAEVGDITRFDNPKQLQKLAGYAIVECSSGKHKGESHISYRGRKRLRYVLYEAAISLIARNEEFKEVHRYYRTRKENPLKKMQSVIAVACKVLRIFYTILTKGVTYDGAKMMQDIKRPQMLAA

SEQ ID NO: 348024 - protein, 347 aa, unidentified
MNFYNQQHQYYCGIDLHARKMYVCILDQKGKTMVHENINTDPDLFFQLVSPYLKDIVVGVECVFCWYWVSDLCAKHQIPFVLGHALYMKAIHGGKTKNDKIDSYKIALLLKGGNFPTAYPYPAEWRATRDLLRRRMYLVRRCGELVAHIQNTKTQYNLPEFAKRLARKYNHAGIAEQFENPEVRKSVEVDLAAIASLNQILNKLEWHIEKTAEQHDYHTLYLLRSIPGVGLILALVMLYEIQDVKRFPSVQDFSSYARLIKPVKESDGKWAGKSNGKIGNHHLKWACNEAAILMLRESEKAKQYVAKLERKYNKGKALGIFTHKIGRAVYFILKNKEAFNMDKFFSQ

SEQ ID NO: 348025 - protein, 320 aa, unidentified
MMTQDDLVVAGIDVAKNKVDVCIRSQSLRRAFASNREGRRELACWLRRRKVGKAVMEASGGYEREWAKALRDAGIEVRIVDPKRVRSFARSAGRLAKNDTIDAEMIAWFAETFGEAPHQVYDAERERLAQIVNTRQALLDVQSELQNSSEHSRPEVVQRVQARLLKKIAAELATLEAAITATIKATPRFAELAEIIESVPGLARITSAGLIAAMPELGQVSNKVAAALLGVAPYDDDSGKRRGERQIKGGRRKTRNLFYMACLGAATRHNPVLKAFYRRLVAKGKEKKVALVACMRKLIVILNIMIARRQKWNPNLSAAA

SEQ ID NO: 348026 - protein, 344 aa, unidentified
MEHYAGIDVSLESSSVCVVDASGRIVREAKIASEPAALIAWFREIGLAMARIGLEAGPLSQWLYAAMREAGLAVELLETRHVRDAFKAMPVKTDRKDARGIAQLMRLGWFRPVHCKSLPAQETRALLTARKLVQSKHHHTEMSLRGILRGFGLKVGKTSQRTFASRVHELVAGHPTLLLVAEALLAARAVLGEQLSKLEKRVRSLARHDRRVRRLMSAPGVGAVVALTFVAAIDDPARFRSSKAVGAHFGLTPKKYQSGETDMTGRISKIGDAGVRTMLYEAANVIMTKPVKGSLLKSWAMRLALRAGMRKAKVALARKLAVVLHRMLADDTEFVADKAATAAV

SEQ ID NO: 348027 - protein, 341 aa, unidentified
MGEIVTIGLDLAKNVFQVHGVDSNGAAVLKKAIRRSQVLTFFRDLPSCLVGMEACATAHHWARELTALGHKVRLMPPQYVKAYVKRNKNDAADAEAICEAVRRPSMRFVPVKTEEQQSALAMHRVRELLVRQRTMLINALRSHLAEIGIVEAQGANKVGRLVAIVQNPDDRRISGSLRITLTTLAQHLERAGEEIATIDKRIATWHKANAVSQRLASIPGIGAVTATAIAASVPDARSFRSGREFAAWLGLVPKQNSTGGKARLGSISKRGDGYLRRLLINCAMSALLRSKAIRSMPWVKRMIEKRKRPLVVAVALANKTARVAWAIMSRGTVYQPVATVT

SEQ ID NO: 348028 - protein, 315 aa, unidentified
MTSKNIDNFIGIDISKAELDVAIWGKGSYWQISNDIQGRQELIRRLKGLNPRLIVVEASGGLEQPLVRELDQANLPVAVVNPTRVRNFARSAGQLAKTDKLDAEIIAQFAQAMRPKVRPLRTRQQEHLGALVTRRRQVVDAITAEKNRKATAHPALQEQIQRHIDWLEEELKELDNEIDQLIQQSDEWREKAAILSSVPGVGPVTVSTLVAKLPELGSRNRQQIAALVGVAPVNKDSGKKRGKRRVFGGRASVRRVLYMATLAATKFNPIIRAFYERLLANGKEKKVALTACMRKLLVILNSMIRHKKLWCASLV

SEQ ID NO: 348029 - protein, 333 aa, unidentified
MLQRKSVISKSEEAEMPQIYIGVDLSLHNLDAWIGGKYKRYDNTEAGLKRFLKDVRKLNKPVLVAFESTGSISLYFAEQLDCEGIARTCLNPAWIRHYAKSIGRLAKTDRIDCELISEYAQLHQIYADKPMSSDVLKMRQKQRYRSMLIKHRAQLKASLYTYRDDDTISRIMQQISQLDIEIKEIQKEMEEIIQANEEMRKRYQIFLNIGGIGEKTAKLLLCNLPELGFLSRREIAALIGVAPFNWDSGRKSGKRFARFGRREVRTQLYMVIIASMRISNNSSRQTYDDLRGRGKTHKVAIIACIRKLLVRINAQVRDWMAAGMPEIESKKVA

SEQ ID NO: 348030 - protein, 366 aa, unidentified
MSEITRVGVDLAKRVIQIHAVNAAGLRVTGRALPRDKFLAWCAQLPAGCLVAMEASSSAHHWSRKLLAMGLDARIIPSHLVTPYRLQGKSGKNDANDAAAICEAASRPQMHFVPIKSVEQQSMLCIHRLREGLKTERVACINRIRGLLAEFGLVFAQKPEVLRQALPDAIEDASNELGGLARMALQRAQQQWQELDGHLDWCDARIAAHLKASEQVRQAQQLMGVGPITASAVVATVGDFRQFKDGAQFGAWLGLTPRQNSSGGKNNLGKITKRGDIYLRTLLIQGAKSIVLTAHKRDDPISRWVQQLKEKSGWQKAVVALANKNARILWAVFVRGKSFDARHVSVKPTGATPVGSAMAQLTAIPA

SEQ ID NO: 348031 - protein, 356 aa, unidentified
MDAKKYIGLDVHQATISAAVLDEAGRLVMEAVIATRPEAIVDWLGGLRGSLHVTLEEGTWAAWLQELLQPRVARVVVCNPRRNALLKEGNKSDRVDARKLAELLRAGLLRPVYHGENGVGVLRELARSYLSLTQDLTRVMNRLKALFRSRAIACRGQTVYAPRHRGAWLEKLAEAGLRRRAEHLYQQLDQLQPLRQQARQELVAEGRKHSAAAWLRGVPYIGPLRAALLIALLQTPHRFRTKRQLWAYSGLAVRTRSSADYRHDRAGQLQRAPQPPAPRGLNTNHNHELKNIFKSVATAASAGRGPFHDFYAALLAQGHKPALARLTLTRKIAAITLTVWKKGVRFDPGQLKRQAA

SEQ ID NO: 348032 - protein, 333 aa, unidentified
MYYSGIDLHSDNSYITTVDDSGAVVKQQRVENNNELVLDYFQSLPGSHQAVVESTTGWYWLNDLLGENGIELVLAHAKYLKAISYAKVKTDKVDSQTLAILLRQGLIPRAHKISRELRGLRDTMRVRLRLVQQRSDTLRRLHSIHAKFNGSVPDPYRFQLAVLEHTRDTLSKEILALEKSLHPVLIPNDDIQRLLNIPGIGKLSAFTIYLEIDGIQRFNSDKHFVSYCRLVPAADNSNRTLHHRSSKDGNKYLKIAFSDAAVHAIQFYPEYKRLCQKLVRRSGEATARTVVAKELAKIVYYVLKNKTAYTGLKGQPMSRQKSQQWPRLSSPLS

SEQ ID NO: 348033 - protein, 377 aa, unidentified
MHSENIAAYVGLDVHKETLAVAIAAPERLGEVRYYGTINNEAQAVRRLFQKLQGLYGNILSCYEAGPCGFGLYHQLTAMNIKCQVIAPSRIPKSPTDRIKNDHRDAISLARLLWAGELTPVWLPDLTHEAMRDLIRARAAAKRDSRVARQRILSMLLRTDKRYAGKHWTGKHRTWLANQSLSQPSQQIAFQHYCQSLEQIEDRILQLDQEISRLLPEWSLCNLVCQLQALKGVGQLIAITLVAELGDFSRFSNPKQLMAFLGLVPGEYSSGNSIRPRGITKVGNSELRRLLYEAAWSYRTPAKVGAWLIYYRPDSVTQYSKDIAWKAQQRLCSRYRSLTAKGKKSQVAITAVARELTGFMWDITLAAQSSFSQQKQN

SEQ ID NO: 348034 - protein, 350 aa, unidentified
MEYIAFDAHKHYTLASVVTPDGQLVREERIEHDRGALRGFLERCERGSPVAVETIGNWYWIVDEIEAAGCLPRLVHARKAKLMMGEINKTDKLDARGLNRLQRTGTLPTVWIPPGELRDQRDLPRTRMVFVRQRTQLKNRIHATLAKYALHDLEVSDLFGVRGRALLRERLELLPPHTAYASQQLLGQVEELGRQVRAFEQRIQATFKPTPAVQRLLTLPGVGLTLAVVIALEVGEVARFASAEKLAAYAGTTPRVHASGGKTRFGPARADVNRYLKWAFVEAANAICLHRGRAAHRHVSRLYERVARRKGHAKAIGAVARHLAEATYWMLSKQEAYREPKGVGRFVHGG

SEQ ID NO: 348035 - protein, 388 aa, unidentified
MHVYVGVDIAKELHYAAIMDSDGVVTKPFSFENNDKGFNLLLSHLAPYDKESILIGYESTAHYQENLAFFLKSLGYRTAEINPLQTAALRKANIRNTKTDSVDARLICLALMNHNIQGDQRDSARLDDLYQLCKMRMDILKKRTTCKIQLVATMDRIFPELASFFDNNLHTNTIYRLIESFPLPSQIKKTRIDILTKLLHKASRGHFKKEKAQKLKDLADISVGIPSDIFAFQAQQLVHQIEFYTDQIQTIEERINTNPDVMSSPLMTIPGIGTFCVACILSAIKNINDFGAPCKILAYAGLDPVIRQSGKFNASHTRMSKRGNSLLRYALVWSAGNVVKNNNTFAEYYRHKTEDQGKSHYQALGHCAKKLVKSIYHMLKYNESFNLD

SEQ ID NO: 348036 - protein, 428 aa, unidentified
MNEEDCTRLEEFRQFRREIRKSAEYLIVGIDVAKDKHHAFFGTATGKTLFKRLVFENDIEGFRKLLVQAEAMKVQEGLKKVVFGLEPTGNYHKPLGEHLMRCGQGVVLVSGVAAHENRKTLDGRWDSNDTRDAANVADLISQGKCLFYEFPVGGLQDLRNLLSLKRRLKRQEHGYRVRIRNHLVAKYFPELDRYFEQSEKTSLAVVRWCLDPSVIAGLEYPKFVEMVSSGQRRLSQENRLQAIWKMAVDSVGCEVGPTVAFEVQVMVEGLKQIRERIRDIDEKIYEICSQFPEYEFLLSIPGFGPDISAKVLGAVGDPFRFQSGKQVLKMAGLDLSAERSGKTSQSAIPVISKKGKADLRYALYQAAFIASTRNQAFIVYYTHKLQGREREPGIKTKMRVKLSAKLLIIAWTLMKKKEPFNPDYLNIE

SEQ ID NO: 348037 - protein, 411 aa, unidentified
METVIRRCAGLDVHKATVVGCVRIIDENGELQVETQSFGTTVGDLMKLNDWLMSYAVTVVGMESTGVYWKPVYALLESEFECWLLNAQHLRNVPGRKTDVADAAWIAQLVAHGLVRPSFVPPKAIRELREITRYRKALIQERSREAQRLHKTLEGSGIKLSSVATDILGVSGRAMLQALLEGTHDPEVLADLARGRLRKKIPALRKAMVGWFSPTHRILVTELLAHLEYLDESIERLSEDVATMVAPFAIPIDLLDTIPGINRRAAEVVLAEIGPDMSRFASSGHLASWAGICPGNNESAGKHFSGKTRKGSKWLRTVLVESAQAAARMKGTYLAAQYARIKGRHGHKKAIIAVAHSILVIAYHLLQRGKPYDELGGDYFIERQNKQAYQRRLVKQLERMGYQVALTEAAA

SEQ ID NO: 348038 - protein, 397 aa, unidentified
MYIVGIDIAKRKHEAAVIDGEGTVIIKPFSFTNNCSGYNRLLAMLTKAKLPLDEVSFAMEATGHYWLALFTRLQKEGFRVQVINPVQTNSIRSFYIRQAKTDPRDALLIAEVIRFGHFSESTLHPENIYELRELCRGRHAIVSMQADVKRKVIALLDQVFPEYETAFTNLFGDTSMAILQTCPTPKELSEMPLEELCHLIEVSSHKRFRMAKARELQELARNSFGFAMAGDVFSTMIRLYAKHLDFLKQQVREMDRKIAEIMETLDTPITTITGIGPTLGAYILSEIGDISRFSSAAKLAAYAGIDPTMRQSGEYNGVRNRMSKRGSPYLRHAIWLATSSAVLHDPALKLYFQKKRDEGKPYMASVGHACRKMVSIIYAVMRDNKAYTPHIPNEISA

SEQ ID NO: 348039 - protein, 343 aa, unidentified
MTLIGCDLHARMQQVAVLDTGTGEIQEHQFPHHGDAVERFYAALPRPVTVAVESTGYSLWFHTLIRQLGHTLIVGDAAKIRAMVVRKTKTDRRDALHLLELLRHDRLPTIWVPDPATRDRRALLAHRMRLVRIRTTVKNGLHAIALSHRLVEGSKRLTKPRLAVLQGLPLAPYTARRRDESLELLHWLDEHIRQLDDEVAEAAAGDLAARRLLTHPGVGPVTALATIVVLGPVGRFPGSKEVASYVGLAPALHASADTHHLGQITKQGNPFLRLVLVQAASIAIRYDEDLHRLYTTLHRRRGHAKAKVAVARKLLIRLFIMLRDGIDYDEFRRRGRAAQPMPT

SEQ ID NO: 348040 - protein, 349 aa, unidentified
MLADELDYVVGVDTHLDEHVLTVLAAPAGAVLAKQAVPANARGYREALRFVEEHADGQRAWAVEGAGHYGAGLARFLAGRGEPVLEVSRSPRAERRLRGKDDSLDAIRAARALLSSETLALPRAGQRREALRLLLIARRSAVDVRREALVQLRSVIVTAPERLRDDLRGLPVGRLLERCCRLRRSRCASADELATRLVLRSLARRIETATAEAGELEAEILGHVRALAPKLLDEPGIGPIVAAQVIIAWSHPGRVRSEAAFARLAGVAPIPASSGQTTRHRLSRGGDRQLNRALHTVILHRRLHDPATKTYIERRVAEGKTRREATRLLKRYLARHLYRVLDNQASLMT

SEQ ID NO: 348041 - protein, 340 aa, unidentified
MKITTVGIDLAKNVFQAHGVDEHGKAVLRKQIKRAQVAQFFANLPPCVIGMEACGSAHHWARKLQAFGHTVKLMAPQFVKPYVKTNKNDAADAEAICEAVRRPNMRFVSIKTVEQQAVLSLHRARQGFVKARTAQANQIRGLLAEYGVVVPKGITNIAARIPAILEDASNELPDAFRQLIAGLLEHLRCLHQQAAELESQITVWHRTNDDSRNLARIPGIGPLTASALVASVGDARTFKNGRQLAAWLGLVPRQHSSGGKSNLLGISKRGDAYLRTLLIHGARSAVLATQRSDKESWLTQLLKRCHTNVAAVALANKNARVVWALLAHDRTYQPDYAAVA

SEQ ID NO: 348042 - protein, 373 aa, unidentified
MKKLGEAFIGIDAAKARNAVAVADEGRDGEIRYLGEFDASPEAMRRLVQKLAAKYERLHFCYEAGPTGYGLHRLIVSLGHGCVVVAPSLIPRRPGDRVKTNRRDATTLARLLRAGELTAVWVPDPVHEAMRNLVRARTAAVETVRVHKQQVNAFMLRHGRTAPVKKAWGARFRRWLQQQKFEHPADQIVLQEYVEAVRLAEERLGRIEAAIVEFLPGWSLAPVVEGLMALRGVDLVVAVNFVVEVGDIRRFESPRQLMGYIGLVPEERSTGESIRRGSITKMGNARLRQLLVESAWTYRHPPRVGKRKLGLMARVPPKVREIAWKAQSRLTARFRVFAARGKRLTVACTAIARELAGFMWAVAQEVQPQSNAA

SEQ ID NO: 348043 - protein, 372 aa, unidentified
MSRFFGSERLLVMKKPTHHLIAEVRSSSTVEITIGIDLGDVWSHYCTLNEDGEVVDRGRFRTSPSGVEKWFTDLPRVRIAMEAGTHSIWVSEQLQELGHDVIVANVRELRAISHSDRKSDQVDAEKLARYARLDPNILRPISHRTVAQQEALTLIRARNVIVRLRTAAVNAVRGLAKPCGYRLPASSTLCFAKRCMAVLPSGLTQALGPVLEQIATMTIKIKHYDRLIKQLTETEYSETQALIKVYGVGQLTALTYVLTLGSKERFQRSRDVGCYLGLRPKRSQSGDRDPQLGITKAGNIYLRSLLVECANHVLGPHGRDSTLRQWGLHLASRGGKQSRNRAIVAVARKLAVLLHRIWVTQEPYIPFYAVAA

SEQ ID NO: 348044 - protein, 356 aa, unidentified
MLAELVDAVIGVDTHRDTHEVEIALPTGTPIATITISNDSAGFAALLAWIFDHAPGPRLAVSIEGTRSYGAGLARAVAAAGLVVVECEQPHRKVRRGKDKSDPIDAHLAVLTALRCDAGRLPTPRADGDREALRILLSARHDLTTAHTAQTNRLRALLLGGDDADRQIARAALPDTVLAALARRRSPRDANRAQAVRHGELRRLAIAIRDGGRALKANRAQLHAIVDDLAPGLTDRRGVGPVSAAQVIVSFSHPGRCRSDAAFAALAGTSPLEASSGRTVRHRLNRGGDRALNCAVHTIALTRMRCCERTQAYVARRTAQGKTLREIRRCLKRYITRELYRALTTTMTPAMSPADA

SEQ ID NO: 348045 - protein, 305 aa, unidentified
MAQSSTLFIGMDVHKETIAVAYVAQDHGAEVTYLGTIGTRQCDIDQLVRKMQSKAKHLVFVYEAGPCGYWLYRYLSKKGYDCWVVAPSLIPKKAGDRVKTDRRDAVQLARLARSGDLTAVDVPKVEDEAIRDLSRAREDTLSDLKDAKFRLKAFLLGHDIRYVGRANWNPAHLRWLSEVVCPTPAQQIVFQEYVRAVTEHTERLQRLEQELHDHVKAWRLHPVVEALQALRGVQFTVAVTMVAEIGDLSRFDTPRELMKFLGLIPSEYSSGERRQQGSITKAGNTHARRALVEGAWAYRYPAKVS

SEQ ID NO: 348046 - protein, 346 aa, unidentified
MNKITRIGLDIAKNIFVLHAVNEHGKTVKRQTLSRSKVLSFFAQTEPCLVGIESCASSQHWAREIRQFGHTVKLMNPKFVVPYRKSGKNDTNDAEAICEAVGRPNMRFVSVKSIEQQAVCSLHTGRQFLVVQRTALINHCRGLLTEFGIIMPLGADKVRRLFAEILDDEQSAIPLLLKDLLQQHLQDLARLEHRIESIDQQLAQWAKTNQQAMTLLQMLGVGVITATAFAAGVCDPKLFDNGRQFSAWIGLVPRQYSSGGKNKLGSITKTGDVYLRTMLAQGARSIVFNAKKKNDPFSLWIQRLLERAGMNKTVIAVAAKQARIMWAIMAKNQDYQPERICSPLSA

SEQ ID NO: 348047 - protein, 348 aa, unidentified
MLTYCGVDFHSRQQKVVYGNMADGEIKRIELKHQIDEVRLFYEQLPKPVIVGLEATGSSSWFEKLLSELGHEVWIGHATEIRRRARSRQKNDWRDAELAYDLMIKGEFPRIYRLSDESLEILRQLRYRHRLVKIRTMAKNSLHAIALSSGLSLKTRLLTQAGRNKLNLLTLSPVFTEQRREWLDLIDQIKHRITRIESELEQIGETDPRVGLLKTHPGIGLLTALALVHTLSPAGRFSSSRKVTAFVGLEPCEDTSDDKVHWRGISKAGSRLLRFLLIEAGHSAIKNDEELRRFYFRLVFKRDRPRAKVAVARKLLVRAWIMLRDQIDYSEFLRRGVAVGSARTEHRL

SEQ ID NO: 348048 - protein, 340 aa, unidentified
MNVRTLGIDLAKNVFSVHGMDDRGKTVLHRVLRRRQLLSFVAQLPRCLIGMEACGSAHYWAREITKCGHEVRLMSPRFVRPYVKSNKNDSRDAEAICEAVSRASMRFVAIKSRDQQDTMALHRVRSLLIRERTSLMNEMRGLLAECGVIAAQGASALRRLIATVIAETDERVSDLLREILSEMSERLRLFEERLKRYDRRITELADKDERTGRLMTVPGVGPLTATALIAAVGNARQFRSGRELAAWLGLVPRQHSSGDRVTLLGISKRGDRYLRTLLIHGARTTLRHAARKRDSHSRWVTTLRERRGPNIAAVALANKNARVLWALLTRAEEYRITAAA

SEQ ID NO: 348049 - protein, 365 aa, unidentified
MASVSQLAPIHLGLDVHKDTISVGILPTDQQVPDVERITHDEASIRRLVGRLGNPRMLRACYEAGPTGFELARLLHSMGVGCDVIAPSLIPRAPGDEVKTDRRDCRRLARLHRAGELVCVRIPTVQEEAVRDLCRTRGDMVEDLTRARNRLGKFLLRHGRVWRGGSTWTLTHQAWLRSQRFDQPAMAQTFAHYLAVVEVRNAQLDAVEADLAGWSGRAPFDWQVARLAAYRGVTRLGALTLAAEVADWRRFASASQFMGFCGLVPSEYSSGNTTHRGRLTKAGNAHLRAQLVEAAWAYQHRPSVGVAIARRQQGLDPAVVARAWAAQQRLCARFRALAARKNTKSIVAAAIARELAGFLWAEMTA

SEQ ID NO: 348050 - protein, 371 aa, unidentified
MKKNSSCSQSPKRGKKAQRGRMTIGIDLGDKTSRYCVLNEQGEVLAESGVATTKQALGRVFGARQRCRVALEVGTHSPWVSRLLERLGHEVIVANAREVRSISHSSRKDDRRDARMLARLARADPQLLRPIRHRGEQAQGHLLRIRVRATLVEVRAKLVNTARGLTKAWGERLPACDTDTMGVRRLEGLPAALRAALEPLLREVESLTEKIKACDVELEQIARKEYPETELLRQVSGVGALIALTFVLTLEDANRFARSREVGCYVGLRPRRKDSGESRPQLGITKEGDRYLRKMLVQGAHYILGWRGPDTDLRRWGLKLAERGGPNAKKKAIVGVARKLAVLLHRLWVTGEVYEPLRNNTAGPRRKALAA

SEQ ID NO: 348051 - protein, 308 aa, unidentified
MKVFYLGVDVSKKKLDLCLRSNGKDILYDVIPNDLSSIKSWLTRTFEKFFLSEDSLVVCAEHTGQYTYPLVCATKSIGVYLCLEDAAKIKYCHGIPRGKNDKIDACRIAMYAERYNDCLQPYTASELIIQKLKNLSTERSMLVADRAKYQSQLKDQVDYMEHSIYIAKCNRVEGIINTFTDYIAQIDLEIKELINQAPVIAHQMDLLMSVDGVGERVALKMIMETDAFTSFTDPRKFCCHAGVVPFVYVSGSSQRSKNRVSNRADKSIKHLLHMAALSVSQVKNSPLKKYYDRKVEEGKSRNYQNSLA

SEQ ID NO: 348052 - protein, 331 aa, unidentified
MKFKEAIGIDISKKTLDVVLHCCQVYCQFTNDKKGFNELIKWAEKNSGFEIEQMIICMEHTGIYTYQLSEYLAKKSIAYSIVPGLEIKRSLVITRGKNDKVDAKKIASYAFMRRGQLKLYQLPSKNVSKLQKILVIRDRMAKQKGGYQATLREFKELFTKKDNELLFASIEKMKAELDKQIKKLEKEINKVIQEDEKMSYQYKLIVSIKGIGLIVAANLLVTTNCFTRFENSRKFACYSGIAPFSNQSGTSIKSKSRVSHYANKKMKSLLYLSASSAIQNDAEFKDYYQKRIESGKSRMSTMNAVKNKIISRVFAVIKRGTPYVNLKRYAA

SEQ ID NO: 348053 - protein, 338 aa, unidentified
MSSLKYIGLDVHLATISIAVLNASGKLIMEVTIKNQATALLDFLRGLRGALHVALEEGTYAEWLYSLLAPRVTRIVVCDPRQNPRRRGEKKSDRLDARKLAEWLRLGTLKPVYHGRPQGHALRELARSYRTLVSDATRVMNRLKALYRGRGIPCAGARVYAPRFRPQWLEQLWEAGVRQRAELLYQQLDLLLALRRQARGAMLAESRRYAAQKILRSIPSLGPVRAALLMAWLGTPHRFRGKRQLWTYAGLALVTRSSAGVTRDLCSFRAVCASSSKAPTCCPICPNQTGSAILCVRMRRLEQATKEILNLEAHFQLPRGEAFRDHDFSNELGTDSLR

SEQ ID NO: 348054 - protein, 340 aa, unidentified
MKLTAVGVDVAKRVFQLHWVEPETGEIISKQIKRAGFLEHFANRAPCLVGMEACGGAQHWARRLIEMGHQVRLMPGKAVKAFVGGNKNDMADARAIWMAVQQSGVKSVAVKSEAQQAILALHRMRQQLIKFRTMQSNGLRGLLTEYGEVMAVGRASLNRAMADVLARLNDRLPVVLVNTLREQWSRLGELDAQIAEIERRLSEWMKEDRSCRQIAAIPGVGLLTATAAVATMGDPKAFKSGREFAAWLGLVPGQIGTGGKVRLLGISKRGDTYLRTLLIHGARAVLTNTKEPGPWVEQISKRRPQNVVTVALANKMARTIWAVLAHDRTYERSYVSVKPV

SEQ ID NO: 348055 - protein, 342 aa, unidentified
MTIVTVGIDLAKNVFAVHGVDAAGKPALVRPSVARSNLLELIATLPPCLIGMEACSGAHHWAREFEKLGHTVRLMAPKFVAPYRLSGKRGKNDAADAAAICEAVTRPQMRFVPHKSIEQQGQLMVHRTRQGFVEQRTATLNRIRGLLSELGLVLPLKAATVRREALARLEELPGWANTVIGDLLSEVTRLDERIAEYDRHIALMARHSTQAQQLMQLGGIGQTTAMALISTVGNGHDFACGRSFSAWLGLVPGQYSSGGKQRLGRITKAGDAYLRSLLVMGARAVLAAAMNTRTPKQDPISRWARSLAERRGYWRAVVAIAAKNARMCWAVLQRGEAFKMPA

SEQ ID NO: 348056 - protein, 355 aa, unidentified
MKYYTSTTEYNCGIDLHARQMYVCVMDRQGKILVHTNIKNNDFQFFLKLVQPYRHSLTVCCECMFGWYWLADACQAAGLTFVLAHALYVKAIHGGKNKNDRIDSEKLTHLLRSNLIPPAYVYPAEKRPLRALLRQRVFYVWRRSELLARIHSHQLAHNRIPARQTRRTRDPWEEQLLAAEDHPLRQIAIKNDLAMIRHFDQQIFALEEELQRQTKKVACREYALLQTVPGIGETLGLIVLHEIGDIHRFPSVKDFLSYCRLVKGTVASAGKIKGLRGAKLGNPYLRWAFGEAAVIAKRDHAIIGPLAQRLEAQMQGNKFKANTVVAIKLARAVYFMLKNKTVFDPERLVAALTHK

SEQ ID NO: 348057 - protein, 424 aa, unidentified
MATITPVTATVKSEDLMQVCCDVSKEKIDVYSRVGHEGALFEMMDTIRNCGSVLQRQLKAWQELAQAHGHAGVLVVCEPTGGHERKLLALARQAGSRTAYVSGEAVGKARVIESNDTGKTDRKDARIIATLAGMGKTLKVRQLPDEYEQLRELNTTYELECTTVATIRNHMHDQVRQLFPDLDGEEGFIFSATGRAIYQLFGLNPARIRECSWREFVAKVKTFVKAARIERLEKVWAAAASSLLHQCPATVRAMREERLGELFEDLDRHLGRKLQLRTRILDAYGKTEESRKLADIPDASSFQLARVIAESGPLADFRHGSQLLRYFGMNIRERQSGKWTGKNRISKKGRALGRKVLYQLVFSSLIGEGKLFADPYRRKKADCACGMKAIVCLMRKALKMILGVFRSREEFSRDRVFASLPAAA

SEQ ID NO: 348058 - protein, 420 aa, unidentified
MDALNEIDFVAYVGIDWADKKHDACIQEANSEQREFVVIPHKVKLIDEWAKSLHKRFGSPIAVALELSKGPIVSALQKYDFFVIYPINPATLAKYRETFTPSRAKDDPTDAELAVDLILRHPEHFKPLKPQSVEMRTLTSLVEQRRTLVNDRVRITNRLRYALKQYYPQVLEWFDHIDTVLFCEFIERWPTLKQAKRARKNTLRTFFAEHNMRFAHVVERRVRAIKEALALTSDEAVIIPHRLQALVFVEQLRVTLKAIKRYDEEIEKLADNHVDYGLFSPLPGAGPSLAPRLLVAFGEDRERYKNAAELQKYAAVAPVTERSGNKHWVHWRWKCSTFVRQTFIEWAGQTINKSYWAGVYYRQQRAKGSNHQAAVRSLAFKWIRILYRCWQAREPYDESRYLKSLERRGSPLVKELAKVA

SEQ ID NO: 348059 - protein, 455 aa, unidentified
MTKQKSQPRMKAPVNALEQINPHAAGIDVGSEEVYVAVPPDRDVESVRSFPTFTADMRHLAEWLKACRVATVAMEATGVYWIPLYELLEEHGFEVCLVNARHLKNVSGRKTDVLDCQWIQQLHTYGLLRASFRPPEEIVAIRSLVRHREMLVQYRSAHIQHMQKALTLMNLRLTNVLSDITGVTGLTIIRAILAGERNPQRLAAMRQAGCKKSEAEIAKSLEGHYKREHLFALKQALELYDFYDRQLKACDAELEAMYSEFDPPEDPGTLPPAPRTRKRRKNQAHFDLSPALYRLTGVDLTQIDGVDELTAQKVLSEIGTDMSKWPTVKHFTSWLRLCPNNKITGGKIIQTGVQPTKNRASAALRIAAASLKSNDSALGAYFRRMRARLGTPAAITATAHKLARIIYFMLKEGKPYHDFGADHYEQQYRARILRNLTRRAAKFGFRLEPAIPEVS

SEQ ID NO: 348060 - protein, 331 aa, unidentified
MDQWNHMGIDVSAKTLDVALAGEGIPVISATFPNTSMGHRQLIKWATKRGRSARVCLEATGVYSASIALAIQRHPRLDIMVVNPKAIRNYGQARMQRAKTDRIDAQLILDYGQRMPFVSWQPPSENMLQLQAITRRITQLKSESQREKNRLHAESYRATPTDLIERDIQVHIRHMERRIQYLTEKGMALVRAVSALSGPFQRLRSIPGIGQTSALRILAELAVLPKDMKPVQWVAHAGLDPRPYESGSSIHPPRKITKIGNKFLRTALYMPALVAIRHQCQIKAFYEKLIAAGKNPRLAITAVMRKLLHTIWGVWKHDQDFDGQKFYRVAV

SEQ ID NO: 348061 - protein, 420 aa, unidentified
MPATFSIPRTNDLERAMTAVMIGVDPHKGSHTAVMISPAEEPLGEIRVRASAAQAGKLAEWASAWPERTWAVEGAAGLGRLLAQQLVAAGERVLDVQPKLASRVRLLQAGDTNKNDPNDALSVAIAALRSRTCREVAAEDHPAVLKVWSKRHRDLARLRNQVACRLHAVLCDLVPGGIAKEISAAQAARILGQATPSGAVEVARAELAAEFLEDMRRLDAQLRGTRKKLAAAVKVSGTTLTQVFGVGPVIAGTIIGDIADVSRFPGRDHFASYNGTAPVEVSSGNRKIHRLSLHGNRRINHAIHMAAITQLRHKHSEGRAYYEKKLAEGKTHKEALRSLKRKISDAIFARLQADARQAAAAAPKGPGGHPGNDSASSAAGSHPARQLFGQATPGPGTSLRPATPAGTPSKPVPRKTQATT

SEQ ID NO: 348062 - protein, 357 aa, unidentified
MSAMSQKPHTTIAVVGIDIGKNSFHVVGLDQRGAIVLRQRWSRSQVEARFANVPPCLIGMEACVGAHHLSRKLKALGHDARLMPAKYVRPYSKGQKNDFRDAEAIAEAVQRPTMKFVATKTADQLDLQALHRVRERLVSQRTGIINQIRAFLLERGIAVRQGLRFLRAELPHILAAPPDVLSPRMVRVIEDLAGDWRRLDKRVESLSYEIEAIARQDTGCERLMSVPGIGPIISSAMVAAIGTGDGFSKGRDFGAWLGLVPKQMSTGDRTILGKISKRGNRYLRVLFVQAAWVVLIKPKSWERYGLKPWIEAAKKRLHRNVLAIALANKLARIAWSVLAHGRNFEARKIDEAAAQPA

SEQ ID NO: 348063 - protein, 367 aa, unidentified
MEKSSKVFVGMDVHKESIEVTLAEVGGEVRRLGQIGGDRGSLLKMARKLQARGGERVFVYEAGPCGFWIHRELAALGERCMVVSPALVPKRAGDHVKTDRRDSERLASLARAGELEAIHVPDIRDEAIRDLVRGRDDAVIAQRRVRQQLKALLLRNDIRYVGKTSWTGAHRRWLSELKLPQPAQQIVFEEYVDAIAVATARIERLTRAIQAEVLTWRFAPVVGALQAMRGIQFVHAVTLIAELGDLTRFGSARSLMGYLGLVPREASSGEHRRQGSITKAGNSYARRALIEAAWAYRHPARVTRIIATRQTGLPKAACDIAWRAQLRLSAKYRRLNARHVNHNKIVVALARELSGFVWAIGQSVKPQ

SEQ ID NO: 348064 - protein, 277 aa, unidentified
MTTDTMIGIDLAKSVFQVHGASMTGQLKFRRKLSRLHFRKFMAEHPVSTVVMEACGSAHYWAREIAKYGHEVMLIAPQYVRPFVKRQKNDAADAEAIVTAAQRPEMRFIIPKMEEQQAKALLFRGRERLVRQRTELVNALRSVLYEFGHPIPAGIGHLKRIETIIEGDNSDLPELVREECRDLSCQIAEKTQRIEAKAKQIASLATQTDSARRLQTMPGVGPMSALAIEAFAPPMDSFRHGRDFAAWLGLVPKQHSSGGKERLGRISKAGRPISGDC

SEQ ID NO: 348065 - protein, 416 aa, unidentified
MDSGCDSQLGGIQINSVGIDISKGRSTIAVMRPFGEVVILTFKVRHTDSELSELARQLKSLDGETRVVMESTGNYHAPVAWLLHGAGLYVSVVNAMLVHDYGNNSLRRGKTDKKDAVKLANYGLDHWLTLPRYVPEEDTRLMLKTCYRQYQQYSKVQTMLKNNLISLLDTAFPDANRLFTSPPRADGSEKWVDFVAEFWHCRCVSEKSEKAFTNKYQLWCRKHGYNFSEAKAHLIHAEASGHIGVMPKSETTKLLVEQAVAQLRATSAALTALKHEMLALAAQLPEYPVVMGMFGVGPTLDPQLIAKIGDVRRFYSKKALVAHASLDAPPNDSGDVTGKHKSMSKIGASSLRRTLFLVMSVYLRSAPLDEPVYQFMDRKRTEGKLYHVYMMASANKFLRIYYATVKAYLESLEHTA

SEQ ID NO: 348066 - protein, 312 aa, unidentified
MGSIAETNSGMVTIGLDPHPGTHTASALNAFGRELDEITAINEEAGWEELMNWAHQFPERRWAIEGPNNRYARGFVERLIKSEQLLFPITPSMTARYRSRSANGKDDDIDAASAARALLANEDLPVHHPTPYEAELKELTRGYQRIRNQIKANKMSAREQSLAVVRDALERANEALEDAAKKLEREMAKIVKSIAPEFLELRGVGPIVTATVLAEAGWIGRFKDQDHFASYAGSAPLKWSSGAHETVRVNFKGNRRLNWAAHVVAMSRLRIEPRTQAYRDKKLAEGKTMREVFRLLKTYICREFYRVLRDMQ

SEQ ID NO: 348067 - protein, 351 aa, unidentified
MPRTSSLHAVTTIGMDMGKNTLHMIGLDSRGAIVLREKVSRGRIASRLANVPSCLIGIEAGLATHYVARELAALGHDVKQVPPAYAKPFRQGHKNDFRDAHSVAEAVQRPTTRFVPAKTDEQLDLQALHRVRSRLVSERTAVINQIRGFLLERGIIIRQGLPFLRQALPDILAKRTDVLSPRMVRIVADLASDWRQLDERIEPVTDEIETLAKSDDGCRRVMTVPGIGPIISSAMVAAIGNGAAFARGRDFSAWIGLVPKQMSTGDRTILGCITKRGNGYLRTLFVQAARVILLRPTSWPKHSFGVWLARAAQRLHRNVFAAALANKLARIAWTVLAQQRNYQARVTKAAA

SEQ ID NO: 348068 - protein, 317 aa, unidentified
MVATLWGVHIGIDVSKARLDVAVDESGESWTAAYDGPGLGRWVKRLAACQPARIVVEASGGLEALRVAELAVAGLPLAVVNPRRVREFAKALGLLAKTDRIDARVLARFAAAIQPPLSHLPSQAEQRLAERVTRRRPGVERRTAEHNRLGGAPARVQERLHTHLAWLDEELAALNTDIHDFIAQHPHWPDNADRLDSVPGIGPVTPSTLVADLPQLGQLSNKRSVARVGVAPFNHDSGRRRGKRHIRGGRTAVRNVRYMATLSATRFNPVIQAFYERLLRAGKEKKVALVACLRKLLTILNAMIRHQQAWRQAEVSA

SEQ ID NO: 348069 - protein, 429 aa, unidentified
MIRSTDFAAYIGLDWEHEAHCVCVLPAGSDAIQRREVEHDPDRISDWVAELRERFGGRHVAICLEMSRGGLVYALMQYDFLVLYPINPKQLSDYRKALYPSGAKNDPNDAELLARFLRDHRDKLRAWQPDDAITRGLRLTTEQRRKWVQDRVAQTNELQQRLKESYRLALDFCDGDLWNESFLDLLERFPSQSELQRASPKQLEKWLPKKRRKADDPPADELLRERISAVRKATPLTSDSAVLDHARLAVTNLVVVIRALNRAIAQADAKIAELFAQHPDVAVFSSFPGAGKALAPRLAAAYGTDRDKFQGAQDMQQLSGIAPVTKASGKTKVVQMRWACPKFLRQTFHEFALASTRFSRWAKAYVTMRKAAGHRYQEIIRGLAFKWQRILTRCWKDRQPYNEHHYLQRLRDAGSNLIAYLPPELEPVT

SEQ ID NO: 348070 - protein, 412 aa, unidentified
MEVLYHCCCGIDIHAKTAVACLIKDGKKQTRTFSTMTDDLLCLLDWLTGEGCTHVAIESTGVYWKPVFNILESCMEVILTNARDAKGFKARKTDVLDAEWLADLLRHGLLKPSFIPPLHIRELRELTRYRESLVRERTSLANRIQKLAESANIKLGQVASDALGVSGKLMLKALARGETDADKISDLARRSMRKKKPELKRALEGRLTENQRWILWQMLNQYESVEEAIKRVEAKIRQEVEESSDPFVAEAVKLLDTIPGVAETAAHILVSEIGADMNQFASDKQLASWAGMCPGNNESAGKRRSGKTRKGNRYLRAVLVQAAWVASQQKETYLAAQYKRMVKRMGKKKALVAVGHTILVIVWHVLKKKASYQELGGDYFDRRHKEQQKKRLIRQLESLGLKVTIEELERAA

SEQ ID NO: 348071 - protein, 347 aa, unidentified
MRFYNRQHQYYCGIDLHVKTMYVCILDSTGQVLVHRNVPSTPEALLSVIGPYRTELVVAAECMFTWYWLADVCAAEGIAFVLGHALAMKAIHGGKAKNDKIDSHKIASLLRGGLLPQAYVYPAAMRSTRDLLRRRLHLVRKRGQLLAHIQNTRAQYNLPEFGRRLAYPGNRDGVVDHFPDPSVRKSIEVDVALIDQYDALVNDLELTIVREAKRHDGDAFHRLRSVPGIGKVLALTILYEIHDITRFDRVQEFASYARLVKCQKQSGGRTLGTSGAKMGNVHLKWAFSEAAVLFLRHTKDGKKLLAAIAKKHGKGKALSILAHKIGRVVYYMLSRGTVFSTEKFLAA

SEQ ID NO: 348072 - protein, 346 aa, unidentified
MKYFAGLDVSLEETAICVVDEAGAMVREARITSEPEALVAFFQGSGLVLERIGLEACSLSAWLHESLVAAGLPAVCIETRRAKAAMGAMPNKTDRNDARGLAQIIRTGWYRAVHVKSPACRSWRALLTARRLLLNKMRDLENGLRAVLREAGLKLGTPTRKEFAARVRELTAADPVLSVLAEPLLTIIAAMTRELAQLTKRVLEIVRDEPVCRRLMGVPGVGPLTALTFRATIDQPERFRHSRDVGAHLGLTPKRYQSGETDVQGAISRCGDELARTALYEAAHSLLVRSRRWSALRAWGMQVAKRRGMARARIAVARKLATILHRMWADGTEFRWGKEGTMPAAA

SEQ ID NO: 348073 - protein, 302 aa, unidentified
MNGIGIDVCKAMLDVAVHHGPCAQFHNTPAGHRKLLAWLANQEVGQIVLEASGGYEHPVLDVLFDAGYRIVRANAHRCHAFAAATGLPAKTDRLDAMNLACMAATLELLAYQPMEPWRRRLREFVRARRQLVALATSADHQLEQVTDKPLRRVLQANINQIKKTCARLEQQIAEQVRQQPQLEALRSLKGVGATLQAVLASYLPELGTLDGKAIARLVGVAPIAHDSGRMRGVRRIQGGRAEVRNVLYMACLSAIQHEQRIREFYRSLRARGKPGKVAVVATMRKMLVILNARARDAQAAPT

SEQ ID NO: 348074 - protein, 406 aa, unidentified
MEVYLGIDWSEAKHDACFVNAAGAALSRLTFPHSPAGLSQLDAARAQLGVSAADCVTGLETAHTLLIDHLWAHGYVRVYVVPPGAVKAARPRFSASGARTDQRDAYVLADLVRTDRGRWAPWQPDGALTRQLRAQVTWRLQAMRAALGLSNQLRAVLLRYYPAALAVFSALAQPLTLHFVLDYPTPAQAAALGWEDFRAFARRHGYPHPARLAARFARLQAPQPAPEAATVLAFAGVAREMARALLGQLDSQRTAERAVAELFAQHPDRALFASLPGAGAALAPGLLVKFGDDRRRFPTAGAVQALAGTCPVTEQSGKHQVVKFRRACDHDFRFIAQEWARCSLKESPWAAAYWERVRPHCGSDNHATRCLANRWLAVAWAVWQAGRPYDEAYHLQQCAARAKPRA

SEQ ID NO: 348075 - protein, 353 aa, unidentified
MRYLGLDVHSGATVWCLLDEAGETAGRGKVATTAPALTALVKRLSTEDELLVGQEVGTMSYFVHDTMMAAGMKLLSFDARMLRMIASSRKKTDRRDAFWIAKALQTGMTPHPVYIPSGEVRRLRQLLSQRDGLRRDQKRWLVRAKSAVRAAGLSTPASRSPAALLDKLSDHPDGLDRELALVLDRCGRMHEMLTEEVTELERQILREARDINAIQRLQTIPGVGPWVSVTLYAWVGDISRFPSARRLAAYAGLVPSVWQSGDSQRSGGITKQGSPALRTTLVQAGHVLLFRCRSEAAAPLKAIAMRVHSNRKRRKIAVVAAARHILRIAYYVLRDGTEYDPSRLARPTLQAAE

SEQ ID NO: 348076 - protein, 412 aa, unidentified
MDEVVEFCAGLDVHRDTVVATVRFPQGRQRGSETKTFGTDTAELVALGDWLISHQVTRVGLESTGVYWKPVFYLLEDRIEQLWLLNAQHLKNVPGRKTDVVDSAWIAQLVEHGLVRPSFVPSPPIRELRDFTRHRRVLSEERTRMVQRLEKVLQDAGIKLTSVASTVLSKSARAMLEAMLAGESDPVVLAELAKGRMRSKIPALIDALRGSFRVCHHGVLVRQILAHVDFLDAQLAEIDEQITTRVATFEPIIERVQTIPGVARKCAIGMIAEIGVDMSVFATPAHLASWAGICPGNNASGGKSRSGRTRHGPVALKTVLTEAAQAAARTKNTYLGARYHAIRGRRGTFKAVGAIRHDILIAYWHIVTADVGYQDLGVDWVARRHSREHQIARLAKQIEKLGAAVEITMPAA

SEQ ID NO: 348077 - protein, 459 aa, unidentified
MRKKVQNHKKRKQKIAMDQAWPLINPNAAGVDLGSREHWVAVPEGRDAQSVRRFGTFTSDLEELAEWLKKCGVTSVAMEATGVYWIPLFQLLERRGFEVLLVNARQIKNVSGRKSDVLDCQWIQRLHTYGLLGASFRPADPYCVVRSYLRYRDELVAARSTQTQHMQKALQQMNVQLTQVLSDVSGLSGLAIIEAILQGERHPLKLAAMVDRRVKSTQDQIAKALIGDYRAEHLFQLKTAFELYHTYEAKISAADDELVRELGNLPDRVDIKLKPLPAKSHPKAIDENLRTGLYLKLGVDLTAIEGIGALVALTTLTEVGPDLSRFKTEKHFTSWLGLCPDNRISGGKVLSCRTRRVVNRLSDALRLAATTLERSQTALGAYYRRMKAKLGGAEGVTATAHKLARILYRMLTHGDEYVRQGMEEYEKKHQARKLQALQKAAESTPSPAKSRRINRTPAR

SEQ ID NO: 348078 - protein, 350 aa, unidentified
MVVVGADVHKRTHTFVAVDQVGRRIGEKVVEATTVGHRQAIRWARTQFGVELVWAIEDCRHLSARLERDLLSADQKVVRVPSKLMAQTRASARTRGKSDPIDALAVARAYLREPDLPVASHDEVSRELKLLVDRREDLVGQRTSTINRLLWRVHELDPGQAPKPASLDLAKHRRTLGDWLAAQPGLVAELAREELADITRLTEAINVLAKRIGERVRAIAPALLAMPGCGELTAAKIIGETAGVARFKSEAAFARHTGVAPIPVWSGNTVGRVRMTRTGNRQLNAALHRIAVTQIRLDGLGQAYYRSRLAAGDSSTEALRCLKRRLARVVFHHLHTDHNIRTKPCQPAAA

SEQ ID NO: 348079 - protein, 341 aa, unidentified
MKSFIRIGIDLAKNFFQVHAIEREGAPAVARKLSRGKVLGFFAQAAPCRVGMEACGSSHYWAREIQALGHEVVLIPPAYTKPYVKRGKNDANDAAAICEAMSRPDMRFVPIKSADQQAVLMLHKTRELLVKQRTMTVNALRGHLSEFGLIAPKGIHRVKELLALALADETLPEEAKQASAMLASHSGGLDEKIDDLEKTIARASGKNQTSQLLDEIPAFGPLIASAIAALTPDPRVFRSGSDFSASLGITPSQHSSGGKDKLGAITKKGNRYLRKMLVVGCTSVLRVAHKHKGALAEWIVAMRARKPERVVAVALANKLARIAWAMMSTGESFRTELYTKA

SEQ ID NO: 348080 - protein, 338 aa, unidentified
MSMYAGLDVSDKTTHICVVDADGKVLRRDVVVSDPDVLAKWLNRHCAELGRVVLETGTLSTFLYHGLVERDIPVECICARHAKGVLSARVNKSDVHDAEGLAQLARTGWYKRVHMKASATHIDRAALRIRAQLITARTSMANQLRGLLKLFGLRMGTARTPGRRAERLAAFYAQRPDLKALFAPLIAAMEAIEEQLRASNRLLNDRAKADEVCARLMSVPGVGPITALTFTATIEDPHRFARSEDVGAYAGLVPRRSQSGERDVSGHISKAGDPMLRKALYEAANVALSQVKRPFALQAWGRKIAEAKGPRRARTAVARKLAALLHSLWLNETEFRWA

SEQ ID NO: 348081 - protein, 459 aa, unidentified
MTAQRASPHPEQHPEQHPEQHLASLEAGEPLRSPAGWSQHGTVDSKAEWAVQFPVHVGVDTGKVFHKMVARGPDGRRLGAQLVPVSREGFDAADAYLATTFPHVPRSRILVGLEFAGHYGFTFAHDLHRRGYQIVNVLASVTKRLKEVEDNSPRKSDDKDAAQIAKLLAQGYFVSYPFLSDTAAELRFLATERRRLAVEQTRHRNRLLAVLDLAWPEFMRHFSTIVKPTPLALLQAWPLPADLAAAPRRTVNKLARDVSQNHMPKPRLDALLTDARTSVALTAGSEARRAEILRLLDRLLLVREHAAEVEIRLRALVELTPAARALTTVPGIDVVCAATIIAEVGDPHDYVSPRQILKLAGMNLARKESGVSVRGRLRQTKRGRPALRRQLFLLAGRWCQQRGLARAEYEALQARNGGAKISAMCAVARKLVPMLLHLMQTGEEFRAEVWLERHRVHEK

SEQ ID NO: 348082 - protein, 342 aa, unidentified
MKATTIGIDLAKHLFQLHGVDQHGKTVLKRQLKRDQMLSFFSNLPPSLIGMEACGSAHYWANKLQGLGHTVKLMAPQFVKPYVKTNKNDAADAEAICEAVTRPTMRFVPIKSSEQLAILALHRARQGFVKARTAQANQIRGLLAEYGFILPQGITHIGKHVPELLEDSENGLPGTFRHLLMRLHEHLKMLDKQVNELEDAIVRWHKDSAASQTLAQLPGIGPITASALVASIGNAKNFKNGRQLAAWLGLVPRQHSSGGKQNLLGISKRGDSYLRTLLIHGARAVLRVAERKESFSGSWLAGVMARRNPNVAAVAQANKTARIIWALLAHDRKYDAHYGMAA

SEQ ID NO: 348083 - protein, 345 aa, unidentified
MKIVGCDLHTRYQQIAMLEEETGELVERRLEHESGEARAFYAALSAPVRVGIEATGHTRWFERMLGELGHELWIGDAAQIRASMVRKQKTDARDAAHLLDLLLSDRFPRIWRPTLEERDLRQLVWHRQKLVWMRNAVGNQLHALAMGEGVCRKKKLFTKKGRVELESLKLGPWASNRRQELLKMLDALDPSLQQLDRAVQQQAEQNAEAVRLMTHPGVGPVTSLAFVLTIGPVGRFERSKQVVSYLGLNPREHSSGGRQRLGAISKQGNPMMRSLLVEAGHTAARLDAELRQDYQRLKLRRGSGVAKVAMARKLAVRMYWMLRNQASYAQLVRMQGSPWATLVKE

SEQ ID NO: 348084 - protein, 370 aa, unidentified
MLDTTTFVGLDVHARSIKAVSLDVMTGEVRCATFGYDAGAVAEWVRSVDPKARCVYESGVTGFDLQKRLSGLGVDCVVGAVSKMIKPSADRRRKNDRNDAEFLARMLSVGNVVEVWVPDDECEAARDLTRALEDARDDLSRSKQRLSKFLLRHGLVFDERTPTGRRKGNWTRAHWSWIESIRFAEGADNDVLAYYVDAVRRAAEEKARLEGLVEAEARKPRWRRRVDSLRCLKGVDTATAADLVFEAGEFSRFRNARSFASWVGLTPSEHSSGESDRRGAITKAGNKHLRKALVEAAWHYLTCSGRPKEPARGQAPDRVARRHAAKGVRRLVERRGALLARGVHNNKANVATARELACWVWAVGLMAEEA

SEQ ID NO: 348085 - protein, 445 aa, unidentified
MGKPQVIDDQEHERVFDTVAAVDVAKKDGVVCLRRPGPGGRQAVVWTVPATMSAVTALGAQLAEAGVAKVTLESTSDYWRIWYYVLEAAGLEVQLVSASQVKQLSGRPKTDKLDAMWLARLTEKGLLRPSFVPPAEIRALRHYTRARTRLTQDRTRCWQRLEKLLEDALIKVSAVASTLTTLSARDMIEALIAGERDPQVLAGLARGRMKAKHDALVAALTGMFEDYHGELAQLLLDQIAFIDTRITRLNILTGEQLATIRAAWGVDADGTAGPGAGAGPGAPVLPAAARLDEVPGISAELAVSIIAETGLDMTRFPTAGHLVSWAGLCPRAIQSGPRTRHGKGQGNTYLRGYLGQAATGAAGTATFLGERHARIARRRGGAKAQVAVARSILVIIWHLLADPETRYTDLGPGYYETKINKNRKARSHIRQLEALGYTVTITQAA

SEQ ID NO: 348086 - protein, 429 aa, unidentified
MEKIHLHSAGIDIGSKSIYIGIDGKPVRSFGTFTSEFYQAVDYLRESGVDTVAMEATGSYWVILFDILSAAEFDVWLVDGRQTKQVPGRKTDVKDCQWINQLHSFGLLNRCYVAEGLVKELRGYQRLREDHLRSMSMHINHMQKALIEMNIRLPEVLSQIHGASGLAMIEAILSGVRDPHQLVSLCHSSLIKNKGEELVKALEGFYTPIGLFSLGQALEGYKFYKKQIQSCDAKIEEAFKQYQNELPENLSKQPRKPIRHNKPDVKGLDKYLLSIFNGKDATVLSGITDYNWLQIYTETGADLSRWPSEKHFTSWLGLSPGQNNSGKKKKNKAKGRPKAGQLFRLTAQSLLQSKHIALGAFGRRLRSRKGPSIAIKAVARKLAEQYWRLMVKGKEYVEKGVEHYIQQLNIQKMRQLQRLAVELDIELLA

SEQ ID NO: 348087 - protein, 363 aa, unidentified
MTDQTLEVTGGVDTHGQTHHAAVIDRLGRHLADHEFPATGAGYRLLLAWLRSFGTVAAVGVEGTGAYGAELARTLRRAGLTVIEVDRPDRRTRRMKGKSDPIDAYAAAQAVASGRASGTPKSRDGIVEAIRSLRVVRRSAVKSRTQAVNQARQLLVTAPESLRAQLRGLSAVALAGACARLRPGDDLADPAQAVKAGLRRLGRRILALAGECEELDAELKALTAQAAPDLLALKGVGQDVAGQLLATAGDNPDRLHSEAAFAHLCGVAPIPASSGRRDRHRLNRGGDRAANHALHTIVLSRMRWDERTRTYVERRTAQGLAKKDIMRCLKRHIAREVYRALMRSIHPTRTNPPTTRSDLTEAA

SEQ ID NO: 348088 - protein, 344 aa, unidentified
MDEYVGLDVSKEETAFCVKDTAGTVLARGKVATDPKALFEALKEHCLCPGRIVMETGTMSGWLARELGKLGVTIDVIDARQAHAVMRLQHNKTDANDAELLAEIARTGFCRAVSVKSETAQQERVVLKARAHLVRQRRDTENAIRGLLASLGLRFPKGAGKLAARVGAALADHPELIPAIAPLLSSLAALKDASKRLDAAVAARAKADRACRLLMTVPGVGPVTALAYVATIGDAARFASSRAVGAYVGLTSRRWQSGEMDYSGRISKMGDAMLRTLLYEAANSLLTVVRRAHPLKDWARRVRKRTSHKKACVALARKLAVILHRMLITGEAFRWPETEATATV

SEQ ID NO: 348089 - protein, 373 aa, unidentified
MPKYSTAFGMDVHLRSTTVCVLDADTGEAVTRRFPGNPWGEIAGWMDGFPGPSLAAYESGYLGFAPQRELAGLGVECVVAAVSKIPRSAADSASKNDRNDAARMAKAILAHDISPAWVPSPEVEGIRDLAGAHDGATARLATAKQRLLAFLAKRGFVYGGTTPAGNPRKYWTYDFLRWLDKVRPEDDGGVRTLAALRNEVEAAAEARADLLSEYRAAVDASPIAAEVAALQSIKGCAFALAAAFSAEIGDFTRFRSGRQVTAYFGLAPSQRSSGDSVRLGGISGAGNALVRKLAVEGSWCYAAARHQPKLMPRDTGVPLEIRMHGRKGSERLLRRREEMLARGMPAAKANAATAAELVRWLWALGMMCREGAE

SEQ ID NO: 348090 - protein, 320 aa, unidentified
MSDNIVVGIDIAKHKFDVAVWAGENHYKMKHFPNDLKGFDAFINWLKPASNYHFCMEATGIYGDPLALYLSDKGLLISVVNPVQIHAFGKAELLRNKTDKIDAKLIARYCASQHPPAWQPAPLCERQLLALVRHRNKLNEMLLTEENRLSVADEVVCDSHAKIITLLKQELKDTELKLKKHIDDSPSLKKNKGLLESIPGIGERLSATRLAYIGDGSRFHHRGQVVAYAGLNPKLHESGQLKGRAHLSKQGSAELRKALYMPALAAISCNKVVKKQWEQLTARHKGGKVGVCAVMRKLLRLAYGVMKSGTLFNAEIPLAV

SEQ ID NO: 348091 - protein, 422 aa, unidentified
MLEETQETEEIIQRVAALDVGKAELTCCVRVPGQGSSGRRAQEVRTYKTMTRSLLVMVDRLAELGVTRVVMEATSDYWRGAFYLLEAHGFEAWLVNARDVKHLPGRPKTDTLDAVWLCKLAERQMLRPSFVPPRPTRQLRQVTRYRADLVAARTAEKQRVEKLLEDAQIKLSVVASDIFGVSGRAMLTALIAGERDPKRLAQLARARLRAKLSLLEEAFSGFFTDQHAFLLGKMLARVDALDADLAELDAKLQALIAPLAGAVERLDEIPGVGQLAAHLLIAEIGTDMTRFPTAGHLVSWAKFAPGVKESAGKRKGRGSTGHGNPYLARVLGEAAVAASKTDTFLGERYRRIARRRGKRRAIVAVGRSILVIVWHLLSDPSARFQDLGAGFYDTRINAEHAKRNHIRQLEALGYKVTLQPAA

SEQ ID NO: 348092 - protein, 386 aa, unidentified
MENEALGASIQYVGLDVHKDSIDIATADEGRSGEVRHVGQIGGDLAALDKALRRLISRGHRLHVVYEAGPCGFVIARHLAGQGIDCMVVAPSSIPKRAGDRVKTDRRDALMLARLARAGELAPVRVPDLRDEAVRDLVRAREDAVREQRNARHRLKALLLRNGIAYAGKASWTPAHLRWLAGLKMPEPAQQIGFQEYLHSITESGARIARLEQALRDQLPTWHLRAHVQALMALRGVQLIAAMTLVAELQDFMRFAHPRQLMAYVGLVPGEHSSGGKRRQGSLTKAGNSAARRMLVEVAWQYLHGPRVSPIIARRHDQVPAAITDIAWAAQLRLNAKFKRLLARKVMKTKAVVAVARELTGFVWAIGQHVSTSGWQGVALVEPKGA

SEQ ID NO: 348093 - protein, 342 aa, unidentified
MNHYAGIDVSLECSSVCVVEANGKILREAKVASEPEALIAWFRSCGFNLERIGLEAGPLSQWLFAAMRQVGLAVELLETRHVRKAFEAMPVKSDRNDARGIAQLMRLGWFRPVHCKSMSAQETRTLLTARKLVQSKLHDVENSLRGILRGFGLKVGKTTELKFADRIEVLVVGHPHLQMIAKALLAVRAVLRKEFAAFEKQARKMAQSDARTRLLMSTPAVGPIVSLTYVSAIDDPGRFKSSKQAGAHFGLTPKKHQSGETDYTGRISKIGDSSVRTALYEAAHIMLTKPLKGCTQLKSWAMRIARRAGMSKAKVALARRLAVIMHRMLADGTPFNSAAAAA

SEQ ID NO: 348094 - protein, 318 aa, unidentified
MNTASNQNIYIGVDTGKAQLDIYVRPTAHFFSVPNTDKGIKDALKIIKPYQPERIIIEATGRLEMPFVLACIEANLPIVRANPVHIKRFAGAIGRRAKNDRLDAELIAHYGDAIKPEITIIKAENIRLMSDLVIRRNQLLSMQTMEKNRLQILPKTLHSTIKPLLTAMKNQITNIEQKLVTLIEACPEYQTKNTLLQSVPGIGSIAAASIISNVPELGYITKKQAASLIGVAPVTKESGRYKGKRVIQGGRAQVRTVLYMAMMSAMQCNPVFKATHTRLVAAGKPKKVAIIACVRKMVVILNSMLRDGVMWDKNLAKI

SEQ ID NO: 348095 - protein, 307 aa, unidentified
MALSVGIDVAKHTLEWCVGAEGKIQHARNEPRPIAQLVRQLVALDPTRIVVEATGGYERTLVTKLAEAGPPVVVVNPRRVRSFGQALGILAKTDAVDARLLALFGEKVEPPIRPILQGRARLLADLVARRRQLVSMIVAEKNRRETASAAVRRSIETLLRTLAQQLRDLERRIDEALLEDAEAAELAALLKTVPSVGPGVARTLLVDLPELGHLGRREIASLVGVAPFARDSGRMRGVRRIRGGRASVRTVLYLAAMSASRHNPVLRALYLRLRQAGKPPKLAFVAVARKLLTILNAIARERTAWQA

SEQ ID NO: 348096 - protein, 342 aa, unidentified
MNITTIGLDIAKNVFQIHGVDANGKTVLRKQLKRNDVLAFFANLLPCLIGLEACGGAHYWARELIRLGHDAKIISPQFVKPYVKGNKNDSNDAEAICEAVGRPNMRFVPVKTVEQQDIQLLHRIRSGLIKERTALVNRIRGLLMEYGIIIALGIAKVRKQLPDILEDAENGLTIKARKIFADLQEQLIELDKQVAAYDEKIRAVHCASAVSQILAEIPGIGPLIATALLAALGDGKAFGSARQVAAWLGLVPRQNSSGGKSKLLGISKRGDVYLRTLLIHGARSVVNAAAKKDDARSRWINDLVKRRNANIAAVAVANKNARIAWALLTKSVHYEAPTLVDA

SEQ ID NO: 348097 - protein, 320 aa, unidentified
MRYFLGCDVAKAKIDVSFIDSNGQELWASKVPNTGVDVAVLLLAIIGNYPDDGLECVVESTSTYHFTLAETSYTLGLDCRVYNPILTKQGIKGTVRGKKTDRTDATMIARLGLRGEGRFYTPEPYKSVKYHARSCQKLSNLSTSFKRHNDHITNLLEDGLSQDAKTLMTGIQEAIVAARRQLREDLAVSAQGSVFTRLQTIPGVGPYVAASIIGEIQDMKRFKTAHALTAYAGLDPKIRQSGHSLNSTGRLTKRGSSYLRRSIFIAASVARQYDSNMKALYDKKRNEGKSYTVATIIVARKLLSIVRAMWLSEQDYDPNL

SEQ ID NO: 348098 - protein, 428 aa, unidentified
MDVEESNRLKEFRQLKKEIRGSEEHVIVGIDIAKDKHHAFLGTATGKTLLKRLVFENSVDGFERLLAYTEAIKVQHCLSKVVFGVEPTANYHKPLAEYLIKCGYNVVLVSGVAVARNRELLDGRWDKNDTKDSANVSDLICQGKFLYYDYPALTLRGLRNLLSLKRRFKKQEHGTRVRIRNHLLAQYFPEFDRYFGKGCSESLPIVKWCLNPSIIAGMEYDEFVQLIAPRVKTIGQENRLKAIWDLAIDSIGCEAGEALGFEARLMVEDLQQVKDSIRAIDDNIKDICLGFPEYSYLLTIPGFGPDISSKVLGAIGDPFRFDKGKQVLKLAGYDLSANRSGKTSDSAVPVISKRGKAYLRYALYQAAFIASTRNRHFIIYYTNKLRGREREKGIKTKMKVKLAAKMLIIAWTLMKKKEPFDPEFLNID

SEQ ID NO: 348099 - protein, 445 aa, unidentified
MSESLISATSEPAWAAFAAIDWADQKNFWRLVPAGSQRYEQGELENTPEAVEAWAAGLQERFGGRPIALCLEQSRGALVYMLTKYPHLVLFPVHPTTAARYRETFCPSGAKSDPSDTASLLDLLMRHRERLTPLQPDTAETRLLHFLVEERRRMVDEKTRESNRLTDCLKMYFPQILGWFDDVTTPLVGDLLERWPVLEQLQRAHPGTLRRFFHAHNCRSQELLEERVAAIAQAIPATRDQAVLEAGMLMSRGLVTLLAALRGNIAAFDKRIAELVRAHPDSALFASLPGAGPVLVPRLIAAFGTRRDRYQNADEMQRYSGIAPVKIASGKTELVHFRYACPKFLRQTFHEFASHSIGQSEWAKAYYEHLRNDEKKDHHPAVRALAFKWIRIIFRCWKDGKPYDEQVYQKSLRRRGSLLGAAFASATGVGWKTVAGFQKLSENNA

SEQ ID NO: 348100 - protein, 405 aa, unidentified
MGKVFVGHDWAEAHHDVHVEDEEGRRLAKARLPEGVEGVARFHELVAPFVEDPAEVVIATETDRGLFVGALVAAGYTVLAVNPMSTSRYRERHSTSGAKSDPGDARVLAELARTDSHNHRPIAGDSHLAEAVKVLARAHQSMIWTRQRQTNQLRSTLREFYPGALTCFDDLDGGDALAVLAVAPTPVLGRGLSRSKIAAALRRGGRQRRVEERTAQIQAALRADQLAAPDVVSAAMGSTVAALVAVVGELNTQIARLEAELSDRFEKHPDAKVIRSLPGLGMVLGARVLGEFGDDPNRYADAKSRKNYAGTSPITKASGKRKVVLARYARNRRLADACYLWAFAALTASPGARAFYDQRRATGDTHHRALRALANRLVGILHGCLRHGVLYDEDTAWAHRMEEAA

SEQ ID NO: 348101 - protein, 349 aa, unidentified
MLHVGLDLSRKRVDVCVICSEGELVEHFRAPCDRDGLYGLTRRVAVYEEPIRGVVESMNGARYVHDELVRYGWEVLVADAVRVKGLAPLACKTDKVDARVLAELSFRDLVPAIWLPTPELRAERERSRWRLHLVKHRAILKNRVHSSLIAYGHQVPMADLFGVAGRRLLASLDFPEPWLGHVKASLELIDDLDRRIGEIEEWLRRSGADHRYLPLLLTCPGIGWITGYTIAAEIGDINRFASPVKLTGYTGLCPRVSQSGEIDCRGPISKHGPRYLRWGLMEAAIAASSHPLYRERYQRTRRRLGRQRGPKIAQIELARKLSEAIWYMLTRNQPFKPFVPAGAVLPLTA

SEQ ID NO: 348102 - protein, 370 aa, unidentified
MQTIRSFVGMDVHKATISISVAEDGRSGPVRFLGVIPNQPDDIAKMAKRLAKHGELDFCYEASSCGYNIHRQLTGLGHKCTVAAPSMIPRKPGERIKTDRRDSEKLAILHRAGDLTPVWVPDTTHEALRDLVRARVDASMHLMRARQQLLAFLLRHGRSYPTGKHWTQRHRCWLAGQTFKEQAHGIVFQDYLETVWTAQDRRDALVKKISEMVAVWSLGPLVEALRGLRGVDLVSAATFIASTGDLSRFESPRLLMGYLGLVPSEHSSGGTIRRGGITKTGNREARRMLIEAAWSYQYPARIAKEKAEILVRLPKSIRDIAWKAQSRLCARYRSLIARGKKPTVVVVAIARELAGFIWAIGQEMRAPMTA

SEQ ID NO: 348103 - protein, 412 aa, unidentified
MFKIFRNNCCGLDVHKTWIYACIGITDANGRTEYKQARFSSFSKGLRDLAAWLANYSCFEVCLESSGKYWIPVFNILEKTYLVTLAHPKYTKPQKGNKTDVKDAKWICDLFMCDMIKPSFIPSPEIRQLRDLIRYRIKLTNMLTGEKNRAQNCLTVSNLKLDDVFSDVFGKSSRSITNHMLDHPGETFDVAPFVDARCQTPLDEIQAAVDGAISSEQAVKLRQCLAHIDELEAHRKEIEREILMIAEPFSAVLELLYTLPGLDKNPMTAIAILSEIGPDMSVFPSSKHLVSWAGCCPRNDQSNQKVKSRRISRAGCYLKPLLVQVANALIKSKKHPEFKERYRRIKSHRGHKKAIIAVCKMLLTAIWNMLSKLEPYNPDGFLGHRPVNEKRVLTKSQALELLRLRGYTITND

SEQ ID NO: 348104 - protein, 339 aa, unidentified
MKLYVGIDLHSNNNTVVVINEQDQVIYRKQLNNELTVVLQALEPFRAELAGVVVESTYNWYWLVDGLEAAGYRVHLANTAAIQQYQGLKYSDDSSDATWLAHLLRLGLLPEGHIYPKETRAVRDLLRKRGQLVRQRTGNILSIENLTSRNQGIRITGNAVKKLRAQEVESQYENPDLALAVTSTLSIVEALNWQIEKIEKRVKEKIRLAPSFEGLKTVSGIGDTLALTIMLEAGNPSRFPSVGDFSSYCRCVSSQKLSNGKKKGRGNVKNGNAYLSWAFIEAAHFAIRHDPVIRRFYQRKKAKTLGVVALKAVAHKLARACYYVMRDQVSFEVEKSFGH

SEQ ID NO: 348105 - protein, 489 aa, unidentified
MAKRKQQSTFERLSSGKLNRKQRKELIRKIEVEDPKLEVVYRNAAGIDVGNESHMASVPADRDEKPIREFGSWTKELHDVADWLQACGIESVVMQSTGVYWIPLYDVLEKRGFRVGLTNARDTKNLPGRKSDMAEAQWLRKLYSYGLLRDSFRPPEHIRSLRSLWRLRDRHVKEAAEEIQHMQKALTQRNVQLANAISDISGTSGQAIIRAILQGERDPYQLADLRDYRVRARREEIARSLEGTWREDLLFELQQAVDRYDFCHRQMAECDRRLQLLLTAIPDRPERAPGSEADQENRPSGQPRGRKQKNQEKKKAHKNQPAGFDLEAEMKRICGVDLSRLEGVKLMTITTFVSEVGVDMSPFRTENHLVSWLSLSPKRKVSGGKVLRHERVPNKNRAAAALRMAASTLRESDSYLGARFRSLRARLGEPRAIKAMAAYLARLIYRMLTKGQEWVDRGVEEFDKRRKARQHYMLQRMAAAMGYQLLPAA

SEQ ID NO: 348106 - protein, 323 aa, unidentified
MYSIGLDISKSTINVFIPINNLDIVIDNNIKSIKSLYSKLKKLYKKEFPKLVFVYEPTGTYSFTLTKFCASKNLHCFIVNPKKSANFAKAIGNRNKNDIEDARLLSQMLVTARKEDIKIPIINDNVEAIKEAISCYKLIIKQQTQNKNHVSSLKVKGDSSYVIKELEIQYKFLKKQEERIIKKILTYLSKDKKLYQSFLNLQTMPRIGQISAIILIYHFIQYPDANQRQIVSLSGLDPIEKSSGTSVKGKTKISKAGSKICRGTLFMPVMVAVQKNERLKEFYNRLKDKGKHTTVAQIAVMRKMIVIAHSLYKNNERFNVNKR

SEQ ID NO: 348107 - protein, 423 aa, unidentified
MLLYIERGCIPLRFRGSDFICSLILKVGVIMFYVGIDIAKHSHEASITDSNGYLLGKSISFSNSQKGCEKLIALLERFSATVDNTIIGLEATGHYWLSVYSFLLELGYDLKVINPIQSDAFRKMYIRQTKNDSKDSFVIAQIMRFGEFSSTILSDENIMALRQLSRYRLALVDECSDWKRKVICLLDQVFPEYSSFFSDTFGVTSKEVLLKYPTPEDMITVSSKKLTTLLNKASKGRFNINKTKQLKETANNSFGIKFAKDAFSFQIKQMISQIIFIENQLNDLEKEISSLLHETNHVITSIIGIGDVLGALIIGEIGDISRFESAPKLVAFSGLDVKINQSGQFSGSRMRISKRGSPYLRRAIWTAANRAAFADPVLSNYYQSLRARGKHHLTAVGGVARKLCNIIFPVLRDNKPYTPIFPK

SEQ ID NO: 348108 - protein, 480 aa, unidentified
MNVKATRTKKQVNVENQAIKLLSKEELIRKIEVIKKELRSYTWRDLETNGKFAKNDKLSFITDDMLIAGCDIGSETHYIRAIDVRGRELSSGAFEFSNTSEGFANAKAWVLALAAKNDKKQIVLGLEPTGHYWFALAAWMVSNGISVVQVNPYAVKQSKEIEDNSQLKDDRKDPKLIANLVKDGNYGMPYLPEKVYADMRRLSMFRDQLTEDRIRNINRLHRELKIYFPEYMDAFGKIDGAFTLEVLKVSAIPSDITALGAEGIKNIWHNEKLRGRGYSRANEIVSYAEKSVGLTDGTDAGREAVKWYAEQILKLDEQLAVIESALHEKCREIPYAENILEIRGVGENILAGILAEMGDISRFDDVKEIQKLSGMGLVACSSGKHKGQTKISHRGRKRLRYWLFQAAKSAVSHADEFKQLHEYYTTRTNNPLKKMQSLVVIACKILRVSYTILKTGTTYDPQKLLKDIKRPTASQAPMAA

SEQ ID NO: 348109 - protein, 407 aa, unidentified
MIFVGVDWAEVHHDVCIMDAEGQVLERKRIADSLTGLGELHVLVADHLGENDEPGDVVVGIEKDRGLIVMSLLAANYRIFAINPIAAARYRERHVTSGAKSDPGDAKVLADLVRTDRHNHRAVAGDSTLSEAIKLLSRAHQNTIWNRQRQVNSLRSALKDYYPGALDAFGTDLSGQDAVAILAIAPTPSLGRTLSRAKITSALRKAGRSRHLEERTERIYQALRQDQLRQPVVLETAYGVATETAIAIIVQFNASLAKLEASLSEHFEQHPSAKVILSLPGMGTVLGARVLGEFGDDPNRYSDAKSRRNYAGTSPITRASGRSRVVLARHSRNKRLAGALDQWAFSSLLPSPGAYRYYNELKTRDKHHRKAIRQLANKWVGILHACLESGTPYDENIAWSRRQEHAA

SEQ ID NO: 348110 - protein, 397 aa, unidentified
MNRLLYIGMDVHKESFTLSTYHVTLDESELTQDFIGAPLKITDATASGVEKYVKNLKTMLNIKATDNVWIQCGYEAGCLGFGLYFQLKAKGIECVILAPSTIQKSANAKKKKNDPLDSKAIAMALANKTYKSVHVPDKDDLNVREYLRMRNAHRDAVKKVKQQILAFLLRQGIKYSNTNWTKAHITWLHGLKFDHALLKETLDEYITSLENYVAKLERLDKRIEEFAQGDKYQEKAAELGCLLGIKTQAAMTMMSEISDFSRFRTASEFASFLGLVPGENSSGEKTQRTSITKSGNSQCRKTLIEAAAGICRGKVGHKSKELLRRQALCNNPIAISYADRANERLRSKFYRLNLRNGKPANVAKTAVARELACFIWGIMTDTYNGKVPRNDEYALGK

SEQ ID NO: 348111 - protein, 372 aa, unidentified
MLYAGVDVSKDKVSVAVLTSGGTKLTSGEFDITTEGLKLLELTLKHLKDEISMAIEQTGTYSMPVILYLMERVEGLRIYLVDGLNFSRFIKLEGRKKQDKADAVSLAEYLRRGLPARLITDKDIKAYGLKVLISQREHLLKVKNQVENRLRQLVETIFPDSKTLTKPVFWSEIRKGRAILDWKRLTDKAEVLSTILRERKIWLEIVHSLEETEKEINAFLRAHYPTDVEILKSFGFSETTIAYFISVYVDIGRFKDVKAFKSYMGLGLRIYQSGKKEKNVVNSYTNKYIRKLLYMYVVQAVRERSNHRRVKDYYLRQVEKSGSKKKAIIKTASKVIEWVYYCLKHKEPFRWEANYETQQEDISKVNSGQAED

SEQ ID NO: 348112 - protein, 420 aa, unidentified
MRNAGIHANSLLEVRRMYNAVGIDVSKGKSTVAVLQPGGTVIRKPFDVSHTSQNLNELADYLSSLDGTTKIVMECTGRYHEPMVKALSEAGLFVSIVNPHLIKNFGNNSLRKVKSDPADARKIARYTLDNWTELRQYSGMDNTRTQLKTLNSQFSFFMKQKVAAKANLIALLDNTYPGVNKLFDSPTREDGSEKWVDYAYSFWHADCVRKIGLKAFTERYKSFCKKHHYIFQQDKPEKLFNASKELVAVFPKEKTYKLLIQQSIQQLNLASEHVERLRREMNELASTLPEYSTVMGIYGVGKTYGPQLIAEIGDVSRFTHREALTAFAGVDPGVDESGQHKSKSNRSSKVGSARLRKTLFQIMTTLLQNAPEADPVYRFLDKKRSQGKPYYVYMTAGANKFLRIYYGKVKECLRNLEQTE

SEQ ID NO: 348113 - protein, 341 aa, unidentified
MATTTYGLDISKRVFQMYWIEDETGEFANRRFNKQQLIEFLGLRQTGRVALEACGSAHWWARKIAALGHTVVLLHARFIRPFVQNNKTDATDARAIWTAAQQPGMRFVAPKTEEQQTMLALHRMRSLLIKSRTMQVNQLRGLLYEFGVTLKAGRVAGLTEFREHLPQIEELMPPTLFCALGDQLRHISMLDDEIKKLERQLGVWRRQEDACRRVAAIPGIGPLTATALVATIGDPTAFKSGRELAAYLGLVPRQTGTGGKIRLGGITKRGDSYLRMLLIHGARAVLFKSRRKTAWCEQVLQRRPVNVAAVALANKMARTARAVLAHNRTYQADYEGLKPSM

SEQ ID NO: 348114 - protein, 332 aa, unidentified
MKSHFTLGIDMAKDSFVAILIDSQGKTILPATTFKNNSKGFLKLIASIPKPQSTNVILESTGVYGKLFIKALSGSPVNLFEVNPLIIKRFSSSMVQTKTDQADALTIAQAGRLLASSQPETLNKYRVKHDSDRENLALWIAEYKRLSSANARLKQQIQNIRHHAAPKMNVILKRRQEEQQQIQKQLKITKKEIDALLKEQADEDAKCLTSIIGVGTLTAATALVSVKNISRFPSADSLKAYWGMYPRRRQSGKHEARSHMATHGNKLMRHMLWNAAKSAARHNPVCKDLFDRLVAKGKTEPAAYGAVARKLVQIIYGVLKNKTMFEIQPQNT

SEQ ID NO: 348115 - protein, 343 aa, unidentified
MEVMIGVDPHKASHYVFAVDDGEVELAQVSVRASREQVRRLLAWAEPFERRTWAVEGSDGMGYLLSQQLVAAGEHVVDVPATLAARTRVLGSGRSNKTDPNDARSVALTALRHRDLRQVQPVGHAEVLRLLAKRNTDIGDRRTQVVSRLHSLLVELAPGGIAKEINASDVDAFLAQVTPVTSVEQTRFDLAVELLGEIRQLDAQLKASHKRIRATVAASSTTVTALFGIGPIIAAMLIGYTGDIGRFANRDHYAAYNGTAPVEFSSGGRTVHRVSTRGNRQLNHALHMAAICQMRQPHSEGRAYVDRKVAEGKTKREAIRALKRQVSNAVYRQLVSDARRRAD

SEQ ID NO: 348116 - protein, 320 aa, unidentified
MSEEIFIGIDVCKAWLDVAQVPAPSADKSGELAKRVDNDEPGRAVLVSQLKRLGPTLVVMEATGGFEAALASELCAAGIAVAVVNPKRVRDFARSMGVLAKTDRLDAQVLAKFAQATRPQVYALPDETQQEIIELVDRRAQLVTMRAQEQTRLSTVKHVARTSVRHHIEWLTKRIKEIDKDLDGRLKDSTIYQPKYELLESVPGVGKVTIMKLLGRLPELGSLDRKRVTALVGLAPMADDSGKRRGQRYIQGGRADVRTAMYMAALTAKRYDGPIKALFDRLRLAGKPFKVAMTACMRKLLIILNAIIKTGQPWRGAEGA

SEQ ID NO: 348117 - protein, 389 aa, unidentified
MERPMQKLNDLSRSLTPLNPDGTLIAVIEMSQSSWLVAGIVPGIERHPLKKLEPNEGELLRLLMRWRAEATKVGCTITRIAVAYEAGRDGFWLARWLRTRDIETYVIHPTSVAVSREHRRAKTDRLDTGLLKRVFIGWLRGEPDHCHMAAIPTLAEEDAKRPNREREGLVRERTRIVNRMKSCLARFGVRSFKSTLRKAPERLATLVTPEGVPLPPNTLLELRRDMARLRFVMDQIKEVEEARTHRLEQAPQEKTHAMVRLLARVIGVGIETADMLVHEILSRSLRDRRAVARYAGLTGAPDESGSKRQEKGLAKAGNARVRRGMIQLAWRFLLFQKDSALAQWYRTRTESGGKKRKTMIVALARKLLIALWRLVTTGEVPAGVVLRAA

SEQ ID NO: 348118 - protein, 338 aa, unidentified
MEQFIGCDAHKKYSVFVAVSERGEASAAVRVGHDREQYQQFLEQLPGGLEIALEASGHYYWIVDAMEAAGHRPHLANPLEAKKRMGKTGKKTDKVDANGLGILLRNGTLPEVWIPPAELRDQRESLRLRMFLVQQRTRLKNRIQGALARYNMQIAGVSDLFGVEGRQRLGKRLGELPEHTRQSVELELVTLDFLEVQLTDIEKRLEALMKVTAEADLLKTLPYVGRILSMVMTLEIGRVERFPSAAHLASYAGLVPRVHCSGGHTRLGQICGDVNQYLKWAFIEAANLVVIHQKHLAGQHVVRLYQRIKRKKNHQKAVVAVARHLAEAACLILKQQEA

SEQ ID NO: 348119 - protein, 437 aa, unidentified
MLNPNAAGLDLHKEEIWVCPGGFQDNHEPEVKTFGTLTGELRKLVAYLKEKKVTAVAMEATGIYWIPVFEMLKNEGFDTCLVNARNIKGVKGRPKSDYADCVWISRLHCYGFLRASFVPDGNVSALQSLWDCRGKIIDDIARYAQRINSELIKMNFRLDMVVSNTLGLTGCRIIEALLSGNHNPHQLLELVDTRVQKTAEECLAAFDGNFQSDHLTVLKVWYQCYRDQQRQLHELNEEIYLMLEKFPKKATKEDLPPEPLNYREDGLEFPYKLRPVLYEIFGTDITQLCGIGASVAMTFLSTVGTDVRAWPTAGHFTSWLALAPMNQVSAGSRKSSKTARSANPLRRALVNTAMIVQRTDSYLGENHRRLKSRLGPATAKVAIARKLAVIIYNILKNDLRTIRYDAEAYQRHRQEKELKNLQKKARRLGYTLSALSN

SEQ ID NO: 348120 - protein, 343 aa, unidentified
MKYIGLDLHKKSIFATVLGEDGKILSRTKIGPNTRDICYYLKSQGKRDELSVAMEASYNWPYYYRAAEEAADTIVLAHPLKTRIIGEAKIKTDKIDSKVLAYMLKADMLPRAYVPSRDTMENKVLLRSRISLVRIRTQIKNKIHAIVDRNRDSYWGLENITDIFGKTGKHILRNTEICPTDHKILAGYLDLIDEVNKKIKDIESQIDERSIKDRDIELLKTIPGIGTFTAFLVKSEIDDISRFASKGKLSSYAGLIPSTHGSGERLYHGRIVKQGNKFLRWALTEAAQTSIRCSEYFRYHYSKVRSRKNANSATIAVARRILEIIYVMLKEGREYIEKPVDIK

SEQ ID NO: 348121 - protein, 403 aa, unidentified
MYYVGIDIAKRNHEASVIDSTGKPLSGSISFSNSKEGCNKLIALFEKLGVDVDNSIIGMEATGHYWLSLYSHLLEHGYDLKVINPIQSDAFRKMSIRKTKTDSKDSLNIAQIMRFGEYSSTRLSNENVQAMKLLTRYRFSIVAECASCKCKVIALLDQVFPEYERLFSDTFGSASKELLLNYQTPEDLLEISSAKLASLLTKASKGKFKMAKAEQIRDAAAGSFGVSFAKKAFSFQIRQLIEQINFIEKQLDELDKEISSLLAQTNSVITTITGVGPVLGAAIIGEIGDITRFDSPRKLVAFAGLDASVSQSGEFTGTQGKLSKRGSPHLRHAIWMAASRACFCDPTLSDYYKSLRARGKHHLTAVSAVARKMCNIIFTILKENRPYESIPPKKTTLCEIQSE

SEQ ID NO: 348122 - protein, 464 aa, unidentified
MLRDAIGIDPDSLGCQCAFVKLGEGQAQQRGYLATEEGMEGFIRWVKKKGDVIVAIEGSNGQSKPIEKALRAEEIVFYSFKPSDVDKFRKAVLGQNKNNEKDAESAARYAMALEAQGKLDNWKRVWFADEELQGLTRSYSQKTKEATREINRLWKLLRTASVDLYLALGGKHPDINISENILQNEGILTLLTKKPDIYEWKTLSEVDFLAAMGDRNYKGRKEIIKEIQKTSKSFRLVSAAISLMIKNTAAQIMLFKQQLSEIKKMIEKLTKDNRAVKILELYKGIGILTASTLIAEIIDIRRFVKEDNLASYAGLGRREYKTGNNEKEIPAYFFNHRLKNVFMTAARNYVLFNPDLHLAGYYRNLVKGGMKKTDARKRVARALVRVFFRVLYSLVGSYNSENNEEEKIRRESDMANGLSRSNKDYSNISLSSPTNNNTEGVEKSKVEENHNSVANRLLEKIPVS

SEQ ID NO: 348123 - protein, 346 aa, unidentified
MEHYVGLDVSLKLTAICIIDRTGKIEREGVVASDPEAIAAFIKLHAPHVVRIGLETGATSTWLWTELNKMGLPVICIDARHAKAALKMQINKSDRNDAVGIARIMQCGWYKEVRVKDLDSHATKALLVSRALLVKIKRDIENQIRGLLKNLGLVIGRAKMNTFAARAAELAGDRPELAAAVDPLLKAREAVEQQIFDLHRKVLRLARNNTQVRRFMTAPGVGPVTALCFLATIDDPTRFKRSRSVGAYVGLTTRRYASGEIDWTGRISKCGDAMLRSYLYEAANVLLTRVAKWSTLKAWGIRLAKRSGLRKAKVAVARKLAVILHRMWIEGTEFKWSSKEAANQPA

SEQ ID NO: 348124 - protein, 356 aa, unidentified
MLNDKKYIGMDVHKESISIAVRDGAGKIVMECVIETKASMILQVIDGLHGELQVTFEEGTWAAWLYDLLKPHVTELVVCDPRKNASMREGNQSDKIDARRLAELLRLNHLHPVYHGEHGLRSLKELVRSYLTMTKDLGRVMSRVKAIYRSWGIPCTGKQVYAPRHRAEWLGKISELGVRRRAEFYYQQLDALRALRQEVRRDLLAESKKHPVWKRLCQIPSIGPIRAAVLLGIVQTPHRFRGKRQLWAYSGFGIETQSSADHRRVDGQLERAKKQISIRGLNRNCNHDLKNLFKGAAIVASSKPGPFQEFYTALLTKGIRPEMARLTLARKIATIVLIVWKRGASFDAQHLKPQTA

SEQ ID NO: 348125 - protein, 353 aa, unidentified
MNQVTTIGLDIAKSIFQVHGVDAAGQSVLRQRLSRSRVLEFFGKLPRCLVGLEACASSHYWARELIRLGHEVKLMPAQYVKPYVKRGKNDAADAEAICEAVVRPTMRFVGVKTTEQQSIMMLHRVRRILMRQRTQLSNALRSHLAEFGIVSPIGREGLDRLLKIVADTDDRRVPAEARAPLEMLAAQLEGVKAKILENDRRIIASARATEVGRRLLEVPGIGPVLASAFVASVADPAIFKSGRDLAAWIGLVPRQNSSGGKERLGGITKAGNGYLRQMLMVGAMAVIRYAQRNSTRRPWLVQLMGRRPAKVAAIALANKTARTVWALMTSGERYRDPQAIQAAVSANGMETPD

SEQ ID NO: 348126 - protein, 325 aa, unidentified
MTSHRPLGLDVAKRSFDAALLLDNGRYRHRQFVNSPTGFTQLAAWLRQHAIGPIHAGLEATGTYGNALALFLHEQGTRVSVINPTRIHAFAQSELSRNKTDPLDAALIARFVATQQPPPWTPPPRQQHQLQALVRRVEALQAMRQQERNRLDLETDDSLVADSLREHLVHLDAQLQGLQQRLRQHVRAHPGLQHQNDLLQSIPGIGETTALKLLAEMPGLAQWSSARQAVAYAGLNPQQRTSGSSVRGRSRLSKIGNARLRRALYLPAVVAMRYNPLLKTFAQRLRERSKPPMVIVGAVMRKLLHQAYGVLKHATPFNPNYASTH

SEQ ID NO: 348127 - protein, 381 aa, unidentified
MDKVCGLDVHKDSVFACILDEKGEKILEERFGTLTPDLDKLRDVLVNHCVGRVAMESTSIYWRPVWRVLVSDFDLVLVNPLLIKQLPGRKSDVKDAHWIAQCLQKEMLRGSYVPDEELQQMRDYSRRYSYLSKQIVRVEQRIDNHLQKCNIRISNYVSNQGQNVSIRKVIKAVIAGERDPTILCRLIHGRIKNKHGKDVIIAALTGVITATDVEMLRQCLEELELFEKQQSLCIKSLEELAMKHYAKEISLLCTIPGIKMLSATCILAELGGDMNAFFSAAMLIGWAGLRPRNDESAGKVRSRKTLHGNKYLRKMLIQVAWAAGRSNKSFLGKKYRQLSERMKAQKALVAIARKLLVIIFNVLSKKEPFDHHRNIQAKKAA

SEQ ID NO: 348128 - protein, 371 aa, unidentified
MNSILYVGMDVHKENYTLCCYSFDRDKVEYRQTVPSDYRLILKYLEQVRRKYPEEVEFICGYEAGCLGYSLYHQLTDHGVKCIILAPTTMGITNTNRVKTDRKDAANIARCLAFHTYSAVYVPDGEDNAVKEYLRMRDDQKLALKKIKQQITAFVLRLGKQYTGGKSLWTENHLKWLRGLDLTLLEKETLQEYLITYDYLTDKLERLDARIEELARNERYGERVRRLGCFIGIKPHTALSLLVEVGDFRRFEKAPNFAGFLGLVPGEDSSGGGRNRLAITKVGNSHLRRLLVESSQSYSRGTIGFKSKELKKRQEGNPPEVVAYADRANERLRRRYYRMTLKNGAKRNVAIVAVARELACFIWGMMTDEIA

SEQ ID NO: 348129 - protein, 404 aa, unidentified
MKGPIVSIDVSKGKSDYQAFKNLNVKYTGSRSIKHTKEGFDEIVNLVREMEKKLKTEVCVVYEATGVYHRVLKKVLEDNNIKQFIINPLLSAKTRKNDSLRSPKTDKLDPKSIAKTYYSHSLHNSHKPETIYHELRELSRYYEDILVHIRKDKVAFRAQLDIVFPGYDTLYDDLYGPVALAVIEKYPHPEMLQKKKINTVSKVIQSKTCHRQAVSDTMADKAIEYSKTIYSGCDKDDIEVLILQRFIKKLNEDMAEAERTIGEMIKLAQELPNFNIIKSIPGIGDNLAARIIAELGDMTRFKKKNELVAFAGLDPRISESGKNDGDHMHITKKGNKRLRCLLYLAVTCSIRLKRDDNSIKDFYIKKKQQSNPMCSKAAKTACASKLVRIIYSMCKTGELYQYNK

SEQ ID NO: 348130 - protein, 291 aa, unidentified
MKHYVGMDVSVKETSLCIVDEAGGICRELKVSSHPDDLIEVLNDPAWHLVRISLEAGPLSQWLFEGLSNAGLPVVCIETRHTKAFLKATVNKTDRNDARGIAQMMRVNLFRPVHVKTISSQQRRALLTARKLILNKIRDIENDIRGLLRNFGLKVSLIGRIGFVARIRELLEGMVDLAEIIEPLLSARQQLRESFEVLHRKVLSIVRNDATCRRLMTIPGVGPVVALGFVSTIDIPGRFKNFKAVGPALGLTPVMNQSGESNRVGRISLCGDIMMRTLFYEAAQVMLTVVR

SEQ ID NO: 348131 - protein, 338 aa, unidentified
MQLYCGIDLHAKNSYLAIIDERRQRIFKHNVANDRQLILSFLSPYKAELAGVVVESTFNWYWLVDTLMEDGYMVHLANPCAIQQYAGLKYIDDKHDAFWLAELLSLGILKEGYIYPRQERPVRDLLRKRGHLMKLRTSLLTSLHNTMANACGRKIPSHHVLGKEDRLSSHLSGNESLALMGQVSKASIDALTLQIKTIEAHAEKQYTIEPAYVGLLSLPGVGEILGLTILLETGPISRFPAVGNYVSYCRKAESTWKSAEKVKGKGNIKNGNRYLSWAFAEAAEHARRFDTASRNFYNRKVHERNGAVAHSALANKLARAAYYIMRDQVPYEEAKLFG

SEQ ID NO: 348132 - protein, 366 aa, unidentified
MKKTSTVRVNGNMIFKGHKLTIGVDLGDRWSNYCVLDEAGEILLEQKLATTPEGMKQTFERIPRSLIAMETGTHSPWVSRLLKELGHEVLVAHAQRVELISKSTRKDDRHDARTLARLARIDPELLGPVRHRSAKAQIHLTVIRARAALVSTRTALVNAARGLVKSYGQRLPKCGTQQVSRELGAKLNAELREVLEPLLKEIESLNERIKEYDERMEKIAKESYPHVELLKQVKGVGTQIALTYVLTLDDPHRFPKSREVGCFLGLRPGRRDSGQSQPQMHISKEGDPYLRTMLVQGAHYILGPFGEDSDLRRWGLRLAERGGKNAKKRAVVAVARKLAVLLHRLWVSAEVYEPLRNSQKAMRAVA

SEQ ID NO: 348133 - protein, 320 aa, unidentified
MTTATVGADISKATFDAARRGADGKYKHKKFPNTPAGFAAFRAWLIAFGGDKPLVCMEATGAYSIPLAEFLAAQGWPVSVVNPARIHAFAGSEMSRAKTDKADAKLIARFAQEKNPPLWVPPPPAVRALQLLLRRVEDLLEMRQMEQNRLDTADPAVAGSIKAVLERLGQELEATRERIRRHLDDHPDLRQRRDLLESIPGIGEASAAHLLVALSEHYGFRHAKQAAAHAGLAPRLKESGQWKGKTRLSKTGDPLLRKALYMPALVAWRHNPAVRAFCERLKANGKNGKAIACAAMRKLVHIAFGVLKSGEPFNPNLALA

SEQ ID NO: 348134 - protein, 314 aa, unidentified
MNTLIFVGIDVSQFQLAVAVRPGTRFSVPNDEPGWAIVAAQMRRLAPVLIVLEATGGLEVPLAGVLAAAGLPVVVVNPRQVRDFARATGQLAKTDTLDAQILAHFAEVIRPAVRPLPDEQTQALAALAARRRQLIEMLTAEKNRLRTASPSIRKSLRAHMAWLQREQTHTDTELAQAIQDSPVWREKDDLLRSVPGVGPVLTTTLLANLPELGTLTNKQIAALAGVAPLNRDSGILQGKRMVWGGRAQVRATLYMAAIVATRYNPTIKTFYQRLWGVGKAKKVALVACMRKLLTTLNAMLKHRTHWRTEPPQHA

SEQ ID NO: 348135 - protein, 325 aa, unidentified
MQGKEASEQETRQCTAGIDVSKDWLDAHVLPKGASLRVANTSEGIRQIKRWLLRSEVELVTIEATGKWHRAVFRSLSASNVAVAVIDPFRVRMFAKAQGIAAKTDRLDAKVLAMYAAMMSPVCRPPAPELLEALQELVTARASAVDEKTALKNQLAAVTQSFLKTQLRKRIRQLEAHEEALEKECLKRIKSEEGLKRRLNILTSIPGIGDVVAMTLIACLSELGSLSDKQAAALAGLAPVADDSGRRQGLRVIWGGRSAVRRALYLAALSAKTWNKDMKAFFQRLVGKGKVKKAAVVAVARKMVVLANLLIAENRPWQKIAPKCA

SEQ ID NO: 348136 - protein, 314 aa, unidentified
MILSLRYVGIDVSKRMLDIFDDAVGSTERIANALQPITEQVARWRCCNVFVVFEATGIYDRELAEVLRQAGIRFARINPARARDFARAGGRLAKTDAIDARMLAAFARTMAPAVEQAPNAARNALALLAKRRDQMVHMRAQEKNRRSEARDRAMIESIARHIDFLDSEIKAIEAKIKALIKAEPEISEQARLVRSAPGIGPVACMQLIAQMPELGCVGPKQVAALAGLAPFNVDSGLYRGKRAIGGGRKRVRDALYMAALNAVRRDGPFKAFYQKLRLAGKPAKLALIAVARKLLTTLNAMLRDRKTYLQPQPS

SEQ ID NO: 348137 - protein, 390 aa, unidentified
MIYVGIDVAKDKHDCLLVNADGESVFEPFVIINNRGGFYGLLEKIESCSEDLNHVKVGLEATGHYSNNLLEFLISKGLTTYVINPLHTNLYRKGLSLRKTKTDKLEANSIAFMLRTEVLKPYSHSSYQIRELKSLTRYRFSLVQDLAQLKSSYARLCVILFPELETLVSSLHLSSIYALLAELPTADAIACCHLTRLKNILSSNSRGRLSESRAIEIREHARNSIGSYSDVKALELRQVIQRIQTLEEQIKQVESKINPIVDSLKSPLITVPGISYKMAAMIIAETENFSNFYHPEKILAFAGLEPSVYQSGQLTSTHAKMVKRGSKYLRYAIFNATKYVCQWDPHFKAYLAKKRAEGKPYNVAVSHAAKKLVRVLFHLVKTNQAFVGQP

SEQ ID NO: 348138 - protein, 305 aa, unidentified
MISWVGIDISKSNLVVWVQPQKDGFEVPNTVEGFDVLVARLGQYTVGRVLLEATGGYERKVMAALQQASFSVLRINPRRARAFAVAMGKNAKTDPIDAAVLADFAEALHASREKPISPEREALRELIQLREHFVQQRDDNKRRLQQAQLPAVVEAIRDHIRYLQTQIKQIGKAIDQSMRELDAEKADRLISVKGIGTVATASLLVYLPELGELDRREIAALAGIAPYNDDSGNHSGKRQIYGGRARVRRALYMSCWVVIRCQADFKARYESLRERGKSAKVALIACMRILLIRLNAMLRDGTEWR

SEQ ID NO: 348139 - protein, 316 aa, unidentified
MAEESYVGIDVSKAELVVAVRPSGERMTLANDRAGIKRLVGRLAELKPQLVVVEATGGLQRQVVAALWMAEIAVAAVNPSWVRNFAKGRGVMAKTDRKDAELLALFAQRERPEPRPPADAETQALQDLVMRREQLLEMLVAEKQRLHRASGPMRKELRHHIAYLEGRIKELEQDIDKTVRRSDGWRRKSEIVRSVPGFGPRFSAIALAKMPELGTLNRRQIGALAGVAPMPDDSGRRHGRRIIAGGRFEVRNKLYMCAMVAARSNPVLKQFYERLVARGKPKKLALAAVMRKLIVILNAMLKTNSLWRPPCPDPSV

SEQ ID NO: 348140 - protein, 375 aa, unidentified
MTRIARIGIDTSKSTFQLHGVDEREQVVLRSKLRRRAFLTFFAKLEPTVIGLEACGGSHYWARELAKLGHEVVLIPPQYVKPYVARGKNDAADAEAICEAMSRPRVRARLVPIKSVEQSAGQMLLGVRESLIKRRTQLANTMRGHAAEFGLVAARGLDKIEPLLARIAADDSLPALAKEMFATLGQELAELGPRIARIEKRLMAFHRSNELSRRLAEVPTIGPIGACLLATKIVNPQAFRSGRMCAAWIGLTPKDHSTAGKQKLGGITRAGDESLRAVLVSGATSYLRHVRSGRTTPSPWLAELLTRKPPKLAAVALANKTARIAWKLMTSGQRYDKVRAAARQGLGAAQREDSAPSPSLHPDTAPKATSASIAA

SEQ ID NO: 348141 - protein, 350 aa, unidentified
MLIGVDYHPSFQTIAFLIAETGECGDRELNHSDGQAEKFYRDLKQRGISVRVGMEATGYSRWFERLLAELGFEVWMGDPAEIKAKRVKKQKFDREDARLILRLMRENNFPQVWVPGPENRDLRQLLWHRHRLVQMRTRIMNQLHALAMNEGYRWKKKLFSEQGRAQLEKLTLAPWASRRRQELLELLDRMNPTIEELTAAVEREARKRPEAVRLMTHPGVGPLTALAYVLIIGTPTRFQRGKQIGTYVGMIPCEESSARKQRLGHISKQGNSLLRFLLVEAAQAAARIHPDWRRRYMHLAMRRHKSIAKVAMGRRLGVRLYWMWRNGCEYSPSLEFGSYAGQLGTGDGVK

SEQ ID NO: 348142 - protein, 424 aa, unidentified
MKKVLYVGLDVHKESIVVATAPQGDTEAQLYGRIGGTLDALDKLIKKMDKPDLELRFVYEAGPCGYVIYRHLKKRGYMCQVTAPSLIPTKASDRVKTDRRDARQLARLFRAGELTAIYVPDEEDEAVRDLVRARDRAMVDQRKARQRLKGFLLRLGYRYSGRGNWSPEHLRYLADIKLSHAAQQIAFQEYLEAITVATERLERLTKAMEAALATWKREPVVRAIMSLRGVALINGMTLIAEAGDLTRFDSPSQLMSYFGLTPSEYSSGDKRVQGGITKAGNGACRRALVEAAHQYRIPPRVSPAMQKRQEDQSKEVRAIALKAQQRLHSRYRLLTARQKKPVIVVAALARELCGFVWAIVCQVSAPGKVQTREKGTVKEAKAAVLTTPTKATKSTPAGTAKKKYQLNSENTFKKQAANTGAIHE

SEQ ID NO: 348143 - protein, 354 aa, unidentified
MQKILYVGMDVHQATIVIVVLNAEGKTISEAIIETKTETVRDFIRGLRGELHVTFEEGTQAAWLYDLLRPHVTQVLVCNPRHNKLLGAGNKSDRIDALKLAQLLRAGLLKPVYHGESGTRALKEMVRSYECLVSDTTRVMNRLKAIYRARGITCAGHDVYREDRRPEWLQKLTERGVRLRAEVLYRQLTALQELRAQAKRAMLAESGKHGAQKLLAGVPKLGAVRVAQVIASVDTPHRFRSKRQFWAYCGLAVVSKASAEYRVEDGRVKKAAKVAATRGLNGNYNHRLKSVFKSAAQSACASEPFKQQYDALLAKGINVALARLTVTRKLAAITLAVWKRGEAFDAERAVKRAA

SEQ ID NO: 348144 - protein, 421 aa, unidentified
MKNTAARKLKQVPKGYLIVGVDPHKKKHAAVAITQDFTIRDRFKFDNTREGLEFLLRRVRIEMVKSDCRGVMFAIETGGHYWRNVAYYLDEKGIPFRFINQYTLKRRREGKDLNRRKNDYRDSEVAAQLLCTGEFVESTIPQGVYAELRTAHNAYRRLVKERTRIINLVKGLLDGLFPEFTQVFKDPCGLTALSVLSTGSIPGVIAGMTGEEFVATIEAKHRGRLMRKKLMALHYVARSSIGIAAGAKSLSSEISFLVEKHELIRGHICIIERTLVKLVDETEEGKYLLSIRGLNYIAVAGLLAELGCFKSYRSAKQMIKMAGSNPTESESAGKKKSRTPMSKQGRPVLRYCAWTAVIPMLRFNSDFRAWAKQRRERPAHANPLGGREIVGAALNRLLRLSFALVKNQTYYRSPQLVQVAG

SEQ ID NO: 348145 - protein, 346 aa, unidentified
MNITTIGIDLAKSVFQLHGIDSFGKVLIKKQIKRAQMAEYFVNLKPCLIGMEACGSAHHWARKLEGFGHTVKLMPPQYVKPYVKTNKNDAADAEAICEAVTRPNMHFVPIKSTEQQAILSLHRIRQGYVKARTAQANQIRGLLAEFGLEIPQGIGYIAKRVPDILEDASNELPGILRIEIQSLLEHLNELDTRADNCEKKIVAWHKQSETSKKLEAIPGIGPLTATALVASIGEAKNFKNGRQVAAWLGLVPRQHSSGGKQNLLGISKRGDIYLRTLLIHGARSVIYRSGQKENPTDRQSWLNQLTQRRNKNVAAVALANKNARIVWALLNHDRDYQDNHKMLVAA

SEQ ID NO: 348146 - protein, 418 aa, unidentified
MARAVEIVYPVCCGIDVHKNFLVACIATTDERGHTTHLIRRFSTNTGDLRRLADWLEDNNCKDVCMESTGKYWIPVFNILEQTCNVTLTHPKYVKAIKGKKTDKKDAKWIAELFKCDLVRSSFIPPHDIRQLRDLCRYHMKLTYMNTSEKNRSQNCLTTCNFKLDAVFSDIFGKSATRILEALISQGNSDFEIAPLLDRRCKATVEEVAAALDGELSFAQGEKLKIIRSHMENLKGLKDTLESLIYQLAIPFQSEIDLLLTVPGISSPLTAIRILAEIGADMSVFETSKHLCSWAGVTPQNNESAGKKKTTRISRAGAYLKPLLVQISLAACKSNKHPELKDKYQVLKKRRGHKKAVIAISRRLLTAIWHILSKREVYNDKLYRKADKPPANRILTPEQAFAILRSKGYQIEISEPAA

SEQ ID NO: 348147 - protein, 347 aa, unidentified
MSIRMIGLDTAKTVFQIHGVDEAGKAEIRRKLRRNDLIAFFEKQAACTVVMEACGAAHHWTRMLTGLGHSVKLIAPEAVKPFVKKGKKNDAVDAAAICEAASRPDVKFVPAKSVEQQGILALHAARSLLVKQQTMLANAMRGLATEFGLTVPKGIHKLDELMAVVDADEIIPKRAKQAIAGLHDCCNNLSDGVETFETEIVAHARRDETARRLATIPGIGPITASLIAATVGDISLFKTARQFAAWLGLVPRQSSTGGKTRLGRITKTGNREIRKLLVLGATSMVYRADGWNSAVGAWLRSVLERRPVRLVTVALANKMARIAWAVMTRKEVYRPKGGVAAVAQAAA

SEQ ID NO: 348148 - protein, 324 aa, unidentified
MLQSADKVEMAAMPVAAVIGIDIAKHTMVLHDSISQHSWTIDNTYADALQALGPFAGHDLAVCEATGGYERALLEAARTLNLPVHRADPAKAKAFIASHGGHAKTDKADARWLARLGLERGASLTRWTPPDPEREALTALVRYRQDLLKQRTAAKNRRSAPTSGPVRDLLEAEIDFLDGQISRLDTRIDALQTAPALVPIHRVLTQMTGIGAVGASSLIALMPELGQINRRQIASLAGLAPHPRESGRFAGKRRTGGGRHELRPVLFMIALSAARFCPKLNPFYVRLVSLGKPKRVALTAVARKLLVIANAKVRDANLALPQLT

SEQ ID NO: 348149 - protein, 417 aa, unidentified
MEGITTMDVVYRCCAGLDVHKQTVECAVRRLTENGTVQVEIRQFGTMTDDLLEMVTWLKAQGVTHVAMESTGVFWKPIYNILEGHCSVLLVNARHVKQVPGRKTDVRDCQWLAQLLQYGLLKGSFIAPRWQRDLRDLTRERTQLTDEQTRVANRIHKVLEDANIKLGSVATDILGVSGRDILERLMAGEEDVEALAERARGRLRGKIPELRRALRGRLSEHHRFQLRLNWDHLQRLQELIERLDQRIRELSQPYHPQIEQLDKVVGIDQTSAESIVAEVGVEMKVFPSDGHLSAWAGMCSGNNESAGKRRSGRTPKGNRWLRRTLTLAAQAAGHAKDSFLASRFRRLAARRGKKRACVAVAHSILKVVYHILKDGRPYQDLGGSYFDRLDPQRLTRYLVRRLERLGLKVTLEPATVA

SEQ ID NO: 348150 - protein, 338 aa, unidentified
MKAYAGIDLHSSNNYIGIINQKDDRLFGKRLPNDLDSIEQVLNPFKKDLKAVVVESTYNWYWLVDGLKERGYPMFLANPAAIKQYEGIKHTDDRWDSFWLAKMKQLNILPEGYIYPKEERPIRDLLRRRLLFVHQKTAHMLSLQSTITRNLGVNMSCNTIRKLRPEDAYDLFEDSNLALMAKNNIETFLHLQKTTKEIERTVISQVKLRNEFELLQTITGIGNILGLTIMLEVGDIGRFAKVGNYSSYCRCVSSARISNGKKKGENNRKNGNKYLSWAYVEAANFAKRYSKKAQRFYQRKMAQTNKIVATKALGNKMCRASYFVMRDQIPYDEERVFK

SEQ ID NO: 348151 - protein, 310 aa, unidentified
MIITPDVVGIDVSKHTLDIFDADLNRSETVPNTAEATAALAHELAERGRFVVLEATGRYDVRLRRSLEAAGVAYARVNPSRARDFARAAGFLAKTDRVDARMLARLGEALRPAPAEPADAARERLTRLHRRRDQLVAMRKQERARLSEALEDDLLEDLERHLAWLGAQIASLNNRIAQAIAADEALKETCRIVRSLPGVGPVTATTLVALVPELGRRSPKTIAALVGLAPLNQDSGLRRGRRSIRGGRRRVREALYMAAVSACRSGSRFALAYRALLAAGKAPKLALIAIARRLLVTANAMVRDHQCFAA

SEQ ID NO: 348152 - protein, 385 aa, unidentified
MNAVGIDVSSRKSTVALLRPLGEVVCLPFDVTHDIAGLASLAEKLKAIDGETRVVMEHTGRYYEAVEKALHEAGLFVCAVNPLLIKEYGANSLRRVKTDKADAVKIARYALDNWADLRDFTPMDAIRYDLKTLNRQFQLASKQRTASANNLIALLEQSFPGIRKCFDSPVRSDGTQKWVDFAHSFWHVDCVRKQPFPAFCERYRKWCKRHAYLFKLSNAEEVYALAKRAVVLTPKSKVVKVLVQEAANQLSSISRSVEVYRAEMDRLAAMLPEYPVVMAMYGVGKSYGPQLMAEIGDVRRFERKQALVAFAGIDPMPNQSGDKNVRSNKSSKRGSPYLRKTLFNVIRTYLQCAPQDEPVFQFLNRKRAEGKPFYVYMLAAANKFL

SEQ ID NO: 348153 - protein, 467 aa, unidentified
MIVPNREPKKPDQSPSRSLPIPVPASTAPLDVLNPDAAGIDVHSDMHMVCVPADRDPDPVRRFGANTVDLQEIVAWLKKCRVKTVALESTGVYWIPLFELLESNGFEVKLVEPGQLSRCGARPKTDVLDAQWIQRLHSYGLLRGSFRPPDSVLALRAYWRQRQMQVRYAASHVQHMQKAMEQMNVKLTQVVTDITGLTGMSIIAAILEGERDPIKLAQLRDQRCHHSADQIARALEGTWRPEHLFELKQAHELYHFHHRQITECDQQVEAELKKFPNRAAEKTRTEKPRKRGRKSNDVRFEATGRLFEALGVDLTRIDGIDVGTALVILAEVGVDVSRFPTEKHFASWLRLCPPQDQSNRTKKRRAHRKGTNRVGIALRMAARSAGRTMTPLGLFYRRIRSRIGGLGAVKATAHKLGCLVYRMLKYGQEYLTQSMEEYEATMKEKMLNTLKRKAAAMGFQLSPLPPQ

SEQ ID NO: 348154 - protein, 421 aa, unidentified
MKGLKAKMVKMVREGTLIATVDIGATSNTGYCTTLDGRDIKSFRFDNIKEGFEKFWHMIVASKNRFSCDEVIVGYESTGPYAEPLVHYLANKPVKIVQVNPMHTKKMKEVNDNSPLKTDDKDPRVIADIIRLGRALTIVVPEGDSANLRRLNNARERHVGEQTALLNQLQQLVFIIFPEFKTVLKNMKGKTAQYILNKYTTPERIGALSKEALGEEMRKRSMGKFGIKDAESLIGLARETVGIKEGLAGLFMDIRHILTQLEAEARFISEIESEMGSTLERIPCSAKLLSIKGLGIVSVAGLIGEVGDFSKFSTQSEIMKLAGLDLYEISSGRRKGQRRISKRGRSLLRKILFYAAIQMIRKNGIMYDYYTRLTGRGMERMRALIAVSRKLLRIIHAILRDNRDYVGGYQPPQRMVIKKAA

SEQ ID NO: 348155 - protein, 353 aa, unidentified
MKLKIDPNAAPLTSIGIDIGKEIFHLVGLGTDGKIAFRGKIKRLALKEAFEKLPPCVVGMEACLSAHFVSRMLRTLGHEPRIIPAIYVKPFLKGQKNDYNDAEAICEAALRPNLRTVQEKSQDQLDLQACHRVRSRLVSRRTAAINQIRAFLIEQGIAVRAGTSALRKSLFEILKNRKDEISPRMANLIVGLYEDWLWLDKRIETITSEIKQLSQSEPNCRRLMSVPGIGPLISTGLVAAIGTGEAFERGRDLGAWLGLVPRQYSTGGRSILGRISKRGSKYLRTLFIQAAKVLLIRPQNWPRYSFGAWLKTAAERLHRNKLAVALANKLARIAWSVLRHDRAFDTHIEAGAI

SEQ ID NO: 348156 - protein, 414 aa, unidentified
MDIIHTHCAGLDVHKKVVVAAIIVPGKEEGLYKETRSFGTMTAELLTLSDWLMSQGVTQVAMESTGEYWKPIFNILENNFEVILVNAQHIRKVPGRKTDVSDAEWLADLLRHGLLSPSFIPPLGQRELRELTRYRSTFVKERATLVNRVQKVLESANIKLSSVASNVMGVSGRAILEAIIAGQTTPEQMAELSKGRLREKRTQLTQALEGRVKAHHRFVLTELLCQIGSLDETIARFDEEIERYCRPFEEAVVLLDTIPGIARETAEIIVSEIGTDMSRFPSAAHLASWAGVAPGNNESAGKKRSGRTTQGNKPLGVALNQAAHAAAHTRNTYLAAQYHRLAGRRGKKRAIMAVAHSILVIAYHMLKNHLPYEDLGADYFDKRRPETTSKRLVRRLEQLGFHVSLQPSSTLISV

SEQ ID NO: 348157 - protein, 423 aa, unidentified
MPYRIAGIDVHKKRLAVVVAEVESSDEFQFERRWYGSNPEQLRALSEWLNEQQVEEAVMESTAQYWKPVWGALEGYWRPICQGREGAGRMSGTLHLAQALSNRGRRGRKTDFRDAERLVKRLVSQELVLSFVPDTEQRLWRTLTRTRYQRTREKVRLQNQLEALLEEAHIKLSSLVSDLLGASSRRILNAIADGETDLAALASLAHQRLRATPAQLQDALGACKELNPLYRRLVRMTLDDLQFVERQVGQLDQEIACLLQPHQDAVERLAVVPGLGVDSAQQIIAEVGSNAATFPSAEKLSSWVGACPGKEESAGVNRSRRSPKGNRQMRRILNQAANAAVKRKGSIFELLYRRLVSRLGHNKTIGVITNRLCHLIWIILHKGVRYEERGPAVSEQSKQRHTAKMIRKLRLLGYKVEPLANPA

SEQ ID NO: 348158 - protein, 444 aa, unidentified
MRAIGLDIHRDFCEVAIAEEGRVRAAGRIGTAPAEIEAFAGGLRPDDTVTLEATGNALAIARLIEPHARVVLANPKATKAATRLRAKTDRIDARTLAQLLASGFLPEVWTGDEATHALRRRTGRRVHLVRQRTKAKNQVHAVLLRNLAGRPPVSDVFGTRGRVWLERLVLPDDERETLEACLRTVDFLDAEVAHIDRALAPLVLASPDMRRLLTLPGVGATTAATLVGVIGDIGRFPAPGRLVAYLGLDPRVSQSGNDPAHHGRISKQGASEARHVLVEAAWVATRTAGPLRAFAQRLAARRGWNIAIVAVARKLTVIAWHMLTRGEDYAFARPILVRAKLREIELRAGAPRAQGRALGIAATEAERRLDRELGVAAEVAYERLVADWVPSRTKVREPQAGRASHDAERQPARQGSAPTLRFGPASLPHQHDYAPDPGPRQDGT

SEQ ID NO: 348159 - protein, 399 aa, unidentified
MDEGYEVYCGLDVGKSEHHAAALNAAGERVFDKPLPQDEARLRELFTGLQQHGRVLVIVDQPNTIGALPIAVARDCGCTVAYLPGLAMRKAADLYPGKSKTDARDAFIIAETARAMPHTLRAVDRDSEVLAALKVLSGFDADLTHECTRAINRLRSLLLQIFPALERVFPGTVLTRPLVLELFIKYSGPTGLRAAGRSNVLRWARNRSRKDPVNLIEAVFSALDEQTVTVIGTEAVELVIPRVAAQIKELKNQRAIVAQEVEKLLDDFPLSQVLMSMPGVGIKTAATILLTIGDAGTFTSAGHLAAYAGIATVTRRSGTSIRGEFPARSGNKQLKNALFRSAWIASCHHPASKAYYQKKRAQGKKHNAAVICLARRRCDVIYSMLKHGTLYEENPAQAA

SEQ ID NO: 348160 - protein, 351 aa, unidentified
MLLIGVDYHPSFQTIAFLMEETGECGEQELNHSDGQAEKFYRDLKQRGISVRVGMEATGYSRWFERLLAELGIEIWMGDPAEIKAKRVKKQKFDREDARLILRLMRENNFPQVWVPGPENRDLRQLLWHRHRLVQMRTRIMNQLQALAMNEGYRWKKKLFSEQGRAQLEKLALAPWASRRRQELLELLDRMNATIEELTAAVEREARKRPEAMRLMTHPGVGPLTALAYVLIIGTPTRFQRGKQIGTYVGMIPCEDSSARKQRLGHVTKQGNSLLRFLLVEAAQAAARIHPDWRRRYMHLAIRRHKSIAKVAMGRRLAVRLYWMWRNGCEYSPSLEFGSYAGQLGTGDGVK

SEQ ID NO: 348161 - protein, 349 aa, unidentified
MNQEKYIGMDVHQATISVAVMDGSGKLIMECILETKAATILEFIAGLRGTLSVTFEEGTPAAWLHDLLKPHVSHLVVCDPRRNALLRDGSKSDRIDARKLAELLHGNKLHAVYHGEHGVRTLKELGRSYLTITKDLTRVMSRIKALYRSWAIPCSGTTVYAPRHRAEWLAKILEPGVRLRAERLYQQLDLLQPVRQEARRDLMVESHKHQAVKLLRQIPSIGPIRAALLVALLQTPHRFRTKRQLWAYSGFAVETHDSGEYRFVRGKLRRNRERITVRGLNHNHNHDLKNLFKGAALSASTRPGPLCDFYVALVGKGMRPTMARLTLARKMAAITLTIWKKGVEFDAKQ

SEQ ID NO: 348162 - protein, 334 aa, unidentified
MHCVGVDYHKKSSYVTVMDERGKVVKEAQIANTQEALAAFLDGRAKGASAVLEAGRNWPVMYDWLEELVDEVTLAHPAKVRVIAEAKVKTDRIDSRMLAHLLRADLIPAAYVPGAVTREQRRRLRQRMFLVRLSTMVKNRVHTLVDRHPELSRQAGGWSDLFGKAGRAWLEQVDLPEGEAELLRTDLELLGAIQEHIKRSNRWVSQLARKDARAKLLATLPGIGDFFGVLLAVEIDDVRRFSRPQKLAAYAGLVPSTYASGGYVHHGRITKRGNKWIRWACIEAAYPAIKQDPELAALYQRLKVAKRLLIIAYRVLKESRAYRPADEQAALRRR

SEQ ID NO: 348163 - protein, 423 aa, unidentified
MEMMHERVAGLDVHKATIVACVRVGTGRKVTRECRTFDTTTDGLLALLAWLVECRCSHVAMEATGVYWMPVWKILSEGDFVLIVANAAHIKNVPGRKSDLNDAMWIADLLACGLIKSSFVPEEDVQELRSLLRTRKQLGREQTRHVQRIQKTLAEANIKLDSVLSDIMGASGRRIIEAMIAGVRNPRQLAALASAQIKATPKQLYDALHGRLTDHHRFLLKLHLRQWDGLDATIREIDLEVEARIARMDKEVSAGAAPFRDLIRLLCTIPGVSTLSARTILSEIGRDMSRFPTAGHMVAWAGLCPGQNESAGKRKPARLRKGAPWLKTMLVQCAWAAKRKKDSYYKAQFFRLQSRRGPQKAICAVAASILTAIYHILRDGTEHQDLGANHFDRRSTQGKARRLVAQLTSLGFEVQLQRTAEAA

SEQ ID NO: 348164 - protein, 343 aa, unidentified
MPEQKITGIDLAKTNFYLFSINAHGKPAGKTKLSRNQLLNWLVQQPKMTVAMEACGASHYWAREIRKLNHDVMLLPAQHVKAYQRRQKNDYNDAQAIAEACQHGTIRPVPIKTLEQQDVQTFLKMRRLVSMERTQLINHVRGLLAEYGIVFSKGATELRQKLPALLEDAENELTDTMRTLLHRQYIRLITLDNELEWYDSEQKKYVRQDPVCKRLLAIPGFGPLVSQAIKSWMGDGKQFRRGRDASAALGLVPRQFSTGGKQVLLGITKCGDQYVRSMLIHGASAVLFRASEKTDSLSVWVNRIREKRGFNRAVVALANKLLRIAWVIIARDEMFLPATKQNQ

SEQ ID NO: 348165 - protein, 346 aa, unidentified
MKITTIGIDLAKNVFQVHGVNEHGKVAVKKQLKREQMAAFFANLPPCLIGMEACGGAHHWARQLQRFGHTTKLMAPQFVKPYVKTNKNDAADAEAICEAVARPNMRFVPVKTTEQQAILSVHRARQNFVKARTALANEIRGLLSEFGLVMPQKIQTIGLRLPEILEDGDNGLPGTFKQLLQRLGEHLKELDRQVAELERDIQIWHRGNEASRRLEKIPGIGPITASALVATVGDAKNFSNGRQLAAWLGLVPRQNSSGGKATLLGISKRGDRYLRTLMIHGARAVLRFAQNKTDTTSMWLNEVQTRRHVNVVTVALANKNARIVWALLAHGSEFRAGYTSSESVAV

SEQ ID NO: 348166 - protein, 343 aa, unidentified
MNATRIGLDLAKLVFQVHGVDRDERKVIKRQLRRSQVLPYFEKLPACKIGMEACAGAHYWARKFAQMGHEVKLIAPQFVKPYVKSQKNDANDAEAICEAVGRPNMRFVAIKTVAQQDMQAVHRIRSELVKSRTAKVNQIRGLLAEYGEIVPARIEQIRRAIPLLQEDATNGLTPLFRRLLEGLRLDLVELDRRVEELDQEIVAAAKADPVAQRLQTVPGIGPITATALVAAVGDGRQFKRGRDLAAWLGLTPGQHSSGGKDHLLGISKRGDSYLRTLLIHGARAVLRAVGDKDDPRSRWLAGLAARRHKNVAAVALANKNARIVWALLTRGERYDSQHGMTTA

SEQ ID NO: 348167 - protein, 341 aa, unidentified
MHAITIGLDIAKSVFQVHGEDRNGKVVMQKRLRRGQVEEFFRKLPPCRIGIEACGTAHYWGRTLRALGHEVRLIPAAYVKPFVKRNKNDARDAAAICAALGRPDMRFVAIKSVEQQASRGLERSRDLLVKQRTQLMNCVRSLLAELGIIAAQGRRGFAELAARVQAADPEIPPILLAGVLPLTQQIDRLDLMIAVVEKRIMAAARDNPVMRRLATIPGVGGITAHAIVTAIGEGKQFGSARDFAAWCGLTPREHASAGKRHDKGISRQGDNRLRKLFALGASTVMRSARSRTDRATVWQRGILARRPVKVAVLAQAAKNARIAWALLASGETYRHVTSAAA

SEQ ID NO: 348168 - protein, 369 aa, unidentified
MEKNTIYIALDDSKRKLVVAMLRPGAPEPEEREIPKDAPHIQRLFRRLEREGPVQACYEAGVSGYDLYRQITACGVTCQVIAPALTPRRPGQRIKTDRRDARKLVRLLRAGELTPIHVPDEAEEAARDLVRCREAVRRDVVRWRHRLLKLLDRHGRLWVTEKNWTQRHWTWIRAQHFALAALQRAFEATVFALEQALRRQAALDQEIEALAETAPYREAVGWLRCFRGIGTLSAMVLLAEIVDFQRFRRPRELMAYLGLVPSEYSSGETQRRGALTKAGNTHARRVLVEAAWHYRHRPTVGRALASRSQGQPEEVVGQAWRAQQRLHRRYRHLVGHGKRPPVAVAAIARELVGFLWAAMTRRETRGHAA

SEQ ID NO: 348169 - protein, 408 aa, unidentified
MEKFLKLCVGADVSKDTLDVCLSGLREDLSIREVERKSFSNNADGIKKLMKWASQKTEGNPYQIVMEATGVYHEKLAFTLSKNGVEAVVVLPKLMSNYFKSHNLRVVNDEICAEHIAMFGLSRKLDVWKEPEPVYMALRALCRHRYQLAKLTTQCTNQIHAQKHSETSLQEMIDMSEDMVKLAEKQIKEIDKKLRAILKENAWLKAKVDKVCTVIGLGWITVVKIIAETSGFNLIRNSRQLVAYAGYDVLSKESGTSVHTKSKMSKKGNKYIRAAMYMPALSAIRSDEQMAAFYSRLFHRHFIPKKSNVAVQKKLLVLIYTLWKNDCTYDPDYRHPASQSQNQEDHQTNDPQCDQESDQPSKMIEKAINKNREAIRRSLHRLDQVRLQDFDETKIKKNPQNEHRQRIE

SEQ ID NO: 348170 - protein, 415 aa, unidentified
MRIVYAHCCGLDVHKKSISACLLTANEAGATQQHIRRFGTVTRELLELCDWLRSNHVTHVAMESTGVYWKPVWNILEASFTILLVNAQHVKSVPGRKTDAKDCQWIADLLQHGLLRGSFVPPSPIRQLRDLTRTRVSLRQDHTAVANRMQKILEDANIKLASVATDWLGVSGRIILSRMLDGEQDVGKLANLCRGRLRDKIAEMQLALEGRMTEHHRWMLRLQREQLDFLETQIAKLDAKIQQEMQVNQEAVDLCTTIPGIDAIAASNLIAEIGVNMDQFPSAAHLVSWAGLCPGNNESAGKRLSGKSRNGNTWLRRSLCQAAWAASHSKNTYLSAQFHRLAARKGKKRAIVAVGHTILVIVFHMLKNHQPYRDLGADYFDHRNVEQLKRTLIRRLQRLGLQVLITPCTTVAQPT

SEQ ID NO: 348171 - protein, 349 aa, unidentified
MSHKLNSAIAVIGIDIGKNSFHVVGHDNHGTIMLRQKWSRGQVERRLANLPPCLIGMEACVGAHHLSRKLRMLGHDARLMPAKYVRPYSKGQKNDFRDAEAIAEAVQRPTMKFVATKTAEQLDLQALHRVRERLVSQRTGIINQIRAFMLERGIAVRQGLRFLRAELPRILTTPCDVLSPRMVRVIEDLAGDWRRLDERIEGLSSEIEVVARRDCGCERLMSVPGIGPIISSAMVAAIGSGDAFCKGRDFAAWLGLVPKQISTGDRTILGKISKRGNRYLRVLFVQAAWVVLIKPKSWQRHGLKPWLEAAKKRLHHNVLAIALANKLARIAWSVLVHGRTFEASKIQAA

SEQ ID NO: 348172 - protein, 339 aa, unidentified
MELYSGLDLHSTNTYIGILDIDFKRVFKKRISNKLDLILETLQPFRDRLKGLVVESTYNWYWLVDGLMDAGYDCVHLANPSAIKQYEGLKHSDDQHDAFFLAQLLILGILPQGYIYPKKDRPVRDLARKRMFLVKHKTAHFLSLQSLIARCSGQRISSNQLRTFTSKDLEQLLKEEHLVLSARANLDSIAFLKQQIHRLEKVIRSKLKLNQAFNALLTVPGIGQILAMTIMLEVGDIGRFAKVGNFASYCRCAPTKRLSDGKSKGSGKRKNGNRYLSWAFSEAAQMACRHNKRFRRYYDRKAAQTNMIVAARALSNKLARVCYYIMRDQVVFNEQLMLH

SEQ ID NO: 348173 - protein, 347 aa, unidentified
MSIAMIGLDTAKSMFQVHAVDEDGKAEIKRKLRRSELVSFFEKQAACTVVMKACGAAHHWARMLTGLGHTVRLIAPEAVRPFVKRGKKNDAADAAAICEAASRPDVTFVPAKSLEQQGILALHSARFLLVKQQTMLANAMRGLAAEFGLTVPLGTDKLDELMALVQADEAVPKGARQAVRGLLDHRQVLAKSTKDFEAAIVAHARQDDTARRLATVPGIGPITASLIAATVADIGVFQSARHFAAWLGLVPPQHSTGGKTRLGRITKTGNREIRRLLVLGATSMVHRAAGWNSAAGVWTRGLLQRRPVRLVTVALANKMARIAWALMTRKEVYHAKGRVAAAAEAVA

SEQ ID NO: 348174 - protein, 391 aa, unidentified
MVCVGIDVAKDKHDCCILDSDGMVRADCFTIPNNMDGFKQLLQTIRNCTQKSDKIKVGLEATGHYSYNILGFLLDKDLAVYVMNPLHTNLYRKSLSLRKTKTDRVDARTIATMLLSDVDLKSYTDTAYHNEELKSLTRYRFDKVRERAKLKQSVSRLVTILFPELEKLVTSLHIASVYALLSEYPGAKQISEIHLTKLTNLLVTASKGRYGKDKAIQIRDAARTSIGSVMPAKSLELKHTIKLIRELTSEIDEIEVSIQKIMDELNPPILSIPGVGIQSAAMILAEIGDFSNFESPDKVLAYAGCSPSTYQSGKLTNCYAHMEKRGSRYLRYALYNATKYVCYWNPVFAEYLAKKRAEGKHYNVALSHATKKLVRLIYALQKSGKAYLTAA

SEQ ID NO: 348175 - protein, 368 aa, unidentified
MHEGITAFVGLDVHKDSIAIAVAGNDRQVPHFVGTVRPNFKQVRKALSNYGAPCSLQVVYEAGPCGYALARQLLTDGFGCQVIAASRITRSPTERIKTDRRDAITLARLARSGDLIPVRIPDERDEAIRDLSRARQDAVRACLKARQQLKAFLLRHGRPLRGSRPWSATSELYLSKISFAHTAQNIAFADYRLAVLDTRARVERLTEALRAQCEHWRMQPLVSALACLRGVDFLTALILVAEIGDFTRFAHPKELMGYLGLVPSEYSTGERHHRGDITKTGNAHARRALVEAAWNYRFPARLSHTITRRQEGQSKPVRDIAWKAQLRLGHRYRKLQSRKLHQNKIIVAIARELSGFLWDIARHVSIAA

SEQ ID NO: 348176 - protein, 417 aa, unidentified
MLKIVHQICCGIDVHKKFVVATVGATNKAGTTEYKTKQFSTFTEDLIALRDWLSKQDCKEVCMESTGKYWIPVFNILETNCNVFVANPKYVKGIRGKKTDKKDSIWLCDLHKHGLVPNSFIPPLQIRQIRDLMRYRVKLTNFKSSEKNRFQNSLTVSNIMLSSVVSDTFGKSSMRIINHILEDSENMDFDVEPLLHGSMKAKAEEIAKSINGNLTKPQADKMAVCLAHLEDIDKHKTVIESAVLDLIEPYSEQINLILTVPGIKDIYTAIAIIGEIGADMSVFQSSRHLCSWAGLTPQNNESAGKKKSVRVSRAGVYIKPLLIQCANAAIKSKECPYFRVRFEQISRRRGKKKAIVAIAHMLLNCIYHMLSRNESFNYELYRIDNAPKCKPHDEITAEQAIKLLESLGAKVILPAAT

SEQ ID NO: 348177 - protein, 410 aa, unidentified
MEVVLERCAGLDVHQASVVCCVLIGAPGRKPQKLLRSFGTATRELEALRAWLVEHGVTQVGMESTGVYWKPVYAVLEGHFDLIVGNAHHIKNVPGRKTDVKDAEWIAQLVRHGLVAKSFVPPPAIRDLRELVRHRRTLIETRTAVRNRVLKLLEGANIKLSGVASDVFGVSGMAMLEALAAGTNNASEMAGLARGRMRRKHAALEAALDGRMREPQCFLLGMQLRNLEAIDRDLGALDARIEAQLEPYQAQHRLLTQIPGVDWVTAAAIIAEIGTDMDVFATARRLAAWAGVARGNYESAGKRKGAGTRRGNVFLKSALFAAASAAVRTKGSYYRDKYNRLRARRGPVRAIMAIAHKLLIAAFYMLSTGEDFRDLGESYLDQAARKRSTTKLVQRLSNLGYDVMLVPKAA

SEQ ID NO: 348178 - protein, 360 aa, unidentified
MRIIGCDLHARQQSVAMLDTETGEAVNRRLMHEGQEVREFYSQLPRPVLVGIEAIGPMQWFLNLLEELKIECQVGDATKIRAAEPRKQKHDRRDAELILKLLVENRFPAIWRPSKEQLDLRALLLHRHHWVRLRTQIQNALQAIALANGLRRGPSLWSYDGQAKIAFLPLPPHASYRRSMLQALYRKMEEEIEQLTAQVAEQAEQRSGARLLMTHPGVGPVTALATDVFLGDPQRFADGKALASYVGLIPREYSSGAHQRLGALTKQGSPFLRFLWNEAAAHAVRRDPDLQRFYRRKLVQKGLGKSRVAAARKLGIRLWIMLRDQIDYEEFCRRGQKQSSAVCAGMLEVANGANCHRPVG

SEQ ID NO: 348179 - protein, 353 aa, unidentified
MNSLSEIVEVVIGVDTHVETHTAAVLDARTGAVLDELTVPTTSRGYQDLVDLADTHGALRVWAIEGTGGHGAGLARHLARGEEFVLELDRPERAKRRHGAKSDPLDAVRAAREAMSRPKLGTPRSGGDRQALSVLLAARRSAVDACAVAQRQLFSLVIAAPEHLRAKLRGRKLPQMLTVAARLRVQPGWDTESATTAATLRLLARRAQALTAEAAEIEKQILVIVRAWRPDLLNEFGVGPIVAATVLCAWSHPGRVRSEAAFAMLAGVAPIAANSGQVTTRYRLNRYGDRQLNRALHVVVLSRQRFHEPTKAYTDRRTTNGKNPRDIRRCLKRYIARDLYRLLEHGPHRLDEP

SEQ ID NO: 348180 - protein, 342 aa, unidentified
MSTIQTIGVDLAKKVFSIHGVDAYGKCVLRKTVKRNKLLETFAKLPPCLIGMEACSGAHHWARELLKLGHNPKIMASKFVIPYRQNEKNDANDAEAICEAVSRPKTRFVSIKSEEQQAVLCLHRIRQGLIKARTATINQLRGLLSEFGIVMPQGRYSAQNTIGSVLEDAENGLPILARELLQDLSNKIQNLNLEVLHYDRRVSALVHEMASAKALMDIPGVGEHSASAIVATVNDAKQFGSSRQFAAWIGLVPRQHSTGGHVHLGRISKRGEKHIRTLLIHGARAVIARCKEKTDRNSIWLNQLVERRGYKRAAVALAAKNARIIWALLTTGKEYKINYVNG

SEQ ID NO: 348181 - protein, 393 aa, unidentified
MSPMEHPMRKPNDLSRSLTVLNPETTLIAVIEMSQSSWLVAGIVPGIERQPLKKLGVDEDALLRLLLRWQDEAKKAGRQIDRIAVAFEAGRDGFWLARWLRAHDIEAHVIHASSVAVSREHRRAKTDRLDTELLKRAFLGWLRGERDHCKMVAIPTCQAEDAKRPTRERESLVGEKNRIVNRMKAALTRLGIRGFNPKLKKASERLDGLRTPEGEPIPPNTLAELRRDMARRLFIRYQIKEIESARLERHAQAPEAGPNAMVSLLARVVGVGIETADMLVQEVLSRNLRDRRAVARYAGLTGSPDESGAKRREKGLARSGNARVRRGMIQLAWRFLMFQKDSALAQWYRARTENASGCRKTMVVALARKLLIALWRLVRDGVVPDGVVLRPAH

SEQ ID NO: 348182 - protein, 313 aa, unidentified
MTDITRFVGIDISKSSFNVCVLPDGRSASFANSAEGIADFLVFIEPLCGIERLVLEPTGGYERHVFAALQAAQLPVARVNAKQVRQFAKACGQLSKTDKIDAFILADYARRMETRIVPQRSSQQGALVDLVRRYRQLSHMIVQEKNRREKQNETLKDWIEEMLHVLLEQRQAVVDAMEACLKADLELARKADILMSLKGIGLRTACFILADLPELGRIGKGQIAKLVGVAPLNRDSGLMRGKRMIAGGRQPVRDALYVAALPAIRFDPAMKAFFMHLKQKGKPGKVALVAVMRKMIIILNAKMRDAYATVLDH

SEQ ID NO: 348183 - protein, 317 aa, unidentified
MERSNESLYVGIDVSKCYWDVAVDGSNKVERFTTNKEGGNKLMTKMKKWKPELVCFEATGGWEQPLADLLWEKGVTISIVNPRQVRDFAKACGQLAKTDRIDALMIARYGSTMKPKITEKPSENQRKLRALRTRRTQAQKAKNQESNRLGTLHDDEIEILVKQSIEFYKNQIEELDKQIEKLVKNNAEFKKRTQLMVAVKSIGITTAAALLAEIPELGTLNRPQVGRLSGLAPINRDSGMFRGKRMIGGGRASVRNAIYMATLSAIKHNPAIKKFHDRLISNGKSKMTAITACMRKLLIILNAILRDESPWNPNLNA

SEQ ID NO: 348184 - protein, 352 aa, unidentified
MIIGCDFHPSFQQIAYVEQETGECGERRLSHREEAVRFYRSLAGRKAVVGLEATGNDRWFRKLLGELGHELLVGDASAIHAAAPREQRTDKRDARHILKLLVENRFPAVWQPPADNEAQRQLLYHRCRLVRIRTRIKNQLDSIAKSEGLTGSRKWSIQRRRQIEALPLTGWYCQRRADLLQLLDELEHRIKPLDQAVEEAAGQDEQARLLMTHPGVGPVTSLAYVLVVGDWRRFPRGKQVGSYLGLIPSEFSSGKRQQQMGHITKQGNTLLRWLLVEAATTAQRYDVSWHRQYVRLSMAKHHGVAKVAIAHKLAVRLYWMLRSGQDYGQMVERGSHARQSECPVGRSKGPVE

SEQ ID NO: 348185 - protein, 384 aa, unidentified
MIIKRCKGDPLEPGRHHCARVEMFGNHSRDRGSTMNVTTYGLDLAKRVFQVHWVEPDTGELKRKALMRAEVAAFFARRTPGVVAMESCGSAHYWGRVLSGLGHQVRLIAAQFVRPFVKTNKTDAADAEAIWEAAQRPGMRFVALKTEEQQAVLSLHRMRAQLVKIRMMQAYQVRSLLYEFGVIAPKGFRALQEKFGPLLTEPSGCPVPELLRVELLRQFEALRSLGARIEELERRIGGWQRREAECERLVAIPGVGRLTATAVVATVADARSFRSGREFAAFLGLVPRQSGTGGRVKLLGISKRGDPYLRTLLIHGARSVLLTQGRADRVMDPWLKQILTRRPKNVAIVALANKMARTIWALLAHGRCFDPNWGRTAIVVAPGP

SEQ ID NO: 348186 - protein, 416 aa, unidentified
MNAVGIDVSSRKSTVAVLRPLGEVVCLPFDVTHDIAGLASLVEKLKALDGETRVVMEHTGRYYEAVEKALHEAGLFVCAVNPLLIKEYGANSLRRVKTDKADAVKIARYALDNWADLRDFTPMDAIRYDLKTLNRQFQLASKQRTASANNLIALLEQSFPGIRKCFDSPVRSDGTQKWVDFAHSFWHVDCVRKQPFPAFCERYRKWCKRHAYLFKLSNAEEVYALAKRAVVLTPKAKVVKVLVQEAANQLISISRSVEVYRAEMDRLAAMLPEYPVVMAMYGVGKSYGPQLMAEIGDVRRFERKQALVAFAGIDPMPNQSGDKNVRSNKSSKRGSPYLRKTLFNVIRTYLQCAPQDEPVFQFLNRKRAEGKPFYVYMLAAANKFLRRYYAKLRDYFASLDTLQPVAPIPTILKATL

SEQ ID NO: 348187 - protein, 410 aa, unidentified
MQTLVERGCGLDVHQATVVACLLIVLKSGKVHKQVRTFGTTTRDLLGLREWLLSEGCTHVAMESTGVYWKPIYAILEGAFEIVVANAQHVKKVPGRKTDVKDAEWIADLFCHGLLRASFVPPKPIRELRDLTRYRRKLVESRSAERNRLLKVLETANIKLASVVSDVFGASGRLMLLALAEGKDTAQEMAQLAKKQLRKKIPELQLALEGKVEEHHRFLLSVQLHRLGAVEKDLAIVEQRIEEKLKPYEAEIKLLDEIPGVDVALAGAIIAELGADMRVFENVSQLASWAGVCPGNNESAGKRRSGRIPKGNVYLKTALVEAANAAAKAKGTYLRDKFYRLKARRGYKRAAVAVAHKILVAIYHMLSHRVCYNELGDLYLDKLNKHHLTRNLVHRLERLGYTVTLEQKAA

SEQ ID NO: 348188 - protein, 410 aa, unidentified
MEVIHPRCAGLDVHKQTVVACIRIANNGAPTQEVRTFTTTTSGLLTLADWLAAHGVEHVAMEATGVYWKPVWHILEGHFQLILANAAHVKNVPGRKTDGNDAMWLADLLAHGLIRASFVPPTPVPELRALTRTRKQFVRERASHVQRIEKVLEDANLKLGVVLTDILGKSGRAVLQAIIDGDSDPESLLARIDRRVKASRDQVLEALRGHISSHHRCMLQLHLEHIDALNRAIATLEQEVGAGLKPFLDAAELVSTMPGMSAVASHAVLAEIGIDMSRFQTPGHLLSWACLCPRNDESAGKRRSTRLRRGGKWLQTTLVQAAWSAVRVKGSYLQAQFHRLRARRGAKKAIIAVAASMLTAIWHMLRNGTEWRELGAAYFDRVDAQKTATRLIRRLQQIGYAVQVTAVTPA

SEQ ID NO: 348189 - protein, 395 aa, unidentified
MNLKYSVGLDVSSKKINACISVIDEKQKVIVKSSTIISNSLKGFVTLEQWILKHKKEAIPVVVCMEATGIYHENCSYYLFEKGFEVSIILPNKAKKYLEAIGLKSKNDSIDAKGLSQMGAEQCLELWQPMGTFFYELRLLTRQHQNVTELKTVLKNQLDALGFAMHQLETVNHQIKHTISIFESQLKELEKAIKNHLKSDEEVNKKAENILQMKGLGILTVSTILAETNGFTLFNNYKQLVSYAGYDVVEAQSGTRIGKTKISKRGNSRIRRALHMPSLVVIQCQVKPFKDLFERTYEKHGIKMKSYVAVQKKLLTMIYHLWNKKEAYDANYQINIQEEEQKLSSRAIVFEEDTIAKNSPNLKIEATQGKHPVKNRKKLPLGYANVEKKVKIIRN

SEQ ID NO: 348190 - protein, 494 aa, unidentified
MAKSKSKAYRKRQHIQKVKGRRFTDEIRNLDLEKVLVVPIDGGKNSHKALVADYFGDILHDPFEFSNLASGVKMFHATVKRVSSSVAAQKVIVGMESTGHYYENLYRTLTNLGYDVAMVNPASVYAQRSGQLNWCKTDEIDLCAIGQVLIDNQATETRLSEGLYYNLKQLTRLRRDEIRKRARLKIQIRVLCDHIFPGLQHSGIFSDFWGKSSMLLLEDYPTPSSLIRLGTSRLARFFKKHNTKLGLYTAERLLNLARNTLCSNKVNLEAHLFNLRFKVADLKMADEKIRKLHIELARYLVQTPGIVLLSIKEINVPSAAEYVAEVGPLEQAGNAKKIISRAGLNPSKFQTSEYERSDTPITKHGSNLLRNICLIISQNLIRVDPHSSQPHNPYFREFFERLVEGGKDKRVAKVACANKFARVSYRMMREGELFSPPTLRKHNVSDDPLVKLKAFLCLNKSEELFEELAENAKEQLPSRYRSSFQKYSIVEKGN

SEQ ID NO: 348191 - protein, 344 aa, unidentified
MTVSVLGIDLGKNICSIVGLDASGAVILRRRAKRETLIGLAAKLSPCIVAMEACCGAHYLGRIFAAHGHDVRLMSPEYVRPYVKAQKNDDRDAEGIAEAATRPTMRFVELKSQEQLDMQTLHRSRERLVAERTALINQLRAILLERGIVIPKGKRKLEQYLAALLDEQNGQDLSPRMRMLVADFRAQWLDLDRRIAAFDAEFVAFAKRDEDARRLATIPGIGALNATALTAAIGKGQAFAHGRDLSAWLGLVPRQATTGGKPTLLGISKRGNKYLRKLLIHGARAALPHIAERDTALGRWAKGLLARVHQNVAVVALANKLARIVWAVLRRGGKFAAQGLAVAV

SEQ ID NO: 348192 - protein, 414 aa, unidentified
MKLFVGIDVSSQELEACLMNPDGEKLDTLKVKNDLQGASCLRDRIVAAADRLSASEVHIGLESTSVYSWHPAMYLHQDPALKALGAKVFTINPKLISKFKEAYPDLDKTDRLDAWIIADRLRFGRLTTTIVMQEQYIALQRLTRMRYHLIHSLTREKQYFLQNLFYKCNAFTSEVESSVFGHAILEMLSEKYSLDDIATMDVADLADYLKEKGKNRFPDPEHVARCIQKAARDSYRLSKVVEDSIDLVLGVSIQTIRSIQAQLKELDKAIERILDGMAGARCLRSIPGIGNVYAAGILAEIGDIERFANQAAVAKYAGLTWRRHQSGSFEAEDTKRIRSGNRFLRYYLVEAANSVKNREPEFGEYYRKKYQEVPKHQHKRALVLTARKLVRLVDALLRNDQLYTPRRKVNRAKG

SEQ ID NO: 348193 - protein, 409 aa, unidentified
MGVDWAEDHHDLCVMDTAGRVRAKGRVSVDLAGVVRAHDLIASAVPAEVDDDDRAERVDVTVGIETDRGLMVRALVAAGYLVLAVNPLSVDRYRDRARVSGAKSDPGDARVLADMVRTDAHQHRPVAADSDLAEAIKLVARSHQSAIWSRRRLANQARSALREFYPAALEAFDDLTHADAVAVLSIASTPERGKRLSRSKIAAALRRGGRQLNIDRRAAEIQAVLRTEHLTQSPVVADAYGAIVASLMAVIGSHSRQISELEEVLETHFGQHPDATILRSLPGLGVVTGARVLGEFGDDPTRYETAKARRNYAGTSPLTIASGTRHIVRARHIRNRRLADALHWWAFNAISRSPGARALYDRRRAAGDTHSGALRVVANRLVGILHGCLRTHTTYDETTAWAHRHDLAA

SEQ ID NO: 348194 - protein, 348 aa, unidentified
MRFYKQPHAFYAGVDLHARSMFTHILDHAGATVFERDLPASPDAFLNAIAPYRAGLVVGVECMFAWYWLADLCEDEAIPFTLGHALYMKAIHGGKSKNDRIDAGKIAGLLRGGMFPMAYVYPRAKRATRDLMRRRCFFVNQRSQLIAHIVNTNSQYNHPPLTAKLCYARNRTDDIAGRFTDPATKLSVQADLTLIDNFDAQIDEIERVVLKTAKIDDPVSLAFLRTIPGIGKILSLVMLYEIDQAARFPEVGNFLSYARLVRCEHESAGKKKSSGGKKIGNAHLKWAFGEAACLMLRAMPEAKKWLARQERKRGKKKALSVLEAKIGRTVYHLLRKQQAFDAKRFFAS

SEQ ID NO: 348195 - protein, 455 aa, unidentified
MTGAKSPGSDALSMVNPGAAAIDIGSTMHLAAINPQADDNPVRAFGTFTGELHDMARWFKASGVTSVAMESTGVYWIPAYEVLEEHGFHVILVNARYAKNVPGRKTDVSDAAWLQRLHSYGLLRGSFRPEAGVATMRAYLRQRERLIEYAASHIQHMQKALMEMNVQLHHVVSDITGVTGMRIIRAIVAGERTPVTLAEMRDVRCHASVEIICAALSGNWRDEHIFALCQSLALYDFYQTKILECDRKLEVALKALAIDKGHDIRGLPKVRTKRRQVNAPAFEVRSALYRVLGVDLTQIHGIGPSLALKLVGECGTDLAAWPSSKHFTSWLCLAPGNKISGGKLLSSKARRSSSRAAALLRLAATTIGRSDTALGAFYRRLAARAGKARAVTATARKIAVLFYNSLRYGMAYHDPGATQYEERYRSRVIGNLQRRAKAFGFSLQELPPEPDMAVS

SEQ ID NO: 348196 - protein, 417 aa, unidentified
MDVLYERCAGIDVGKADVKVCVRTAGLRGRGRHSEVRTFTTMTRDLLALRDWLICQQVTVVGMEATGEAWKPVFYMLEDAFEVWLLNARHMRNVPGRKTDVADSTWIAQLVEHGLVRPSFVPPEPIRRLRDLTRYRSDLVHERVREVNRLHALLEDAGIKLAVVATDILGVSGRAMLEAMIRGERDPRVLADLAHTHLRRKRDALTEALTGRFVGHHARLARTMLDHIDALDATCVEISGWIDAALAPFRRQLDLLTTIPGVQQRTAQVLLAEIGTDPSRFPTAGHLASWAGMCPGNNESAGKHKTGRTRHGNAYLRAALGEAAHAAARTKNTFLAERCRRLAVRRGKKRAIVATAHAILVSVWFMLTTDSPYQELGDSYHLQHSDKTRRTRHLLTELGRLGYTVTLNPAEATAPTA

SEQ ID NO: 348197 - protein, 338 aa, unidentified
MAIVMGLGQHRAQITAEWIDTDTGELGRARISPALRGDVRRFVKRFAGQPLEVALEATTGWRFVVEELHAVGAEVHLAEPAETAARRGNKKRAKTDRADARHLCELLMIGRLPESWIPPEHLLDLRARVRLRHTLVDQRGEWQQRIQAVLYHHGFPQRNGLLTGENRAWLEALALSPSAREQVRIALQIIDSLDAQSAPITRELRLYARRQLGCRALMKHYGIGELTAVTILAELGDARRFSSSRHAVRYAGLDITVHQSDQRRAAGHLSRQGPPALRWALFEAAQAARRPGSPDRGYYDQAAERLGGNRACLALARKLLKRSFHTLRELGEEAVAPA

SEQ ID NO: 348198 - protein, 408 aa, unidentified
MVYETGKENEELYAVSFYDLRGRIGEWAESPKRDMLRRKGGYGMRIDVGVDLHKTQMTVYVRTGKDEGESSQYSVTTEGYREFLKALGKWRSKGADIRVAVESTGNTRYFMHQLEARGYPVVVINTMKFKVITQSVKKTDRHDAYTIAEFLSKDMLPESKLCSEKSEEVRRLLKVRSMLVRTRVSIKNQIHGLLVSRGMEDTRACLQSKRGRQEIQDTLAEAGNGLVVQPLFDTIEALGEEIKAIEAEIEKLMAADKAVKLLQTIPGCGPVTAWTIRAYTDDIRRFARYKQYSSYAGLVPWVECSNETVHYGKITKRGPEELRTAFVQLVMGIRRSRSTLSWRLMVQYESMKRQKGTGKSIIATARKMSKIVWYMLMREEEFKTSLMVDTKLDSVIQSMREKALCESA

SEQ ID NO: 348199 - protein, 394 aa, unidentified
MFYIGIDIGKRSHVASIMNDEGKVVLKGFSFPNTIEGGEKLLGKIHDFSSSSDDFTVGMEATGHYWLTVFSYLHEKEFLIHVLNPIQTDGWRKGTEIRKRKNDIIDSVLIADLIRFGSFVETTLSDENIFSLKQLSRYRTYLVGTASDFKRKIIAVLDQVFPEYDSVFGKSGVFGKASKEILLEFSSPETLHDISANTLAKLLKEASHNRLGIDKANALKSAASRSFGITFAQETFTFQLRSMIEQLKFLEAQIKDTETEIKKIMVTLHSVIETIPGIGPINGATILGEIGDISKFSNPTKLVAYAGLDATVSQSGQYQATHNVMSKRGSPYLRKALFSAALIAVQHDPVLKAFYEKKRSEGKHHLTALGAVSRKLCYIVHAILKKNEPYEIRM

SEQ ID NO: 348200 - protein, 311 aa, unidentified
MYYIGIDVSKKDLSVFDGKDLKFINKEGLTSFKKYLKKKYNLQEIAIIFEPTGIYSFYLKEFCAENSIKAYIINPKQSHNFARALGIRPKNDKIDARTLYKFHKLIDLKDIKVPKIDQQAKTLSSYLVSYEFALKQRISLSNHLESLRDKRLIALMKKDLKRAKKLEDKLFNDILEYVKQNQNLKEDYQRLLTISGVGDKTAIALLTLFKTYQGTNRAQITALAGLDPVRRESGTSVKYKVKISKNGKGIYRKIFYLPTICATVHNQKIRVFYQRLLANHKTKKLAIIASMRKILLVAHAMYRDKTEYVTA

SEQ ID NO: 348201 - protein, 393 aa, unidentified
MKWGYRKVNHLPLLLSYEGYNEKLWKGLGKILGEYSAEDVVFAVETSCDLWKTIVDYLSRQGYTVLLVNPLTTYHSRPLMNHDFSKTDQKDALLIATNAYNGNYIKYKQFTPEINRLHRLSITYEKLTKDRQRAVAQLRAFMEEVFPEYLRCIHIDTETSLYLLEKYFLPERFHSIDIQQEAINIRRISNGNHGSETLLKIREYAKKSIGSRIQEEEETLRLILDSWISEIRQINKSIKAISDAMIGHAKKNEYFDILTSMMGISDISVARFIGECRDLNLYDHYKQIEKFAGTNLRLMNSGKYEGTRRISGIGNKRLLKLIYLMTAQTARFIPEVRIKFLKRQLKKKCYRKNIIASSSQLLKLLMALIKEKRKYVFRKEQNKQKAETTRKAA

SEQ ID NO: 348202 - protein, 417 aa, unidentified
MSKIIERCAGIDIGKRFLLCCVVTGAAHEESRSQTLRFDTTVPALERMSEWLHRERVTHVVMESTGSYWVPVFNILEDRFTVVLANPEEVQNRKGHKTDRKDAKHLADLLRHDHIRPSYIPPRATRELRDLTRRRVQLMQDCTRERNRVQKLLEHANVKIAGVLSDVFGVSGQRMLVALLEGESTPDQIAELACGQAKRKIPQLTEALVGHRMTEHERFLIRSCLRHLACLEEELESLDVEIVRRMGMPPFQNAFALLQTLPGVGELSAAAILAETGTDVASFPTAEQMASWAGLCPGNRESAGIQKGSHTTHGNAYLRTALVQCSWCASRKQGSGFEARFKRLVKPLGPKRAIVAVAHHMLIIIYCMLRAGVSFRGAEGAPQQRRRQHRAHHHLRCLRRLGVAVRVLSDDLSGWAP

SEQ ID NO: 348203 - protein, 356 aa, unidentified
MSNTIPVDVVVGVDTHKDVHAAVAISATGFHLAATTVPVSSKGYQALEAWATSIGPVQAFGIEGTGSYGAGLSRFLHQRGHTVLEVNRPNRQLRHQKGKSDIVDAESAARAVLAGQAAGQPKSGIGTVEMIRHLKIARDTAVKARTQAMQTLRAIIICSPAALREQLDPIVGKMTLLRRLAALRPGPITSTLASAKVSLRAIAQRWLELDAEIKQHDVLLATLTATCAPELIKAHGVATGTAAEMLLVVGDNPERIHSEAAFAKLCGACPIPASSGKTNRHRLNRGGNRQANAALYRVVITRMRAHPPTLEYMRRRRAEGKSKTEIIRCLKRYVSREIYGYLCGKPKLLNTPSTTP

SEQ ID NO: 348204 - protein, 360 aa, unidentified
MSFNGTSVGLDVHALSVVAHAFDEETGRVERARLCPDHGEILDWLHRLRGPLRVAYEAGPTGFGLARALTDAQIDCVVAAPSKLIRPAGDRIKTDARDAAHLTRLLRLGEITAVTVPEAEVEAVRDLVRAREDARADLMRVRHRLSKLPLRQGRVYSGGNAWTGVHETWLRRQRFDDPHTRAAFDHHFDAVLSATAARDRLDEQIVAVAASSRWSDPVDRLGCLRGISALTGLALSVEIGDWTRFTGASIGAYVGLVPTEYSSGASRVQGSITKAGNAHVRRLLIESAWHHRAAYRNPGPAMRARWAKVDPALKDRGHAGNRRLHQQWCRFNERKKPHVVANVAVARQLAGWCWSLATLA

SEQ ID NO: 348205 - protein, 444 aa, unidentified
MLPILYRRVAGLDVHKKTVVVTRMQVTDEDRAEWDTQTFGTTTPELLQLHDWLLEWEVVHVAMESTGDYWKPVYNVLEDTFELLVVNAKHVKHVPGRKTDVKDSEWLAELMMHGLLKASFVPPRPQRALRDMTRYRTTLVQERTRLVNRVQKLLEGANIKLSAVATDIMGVSARAMLAEIAAGQTDPVLMAELARGQLRAKIPELEKALTGIVLPHHRFLLVQQLAHIDFLDEQVEEISAEIGRQLEAMSRPPDGSEPGMGESTDEGSIPGESKPPLTWLEAVALLDTIPGVNQRTAEKMLAEMGLDMSRFPTAGHLATWTGLAPGNHQSGGKRYSGRTTKGNEALTTTMVVAAWTAVRTKDTFLKARYHRLAARRGKKRAIVAVAHSMLVSAWHMLTYQQPYQELGGDYFDQRKKEAKMSYLIRQLEKLSGGSVSIEIQPAAA

SEQ ID NO: 348206 - protein, 416 aa, unidentified
MADPEKSSTFERYLAMDAHRHYVVVGGLNAQLEVVLPARRMEMERYPQWAKENLTRKDIVVIEASTNTWDLYDITAAVAGKVLVAHPLAVKLIAHARVKTDKQDVFRLARLLAGGLIPEVWVPPVPVRELRSLIAHRRRLIQMRTMTRNRLHSLAQRHNLILPEGGAFTDKNQGWWKSLSLSPVEKLHLQQNLALLEFLEPEVKTVDAELARLSTCEPWKEAVPYLIQLPGFGLIVTMTVLSAIGDIQRFPTSKQLVGYSGLGASLHQSGETNYSGHITKQGRRDLRFALVEAAWTVISSSPYWREQYQKLSHRMPTNKAIVAIARRLLVAVWHVLTERTIDRRADPDMIASKLMIWSWKLNDAQRGGLTSRQFVRYGLMRLKIGQEIDRIKRKGNRPIASVEEVLERLSELNLSI

SEQ ID NO: 348207 - protein, 351 aa, unidentified
MKKRKIAQEPAFEPDAAYLGIDVSKEHFDAALCLGRGRTLQEVICKRFGNDAKGIKAFDKWLTSQGVDTSLRPQLLVVMENTGIYHRRLWQYCCAQNLHATIGNAADIKWSMGLVRGKDDVTDSMRLCEYAYRHEDRLRQVDAFDEDVLLLKDLQTLRRRLLKQLSANKVALGELRGTNAKATQTIIEKASKAAIEGIKKSLKEVGIQIKALIRSNEAMCKNYKLLLSVPGIGPVIAVYLIACTANFVGQPTGKQLACYAGVAPFEKSSGVTKGKPRVHKMANKELKAILHMGARSIANLNPEAKAYYERKATQGKHDLSIINAIKNKILLRAAAVIRNGKPYVDNSKAAA

SEQ ID NO: 348208 - protein, 317 aa, unidentified
MNQSDVIYIGVDVSKATLEIYCDNQQALNIPSSVDNHKLAITKLINKLSKYDVHVVFEATGGYEQCLLLLLQETAIKASCVNPALVRSYARACGVLAKTDAIDARIIAEYGCKFNPDVTQPVEPYLAELHDIVSYRKKLTQELIRERKQLEHPRSKVVTKIVKLRIKALVKQVAQLEAELVAIKQEHTAVRESVDLLSQTQGVGELTAFSLLSAMPELGKINRYQAAALAGLAPFNRDSGRMMAKRSIYGGRREIREALYMAALSASKCNPVLREFYQRLVANGKPKKIALTAVMRKLLCHLNHTMYQYLKTQKLVA

SEQ ID NO: 348209 - protein, 465 aa, unidentified
MKSKPRKSEKKKKKTVIDPAWELIHPEAAGIDIGSREHWACVPAGSTGKNVRSFGTFTADLEALAVWFRECGVKTVAMEATGVYWIPVFQILERRGFQVILVNARQTKNVAGRKTDVKDCQWIQRLHTYGLLQGSFRPEDKYCVVRTYLRYRDEWVSARSTQCQHLQKVLQEMNVQLHHVLSDVTGASGLRMIEAILDGQRDPVKLAATVDRRVRASQETIQKALVGDYRPEHLFVLKAVFELYHTYEAKINACDGQIVIEVAKLPDQVDVKVKPLPARKAGRQASVDKMLQHDMRAALYPKLGVDLTAIEGIGVLTELVILTEVGPDLSRFPSEKHFASWLGLCPDQRISGGKVLSSRTRRVINRVSDALRMGALTLERSQSALGAFYRRMKARLGAAEAVTATAHKLARLVYRLLKHGEAYVRQGMADYEKRFQERKLYALQKTAKMMGFELIAKQPITQGVS

SEQ ID NO: 348210 - protein, 343 aa, unidentified
MQTVTTIGLDIAKSVFQVHGVDAEGNVLIRRQLKRRYVLAFFEKLPPCLVGIEACATSHHWSRELKARGHNVRLMPPAYVKPYVKRQKNDAADAEAICEAVTRANMRFVETKTPEQQSCLMLHRTRQLFIRQQTSVINAIRAHMAEFGIVAPVGRKGVEQLLDVVADARDRRVPEVARACIAALGAQLRLLKAQILEFDRRILAWHRSNETSRRLDAIPGIGPALATALVASVADAKAFRSGRNFSAWIGLVPKQHSSGGKDKLGSISKQGDRYLRSLFTAGALAVIRYAKIHDTQHRPWLTALLARRPTKVAAIALANKIARMAWAMMARGERYREPVALAA

SEQ ID NO: 348211 - protein, 344 aa, unidentified
MDVLYQSCAGIDVHQATVVVCILHGPLTSTRPKREMAQFDTTTKGLKACHDFLTQFHVEAVGMESTGVYWRPVWHELCDDFELILAQPAHMKAIPGQKTDKKDAHWIAQLTRIGLLPRSFVPDETIQELRELTRQRKHYVESRNRETNRIHKILQSGGIKLTTYIEDIMGASGRNLLQLLIDETPLTPRMIHQSVYTSLKRKVPQLLEALDGYFSAHHRFMLGQSLEIYDFYQKQIDCLEERINGYLNLYERPVEILDSIPGMDLITASVIIAEIGVDMSQFPTAGHLASWAGLCPGNNESAGKKRSTKIRHGNSYLKRCLCQAVCGKKTKRKSTSRALLPNSK

SEQ ID NO: 348212 - protein, 322 aa, unidentified
MQGKVMTEVAMPRIYVGIDVCKERLDIYIHPAGVSFSVANDAGGWRHLLRRLAKHQIELVVMEPTSKYHRAAHRHLSAAGMAVALINPHRARLFAQACGQFAKTDRIDARILALAGERLQPDQVAPPTAEEEALEELAGARSAALAERAAIANRLRTINLPFLQRELAGQMRNLDRHVSRLETKIETMIAADPIMARQAVIIRSIPGMGPVNVLAILTGLREIGSINGKEATALAGLAPFANDSGPRQGQRRIRGGRANLRKALYMAAVSASRCHPDLRTFYQRLRAKGKSAKLALIAVARKLIVLANSLVTENRCWTPLRP

SEQ ID NO: 348213 - protein, 441 aa, unidentified
MMAMRKRTDTVFPNAAGIDVGASSHWVAVPPDAAEESVREFGVMTDDLRALADWLLACKVEIVALESTGVYWIPLFEILEQRRLQVWLVDARQMKYVPGRKSDVQDCQWLQRLMSYGLLRAAWRPAGEVCELRAIARLRETLLAEQASWVQRMQKALVQMNIQLTEVLTDVMGMSGQAIIRDIVAGERNPEVLARHRHRRVKASTEEVIRALTGNWRQEHLFVLGQALSMYDDIARHLRECDAQMQVLLGQRAQCAINVGAVPRAGSKARAAFDVRQMLANWAGVDLTRINGLEVSSVMKILTEIGPDLSRFANVKHFCSWLGLCPGTKVSGGKVLSAGTKRSANRVRQALKMAAMTLSHSNSALGAFYRRLCSRMDKPKANTATAHKLARMVYFMLTRGEAFVDQGQQRYEELQRERSIAALKRRATALGFQINPIGAAA

SEQ ID NO: 348214 - protein, 409 aa, unidentified
MQVMYQRCAGIDVHLRFLVVCLLISEGGQRRKEIRTFRNETADLLVLRAWLLQEGCSHVAMESTGVYWLPVYRRLEGFFELVVGNAQHIKGVPGRKTDVQDAEWIADLVQHGLIQASVVPSQEQQEVRDLTRMRVSLVQERSRLVNRVQKVLEEAGIKLSTVLSDVMGLSGRAILDALCAGESDPMRLARRVHPSVHATQEQIAATLTAEIREHHRFLLRELLVLIDAQDRSIKHLELEIERHLHPFEEQVKRCVKINGVSEHVLYVLMAEIGTDMVRFPDAEHLSSWAGVCPGHKESAGKRQSGRCRKGNRYVRAALVQAAHGVRRSHTYLGERYRRLKKRRGSKRAALAVGHSILVIYYQMMKTGQEYQEKGEEFFQRKDRGKVERQLVRRLERMGYQVISPPQSVA

SEQ ID NO: 348215 - protein, 355 aa, unidentified
MDNTKYIGMDVHTETISIAVLNSAGKLVMESVIETKALTIIQFVQGLRGDLHVTLEEGTWAAWLYDLLRPHVNQVLVCDPRRNALLKVGNKSDRMDARKLAELLYMDKLNAVYHGEHGVRTLKELSRSYLAISGDLARVMTRLKAVYRSWAIACAGKQVYAPRCRAEWLGKLSEAGVRRRAEIYYEQLDALRSLRQQVRRELLAESAKHKASKLLCQIPSIGPIRAAQLIAILQTPYRFRGKRQLWAYGGLAIETHSSADHRYVKGQLQPSKRQVSLRGLNRNHNHELKNIFKGAAIIAATKPGPLQEFYANLVAKGMRPEMARLTLARKIAAIILIVWKKGVSFDAEHLKPQTA

SEQ ID NO: 348216 - protein, 466 aa, unidentified
MTPPRRQQPKRRRTSPSLLKRIKLHVAGVDCGAAEHYVAVPPDRDATPVRAFKTFTSDLHRLADWLAACRVTSVAMESTGVYWIPLYEILEGRGFEVVLVNARHVKNVPGRKSDVTDCEWLRELHSVGLLRGSFRPTAAITVLRAYLRHRETLVESAAAHVKRMQKALGQMNLQLHVVISDITGVTGLRILRDIVAGHTNPQDLAQYRDHRCHASEAEIAAALTGHYRPEHLFALKQNLELFDTYQRQLADCDAATEAHLQTLAAEATVVLTHPLPAPRSTAKPRRNEPRFDIRSPLHQLTGVDLTQVDAIGPYSALRLLAEIGTDMSRWPTEKHFTSWLTLAPKNKISGGRLLSSRTQPSANRAAAILRLAAMSLGRTETALGAFYRRLAYRVGKAKAITATARKLAILVYRTLKDGLVYHDDGAAAYDAHHRTRLLRRLRQRATALGFTLVNLETGEQLETVVS

SEQ ID NO: 348217 - protein, 311 aa, unidentified
METTLIVGIDVSKDRLDVAVRPGAEAFGVERNAAGLEQLVGRLRQLSPQIVALEATGGFETVAAAALASAGLPVVVVNPAQIRAFATAIGQRAKTDPIDAAVIAHFAEATKPTVRPLPDEATRLLSDLVARRKQIVEMIVAERQRQRRITVPHLKKSMARLIKALSQELSSLDSDLDDAVRGSPVWRAKEDLLATVPGVGSGIARTLIADLPELGTVGHKQIAALAGLAPFTRQSGRWRGKAFIGGGRTAVRAALFMGAMVAKRHNPVLRAFFDRLVSVGKPKMVALIAVARKLLVILNAIIRDNRPWQTA

SEQ ID NO: 348218 - protein, 391 aa, unidentified
MSMYFVGIDISKYKHDCCIISAADQQIISKFTITNDKDGFEQLLTALNSLSNPEDIKIGFESTAHYALNLELFLENAHHSFMEVNPVLIKEYKKSTTLRRTKTDSVDCESIARWLITVEYKPHSKGFYHAYSLKSLTRLRDRLIRQRSFYLVKITNVLDHTFPEFKPFFNERLSKTALYLLENYGSAEKMARMNSASYDKLRCISRGKFSIQQFLRLKELAADTVGVNNSIFDLELNTLLTLYKSLSDEINTLETEIIKLIEEVHPHYMSIPGIGPISAAVIYAEYGDISNFSNPGQMLAFAGIEPGINDSGTESHGGRMVKHGSSQLRYVLLNACLPLIRFDLTFATYYEKKRAEGKKHRVAITHVAKKLIRVIYALERQDVDFNAQKLR

SEQ ID NO: 348219 - protein, 374 aa, unidentified
MKERGLRSSCPFRAHMLGVLTLLRRRRPLVSEFYEGRQFVGMDLHRRRSMLVRMTEFGEHLETVRILNDRDSLAEVISRAGESPEVVLEATYGWYWAVDALAELGATVHLAHPLGVKAFSYRRVKNDQRDAFDLADLLRMGRLPHAWIAPPATRELRELVRHRAKLVAMRSQCKAHVHAVLAKGGIWVPMTDLFGVEGNLLLDKVTMPAPYRERIASLRRFIEGFDAEIDLFTALAQRRLTHDAGYTAIQQIPGIGPVLAAVFVAEIGDVHRFAGPAQLTCWAGLTPSHHESDTTVHRGRITKQGSRLVRWAAIESVKILPETSRIGAIREQVAHRRGNRNIGAVAAARRQLELVFYGLRDHHVRALHRSPHAA

SEQ ID NO: 348220 - protein, 386 aa, unidentified
MSVDPRSEPTAIRTDLGAIFVSMELSRSLWLITSLSPGAGERMSKHSVRGGDVAGLLMRLAQLQEKAQARTGQVFPIIAIQEAGLDGFWIHRVLLSEGIESHVVDPASIATSRRQRRPKTDKIDGEALVRTLLAYKRGEPRVCAMVRAPTPDEEDRRRIGRERKTLIAERVQHVNRIKGLLFAQGIGDYEPLHRNRREKLAELRTGDGRPLPPHLKAQIGRELDRLELLLDQIKAVEAERDARLALADDDAVPPTVMLLGLKGVGPEFAAILWSEGLFRTFSNRRQVAAYAGLAPTPWKSGRVDREQGVSKAGNPRLRTTMIQLAWLWLRQQPASALSRWFQERIRRNGGRLKKPMIVALARKLLIALWKYVTAGVVIEGGISKAA

SEQ ID NO: 348221 - protein, 476 aa, unidentified
MGKGSGTTRGDRRRNARRERLRELLPRDGAVIGIDLGEDGQAIAVIDHDVRVLARKTVRVKAFRLGGALDWAVGQARAKGFAAVTVACEPTGARWLQVQRLCAERGLPLVCIQPLVSHIARQQQDYTTHKTDEADCVMIARLAIELHCYIPEELDEAWAQLRHLGRRRAQLITAATASVQRVRDFLSVAWPVAAEVCAHPFESVTWLAAMQVVTSRCGGQPEKLAAIGLAEFTALVRQAVAGWGGQRPAGPVCRAVFAALASTEGMVVSHRRGLLRRCADELGDLQRTRAQLRAVEADMAAVLGELGLSRLADIPGLTAVGAAAILAETGDPRRYDSSSSLVKHAGLSPSGNASGAFEGQAHISRRGRPGLRLTVWRAIWPLLIHNSVMAAKYAAMIAAADAAAAQAVPAQSGTGSRQASAAAAARARRAKARVACAASLLRWIYSMVVHDTGWDPDVASGAASCQHAPRYQAEAA

SEQ ID NO: 348222 - protein, 367 aa, unidentified
MREKLRFLGLDVHAETIAVAVAEADGEVRSLGTIANREESIRKFIRKLGSPEQLRACYEAGPTQLGVECDVVAPSLVPKKPGDRVKTDRRDALKLARSHRSGDLTAVWVPDGDSEALRDLVRAREAAKQDQLRSRHRLTKFLLRTDQRSPLGVKAWTERYVEWVQQVRYTHPAREATLLDCLNEVQHMDQRVKRLEESIVEVIQMAPAPMQEVVRGLQALRGIAHISAVTIAVELGNITSRFENARALMGYSGVFPSEDSSGERIRRGGITKSGNAHLRRIVVESAWSYRHRPAIGARLRKLQEGLPAEITEIAWRAQIRLHKRYMKLMARGKEQRKTMTAVARELLGFIWAIGIKAEAACKQQMAA

SEQ ID NO: 348223 - protein, 330 aa, unidentified
MSKHNIVFIGMDTHKSFIEVAYIEDVRGVKPIHLGKNPSTKQSVIKLVRRFESKYPHATLHFVYEAGPCGYWIYRLITSIGHCCYVIAPSLIPKKPGDKIKTDKRDAMNLAKLLKSEDLTAIYVPEPEDEAVRDLSRARETAMKDLKDGKYQLNALLLRNNVTAKVKDNWSKQHLRWLTELILPHPAQQIVLQEYIQTITERMNRLKRLDNELEHHVKNWRYYPVVKAIQAMRGVRLLVATGVVAELGDLTRFDHPRKLMSYLGLVPSEHSSGGSRKLGSITKCGNSRARRLLVEGAHTYRFAANISKELQLRQEYLGKTIVADLNGKRM

SEQ ID NO: 348224 - protein, 416 aa, unidentified
MKIVRPICCGMDVHKNIIVATIGITNKKTRITEYIQETFSTLNPDLLNLKQWLINHKCFDACMESTGKYWIPIFNILEDEINIYLTHPKYVKAIKGKKTDKKDSKWICDLFKHDLIKFSFIPPKEIRALREVSRYRYKLVGMRSSERNRYQNCMTVSNIGIGSVFSDPFGKSAQAIMKEVLESDIIEDEKILKCIHGSCKNKDKILDSIKHCNIETDQRFKMNESMTHMEELQVHINNCEIEMMKRAAPMFDRFMHITQLPGISTLSAILIISEIGVDMKQFESDKQLTCWAGLAPANNESANKKKSVRISKAGQYLKPLLVQCALGAIKDKEGYFGIKYSRIKKRRGHKKAIIAIARMMLVSIYHMILTGETFNPSDYESFRNPKPPIKQQDLTEESAIEFLKKSGFDVSKLTKP

SEQ ID NO: 348225 - protein, 468 aa, unidentified
MSLYSITSGSLIVALDIGKNVHWFGCYHYDGRLVELVPPRKVRSDTVGFAQFTATVDPLLASGRFPAGVFGNEHTGVYHEPWAWLIAAHYQAALQPAAACPVAYRWLNPLLTKKRQDETSVRQRTSDRTAVAAIAACLADGLGHPAHLLTDDAAQLRELVRSYAQVSDQLRFAGRQLLPQVDRLWPGAIADVKQFRRAHPDLPPPTPIVETHALDRDRLAALLLYCPNPHDALALGATGLIQLFHDHGYRAGPKTAEAILTALRHSPLPPKTVAATYASRLQIDYRRYLALAEASETLVSQITTLAPLTPARFVDSVPGIGPLLAASYLAPLGDARYFATASQVWALAGYDLSTAESGDTKRIGHITKRGSPALRDTLYQIGFHTASQCPPIGEAFLAARERGLGETAAVIHAAHKANRLCFTLLREARMYEPATPAEEAHFQQRWQHFQQQLAKQRQRHAVQQRLAA

SEQ ID NO: 348226 - protein, 350 aa, unidentified
MEDCYLGIDLGNTKSVFYLMSDSGQKRDAGSLPTLSEFAWRTLLEPLRGERLHACFEASPHYDWLYDLLAQFCSEVVMVNPADFAVISRSQRKTDKIDAQKLAEGLRRGDLPAVYVPEKRVREDRRLVSFVHWHSQQLASVKHKIRSLLLGARLKCPAADVMSIKGQAWLEREALSRLAKQESMLLRMLLNQARQLAAQRKELDEEVRKRVPRYKQADVVESIPGFGPLVSLAVLSAVAEITRFRQPGQLASYFGTCGSVHQSGESLRLGALTKRGNVHVRWLLSQALRTLHCKDPRVRQRYLKLKRKKPRGVARAAQVRWLSNLVWWLMTKNEPYRRGGMQRKPDAVAA

SEQ ID NO: 348227 - protein, 339 aa, unidentified
MDKRDFAGIEVSKDKLLVALRREEQTLPLHSFPNTPEGHRAVAQYLARQGRRVQVCLESTGVYGLDVALLLHKQAGVEVMVANPRAVRHFAQALMQRSKTDPLDALMLLEFAARMPFQSWQPPSATALHLCALARRIEAVTDLCAAEKNRLHAASAAVALPAAVRQDIGRSIAFQERALERLARQARKLIAGDPLWQERFEQLDSIPGIAPTSAIAILAELALLSPDREVRQWVAAAGLDPREHSSGTSVHKKTRISKTGNRHLRRALYMPALVAVQHDPHLRAFYQHLLDNGKDKLQALVAVMRKLLHAIFGMWKHRQTYNGSKIFRLAPELCTTEVA

SEQ ID NO: 348228 - protein, 423 aa, unidentified
MSHDTKDVPFQKQFKLFAGFDWASDHHDVVAVDPDGRIVLELTIEDAAEGWATLREKFAKLVGQDLSAVAVAVETCNGPAVERLLEMGCGVYPLNPKAAQRYRERKSPMGAKCDRLDAWSFGDALRTDGHGWRRLQPDDPLTQELRILCRDEVQLIQQRTALVCQLKQALHEYYPAALEAFDNWVTVSSWAFVEKFPTPQVLVKAGKRRWEKFLHTNRLGRPERYDQRLEIFARADQFCGKQAVTNAKSRLALALVAQLRVLEKQLQDYRKAIESLFGRHPDNDIFGSLPGAAAKLAPRLLSEFGQNRDRFPKDESIQCYAGTAPVTRQTGKRRVVRIRHGCNKFLRTAVHLWANESREKCAWAEAYYQAKRGQGKSHACALRCLGQRWLDILWKMWQTGTTYDEALHMRNQVQHGSWVIQLG

SEQ ID NO: 348229 - protein, 392 aa, unidentified
MLFVGIDVASKKHDIAITSSEGDIIVRPFTISSDLEGFKKLRMVITSHTESVEDVRIGIEETGIYSKNISEFLALHGFIVHMINPVLTNYSRKSQSLRPAKTDKIDALAICRYIQSNFKRLNSYTPSLYIHMELKSLTRARFDILKNQIKAKTEWTRLLDLVFPEFRQHFKQHSKWVYNLFSRYPTVEQISRMHLCTLQRIIKVQGDRVLAAQTIKLLAMNTIGHPSDTNGVLLTNTLCDIMHYASQLKRIEKQIKSVVNENFAFLLTVPGIGDITGATIIGEIGDINRFHSSSALVAFAGMDPAIHESGDFRANTMHISKRGSRYLRAAVFLSTRAAIINPNIQDNKFREKYLKKIAQGKHHNSAICSASKNMINVIYSLMKSHESFNYFV

SEQ ID NO: 348230 - protein, 355 aa, unidentified
MSQEKYIGMDVHQATISVAVMDAQGKLIMECLLETKAATIVEFIQGVQGTLSLTFEEGTSAAWLHDLLKPHVSRLVVCDPRKAALLKDGNKSDRIDARKLAELLRTHQLKPVYHGEHGVRTLKELGRSYLTLTQDVTRVMDRIKALYRSWAIPCSGTTVYAPRHRAEWLAKIGEPGVRVRAERLYQQLDGLQPVRQAARHDLLSESHKHPAVKLLRQIPSIGPIRAALLVALLQTPHRFRTKRQLWAYSGFAVETHDSGEYRCVRGKLQRNRERITVRGLSDNYNKDLKNLFKGAAISASTRPGPLHDFYAARIAQGMRPTMARLTLARKMAAITLTMWKKGVGFDPQQLHRQAA

SEQ ID NO: 348231 - protein, 324 aa, unidentified
MILGIDISKAYFDVTLRMGPGQKEHRQFTNDEPGIAALLAWLKRQGVSELHACMEATNLYWEAVAEQLHEQGDTVSVVNPARIKGFAQTQLRRNKTDKQDSDVIADFCAALKPAAWQPPSPTQRKLRALERHREALQKTLTQQKNRLASSKDPDVICSLQKVIAILQQEIEQLDQQIADQIAQHEELATQKALLLSIQGIGERTAHKLMTEMYDLATYEDAHAAAADAGVTPAHHESGATIRRPARLSKVGKAAVRGALYWPAITAIRYNPVVRALAQRLERQNKPAKVIIAAAMRKLIHLAYGVLKHKRPFDPNWGAHPVPAT

SEQ ID NO: 348232 - protein, 335 aa, unidentified
MIVIGVDVHKHSLTAVAVDELGRTVADRSGPVGGDVVVWAQTLEAERLWAVEDCRHVTRGLERTLLEAGERLVRVPPRLTAPQRRRGRVRGKSDRIDALAVARAFLQEPLLDGPRAGEETLRELKLLVDHRDDLVAERRRCQQRLRWHLHELDPTLAVPLGALDRAVWLDRLGRQLARREQTTQVRIARDLVGRCRTLTRSIGELERELHARTAALAPRLLQLPGCGPLSAAKLLCEIGPIERFPTDAQLARHAGVAPLDASSGKHQRHRLDRGGNRQLNRALHRIAVTQGRVHPPHAPTSNANKAKAKHAAKRSAASNANSPAPSTPHSKTSRY

SEQ ID NO: 348233 - protein, 457 aa, unidentified
MGRAGKAKTAAQLMEDEEYQLRHERVAGIDVAKAKGDVCTRLPPGEGRVRRRSRVEEVPATVPEIAALAGRLLDDGVELVSMESTGDYWRVWFYVLEAAGLKVQLVDSSQARQLKGRPKTDRLDAQWIARLTETGMLRPSFVPPAEVRELRDWTRARVHLVRDRTAEWQRLEKLLEGALVKVSSVTSRLAGNKTARAIIEALIAGERDPQALAGLALGPLRGKRKELAAALAGAAFGEHHARLARMHLDRIDALDRDVKALDDEIAACLEAIPAAWGVTADGVPSPDPGQGAAALTAAARLAEVPGMSLSLAMAVIAETGLDMSRFPTAAHLASWAGLAPSARQSGARSRKPGKGRGNAYLRGYCTQAANGAAATDTFLGERLRRLSKRLGGARARCAVARSILVIVWHLLNDPAARFVDLGADWHQRKTDRDKKIAGHLRQLRALGLEVTVTETAA

SEQ ID NO: 348234 - protein, 337 aa, unidentified
MELYSGLDLHSRNTYIGILDTDFKRVFKKRVSKNLDLIVETLEPFRDQLKGLVVESTFNWYWLVDGLMDAGYGCVHLANPSAIKQYEGLKHSDDQHDAFFLAQLLILGILPQGYIFPKEDRAVRDLARKRMFLVKHKTAHILSLQSLIARCSGQRISSHQIRKFTSADLKQLLTEEHLVLSAQANLNIIVFLIQQIKTLEKAIKKKVKLDKAFKQLMTVPGIGFILAMTIMLEVGDISRFAKVGNFASYCRCVSSQRLSDGKSKGSGNRKNGNRYLSWAFVEAAQLGRRYSQRFGRYYDRKAAQTNTIVATKALSNKLARICYYIMRDQVSFKEELF

SEQ ID NO: 348235 - protein, 378 aa, unidentified
MHKDSVYLCILRENGEKIERVYGVLTPQLDSMRDFMAENEVSEVAMESTSVYWIPIWRVLVDSFELKLVNPYFIKQLPGRKSDVKDAQWIAECVMKELIRGSFIPPPLIQQLRLYDRRIFELNAELVRKYSKIDAILQRCNIRLSNYVSNTDCKSYKNVVKRISEGVTSPQELLRHVHKRIINKHGEDTILAALTGVVSEAEIDMLAQYVAESALLEDNKNKCIEKMREICNREFEEQMKNLQTIPGVSERSALTVLAEIGPDVNAFPSAKHLVSWCGFNPRNDESNKKIKSNKITHGNRFIRIASVQCAWAASRTKDCYFSKFYAFHTQVRKKFKLKVVVAVARKILVCIWHILKFNVSYKDFEPQKSVAKDSTQLA

SEQ ID NO: 348236 - protein, 337 aa, unidentified
MKTSFYFVAWILVYVLIDILNIQQLKENSFVAAYPTKSGYTTQTFKNDTKGVRQFIKSLPEESHCVMESTGNYSMLLLYLLQQGGIPVSMENPQKIKHFSRAMMSVTKTDEIDAKLIAMYGEKMNPAPYKIPSESILLLKQKRTVLRQLKKHLAATLNLQQSLAVLPKQDPTSKTAVEQTIKFLRKQISKMEEEITNLSNKEFKRQMDLLTSIKGIGNTLASALIVATGGFTYFTSAKQISRFLGICPTYQQSGTSVNIKGHINRNGDTHLRCQLYLAACSSLRCNTACKQAYDRLRANGKSGKSAIIAVANKLIRQAFAVVTSNRPYIDGYVSTFA

SEQ ID NO: 348237 - protein, 394 aa, unidentified
MILVGIDIGKNKHTFSIIDKNSGEILLSPSDFSNNLKGFLFLIQKLSSYTKSELLIGMEDTGHYHFALLKYLLDRRYTVALINPTTTDLTRKLQGGITKNDPLDSLTICDVISSNHRNKPYRVTTLNRFDLYEQKQLTRHHHNLKEELNTYKNRLQKCIDIVFPEFNSLFHSKYGIVYMNILKTFSSAKAIANADIRSIRKCFEFKGQGKRISLSAEQLKLTAKSSIGIPSIAEEIQIRHLVSQIELLEKQLSEIDKRIEEFSLKNNSPILTIPGISHFSGTSIISELGDICNYTKASQIIKFAGVAPYHYESSQFTAQHTAITKKGSKYLRKTLYQIILPVISNNEVFYTYYTKKLNEGKGHRCAQGHCIRKLLRVIYHLLSTRQPFNPKLLV

SEQ ID NO: 348238 - protein, 363 aa, unidentified
MIIIGADYHPGFQQIAFVDTETGDCGEQRLQHREEAEKFYRDLAAQGMKVRVGMEASGHARWFERLLAELNIELWIGDAAEIRTKRVRKRKTDREDARLLLRLMLEDRFPQIWVASWENRDLRQLLWHRHRMVQARTRLMNQLQAVALNEGLRCKKKLWREQGREQLESFRLAPWASRRREDLLKLLDQLNPTIAELTQAIEQEAENCPEARRLMTHPGVGALTALAFVLIIGRAERFQCGKQIACYLGLVPLEDSSGERRRLGHITKQGNALLRFLLVEAAQVTVRTIPQWRSKYFHLAMRRGRKIAKVAMARKLAVRLFWMMRQEWNYEQVQKFGSHVGQPENRHGVQENTELLTGASRSS

SEQ ID NO: 348239 - protein, 338 aa, unidentified
MSVALLSIDLAKNIFQLYGVDERGHPVLSRRVSRNKLLESIVNLPSCRIVMEACGGAHYWARRFSAMGHHVQIIAPRFVKPFVKSQKNDRNDAEAIVEAASRPTMRYVAVNSVQQQDIQSMHRIRSLLMRDRIAQINQIRGLLAEYGVVIAQTALKVRQQLPSIIDDERNELTGLGRSMMRDMYERLVLLDKQIARYDELIHQVHKASPVSQRLEKIRGVGPLIATAVIAAAGSATEFSNGRQFAAWLGLTPRQHSSGGKDRLFGITKRGNGYLRMLLVHGARSVVQQAIKHTDTLSRWIREVQARRGTNIAVVALANKIARTIWVLLARGLEYAPPV

SEQ ID NO: 348240 - protein, 411 aa, unidentified
MRLFTGDDWAEDHHDVEVMDEAGKVLAKRRLPEGVAGMTQLHALIGRFLPEDADDAEVVIGIETDRGPWVAALIAAGYTVFPVNPLQASRYRGRHGVSGAKSDGGDAHMLADMVRTDSHQLRPAAGDSPEGQGIKVVARAHKTMIWDRTRAVQRLRHQLREYFPAALEAFEDLDAPEVLELLGKAPDPARAAKLTRAQVAAALKRARRRDIAGKTGAILAALRGEHLGQPAALTAAYAATARSLIAVITTLNAQVKILEEQVREHFGRHPDAEIYQSQPGLAAILGARVLGEFGDDPRRYVTAKNRKNYGGTSPVTRASGKKKVVAARFIHNDRLADALMSWAFSSLNASPGARAFYDGQRAKGLQHSDALRRLANRLVGILHGCLKTRTLYDEATAWGHRENLPQSSVAA

SEQ ID NO: 348241 - protein, 347 aa, unidentified
MCYYVGLDVSLKSTMICILDEKGKRIQEGEVESAPEAIDAFLRQTGLEIEQIGLESGNLTHYLKKGLLKIKYRVAIMESRKMAAILATIINKTDKNDARGIAEALRVGHFQECVHRSDDAVEIRTLLHLRQTAIEERTHIINSLRGHLKVYGIKFSKKAGKTFRKIVEEAIKNLRPRVQSAIQSLLNILDTLNKEIKALTKEVGDVASSDPDVQLLQTIDGVGPITALAFKAEVDDPNRFEDSKDVAAYIGLTPRQYSSGEVHRQGGISKKGSKRTRYLLVEAASALVTRCKTWSKLKAWGTKLQKKKGHRKAVVAVARKLAVIMHKMLITKKPFERSTKKKKQEAA

SEQ ID NO: 348242 - protein, 430 aa, unidentified
MADSIRWVGLDVHVHESTIAILDQGTGELITRRFIGRPHQLMPLLGQIERPARMVYEAGPTGYGLARRALAEGIDMCVCAPGHTERPPNEHVKTDKRDAIRLARRLASGELTMVCVPSVEQEQLRDLVRCREDIRGDLMRARHQLGKFLLRREIYYEGPYTAWSRKHRAWLASLRFQDRASQLTLADYLHGHDVLVARRDQLDRELCQLAGDSSWAQTSARLGCLRGIATLSAIGLCAEVGRFDRFLHPDPLAAYLGLVSCENTTGERRRQGAITKAGSTHARRLLVEAAYHYQRHPAVGQVLERRQRDQPAEIINIAWRAQRRLHARWRQLKHARGKANGIVAVAIARELVGFCWEIATWEGTSGPLPRASMPAGHTVAQAVSVPQSQRPPPPRRMASPASLPVSRVDGDRNGADQPPPSPDEHEATQQ

SEQ ID NO: 348243 - protein, 399 aa, unidentified
MGRIIIGVDPHKLSATIEVVDHQERKLGHGRFTTDKAGFAAMRKYAKTWPRRVWAVEGANGVGRPLAQRLLEAGEDVVDVPAKLAARARLLDTGHGRKTDAHDAHSVAVAAVRAKDLRVLAVDPELEVLRMLVERREALTRRRVQTVDRLQALLAELLPGQAKKDITTGQAKRMLASVRPRDMAGKTRRRIAAEELAELIAVEVKMKKATAELKTIVASRGPNLTDIHGVGPVVAARVLADVGDVARFADRNRFASWTGTAPLDASSGEQNRHRLSRAGNRRVNHMIHIAAVSQLRTATDGQAYYRRKRAEGKKPLEALRCLKRRISDAIFRQLVTDAAAARPESVDAGPGGHRGATQESSAAGSHPHTGTSDQPLPGPAPTTLRPAASTRKTHLKATG

SEQ ID NO: 348244 - protein, 392 aa, unidentified
MIYAGVDIAKVDHVIGAVDETGAEAARPMKFKNSEAGFERCIAWLESVAESEDDVFVGMEATGHYWKACFAYLMAAGYRVCVVNPMQVHAMRRLKSLSGVKNDRIDSWLIAETLRQGDYDETRLATDEVQALKQLTRYHQGLKQELAAVKTQAICVLDAYFPEYAALFSDMFGAASLKVLAECPTPSEVARKRATSIAKLLSEGSRGRLGDAKAAEVKAAAKSSVGIRLGEEAASFQIRTMVSQVEFLNATIAKVEKEVASLLARVEPDITTIPGVSTTTGAQIVAEIGDVKRFRNAASIVKYAGLNSGVDESGKYSAEGVPITKHGSPYLRRSLWLAANRARQYDPRLKEYYDKLRRKGKPHRVAVTAVARKLCHVVYAVMRDRKPYDPAK

SEQ ID NO: 348245 - protein, 331 aa, unidentified
MNQIGIDISNDVFDATMQHSDGVSRRQFSNTKSGHCQFQKWALRRANSAQVCMEATGVYHLQLALALDANAAVELMVVNPCAARRFAQANMVRAKTDAIDADGLLLFLQRMPFRCWLAPRQQVLQLQSLAHRVSQLDKEITRERSRLHAVRRAGSHTRLVQQDIQAHLIQLKRRLEVMTARAMEVILSDPQLADDARIIDSAPGFAELSSMKLVAELSPLPDDMMPPQWVAHAGLDPRPGESGSSVRSPRRISKQGNARIRAALYMPALVAKQHDPNVKAYYEKLLAAGKPKMQAIVAVMRKLLHALWGMLHHRQEWDGQKFYRLNQVESA

SEQ ID NO: 348246 - protein, 321 aa, unidentified
MNKDKQIYGVDISKDVYDVCTPEGDLYQFKNSASGFKAFAKILSTKAHCVMEATGYYHFQLAYFLNNKGIAVSIINPLKIKRFIQMNLSKVKTDKSDAIWIMKYGKSQSLALWKGDSELMQENLQLTRLLSLYTKQSTQLKNKIHGESTLGNPSKVVVSSLKSQLKSLSKEIEKLESKLYENVKSAHQKSLTLLKSIPGIGEKTPISLIVLTDNFTRFDSYKGLCSYAGITPIIRESGSSVKGRPRISKMGNAKLRNLLFMCSFNACKFNTACRALFERLLAKGKSKKLALIAVCNKLLKQAFSIVKSGLPYDQNYRNVIK

SEQ ID NO: 348247 - protein, 338 aa, unidentified
MSIVMGLDQHRAQITAEWLDSETGEVSRSRVVSADRASVRRFLGRFSGQQLEVGLEATTGWRFVVEELRRVGASVHLAEPAETSGLRGPKRRAKTDWADARHLRELLMIGRLPESWIPPDHILDLRARVRLRHTLSHQRCEWQQRIQSVLYHHGCPSRRQLMVSDGREWLAAQPLPPAAREQITVYIAIIDALDAQMGPLDKELYSYGRRQAGCKALQGQYGVGALTAVTILAELGDASRFSSSRDVVRYAGLDITVKQSDQRRSPGHLSRQGPPALRWALYEAAQVARRPGSPDRAYYLQAAERIGGNRACLAVARKLLKRCYHTLRELGEEALQPA

SEQ ID NO: 348248 - protein, 339 aa, unidentified
MKEVSIIGLDIAKKVFQVHGVDAAGTIVVRKTLRRSQLLAWFTKLPRCLVGLEACATAHYWARELSQLGHEVRLIPPAYVKGYVRRNKNDAADAAAICEAVSRPSMRFVAIKSEPQQAGTGIHRVRDLLMKQHTMLRNHLRGLMAEFGIVAAKGRRGLAELLAILIDPEDRRIPSSLREGLIAIAETLRGIDRKLEALERQMVAAGREDATYRHLITARGYGPILSSAMAAFVTDPAAFARSADFAASLGLVPRQEGTGGKVWLGPISKRGNGYLRRLLVNGATAVLNGKQAKQDPWLARLLATKPRKVVAVALANKMARVGWALMMRQEDYRRSPAAA

SEQ ID NO: 348249 - protein, 343 aa, unidentified
MSFYAGLDVHKEFVQAVVVNSQGRKVKEVKFMNNTQALDAFLNSVSPETEFALEACSMYEPIYDWIDDRNFPVTLVHPKKVKAIASAKIKTDLIDATTIAQLKRCNLLPESFVPAKHVREVRNIVRHRAALVRHRARVKNNIQSLLLKEGAKHPFSDLFGKAGLEFLKKVPLKYSNRLALDNYLAILSSMTEKIDIAAANIDAVVDANPKIQLLTTMPGIGKYTALLVSSEIADITRFSTAEHLCSYAGLVPSLHQSGNSLRRGHITKEGNKLLRWALVQSAHKAVTADPHLKKIYTKLKQRKGSNIAIVAVARKMLSYIYIMLTQNIEYSQLRVNSGGKARE

SEQ ID NO: 348250 - protein, 412 aa, unidentified
MLFVGDDWAEEHHDIEVQDETGRVLAKKRLPEGLVGMVSLHELLGRHVPPSWADLDPGEAAARVVVGIETDRGPWVAALVAAGYRVYAINPTSAARYRQRHSMSGAKADTTDAHLLAEIVRVDRTHHRPVAGDSPQAQAVKVVARMHQSLIWDRTRHVLRLRSALREYFPAAIRAFEDLDAPEALELLAAAPDPDSAAKLSKMRIVAALKRAHRRNTEERATVMLQVLRAPELRLPGPVQQAYAAGIAAQVAVIGVLNHQIEDLSVVVGSHFGRHPDAEIYTSLPGLGAVLGARVLGEFGDDPHRYADAKARKAYAGTAPITRASGKKKVVLARYARNDRLADALQQWAFGSMRGSPGAKAYYQALRDRKIGHQAALRQLGNRWVGILHGCLKTGQLYDENTAWNHHHSAAA

SEQ ID NO: 348251 - protein, 415 aa, unidentified
MQHEEALMEVLHARCCGLDVHKKTVVACLLTPGLGGKPLREVRTYGTTTRELLALVDWLAANGCTHVAMESTGSYWKPVHNLLESSFELLVVNAHHLKAVPGRKTDVRDSEWIADLLQHGLIRPSFIPSRPERELRELTRYRTTLVRERASEVNRIQKVLEGANIKLASVASNVVGVSGRAMLSAMVAGVVDAEVMAEMARGKLRNKIGTLKEALHGRLGSHQRFLLGAQLRHVDELGQLIDEVSAEVEERLRPSQEDLTRLTTIPGVGRRTAEILLSELGADIARFPSARHLASWAGICPGNHQSAGRSGTGRTRKGSPWLRSALVEAARAAGRGRTYLGAQYHRIAARRGANRAAVAVAHSILVIVYHMLSDRRDYHDLGGNYFDERHREQVSRRLTRRLEALGYSVSLSPAA

SEQ ID NO: 348252 - protein, 412 aa, unidentified
MQVVIERCAGLDVHQETVVACRLLGAPGVRPTKEVRTFATMTRDLVALRGWLAEAGVTHVGMESTGVYWRPVYAVLEGHFDLIVGNARHIRNVPGRKTDVKDAEWIADLVRHGLIAKSFVPPQPQRDLRELLRYRRKLVESQEAERNRLLKLLETANIKLASVASDVFGVSGRAMLKALIAGGASAEEMADLARGQLRRKRADLVLALDGRIEEHHRFLLSLQVRRLEAAEQDIAALDERLAAKLQPYGEQHALLMQIPGVDWLVAAVLIAEIGTDMGVFNSASHLAAWAGVCPGNHESAGRQKSGRARKGNVHLRTMLVGAAISASRTKGSYLKDKFHRLKARRGVMRAALAIAHKILVAAYHMLAKGLAYRELGDVYLDQIAQTRIVANLKRRLERLGYRVSLEPSAAVA

SEQ ID NO: 348253 - protein, 391 aa, unidentified
MFYIGIDIAKHNHEVSIIDDNGKALGKSFSISNSQKGVDKFNTYLDSFNITSENCVIGMESTGHYWINLFSFLVNLKFNVFVINPIQSDAFRKMYIRKTKNDSKDSYIIAQIMRFGEYSSFNISDENIFALRQLSRYRTSLVDECSSWKRKIISILDQVFPEYSNLFSDTFGVTSKELLSKYPLPENMLELSTEELTNLLNKASKGRLGNEKAQEIKESAKNSFGVSFAKQTFSFQIKQIINQISFIESQLKELDNEISNMLKELNSEITTITGIGDVLGACILSEIGDISRFEKASQLVAFAGLDVAVKQSGEFTGTEMKITKRGSPYLRRAIWLAATVASFKDPALSIYYKSLIARGKKHLTAIGAVSRKMCNIIFSVLKNKKVYTPNI

SEQ ID NO: 348254 - protein, 496 aa, unidentified
MKHCKVVNNSAGDHKGVGRHSASARSRSSGFIATSDKERSPVVPGAPGNTYERTSSLEDSCIRFTSRRGGRANRGHKMNATQWNQQPYFAALDWARAHHDVVIIDRLGQIKEALRFEHTAEGWASLRSLLVQYPKVPMAVETSHGTVVEQLFATGVVVYPVNPKTANRYRERHAPADVKDDQRDAWSLADALRLDGHVWRALAVQDPIVAELQLLCRDEIALIQQRTALINQLKQALHEYYPAALEAFDDWVSRNAWDFVVAFPTPALLHQAGRRRWEKFLHLHKLWRPTTAEHRLEIFARAEALSGTLPTVAAKSLLAVSLARVLKTLETQLEDYRLRIAAVFDSHPDHDLFGSLPGTGPKLAPRLLGEVGDDRTRFPDARGLQCIAGTAPVTKQSGKLCYQLMRHACNDTLRATVHLWADLSRTRCVWAEAYYQAHRKKGQSHACALRCLGQRWLKILWKMWQTRTRYDEALHTRNQTQHGSWVLELAAPATTR

SEQ ID NO: 348255 - protein, 339 aa, unidentified
MKTYVGLDVSLKETSICVVDDAGVAVKEGVVPSDPDRIVEYLAEYSPMAQRVGLESGPTSSWLWRELEARGLPAICIDARHASAALSMQINKSDRNDALGLARIMQTGWFRRVQVKSENSHRIRALLNARSLLVQMRRDLENQIRGLFKSFGLIIGRANGGVFLKRALDVSQQAPELAGIAGPLLAARADIDRQRLDLERQIKRLARGNAQSRAFMTVPGVGPMTALAFLSGIDDPARFTRSRTVGAYLGLTPRRHASGEMDWTGRISKCGDTMLRTYLFEAANVVLTRTKQNCSLKTWGMAIAARSGGKKARVAIARKLATILHRMWCDGSSFKWTTA

SEQ ID NO: 348256 - protein, 337 aa, unidentified
MEQTTQYVGIDLHRRRSVIVRRDGDGETLDTVRIDNDPVALAAELAKAGERPEVILEATYGWYWAADVIKECGGNVHLAHPLGNNWGNRRVKNDERDATDLVDLLRMGRLAEAWVAPPPLRELRELIRYRGKLVHLRTSLKSQVHAVLAKEGVAVPMSDLFGVGGQALLDKVHLADAYRVRVKSLRDLIESVNREIAQLEEHTAPYFAGDLGYHAVQAIPGVGPVLAAIFVAEIGDVSRFTSARHLCSWAGLTPTHHESDEKVRRGHITKQGSRLVRWAAVEAVARQRTDTPIRRHHHNVGDRRGTQIGRVAAARKLLILVYYGLRDGEIRCLAKAG

SEQ ID NO: 348257 - protein, 346 aa, unidentified
MQNNTLAAVDIAKEIFEVGVSDRPGRVMLRKRLPRAAFLEFFAQLPRATVVMEACGSAHHWARRIEELGHVVVLLPPQYVRPYVMRNKTDRTDVDALLEAFRNEQIRPVPIKTVPQQVIATLHRLRSGWLADRVRSINALRRLLRELGFFIPEGRKHVLPEAWEIIQDHRRGLPDALKPSLAALCEEIAALSTRIEDVEAQLEALARQIPLIARLRSVPGIGLLSATALYAFIGDPSRFPSGRHMASFVGLTPREHSSGLRRFLGRISKRGDAYLRMLLIHGARSVLWHAKRMKHRDRLRSWALNLERKVGHNKAAAALANKLARITWAVWKNDRDFEIAPEPQAA

SEQ ID NO: 348258 - protein, 394 aa, unidentified
MKLVGIDIGKNSHHFCVMDKETGELNVTPSSFSNNKEGFDFLINSLKPYSKKSILLGMEDTGHYHVALLKFLLSNGYTVALINPKTTDFTRKMEGGITKNDKLDTITICNVLDTPERKKQYRITKVDRFDLYEQRQLTRHHHNLKEELNIYCNRLQKSIDLVFPEFNTLFGSKYGVVYMNLLKTFGSAEAIASTDIRTIRKCFEIKGRGGRISLTPEKLKECAKNSIGISSEVETIQIKHLVSQITLIKEQIAEIDKKIEEFSITNNSPILSIPGISHFSGTSILAELGDIGNYSKPSQIIKFAGVAPYHYESSQYNAQHTGITKKGSKYLRKTLYQIILPVINNNPVFKKYYRLKISQGKGHRCAQGHCIRKLLRIIYHLLETGQSFNPALLR

SEQ ID NO: 348259 - protein, 459 aa, unidentified
MSTRVSPRRPRRMRQVHPDAAGIDCGSAEHFVAVPVDRDPHPVQAFKTFTGELQRLIGWLQACGVTTVAMEATGVYWIPLYDLLEAAGIEAVLVNARHVKNVPGRKSDVSDCEWLQELHSVGLLRGSFRPAPAITSLRAYVRHRDTLIRSAGMYTQRMQKALIQMNVQLPLVVTDITGVTGLKIIRAILRGETDPTVLAQHRDRRCNASAETIAAALTGHFRAEYLFIVQQNLALYEMCQQQVTACDTAIEGVLQTLATKMPTPQAPPPPARPRQKHNGNEPHFDVRTPLYQVTGVDLSQLDAIGPYAALRLVSEVGTDMRRWPTEKHFTSWLTLAPRNRISGGRLLSSRTQPSANRAAALLRMAAMSLGRTQTALGAYYRRLAARVGKAKAITATARKLAILVYRTLKHGLVYQDPGAAAYDLHHKTRVLRRLRQRAAALGYGLIDLTTSPASDGVVS

SEQ ID NO: 348260 - protein, 320 aa, unidentified
MEAMIERCAGLDVHQETVVACVLFGPLDKRPKKEIQTFPTTTSGLLALSDWLASHEVTDAVMESTGVYWKPVWNVLEHSVRLVLANARHVKNVPGRKTDVKDAEWLAKLLRSGLIESSFVPPVDIRDLRDLTRYRKKLINSRTAERNRIHKILQDANIKLTSVFSDLFGVTGCRILEALINGEKIELHSLQQMVDPRVKASLTEIYEALNGRIRKHHCDMLRFHWEHISYLDQTIDKIVEQIDQVLIPYREECELLDTIPGVNKDSAAIFIAEMGVDMSVFGSAKRLASWAGVSPGNYESAGIKKKVKRPMETKLSERLP

SEQ ID NO: 348261 - protein, 408 aa, unidentified
MTVVGIDVSKGKSMVAAMKPGGELVAAPYEVRHSDIELSHLALDVLCMEPDTCVVMEATGRYHEPVAALLHSEGIFVSILNPLLIKQSGAGSLRKVKSDPKDALKIAKYGLDNWSTLREYTPMEAIRQQLKLCARQCDLYNKNIVMLTNNLISLSDKTFPGVNELFSSPEKADGHLKWVDFYRSFWHCDCINRMSPDAFEERYKKWCKRKGYHFSTDAADALYAASCGSYTTLPRDNNAKLLVTVAADQLIALRENQSKLEAEMLNLCKQLPEYETVMAMYGVGKSTGPHLMAELGDVRRFPHRSSIVAFAGVDPGVVGSGKMQLSSVTTSKRGSPQLRKALFQVVSTYVKCKPENEAVYQFYAKKRDEGKPFFVCTTAAANKFLRIYYARVKECLNAAESATQVEEG

SEQ ID NO: 348262 - protein, 347 aa, unidentified
MRFYTRQHAFYCGIDLHARWMYVCILSQEGEIVYHENLPAGPEAFLQAVAPFRGDLVVGVECVFTWYWLADLCRTEGIEFVLGHALYMKAIHGAKVKNDRVDSQKIAGLLRGGMFPMAYVYPPEMRPTRDLLRRRTYFVRRRADLLAHIQNTNSQYNMPEFGKKIARRMHREGIAKLFPHPAVQQSIAIDVQLIDEYDHIIDGMRDTILRTARNHDAQALSLLRSVPGIGKTLSLVLLYEIHDIERFDRVQDFCSYARLVKCEHESAGKRSGKSWRKIGNVHLKWAFSEAAVLFLRANPEGMKYKKRLERKHGKGKALSILGHRMGRSVYFMLKRGRAFDMATFLAN

SEQ ID NO: 348263 - protein, 392 aa, unidentified
MICVGIDVAKDKHDCFIMSSEGEVLADVFTVSNSKEGFEHLLQTINTCTGIGNSKIKVGLEATGHYSYNLLGFLLDNGLTTFVINPLHTNLYRKSQSLRKTKTDRVDARTIASMLMSDMSLKPYTNIAYHNSELKSLTRYRFDKVKERAALKSSVARLVNFLFPELEKLLPTLHTASSYALLSELPSAKHIAEVHLTHLTNLLYVASKGRYSKDKAIQIREAARNSIGTYMPAKALELKHTVKLIKEFNNEIAEIESEIQSIMDKIDSPITTIPGISLRMGTMIIAEVGDFNNFDSPDKILAFAGLSPSTYQSGQLNNCYAHMEKRGSRYLRYALFNATKLVCYWNPLFADYLAKKRSEGKHYNVAVSHAAKKLVRLIFALQKSGQPYMANS

SEQ ID NO: 348264 - protein, 317 aa, unidentified
MALQRIFVGIDVSKDWLDLWLEPVKRFERVSNDAAGWVATIGLRNSLGVEAGLVVAFEATGGYERGLRQALLEAGFEVRRLNPLRVRLYAKSLGRNAKNDRIDARVIARYAAAAETMPETLDPARERLTERVSHRRRLVDERVALGNQTDMLGCRLLQAQNRKRLALIERHIEQTDTLILEAIGQIPCLLAKVELLKTLKGVKDVTAIALLALLPELGRITRRAVAALVGLAPFDHDSGKLKGTRSIAGGRTAVRTALYMAARAAARSKSPLGDFYKRLIAAGKTPKVATVALMRKMLVTLNAMTRDNQAWKHAKAC

SEQ ID NO: 348265 - protein, 370 aa, unidentified
MSNATTFVGLDVHARSVKACAFVPETGETIRKSFGYEPGEIASWVSSLPQPARCVYESGVTGFHLCRELNAMGAACVIGAVSKMHKPAADRGRKTDRRDAQFLAVQLALGVVTEVHVPDAECEGARDLARALADARDDAVRAKQRLSKFLLRHGLVYDERNAAGQRRNRWTGDFWAWVGRIDLGDAAAMATLDHYCERVREADAAKAALEAKVKSLAQQPRWKPTCDALKCLKGIDAVTAASIACEADGFARFATASGFAAWVGLVPSEHSSGESRFRGGITKAGNKHLRKLLVEAAWHYKGASRSPKDLTKGQAVDAATRRHANAGVRRLVDRRRSMDDAGKQSSVANVAVARELACWCWTVGRMAEGA

SEQ ID NO: 348266 - protein, 391 aa, unidentified
MIFVGIDVAKDKHDCFILNSEGTVLADVFTIANNRIGFETLLSRIQSCSQGESKIKVGLEATGHYSYNLLGFLLDSGLATYVINPLHTNLYRKSLSLRRTKTDRIDARTIAMMLMSDVDLKSYSNTAYHNEELKSLTRYRFDKVKERAKLKSSVARLVNILFPELEKLVSSLHIAVVYALLSNYPGASDIANANTEELAETLCTASKGRYTKSKTAEIQVAAGASIGSKMPAKSMELKHTIALIRELDKEISEVESAIDKITSQMDSPIFTIPGIGRHMGAMILAEVGDFSNFASADKLLAYAGLSPSTYQSGQLQNCYAHMEKRGSRYLRYALFNAAKYVCLWCPTFSAYLEKKRSEGKHYNVAISHAAKKLVRLIFAMQRSGKTFLADY

SEQ ID NO: 348267 - protein, 419 aa, unidentified
MSFKIFKFNCCGLDVHKTWIYACIGITDSNNRTEYKQARFSSFTKGLQELCLWLAKYNCIDVCMESTGKYWIPVFNVLEKNNIFVTLSHPKYTKPQKGNKTDRKDAKWICDLYMCGMVKPSFIPPADIRELRDLVRYRFKLTCMITGEKNRAQNCLTVSNLKLDDVFSDVFGKSSRSITEHILQHPGEKFDIAPFVDSRCKTPITEIQAAVDGAISHEQAVKLRQCLKHIDELEMHKAEIEREIFRLSDKYEDILTLIRTVPGFDKNPMTAIQVLSEIGGDMSVFPTAKNLVSWAGCCPHNDQSNHKIKSTRISRAGSYFKPVLVQIANALIKSKKHPEFTTRYRRIKARRGHKKAIIAICRMILTAIWHILSDLKPYTPEGFLESRPVKEGKVLSTSQALNLLKQRGYIIKGEPLAVS

SEQ ID NO: 348268 - protein, 348 aa, unidentified
MTVYIGVDFHARQQTISYLTTETGEIQHLVLLHQELTTVRAFYAQFAGQRVVVGFESSGYAAWFEELLEELGCEIWIGHALYIRQFAKRRQKNDRRDADLILDLLVKGDFPRIHRYSRRTREILQQLRYRQRLVKMRTMAMNMLLFMASSRGVSLRTQLTSKRGQARLAQLTLPQPLNSQRDELLQLLQALDEKIKTVEQWLQRETKADAAVQRLQTHPGIGLLTSICVRYTLEQVERFTTTRQVSAFAGFDPMEDQSDERQRRGAISKQGSRWLRFYLVEAGQIAIRKDADLARVYKRICVRGGHAKAKVAIGRRLLVRAFIMLRDEIDYDEFLRRGVAARSSRGTA

SEQ ID NO: 348269 - protein, 326 aa, unidentified
MAKRTTICAGIDTGKRKLDVAIDGNSLQLQVENTAEGHKALLEWLRRHKVKRIGIEASGGYELPVVSELRRKRFVVVVFQPAQVRAYAKFHLQRAKNDKIDAALIAACTAAVKKIHAAPDPRLQPFAEHLTLIEQIGEDITLYKNRLEACRDPRIQKVWKDEIARLAKRERVELKALVAAIREHRDLAQRLDLIYSVGGAGMPTAVAVLIRMPEIGQLSREQAAALAGLAPYDDDSGEHSGARHVDGGRKRLRRALYTAALPASFRWNPQLIALYSRLRAAGKEHKQALIACARKLLIFINTVVARGTPWQDQPPLAATMGASPAS

SEQ ID NO: 348270 - protein, 409 aa, unidentified
MQPIIKSCCGIDVHKKMIKACIAKGPLDKPPKFEIKTFSTMTSDLLRLKDWLRQNEVEKVAMESTGVYWKPIFNILEDEFPIVLSNPQALRKIPGKKSDVSDSKWIATLLRSDLVPGSFIPPKPIRELRDLNRTRRKLVGVMTSDKNRLHKVLEDANIKLSSVVSEVGGVSSMNLIQALMTKDELTREEIKALVHGKLRSKVDQLVEALNGKLTDHHRFLLKIHLENIAFMAEQIQELDDEIAKRMIPFQKESHLIQTIPGIRATTASAIIAEIGVDMSQFQDEARLSCWAGICPGNNESAGVKKSGKIRKGDKFLKATLVEAAWSASKKKGSAYSAIYNNIAKRRGKKRALVALGHQILRDVYRVLKTGEPYVDEGAEAVFQRNSANRQKSAIRLLERSGYTVTKASA

SEQ ID NO: 348271 - protein, 375 aa, unidentified
MKSILYVGMDVHKLSYTLCCYSIEKDETFAIVQMEPKVTNITTYLDQIKRNYGDCEFLCGYEAGSLGYSLHHQLFARGIDCVILAPTTMAGTNNRRIKTDKRDAMNIAKNLAYRTYNAVYIPTEEDNAVKEYIRMRDAAKDNLKKLKQRILSFCLRNGKHFTETKNHWTIKHIAWLKKLDFGNAILQEAFEEYLTLHFQATDKVGLFDKRIEELAKRESYEEKVRKLTCLIGVKAHSALATVVETGDFDRFRTAQQYASYLGLVPGEDSSGESKRITGITKAGNSHVRKLLVEAAQSYSRGAVGYKSKTLSARQKGNEPKVIAYADKANERLRRKFYRLTFNNTKRNVAVTAVARELACFIWGMMTGNISEPRLC

SEQ ID NO: 348272 - protein, 384 aa, unidentified
MNNDSIIFIGLDTHKSFIQVAVLQEQRGATPEHLGRIKSNKSALIKLTQQLQSKYPKATLHFVYEAGPCGYWTYRLLTSLGHSCCVIAPSLIPKKSGDRVKTDKRDAAKLAKLFKAEELTPIYVPESEDEAIRDLSRARETAMKDLKDAKFQLKGFLLRNNVQATVNDNWSKKHLRWLTDLILPHHSQQIVLQEMIITISERMQRLQRLDNELLHQVKNWRYYPVVKAIQAMRGVRLLVALGTIAELGDLRRFDHPRKLMAYVGLVPTESSSGGKTKRGSLTKCGNSRARRLLIEGAHTYKHKANISVELQLRQEGLPKEIVDIAWHAQQRLCRRYQRLLQKGKHRNVVVAAIAREMIAYIWAIAREVVVSAVEPKTRIARLPV

SEQ ID NO: 348273 - protein, 342 aa, unidentified
MKTFVGLDVSQKKTSVCVIDHNGNKIRMANVDTHPGVIADYLFSEGFDKSKIGLETGPLCVWLYHSLKSFGLDIDCIHARHVHAALSMQLNKTDQNDAFGIARLVLSGWYKPVHVKSLECHQQRLILTSREKLVQLRVAVTNQIRGLLKTFGVVLPLGKNSVFEHAVLESSPSLETIKPAVMMLLDTWEHLSGQIRKFNYMLEKLARNDPVCQILQSVPGVGVLTALSFKTSIDDPSRFRRVSDAGAFLGLTPKKYQSGEVDRNGGISKQGNRMTRTLIYEAASCLLTRYGKDTSLAIWANELRHRMSYKKVIVALARKLTTLMLSMWKSETFYNERLKAVN

SEQ ID NO: 348274 - protein, 370 aa, unidentified
MPQPTPLFVGLDVHKDSIAVAHAQGQCTDPPVFVGAIGSRQTDLDKLIRRLHAKTSELVFAYEAGPCGYGLHRYLTGQGFSCQVVAPSLIPKKPGDKVKTDRRDAVDLARLLRSGDLTRVYVPTVEDEALRDLCRARDAARITLKNAKLRLKAFLLRLGRHYVGRADWNEAHRRYLAKVVCPTPTQQIVFQESVRAVDEQVDRVHRLEAELLERAPAWRLYPVVQALQALRGVQWLVAITVIAELGDLTRFDSPRQLAAFVGLVPSEDSSGPRRRLGAITKTGNGRARRALIEGAWAYRHPAKVSEHLQRRIDTVPKSIQDIGWKAQVRLCKRFRRLTARGKHPNVAVTAIARELIAFMWAIAKEVPITT

SEQ ID NO: 348275 - protein, 349 aa, unidentified
MKKIFIGIDFSKEKFDATVIKAEDLSEMLSVGHQEFINKVSGYRKMLHWVDSLCGADTCEDWLFCGENTGGYSQMMSDYLYSKGYDLWIENALSIKRAFAMKRGKSDRSDSLMIAEYAMRYQDKARLYEPLSPALSPLREVFLYRHMLVRHKCSFEVRRIEKRLTQQKSSAKTMISQSSRHILTELKHEIQKCDQRIQELVRSDEELSRIFGIITSIPGVGTLNAVCLMVFTNNFTKFDYNARKIACYYGVAPFARDSGTSVHSAPKVGYLANKMIKSLLSQAALAAVNFCPAMSVYYHRLLDKGKMPMVALNNVKNKMLTIITAMVKNECKYQPEYISINAQSEMLNK

SEQ ID NO: 348276 - protein, 381 aa, unidentified
MKNVYTKRTGQAARPSVVGDRSVARVVPSLLPKSSNSCLGYPSPHVLQGRPTLEQIKIIKEDCLLEVPLIFVGIDVCKAQLDVAIRPTAQILSVPNDKASIKTLVKHLEKLRPTLVVLESTGGLERQVMLALVGAEISVVMANPRQVRDFAKSTGQLAKTDRIDAAVLAHYAEAIRPQPRPLPDELTLELRALTVRRRQIIDMIVAEKNHLATASKAIKKLITAHITYLEQELDDADQDLDRFIGKNPLWKQNQEILCSTPSIGPVSSRTMLAELPELGTLGRKQISALVGVAPFPRDSGTLKGRRTIWGGRASVRGALFMATLVATRFNPVIRDFYKRLRAKGKPSKVALVACMHKLLIILNAMIKNKTRWSENFSLKTA

SEQ ID NO: 348277 - protein, 330 aa, unidentified
MPRISSQVHGIDACGKVVVRKPLRRGEVMKFFASLPPCLIGIEACATAHHWGRELGKLGHTVRLMPPAYVKAYVKRGKTDAADAEAICEAVTRPTMRFVAVKSMEQQGVLMLHKTRDLLVRQRTMLINALRGHLAEFGIIAAQGTAGVKAAIEAFHAMQDSLPTLAGKALHGLIKQMRVVASEIDKIEEQILAWHRNNAASRRLAGISGIGPITASAIVATVSDATLFSSGRSFAAWLGLTPRAHSSGGKEKLIGISKQGDGYIRRLLVIGATAVIRRARQDNASKSWAAKLLTRKPARLVAVALANKTARVAWALLARNQAYIAHVGAA

SEQ ID NO: 348278 - protein, 451 aa, unidentified
MSRARTESVAVEGMPVVNPNAAGLDIGLDEIWASVPADRDTLAVRKFGTYTPDLHALADWLVKCGIQTVAMESTGVYWIPVYEILEARGLQVYVVNARQIKHVPGRKSDVQDCQWIQRLHTCGLLSGSFRPEAEMRVLRAYLRHRADLIQHRAAHIQHMQKALQQMNLQLTQVLSDITGVTGLAIIRAMVAGERDARHLAQLRDRRCAKPEAEIVKALTGHYRPEHVFALKQALALYDAYTQQLGECDHEIERQFSVLKPIHDDDLPPLDPSDKRNTHSKNAPATDHRSLLYHLLGVDLVAISGLHASTVETIISEVGTDMSRWATDKHFCSWLGLAPHHDISGGRILRSHTLKTNNRAGQAFRLAARSVSRTQSVFGAFFRRMRAKHGPKKAIVATAHKIARTFYAMLKHRQPFQDIGADEYDQRERKREIARLQKRAAKLGLSLVCTSA

SEQ ID NO: 348279 - protein, 425 aa, unidentified
MKALKSHVAGIDVHKEMLAITVLIGELDGEPKEYQFESSTFTDDLMALGLKLKEMGVTDVAMESSGIYWKPVFNVFNPLGLKVVVANAAHIKNVPGRKTDMNDSRWIAELHRFGLIRASFIPDGEFQRMRLLSRHRTNLTEDLARVKNRIQKVLEDGNIKLSIVVSDIFGVSGLKVLKQIAGGYTHPNILITEVTTKIKRMEEMKKALTNCLTTEHCFVINVLMKQYEELKNRIEEGENELCKKVEPYAHLVEELDKIPGIDAILAMGIIAEASANMSSFKDERAFAAWSGVASGNNESAGKKKRAKCRKGNPALRKMLIQAAQGAIHCKKSFYRSKYNKLSFRLGSKNKAKVAIANKIARVVYKVLAGDQYKDLGYMRGDPREERIKKLLFELKSLGVEIQNHTHQNIYSKRDVKVEASGIVYS

SEQ ID NO: 348280 - protein, 427 aa, unidentified
MTKSQNLKFDAIENTDAIVGIDIAKNVHWAGIILPNGKEIKKSFSFNNNKKGFESLVETVKNVLTMLNFKKAIIGMEPTGHYWKSCARYLKKIDWIKVVTVNPYHVKNSKEFDDNCQTKNDKKDCMTIARLIKDARFFEPYLPEGIWAELRNLSNTRAELVGKQNAVKNRLIATMDEYFPEYTKVFKNVLSRTSEEILKECPFPEDIKSIGKEELLKHIKKTVKRGYSKNQVETIYELANESIGTTEGIEGAKFQLNMYIEEAKLLEKQIKMTEQELERQLKETGFYESLISIQGIGIVSAAMFVGEVGDINRFDSYEQIRRYAGLNLVENSSGNHKGKTTISKRGRSLLRSILYRMAFTMVNKNNELKELYKYLTTRKEKQLKKKQAIVAVIGKILQIIYALVTKNEEYEATRVFTVKRLEQLKVA

SEQ ID NO: 348281 - protein, 412 aa, unidentified
MTKEYRRSCGIDVHKDTIVVCVLPPVGGEGKAIRKTYGTFRNDLIRMRVWLKQLKVTEIAMESTGVYWRPLWNVLEDEGFRLLLVNPAQVKALAGRKSDGRDAQRIAEYLQDGRLDGSFVPSAEVRQLRSLLRHRVSLLEQRNEVHNQIRDLFETASVKLSSVVSDLMGVTGRRIVEALIAGEDSPEILSWKVRGSLRKKEKLVKESLKGYFSEFHRMMLESHYKHYQFLTKEIAAFEERIAQAMEPYASQTELLISIPGVDRLVAWHLLAELGVDLKAFPDGDHCSSWAGMVPGENESAGKQKSTRCRKGNRTLRRILAQAAWAASHCKKGYLRAFFHRIKGRRGWAKAIVATGHKILTIAFQMLRTGTPYKELGDDYFDRLNPARATRKLVQRLEALGHHVQLSPVRSNA

SEQ ID NO: 348282 - protein, 340 aa, unidentified
MNATTYGLDIAKRVFQMYWVDAQTGEIANRKFGRDDLIAFLAQRPAGRVALEACGSAHWWARKIRALGHEVVLLHAQFIRPFVQTNKTDAADARAIWTAVQQPGMRTVAAKTEDQQVMLSLHRMRSLLVKFRTMQINQLRGLLYEFGVTFRAGRVAGLDEIRKRMAELEDTLPRSILLNLLEQLRRITLFEEDIDQLEKRIGAWQKQEAACRAISEVPGIGRLTATALVATIGDANTFRSGREFAAFLGLVPRQNGTGGKIRLGSISRRGDPYLRTLLIHGARSVLCHAKVPTGWQKAIQERRPANVATVAMANKMARIAWAILAHGTPYEAHHVSNRPA

SEQ ID NO: 348283 - protein, 320 aa, unidentified
MSEEIFIGIDVCKAWLDVAQVPAPPADKSGSLAPRVDNEEPGRAMLVSQLKKLEPTLVVMEATGGFEAALASELCAAGIAVAVVNPKRVRDFARSMGVLAKTDRLDAKVLAEFAQRMRPQVYALPDETQQEIIELVDRRAQLVTMRAQEKTRLSTVKHVARTSVRQHIEWLDKRIKEIDEDLDGRLKNSTIYQPKYELLDSVPGVGRVTITMLLGRLPELGSLDRKRVAALVGLAPFADDSGKRRGQRYIQGGRADVRTAMYMAALTAKRCDGPIKALYERLRLAGKPFKVAMTACMRKLLIILNAILRTGEPWRNAEGA

SEQ ID NO: 348284 - protein, 344 aa, unidentified
MDHFAGLDVSVKETSVCIVDNTGKIVREVKVASEPEALLAVLKNPTYHFKRIGLEAGPLSQWLYSALAEAELPVICVETRHMQALLKAQINKTDRNDARGIAQMMRVGLYRPVHVKTLRSQKLRMLLTHRKLLQSKAIAIDNDLRGTLRNFGLKVGMVGKVKFEARIKELVENLPDLAELVEPLLIVRRVLREQIVILHRRLLAIVRDDEVCRRLMTTPGVGPVVALTYRATVDVPARFRKSKAVGAVFGLTCSKYQSGEIDRSGRISRCGDEMMRVMLYEAAQSMLRSKKWSWLKAWAMQIARRRGMKKAIVALARRLAVILHRIWVDGTEFRWTREQAPVAA

SEQ ID NO: 348285 - protein, 318 aa, unidentified
MQIPGCFIGVDVGKFELQVAGHEGAIVSGSLANSRSSIVGWLKRLPAGSVIAMEATGGYQELLARLAHERGFAVYVLNPTHVHHYAISLGNRGKTDRLDAEVIAQYIAQRHATLHRYEPISPELQQVRALQALRSTVVRVGTSLRLSAQRHGCSSEHQKKALASLSAWAEQLERELITQIKAQSEWAKTYGLLTGICGIGPINGAALTTLFNRIHFASSDAAVAFCGLDPRPNESGRKVGRRRLSKQGDKAARTLLYNAASSAARTAHFKDYYAMLRARGLASTAALVVIARKLLRIAYGVWRTGQVFDPGRLNLKTA

SEQ ID NO: 348286 - protein, 339 aa, unidentified
MTYYAGLDVSLRTVHLCVIDDQGERVAETKLASDVQDIVAYLDDLELDIDSVGLEAGTLTQYLTDGLQAAGFDIICMQARQVKGALSAMRNKTDKHDARGIAQILRSGWYSQVHVKSMQSHHIRMLLSSRKAVLSKCVDLENEVRGLFKIFGIKLLPKLGHGAFDTAVRDIIEADEALSHALLPLLEARLVLYRTFRVLDNRSRKMAHADAVCVRLMSVPGVGFITALTFKAGVDDPSRFKRSRTVGAYFGLTARRFQSGEMDIDGHISKCGDADVPGTLYTAANALLTRSARWSPLKAWLSTPSNQCLQRLTTISTDCEEKRDPRQDATNRMPQSIVA

SEQ ID NO: 348287 - protein, 389 aa, unidentified
MEVLHPRCGGLDVHQQTVVACARVVAGSSVAHDVRTFGTTTPALLALSDWLAAHGCTHVAMESTGVYWKSVWHVLEGSFELVLANAMHIRNIPGRKSDVNDATWIADLLAHGLIRGSFVPPAPVQELRDLTRTRKQLVREITQHTLRIQKTLETANLKLTGLRETDPERLAGLVRGRVKASRADLVAALHGRVTAHHRFLLTLHLSQIEALETAVSEVEERLGDALTPFRPALDRLITMPGVSETVARVLVAEIGFDMTRFPTAGHLVSWAGLCPRLDQSAGKRLSTRTRRSNPWLKTTLVQAAWAAARKKDGYLRAQFLRLKSRRGPKKAILAVAASMLIAAYHMLKDDVDYRDLGADHFDRRDKTKLANRLIQRLHQLGFTVEVRAA

SEQ ID NO: 348288 - protein, 376 aa, unidentified
MESQVSFTQVLSLGCGIDVHKKMLVATISGEGLRTETREYGTVTRSLTELKDWLLENGVTHVVMESTGVYWKPVYHVLEPSGLTVWIVNARHVKNVPGHKTDKKDSRWLCKLLLAGLLKPGYIPAREQRELRDLTRYRKKLVQDISSNKNRIIRILEDCNVKLSSVLSDTSGVTATKLIDKLCGGKEITMADIDEVYHKKIGASKEDLLEACNGYITAHHIYLLGTLRGNNAHLACLVGELDGRIRQVLAPYDNALALLREIPGLNRKSVEDLVAEIGLDMDVFPDEKHLSSWVGVSPGNNESAGKKKRTHHPREQTGKADPDPGRMGGLPRQGYVLPRPLPPPGCQAGKETGPGGSGTLHPQIGILHPQGWSPVQ

SEQ ID NO: 348289 - protein, 336 aa, unidentified
MTLYCGIDLHSNNCFLSVINDKDKRLLEKRLDNDPVLIVQTLKRYRARLQAVAIESTYNWYWLADALQDAGFKVRLVNTAQIIQYQGLKQTDDRYDAFHLAHLMRLGILPTGYICPRDERGLRDLLRRRMFLVQDRSRHIISLKGQYQRQTGQTLSTNAIKGKRFVLPIVGDMNVQLAMTSNLNMVKVLTQQIRTLETVILRQVKRVPTFELLKSTSGIGDILAETILLETGDIRRFKRVGNYASYCRCVESKRISNDKKKGVGNRKNGNKYLAWAFIEAANFAKRHNPKARAFYERKKAETNNIIALKALAHKLSRACYHIMKNEVAFDSSKLFA

SEQ ID NO: 348290 - protein, 414 aa, unidentified
MVAVDVVHERCAGIDISKADVKVCVRVPGSARRRRSEIRTFTSMTNDLLAMRDWLVAQSVTVVGMEATGDYWKPVFYLLEDGFEVQLLNARHMRNVPGRKSDVADSEWIAKLIEHGLIRASFVPPEPIRQLRDLTRYRTVVVRERVREAQRLEKLLEDAGIKLSAVVSDILGKSARAMLEALVAGERRPQVLAELALGSMRGKKPLLAEALTGRFGAHHAFLVRAMLDRVDEADAMIARLNRQIEAQVAPFRRVITLLDGIPGISTRVAEVIVAEIGADMSRFPTAAHLASWAGMCPGNDESGGRRKSGTTRPGDAWLRAALGEAAMAASHTKGTYLAARFRRVASRRGKKRAIVAVGHSILIATWHMITSDTEYRDLGGDYFIERTGKTRVTQRLVGQLSQLGWRVNLTPATA

SEQ ID NO: 348291 - protein, 401 aa, unidentified
MSKKNTRNALDTSLSYAVIGLDLAKADCAVAAVPCSDDELGLIDRMDYESLFEQAEKLKPTLFAMEPCCGYSQISLRLQNMGHEVKVISGHAVKNWIATHKSNQKTDLNDATALAKLALYDHDLQPIRVKNVEECRIASVQAIRIQLRTQATKSLVCFKSLCQCWGIVIRRGSSNTKKMAEAVAAVEKLLGAEVASSLMILRDAYKFTMKQINALDKLLDALVEANEQARTMKTVLGIGTQTAARLAVTTGDIKRFPMPRSYVAYFGLAPRNIITGHSGTPSPSKRGALKPVSSRGQGKVSRRGDRVARSFIIQGAATIYMLYCKDMLPECQLRRWLHEQIKRGKPYGKIIVSLAAKLLRIVWALLTYGEKFDSHKAGVPRSVLAAMEKPLKHDAAAESAA

SEQ ID NO: 348292 - protein, 316 aa, unidentified
MYLGIDVSKLTIDCCLTADGQNHQKKFQNNERGFEQLTKWLQSHKVSDNLHCVCEATGTYYEELAEYLYSRYTITVENPRKIKGYAIAELQRSKTDTQDAKLIAQYCQDRKHKLKAWQPPAKEQKQLQEIARYLDYLKQQRATEKAKQHEAPDYIKSHIQTTISNLTAQIQTVKKQLLQFYKDNPSYNNLRKRLKTITGIGEQATAVLLSTYKRHEFKNAKQFTAYLGLDPRKYQSGTSVNGKSRISKIGSSEIRKSLYMPAVVAYRCNAFPEFVGRLKKKGKHIKLILIAIMRKLAVIAFTLMKNGQEFQAERYK

SEQ ID NO: 348293 - protein, 338 aa, unidentified
MKKIVIGVDVSKEKLDFCLLLSENLSKDWELSNTTPAIKSSLKTLLKEHSCETSEVLVCAEHTGQYTYPLSCACDELGLHLWLENPAQLKHSSGVVRGKNDRMDARKIADYAYRFQDKARVFSLPEKNIASLKQLISERDMYIGDKAKYQGQFTDQKRFMNAQDYQRKSQRLKKLMAGLEESIAIIEQEIQELIDNDDTLSNQHKLLCSVDGIGDKTALKMIVATNGFRNFDDARKFSCHAGVAPFQYTSGSSIRSKNRVSNRADKSIKSLLHMAAMVVATRKKDGELREYYLRKVEEGKNKMAVLNAVRAKLIARMFAVIKNNRPYEKNYAFCLHIS

SEQ ID NO: 348294 - protein, 367 aa, unidentified
MVTLGGDSHKRTHTLVAVDDNGRQLAQKTSPATRAGHLEALQWARRWSERRWALEDCRHVSRRFEADLLVAGEVVVRVPSKLTGGARKVARTSGKSDAIDALAVARAALREPDLPVAKLEGPGRDVRLLLDHREDLVGERTRIQNRLRWHLHELEPEAAIPARMLSRYHTLGEIEQRLGRHRGVVAEIALELVVRVRELTRRINELEADIEHRVGGLAPTLMKLSGCGALCAAKVVGEAAGVSRFRSRAAFAMNNGTAPVQASSGNQQRHRLNRGGNRQLNVAMHRIAITQLSRPGPAKDYMAKRLAAGNTKTEAIRALKRRISDEVYRRLLQDERASLTTMPVPAWPPLDIGASTEPVPSHNVHLR

SEQ ID NO: 348295 - protein, 315 aa, unidentified
MATLSYVDVGVDISKKHLDIHLHNVNKTIRLENSKQGINKLIILLSRYEVGQIACEATGGYERLMCKALSQANYKVWRIQPRLVRAFIVSEGIKAKTDKIDAKMIALFAYKKNCPYEAIYQSDNNEKLKNIVALNSSLTTKAAQVKTQLKQAYDPDCLKILNQHLNFLKKQISKLESKIRNLIKNDNELKDKAQQIVSIPGIGSGTIAVTLAMMPELGKIGNKQIASLAGVAPYIKQSGNYRGKARISGGRSQLRKALYMAALSAIQHNVVLINFYQRLINDGKPFKVAIVAVMRKLIIYMNTLVREKTLWNPVT

SEQ ID NO: 348296 - protein, 430 aa, unidentified
MEIVYPRACGVDVHKSFIVAVICISESIKPRYIKKRFSTFNNQLIQFRDWLIENNCHNVCMESTGKYYIPVYNALEGHIPNVVVANPKWVKAIKGEKDDNKDAKWIADLFKFGIVRSSYIPEKDIRILREFTRYQYKLVNIRSSEKNRFQNALTVGNCKLDLVFTDVFGKSASSIVDTILSDEPYTSEDILSKVHGRCKASSDDILSAVEGTNLNQYQKARIKIVQKHMEYVDSLLDEVQHHIDMMVEAYENYIQLLMTIPGVNRKSAIIIISELGIDVSQWSSARKLAAWAGLAPGHNESAGKKKSVKISKAGIYLKPCLVQVAHAAVKDKTCSYYAEKFVRISKRRGKKRAIIAIARKILVAIYHILKTGEVFNPSDMADVETTKEQRIAYITNNFRNAFNQLSRTGLSEEEILSIIIKKSNNSPQTE

SEQ ID NO: 348297 - protein, 347 aa, unidentified
MRVYIGVDFHARKQTISYLTTEDGEIRQLELDHEKDDIRAFYAQFRGQAVVVGFESSGYAAWFEELLEELGYETWIGHAAAIRKYARRRQKNDRRDADLILELMVAGDFPRLHRYSRESRETLQQLRYRQRLVKMRTMVINSLLYMASSRGVSLRGKLQSSRGQARLMQLALPAPLGQQRDELLRLLAELQQKVATVEGWLKQKAELDPRVQRLRTHPGIGLLTGLCLVATLESVERFGNPRKVTAYVGFDPVEDSSGERRRMGSISKQGSRLLRLLLVEAGQVAARHDQELGHVYRRVTLRRGHATAKVAVARRLLVRAFIMLRDEIDYAEFCRRGVAARSSRGNA

SEQ ID NO: 348298 - protein, 423 aa, unidentified
MSYRIAGIDVHKKMLAVVVADVEVQGEYQFERIRYGSNPEPLRLLAAWLIEHEVEEVVMESTAQYWKPVWGALEQYWKPSGQKRETTGPMSGTLHLAQAQSNRGPRGRKKDFPDAERLVKRLVANELSLSFVPDAEQRLWRTVMRRKYQLRRNRVQLQNRLEALLEEAHIKLSSLVSDLLGASARRMLKALADGETDPAALASLADKNLRATPAQLCDALGACTELNPVYRRLLKMFLEELQLIDQQIGQLDKEMATLLGQHQAAVERLAEVPGLGVDSAQQIIAEVGATAATFPSAKQLSSWVGACPGDEESAGVSKSHRSPKGNRHMRRILNQCANAAAKSKGTIFEIVYRRLVSRLGHNQTIGAIAHRLCRLIWIILHQNVRYEERGPSVSAKSRQRRTHRMIRELRNLGYRVEPVVTTL

SEQ ID NO: 348299 - protein, 328 aa, unidentified
MTMSPTHVAFNHIVAFEVAKQTLVTHSLPGDGQCTIANKPKAVRKLLMREMRRNAAAGLGPLLVICEATGGYESHVLEICVELGLAVHKAHGSRVRYFAKYMGLLAKTDPIDAGVLALYGLRTQNLRLYAPPSPEQLALKDLKTRRDQVQRMLIAETNRLEHARHPSVMRSLKTQVASLRKALAALEAEIAAHVRSSDALARKARLMRSLKGVGPATAATLLAYMPELGTFRKGEVACLAGLAPFNNDSGTSRTPRHIAAGRSTIRAALYMAALVAVRHNPIMRRFAASLRQSGKPIKVVITAVMRKMLVILNAILRTGQPWAHANHA

SEQ ID NO: 348300 - protein, 358 aa, unidentified
MAGKVTETAVVGGVDTHKDLHVAAVVDQNNKVLGTQFFSTTRQGYRQMLAWMTSFGALKRIGVECTGTYGSGLLRYLQNAGLEVLEVTAPDRMERRKRGKSDKIDAECAAHAAFSGIRTVTPKTRNGMIESLRVLKTCRKTAISARRVALQIIHSNIISAPDELREQLRNMTRMQLIRTLGSWRPDASEYRNVTNVYRISLKSLARRYLELHDEIADLDVMIAAIVDELAPELIKRNAIGYESASQLLITAGDNPQRLRSESGFAALCGVSPVPVSSGKTNRYRLNRGGDRAANSALHIIAIGRLRTDDKTKEYVARRVAEGHTKMEAIRCLKRYISREVYTLLRNQNRQINSIPITA

SEQ ID NO: 348301 - protein, 347 aa, unidentified
MLIIGCDFHPGFQQVAIFDNRTGEMQEKRLQHRGEAEQFYRDVAGQEVRVGMEACGHYPWFERLLAELGYELWFGDAAQVRAAVVRKQKTDRRDAEHLMHLLIEDRFPRIWVPSLEVRDVRQLLVHRHKQVQARTRTKNQLQAMALSHGVQKKYKLWTQAGRGELEQLPLLPYAAQRRQKLLAELDAGEAEIGELDRRVAEEARQRPEAVRLMTHPGVGPVTALAMVLTLGPAERFESAKQVGSYFGLIPSEESSGGKQRLGRISKQGNAFLRFLLVEAGQTAVRYDPQLKRFYRRLAARKNRGVAKVAVARKLATRMYLMLREGWTYAQLNQVVMSVNPSHSVAGE

SEQ ID NO: 348302 - protein, 355 aa, unidentified
MNSVKYVGLDVHQSTISVAVLDAEGKLVMQSVLATHATAILDFVHGLRGSLYVTFEEGTHSAWLYDLLVRRVAKLVVCNPRKNALLKAGNKSDTIDARKLAELLRAGLLSPVYHGENSAQTVKQLVRSYAALTEDTTRIMGRLKALYRSQAIGCAGKQLYGRRHRDQWLEQLREVGLRRRAERLYQQLDAVQELRRAARRDLIVACRQHPEAKLLRRIPLLGPIRVAVLIGRVQTPHRFRSKRQFWAYCGLALETRSSADYQMVNGQLERRQKPVFIRGLNRNHNHDLKNLFKSAATTAAARPGVLREFYENLLRKGMRAEMARLTLARKMAAVTLHVWKKGEAFDAQQLKPQAA

SEQ ID NO: 348303 - protein, 345 aa, unidentified
MGNYCGIDLGSKRTTVCVMDKQRKVLRLVEVKTTTEGLKEALSGYRRLTCIVEAAPLAEWTAGAVEALGHTITIVCPRKAKVALESQGARKKTDRRDARALAELCRSGWYEAVHRKSEEARNARSYMTARKQLVKASNAMASSVRGILRAHGVKLPECKDGESFEDKVREAIKPLAQSVQAAIQELLQAYELLHNQQRRMYRQLQDKLKSDPVAERLMTIPSVGPATAAAFIATIDDPNRFSDGAKVASYLGLVPSVYQSGETEFRGRITKSGDKLLRWLLVEAANNMLTRSKTESYLRTWGLELEQKKGSGKARVAVARRLCTLMWTLWKEGGVFHVEPMKEAA

SEQ ID NO: 348304 - protein, 343 aa, unidentified
MSEVTTIGLDIAKNVFHAHGADASGRALFSRKISRAKLLEFFAQQPRCTVALEACGGAHHWGRELTHLGHDVKLIPPAYVKPFVKRHKNDAVDAEAICEAAQRPNMRFVAIKSEEQQASALVFRTRDLLVRQRTQLINAIRGHLTEYGWVAPKGPSHVAMLGDLLEDEIGSSLPEAARAMFRTMLALLEELNDRIGDLDKEIARRAREDAIARRLMTIPGVGPITATAIAALAPAAETFAKGRDFAAWLGLAPRQLSTGGKQKLGSITKMGERTLRRLLIIGSSAVVLQASKRGAPAGSWLEQMLARKPRMLVTVALANKTARIIWALLTKNEDYKAPVAAAA

SEQ ID NO: 348305 - protein, 362 aa, unidentified
MRIIGCDLHARQQVLAMLDTVTGEVVIVTLKHEGDNVREFYSSLPRPVRVGIEATGSMQWFLNLMEELRIECRVGHPARIRACEPRKQKHDRRDAELILKLLAEDRFPAIWLPSKEVQDLRALLRHRHQWVRMRTRVQNALQSIALANGLRRGTALWSQDGQSRIAALPLAPHTAYRRSELQAMYEKFEAEIEKLNQRVEEQACGRAGARLLMTHPGVGPITALATEVFLGDPARFADSKALASYVGMIPREYSSGPRQRLGGLSKQGTPLLRFLWGEAGAHAARKDPELQRFYRRKLVQKGLGKASVAVARKLGIRLWIMLRDQIEYNEFCRRGQKQQKSSDACAGMPETRYGAKSHRPVD

SEQ ID NO: 348306 - protein, 413 aa, unidentified
MHPALFFQEVDMAEKPTRFIGLDIHKQYFVAVGVNVDREIVFGPQRVSNYQLDDWVERVLTLEDAVVLEMSTNTYLFYDTMLPHVHSVIAVHPPNVALVTNAPVKTDKKAALALAQLHAAGMLTGVWIPPHEVRDLRSLIARREKMVRLSTMAKNRLHSSLHRNHLIAPESPFAPEQRTWWESLPLSETEQFLVRADLDMLEFAQKQVGQVEDCLKQESAGDKRMPLLVQLPGVAMLTAITILAAIGDITRFPNAKKLVGYAGLGTRLHDSGMTHSAGRITKAGRRDLRRAMVNAANHAVEHHVHWKKELERMESHLGRSKAIVAIARKLLVAVWHVLNEQVADRFANPRDVANSFFRYAYKVGVHNLPEGQSALSFTRDQLDRLKLGQDLLVVPVGAKKHKLPPSRLLLEKE

SEQ ID NO: 348307 - protein, 386 aa, unidentified
MQKLNDLSRSLTPLKPDRTLIAVIEMSLSSWLVAGIVPGIERQPLKKLEVDESTLLKLLIRWREEAKKSGHSIERIAVAFEAGRDGFWLARWLRARDIEAHIIHASSVAVSREHRRAKTDRLDTEVLKRAFLGWLRGERNHCKMVAIPTIKDEDAKRPNRERESLVGEQSRIVNRMKAALIRLGIRGFNPKLKKAVERLDGLRTPEGEPIPPNTLAELRRDMARRRLVNDQIRQIEDTRLERLEQAPSDGPHAMVRLLARVIGVGIETADMLVQEVLSRNMRDRRAIARYAGLTGSPDESGRKRREKGLARSGNARVRRGMIQLAWRFLMFQKDSTLAQWFRARTENARSARKTMIVALARKLLIGLWRLVREGVVPDGVVLRPVS

SEQ ID NO: 348308 - protein, 428 aa, unidentified
MTVKDCTSVKEFWQLKKEIRGSKDHLIVGIDVAKDDHRAFFGTANGKTLLKRLTFKNDIEGFEKLLARVKEMKVKHRLDELVLGLEPTANYHKPLGDFLIKCSHMVVLVSGVSVKRNRELLNGRWDKNDTKDSANVADLISQGKCLYYEYAPLLLKDLRGLLSLKRRLKKQEHGLRIRIRNTLLAQYFPELDKYYSKWEPEVLSVVRWCLDPSVIAGLEYDQFVSLVSPGSKNIRQQGRLEWIWKKAVYSIGCDAGEAVEFEAKVLVEELRHIREVIKETDAKIKDVCIRFPEYDYLLTIPGIGPDVSSKVLAAIGNPFRFNSGKQVLKMSGYDLSAKRSGKTSESAVPVISKKGKASLRYALYQAAFIASVRNKYFIAYYTNKLRGREREKGIKTKMRVKLAAKMLVIAWTLMKKKEPFDPGYLKID

SEQ ID NO: 348309 - protein, 371 aa, unidentified
MEHTRFIGLDIHKEKISIAVAESGRGGALEYLGEITNDPGAIRKLCERLGRPGKPLAFCYEAGPCGYGVHRQLTSLDHRCEVVAPSLIPKKSGDRVKTNRRDATMLARLHRAGELTPVWVPDADHEAMRDLIRLRSVVRQIVTRARQHLQGFLLRHGRKHGLGAAWRMAYRRWLSTLTFEHPAQQIAFQDYVDAVMDGERRLQRVEEQISSLLPEWNLRPVVDALQSMRGISLINAVVLVAEVGDFTRFSNPRQLMAYFGLVPGEQSSGETARRGGITKTGNSHVRRALVEGAWAYRMRARIGRHKVDRIEALPKAVRDIGWKAQVRLCARYRRLTARGKTANVVNVAIAREMVGFIWSIACAIQSASKAA

SEQ ID NO: 348310 - protein, 373 aa, unidentified
MPKYSTAFGMDVHLRSTTVCALDADTGEAVTRRFPGNPWGEIAGWMDGFPGPSLAAYESGYLGFAPQRELAGLGVECVVAAVSKIPRSTADSASKNDRNDAARMAKAILAHDISPVWVPSPEVEGIRDLAGAYGGATARLATAKQRLLAFLAKRGFVYGGTTPAGNPRKYWTYDFLRWLDKVRPEDDGGVRTLAALRNEVEAAAEARADLLSEYRAAVDASPIAAEVAALQSIKGCAFALAAAFSAEVGDFTRFRSGRQVTAYFGLAPSQRSSGDSVRLGGISGAGNALVRKLAVEGSWCYAAARHQPKLMPRDTGVPLEIRMHGRKGSERLLRRREEMLARGMPAAKANAATAAELVRWLWALGMMCREGAE

SEQ ID NO: 348311 - protein, 373 aa, unidentified
MKRILRIGMDVHSTNYTLCAIEPRFDGDDIIYANVKVTPDPDNIVQFIEKLKSKVKDECDILCGYEAGCLGFSLYHALAKKGIRCVILAPTTMMTQQGKRIKTDKRDALMIAQCLAYGGYHAVHIPTDQDDDIKVYIRMRDDHKSDLKKTKQQICAFCLSQGFHYEKGKWTQAHLKWLKTIELGAMDRETLDEYLITYEYFTNRIEAFDKRIEELASETEYVEKVKKLVCFLGVKTHTALSCLVETGDFQRFAKGNIYAAYLGLAPGEDSSSDSINRLPITKAGNSHLRRLLVEAARGICKGAVGHKSKDLKARQSGNLPEVIAYADKANERLRRKYYRMIRNGKKKNVAVTAVARELACFIWGMMTDNIGMV

SEQ ID NO: 348312 - protein, 415 aa, unidentified
MELLHERCAALDIGKKDLKACVRTPSVSRRKRSRSQEIRTFATTTNALLELRDWLVAEQVTLVVLEATGDYWRGAFYLLEDDLNVILVNAAHAKGLPGRKTDVCDASWLCQMGECGLLRASFVPPEPIRQLRDLTRYRTTLIAERTREAQRLEKELEDAGIKLSSVATDILGVSGRAMLAALIAGEDDAVALAELAKGRMRPKIPQLVQALTGNFGAHHAFLCRLHLERIDQLSATIEELSTRIEEQMRPFSHKLDRLATIPGVARAVAEVIVAETGGDMSRFPSPGHLASWAGVCPGHHESAGKRKSGRTRHGDRWLCGALGTAAMAAARTRDTTYLGARYRRLVPRLGKKKAIVAVEHSILTAAWHMLTDDVDYHDLGGDYFARLDPERAMRRIVRQANALGYTVRFDPIHAA

SEQ ID NO: 348313 - protein, 340 aa, unidentified
MKEVITTIGLDLGKKVFQVHGVDAVGGVRVRRSLRRSQVLGWFGKQPACLVGMEACATAHYWGRELSRLGHEVRLIAPAYAKAYVRRNKNDAADAAAICEAVSRPGMRFVAIKTAAQQAAGGLHRVRDLLQKQRTMLINQLRGLMAEFGIVVAGGPQHVKDLLAVLADPADARVPELLRGPLLGLAQVLGDLERRVATLERQIVAWGRGNATYRHLITVPGYGPILAGAFAAFVVEPSALRSGRDFAASLGLVPRQEGTGGKLRLGSISKRGNGYLRRLLVNGAMSVLNTRRARQDPWIARLLASKPRKLVAVALANKMARIGWAMMVRQEDFRPRSAAA

SEQ ID NO: 348314 - protein, 344 aa, unidentified
MDHFAGLDVSVKETSVCIVDEVGKIVREVKVASEPEALLAVLKNPAYCFKRIGLEAGPLSQWLYSALAEADLPAACVETRHMQAVLKAQINKTDRNDARGIAQMMRVGLYRPVHVKTLRSQKLRMLLTHRKLLLSKAIDIENDLRGTLRNFGLKVGIAGKTKFEARIKELVENLLDLAELVEPMLVVRRTLREQIVILHRRLLAIVRDDEVCRRLMTTPGVGPVVALTYRATVDVPPRFRKSKAVGAMFGLTCSKYQSGEIDWSGRISRCGDEMMRVMLYEAAQVMLTRTNKWSWLKAWAMQIARRRGMKKAIVALARRLAVILHRIWVDGTEFRWTREQAVAA

SEQ ID NO: 348315 - protein, 419 aa, unidentified
MKSASTIPSSKLPDQPANGVTGGVDWASEDHAISVVDDRGREVARQTVDHTVAGLRALVKFLVNHGVGEVAIERGDGPVVDALLDADLTVVVISPNRLKNLRSRYGSAGNKDDRFDAYVLADTLRTDRTQLRPLTHDSEATKTLRATVRARRELVKHRVALCNQLRAHLQAAFPGAVGLFKDLDSQISLRFLARFDSQERADWLSVKRLAAWLGSVGYCGRKHPADLYAHLQAAPRGPVGPDGAARAHVTRAMLSVLVELVEQIATLEAQIAEQLALHTDAHIFQSLPRSGTVRAARLLAEIGDVRGRFPDAASLACLAGVAPSTRQSGKHKAVTYRWAVNKELRDAVCDFAGDSRRANPWAAKIYNDAIARGKDHPHATRILARAWLGVIWRCWQDETAYDADQHTALQTLLNSAAAA

SEQ ID NO: 348316 - protein, 402 aa, unidentified
MKASKQYLRFCGIDVAKQKHVACIIDQDGQYLVRPKSIRNDAAGYQQILNCLKQSGRKKAILLGMEATGHYWYGLHDFLIRHGYSVAVLNPIQTAQQVKQAIRKCKTDKYDAFHIANLLRCGQYKAAVIPGELAMTCRLLTRLRYRMVRQSAMIKQLVNSRLHPVWPEYEELFSNTFGTTSMKLLQTAPTPKELLELDVDDLSERIRKASRGRFGPAHTQKILHSAENSVGMKRGHYGISTGIKSLVEQIVALEPVRKKLDVEIQKLSARLPEYLFTLPGATELTIVSLYGEVDPIETFERPSKLVAFAGLDPKVFQSGQYDAPRRHVSKRGSPYLRRTLWQMAYRSVCTEGDLRDFWRRKHRQKKHHLVAVTAAANKLCHIVWRIMTDRRDYIPKGYNPKS

SEQ ID NO: 348317 - protein, 338 aa, unidentified
MGEITTIGLDLAKNAFHVIGCNVHGKEVKRKMLRRSQVMAYFANLPPCLIGMEACSSAHFWARRFEDLGHEVRLIAPQHVKAYVRGNKNDYNDARAIAEAVCRPDMRFVAVKTVEEQDVQALHRLREAQVGERTALCNQIRGLLAEYGIVLPKGVGVVRKRLPELLEEGENGLSAFFRPLLAQCYQQLQQIDAHIEFYTQELKRHAQHNEAVRRLQTVPGFGPIVGSVFHAFVGNGQAFRKGRDVSAALGLVPRQHSSGGKTVLLGISKRGDRYLRSLLVHGARSVVRLAVGKEDRLSRWINKLRSTRGYNKAAVALANKMARIGWAILSQNSVYRAA

SEQ ID NO: 348318 - protein, 385 aa, unidentified
MGMNKSVAQIGMDIHRTFSKVTARDAQQRIVWRQRLEHRERDVLRRQLARWPTQTPVVLEGSFGWSWLADELGQAGLRPHLASSRKVAAWRDLHGLAKSNRTDADLLSLLGFEPARLWEVWLPPPAVRQQREWLRYRMTLVQLQTGLKNRVHAILHRHGLFPEVVKLFGCAGRRWLQLLLSDRSPLPASARDGLKGYLQLLDHLRLQIVRVTRTFRRQVQAHPAALRLCTLPGVQWILGYTLLAEIGDIERFRSARHLVSYSLLAPRAFDTGEPEDDPPRGRHVGHQGRRTLKWAYIEAAHSAVWKSSALRAWFDHYTHGRRQNCNRGYIGVARRLCQRSYVVWKKEVAYQEEPPPRPGSRPCRRESARPVQGQPADAMVALASG

SEQ ID NO: 348319 - protein, 320 aa, unidentified
MENISQWVGIDVSKATLDVYIRPIGKALKVANTQVEIFHLVEQLKSYDLNLIVLEATGGLETELVIQLQAALLPVALINPRQGRDFAKATGKLAKTDAIDAQILAHFGEAMKPQVLAIESEAARQLSELISRRRQLVEMQTAEKNRRARSRGKALADIEAHIEYLAQRLKQLNQEIEELTQNNQQWIDKVNLLKTTPGIGQVISTTLVSDLPELGKLSAKQISRLVGVAPINHDSGQHKGKRMINGGRAHVRATLYMGAVVAMRHNPVIKAFYERLVERGKSKKLALTACVHKMLVILNAMVRDNLPWRVTDNLQPIVNV

SEQ ID NO: 348320 - protein, 463 aa, unidentified
MSRSSRYPRKPRLGAGKQEQSIGKEVHPEAAGVDVGAREFVVAVAPERDRSGCVKTFPTFTADIGRVVAWLKECKVRTVAMESTGNYWVPLFQALEAVGIEVCLVNARHVRAVPGRKTDVCDAQWLQQLHTAGLLQKSFRPPTEVASLRYVMRHRSDLVLTAARLLQEQQKVLNEMNLKLHHVFSDIDGASAMAIVEAILAGERNPTVLSKLRDPRCRASVAVVEKALQGNYRPELLFVLRQANRMWRQVREQVDEADQEVARLVGEIQSEAPGPLPPPTTRNQRRLQKNAVDMAVFEEAYRFYKVDLSQVTGVGAALLTTLMTEIGTAEDMLKAFRTAESFASWNGLCPDNRITGGRVLKAKTRAVKGRVAQAFRLAAHGMARAQGKMGEHVRRMKGRLGKAEGITATAHKLARVVYGMIKNRQPYDEQKAFRPTASSQAKRLKRLQEQAVAMGMQLIPAAS

SEQ ID NO: 348321 - protein, 345 aa, unidentified
MSVYVGIDVHRKRSQVAVIDQDGEVLANRNVPNGVTPILSVIGDLPSGTPAAFEAAFGWGWLVELLEDYGFEPHLVHPLQCKAIASARLKNDKVDAAILAQLLRADLLPEAWIAPPQVRQLRALLRHRIQLVRLRTLLRNRIHAVLADHGHDRPAGYWSGPGRAWLASLDLPAVSAEVICDALALIDALESVIDRLDAEIRGHARSDPRVKILTQLPGVGPFTALVLLAEIGDVTRFASARKLASWAGLTPTVRGSDRTVRHGHISKQGSVWVRWILCEAAQTAKRSPQFAARYQIIARKRGKKIATTAIARKLLTRAWHLLTDAERAASPPVITPASAPPTGAP

SEQ ID NO: 348322 - protein, 438 aa, unidentified
MSNKVIFNLDDLFISVGIDVGADFSWMSIALPNQQFVGKPYKILHNSIDSLTTAVSKIKEAEELYSLESRIFLESTGIYHYPLFCYLRDKGFNCSVINPIITKNSTNINIRKVHNDRFDSKKAALVGLKPDLKVSLMPSDLALNCRNLCREYYDLMDNRGAYVNKLQGELRMAFPQYLGIFSKVTINTSLTLLETYTSPSAFLKADKQEIIDIIKSTARFGLTYAQNKYNAIIQAATDANQFGYIIDSNIKRIRLYISFIRKYDEEINNILESLHELVDANEDADFVKQIHLIETFKGAGFLSAVSIMGEIGDFSAFSKPKQLFAYFGLDPAVKQSGKFEGTKVQMSKRGSAIARRVIHTLTLQSISISRNGEAKNPVLREYYLKKCDSKPKLVAMGAVSHKVCNMIFAILRDNKSFEIITPQEHIKQYNASKCDMAA

SEQ ID NO: 348323 - protein, 402 aa, unidentified
MNAVGIDVSKGKSMVAIMRPFGEIVSAPFEIKHTASGINSLVELINSVEGESRIVMEHTGRYYEVLAHQLSKANLFVSAINPKLIKDFDNDSLRKVKSDKADAVKIARYALDKWQNLKQYNVMDELRNQLKIMNRQFGFYMKHKTAMKNNLIGILDQTYPGVNTYFDSPARSDGSQKWVDFASTYWHVDCVRKMSLNAFIDHYQNWCKRKKYNFSQSKAEEIYGKAKELVPVLPKDAITKLIIKQAVDQLNSASTTVESLRTLMNETASKLPEYPVVMAMKGVGTSLGPQLMAEIGDVSRFTHKSAITAFAGVDPGVNESGTYEQKSVPTSKRGSSDLRKTLFQVMDVLIKTHPQDDPVYQFLDKKRAQGKPYYVYMTAGANKFLRIYYGRVKEYLSSLPES

SEQ ID NO: 348324 - protein, 347 aa, unidentified
MACLISPSYEEEDRPYHTEEEEELKYVGLDVHKRVIQGTVMNEDGSILKRDRFTNSPGALRSFMEDIGEARVVMESGYCWQQPYQTLEEEGYDVRLAHPLKVKAIAEAKVKTDKIDSETLAHLLRANLLPESYVPPKEIRELRDLVKRRAFLVSTRTRFKNRIHAELTKRDVDPGTPLFTKRGKALLASLDIDAVNQILPVIDSLDRQIILISGELKRAAELDERARILQTIPGVGYYIALLLVAEIGDVDRFPDAEKLCSYAGLVPSVRRSGDTTRYGGITREGSRWLRWALVEAVHVHLRYDTRLTRFHRRLARKKSHQVATTATARKMLVVVYCMLKAGRPFQP

SEQ ID NO: 348325 - protein, 298 aa, unidentified
MRFYTKHHQFYCGIDLHARTMYVCIIDHEGNILKHRNMSATAEALANVIQPYREDLAVAVECIFSWYWVADLCNRIGVEFVLGHALYMKAIHGGKVKNDKIDSQKIVNLLRSGMLPIAYVYPQQMRSTRDLLRRRLYFVRQQAQLQTHIQNTNIQYNLPSFEKRIDRHSNRIGIADRFSDPMVRTSVKVDAALMDALHEQILAIERQINSKVPDHDPVAVHLLRSIPGVGKTLALVIFYEIHDINRFAKVGNFISYARLVKVCSRVSWQAQKGKKLKDRKCPPQVGLQRGCLPVPPPK

SEQ ID NO: 348326 - protein, 353 aa, unidentified
MKTYYVGMDVHRASIVIVVLNGAGKVVMQSVIETGAERVRGFLKQLRGKVYVTFEEGTQANWLHEVVRPLVTEVVVCDPRHNKLLQSGNKNDRVDAQKLAELLRNGALKAVYHGDNGVRALKELVRSYDCLVSDTTRVMNRLKAIYRGRAIGCAGHDIYRQDRREQWLEKLRERGAKQRASFLYQQLAALKPLRHEAKRMMVEEARRQTAYPWLLSVPQFGSVSVAQVLAIVGTPHRFRSKRQFWTYIGLAVVTRTTADHEVVNGVLRRSQRPVSTRGLNRNHNHLLKRVFKNAANGACHGGPFKAAYELRVRQGMVPSLARLTIARQLAATTLAMWKRGEQFNPERMKQQAA

SEQ ID NO: 348327 - protein, 338 aa, unidentified
MKLYGAIDLHSNNNVTVLMDETDKVVYQKRLTNDLPSILEQLSPYASSIEGIVVESTYNWYWLVDGLMDKGHRVHLANTAAIQQYEGLKYTDDDSDARWLAHLFRLGVLPEGYIYPKEERAVRDLLRKRSQLVHQKTANILSIQNLYSRNTGSSISANRIKQLSGEKVDALFLTADLALAVKANLTVMRSLETEIAILERVVKDRIKLKPAYRYLLTVNGIGQTLALTIMLETGDIRRFAKVGNFASYCRCVGSEKISNGKRKGSGNTKNGNKYLSWAFVEAANFAIRFEPLVARYYQRKKAKTHRVVAIKAVAHKLARACYYVMRDEVPFDVNRAFA

SEQ ID NO: 348328 - protein, 361 aa, unidentified
MASIALVRSDVIVGVDTHKDQHVAVVLDGLGGRLAELFIPATADGYTTLLAWARDHGRVIAFGVEGTGSYGAGLASFLRRHALKVIEVNRPARQADRRLAGKNDTIDAEHAAREVLAGNATNTPKTADGAIEAIRLIKIARDGAVKARSKAMITLKSTLVTGSDELRGELEPLTDHKLVLACAEFADTLADPADPVAAMRYLLGTLARRWLSLHEEIKVQFKLLDQATKAAAPELTEAFGIGPDVAAEMLVTAGDNTDRVRTEAAFAKLCGACPIPAGSGKTNGRHRLNRGGNRQANAALYRTVIVRMRWHEPTITYVQRRTAEGLSKKEIIRCLKRFVAREVYGLLPTPATGATVQQIAA

SEQ ID NO: 348329 - protein, 341 aa, unidentified
MCNQVLGPDPIKMMEVRMNCKGPRVVGVDVGKRMLDVAREGARAGERYSNDVVEIARFVRGLDPERDVVVFERSGGYERLLEGQLSEATVRWAVVHSKRVKAFRVAKGIKAKTDAIDCRLLRDFGRDQLDSGELRLGRLGDVTMAALAARRRQLNDMLHAERCRRETAAIELVRSSIDCTVATLEAELTAIEAAIATHIRTDPELYLKEDVMCRRIGVAETTARGLLAILPQLGRASAREIAALAGAAPRVHQSGTTQKRRGLEPGRAVVKVILFYPAQTAMRFDPEIKAFAQRLRNRGKPGKVIMVAVMRKMLVQLNAAVRDALANSNRLGLASAGCAAD

SEQ ID NO: 348330 - protein, 416 aa, unidentified
MLFIGDDWAEDHHDIEIEDEDGRRLARARLPEGMEGITGLHVLVAEHAPPAWSELTPEQLANNVIVGIETDRGPWVRALRAAGYQVFAINPLSAARYRQRHSTSGAKSDAGDAHVLAEIVRLDRDHHRAIAGDSDLADAVKLLARAHQSAVWERTRQTLRMRSTLLEYFPAAVEAFNDLAATDALALLARAPDPARAAKLTRAQLVSALRATRRHHVEAKADTLLAVLRAPALSQPATLAGAYAAVVSGQVGIITALNAQIAGLQAAADEHFGQHPTAEIYLSQPGYGVVLAARTLGEFGDDTGRFASARARKNYSGQSPITRASGKKSIVLARYATNRRLGAALHLQAFSALGASPGARAYYDTLRGRNIGHHAALRQLANRLVGILHGCLKTGTVYDEDTAWQHHYTDAQHAAA

SEQ ID NO: 348331 - protein, 408 aa, unidentified
MNAVGIDVSKGKSMVAALRPMGEVALLPQEFLHTEVGLEQMAYAIIALGEDTRVIMEATGRYHEPVAAALHEYGIYVCVLNPLFIKQSGGGSIRKVKTDKADAMKIAKYGLDNWVDLREYTPMDTVRQQLKLCSRQYNLYMKTVVSLQNNLISLTDKTFPGVNELFSSPERADGHQKWVDFVMTFYHCDCICRVSENAFAERYQKWCKRKGYHFSTEKALDLYAGSCGHFTTLPKNDNTKLLITTAAQQLLAGKMTLAALRTEMTRLAKQLPEYDIVRAMYGVGETTAVQLMAEIGDVRRFPRRSSIVGFAGVDPAVDQSGKHSAKSVPTTKRGSPHLRKTLYQIVCTYLKKSPVDEPVYQFLDKKRSEGKPYFVYMTAAQNKFLRIYYARVKECLEAFDAQQDTSQR

SEQ ID NO: 348332 - protein, 358 aa, unidentified
MAKSRHAVAVAEDGRQGEVRYLGEIGADKESVRRLVAKLEKRHGRQLHFCYEAGPTGYGLHRHLVELGHECTVVAPSLIPRKPGDRVKTNRRDAQQLARLLRAGELTAVWVPDEAHEAMRDLVRAREAAVDDLRRKRQAISSMMLRQGRIYPGKTTWGARHLRWLQEQNFTHPAQQLVLQELLLAARHAGERLKRVEAAMVEFLPEWSLAPVVEALQALRGVNLVTAATVMAEIGDLRRFDSPRQLMGYLGLVPGERSTGDTVRRLGITKAGNGRVRRALVESAWCYRHLPRMGKAKYYVHERLPPAVRDIAAKAQARLCARYRALSGRGKPLTVAVTAIARELAGFVWAIGREVQAA

SEQ ID NO: 348333 - protein, 339 aa, unidentified
MSKLLKNFVGIDISKTYFDVVVVKTQPTEEMIHHQFPQKQEGFLKMLEWLQQYNVTLNEATLFCMEYTGLYNTGLVNYLVKNKAQLWVEMRLRIKKAGGFERGSNDKTAAVKIALYALRYQDRMQLWQPIDSNIEKIKSLIAQRDRILNAINQLRVPVDELKEYGNIAEAKEIEKLQAPALKGLQKARLSVEHQITKTVQSDEKISKKVQQVQSIKGIGPITAVALLAYTKGFTSFNNGKQLACYCGVVPFKKESGTSVRFKATISPFANKKLKKLLHLCALSAIKNDNEIKLYFERKVAEGKNKMSVINAVRNKLVHRVFAVVRDERLFEENYVRKCA

SEQ ID NO: 348334 - protein, 419 aa, unidentified
MTQKEDNRILGIVHPICCGLDVHKEQVSACVISPDGDGNEKIVIKEFGTFTDNLTELRGWLLDLGCPIVAIESTGVYWRPVHNILEGYIRVVLVNARDIKNVPGRKTDIGDSKWLAGLLRYGLLRGSFIPDREFRQWRDLTRLRKKYVLSIGDYKRRTQKLFESANIKVDSVVTDLFGVTGRNLMSLLSSNRSKITLEEVCSCVRGKLKGKENELYRSIQGFFTEHHRFLLRTLLDTIQSLEEDVIRIEKRISMAMRQGDNIAERLKEIPGISETASRDILSEVGTNLATFPNASSLASWAGLCPGNNESAGKRKSGRNPVRKHHLKTIMVEVAHAAVRKNGSYYKDKYYRLKAKCGSRKAIVAIAHRILKAVYYIIKEGASFVDLGESFLSLRNKERKLKYVRKQAALLGFNLVPENV

SEQ ID NO: 348335 - protein, 338 aa, unidentified
MEILKQNVGIDVAKDSFVATFTILLKDLIVKNKATKEFKNNSNGFENLYQWCEKLQEDNLEVNYTMEATGVYYESLAYYLYEKDVTVHVLLPNKAKKFAESLNVKSKTDKIDSKVLGQMGVERNLEKWVLSSKIYRHLRSLHREKQQIIKERTAIKNQLHAEEYSGDPVKTILRRMKNRIKYLNKQIESIEKELEDLVSKDDYISERVKKITKTPGLGFRTVTAVIAETNGFANITSIKQLSSYAGYDVRIRESGKWKGKSKISKKGNSHIREIMYMPSLSSIQYAETYKKFYKRLNEKKQNGLISGTAVQRKLLGLIYTLWKNNTEYIENYEMKKVS

SEQ ID NO: 348336 - protein, 400 aa, unidentified
MLLFFEVITMIFVGIDVAKDTHYAAVSDDSGAVLVKPFAFQNNAEGFCLLLKKLSEFDRSKLLIGLDSTGIYSENLICFLYESGFRLAVINPIQTATLRKTAIRKTKTDKVDTMLIIKSLMVNSYRLYSQRDADSLKLRTLCRFRQNLKKSKARLKIQLAGYVNLVFPEFGKFFKSGIHIAASYALLKKYSSPKEIAALRTSTLCTLLSKASHGRFGKDTAEALKSLALSSVGVKNPYISIQIAQTIAQIELLEQQIKDLNSAIEEAMESLNSVLMTVPGIGAVNAACILGEIGDIKRFSKPCKLLAYAGLDPTVRQSGQFTAKSTRMSKRGSALLRFALINSAWQLTLNDTTFKAYYDLKRSQGLNHYGALGHVAHKLTRVIFKLLTSDTPFNPAKLLA

SEQ ID NO: 348337 - protein, 341 aa, unidentified
MLGSDSHKRSHTIVATDTNGRPLGQMTVKATPAGHLELVRWAQRWPERSWALEDCRTLSRRLEADLVRAGERVVRVSPKLMAGARRGGRQPGKSDPIDALAVARAALREPGLPVARLDGPERELRLLVDHREHLVTERTRAQNRLLWHLHDLDPELELAAGALSKLRTCEQVRELLAGHQGVVAEIAIELVEVIAGLTERVNALERRITTLVAPLAPSLLALAGCGALSAAKILGETAGIDRFHSRAAFARHNGTAPIPVWSGHATRHRLNRGGNRQINAALHRIAITQARIHQPARAYLDKRRAAGDTRTEALRALRRRISDEIYRRLHQDIATPTTRAA

SEQ ID NO: 348338 - protein, 350 aa, unidentified
MIIIGADYHPGFQQIAYVDSETGELQERRLQQREEAEKFYRELAVQGMKVRVGMEASGHARWFERLLGELQFELWIGDAAEIRTRRVRKQKTDRQDAQLILKLMLKDDFPRIWVASWENRDARQLLWHRHRMVQARTRIMNQLQAVALNEGLRSKKRLWREAGREQLAAIRLAPWASRRRHDLLELLDRLNPTIAELTEAVEQEAEKCPEAQRLMTHPGVGPLTALAFVLVIGTAERFRCGKQIASYLGLVPSEDSSGERRRLGHISKQGNSLLRFLLVEAAQVTVRSNQEWRRKFFHLAMRRGRKIAKVAMARRFAVHLYWMWRKEWNYEQLTKFGSHAGQPGNPHGVQ

SEQ ID NO: 348339 - protein, 345 aa, unidentified
MTVIIGVDPHKQSHTAVAICGDEREVANVTVRATRQQTAKLLAWAEPFEKRTWAIESAGGLGYLLAQQLVDAGEHVVDVPPTLASRVRVLSRGRSDKNDPNDALSVAVAALRSDSLRQVETADHTAIMRLLAKRNHDLGRMRARLICRLHNALADLSPGGIAKELYAADADQLLESYEPVSPIEHMRHQLARELVDDVRRLDTLIKESHRRIRTAVRASKTSLTEIYGVGPVVACMVIGHTGDVGRFATRDHFAGYAGVAPIEHSSGGRIAHRLSRRGNRKLNNAIHIAALTQIRNPGTDGRIYFERKVAEGKTKREALRSLKRQVSNAIFRQLVLDAERGPGGH

SEQ ID NO: 348340 - protein, 348 aa, unidentified
MRILALDLGKNKSVFVDYLSGGGEQNFGKIGSNAHEVQKLLERVRPDRLVIEAGPAAGWVCDLAQRHGVQVQVANGNDERWRWKTVKDKSDRKDALKMAVMSEMDSLPLVHVPEASVRQWRSLIEYRHGLVDRRTAIKNSIRSIYERQGLSLPGAAKAWTEQRLKEMKQEAAASAQDLWLFQVGCELAQLEALEKQIEAAESKLAELGQANQAVRRLQEAPGVGPRLSEAVVAIIDDPQRFKNGRQVGCYVGLTPRRWQSGASDRQGRISKAGNRLLRELLVEVAWLGVHRDTWMKEVYERVLRGSEKRKKIAIVAVARRLLVKLWAMLRDGTRWKEPARSPAAATVA

SEQ ID NO: 348341 - protein, 388 aa, unidentified
MADNAAPARRAVLGLDVGKATHWACMLTRDGEIAVNRPVANSEHELDRLFSQVGEGTLVVVDQARNIGALPISRARRAGLDVAYLPGIAAHQASRMFAGDAKTDERDAHVIARTAMGLPDALLPVPERDGNLEAARSLASQRDHMVTCATRDKNRLRSILLESCPAFEALVDPSDPRWLRVLARLGGAWGVADAGRASFSALMRGAGGSARADAWTAIASSTRPSEVMVRAENPQVKMLARRISEAMEEASRLDAEIASLLESDDTYACLLTIPGIGPRTASELTIAIDISSFPDHDHLASYCGIAPRNRRSGTSIASVAASRQGNKRLKNLLIFSCNSLTRSANRFGEYYRACRGRGMCHGEALKAVARKRLKVIYAVMRDKAPYAA

SEQ ID NO: 348342 - protein, 373 aa, unidentified
MENTITYVGMDTHKKEHKVALRYPDNEEIEILTIKNNASDISKMVKRILKKAPSEVRFCYEAGVCGFDLKRKIESLGCRCAVIAPSLTPVKPGERIKTDRRDAKKLLTMFKAGILTEVYAPDRQQETDRELTRLYQSARKNLMAARHRLQKLLVRHGYIYHDGDHWTQKHLSWLRNLEFEETVLKEVFDSYFTEMQHCMQRLESISKQVEQLADSEPYKEIVGLLKCFHGIKTLTAISIITEIFNFGRFANPRELMSYLGLTPSESSSGEKQKKGAITRTGNKRVRRLLAEVSWHYQHPYHISKELKRRRTDQPQWAIDIADSAGQRLRKRYWYLINHGKMPCKAITAVARELVGFLWSVMREYQSRKMDKAA

SEQ ID NO: 348343 - protein, 454 aa, unidentified
MERYAGIDVSLERSSVCVVDATGRIVREAKVASEPEALVGFPRQLGLPLARVGLEAGPLSQWLHAGLAGAGLEAVLLETRQVKAALSAMIVKTDGVDGPHGIVVPRRRPSPCRKEATPMQISTVGIDLAKRVFQIHGVDRDGNVVLRKQLRRAQVLSFLAELPPCLVGMEACGTSHYWAREIGALGHEVRLMPPQYVKPYVKRNKHDPADAEACCEAVGRPSMRFVPVKTEAQQAVLIMHRSRDLLVRQRTQVVNALRGHLAEFGIVEPQGIWHVGRLRARVEDEGAIPEPGRTVLGILVRQLEQLDEHIAQVEAEIVAWHRANPVSQRLAKIPGIGPLTASAIVATVPDPSVFRSGRAFAAWLGLTPRQHSTGGKERLGRISRQGNRSVRQLLIVGAHSALLRSKEIRANAWVQGLLGRCARLKVAVALANKMARIAWAVMAKGESYRRTVPA

SEQ ID NO: 348344 - protein, 337 aa, unidentified
MNYCGLDMGKRSSHFCIVDEKRVVQREGKVSNTPSALHKVFGKLDRMRIVVEASTKSFWMADQLEALGHELVVVDPGRTKAIGSALIKHDKLDARVLATLCAADVLARVSRPTLKERLARTPVVIRDGMVQCRTKLMNTVRSVLDAEGVEVASSSADGFTGAVCTALDAAPEQLAEAVTPMLEAIDALSQQIAKCDDAIERSVKSDPLALRLMTAPGVGPIVASYYAMAVRDPARFKSGRQVGAYLGLVPSLYESGQTSRRGRITKHGGRKARWALTVAANAILRTRSSSRLRDWGLLLVKRLGRKKAIVAIARKLANVLWAMWKHERAFEPMHGMA

SEQ ID NO: 348345 - protein, 348 aa, unidentified
MKNKSFVGIDISKKVIDVSIFREDTNIKMFPHEVFNNTRKGFGDMCSWLKKSRVVLSQALFGMEFTGCYSLDLEKFLTSKNYSFCMLSTRIVKHHPMGTIDKSDKNDSAKIADFLYRYDGTECAKPYKLPSKAMQQLKQLVNERKFLVEQRTNFMNRMQMFETKEDSAMYESYIKKLNHDIEKIDQEECELMSKEEDVLDTFQNLLTIPGIGFVNATNIIAITRNFTAFDTARQYARYVGVAPCSHTSGTSVKWRSRPSAHCNGQVKADLSMAALRAVEYDVEMQIFYNRKLGGRKDSDTKRKALNAVKFKLIRRMFAIGKQKRKWEVLNTSDDRKNLHIEKSKASEL

SEQ ID NO: 348346 - protein, 321 aa, unidentified
MSHTTSKPGFVGIDVSSGTLDVCVLPEKHTWTVANDPACRAALAEELHSRGVALIVLEATGGYEVPIVAELAAAALPVVVVNPRQIRDFAKALGITSKTDRLDAGVLARFAQDIRPEIRPLPSEEERFLRELLARRRQLIQLHTQESNRFQQAASAKVRHSISNVLQFLEKQLRQIDADIDRLIRQSSVWREKEEILRSVPGVGPTTARTLLAELPELGRYGNRQISSLAGLAPRNRDSGKFRGTRSIGGGRGNVRRALYMAALTAIKHNPNLHEFYQRLRNEGKKFKVAITACMHKLLVILNTMMRKNTSWNPNFYPQIT

SEQ ID NO: 348347 - protein, 354 aa, unidentified
MSQTPNTAIAVIGIDIGKNAFHVVGHDARGAIVLRQKWSRGQVEARLANLPPCLIGMEACVGAHHLSRKLASLGHDARLMPAKYVRPYSKGQKNDFNDAEAIAEAVQRPTMKFVATKTAEQLDLQALHRVRERLVSQRTGIINQIRAFMLERGIAVRQGIGFLRTELPTILATRTDALSPRMLRVIEELADDWRRLDQRIDGLSGEIEALARQDQACSRLMTVPGIGPIISSAMVAAIGTGDVFSKGRDFGAWLGLVPKQISTGDRTILGKISRRGNRYLRVLFVQAAWVVLVRIKNWERYGLKSWIEAAKKRLHHNVLAIALANKLARIAWAVLAKGRAFELTRTDDAGVRPA

SEQ ID NO: 348348 - protein, 346 aa, unidentified
MKIIGCDFHPSYQQIAVLETTTGEVIEAKLMHGDGEAERFYRELEEPALVGMESVGNSLWFEQLVERLGHQLWIGDAAQIRASYVRKQKTDKRDAGHILKLLLENRFPQIWVPSHQQRDQRQLLIHRHKLVGMRTRIKTELQHVALNQGMQKKRSLWSKGGMSDLKKLSLEGWTSRRRADLLSLLSMLETQVSELDKAVEEAAQRDPLAQLLMTQPGVGPNTALAFVTTIGDVARFPRGKQVASYLGLIPSERSSGSKRRLGAISKQGNVFLRTLLVEAAQSAVRHDEDFKKEYRHHCHHKPKGVVKVAVARKLAVRLYWMLRTQTPYPQVVHNEGSPSHFVVSQS

SEQ ID NO: 348349 - protein, 381 aa, unidentified
MRQVCGLDVHKDSVFVCILNENGIVFQEKFGVLTPELEHLASVLQEHDVGEVCMESTSIYWMPVWRVLEPYVAELKLVNPYFIKQLPGKKSDVKDAEWIATCLLKDLIKGSYVPADIIQQLRQYDRRIFDLNAECVRKLCKLDAALQRCNIRISNYVSTTDSKGYKEVVRLISEGVIDPEMLIKAIHGRTINRAGRDVILASLTGVISGADVDIIRQLREEIDLAQRHRDECQSRMDAICQQHFPEQLKNLQTIPGIKGRSATAIIAEVGTDVSSFQDAAHLVSWCGLKPRNEESAGKIKARSITHGNRFLRKTLIECSWAAAKTQGCFLNKFSYYQTVVRKKNKMKVQVAIARKILTAVWYVMHDNVAYRDYTPDIAPAE

SEQ ID NO: 348350 - protein, 407 aa, unidentified
MDKLFVGIDVGSRNNAVHIMLPDGSKHKAFSVQNDLGGAQTISKQIVSALAETHLSSVSVAIEATGVYGDNLMCFLQGDGATGQFERTLHVLNPKQVSKFKQAYPDLPKNDGIDAFIIADSLRFGRIATAVYMDDYRYSALQKLTRARFHAVQDLTREKQRFMNHLFMKCSGLAQEKVFSNSFGATALAVFEEFATPDDIVNMDIGELASFIAEKGKNRFPHPDEIAKAVQAAAKGSYRLPKTVNDSVNQVLSISISSMRAMQAQIKILDKEIERQFVNIPNTLTSVPGIGPVCSAGIIAEVGNINRFKGQESLAKYAGLTWSQHQSGTFEAQNTRLIKSGNRFLKYYLCEAANSLVRYDTEYRRYYDLKYKEVNRYQHRRALALTARKLVRLVFRLLKDNRLYIPA

SEQ ID NO: 348351 - protein, 372 aa, unidentified
MVWTPPLPNGIVMCQSGRVNHHLREEEESNMNITTIGLDIAKNVFQIHGVDANGKTVLRKQLKRNDVLAFFANLLPCLIGLEACGGAHYWARELIRLGHDAKIISPQFVKPYVKGNKNDSNDAEAICEAVGRPNMRFVPVKTVEQQDIQLLHRIRSGLIKERTALVNRIRGLLMEYGIIIALGIAKVRKQLPDILEDAENGLTIKARKIFADLQEQLIELDKQVAAYDEKIRAVHCASAVSQILAEIPGIGPLIATALLAALGDGKAFGSARQVAAWLGLVPRQNSSGGKSKLLGISKRGDVYLRTLLIHGARSVVNAAAKKDDARSRWINDLVKRRNANIAAVAVANKNARIAWALLTKSVHYEAPTLVDA

SEQ ID NO: 348352 - protein, 521 aa, unidentified
MITIPVVTERCAGIDVGKRGLAVAVAAGPADKEAEIKTRSFGTTVPTLRELQGWLRAEGCTTVAMESTGSYWIPVKNILEEDFKITLVCARKHRPKKGDKTDFRDAIDLAVHHRHGLLTGSYLPERGIVELRDLTRRRKKLMGNLRSEKNRIQKVLETANVKIGNVVSDVFGVSGQEILQALLDNRPITAEDMAGMAKKRLRQKLPQLTEALQDHHMNDHHRWLIDQSIEHAKFLDQQVEELEKRIEQHLEPYRRQYELLLTIPGIKETAAANVLAETGPYMDQFPTSDHMCSWAGICSGNNRSAGKSKSSHIKKANKFLLAALVESGWGAARKDGSVFQRKFRRWLRKLGKKKATIAICRSLLRVVWSVLKNERPYVEPDTTVLKTLEREKQVRHHAHRLHQLGADQKTIEALVHTLLEPPAPVPTGPTLGALDKPAAVQPPRRPKCAPANQRAGRRPPARGVLGLRIRTADKKQYAVIKEQPGASLTTRAQTTSRRKQRQAPKHKTGDSLPERPANRGG

SEQ ID NO: 348353 - protein, 343 aa, unidentified
MLEEYDGRQVVGIDLHRRRSVIVRMTEAGERLGCVRIDNDPLVLAAEMAKAGEHPEVVLEATYGWYWAVDVLQEIGAQVHLAHPLGVKGFAYRRVKNDQRDAADLADLLRMGRLPEAYVAPPAVRELRELVRHRAKLVALRSGLKAGVHGVLAKQGVHVPVTDLFGVGGRRLLAAVGLDGAYLARVNAYCRLIDAVGFEVDAVSGQLRARLCAHPGYLAIQQVPGVGPVLAAVFVAEIGEAARFPDAARLVSWAGLTPRHRESDATVRRGPITKQGSGLVRWAAIEAAQKMPASAGWLVSSRARIGERRGRNVATVAVARKLLTLVYYGLRDGHVRALARAVA

SEQ ID NO: 348354 - protein, 350 aa, unidentified
MLIVGCDYHPSFQQIAFVDTDTGELEERRLEHREEADKFYRELAVQAKKVRVGMEASGQARWFERLLAELNIELWVGDATEIARKRERKQKTDRQDAQHILRLMLKDDFPQIWVPSWENRDLRQLLWHRHRMVQARTRIMNQLQAVALNEGVRCNKRLWREQGREQLESFRLAPWASRRGHDLLELLDRLNPTIGALSQAIEQEVEKCPEAQRLRTHPGVGPLTALAFVLIIGKPDRFQCGKQIASYLGLVPLEDSSGNRRRLGHITKQGNSLLRFLLVEAAQVTVRSLPEWRSKYVHLTMRRGRKIAKVAMARKLAVRLYWMMRKEWGYEQLKKFGSHAGQPGNRDGVK

SEQ ID NO: 348355 - protein, 365 aa, unidentified
MRWSPPHPARATLSQGVLFSEAIIMSESALIGIDLGKHSFHLHGQDKLGREVFRKKFSRQQMMTLFGNLPACTVVMEACAGAHFVARQLMAMGHEAKLISPQFVRPFVKGNKNDFVDAEAICEAASRPSMRFVSPKTEAQQTLSVLHRLRESLVRDRTKTANQMHGFLLEFGISLPKGLAIMKRLASILAEHELPVRLTVLLQRLHEHFCYLDEQIKALDKELASQLADDDLGSRLLSLPCVGPITASLLAVEMGDGRQYRCSRDFAASVGLVPRQYSTGGRANLLGISKRGDKHLRQLLVQCARVYMQRLEHQKGALADWVRSLLGRRHSNVVACALANKLARIAWALAAHHTQYEAGPDALNA

SEQ ID NO: 348356 - protein, 334 aa, unidentified
MLYAGLDIHKAVFQAMVLDPDSGELSECRFEPSRERLNGWAMQWQGKLAAVAIEATTGWRWVARELQAHGFEVHLVDPGRASALRGRRRQPKTDRLDARWLALLLARELLSECEAWLPAAEIQRLRDRTRLRKALAGERTGWAQRLHALLAHEGWPCSRGRLLTREGSRWVAALELDAHVRAQIDVIVAVMAALEEQLELVESELRRFARADRRCEALQTIFGVGPLLACHLLAEIGDARRFQRPRQLVRASGLDPSVIESADSKRRGRLAKQGSRHLRWALVEAANHSHRSTSPDHNLYRSTVKRCGRGRARLTVARKIARRSYHLLLAAEAA

SEQ ID NO: 348357 - protein, 358 aa, unidentified
MQSNEKKSKGQKIFIGIDVHKKNWDVAIAPEIGLVKRHPQKASAKELFDFLKKHYPDCEYLAVYESGFTGFSTYYALKEVGIDCIVIHAADVPTTQYEELMKSDKIDSVKLVRSLKAGLLKGIYIRTGENIDDRSVVRIRRSIQKDLSAYKSRVKHLLHNNGVEMPERFEKSGTHWSREFIKWLKDEVTLLSSTRNSLDLLIRQVETVRSNLLNATRMLRNLSNSERYKHNCELLTTIPGIGPIIAMCILTEVFDVSRFHNERQFAAYLGLIPTSHSSGEKIAHGEMTFRGNKELGPMMVEASWIAITQDIGLGALYQRYKDRMKPQLAIVRIARKLSNIIYTILKKQVAYAPYQLGK

SEQ ID NO: 348358 - protein, 403 aa, unidentified
MSTFFAGLDWASQTHAICVVDERGAVRLQLEVAHTAAGLAELRKKLSGFGAVPVAIERPSGLIVDALLEAGFAVVPIHPNVVKATRPRYRSHGGKSDASDAYVLADVLRTDGHRFKPLAPQSDEIRALRTLVRGRDDLVATRVQLANQLRSLLESFWPGSAAVFADVDSPIALAFIERYPTPESAARLGPKRMAAFCAQHAYSGRRSAEELLARLNEAAAVAVGELEMEAKGELARSLVRTLARLVEQIRLLSSRIEHHVASLEDGRILMSFPRAGRICAAQILSELGSVRERFLSDDHLAAEAGVAPVTYASGKSKAVTFRWACNHRLRAALTCLADNSRHASAWAAHVYAKARARGCNHPHAIRILSRAWLRVIWRAWLDRKTYDPALHQAAQMLLNTAGG

SEQ ID NO: 348359 - protein, 406 aa, unidentified
MNQSTLQRPNSFWCGIDWGGRFHHLCVLDGTGQQLLSRKVAHTVDGLAVLVGLIASFTGAVRIAIERAEGLLVEYLQHHCDAEIYCVSPKISARARERYRMAAAKSDEFDAYVLADTLRHQYAQWRPLAVPSPLLAELTAVSRDRQRILDMQVDTENRLRSILDAYHPCPLHLFSALDRDITLSFIRSYPTPVQAGRITAARMGAFTSRHGYSGRHKPETLVARMQPHLLSASDGTVAGKALAAKAFTEQLALLNTHLRAHDKRLGELLEAHPDTPIFTSFPGIGPVTAAVLISEMGEERSRFPSAPSLLAETGLAPVTKVSGRTRQVRFRYAANRRMRHAIDWWMFVAVREDLWSADIYQHARAAGHPHHRALRGLGARWCRILWRCWHDHNPYDPAIHHRATAA

SEQ ID NO: 348360 - protein, 441 aa, unidentified
MAMRKRDEEVVFPNAAGIDVGASSHWAAVPRQATEEPVREFGAMTDDLNALADWLLDCGVDVVALESTGVYWIPIYEVLERRGLQVWLVDARQMKYVPGRKSDVQDCQWLQKLMSLGLLRAAWRPGDEVCVVRAVVRQREVLLTEQASWVQRMQKALVQMNIQLTEVLSDVMGMTGQAIIRDIVAGQRDPQALARHRSDRIKASAEEVRKALTGNWREEHLFVLTQALAMYDSLAQRIGECDAKTQALLAPLGRQDVDLGKAPKERSKQRAAFDVRQALANWAGVDLTRIDGLGIAAAMKILSEIGPDLSRFANVKHFCSWLGLCPGTKISGGKVLSANTKRSANRVRQALKLAAMSLSRSDSALGAFYRRLCGRMDKPRANTAVAHKLARMVYFMLTRGESFVDKGQQHYEQQQRQRSIAALKRRAATLGFNITPSSPTA

SEQ ID NO: 348361 - protein, 397 aa, unidentified
MTATRNQHSTKNNQSRRGLYLSFELSWNEWKLAFATAPTDNPRLRSIGSRNTTALLGEITKAKKRFGLADDAPVYSCYEAGGDGFWLHRFLESQGIVNQVVDSSSIEVKRRGRRRKTDRLDAGKLLSMLIRWHQGEKGVWSVVQVPSVADEDRRQLHRELLELKAERTQHTNRIKGLLAGCGLAVSGIDARFAEVLAKLRTWDGQTVPPELKERLLREHERWQLVDRHIKDLENERARRIRSSPEPVVGKVRQLLRLRGIGANSAWLYVMEFFGWRRIRNRKQLASLAGLTPTPYQSGDSDHEQGISKAGNRRLRTMAVEIAWCWLHYQPGSALSEWYQKRFAKGSSRQRRIGIVALARKLLVALWRFLETGAVPAGAEIVTSKKGLLIAAEEALPA

SEQ ID NO: 348362 - protein, 321 aa, unidentified
MMDSSSVVGIDVCKASLDVAFGLHSPVQQFPNAPKGHRALARALTKRAPSRIVMEATGGYEHTLLRHLAERRLPAIRVNARQVRDFARATGILAKTDAIDARVLVRFGAAVEPEHRPLPAPEQEKLARLQTRRAQLIAMRTSESNRLGHDLDPVIVRTMRTVIKTYNQQIALIEAESAEVIAEHAKLQRTYEILTSVPGVGPVTAAVLMGHMPELGELSRQAVASLAGLAPFNQDSGPQRGQRHIRGGRPAVRTALYMATLTALRFNPVIAEDFERFTAAGKLHKDAMAACMRKLLIILNALVRDDMLWDEKPARTSPPTP

SEQ ID NO: 348363 - protein, 466 aa, unidentified
MSKSQNPTKEVIPIMKKRIYRRMPVNDFQPQSISPADLGGKLVFAIDVAKVDMVAAVAAADGHVLHTVCWKAPQQNSTVLSILRGFRAAGITVEAVMEPSGTYGDVLRRQLEKDVFPVFMVSGKRTYDAKEIFDGVPSLHDAKSAAIIARLHADGLSTRLPDEVPERRQLKAALAILELYQERYLQLVHRLESWLARHWPELPTLIELTSSSLMALLARIGGPADVAANPELATKLLRGISHRLLPDDKIAAIIASANSSVGVPLVGLERDALMAIAADAYRAHRAFATARTKVAQLADTTPAATLAPVVGPTTAAAIFAEVGDARSFPCARAFLKAMGLNLKEKSSGTVQGQIKITKRGPSRVRQLLWLAVFRWIQTDPIANAWYQSKKQRDGGRASRAAVALMRKLAKGLYHVGRGGTFDSSKLFDTRRLQVASAGFPKGDLPLHRLSATRKSDGCLEAPCGTF

SEQ ID NO: 348364 - protein, 348 aa, unidentified
MTMIGGLDVHRQQITFDYVDDDGLVHFGQIRPATRTRLRDWLGKHCPGGDGEFAVEGCTGWRYVSEELAAAGVRVHLGDPAEVAALRGSKKRAKTDRTDARLLRTLLWEGRFPESWIPAAHVLEVRTLGRLYCALMDERRSWQQRIHAQVFHQGCPPITALLSQAGREALADAQLSAAGRQYVDTAQRRIDELNAEIKPLRKQLVDFARHQPGCQALQARHYGVGWLSAAIMWAEIGDARRFRSADQLVRFAGLDITVYSSDAKRAPGHLARQGSPTLRWAAFEAAKCAARPGSPDYAYYHNVADRIDGKRPALAVERKLLRRCYHTLRELGDTALALPTTKTAKTAA

SEQ ID NO: 348365 - protein, 410 aa, unidentified
MRYHLGVDWADQTHAVWVVDERGTKITARTVPHTVEGLSEWGRELDEWRAHGIELWAAIERPEGRVVDFLLDHGIVVYPVNPKALDRARDRFRQSGAKDDPFDARVLADFLRTDHAHLRPLRPSSEAAQELKLLTEDYQRQVRQQTRLVNQLTITLKAYYPRALEVAELTTGLAQAFLQAYPTPAAVAALTERQWQRWARAHRLSATRTRELWEVLQRPQLPVPAHVVRAKARLMRSLVAQLTPVVAAVGEYREAIEDFFARMSTAQWIRTLPIGDHGITAPTLWARLGDAPGRWEAFRHLQAQAGAVPVTKRSGKQQRVVHFRVACDKALRYVVDQVAFLSLRSCEWARAYYDQQRGRGHSHRRALRALGAKWLKIIFVMWQRHASYDEPYHLATMARQQLRQPQTKIA

SEQ ID NO: 348366 - protein, 338 aa, unidentified
MKLYGAIDLHSNNNVTVLIDEKDKVVYQKRLANDLPLIVEQLSPYASSLEGIVVESTYNWYWLVDGLMEKDHRVHLANTAAIQQYEGLKYTDDDSDARWLAHLFRLGVLPEGYIYPKEQRPVRDLLRKRSQLVHHKTAHLLSIENLYSRNTGQSMSANRIKQLSSEKVDALFTNCDLALAVKANLAVMRSLETEIAVLERVVKERAKLKPAYRYLLTVSGIGHILALTIMLETGDIGRFPKVGNFASYCRCVKSEKLSNGKRKGSGNTKNGNKYLSWAFVEAANFAIRFEPLIARFYQRKKAKTHRVVAIKAVAHKLARACYYVMRDEVPFDVDRAFA

SEQ ID NO: 348367 - protein, 417 aa, unidentified
MVHPKMKWTYVGGDSHKDTHTMVFIDCFFGKIGEITFRNIPSEFDAFLKEAQKFKVIGTSFAFGLEDVSAYGRALNVFLTEKKQLVKHVNATLVASERKSRNTLQKTDSFDAECAARVLLSRFDELPVCDPQDKYWILGSLVARRNSIVKLNVALINHLHSLITDNYPDYRKYFPNIATKTALIFFEKYPSPVKLFGVSAEELTEPFKNTRNNRFTIARAEEFLAYIEKCGFKASEYQAEKDFTIMSTVRQLTANLYEIAEMDKQLESFLPKFDYKLTSMKGIDTVMASKLIAEIGDIKRFPNPAKLAKYAGVSPVTYASGKSDCQYANERGNRELNQIFFSLAMNLTKPTGINRKIINHYFYSYYLKKISEGKTKKQAIKCVERRLVNIIYGMMKNNTEYINPPTYDEPKEETQTA

SEQ ID NO: 348368 - protein, 306 aa, unidentified
MKRDKYMGIDLHQATSVVYVLDSEGKLVLETIVATEASAVVRLLQSINGPLHVTFEETTQAGWFYEVVRAHAAEVIVCDPRRNKLLGEGSKADKPDARKLAELLRAGMLRSVYHGHESTRTLKELVRVYETLSVDTLRTMVRIKALYRSRGMRTPGRGVYQATQRDQWLDRMTEPGLRQRAELLYDELDQLRPLRKRAKQAMLAESRKHRACALLRTIPELGPIRCAYIVATVDTPHRFRTKHQLWSYSGLAVITHMSSEYDIRDGHIVRSRKPVATRGLNRNCNRRLKEVFISARHRWKSERTVS

SEQ ID NO: 348369 - protein, 324 aa, unidentified
MFVGLDVHKNYLQAAAVDGEGMLLKEQRIPNDVREIERFFADIHDAKIVIESSSSWYQIYELLSKRYMVVLSNPVKTKAIASAKVKTDRLDAFMLANLLRGGYIAESYVPPRRIMDLRGMVRYRAGLVRIRTSLKNKIHAHLLMHGLKIEGTPFTKAYMAKLRAIHDYKIDGYLNIIDALNHEIDEVSRRIRAEAKDDDYARLLTTIPGISYYSALLVVSEVGEIERFPDSSHLASHVGLTPSTHSSGGVTYHGSITKTGSRHLRWILTECTQSHIRTEPDSNVTRFYNRLVKKKGKAKATVAASAKLLKIIYWVMKEKRPYHS

SEQ ID NO: 348370 - protein, 325 aa, unidentified
MSKYIGIDVSKKVFDVAFLKSSGLWLHKKLNNKVEGFQKLTTLINKEDVVVMEASGPYHLQLALYLSKSGYNVSVVNPLIIKRYSQMRMLRAKTDKKDAKTISEYGTFTNPELWIPKGELIMELREMYTALDLFKKQLTMSTNQYGAFESSGILGSIVKKELKQHRSTIEKRIERIEAKIEELAMSEYKELIDRLRTIPGIGAKTSIFLVVVTNAFENFSTHKELISYLGLSPRIFESGSSVRGKGHIAKLGNPQIRKMLYMCSWSAKKHNKKCVEMYDRLSEIGKPERVIKIAIVNKLLKQAFAIAKSGEDYNEDHISILKSVA

SEQ ID NO: 348371 - protein, 415 aa, unidentified
MAKVMEPVLRCCAGLDVHSATVATCVRRIDDQGVIHAEVRTFGTMTRDLLVLCDWLTQEGVSHVAMESTGVFWKPIYNILEELFQILLVNARHIKNVPGRKTDVKDCEWIAQLLQYGLLKGSFIPPRPQRELRDLTRMRVQLKHELTSVANRIHKVLEDTNIKVGLVATDVLGVSGRKMIKALIDGETDTTKMSDMAKGRLRNKIEVLEKALVGKVTEHHRFLLNALMEHLTYLESQIERFNQRIEETAGPFEKAITALIPMPGYDRVSAQSVIAEIGPDMNPFPSDSHLCSWAKICPGNNESAGKRKSGATGHGNRWLRAILVQVAWAASHKKNSYFQAQYRRLAGRRGKKKAIVAVAHSILTATYFVLKLETSYKELGGDYFDRVSRDRVRKYHIKRLESLGFDVQLTEKTAA

SEQ ID NO: 348372 - protein, 316 aa, unidentified
MNEKKNVVVGIDVSKAMLDVALVPSGEQLQASNDASGIEGLGKRLKAASVDLVVMEATGGYETAVAAALIGAGLRGAVGNARQIRDFAKATGRLAKNDRIDAQVIAAFGEAIDPEIRQLPDEDAQELQALLVRRTQLVGMRVQEVNRLGLMQGAMRKGIKDHIAWLEQAIERLEIDITHGLRSSPAWRAKDDLLRSFKGIGPITSGSLMVGLPELGGLDRRQIASLAGLAPFNCDSGTMRGRRSIYGGRSRIRTLLYMAATSAIRSNPVIRDFYARLRSRGKPHKVAMVACMRKMLTILNAMVRQSTPWTPETNPV

SEQ ID NO: 348373 - protein, 316 aa, unidentified
MPDFVIGVDVSKRWLDVSLAGGRARRVEMEAGALAALAAEAQERGALVVFEATGAYDAPLREALEAADVAYARVNPAQARPAQARAFAQGCGILGKTDAVDARVLAEMGARLDLSPTEPLAPARRALRSLAVRRRQLVEMRKQELARRDGLGPSPMQASIERHIAWLDGEVAALDSDIAALTAADPEISACARLLRSAPGVGPVVAAALLADCPELGKLGRRQLAKIAGLAPLARDSGQYKGARAIRGGRPDLRARLYNAAFSACRCDPEFKALRTRLTAEGKPFKAIIITAAHKLLRRLNAMIKSGQPYAPQPSP

SEQ ID NO: 348374 - protein, 413 aa, unidentified
MQVLFARCAGLDVHKKTVVACVMLTELTGEVRKQVRTFATTTQSLLALADWLTSQHVSHVAMESTGIYWRPVFNILEGAFSVVLVNAQHIKAVPGRKTDVKDAEWLADLLRHGLLKASFIPPQPIRDLRDLVRYRKSLIEERSREINRVQKVLETANLKLSSVVSNVMGASGRSMIQALLTGEQSPEVLAELAQGSLHKKIPQLREALLGRVDAHHQILLSHLLAHISFLDQTIFHLFFQIQQYLQPYDEAVELLVSIPGVAEETAACILGEIGADMRGFPSAAHLASWAGVCPGNRQSAGKRLSGKTTQGNKRLKAALAEVVWVLSHMKDNYLSAQYHRLARRLGKQKAVMAVAHSLLVIIYHMLRDKQPYRDLGATFFETRQKERVVKGALRRLESFGYTVTLQSQEEVSI

SEQ ID NO: 348375 - protein, 365 aa, unidentified
MRIILAIDLGKFKSVACIYNTADASHEFRTIRTTPPEVHDLIVRTLSDGEGNFRGRVVIEVGSAAGWVKDICEVLGVEIQIANPNHEAWRWRNIKRKTDKDDGLKMAKLSAMDQLPMVTLPSSQVRQWRNLIAYRHTLVGRRTAIKNNIRAILDRQGLSHAAGKSGWTLGAIERLREMSAVLEDVAADQLWRGMLHVELLALEQIEGLIEPVEAKLEAMARQDARVALLRTIPGVGPRLAETVVAMIDDPKRFKTGKQVGAYAGLVPRQIESGTMSRTGRITGHGNKLLRGLLVEVSWLMRRYNPRLSAHFEQVCRGSKTRKKIAVVATARKLLVICWAMLRDGTRWREPILPGATPGAATVMPT

SEQ ID NO: 348376 - protein, 473 aa, unidentified
MLHLSRQLPAGYFRGFNADYARLHGVVVRDPALGFPSIKSKGGDTVKNRMKFDHLSTLCVGLDIGSRINFITALNFDSDRLINMRPVPNASNGVEAMESMILAVLEANPQFRYLLIAMESTSFYGVHVANYLSTTDKLKPYGVKVFCLNPKTIANYRKSFTGLGKNDGIDSFIVADYVRAGRINIEPWRGAQYLALQRLTRQRRHINEAIAREKNYVLNNVFLKFSEFALLSGEESPVSDKFSATAEAILTEYKTTEDIANAPLKELIDFISASGHGRFSDPDQVASLLQKAARNSYRLDKALYEPITTSIACSFNCIRAFEKEQKALDKAIAATVAGLNPTEYQILKSIPGIGPVYAAGILAEIGSVRCFNSNNALAKYSGIIWRDNQSGEFDSEDTPMMKAGNRYLRYYLIQAAGSVVRYCPEYTDYYNKKFAEVPKHQHKRALALTARKLIRLIFGLLDKNQLYSPAKSR

SEQ ID NO: 348377 - protein, 349 aa, unidentified
MSNQQCTAVTYGIDLGKTWFHVVGLDHTGNPIKRAKLNRASIIRFFINIPAALVGMEACPGSQWLARKLQALGHQVRIVPAQFVKPYVKSNKNDTIDAAAIAEAITRPTMRFVQIKQCDQVDLQALHRSRDLLVSTRTRLINQMRAFCLEYGVAMRNGVGAFKVALPPVLSDESNDLTPGMRELLVDLAQELSTLEDRIAQFTRKINAQADASDIARRLATIPGVGQLTATALVAAVGDARQFKTARDLSAWLGLTPAQYSTGGKTHLTGISKRGNSYVRKLLIHGARSCSMHLDRTKDRLGLWIEALEGRLHHNKMVVALANKLARIAWVVLTKPGALYERQVPQLVT

SEQ ID NO: 348378 - protein, 317 aa, unidentified
MTHDTTPTAGIDTAKDKLDVALHPTRTRLAVPNSPAGFRHLATELRRRGVGRVGIEATGGYERGVVKHLRQAGFTVVLLQPLQVKAFAKLHRKRAKNDRLDAELIAACVGLFEPPNTSRDPRIEPLADALTFVEQVEDELVRAKTRLEKTAAPRLRRIIAGDIERLTRRKAAELKRIAQALRRHPDLARRLDLIASVPGIGERTALAILIRMPEIGTISREQAAALAGLAPFDDDSGKHRGERHIAGGRQRLRRSLYAAALPAAFRWNTALIALYRRLTTRGKPHKLALVACARKLIIFANTVVQRATPWTPQLPTP

SEQ ID NO: 348379 - protein, 379 aa, unidentified
MYRILKIGMDVHTTNFTLCALESKFGEEDAVLANITVGPDHKNVLDFIKRIKEKMDPKGNDKIDIECGYEAGCLGYSLHQVLTACKLKCTILAPTTMHAEKGPRIKTDRRDAKLIAQCLSNGGYHAVHIPTEEDNAVKEYVRMRDDHKIALKKLKQQTNALCIRFGFFYDGTKWTGMHLKWLRALELPELIRETLNEYLATYEELTTKIARFDQRIQEIASQERYQEKVRKLECFLGIKTHTALSLIVETGDFIRFRKGNVYAAYLGLAPGEHSSAESGGRLGITKAGNSHLRCLLIEAAGGICKGQIGKKSKDLIARQAGNPADVIAYADKANTRLRSKYYRLTRHGKKRNVAVAAVARELACFVWGMMTDNIYGNAA

SEQ ID NO: 348380 - protein, 340 aa, unidentified
MKRLYGAIDLHSNNNYSVISDQEDRVICERKLENSLEEVDAFFRPFRSELNALVLESTYNGYWLMDGLTDRGYDVKLANPSQMQPYLGLKHRDDSSDGLWLNRMHRLGVLPEGYIYPKHGRGMRDLLRKRLFLVHHRTSLINSLKHQYQTWKAENVSADAIKKLNVEEVEADFKDVFVRQGVEVLRQSAQALSSQIAGIEESLKQVLRKDPLVNRLQVLPGIGKVLAWTIRLEIGELARFREDWRPYLSYCGLVDSKHESNEKTKGHGNRKNRNRYLRWAYGEAAIVALRYPKIRVYHDRLARKKGKIKAKAILASKIARVSFMMMQAPGMIYSQEKLWS

SEQ ID NO: 348381 - protein, 347 aa, unidentified
MRFYTRQHKHYCGIDLHARKMYVCIISNRGKVKVHKNIKTDPELFFELIFAYLDDLIVGVECFFCWYWLADFCAQHHIPFVLGHALYMKAIHGGKTKNDRIDSYKIASLLKGGNFPIAYSYPAKWRASRDLLRRRMYLSRRCSELVAHIQNTNTQYNLPAFKKKLSRKYNHDGVAERFKNPAVRKSVEVDLVVIQALNQILKKLEWHIEKTARQHDYHTLYLLRSIPGIGQILALVILYEIHDIKRFPRVQDFSSYARLIKPVKESDGKWAGHTNKKIGNHHLKWAIKEAAILMLRDSHQAKYYVSKLTHRYNKGKALGIFTHKLGRAIFFMLKNKEAFDMKRFFAR

SEQ ID NO: 348382 - protein, 457 aa, unidentified
MPDYFFGIDASKGYSNFVMLDSLKHYVEDDFQLDDTFDGHQKLYSILSEFCVRHPKANIFSAVESTGGYENNWFDALVRFQTHLPIRTARLNPCGVYNNSKAELNRNITDKISAENVAKYMIEHPEKVQYRQQDPLAPLRKQWGFIKMLKKQKTQMLNQLESNLYTANPEILAYCKDNTPAWVLSLLQRYPTASKLAKAKKSSVALIPYVTPQKAKKLVETAKQSVASATDETTSQIIKAIVQQIRQLSKTIDAQTKAMADKCSIPEVELLKTFIGIGNDSAVGLILEIGSIERFKRAKHLASFFGLHPVYKKSGDGSWGFHMSKKGRTVPRQILYMVAMVAIQSNPLIREIYEKHTEKGMEKKAALGVCMHKIIRIIYGMLKHNQPFDPEIDKANRKKQNPQDEKKVGLDKSRRYQAYDVKAPISRRQAKKREERKQSQSDNIAHNGIIKASVPIS

SEQ ID NO: 348383 - protein, 281 aa, unidentified
MKLYGGIDLHSNNCVIAIINEQGETLSCKRLNNDMYVILSFLTPYKDKLTGLVVESTFNWYWLVDALMDAEFKLHLGNPAAIQQYSGLKHADDHSDARWLAEMLRLDILPEGYIYPRELRAVRDLMRKRMDIVQQSTKNLLSVQSCYMRHLGYKLGSNKIKQMAAIRKGVDTEQVHADFSSMNTALSVISNLSLIRCAQQQINAIEGAILKQTSLSPEFINLTSIDGIGNTLALTIMLETGTIKRFDSPGNFSSYCRCVKGARYSNGKKKARLIRRMVIVI

SEQ ID NO: 348384 - protein, 422 aa, unidentified
MLTTTHDNEEIIERVAALDIGKAELMCCARVPDEDHPGRRLQEVQAYPTMTRPVLGLADHLACLGVTRVVMEATSDYWKPVFYLLEAAGFETWLVNAKDVKHLPGRPKTDKLDAVWLCKVAERQMLRPSFVPPPPIRELRDLTRYRADLVAARTAEKQRVEKLLEDACIKLSSVVADIFGVSGRDMLAALVAGERNPKVLAQLARRKMRGKITVLEEAFTGHFTGHHAFLLSTMLGRVDAISADIAALDERIAGQAAPLAGAVARLDEIPGISLASAYVILAEIGTDMTRFPTAGHLASWARLAPGIRESAGKKKGKGSTGHGNAYLASVLGNAAAGAAKTPTFLGEKYRRIARRRGPKRAIVALSRSILVIAWHLLSDPDARFYDLGPAYHASRIDPERRKRTHIRQLEALGYKVTVEPAE

SEQ ID NO: 348385 - protein, 402 aa, unidentified
MNCVGIDVSKGKSTIAVMRPFGEVVVSPFEVCHTVSELSELARLLKSLDGETRVVIESTGNYHAPVAWLLHGAGLYVSVVNAMLVHDYGNNSLRRGKTDKKDAVKLANYGLDHWLTLPRYVPEEDARLMLKTCYRQYQQYSKVQTMLKNNLISLLDTAFPDANRLFTSPPRADGSEKWVDFVAAFWHCECVCGLSEKAFTAKYQKWCKKHGYNFSEDKALDIYASACGYFGVMPKMDTTKLLAEQAISQLRATSAALAALKQEMQSLAASLPEYPVVLEMFGVGPALGPQLIAEIGDVRRFHSKKALVAFAGIDAPPYQSGQIDVRSRSISKRGSASLRRTLFLVMGVLLQCAPMDEPVYQFMNKKRSEGKPYRVYMMASANKFLRIYYASVKTYLDSLEHN

SEQ ID NO: 348386 - protein, 338 aa, unidentified
MKFKRIAIDTSKHVFTLHGVDEQDRPVLRRELKRSQMESFFGKQPPTEVVLEACGGSHYWGRLLSKLGHRVRLIPPQYVKPFVKRAKNDRNDAEAIREAASRPTMPSVAVKTVDQQADVIILKHREMLVSQRTQAINALRGHAAEFGVVAAKGTVNVTALVAVLAADPTIPDTAKAMFEQMAQHIDALDQRVAALEGELAALHKANPVSQLLAEIPGVGPVSAITMALTVEPGHFASGRHFAAWLGLTPKEHSTGGKQRMGKISKAGNERLRQLLVVGATSVVRFAKPGSKSASAWLLQLVERKPRKLAAVALANKNARIIWAMMSRGEAYRRQPVAA

SEQ ID NO: 348387 - protein, 363 aa, unidentified
MRSVPHDAEAVYVGLDVHKDSITAGVLQPGRQTPELERFFHDEVSVRRFLDRLGDRRRLRVCYEAGPTGFELARLLEALRVDYLVAAPSLIPRAPGDRVKTDRRDARRLTRLFQGGQLTAIHVPTRQEEAVRDLCRTRTDMVIDLGRARHRLSKFLLRHDHPYRGGTEWTDRHSRWLTGIRFQDPALRATFGHYRGVVTTRTAELRAVETDLVPWCDREPFADAVHRLGAYRGITHLGALSIAAEVTDWRRFPKAGTFMGFCGLVPSEYSSGTHTTRGHITRTGNTNLRTHFLESAWSYRHQPAIGLTLARRHQGVEPHTLARAWQTQLRLCARFQRLAHRRTPPSSSRSPSPENSPGSAGPR

SEQ ID NO: 348388 - protein, 423 aa, unidentified
MKTVYPICCGVDVHKTFFVATLITTQGMEPRYQKRRFSTFNNQILAFKRWLLDNNCRDVCMESTGKYWVPVFNLLEDSIRVTVATPKWVKAVKGNKDDVKDSKWIGDLFRIGLVPGSFIPRKDIRILREHTRYRFKLVSCKSSEKNRYQNVFTVCNVALDAVVSDMFGKSASSITDYITSSDTFDPAHCVSLLQRTLKKKADEVVESIEGFQMSAPQKQRAKMVKEHYDFLVAQIQKLDAAIDRLAAPYEGAISLLCTIPGLDRQSAITILSEIGADMSQFESSKKLCRWAGLTPGNNESAGKKKSVRITRAGVYLKPALVEVAHAAVKSKQTPYYKIKYEQILKRRGKKRAIIAIARMILTAVYHMLSTGEVWNPCDLKQIDMPPELRERELQKALRKAAKLLVSHGIVQQDAVVFREPLAA

SEQ ID NO: 348389 - protein, 309 aa, unidentified
MSIHVGIDTGKSMLDVGFYPDKRCERFANTAEGHRALLLALAPLDVPHIAIEATGGYERGIVDALAQAGYCVTRLASHRATAFARAMGSFAKSDALDAQVLARMAAHITPQPYEVPAAERAELAELVRCRLQMVSQRDDNKRRLLQTRLATAQRALRGMIEAASMQIRELDRCIATATKAADPASRLREVPGIGPVAEATLIAYLPELGRLTRQQIAALVGVAPYIDQSGCRNGARRVRAGRWIVRRAMYMAAWAAIRTKGSALGERYRALRARGKVAKVALVACMRCLITAINAMVRDQTGWRQPAAA

SEQ ID NO: 348390 - protein, 338 aa, unidentified
MKLYGGIDLHSNNSVIVLLDEEDRTVYRKRLGNDLGMILEELAPYQTSLEGLVVESTYNWYWLVDGLMDSGYRVHLANTAAIVQYEGLKYTNDDSDARWLAKLLRLGLLPEGYIYPKKERALRDLLRKRSQLVRQRTSNLLSVQNLLARNCGDSLGANAIKRLTLDAVDELLPEPHLALAVKSNVVVMQTLDEQIKELETVIKVHVRPRPDFQSLLTVSGIGDILGLTILLETGPISRFPQVGDYASYCRCVGSEKLSNGKRKGRGNTKNGNRYLAWAFVEAAHFAVRYDPQIKRYYQRKLSRSQGIVAIKTVAHKLARACYYVLRDRVPFDVHKAFA

SEQ ID NO: 348391 - protein, 352 aa, unidentified
MEEVTTTRLKGQMVYCGIDVHKHSWKVAILKNGQIVKVFSQQPSIGQLVAHLRQNYTDCEFLLGYEAGFCGFWIAEELKNLGMECKVLHAADIPTTDKERRQKTDARDCRKIAICLSNPSVSSIHVPEKDLQYDRSVVRSRIKISRDGTRSRNRVKAHLYYYGLPLGDEIPKYWSKGYLDKLRQWSIEKQDLALGLLLDELMALRQLKLKALQEIRKLARQERYETKIKLLMSIPGIGLCHAMCFATEIGDIKRFKNLDQLCSMVGLIPNTNASGDNAGIGRMTKRGKTEVKNLLIEAAWIAIRCDPDLKVSFERLSQKMQKNKAIVRIARKLLNRIRAVLLHNKSYKVAIC

SEQ ID NO: 348392 - protein, 347 aa, unidentified
MNIIRVGVDIAKSVFHVHGVDRHDQIQWQGKYSRSKWLDALSRKVPAGAEIGMEACASSHYWARELQRRGYHVRLIAAQFVKPYVKSNKNDRVDAEAICEAMSRPNMRFVAPKTVTQQDIQAAHRIREELVGQRTAKANQIRGLIGEYGIIAPVGIQQLRSALPGWLEDAENELTDNFRVLLNGLAEDLRHLDDRIKALDDRITESVKQDPVAKRLMTLRGLGPLTASALSGALGDGKAFRKGRDFAASLGLTPKQHSTGGRDRLLGISKRGDSYLRKLLVHGARAVLRHVDSKDDGLSHWLKGLAARKHINVATVDGFAAIHKIALKQKVRFTESMPGSSNTSFGA

SEQ ID NO: 348393 - protein, 315 aa, unidentified
MYTIGIDVSKKELVAARTTKRGIVEERWTIPNDPAAIALWLDALPHALLGAEATAEYHNELARQCIARDIPFKLLNPIVTKQFTRATVRRRKTDRSDAEVIARCLLNGEGYLLSAESLSPVRRLLRTAEKIRRMDCTLRRMEGQMRSFVKEADTGPLLRCARSVRKAAQALQKQGLAMADETQTKLLSSIPGIGKTLSATIASEIGDCGRFGSGKALVAFAGLDPRVKQSGSTLSRNTRLTKRGSPYLRRAFFLAAMIGERSDPELRAYYEKKRAEGKRFTEATVANARHVAHRVYAVLKRGTPYVKKELSTVEA

SEQ ID NO: 348394 - protein, 345 aa, unidentified
MNATTVAVDLAKSVFALAVADEHWKVVERAKLTRGQFERWFHNRAVRLVVMEACATAHYWARTLRARGMEVRLLPAKYVRAYVKRNKTDAADALALLEAARGSDITPVAAKSIEQQALQALHRLRSGWMSTRTRRINTLRGFCREFGMEVSVGAARGLAQIARLLADEHSAIPAMLRTPMRLALEEIRLMEARIEALERELAAMARQSEACQALATVPGIGLLTSTAMVAAVGDARSFGSGRRYASFFGLTPREYSSGDTRYLGRISKRGNRYVRTLLTHGARSVLRAATVARRAGRKLDRLRSWALELQARSNHNKATCALANKLARIAWAVWVKQERYQPATA

SEQ ID NO: 348395 - protein, 337 aa, unidentified
MNVTLIGIDLAKSVLQVCGVNQAGKPVFNHQVRRNRLLDKLRQYPDAAIAMEACSGSNHWGRTLIGLGFEVLLIPPQHVKPFVKGNKNDRNDAFAITEAARRPNMRFVQPRSLAQTDILVLHKVIDRKIQSRTALINQVRGFLNEYGIVVSPGKERLLKALPELLEDAENGLTGPAREVLHSLLEEWREANRQIQAHEAKLKQAAKQLEPARRLMGVKGVAEKTATAVVAYAGDGKAFKSGRHFAANLGLVPNEHSSGGKQKLGCITRRGNSYLRRLLVQGAWSVIRYAGQTTDRLSRWAAKVMERRGKHKAVIAVANKLARILWAMLYHQTEYRKV

SEQ ID NO: 348396 - protein, 381 aa, unidentified
MRFYTQQHPFYCGIDLHARTMYLCVLDQAGTILLHRNFPANPEAFLNAIKPYQGQVAVAVECIFTWYWLADTCQREGIPFVLGHALYMKAIHGGKAKNDRIDAHKIAALLRGGMIPMAYVYPQRMRSTRDLLRRRMHLMRHRAQLLAHVQNTNSQYNLPEIQKKIAYKKNRPGVAERFGDPGARRTVEVDLALIDFYDNLLGELELSITRTAKDHDSHSFYLLRSVPGIGKILALVILYEIHDIHRFERVQDFVSYARLVKCAKESAGRCYGTSGKKIGNAHLKWAFSEAACLFLHNNPQGKKLFSKLERKHGKGKALTVLAHKIARAVYYILKRQKPFDRGIFFGEATATAPENSALNPASPVSSPGTEVRGGTAKTRVL

SEQ ID NO: 348397 - protein, 342 aa, unidentified
MKHTTISVDLAKSVFEIAVSEQPGRVSERRRLSRARFLRFFAERRPAVVLLEACGSAHHWGRRIQALGHQVLLLPPHATRPYVTRSKTDRADAKGLLEAHRNEAIHPVPVKSPEQQALTALHRLRSRWLATRTARLNTVRGLLREFGIAIPVGARNVVPRVRQLVDEIESTLPEILRPVLLEACTEIRQLEQRLVAVERQLKLAARQTPVVKQLLAIPGIGLISATALVGFVGDVQRFPSGRHFASYLGLTPREHSSGCVRRLGRISKYGDVYLRMLITHGARAVLWAAKRRKQTDRLRAWALKVEALRGHNKAAIALANKLARIIWAVWRNGQVYREAHAV

SEQ ID NO: 348398 - protein, 368 aa, unidentified
MQELITGFVGLDAHAESTAIAVAEVGRTAPRFVGTVGARIVELTKALSKLGEPRSLYVVYEAGPCGYALARELIDLGYRCEVVAPSKIPRRPGERIKTDRRDALNLAGLARAGELVSVTIPDERDEAIRDLSRARVDAVRARHKARQQLKALMLRHGRRYSGKTSWSAAHERYLATVSFAHPAQDIAFTEYRQAVGEGAARVQRLSESLTREVEHWRMHSLVSAVMTLRGLDLVAATTVVAELGDLRRFAHPRELMGYLGLVPSEHTTGSRRRLGAITKTGNTHVRRVLVEAAWNYRYPARISPALQVRQERQPPEIRAIAWRAQLRLNHRYRRLKARGLQHNKICVALARELAAFVWDIGRHVTPSA

SEQ ID NO: 348399 - protein, 337 aa, unidentified
MIYIGVDLHRRFCYMTAMDATGQILNQQIVTNEATSLRGYLERWSEPLALAVESCSFWPAFAEAVESHVERLVLVHPQRVKAIASAKLKNDRVDSATLAHLLRTNLLPEAWKADRETRQLRELVRLRIDLGRQRARWKNRVHALLHAHGARSPVTDLFGQAGRAWLSTVELPEGTRPVLASCLEMIDQCSQQIRIQEKSMKACAQADPRVQWLTSIPGIGTYSALVLLAEIGPVERFADKKQLYSYAGLTPRLRQSADRKRSGHITRAGSPRLRWILVEAATVAARYSPAAQRYYQSLAERKHRNIARVALARKLLGAVWALLRHGVCFDEQVFAAM

SEQ ID NO: 348400 - protein, 386 aa, unidentified
MSKSKNNNEVVKLISDLQVINPTVAGIDVSDSEMMVAYPINSTQIEVRAFGCFTRDLNLIAKTLKAVSITSIAMESTGVYWIPLFLLLQEYGFEVYLVNAKHVKNVSGRKDDESDAEWIQKLHRCGLLSASFQPDNMMRTLRSMVRHRKNLVRMSSGYINRMQKALEMMNIKLQTIISDIDGKTGKLIIEAILGGERNPEVLADLRDRRIKASREDIIKSLEGNWTAEHLFELKQCYKLYSYHQEMIDECDKEIEKQLIEQVASKNDGLILDLPKVKRKAVKKNKVDFELTTYLKELIGVDVTEVFGISEITALTIMSEVGTDMSKWKTENNFTSWLGLAPNTKISGGKIISSRIQKKKHHAGQSFRMAANSLHNSKSPLGDFRAL

SEQ ID NO: 348401 - protein, 342 aa, unidentified
MKKIITIGIDLAKNVFAVHAVDAQGQIVWTKPVVKRPQLLELMANIPPCVIGMEACTGAHHWAREFMKFGHTVRLIAPKFVIPYRMSGKGGKNDAHDAAAICEAVIRPQMRFVPIKSMDAQAHLALHRVRQGFVEERTALINRIRAVLAEFGIVLPQKAEVIRQRTGEFLEALPGFANRVVGDLLSHLQILDDRITEYDHLLKQAAKEDARCVRMMQVPGIGPTTATALLASIGNGHDFKNGRQLAAWLGLVPGQYSSGGKPKLGRITKAGDRYIRTLLILGARSVLATASGKTDRFSQWALALQARIGYGKALVAIAAKNARILWAMLRKGEDFSLAAWCR

SEQ ID NO: 348402 - protein, 307 aa, unidentified
MVVGIEVAKAALDVAVRPQGEARQLANEAAGIAEIVGWLRALNPHVIVVEATGGYDAPLVAELGGASLPVAVVNPRHGRDFARATGRLAKTDRLDAQAVADFGQAVRPTPRPLPEEAAQALVALVERRRQVVAMRTAEENRLGATRVALVRARIQAHLAGLEADLGEIDEDVRQRLRASPLWRAQDDLLQSVPGSGPIVSLTLLAELPELGRLSHGQIAALVGVAPLNRDSGTLRGRRAVWGGRRAVRAALSMGTLRATRCNPAIQPFYDRPLAAGKAKQVALVACMHKLLTILTAMVKHQAHWQAA

SEQ ID NO: 348403 - protein, 436 aa, unidentified
MTLINFVAANQKYYAFNLLSVFIMVFWSVQYLLQHLLVQTQVSHQLLQPLILILQLPQTPQFRHARPGKFFLPVNGMDYFLPLRLTVRNVLTRRITMNIVFLGIDLAKNVFQLCGLNQAGKPVYTKRTGRKELLQTLANIPACLIGIEASTGAFYWQREFEKLGHKVKVISPQYVRPFVRGQKNDGNDAQAIAVALMQPTMQFVPPKSPEQQDIQALHRARQRIVNHRTATVCQIRGLLLDRGLPIGSAVSRARRAIPLILEDAENGLSSRMRRTIAELYDLFNDLGRRIHFFDKEIETVFRQSEACPRIAKVKGIGPKTATAVVAAIGKGTEFKNGRHFAAWLGLVPRQHSSGDRQVLMNMTKKGDKHLRTLFIHGARAVVRVATNNNDGHMNQWVNQLKERRGFNKTTVAVANKNARIIWSMLRNDTGYQVVCN

SEQ ID NO: 348404 - protein, 345 aa, unidentified
MTTKASGQKLYVGLDLHSSNVYCGIINTEGERVYKKRFPNELDEIARVLKPYRRRIEGMAVESTYNWYWLVDGLAGLGYPMRLANPAKMGAYNGLKRTDDQSDAFWIAELMRLNILPTAYIYPKEIRPLRDLLRRRAMLVAQRTQLLLSLQSMIARQTGKTVSGASLKTWTEAELNEALKDPHLLLAAKSQLNVIDSQSGQIALIEKTIRKEVKLEGRYMRLLTLPGVAFVLGATIMLESGPMERFPSAGDYASYARTVDSRRESNGKKKGENNRKNGNRYLAWAFVEAAQMAQRYYPEIQSWFDHKKAKTNRAVATKALACKLAKATYFVLKNEEDFDMKKMFG

SEQ ID NO: 348405 - protein, 440 aa, unidentified
MNQEERSRLEEFRQFRKEVRGSREYLLVGIDVAKDKHYAFFGTATGKTVFRRLAFENNLEGFRKLLGQAEAMKVQEELRKVVFGMEPTGNYHKPLGEHLIRCGHGVVLVSGVAAHENRKTLDGRWDTNDSRDAANVADLMSQGKCLFYEFPVGALKDLRNLLSLKRRLKREEHGYRVRVRNHLVAKYFPELDRYYEQSESTVLAIVRWCLAPSEIAGLEYKRFFQMVSLARGRSTQEKRLQAIWSMAVDSVGCEAGPTVEFEAQVMVEGLKQIRERIRQIEEKIHEICSQFPEYEYLLSIPGFGRDVSAKVLGAIGDPYRFESGRQVLKTAGFDLSAERSGKSSERAVPVISKRGKADLRNALYQAALIASVWNPDFIGYYTEKLRGREREPGIKIKMRVKLAAKMLIVAWTLMKKKEPFDPSYLRAAGQSFSAGGRRER

SEQ ID NO: 348406 - protein, 357 aa, unidentified
MGNHIFIGLDVHARTVRAAALDADTGELRQAGFTAAKDPLINWCLSFPGPASVVYEAGPTGFGLARALSEAGLEVTVAAPSKLPVEPGDRVKTDKRDAIKLARWLAAGIVTPVWIPDVATEAARDLYRCREDIQLAGKAASMRLTHFLLRHDLVWDKTAWTREHMAWLRHQRFDQGQDVFDEYLEIKVESMTRLARVEQLINQEAALPRWAGVVAALKCLRGIDTLTGYGLAVEIGDWQRLAPNSVGAYLGLVPCEYSSGQTRHQGSITKTGNEHVRRLLVEAAWNHARTYRADSPKLVRAFAAVPAPIAARADYANRALKRDWDNFKLRKQRSVVAAIAIARELAGYCRDLAVMTC

SEQ ID NO: 348407 - protein, 387 aa, unidentified
MSQTIATLMPAAVDYETTLILAIEVSNKSWVLAAQVPGLPHTKAKRTIDPEAKALQAAIAGYRARAAAIGRSIERVIAVYEAGWSGFWLARWLMSHGVEVHVVQPSSVPVDRRARRAKSDGIDSELLLRTLLAWLRGEPRVCSMVPIPDEADEDARRCVRERTELISERVGLTNRIGAILATLGVSDYNPLLRNRSRRLAELRTALGEPLPTNAHAKIKRLLVRLELVLTQIAELERERDAVMETEASDSASRMIQQLTALRGIGVQSATVLVREAFVRGFANGKALGSYAGLASSPYSSGGIDREQGIGKAGNRRVRTVMVELAWLWTRYQPGAAQVCWFRERVGATGRRARKIMVVALARKLLIALWRFVIDGVLPEGAVLKPAA

SEQ ID NO: 348408 - protein, 527 aa, unidentified
MSFHVRRPGRQLNKTKPSGKRSLQKPSGVISPRVQKVGGEHFAIICIDPAKHRSEWLMADYFGNVLIEPQTVEHEAVFFQLAIELIRQTQQEHDIQDTIVVVERTGNYHLPAKRAFARAGFETRVLHPFATRQYRMPANPGNKTDETDLYAQHRAAVAGFGLLERECDSPYRDLQLLARHRRNLVEKASSLACQIREHLHLSMPGYAGLFDHLFELPSGLMIAAQGESPAKLIELGREQLSKRLDENQIHHQLRTIDKVLAWATQAADSPIHDGPMHHAIWTDLHELYQLIQRQIAELERQLAHHVTLTPYVRLMAIPGINVVSAAELAAEMGAISGYANANAITGRAGLFPSRYQSDQTDHNSGPLVRHANRRLRCVLMRIADSLACHCRYYRGQEEVDKARGVNSRASRVKIAKRFSRLVLACVGGDQPMRHPCFQKPDSILEKLRRFHLEHQTPMDVLLADLVATVEQLPYHTRDHEAEIVASVLQKQQQRRRGAERIGDVLPAVLARLNVRTAKNETVNGDRS

SEQ ID NO: 348409 - protein, 343 aa, unidentified
MQIRSVGIDLGKTTFHLVALGDNGKVLLKKKFTQKQLIAFTANMQTCLIGMEACSGSHFLGRALREQGHDVKLIPAQFVKPFVKSNKNDFIDAEAIAEAVDRENMRFVPIKTDDQLDLQALHRVRDRLMARRTALINQIRAFLLERGIVFAKSPIRLREALPEVLENVNENLTPRMRNLVAMLWSEWKDLELQIVQMNDEVERIASSDAACRRLRQIPGIGPLVATAIVASIGNGAAFRKGREFAAWMGLLPKQHSTGGKARLYGISKRGNSYLRKILIHGARAVVLRSKRDRIAMGAWMTSLETRAPRNVLIVATAHKLARIAWAVLSTGQDYRAVPEALTV

SEQ ID NO: 348410 - protein, 394 aa, unidentified
MFYLGIDIAKRTHVASVMDDAGKVLLKGFSFTNTLEGAQSLLTRLHAISPEPEHFLIGMEATGHYWLAIFSFLDEAGYLVHVINPIQTDGWRKGTEIRKRKTDIIDSVLIADLIRYGSFESTSLANEDMFSLRQFTRYRSYLVGTAGDFKRKIIAVLDQVFPEYDTLFSKVGMFGKASKAALLEYSTPDAFNDITADDLAETLRLASCNKVGLAKAEALKEAASRSFGIRFAQDAFTFQLRSMIEQLNFIEIQIKQTEEEIKQLMDSINSVIETIPGIGSILGATILGEIGDIRKFSNPKKLVAFAGIDASVSQSGEFEGTHNVMSKRGSPYLRKALFQAALVASRSDRVMKAFYDKKRSEGKHHLTAAGAVSRKLCYIIHAILTKNEPYEIRQ

SEQ ID NO: 348411 - protein, 342 aa, unidentified
MAIIGGFDLHRRQLTYDYLDVVTGQVDRGRVVPADRGQLRSFLARFEGQGEVAFAVEGCTGWRYVVEELERAGIGAQLAEPAETAAKRGPKRRAKTDRSDARHLRELLGKGDLPQSWIPPVQVLEARARVRLYKDLEEERTAWLQRVQATLYHQGVPVVASLTSAAGQARLATAELSPAGQQAVQVGLRQLDRLTAELDPLRADLARFSRRQPGCRALRTTHFGIGPITSVAIWAEMGDTRRFSSSDDAVRHAGLDITVYASDSKRARGRLARQGPATRWALYEAAVCASRPNSPDHAYFLAVKRRADGHLGVISVARKLARRVHHTLRALGDQAFQPVPVV

SEQ ID NO: 348412 - protein, 438 aa, unidentified
MSNKVIFNLDELFISVGIDVGADFSWMSIALPNQQFVGKPYKILHNSIDSLTTAVSKIKEAEELYSLESRIFLESTGIYHYPLFCYLRDKGFNCSVINPIITKNSTNINIRKVHNDRFDSKKAALVGLKPDLKVSLMPSDLALNCRNLCREYYDLMDNRSAYVNKLQGELRIAFPQYLGIFSKVTINTSLTLLETYTSPSAFLKADKQEIIDIIKSTARFGLTYAQNKYNAIIQAATDANQFGYIIDSNIKRIRLYISFIRKYDEEINSILESLHELVDANEDSDFVKQIHLIETFKGAGFLSAVSIMGEIGDFSAFSKPKQLFAYFGLDPAVKQSGKFEGTKVQMSKRGSAIARRVIHTLTLQSISISRNREAKNPVLREYYLKKCDSKPKLVAMGAVSHKVCNMIFAILRDNKPFKIIAPQEHIQQYNSAKCDIAA

SEQ ID NO: 348413 - protein, 409 aa, unidentified
MLFIGDDWAEDHHDIEVEDEQGRRLARRRLPEGVAGIEALHALVADHLPDDAEANQVLVGIETDRGPWVQALIAAGYTVYAVNPLQAARYRDRHGVSGAKSDAGDAHVLAELVRLDRAHHRPVAGDSAIAEHVKVLARAHQSLVWSRQRQNNMLRSMLREFYPGALDAFAGELDGRDALAVLAIAPRAADGRRLSRARVETALRRAGRQRYLATRAAEIVAALRADQLPARAGVEDAYGASVRALVAVISELRHQTLALAGAVEAGFGRHPDVEIYLSQPGLGPVLGARVLAEFGDDPARYADAKARRNYAGTSPITRASGKSSAVLARHVRNRRLADALDQQAFAALQASPGARAYYDARRARGATHHQALRALGNRLVGVLHGCLRRHQRYDEARAWQQHAVVPRAA

SEQ ID NO: 348414 - protein, 455 aa, unidentified
MLRAKKAKKLQTVKGVELKIVNPNAAGIDIADSEMQVCVPADRDGDNNRRFGSFTKDLNLISEWLHTCGITTIAMEATGIYWVPIYFKLESEGFDVLLVNAREVKNISEKKTDEADAEWLMLLHSYGLLKPSFQPEGSARQIRNLCRHRNSLLRSAAKEVLHMQKALEQMNIKLTNVLTDIVGKSGKRIISAILSGNHNPESLAQLADGRCKRSKDEIALSLEGTWDSDHLFELKQSYELYEFFLQKVAECDTEIEKMLRKYTAKIDMSIADFIRSKKTIHKKNKVGFDVESYAYGVWGVNAMNIPGMSAGSILQLIGELGFDFIEKFDSPSKFCKWCNLVPNNRISGGKLISSRVPKRKNPVGQVFRQCANATRDMKNSMGFYFRRLKSRGGHMSAIVATAHKIAEIFYVMVKNKIEYNENKVGLNEEELLRRKIERAQRTLNILNEKLYGTAV

SEQ ID NO: 348415 - protein, 428 aa, unidentified
MDEVETIRLEQFRQLKKEIRGSERHLIVGIDVAKDKHHAFFGTATGKTLLKRLVFENTLEGFEKLLLHVEAVKGKHALEKEVFGFEPTANYHKPLGEFLIKASHMVVLVSGVAVKRNRELLDGRWDKHDTKDSSNVADLISQGKFMYYDYPVVPLRDLRNLLSLKRRWKRQEHGLRVRLRNHLVAQYFPELDRYYRQWGSEGLALARWCLSPSVISGMDYEQFTRLVAPGTRRIAQRERLKAVWQRAARSIGCEVGEALAFEAKMMVEALAQVRESIDAIDGKIRDICVRFPEYHYLLTIPGFGPDVSSKVLAAIGNPFRFGNHREVLKMAGYDLSANRSGKNADGITPVISKKGKAELRYALYQAAHIAATGNQYFVMYFTNKLRGRERERGIKTKMKVKLAAKLLIVAWTLMKREEPFNPEYLNIE

SEQ ID NO: 348416 - protein, 365 aa, unidentified
MQKISTTRTNGRKIFKGQLTIGLDLGDRSSSYCVLDEAGKILLEQKLPTTQETMKQIFGRMARCRIAMETGTHSPWVSRLLTALGHEVIVAHAQNVRLIVKSRRKDDRIDARTLARLARIDPELLSPVRHRSAQAQLHLTEIRARAGLVSARTALINAARGLVKSYGERLRKCGSFQVSREIGSGLSTELREALQPLLREVESLNERIQEYDRRIEKMAKERYPEVALLKQVKGVGDVIATTYVLTIEAPHRFRKSRDAGCFVGLQPGRRNSGDSEPQLHISKQGDEYLRTLLVQGAHYILGPFGEDSDLRRWGQKLAERGGKNAKKRAVVAVARKLAVLLHRLWVSGEVYEPLRNSHKAMSAAA

SEQ ID NO: 348417 - protein, 474 aa, unidentified
MLWTAPAPRHRSAVDWLSQPERFKEVRQATTVAFEGIGEDRRGNADKVDPGIGRTRMGQRIFECVLSIGTRSAHSIMASGFTAAQTGRTHDRTRPMLQQLRKFLPRRRQWYGPRPSSRSNVGRELQRGRIIMQVVRIGLDLAKYVFEVHGVDGQGNVVIRKTLRRGSMSTFFANLPPCLVGMEASNGAHYWARVLTELGHKVRLISPQFVAPYVKSNKNDRNDAEAICEAVGRPTMRFVPPKSPEQLAIQALHRIRQRLVQSRTRLVNQIRGILAEQGIVIARDIWRLRRALAEITGHATDDLNKLVRVLILETQAELMELDRRIASCDRRIRELYRTSELCQRLGEIEGIGLVTATALVAAVGDRSCFKNGRQFAAWLGLVPKQRSSGGRHRLFGISKRGDRYLRTLMIHGARAALGKARGKQDPRSRWLASLRQRRHANVAAVALANKNARIVWAMLAGNVSYEPERSVQAA

SEQ ID NO: 348418 - protein, 344 aa, unidentified
MDHFAGLDVSVKDTSVCIVDDAGKIVREVKVTSEPAALLAVLKNPAYRFKRIGLEAGPLSQWLFSALAEAELPVICVETRHMHAVLKAQINKTDRNDARGIAQMMRVGLYRPVHVKTLRSQKLRMLLTHRQLLQSKAIAIENDLRGTLRNFGLKVGVAGKVKFEARIRELVANLPDLAALIEPLLIVRQVLREQIVILHRRLLAIVRDDDVCRRLMTTPGVGPVVSLTYRATVDVPARFRKSKSVGAVFGLTCSKYQSGEVDRNGRISRCGDEMMRVMLYEAAQSMLRSKKWSWLKAWAMQVAKRRGMKKAIVALARRLAVILHRIWVDGTEFRWTREQAAAAA

SEQ ID NO: 348419 - protein, 366 aa, unidentified
MKKISTMQAFGNEISKEQKLTIGVDLGDRWSFYCVLNEAGKIILEQKVATTPEAMKQPFGKISRSLIALETGTHSPWVSRLLTELGHEVIVAHAQKVELITKSNRKDDRHDARTLARLARIDPELLGPIRHRSAKAQIHLTVIRARAELVSARTALVNAARGLVKSFGERLPKCGTYQVNEKLAEGVSAELRDVLAPLLREVESLNERIQEYDERMEKIAKEVYPEVSLLKQVKGVGTQIALTYVLTIEDPYRFPKSREVGCFLGLRPGRRNSGESEPQKKISKEGDRYLRTMMVQGAHYILGPFGEDSDLRRWGLKLAERGGKNAKKRAVVAVARKLAVLLHRLWVSGEVYEPLRNSQKAMRAVA

SEQ ID NO: 348420 - protein, 345 aa, unidentified
MQDDLVLGVDTHKDLHVAAIVDAVGRLVATAEFPSSDSGGHQMLSWVRRYGRLRRAGLEGTGSYGYRLAKLLQANGVETIEVNRPDRSARRLRGKSDPIDAEAAAHAVLSGRATAIPKDREGPAGALRALMVARRSAVKARTQATNQIRALLVGCDDDLRGRLSELRGRTLARGCARLRSCEGTRSALRSLGRRWLNLDREAGELEDEIRLIVTRIAPRLLDRPGVGVLSAAQLLITAGDNPRRLRSEAAFAALCGASPVEASSGRTSRRRLSRGGDRTANAALWMIAHVRMVRDERTRTYAASRTQRGNNRKEIMRLLMRYIARELYPIILESLTPEPALDEVA

SEQ ID NO: 348421 - protein, 402 aa, unidentified
MIFINCLGIDIGKSESVVAHYKDEVLVKEMVIQNNQNGYRYLKNYIKHLDSLFILFESTGIYSRGMKRFCEIHKIDYLEMNPLEAKFKTSSLRSWKTDKSDAHKLALLAFRMKDSKVQRQSEEIYFELRERARFHLEMEINQNRLKVELVETLHQTFPGLEKLFTNRYSKIALNIAKAFPHPDFVSTLTHDELVEKVLHSTDKGISVNKAHKYVQKLIEIQINSFPNVHKSSFLLQKVQYLCDKLLIGIEEMKEFDQEMIDLAKNTTEFENIISIPGIGELTATLLIGELGNIREFKTNKQLNAFVGIDIKRYQSGTSKSRDTINKRGNKKARRLLYLIIMNIIRGRNHYQSHIVDYYYKLREQPHGKTHKTAVIASINRLLKTIHYLIVNNKLYDYQKAPH

SEQ ID NO: 348422 - protein, 340 aa, unidentified
MNTMTLLGIDIGKHSFHLHGQDAKGHQVLRKKTSRSQLLGTLAQLPACTVVMESCGGAHWLARQVEALGHEVKLIAPQYVKPFVKGNKNDFIDAEAICEAASRPAMRFCSIKTAEQQTLSALHRVRDSLIGHRTVATNQIHGFLLEFGISLPIGATALNRVPALLDDPQHPVPLRLKSVVMRLHRQIQQLNDEIKDIESDLKQQLKEDDAGNRLQSIPGIGPTTASAVLADVGDASNYRSGRDFAASLGLVPRQYSTGGKTVLLGISKRGDKHIRQLLVQGARSVIQHIDKREDALGPWVRELLTRRHSNVVACALANKLARIVWAVLAKGGQYDPHPNA

SEQ ID NO: 348423 - protein, 427 aa, unidentified
MNEVDAIRVEQFRQFKKEVRGSRQYEVVGIDVGKEKYHAFFGTAMGKTLLRSLVIDNDLDGFIKLTEQAEALRVQEGLSKVVYGLEPTGDYHKPLGEHLIKCAKLVVLVSGVALRRNRELLDGRWDKHDVKDAANIADLMAQGKCMFYEYPDGNVRDLRVLLSLKMRLRKQEHGLRVRIRNHLVAQYFPELDRVWGQSKTENLAIVRWCLDPSVVAGLELDEFVRRVCTRDRGVRQHARLKRIWKIAVDSIGCQVPEAVNVECKVVVEGLRRLREEIKEISEEIHRVCLRFSEYPYLLSIPGFGPEVSAQVLGAIGDPHRFQNAGEVVKMAGLDLGAHRSGKTAETAVPVISKRGKAHLRYMVYQAALVASSPNRPLMKYYTKKLEGRQQERGIRTKMRVKLAAKLLVIAWTLMKKREPFDPKRLTI

SEQ ID NO: 348424 - protein, 436 aa, unidentified
MTLINFVAANQKYYAFNLLSVFIMVFWSVQYLLQHLLVQTQVSHQLLQPLILILQLPQTPQFRHARPGKFFLPVNGMDYFLPLRLTVRNVLTRRITMNIVFLSIDLAKNVFQLCGLNQAGKPVYTKRTGRKELLQTLANIPACLIGIEASTGAFYWQREFEKLGHKVKVISPQYVRPFVRGQKNDGNDAQAIAVALMQPTMQFVPPKSPEQQDIQALHRARQRIVNHRTATVCQIRGLLLDRGIPIGSAVSRARRAIPLILEDAENGLSSRMRRTIAELYDLFNDLGRRIHFFDKEIETVFRQSEACPRIAKVKGIGPKTATAVVAAIGKGTEFKNGRHFAAWLGLVPRQHSSGDRQVLMNMTKKGDKHLRTLFIHGARAVVRVATNNNDGHMNQWVNQLKERRGFNKTTVAVANKNARIIWSMLRNDIGYQVVCN

SEQ ID NO: 348425 - protein, 372 aa, unidentified
MSANGITWVGMDAHKNSIKVAALFPDRPDFVEWTEATTPEAVRRLARKLLREAPGEVRGCYEAGPTGYALHRQLETAGVICEVIAPSLTPIKPGSRIKTDRRDARKLAELLRAGLLTEVHPPSESEEALRDLCRCRDDARTDLLRARHRLSKFLLRRHCMYRQTKHHWGSRHLTWLQELRFDDPVSQSTFDSYFLSVQQLDERLHQLDERLAEYGGQEPYREPVAWLRCFKGIDTVTAVSLIAELHDFRRFRSARELMSYVGLVPSEHSSGDRERRGSITKSGNRHVRRLLVEAAWHHRHRPGLSAPLRLRREGQPARVLAIADRSQERLCARFRRMTARGTCQPKTIVAMARELVGYLWAVLHPAAAAASH

SEQ ID NO: 348426 - protein, 428 aa, unidentified
MKKHSFSKLEAITPKTLIVGVDIAKNIHWARFTDYRGIPLGKALKVLNNKEGFENILTRIKDVCKQHDLSNVILGLEPTGHYWKPLANYLVGQSIKVVLINPYHTKKAKELDDNSPTKNDKKDALTIARLIRDGRFSQLYLPQDVFAELRVLSNTRCSLMKRHNAIKNTIKAVLDEYFPELVTVFKYPLGGKACRQILKSCPFPSLILELGKDGVLVQIKKAVKKTIGQKRVEKLLRTAKDSIGVTYGIQSARLKLTLLLGELELMENQLAHIETAMEQTLANTGFKEIILSIPGVGIITAAGFLGNTGDPLRFTHPRQISKLAGYNLIEDSSGENKSKTTISKRGRKQLRNVLYQMARTTVAVNSEMKELYRYLKTRPHNPLKKKQALVVISKKIITIIHSLLKKQDHYQAELVFNQFRLNQLKQVA

SEQ ID NO: 348427 - protein, 473 aa, unidentified
MSKGSGSSGMTRGDRRRNARRERLRGLLPRDGAVIGIDLAEDKQALAVIDHDVRVLARKTVRVKAFRLGEALDWAVGQARAKGFAAVTVACEPTGPRWMQVQRLCAERGLPLVCIQPLVSHIAREQQDYTTHKTDESDCVMIARLAVELHCYIPEELDEAWAHLRHLGRRRVQLITAATASAQRIRDFLSVAWPTVMETCAQPLGSRTWLAALQLVTSRCGGRPEKLAAMGQEAFTALVRGAVADWGGKKVRGTISARVFAALADTEGVVAWSRRGLLRRVAEELGDLQRTRARLRAVEAGMVTVLDELGLSRLADIPALSAVGAAAILAETGGPRRYDGSSSLVKHAGLSPSDNASGAFLGDAHISRRGRPGLRLTVWRAVWPMLQFNPVMAAKYQAMTRAADAAAADAGPQQGTAAQAAARARRAKARVACAASLLRWIYCMVVHETGWDPGVASGAAGWHDAPQVQAEAA

SEQ ID NO: 348428 - protein, 435 aa, unidentified
MNSVGIDISKGRSTIAVMRPFGEVVISPFEVRHTGSELSKLAKQLKSLDGETRVVMEATGNYHASVAKLLHNAGLYVSVINAKLVHGYGNNELRRVKTDRKDAVKLANYGLDRWLTLPRYIPEEDTRLLLKNCYRQYRQYSKVQTVLKNNLISLLDTVFPNANRLFSSPIRGDGSEKWVDFVAEFWHCRCVSEKSERAFTSKYLRWCRKHGYNFREAKAHTIYAEASGHIGVMPKSETTKLLVEQAVAQLRATSTALAALKHEMQSLASQLPEYPVVMDMFGVGPTLGPQLIAEIGDVRRFYSKKALVAYAGLDAPPNDSGDVTGRHKSMSKIGASSLRRTLFLVMSVYLQTAPLDEPVCQFMDRKRAEGKLYRVYMMASANKFLRIYYATVKRLFGVIGTHRLIFAIKPLAGRRFILRCKAAWFGAAFLQAALP

SEQ ID NO: 348429 - protein, 343 aa, unidentified
MKLMRVGVDLAKAVFQVHGVDRNEKVRLRRKLTRANWFEVLLEAVEPGCVIGMEACGGAHHWARAFQAHGIAVKLIAPQFVKPYVKSNKNDANDAEAICEAMSRPNMRFVAVKTIEQQDIQAVHRVRFELSNQRKAKGNQIRGLVAEYGLVAPKELWHLRGAIPVWLEDAENGLSARFRHLLNGLWQDLLALDQRMTELDREIALIANADPVAKRLQQLRGVGPMIATALVATVGDAKQFANGRQMAASIGLTPRQNSSGGKERLLGINKRGDTYLRTLLIHGARSIVRTAKGKDDRLSQWVTRIAETHHYNVAAVALANKTTRIAWSMMKHGTEYQADQTAA

SEQ ID NO: 348430 - protein, 346 aa, unidentified
MSEFYEGQQFVGIDLHRRRSVLVRMTETGERLETVRISNDPEYLRQVMARAGESPEVVLEATYGWYWAADCLAELGASVHLAHPLGVKMFSLRRVKNDERNAADLADLLRMGRLPEAWIAPPATRELRGWVRHRAKLVGLRSNLKCQVHAILAAAGVQVPMSDLFGAAGQQLLATVGLAAESRARIDSLLRLITALDFEVELFAKLVAGRLRTHPGYQAIQAIPGVGPVLAAVFIAEIGDITRFHRPAQLASWAGLTPKHHESDTTVHRGRITKQGSRLVRWAAVEAVQRVGAHTGLGQVREQVGARRGRNIGVVAAARELTELVFYGLRDGHIRRLPAPPHTPAA

SEQ ID NO: 348431 - protein, 359 aa, unidentified
MPVTMTYVGLDVHARSIHAAAIDVRSGELRRARFGGGGDEAIAWLAGLPQPLRGCYEAGPTGFGLYRACEAAGVAVEVIAPSKTPRASGDKIKSDRKDAELLARLLLAGQLTAVTVPPPPFEAARHLARAREQVRGDLMRCRHRVSKLLLLHGRVYEGSAWTKAHRGWLEKQRFDQAATELAYLDTLSAVDGLIARKTALDERLSRLALEGDWWPTVARLRCFRGIDTLTAFVLALEIGDFGRFQRPAQLASWLGLVPSLDQSGESRRQGAITKTGSGYARRLLVEAAWHYLPQPGPGVALAERRRGQPDHVIQIALRAQRRLHRLHQRLRERRKPGNVTTVAVARELACFLWAAATAD

SEQ ID NO: 348432 - protein, 324 aa, unidentified
MSSKTNMYLGVDVAKDTLAVCLMDAHKTVQLRATYANTPPGFRQLWRALGGMDPAALHIGMEATGIYWEALAQWAHAQRAVVFVLNPARVKAFSRAEGQRQKTDPVDAGVIARFILAQALHPWTPPAPALRELTALVRRLDGISAMLRVEKNRAATATLPVVRASLRRTSAALKKEYAVLARAGERILAATPALAHDLALLMTIPGVSRITARRLLVFLRRTPYETARQAGAASGLTPTHCLSGTSIHKKPHISRLGDAALRQALFSPAVCARRYNPRMVPWAQALTQRGKCNKVVICAIARKLVHCAFGVLKHQTPFQPPQAA

SEQ ID NO: 348433 - protein, 426 aa, unidentified
MARYVGLDVHKRTITACLLDGEGRQVRRATFDCTRTAIAQFAKEQLEHSDVVALEATTNSWAVAEILEPYVARVVVSNPLKTKAIAESTVKTDKVDSQTLAQLLRVGFLPEVWHPSGPFQLLRQLTVFYASLINDRTRVKNRLQSLFHRRLIQCPVSTLFSQAGLRWMESLEMSEHDRLILELAKQQVFDLNAKIGEVEQRIARLAQNDYSIKLLMTLPGVSLMTAACLVGAIGEVARFRDGDHLAAYFGLVPRVKQSADHCYYGSITKVGNNQVRKMLVLAARNLRTHPGPLGAYFRRMAKHKHINLAATATARKMVTVAYLILKNGEPYRYAQPATTSQKFGQLHMLATQSKRVAVRVEAQPGEPVPPAGYRLERKPSLDQVLVRDGLSAIRWQAVPKGEQVVIEKFRDYIEGISKPSVTVRKG

SEQ ID NO: 348434 - protein, 344 aa, unidentified
MTIYCGVDFHARMQTVAYCDSQLGEIHILDLHHQTDDLRGFYAGLKGDVIVGLEASGYSPWFEQLLEDLGHQVWIGDAAEIRRLAKRRQKNDHRDAGLILDLLINGGFPRLHRSSADSREILNQLRYRSRLVKVRTMAKNNLQALAIRSGLAAKANLLTRRGRDRLSALPMSQSVGLQRDHWLELLKGLDGKVAEVDDWLKQQAKANEQVSRLQTHPGIGLLTSLGLVHTLDPVSRFSNGRKVVAYLGLEPMESSSGEKRRMLSISKAGSRLLRYLIIEAAHTAVRYDPDLKRFYLRLLRSKGKHKAIVAVGRKLVIRGYIMLRDGIDYAEFVRRGVEARPARD

SEQ ID NO: 348435 - protein, 423 aa, unidentified
MTQKIDYAAFIGLDWEDKEHDVCILPSEGGIQCHQLEQSPETIAAWVNKLRARFNGRPVAICIEQSRGALIYALMSYDFLVLFPINPKQLSDYRAALYPSGSKSDPNDAELLARFLRDHIDKVRSWRPDDVTTRALRFMTEQRRKWVNDRVALTNELEQRLKESYMLAFELCGQDLWSESFLSLLEKFPSQRELQRASPKQLANYLPKKRRLPDDPPDEELLRKRIDFIRKAIPITNDSAVLEHGRLVVANLVIMIRSLNRSITECEEKIAELFEKHPDSALFSSFPGAGAALAPRLAAAYGTDRDKFQDAQDMQQLSGIAPVTRSSGKTKVVLMRWACPKFLKQTFHEFAGCSTKHSRWAKAYLAMRKAKGHPHQEIIRGLAFKWQRILFRCWKNHELYDEDRYIQTLVKTNSTLIPFLSKN

SEQ ID NO: 348436 - protein, 296 aa, unidentified
MMLIGVDYHPSFQTIAFLIEETGEYEERELNHSDGQAEKFYRDLKQRGICVRVGMEATGHSRWFERLLAELGFELWIGDPAEIKAKRVKKQKFDREDARLLLRLLRENNFPQIWVPDAENRDLRQLLWHRHRLVQMRTRIMNQLHALAMNEGYCLKKKLFSERGRAQLEKLALAPWASRRRQELLELLDRMNPTIEELTAAVEREARKRPEAMRLMTHPGVGSLTALAYVLIIGTPTRFQRGKQIGTYVGMIPCEESSARKQRLRHISKQGNSLLRFLLVEAAQAEARVHPDWRRR

SEQ ID NO: 348437 - protein, 373 aa, unidentified
MKKVRFLGLDVHAETIAVAVAEPDGEVRSLGIIPNREESVRKLVKKLGPAEQLQTCYEAGPTGYILYWQLTALGVKCEVVAPSLVPVKAGDRVKTDRRDAMKLARSYRAGDLTAVWVPNQEHEALRDLVRAREAAKQDQLRARHRLSKFLLRHGRRAPAGIKVWTQKHEEWIKKQVHFEQPAQEYTLWDYLHEVEHMDDRILRLERAIAEAVKLAPPRMQEVIQSLQALRGIAQISAVTVVAELGEISRFEGARQLMGYSGAVSSEHTSGKRMQRGAITKTGNAHLRRIAMEAAWAYRHRPAIGPRLRKRQEDLSEEVKEIAWKAQHRLHKRYRTLSAAGKEKQKVITAVGRELLGFIWAIGVQAERNSKRVA

SEQ ID NO: 348438 - protein, 338 aa, unidentified
MSTIKTIGIDLGKSTFHLVGHDYSGRELYRHKFTRAKLIQFISVHEPATIAMEVCCGAHWLARRCQEFGHNVKLIPPQYVKPYVKSHKNDFIDADAIAEAATRPKMRFVTPKSEQAQLGSVIRRIRTGYIRERTAVMNRISSILTEFGFSFPRGHANMKQLFQWLADTGQPVPPLLIFELKEQLDHYNHLNDKIKEQDKKIETLNDDNELFTMLQTIPGIGPMTAACCLSAVSNPKDFSNGRNFAAWIGLVPFQYSTGGKPRLLGISKRGNKELRELFVHAARSVLWRDTTAEKYFGPWLTDLKRRKPFNVALVALANKLARIAWSVMTTHKTFEIRV

SEQ ID NO: 348439 - protein, 346 aa, unidentified
MMIVGCDFHPSWQEVAWLDDETGETTEQKLVNGNGEAERWYGQLPVPSLIGLEATGNAQWLVEMLQQLGHEVWIGDAAQIRASYVRKQKTDKRDAQHLLRLLYEGRFPRLWVPSSEQRDLRQLLIHRDKLVQIRSRVKNGLQHLAMNRGVQKKHRLWSVAGQKALRELPLLGWSACRRADLLRLLAQMDALIAPLDQAVKQAAEQDRQARLLLTQPGVGPITALAFVLTIGEVARFRRGKQVASYLGLIPQERSSGGRQRLGAISKQGNRFMRMLLVEAAHSVVRLDEGFRKQYAHRCHGKPKGVAKVAAARRLAVRLYWMLRTQTPYPEIVRIESSPRVPLVGGS

SEQ ID NO: 348440 - protein, 371 aa, unidentified
MVQMRTKPSYQLFVGVDIAYRTFTVASLAPGAKPKREPKAYTQTTQDFARFQKRLQEHGMEPAAILVVMEATGSYWVALATCLHQAGYAVSVINPAQAHYFAKAQLRRAKNDALDAELLAELAQALLPACWTPPPQIYHELHQRLAQRANLLALHTQVSNQLHALSVSSVLIPAVRKRLVQLIETIAQQLAEVEAELLDLVKIEEDPPEVAARQDGQLPTDELTKKWKAAIALLLSIPGIGWLTACWLVVTTLNFTLCETAEAAVHFVGLAPMVHLSGTSVHGRAQISRSGHGRVRSHLYLATLSAARFNPIIKPYYDRLRAAGKPMKVARCACARKLLHIAFAVVTRQQAFDPDYQSAGKSQPELAPTAG

SEQ ID NO: 348441 - protein, 366 aa, unidentified
MSSVTPTAGPIHLGMDTSKNTIVVGILMPGDEVPVIDRIWNEEGSVRHLVSRLGDPAALRACYEAGPCGFELHRLLASMGVACDVVAPSLIPRRAGDRVKTDRRDASRLARLHRAGELTPVRVPSAAEEAVRDLVRVRAALLADRKRAQQRLTAMLLRHGRVWRSGSSWTQAHEQWIAGQRFEEPALAAALAHYRAGLDTRRAELDAIEAELAPWAGREPLAGPVAQLGCYRGIAELHSLALAAEVVDWHRFPSARAFMGFTGLVPGEYSSGDKTRRGSITKAGSEPVRTALVEAAWAYRFKPAIGVTLRRRQRGAEPDTLARSWKAQRHLHAKYKAMTARGKPQAVAVTAVARELAGFVWAEMTS

SEQ ID NO: 348442 - protein, 457 aa, unidentified
MSQTKRSRKSRDFSTVNPAAAAIDIGATIHVAAVGPNRDKEPVHTFRTFTDDLYRLADWFAGCGIRTVVMESTGVYWIPVFEILEQRGFEVMVVNARDAKHVPGRKTDVSDAQWLQRLHEYGLLRASFRPQAEIAGLRAYLRQRERLLDYAAAHIQHMQKAMMQMNLQLHHVVTDVTGLTGMAIIRAIVAGERDPNVLATHRDRRCHASVETVCQALVGNYREEHVFALTQALELYDVYQTKVTACDKQIEAILKRLKKNAAPPAAKLLPVRRRTRQPNAPAFDARAALHAILGVDLTQIAGIGPSVALKLVGECGTNLAAWPSAKHFTSWLALAPHNKISGGKVLSSKTRRTSNRAASFLRLAAGTVGRTDTALGAFYRRLSARVGKAKAITATARKIAVLFYNTLRHGMSYADPGATYYEDRYRQRVLHNLQRRAKSLGFALTAVPPDPIQAVVS

SEQ ID NO: 348443 - protein, 343 aa, unidentified
MDNLDWCGIDVGSETLVVALRRAGHNKLLEKNFPNTPAGRQRLRYWLIRPGQEVRACLESTGTYGRDLAVLLAETPGIEVMVANARAVRKFAEACLERSKTDEVDARILLYFAMQVGFIPWVPPSETAWHLLGISRRLGDLAEMRAREKNRLHAGCQTITTAAVVTRSIERVIDWINGERDALLDEAEELIAADPEMSRCYKRLLTVPGFGRLTAIRLLGELAVLPAHLGKKQWVALAGLDPVRIQSGKSDREGSISRKGNRRIRRILFTAVLSLARFEPSAKAFYERLKERGKTPRQAQVALMRKLLHGVWGMLHYDQDFDGTKLFPLPAADSAHPRACHCR

SEQ ID NO: 348444 - protein, 319 aa, unidentified
MLAQTVVRASAHGYGDALRFAAKHAVGTRAWAVEGAGHYGAGLTRYLGDRGELVVEVGRHPRNERRLRGKDDPLDAIRAARTGLAAEKLTLPRAGQRQEALRVLLLARRSAVDARRVALVQLRSVIVTAPEQLREELRRLPVTKLIQRCSRFRRSHSRTPDELAIILALRSLARRIEAATEEANELEREIVGHVRALVPGLLDEPGVGPIVAAQLIVTWSHKDRVRSEAAFARLAGVAPLPASSGQTIRHRLSRGGDRQLNRALHTVVLHRRQHDPATRDYIARRVAEGKSSRDATRILKRYLARHLYRVMQNATPLTT

SEQ ID NO: 348445 - protein, 349 aa, unidentified
MSQTLNTAIAVIGIDIGKNSFHVVGLDDRGAIVLRQKWSRNQVEARFANMPPCLVGMEACVGAHHLSRKLHGFGHDARLMPAKYVRPYSKGQKNDFRDAEAIAEAVQRPTMKFVATKTADQLDLQALHRVRERLVSQRTGIINQIRAFLLERGIAVRQGQRFLRAGLPDILATPSTVLSPRMVRVIEDLTGDWRRLDERIEGLSGEIQAIARQDLGCERLMSVPGIGPIISSAMVAAIGAGDAFSKGRDFAAWLGLVPRQMSTGDRTILGKISKRGNRYLRVLFVQAAWVVLIKPKSWERHGLKPWIEAAKKRLHHNVLAIALANKLARIAWSVLARGRDFEATRLQVA

SEQ ID NO: 348446 - protein, 430 aa, unidentified
MKSNTQNAKIEAITEKTLVLGIDIGSETHYARAFDHRGIEYSKKPFKFSNTEVGFVTFKEWVLDLKEKHEKDKVVPGMEPTGHYWFNLGKFLQDNEMKPVLVNPHHVKKSKELDDNNPTKNDRKDPKVIAGLVREGRYMIPYLPDGVYADLRTASNLRFQLQAELTRIQNRISRWFNIYFPEYKTVYGKPDAKSGMLILKEAPLPEDILTLGIDGVNQIWRDAKMRAVGKARAKALIEAAGHSVGSKEGAVSARMEIRMLLEDYESRNIRLQEVMTLIEELVNQIPMAEKLLEIKGVGIKTVSGFLAEVGDISRFNTPKELQKLAGLALVEKSSGKHKGKTTISRRGRKRLRYLLFEVAMSLVAKNPEFRELHNYYTTRRLNPLKKMQSLMAVAAKLIRVFYAILTKGVDYDPKKMVGDIRRPVVYLPAA

SEQ ID NO: 348447 - protein, 368 aa, unidentified
MSRKGKRTEGKEEAHPFTGMSQVNPNAAGVDIGAVEIVVCVPGEENTRIVKAFGNYSEDLQAIGRWLKEYGVTTVAMESTGVYWIPLFEELERQGFECLLISSRSLRRVSGRKSDITDAQWIQTLHSYGLLESSFRPQAELIALRTLLRHRNQLVEHRSPHILHMQKALLQMNVQLSQAVSDITGVTGQTIIRAIVAGERDPQELASMREPGCKKSAEEIGKALTGTWREEHLFILRQSVEMYDFYTRQIQACDEEIERVYGLTRPDWEAGEVKPLGQRKRNSHSKNRPQNSESVRKHLKRISGVDVSVVDGFGVSLAQTVIMEVGTDMSKFPSEKHFCSWLGLAPKHEISGGKVLKNKTLKTKNRAG

SEQ ID NO: 348448 - protein, 344 aa, unidentified
MIYCAGLDVSLRSTHICVIDDDGELLAEGKTDSEVADITAFLDELDVEIAEVGLEAGTLTQYLTYGLQFAGYEVVCMEARQVKAALSAMRNKTDKNDARGIAQLLRSGWYSRVHVKSIESHQVRALLASRKAVLAKCIDLEQEIRGLFKVFGVKLPARLGHGSFDPKVRPLIETDTALSQSLLPMLDARLVLYHTFRELDNRTRHLARDDRICQQLMTAPGVGYITALTFKAGVDDPARFRRSRTVAAHFGLTPRRFQSGEFDFDGHISRAGDADVRSTLYVAANSMLTRSGRWSPLKAWGMKLAKSRGHRRAVIAVARKLAVILHRMWIDDTQFRWSAEAARS

SEQ ID NO: 348449 - protein, 330 aa, unidentified
MKKQDFTLGVDVSKNTLDINCAEIDEHIQIENGTQGFRLLIKWCKDFKINLRKSVVVMEFTGGYEYKLIQFCETKKIPFIRIPGLAIKRSLGIIRGKNDKVDSSRIAQYGVEKYQSLQPSKPLNKRIIALKELLNFRKRCVRDKAGCQATIKERKHIYPDIKKDIIIKESENKIKLNAKIIENIEKEIMHIIEENEDFKRNYDLITSIKGIGKVNAWMTIAYTENFTCFPDGRTYAVYVGVVPFDHSSGISIRGRKRVSKLANKELKSELTQAAKSAIQWDKELREYAERKLMEKDWGKVLNNVKFKLILRMFAVVKRGSKYVENYHHAA

SEQ ID NO: 348450 - protein, 428 aa, unidentified
MADHLNNKPFGAWIAIDIAKDFNAVLSETKAGKRQHFRMANSAADHDRFIAFLKSLPPPCIIGFEATGNYHRALGHRLVAAGFEVCFISSVASARYREVMFNSWDKNDPKDAAVLLELLKQGITQRYVDPLIAGHHDLQELSKTYYQVTLSRTRLQHSILTHYLPLYFPEMGKWWNSTRADWWINYLLHFPIPSAVTKHSQEAFCQIASPVIGRKVNKAAKLIELYETALHSIGLPVEADSLACKTFQIQLRRYQEINACRKQLEETAQAVLADNPDSAILQSVPGIGPINALTILAEGGDLRRFSHHRQFLKYCGFDLAKNQSGNYRGQEQISKRGNARLRLALWMSVNRAIQQPENSFQQKYLRYIKSAPQDKDLQRKARTAVAAKMARVVYGLVKSKQMYQGYYEKALPSGSIPLCRAVEAARTS

SEQ ID NO: 348451 - protein, 422 aa, unidentified
MLQEDEQNEEIIARVAALDIGKAELLCCVRIPHEGRPGRRLQEVATYSTMTRSLLRMADRLAELEVTRVVMEATSDYWKPVYYLLEAHGFETWLVNARDVKHLPGRPKTDKLDAVWLCKVAERQMIRPSFVPPPEIRRLRDLTRYRCDLVEARTAEKQRVEKLLEDAQIKLSVVASDIFGVSGRQMMAALIAGQRDPKVLAQLARGRMRGKISQLEEAFTGYFTDHHSYLLVKMLARIDALNADIAELEDHIEEMVAPFATAVERLDEIPGLGPVAACAALAEIGLDMTRFPTSGHLVSWAKFAPGVKESAGKKKGRGSTGHGNRYLAKVIGEAAVAAGKTDTFLGERYRRIARRRGAKKAIVAVGRSILVIIWHLLSDPEARYHDLGSNFYDKRINPERKKRAHIHQLEALGYKVTLEPAA

SEQ ID NO: 348452 - protein, 372 aa, unidentified
MSQSTTAYVGLDVHKDSIDIALAETPRESEVRHLGAVGGGVEPVSKALRRLVSRGQRLHIVYEAGPCGFVLQRHFAALGWHCDVVAPSSIPRPPGERVKTDRRDALKLARLARVGELTPVRVPDTADEAVRDLARAREDAVREQRNARHRLKALLLRNGIAYTGRSAWTNAHLRWLAQVKLAHPAQQIAFQEYLHAITEAGARIARHEQALRDALPGWTLAPLVHALQALRGVQLIAAITLVAEIQDFHRFANPRQLMAYLGLVPCEHSSGTRRRQGAITKAGNAPARRMLVEIAHLYRYPARVSPVIARRQAELPTAVTDIAWAAQLRLCARFRRLAARRLPHNKIVVAIARELCGFIWAIALTVAPTLPH

SEQ ID NO: 348453 - protein, 422 aa, unidentified
MLQEAQDHEEIVERVAALDIGKSFLVCRARIPHEARPGRRMQEVQTHPTMTRSLPAMADHPRCLGVTRVVMEATSDYWKPVFHVLEAAGFETWLVNARDVKHLPGRPTTDRLDAVWLCKVAERQMIRPGFVPPPEIRRLRDVTRYRTDLIGVRRAEKNRVEKLLEDAQIKLSVVASDIFGVSGRAMMAALLAGERDAKVLAQLARSRMRGKIAALEEAFTGHFTDHHAFLLGRMLERIDAIDADIAALDAKIEEMAAPFVTAIERLDEIPGIGPTAAAVIVAETGLDMDRFPTPGHLASWAKFAPGVKESAGKKKDKGATGHGNRYLARTLGEAAVACARTDTFLGERYRRIARHRGKKKTIVAVGRSLLVVIWHLLNNPDARFHDLGPDYYTRRLDPERRKRSHIHQLEALGSKFGLEPAA

SEQ ID NO: 348454 - protein, 380 aa, unidentified
MTRATRSGEYTGQAKKDLFLAFELGLKDWKLGFTTDLGTKPRLRTMPARDLGRLEREIAEAKRNFGLAATARVRSCYEAGRDGFWLHRYLVSRGIENGVVDSSSIEVNRRMRRAKSDGLDARKLLTMLVRYHAGERKVWSVVRVPTVEEEDRRQLHRELRTLKKERTRTTNRIKGLLANQGIRLEKSGEMSHRLGRLRQWDGAPLPAGLLARLQREREHAEFLHGKILELERERRQAILEGRSPVLEKVRQLMLLKAIGPSGSWVYVHEFFGWRRFRNRKEVGAAAGLTPTPYQSGDGSREQGISKAGSRHIRAVAIEMAWCWLRYQPRSKLSLWYQERFGRGGKRARKVGIVAVARKLLIDLWRFLEHGVIPEGATLKA

SEQ ID NO: 348455 - protein, 367 aa, unidentified
MGKDSTAVIGMDVHKESVDIAIADGREARLFGRVGGEATAIDRAVRRIRSVHRDPLFVYEAGPCGFWLYRRLRAQGARCMVVSPSMTPRRSGDRVKTDRRDALMLARLARAGELAPIYVPDAHDEAVRDLVRAREDAVCMQRQARQRLQALLLRNEIRYVGRSAWTQAHRRWIAHLKLPDPAQQIAFEEYVQAVEEAGRRLERLELSIGAQLEHWRWRPVIEALQALRGVSSIHAVRIVAELGDLTRFESPRRLMGYLGLTPSEDSSGKRRRQGAITKAGNSSARRAFIEAAWAYAHPARVSWVIARRHTGLAKSVTDLAWKAQLRLCARFRRLAARRLPRNKVVVAIARELSGFVWAIAQQVRPLA

SEQ ID NO: 348456 - protein, 341 aa, unidentified
MQITTIGLDIAKNVFQVHGIDPAEKVVVRKQLRRGQVLKFFAALPPCLIGMEACATAHYWARELTKLGHEVRLMPAKDVKAYVKRNKNDAADAEAICEAVRRPTMRFVGAKSAEQQGRLMQHRTRDLLMRQRTQVINALRAHLAELGIVAAQGREGLKQLLTIIANEKDARLPIDARASLIVLAAQLQALQTMIGSIERRLLVQHRANEASKRLESIPGIGTIGASAIAATVTDPNAFRSGRDFAAWIGLVPRQDSTGGKQKLGPISKQGDRYLRRILVVGAHSVLWLAKKNPEKYPWLTQLLARRPFKVVAIALANKMARVAWVLLARGGTYRTPQLAAA

SEQ ID NO: 348457 - protein, 343 aa, unidentified
MEYFAGIDVSLEQSSVCVVDGTGKIVREAKVASEPEALVGFFRGLETGVTRIGLEAGPLSQWLYAGLTTAGFEVVLLETRHVKAALSAMVIKTDRKDARGIAQLLRMGWFRPVHAKSPAAQEVRALLVARKLLQTKLLDVEFSIRGILRGFGLKIGEVSKGRFAARVRELAAGHAMLERITEPMLRAREALRTEYARLHGEMLAIVKPDPVCRRLMTVPGVGALVAITFKSAVDNPGRFARSRVLGAHFGLTPRKYQSGETDVTGAISRVGDAMVRMALYEAAHIMLSRVTRFSSLKRWALDVVRRRGLKRAKVALARKLATVLHRMWVDGTSFRWGKQAAAV

SEQ ID NO: 348458 - protein, 343 aa, unidentified
MKVTTIGIDLAKSVFQVHGVDARGHVVVRKQLRRDQMAPFFANLPACLVGMEACGSAHHWARKLQGFGHEVRLISPQFVKPYVKSNKNDAADAEAICEAVARPNMRFVPIKTVEQQTVLSVHRVRQGFVKARTAQANQIRGLLAEFGLVLPQGITNVLRRVPQIIDGATDLPASMRQLIDRLLENMKVLDRQVKELEAQIKAWHHGSELSRKLEKIPGIGPLAASALVASIADARSFKNGRQVAAWLGLVPKQDSSGGKPKLLGMSKRGDTYLRTLLIHGARSAIVAAQRTGKPNGWLSGLLTRRHPNIAAVALANKNARTIWALLAHEREFRPDYVPRPVTA

SEQ ID NO: 348459 - protein, 427 aa, unidentified
MRYIGLDVHREFCEVAISEEGKVRSAGRVRTRREELELFAKSLGSDDEVALETTGGAEAIAAILRPQVARVVVVNTKKLRAISEAKAKTDRLDARRLAELLAAGYLAEVWCPDERTRALRRYVARRAQLVRQRSRAKNEIAAALQRNLLDRPGVYDVAGERGRRFLERVELPADERQTVAGCLRQIDFLDREIAEVDRALAEAAVGSPEIRRLMTVPGVNLHTAATFMARVGEIGRFKDPRKLVSYLGLDPRVRQSGEEPVRYGHISKEGASEARHMLCEAAWIVVRYPSPLSAFSERIKARRGSRIATVAVARKLVVLFWQLLTKEEDYAFGRPTLTRRKLRRLELLAGAERRRSGGRPKKGAPSSKAQEAAEVELARQAEVAYRRLVTDWQQAPKKGASATRGRASSKPASGKQRGKASVPDPAL

SEQ ID NO: 348460 - protein, 438 aa, unidentified
MSNKFIFNLDELFISVGIDVGADFSWMSIALPNQQFVGKPYKILHNSIDSLTTAVSKIKEAEELYSLESRIFLESTGIYHYPLFCYLRDKGFNCSVINPIITKNSTNINIRKVHNDRFDSKKAALVGLKPDLKVSLMPSDLALNCRNLCREYYDLMDNRSAYVNKLQGELRMAFPQYLGIFSKVTINTSLTLLETYTSPSAFLKADKQEIIDIIKSTARFGLTYAQNKYNAIIQAATDANQFGYIIDSNIKRIRLYISFIRKYDEEINSILESLHELVDANEDSDFVKQIHLIETFKGAGFLSAVSIMGEIGDFSAFSKPKQLFAYFGLDPAVKQSGKLEGTKVQMSKRGSAIARRVIHTLTLQSISISRNREAKNPVLREYYLKKCDSKPKLVAMGAVSHKVCNMIFAILRDNKPFKIIAPQEHIKQYNSAKCVIAA

SEQ ID NO: 348461 - protein, 343 aa, unidentified
MQAVTTIGLDIAKSVFQVHGIDAEGQVIIRRQLRRRYVLAFFEKLAPCLVGIEACAASHHWSRQLQALGHTVRLMPPAYVKPYVKRQKNDAADAEAICEAVTRANMRFVPTKTPEQQSCLMLHRTRHLFIRQQTAVINAIRSHLAEFGIVAPVGRHGVEQLLNIAADLSDERLPDVARRCVAALGAQLKVLKVQILAFDRQIMAWHRSNATSKRLDDIPGVGPALATALVASVGDPRAFRSGRDFSAWIGLVPRQRSSGGKDKLGSICKQGDRYLRSLFTTGALAVIRYAKIHGTHHRPWLTALLTRRPTKVAAIALANKIARMVWAMMAKGERYKEPGALAA

SEQ ID NO: 348462 - protein, 449 aa, unidentified
MAWWSGISPGWFPSLRKGGETVKKRKKIDHLSTLCVGLDIGSRKNFITAMNFDSERLIDMQPVPNAVSGVEQLEAMILAVLSDHPEFKYVLVGMESTSFYGVHVANYLSTSDALKPYHTEVFCLNPKEVANYKKSFAGIGKNDGIDSFVVADFIRVGRISIEPWRGAQYLALQRLTRQRKHISECIAREKNYALNNIFLKFSQFALLDSSDKIMSNKFSTTAEAILTEFKTTEEIVNTPLEDLVDFISSHGRGRFADPEEIAKVLQKAARDSYRLDKCLYEPITTSISCSFNCIRAYEKQLKALDKAIAELISGLNPAEYQILRSIPGIGPVYAAGILAEMGSVRCFGSNDSLARYSGIVWRDNDSGEFESEETPMNKAGNRYLRYYLIQAAGSVAQYCPEYAAFYEKKFAEVPKHQRKRALALTARKLIRLIFGLLDKNQLYSPAKSK

SEQ ID NO: 348463 - protein, 347 aa, unidentified
MEHIGMDLGKRESQIAILTEDGELSEQRIRTEHGRLGEFFGARLPARVLLEAATESEWVARCLEALGHEVIVADPNYAPMYAHRTRRVKTDRRDARALVYACKSGTYKPAHRISDERRHLRALLAVREGLVRTRARWIVLIRPLLRREGFRIRSGQPETFRERVGEVGLPAHLWAEITPLLRLLAPVNEQIKALDEQLGALVRNDEVLRRLTTVPGVGPVTAVSFVATVDDVRRFRHAHQVQSYLGLVPREWSSSEIQRKGRITKAGNTRTRWLLVEAAWAILRRRKKPETAPLREWADRIVSRRGSRVAAVALARRLAGILYAMWRDRTAYDPAKLRRGDVVRRAA

SEQ ID NO: 348464 - protein, 351 aa, unidentified
MRTSQKTPEIISTIGIDVGKNTFHLVGVDKRGAIVLQQKVTRHQLGRRFSNIPRCLIGMEACSGTHFIARQLTALGHDVRLIPAQYVKPFLKGHKNDYRDAEAIAEAVQRPTMRFVSIKTPEQMDLLALHRVRSRLVRQRTGTANQIRGFLLERGITVRKGLMPLRKALPEILSSKSDVLSPRMINLIGDLVQDWRRLDERIAHVSTEIEALAKRDENCQRLMSVPGVGPIVSSAVVAAIGNGTGFKQGRDFAAWLGLIPKQESTGDRTILGKISKRGNKYVRTLFVQAAHVVLERRPRTAKQGLWPWIEQASKRLHRNMLAIALANKLARIAWAVLARGRAYQPRITAHA

SEQ ID NO: 348465 - protein, 390 aa, unidentified
MPKPNDTSRSLVALDQDSTLIAVIEMSQTSWLVAGIVPGVARQPLKKLGPDPDTVLALLERWRKEAGKSGRAISRIAVAYEAGRDGFWLARWLRARGIEAQVIHPTSVAVARTHRRAKTDRLDTQLLKRAFLGWLRGEPDHCTMAPIPTLAEEDARRPNRERETLVGEKTRIVNRMKAALARLGIRGFNPKLRKAADRLAALRTPEGEPLPENTLAELRRDMARLALVRAQIAEIEAARLARLERAPDQGPHAMVRLIARVIGVGLETADMLVHEVLSRTLRDRRAVARYGGVTGAPDESGKRRREKGLARAGNARVRRGLIQLAWRFLRFQKDSELARWYRARTEEVTGDRRIIRKKLIVALARKLLIALWRMATTGEVPEGVVLRPAA

SEQ ID NO: 348466 - protein, 356 aa, unidentified
MSRDIKYIGMDVHKEASVIAVLNGSGKLVMESIVETQASSILQFIHGLRGELHVTWEEGTWAAWLYDLLQPQAAQVLVCDPRRNAFLKEGNKSDKIDARKLADLLRTGMLRPVYHGEHGLRTLRELGRSYQTISQDLNRVMNRIKALYRGWSIPCAGTQVYAPRYREEWLGKIEHAGVRRRAELLYQQLDGLQALRRTLRPELLAESRKPKASKLLRQIPCIGPIRAARLLALMQTPHRFRSKRQLWTYCGLGIETRDSAQYRFVRGQLQRAKKPQQIRGLNRNHNHEMKEIFKGAATRASCGVGPLRDFYVALLAKGMKPEMARLTLARKIAAIALTLWKKEERFDAEQLKLQAA

SEQ ID NO: 348467 - protein, 437 aa, unidentified
MKKIRENAAGIDIGAKEVFVFVENQDVKRFYTFTEDFEKLRDYLLKHQVESVAMEATGVYWNILYEVLEEAGLDVWLVDGRQTKQAPGRKTDVKDCQWIQELHSYGILKRCFVVKEHIKELRSYQRLREDHIRSASMHVNHMQKALTEMNLRIKEVISQVHGVSGLRMIKATLDGERNKETLLRMCDKRIIKNKGKDILKALNGRYTNAGIFALRQAYEAYGFYQDQIAQCDKQIEKIIHKMGNKGSQDKNLSSKRKPIRHNKPDVKDLGANMIDIFEGKDATVISGITDYSWMQLLSEVGTDLSNWSTHKHFTSWLGLAPGQHWSGKMRRHKRKNGHPKAGQIFRTIAQSLIESKNIALGSFGRRLRAKKGPAIAIKAVARKLAELYWRVMVKGIEYTEMGIMKYEEQLLANKRKSLERLAKELNVQINNKQGIMV

SEQ ID NO: 348468 - protein, 337 aa, unidentified
MNRNVMGLDIAKQVFHLFSMKDGKAVKKKLKRSELLAFIAQLPVSLIAMEACGGAHHWAREFAALGHEVVLLNARFVKAFGVGNKNDFNDAEAIFTAACQPNKRTVAVKTIEQQDLTMLHGIRRGRVDERTALANQIRGHLAERGMVLPRGVNQLRKQLPEILEDGDNQLSALSRRLVATQYQALKDLDEAIKALEREISAVCQQHALSRRLVDIPGIGPLTAVLAAADVGDGKDYHSSRDYAASLGVVPRQHSSGDKQVLLGISKRGNRSLRTSLIHGARSVLKYCGDKSDPLSLWLKRLIERRGFNKAAVALANKNARIIWALATRDGDYVPQTA

SEQ ID NO: 348469 - protein, 388 aa, unidentified
MFFLGIDIGKNTHVASLLDEKAKIIFKAYSFANTLDAAEALLVKLEPYKDSLEIGMEATGHYWLSLYSFLTEHKFIVHVLNPIQTDGWRKGIEIRKRKTDVIDSVLIADLIRYGDFLETSLADEDILSLRNLSHFRVYLVNSVSDLKRKAIAVLDQIFPEYASVFSNVFGQTSKELLKSLSLPSDYENLSATKIEEVLSNITQKKKASKTISTLSDKASRSFGISFCKDSFAFQLKLIIEQICFIEEQIASVDLEIDQLMSKLGTNIKTIPGVGSVIGAVILGEIGDIERFDNPSKLVAYAGLDASVSQSGEYEASSGKLSKRGSPYLRKALYMAAQRAEFCDPVFHAYYEKKRNEGKHHLVATNAVARKLCHTIYAILKKDIPYEVQ

SEQ ID NO: 348470 - protein, 363 aa, unidentified
MVVTVLLTASNGAVTKQTRTLSTMTAELVRLEAWLADQQVDHLALESTGVYWYPIYTLLEEGRTVRLVNPQHIKAGPGRKTDVRDSEGLADLLRHGLLSPSFIPPTPIRELREMTRYRKQLVYERTHYANRLQKVLASATIKLGAVASAILGVSGRAMLEALIAGQQDATQMAAHARGRMRQRIPDWRQALEGRVSPHHRLLLRQILKHSDGVDQELREIEQQIAVYLQPYEEASRLLQTIPGIGAPAAAALMSEIGVDMRRFPSAKHLASWAGVCPGNNQSGGKQLSAGTTGGQLLDSRHRGRGGLGDQPDEGDLSRRAVPAPDAAAGQIHSGHGRRPHAAGDYLSPATRPQTLRRSRARVL

SEQ ID NO: 348471 - protein, 401 aa, unidentified
MVSDFRKGRYNLMKIFVGIDIAKLNHFAAAISSDGEILIEPFKFTNDADGFQLLVSKLESFDKNSIIIGLESTAHYGDNLVRYLVTELYQVCVLNPIKTCQMRKNNVRKTKTDKVDTYVIAKTLMMQDNLRFVSFFDLDMMDLKALGRFRQKTIKQRTRLKIQLTTYVDQVFPEIQYFFKSGLHQNAVYALLKEAPSPKEIASMHMTHLANLLKVNSHGHFTKEQAKELRVLAQKSVGANDSAISIQITQTIQQIELLDSQLEKIEAEMTDIMKFNDSVIMTIPGIGYINGGMILGEIGDIHRFSNPNKLLAFAGLDPSVYQSGNFQAKTTRMSKRGSRVLRYALVNAAWNVVRNNATFKAYYDAKRAEGRSHYNALGHCAGKLVRVIWKMLTDEVEFNLE

SEQ ID NO: 348472 - protein, 353 aa, unidentified
MNNVKYVGMDVHKSITVIVVLNELGQFESRSQIKTKGENICDFFRGISGKVEAVFEEGTHSAWLYKLLKPLVASVTVCDPRHNKLIEDGNKSDDEDAETLAQLLRLGAVKAVYKGDDQQQQLKEICRAYDNLIEDSTRVQNRLKAIYRGRGISCSGHDLYRADQRSDWLAKLGEEAARFRAESLLEQLESISQLRKQAKQRLLAQARTHADYRILIKLPGFGPVRVAQLIAEVGTPHRFRTKRQFWPYCGYAVVTRSSADYQFVEGKIVKQRKKVSTCGLNRNHNPQLKQVFKGAALTALRHEAIKAYYQRLIDHGTRPELARVSIARKLASIALTVWQRREEFDVKKAFAQD

SEQ ID NO: 348473 - protein, 346 aa, unidentified
MEHYAGIDVSLELSSVCVVDTQGKIVKEAKVASEPEALVAFFKALSFAVKQIGFEAGPLSQWLHAGLRQAGFETVLLETRHVKAALSAMMVKTDRKDARGLAQLIRLGWFRSVHAKSIGSQEVRALLVARKQLLGRLIDVELSIRGILRGFGLKVGQVTRKTFEARIRELVTGQPTLERIAGAMLSARASLKVEYEKLHKAVLAIVREDAVCRRLMTVPGVGPLVAVTFKSAVDDPSRIAKSKAVGALFGLTPKKYQSGEKDITGGITRVGDEMVRTALYEAANVLLSRITRFSKLKRWGMDVAKRRGSKRAKVALARKIGVILHRMWVDGTTYRWAAAEPIAAQA

SEQ ID NO: 348474 - protein, 343 aa, unidentified
MQIRSVGIDLGKTTFHLVALSAAGKVLLRKKFTQRQLITFTANMQSSLIGMEACSGAHFLGRVLREQGHDVKLIPAQFVKPFVKSNKNDFLDAEAIAEAVDRQNMRFVPIKTDDQLDLQAMHRVRDRLVARRTSVINQLRAFLLERGMVFARTPAKLKEAMPEILENADANLTPRMRNLVSLLWGEWKDLEQQIVAMNVEVEQIASSDPACQRLRQIPGIGPLVATAIVAAIGNGAAFHKGREFSSWLGLVPRQHSTGGKARLFGISKRGNSYLRKLLVHGARSAVLRVKRERSPFGPWLDALERRSPVKVVITAAANKLARIAWAVLSSGNEYHPATISMAV

SEQ ID NO: 348475 - protein, 317 aa, unidentified
MQPVLNIGVDVAKDAVVVACAAQSFPVRSVTNQRAPLLAWLKSLPAGSRIGLEATGSYHELLADMAHAQGHAVCLLNPLDTRHYARAMGNRAKTDRVDAELIARLIAQEHTRLRPYTPPTANQRKLDRLIRRRAKIVRLKSTLKLTMNNLGGFTTELKAVLLKLDALMAKMDAAMAAIAACSPHHVEAQHRLQTIVGIGPLGGIALTNTLERVPFRNADAFIAFIGFDPKAHDSGHKVGRRRLSKRGPGELRRLLFNAAMSAVKTNTWKPIYASYRAKGWSTTATLVIIARKIARTAWSIHHYHSTFNPERITKCLT

SEQ ID NO: 348476 - protein, 403 aa, unidentified
MVFLGIDWAEAHHDVCLLDEQGKLLGKRRVVDGLEGVRQLHELVAEQAPEPEQVVVGIETDRGLLVQSLVATGYQVYAINPLAVSRYRERHSTSGAKSDPADAKLLADLVRTDRHNHRPLSVDSELAEAVKVLARTHQNLIWSRQRQLNQLRSLLREFYPAALEAFAGDLASADAIAVLERAPTPHQGRSISQGQLVSALRKAGRERNLVVKAAQIQACLRRPQLEAAARLTQAYGRSVTALVRLVRQLNQELASLEQELSASFELHPNAEIYLSLPGLGKVLGARVMAEFGDDRTRFQNPKARKNFAGTSPITKSSGKHKAVLRRFACNHRLLDACYFWAFASLRRSPGAKDYYRRLRARRQSHKQALRALANRLVGILDGCLRHRQLYREKVAWPLLEAAA

SEQ ID NO: 348477 - protein, 327 aa, unidentified
MITIGVDAHKRMHMAVAVDGVGREIARWRGANSIAGWQELTAWAAALGPGCRWGIEGAWNYGRALAQHLVAAGAEVYEVNPRWTAEGRRHARRRDKNDRLDARAVALYVQREAAALTAIVAEDDTTVLELLATERDALVAEATRLRNQLHQQLLHLDPEYAAHLPSPRTQGGLLALAGYISPDPCPLRQQRAAGVRRLAQRLRLAVEQAKALAAQIRSLAAQRYARLTTICGISLLTAGALAGILGPGQRFAGNAQLAAFAGVAPLEASSAGRVRHRLNRGGNRRLNAILYRIALSQARHSPQAQAYLARRVSEGNTPRRMMCDTGV

SEQ ID NO: 348478 - protein, 355 aa, unidentified
MNQEKYIGMDVHQATISVAVMDAGGKLIMECLLETKAATIVEFIQGLHGTLSLTFEEGTSAAWLHDLLKPHVSRLVVCDPRKNALLKDGNKSDRIDARKLAELLRGGQLHPVYHGEHGVRTLKELGRSYLTITQDVTRVMNRIKALYRSWAIPCAGTTVYAPRHRAEWLGKIAEPGVRVRAERLYQQLDLLQPVRLEARRELLAESHKHSSVKLLRQIPSIGPIRSALLVALLQTPHRFRTKRQLWAYSGFAVETHDSGEYRSVRGKLQRNRERMTVRGLNNNHNRDLKNLFKSAAISASTRPGPLRDFYVARVEKGMRPTMARLTLARKIAAISLTIWKKGVEFDAQQLQRQAA

SEQ ID NO: 348479 - protein, 482 aa, unidentified
MKKKNIYINQSQELLSLFEAAGNNEKIMCVPIDYAKKDHIVMFCNGYGHILRKPFPVKNSPEGIAYLTEQVTRSCSHRRIDPKHVFFGGEDVGSYAENFANTLRSGGWLVAGVNAHDAKEQRANIQASTDRLDLMGIASMLLNRRANCSPAQSGIYRNLRTLVRHRRKLVSMSTEEKNRIHTVVDRLFPGFLDEKKTGILPFSKSSLYLMENRFSPLQIRRRKRHKLIEVLQRYGTTKPENTAAKLHQYTARVLNTPDEYIFTLQLSLVQHVKHFRCLQDSINQLENEIAIWLAQTQGAFLTTVRGIGIVLAAGVSAEIGNPYKQRPLNNLVSYSGIIPRVKQTGGSEGKTRTGKVAKRCNRILKDYVVQSALHMGLHGPEDLMADYKRREAAGQHADFGIGRRYLRMAMCLMRTSQIYMPQQLRNTKVKPEERAGYYLMTWPSLRDKWNKAGALEAAFEKDRPLGQWRNMVQELYEIKLKL

SEQ ID NO: 348480 - protein, 321 aa, unidentified
MTPFYLGIDVSKAKLDCALRLPNGKFRCKVVANTAQGHADLVEWLARHGAADVHTCMEATGVYWENVAQFLSTRGFTVSVVNPAQIKAYGASRLARTKTDAVDARLIADFCAERRPPAWQPFSDDELALRALVLRLDALQAMRTQESNRLEVSRDAVRQGIRQPLDWLDQQIKSLAKEINDHIDANPGMKDKKALLDSIPGLGERTIAILLAFFGDPGRFGNSRQAAAFAGLDPRRHESGSSVKGKPRLSKVGHAFLRKALYMPAMVALYKTDWGKQFRDRLAASGKPAKLIIGAMMRKLLHVAFGVLKSEKKFDPALHNA

SEQ ID NO: 348481 - protein, 451 aa, unidentified
MGGRQVIDDVLHERVHERVAAVDVAKKDGVVCLRRPHPSRAGQRQSVVWSVTATMTQVRQLAAALAAEQVQKVSLESTSDYWRIWFYVLEEAGLEVQLVNASQARSLPGRPKTDKLDAVWLARLTELGMLRPSFVPPAQIRVLRGYTRARAHLTGDRTRCFGRLEKLLEDALIKVSSVASKLTTESARDMIAAMIAGQRDPAALAALARGRMQARRDALTQALEGMFGDHHAELAQLLLDQASFCDQRIARLDILIKEQLATIRDAWGIDAGGVTGPHAGDGSDGRPAPVLPAAARLDEIPGVSAGLAAAIIAETGLDMTRFPTAAHLVSWAGLCPRAIQSGPRTRHGKSHGNAYLRGCLGQAAIGASRTATFLGARYDRIARRRGKARAQVAVARSILIIIWRLLADPQARYTDLGPGHYRTRTDRSKKTRGHVRQLEALGYTVTITPAA

SEQ ID NO: 348482 - protein, 327 aa, unidentified
MNQSASNLSILGIDVSKGKFDVALLREGKYKHKRFLNNLEGFKKLREWLAEYKVERLHACMESTSTYGEALAEYLHDRGFMVSIVNPARIKGFAQSELIRSKTDKVDASLIARFCAAMKPSLWTPESKEIRELRSLVRRVDALVEMRQQEINRLDVSDAVIKKTIENHIDYLTKQIDSIKEQINKHIDRHPQLRDKQKLLRSIPGVGEATIHLVLANFANTEKFSNAKRLSAFLGIAPREYQSGHSVRGRRRMSKVGRSSLRKAFFMPALVALRYNPIIVEMKRRLTKAGKPKMLIVGAAMRKLIHIIYGVLKHGKPFDSNFALKNT

SEQ ID NO: 348483 - protein, 421 aa, unidentified
MRKAGTGKVKVVKDGTLIVAVDIGMEMNRGYCTTPDGKSTKPFKFDNTKEGLDTLWGMIMTSKARFQCNEVIVGYESTGPYGEPMLHYLMKKPVRIVQVNPMHTKKVKEINDNSPLKTDDKDPRVIADIIKLGRALSIVIPEGDAAYLRRLNNSRERHVRERTALVNQLQQLVFLLFPEFKKVIKDIKCRTPLYLLKRYPTPEAISVLDKYVLGEEMRKQSRGKFREHHADMLINLARNTIGIREGVSGLSMDIRHILVQLEMLKNLMAEIEDEMEIALGRIPYSSKLLSIKGLGVVSVSGIIGEIGDFKKFKTQPEIMKLAGLDLYEISSGKMKGQRRISKRGRSLLRKILYYAAIQTIRKNGILHDYYTRLTDRGMKRMMALVAVSRKLLGIIYAMVRDDSEYSVNFESMKRQVIKKAA

SEQ ID NO: 348484 - protein, 352 aa, unidentified
MSMIAFDSHKRYTFARVENEQGEHPQEFRIEHRRGNIIAFLSKQEPGSRVAIETIGNWYWIVDEIERAGMVPRLVHARKAKMMFGCVNKTDKLDAKGLNLLQRAGTLPTVWIPPAEVRDKRELPRTRMVFAAERTKLKNRIHSVLDKYGLQEAFEDISDIFGATGRRVMVCVLEQLPPHTRYTAELLLEQLDQTQQKIEAIEAQMNTLFKETEQHTLLKTMPGVGFILAVVILQEVGDIGRFGRAERFASYSGVTPRVHASGGKVRYGRLRPDTNHYLKWAFSEAGNSVALNRDRFPSRHVSQLYHRIRSRAGHAKAVGAVGRHLAEATYWILTKNEVYRERGLSKVSPTGA

SEQ ID NO: 348485 - protein, 354 aa, unidentified
MPEPCAGTDPHARFLGGGSAATRSRYPTDTGTGQVCRGQISPADREHLRAWLARFYGREDVAFAVEGCTGWRYVAEELAAAGIAAHLAEPADTAFARGRKRHAKTDKTDCRHLRQLLAEGRLPECWIPPGHILDCRALLETYHDLRAEHTAWAQRIHAVLFHQGAPALGEGVLRTEQGVAALRAAAAAHLSPAGQLQVATALEVLETLEARLHELRHQLTDAARHLAGAKVLAARLYGVGPVAAPAMTCWLAGKDRFSSSRQAVRFAGLDITVYSSDRKGPPGRLSRQGPPVLRWAVYEAGKTHARASAPDHRYYAAVKDRCNGKRAALSEARKILRQACHILAELGDDALAAA

SEQ ID NO: 348486 - protein, 395 aa, unidentified
MDHHELTRLQQFRQFKKEIRGSERYLIVGLDIAKDQHHAFFGTATGQTLWKRLLFDNSQEGFQKLLLQTEALQVQHGLPQVVFGLEPTANYHKPLGEYLIRGKHQVVLVSGVAVKRNRELLDGRWDKHDTKDAANVADLISQGKCLYYEHPDARIRDLRLLLSLRKRLKRQEQGIRVRIRNGLIAQYCPELDPSLSRLIASGKESHLLLAMQKASSIGCAAHPEVAFAAKVMIQELQQARESLKTIQERIHKLCSQFAEHAYLLSIPGFGPQVSSQVLAAIGDPFRFQNGKQVLKMAGLDLSADRSGKASDRAHPILSKKGKADLRYALYQAAFIASTRNAAFLAYWTPRLKARSQEPGIQAKRRVKLAAKLLIIAWTLMKRKEAFDPQRLTSQI

SEQ ID NO: 348487 - protein, 405 aa, unidentified
MDIIIERGAGIDVHKESLVACIMGTGIKKEIRTFSTMTNDLMQLKMWLKEHGVTHVAMESTGVYWKPIFNILEDAFEVILVNARHVRNVPGRKTDVKDSEWLCKLLRNGLVRGSFIPPKEIRELRDLTRYKRKLIQAIASEKQRIQKILEDANIKLSSVASNIFGASGTRIIEELMKGDLTAKEMAELSKGRLRKRKDDLTEALVGHMEEHHTFMITASLRHMKAIEEILSTLERKIAETIELHYKEEYELLQTIPPVKDSASIIIAEMGVNMDLFPTEMNLSSWSGMSPGNNESAGKKKPGTTTHGNKCLKSILTELAWVASRMKGTYLYSKYHSLVGRRGKKKTLVAVGHKILIMCYHILKYKVPYKELGENYLDTRKKDRIVKSHIKRLTSLGYVVTLSEAA

SEQ ID NO: 348488 - protein, 367 aa, unidentified
MKKVSTRAAVQSRNISQQKLTIGLDLGDRNSWYCVLDEAGQIQREERVRTNAKALQEVFGAMARSRVAVEIGTHSPWISRLLSELGHEVIVANARKVRLITESRKKDDRLDAQTLARLARLDPKLLYPVKHRSVQAQADLTLIRARAGLVRARTGLANAARGLAKSYGERLRGCNVRNMNPEKAERLSPELQAALEPLLNAIESLSERIVEYNQRIENLAEKSYPQVALLKQIKGEGTLIALTYMLTLEDPHRFRQSRDAGSYLGLQPGRRNSGRSEPQMHISKEGDPYLRTLLVQGAQHILGPFGVDCDLRRWGLKLAERGGKSGKKRAIIATARKLAVLLHHLWISGEAYDPLHNSQQKALPAAA

SEQ ID NO: 348489 - protein, 402 aa, unidentified
MKFSVGIDWATQAHAVCILDQTGRLQWQGAVPHTADGLAALLARLRRIRRRGPLRVALERPSGLLVDTLVAAGLEVVPIHPNALKASRPRYSAAGGKSDPGDAFILADLLRTDGHRFPALRPPSDDTRALRALVRGRDALVAQRVALANQLRALLERFWPGAVAIFADVDSPIALAFLSRYPTPHSAARLGAKRLAQFLGQHSYCGRRPVPELLARLRSVPVSQVGEAEAEASGDVVRALVAVLSPLVAQLQQLSAALEAALPQHPDGPLLQSLPRSGAVNAAQILAELGDDRARFPTAEQFAAEAGLAPVTHASGQHHAVVFRWACNKRLRRAVTTFADNSRHASRWAALVYQRARTRGCRHQHAIRILARAWARILWRCWQDRAPYDVSRHRAAQALAAA

SEQ ID NO: 348490 - protein, 399 aa, unidentified
MQEATQHDAVDVFVDVGRGQHHAVALDRNGKRLYNKALPNDEVKLRALIAELKTHRRLLFVVDQPSTIGALPVAVARAEGVLVAYLPGLAMRRIADLHAGEAKTDARDAAIIAEAARSMPHTLRSLRLADEQLAELTMLCGFDDDLAAQVTQTSNRIRGLLTQIHPALERVLGPRLDHPAVLDLLERYPSPSALAAANEKTLANRLTKLAPRLGKNLAAEIVQVLNEQAVIVPGTQAATIVMPRLAQQLAALRKQRDEIAAEVERLVLAHPFWPVLTGMPGVGVRTAARRLTEAAQKAFATAAHLAAYAGLAPVTRRSGSSIRGEHPSRRGNKVLKRALFLSAFAALRDPVSRAYYSCKIQQGKRHNQALIALARRRCDVLFAMLRDGTIYPPKSAPNA

SEQ ID NO: 348491 - protein, 383 aa, unidentified
MKKTQETLRKDVNTKAAVLHVAFELSNSKWKLGFSDGNKMRFKSIDARNLEQLGEEIQKAKSRFRLDDDVRIVSCYEAGRDGFWLDRYLLSHGIGNVVVDSSSIEVNRRKRRAKTDRIDARKLLNMLMRYHGGERKLWSVVRVPSVEAEDGRQLSRELESLNKERTRHRNRIRGLLIREGLEVKNPSGKTFLEELDSLCTWDGKGLPGDFKARIVREYERLRMVEEQMGTLRKERETRVGSAETLSMRKVAQLRMLYGIGVTSSWDFVMEMFGWREFRNRREVGAFAGLTPTPYDSGGSQREQGISKAGRGRIRALNIQIAWGWLRFQPQSKLSLWYQERFAGGGSRMRRIGIVAVARKLLIDLWRYLEYGVVPEAARLRPVK

SEQ ID NO: 348492 - protein, 349 aa, unidentified
MTKRSHDDAIATIGIDIGKNTFHLIGLDAEGAIVLRQKLSRGQVGVRLANLPPCLIGMEACVGAHHLSRRLLALGHDARLMPARYVRPFLKGQKNDFRDAEAIAEAVQRPTMRFVPTKSVERLDLQALHRVRARLVRHRTAVINQIRALLLERGIAVRQGYQHLRAALPDILGRESERLSPRMVRMIADLSSDWRQLDERLEAVTDEIETLARADEACQRLMSVPGIGPIIASAMVSAIGDGAAFAKGRDFAAWLGLVPRQISTGDRTILGRISKRGNSYLRTLFVRGARVILLRPANWPKHSFGPWLQAASRRMHRNVLAVALANKLARIAWSVLAGARHYETRSIGA

SEQ ID NO: 348493 - protein, 401 aa, unidentified
MQVTRIGMDIAKQIFDLHRVDRRGKVTLRKTLRRERVLEFFAQLKPCEVGMEACAGAHYWHREISRLGHTVRLLSAHKVKPYVDGNKNNRHDAAAICEAMSRPSMRFVQPKTTAQQDLQTLHRARALLVRDLTALSNQVRGLLHEYGIVMRKGAAALRRVVPELLTGDDERITAVLKAVVAEQFERFKYLTLRIDRYDRQIGELCKQDQRCQRLLKVPGIGPLSATALVAAIGNGHEFKNGRHFSAYLGLVPGHSNTGDKTVMLPITKRGNRYLRTLLIHGGRSAVYAARRRSDPRSIWLNRLREISCYNVAAVALANKNARVAWAMLRYGEDYRASRAHRQSANPTAARSARLANRALAFASHRARPAGQRREHFSAPPSVQTKGGAKNAKAESKKARQD

SEQ ID NO: 348494 - protein, 335 aa, unidentified
MKHYAGLDLSMESTQVCIIDEKGRKLASEKVESTAEAIAVLLERFSPIERAVIETGRMSPVICLGLRQLNVKLVCIDARQAYQSLKAMRANKTDHHDAAGLAQLARTGFYKEVHVKSPAAHGVRSVISARSHLVDARLRLDNMIRGLCATFGHRLGSGKGKAFLEGITKAVHIAGLGDAIASLLSVRTELVEQIKEMDRRLRVIASQSQACEILMSIPGVGVQTSVAFAAAIDEAGRFRQSRNAGAYFGLVPRRHQSGELDWTGRITKQGDGTVRKLLYEAANSILTRSRERFALKTWAMRIAKRRGLNKARVALARRLAVIMHAMLRDGTLFQV

SEQ ID NO: 348495 - protein, 324 aa, unidentified
MTTPSVLGIDIAKRTFDAALLQEGRTRHRQFANTALGFQQLETWLRHQTTAPIHAGLEATSCYGEALALFLHQRDVPVSVINPARTHAFAKSELARTKTDKADAALIARFVATQQPPLWTPPPPEQRQLQGLVRRLEALQAMRQQERNRLDLEEATSLLREFIAAHLTHLEDQIRQVQQRLRVHLRAHPVLQQRGALLQSIPGIGECTALKLLAELPSPLQCRTARQAAAYAGLCPRQRESGSSVRGKTRLSKIGNARLRKALYLPAVVAMRYNPILREFAQRLLERGKPKMAVVGAVMRKLLHQAFGVLKHGQPFDPNYALIH

SEQ ID NO: 348496 - protein, 418 aa, unidentified
MFKIFRKNCCGLDVHKTWIYACIGITDANSRTEYFQARFSSFSKGLQELSHWLDKYNCKEVCMESAGKFWIPVFNILEKTCLVTLAHPKYTKPQKGNKTDRKDAKWICDLFMCDMIKPSFIPPPAIRHLRDLVRYRGKLTNMLTGEKNRAQNCLTVSNLKLDDVFADVFGKSARSITEYILAHPGEPFDVAQFVDRRCKSPLSEIQAAVDGAVSPEQAVKLRQCLDHIDQLRLLRQRLEQEILRICEPFADILQLLRTVPGLGNDPMTAIAVLSEIGGDMSVFPTAKNLCSWAGCCPRNDQSGAKVKSTRISRAGSYLKPLLVQVANALIHSRKHPEFAERYRRIKARRGHKKAIIAVCKMLLTAIWNILSKLVPYSPAGFLSASHDLPPSKSLTVAQGLSLLRRRGFILTDDPLSAP

SEQ ID NO: 348497 - protein, 417 aa, unidentified
MIEDVHWFVGIDWATQSHRVCLLDGEGRRIGERDFAHDGSGLTQMRDWLFEQTKGASGQIAVAIETPHGPVVEMLLDHAFRVFAINPKQLDRFRDRFTVAGAKDDSRDARVLGSSLRTDPAAFRQLAIDDSTVVELREWSRLADELQQERTRLSNRVRQQLWRYYPQAAELTDDVADDWFLTLWQQVPTPAAAVRASEKKIARLLKEHRIRRLDATAVLQILRKPPLFVAPGTTEAACAHIRSLAARLHLVNGQIREAHQAMDGLCARLEAPADSTPGQSSEQCDVTILRSWPGIGRIVLATLLTEAAGPLRGRDYHALRILAGTAPVTRRSGRQCFVVRRFACNRRLQNAVHHWSRVAIQHDADARRRYDALRQRGHKHARALRTVGDRLLYALCAALKRHTLYDPSRQAAPVAAG

SEQ ID NO: 348498 - protein, 355 aa, unidentified
MNQEKYIGMDVHHATISVAVMDAGGKLIMECLLETKAATIVEFLRGLHGTLSLTFEEGTSAAWLHDLLKPHVSRLVVCDPRKNALLKDGNKSDRIDARKLAELLRGNQLHAVYHGEHGVRTLKELGRSYLTITQDVTRVMNRVKAVYHSWAIPCAGTTVYAPRHRAEWLAKIAEPGVRARAERLYQQLDLLQPVRMEARRELLAESHKHAAVKLLRQIPSIGPIRSSLLVALLQTPHRFRTKRQLRAYSGFAVETHDSGEYRSVRGKLQRNRERMTVRGLNDNHNRDLKNLFKSAAISASTRPGPLRDFYVARVEKGMRPTMARLTLARKIAAISLTIWKKGVEFDAQQLQRQAA

SEQ ID NO: 348499 - protein, 357 aa, unidentified
MTRISAGVDVPKNRSTVCIMDQDGKFIMRPFLVWHSTEELDFLADTLKRLNGEVRVIMESTSIYQYPIALQLKERGLFISIVNAYEMKQFANIDFRGGKTDKKDSRTIASYGISYWDKLVEWQIPKDTYFNLDLLNRTYMNAKKHRQIILQELQHYIDCAMPGMDKELHSLNLSTKKDFMLDFVEKFWHRDEIVNMTEAEFTEVFTAWAKKKGYRPVEGKAAKIYAIAKSCIPYYPANPTVKTILQCIVDKLSGVNRTLVTIVTQMIEEAKKLPEYQIVREVPGVGDPLAARSFGSAGDIRRFKNSKALVAYAGIDSPPDESGDFSSTHRHITKKGSKVFRDTGYEIMMALRSQKRT

SEQ ID NO: 348500 - protein, 274 aa, unidentified
MDNLRYIGLDVHRDTISAAVLNREGQLMMQSVVPTRAPAIIDFLHGIRGTLHVTFEEGIHSAWLYDLLQRRVARVLVCDPRKTSLLKSGNKGDLIDARKLAELLRNDALSPVYHGELSSLEVQRRTRSYTMLTEDTTRIMSRVKAVFRGLAIPYHGKSIYRPDRRESYLAQLPTEGLRQRVELLYQELDAVHRLRLRAKREMLAECRKHPAMKWLQSVPFLGKVRTAVLIGRVQTPHRFRTKRQFWSYCGLALETHDSAQYHVPWSWRPCCVIT

SEQ ID NO: 348501 - protein, 375 aa, unidentified
MKKVRFVGLDVHAETIAVAVAESGRDGEVRSLGVIPNRTESIRKLVKKLRPHGQLRACYEAGPTGYALYWQLTELGVRCEVIAPTLVPVKAGDRVKTDRRDAEKLARCYRAGDLTPVWVPDAAHEALRDLVRARLAAKQDQLRARNRLSKFLLRHGRRVPVGMRAWTNAYMAWIDQTVRFDQPAQAVTLEDYRHEVVHASERLARLERAIDTVIETLPERMRAVVDGLQALRGIAKISAVTIVAELGEISRFKKARQLMGYSGVVSSEDSSGPRTRRSSITKTGNTHVRRIVVEAAWAYRHRPAVGPTLAKRQKGISPELKEVAWKAQSRLHNRYRKLLARGKTKQKVVVAIGRELLGFIWAIGTAIERQYPVSE

SEQ ID NO: 348502 - protein, 310 aa, unidentified
MDAIVVGIDVSKDRLDVAVRPTGETFAVERDAEGLSRLIARLAPLEPQAIAVEATGGYETVVAASLSAASLPVVVVNPAQVRAFAKALGKRAKTDPIDAAVIAHFVEAAKPDIRPMPDEQTRLLADLVARRGQIVQMIVAERQRQKRLIEKRLQKSIARLLAALQKELSSLETDIDEAVRGSPAWREKEDRLASVPGVGPTIARTLIAELPELGRLDRRKIAALVGLAPWTRQSGQWKGKSFIGGGRTQVRAALFMGALVAARHNSALRGFHQRLLDAGKPKLVAIVAVARKLLTILNAIIREQKPWLPA

SEQ ID NO: 348503 - protein, 423 aa, unidentified
MKSSGTQTFRAYVGIDWADTKHDFCLQERGSDRREFGCIAHQVECIDEWAKSLQQRFGTPVAIALELAKGPLVYALQKYDFLVLFPINPLTLAKYREAFKPSRAKDDPSDAELALDLLMRHPERFAALRPQSVGMRTLISLTERRRELVNDKIRLTNRLTHTLKEYYPQALDWFDQHDTVLFCDFLTRWPTPLQARRAHQASLKAFFHAHNAHRPQIIAARLKAIKAAVPLTQDPGVIVPCRLHVMVLIEQLRLALQAIEQFDRHIAELAPTLPDYRLFAGLPGAGPHLAPRLLVAFGEDRERFQRAEELQKYAGIAPVTERSGKKTWVHWRWQCPTFLRQTFIEWAGQTINKSFWAGAYYYQQRARGSTYQAAVRALAFKWIRILYSCWKTRTPYDESKYLNALKRRQSPLLNNLVPIPQNA

SEQ ID NO: 348504 - protein, 440 aa, unidentified
MPVRKREDEVFPNAAGIDVGASSHWVAVPPHLVEESVREFGAMTDDLNAMADWLLACGVDTVALESTGVYWIPVYEVLEQRGLKVWLVDARQMKYVPGRKSDVQDCQWLQKLMSLGFLRAAWRPDGEVCVVRAVARQREVLLIEQASWVQRMQKSLVQMNIQLTEVLTDVMGMTGQAIIREIVAGERDPKALARHRDRRVKASAEAIAKALTGNWRDEHLFVLRQALAMYDDIAGHLAECNTKLQTLLRALGQRNVDLGKVPRAGSKTRQEFDARQTLANWAGVDLTRINGLGLAAVMKILSEIGPDLSRFETVKHFCSWLGLCPGTKISGGKILSAKTKRSANRVRQALKMAAMSLSHSSSALGAFYRRLCSRMDKPSANTATAHKLARMVYFMLTRGEDFVDQGQQRYEEQQRLRSIAALKRRAAALGFEINPTPVAA

SEQ ID NO: 348505 - protein, 343 aa, unidentified
MKLQVLGIDLGKTVFHLVGLDSAGRVVIRKRCSRTQLLAFTANLQVQLIGMEACSGAHFLGRALREQGHEVRLMPAQYVKPYVQTNKSDYLDAEAIAEAVQRPRMRFVPIKTEEQLDLQALHRVRERWVMRRTAVVNQIRSLLLERGLTLPKGRSHLDEQLPRILEDAELNLSDSFRVLLAQLKLELEQLAARIEEMDRVIQKTARENEACQRLTEIPGVGPVTATALIAAVGNASAFGKGRNLSAWMGIVPGEYSTGGKQKLLGISKRGNKYLRRLFIQGARSVLQQRHKQAPGLSRWLAQLLGRTHQNVVVVALANKLVRMAWAVLYKNERYRAPVFAGTT

SEQ ID NO: 348506 - protein, 312 aa, unidentified
MNQSQKAFVGVDISKETFDVFINVGNFYQKFTNNQTGHVDFINLLKNYDVAQIVMEATGRYHCVLAANLSVENYPVSVVNPRQVKHFSLSLGNLAKTDKLDAMVLSRFAQVVLPPLTVASDEQTQRLAQMVTRRRQLIDMRTMEKNRLDGVHLDVAELIDHHIEWLNSQIKDLDDDIGRQLRVMPLWQEKAKILSSVKGVGPTTTATLLALLPELGTLSRRKISALVGVCPYSHDSGKLKGKRAIWGGRSAVRAALYMAALVAKKNNNEIKTFYDGLIARGKLKKVALTACIRKLVTILNAMVRDGREWAAN

SEQ ID NO: 348507 - protein, 340 aa, unidentified
MRLIGCDLHASQQSIAMLDRDTGAVIEKTLRHEGETVRTFYASIPLPVVVGIEATGSMGWFLRLMEELAIECRVGHPTAIRKAETRRQKHDRRDAALLLQLLVEDRFPAIWMPSIEYRDLRSLLLHRHQWVRMRTRVQNALHAIVLAHGVRRGHTLWNRDGQALLASLPLPPHTADRRSELQALYQHLEAHIDRLDDRVQHVANERARATLLMTHPGVGPVTALATEVFVGDPTRFLDGKALASYVGMIPREYSSGTRQRLGALSKQGNPFLRFLWCEAAAHAVRRDPDLQRFYRRKVAQKGFAKARVAAARKLGIRLWIMLRDQIDYAEFCRRGLARQS

SEQ ID NO: 348508 - protein, 347 aa, unidentified
MTIVEPAAGAVTGGVDTHLDVHVAAALDDIGGLLGVESFEASRAGNDKLLAWLVSFGAVAQVGVEGTGSYGASLARSLRAAHVKVVEVDRPNRQARRRTGKSDPADAVEAARAALSGRAQGAGKTGEGNVEAIRALVVAKRSARSTRIKSLNQIRHLGFTAPDELRDRLRGVTRDHLAGVAAGLRPRGGSDPVIAATKTALRILGRRVLALDEEMATIDALLGDLVTATAPRLLEVHGIGVDTAATLLVAAGDNPGRLRSEAAWAHLCGVAPIQASSGKVTRWRLNRGGDRQANGALWVVVITRMSSDPRTRAYVARRLHQGRSKREIIRILKRYVAREVFHHLPRS

SEQ ID NO: 348509 - protein, 355 aa, unidentified
MLVTQPEQTQATIVVAGVDTHKDTHHVAVLDLVGRVLADRAFPVTSTGYRQLLDWVAGYGVIESFGIELTDSYGAGLTRYLTGRGLPVLQVTTTDKAARARRGKTDRLDAIAAAQKVLAGLARAIPKDTTGSIEAIRMITIVRDSAVKDRTRAINQFQALIITAPAVLREQFQGLTTTAAVKLARSFRPDPARLAEPTQAAKQALKRLAARIGDLEPEIAAAQKELAALVGAVAPTLLGRPCIGPITAARLLMTASSNVTRIHSEAAFARLCGAAPIPVASGKTHRMRLHRGGDRQANYALHMIIIGRLKNDPATQAYRDKKLGQSHSKKDAIRALKRYVAREVFHLLKTDLILP

SEQ ID NO: 348510 - protein, 341 aa, unidentified
MDTVSLIGVDLGKHCFHLHGQDASGRMVFRKKLTRSQMFTLLGNFPSCTVVMEACAGAHWIARRLQTLGHEAKLISPQFVKPFRQGNKNDFADAQAICEAASRPSMRFASPHNEAQQIVSALHRVREGLVRERTCTINQIHAFLLEFGISLPRGMAVIRRLPAVLEAESLPPRLVSVLERLHAHFKYLDEQIHQLEHELLSQLHEDERSERLLEIPGIGPMTASVLMSELGDARQYGSARQFAASVGLVPRQYSTGGKPTLLGISKRGDKELRRLLVQCARTIMQRIEHRTDALGVWIRSLLARRHSNVVACALANKLARIAWAILAKGTHYRSIEAVPAV

SEQ ID NO: 348511 - protein, 395 aa, unidentified
MKMLYIGIDVSKRKHDCFITNEAGEAMTDVFTIQNSREGFEELFRQIKSLVPRPSQENTKVGLEATGHYSDNLVGFLRKIGLAPVILNPLQVNLYRKSESLRRTKTDKSDARFIARMLIVEGFKPHAKPSYHSEELKSLTRHRQRLVKIRSMFKVSYDRLRSIVFPELEGFIKNPNSVTEWKLLLEFGTAEAIAGCHLTRLVNLVGKYSHGKHGKEWVTKLRELAKNSIGANSPAKALELKQTIRQINSLSKEIDLVETEIKTLVIESGTSLMTIPGIGYTLAAIIMAEIGDIARFATPGKLQAFAGIDPTTYQSGQFTGNRNFMLKRGSTYLRWALLMAARSASRLDPTFGDYLNRKLAEGKHYNSAMGHVAKKLIRVIFKLMNTGDVFQAAKA

SEQ ID NO: 348512 - protein, 342 aa, unidentified
MKKKVFIGIDFSKLTIDVTFFYGESPDLFYYQMFENSEDGCKKMIQWIKKMHPLTSDWLVCGEFTGIYTMTLALVLNEQNIDLWLENPMQIKLSSGINREKNDQVDSRQIALYANRFEDRVKLYKPQGEVLLKVRELVGHKDRLTKVKTQLKVPAQELKRVRKDCDIAACINRSSQEIIQVIDSEIKDVERQMMFLLKSDPELKRLYKLVTSVVGVGMQTAIYLLIHTSGLTSFAGPRQLACYCGVAPFAKRSGSSIKGKTQVSHIANKKLKTLLHMCALNAIKFDPILKQYYERKLKEGKHKMNIINNVRNKLIHRIWAVVQADEEYDKNYHFVETIDNAA

SEQ ID NO: 348513 - protein, 399 aa, unidentified
MAAPSLWAGIDAGKLDHHCVLIDASGERLLSRRVRNDEAALTALIDDVIALADGGLVQWAIDLNAGGGALVISLLLARDQHLLYIPGRIVHHASAAYRGDGKTDAKDAAIIADQARMRRDLLEFRHRDEFTVELRTLCARRTDVAADRNRAINRLRAQLLEYFPALERAFDYAHRKGALILLTGYQTPEALRRTGRTRLEKWLRGRNAYNSVAIADRAIAAANAQHVVVTGQRLGSTIVTRIAQQILDIDAELSDLDDMIEERFTQHQQAAVIRSMPGFGPLLGAELIAATNGGLDSFHSADRLAAVAGLAPVPRDSGRISGNLKRPRRYDRRLLRVFYLAANNSIKTCPQSRAYYDRKRAEGKHHRQAILSLARRRVNVLWAMQRDNTAYRSTAKTAA

SEQ ID NO: 348514 - protein, 320 aa, unidentified
MNKERKYVGVDISKEYLDMAVVEPDNKWRFGNNAYGIGKAVERLKRLSPVFVVFEATGGLELSFWEALTEAGIEAAPINPRQIRDFAKAKGKLAKTDEIDAAVIAYFGQAMHPRSQPFPTTQEIKEMMSRRSQIVEMITEEKNRLNWARSSRIKEDIQLHIEWLEREKDEADKNLKQVINIDPEMREKSKLLQSTPGVGPIVSASLLTQVPELGTLNRHQIAALVGVAPLNRDSGHWRGKRSVWGGRSRVRSALYMATLVATQHNPVIRVFYQRLLDENKPTKVALTACMRKLLVILNAMLKNKTSWTTSIAQVSSIACP

SEQ ID NO: 348515 - protein, 458 aa, unidentified
MSKKSSKKAKSQRSRERALLNKVHLNAAGIDVGADTHWVAVPEDRDQRPVRNFGVFTSDLIALCQWLKACQIQSVAMESTGVYWIPLFQMLEREGFEVQLVNAKHVKNVPGRKTDVKDCQWLQQLHTFGMLGGSFRPQAQMCVVRSYLRLRDTLSKDCNSLVQRMQKALTEMNIQVHRVISDITGLTGMSILRAILAGERDCIKLAQLKHPQIKSSTQQIAKALEGDYCQEHLFALQTALELYDNYQLKIMECDKRVEEAMGVFEAKVQVAAPDLSRLRSAQKRQEALRRHHLEQMTGADLTKLPGLDLLAVQRILSEVGLDMSRWPSEKHFCAWLNVAPNNRISGGKILSSKPRKNANRAAAALRLAAQSAMQSKTAIGAFIRRMKVRLGAPTAINAGAHKLARLLYRMLKFGKAYVETGQQSYERLFKERTIRNLQRKARELGFYLTPATASAVVS

SEQ ID NO: 348516 - protein, 411 aa, unidentified
MRRVIGIDVHRTFGEVVVWEDGRLRHAGRIDMTRTALEGFGKTLLASDEVVVEATANSMAVSRVLAPFVARVIIANPLQVKAIAQAHVKTDKIDAGTLASLQAAGYLPQIWTPDAETERKRRLVARRYQLVRHRTRLKNEVHSILHAHLIPKCPHADLFNGRGRAWLAAQPLPDDERAAIDRHVRELDRLAEDLALLDREIAQDAIDDSAVNRLMTITGVNLAVAAGIVAAIGDISRFNSPQKLVSYFGLNPRVRQSGLGAAHHGRISKIGRSHARAMLVEAAWAAAKAPGPLHAFFLRIRARRGHQIAAVAVARKLTVLCWHLLTKGEDYLWARPALVAIKTRAMQLQAGHPQQKGSRRGPAYAYNIKALRDREMLIAAQAEQSYERLVTQWKPRRPKTGARAPQLGRTK

SEQ ID NO: 348517 - protein, 357 aa, unidentified
MRIIGVDLHARQQTIAMLDTETGELVEKTLQHEAEKVREFYSALPGPVWVGIEATGSMQWFLKLMEDLGIDCQVGNPAKIRAAEPRQQKHDRRDAALLLKLQVENRFPSICMPSTELRDLRALLKHRHQWVRMRTRVQNALQAIALSHGLRRGKSLWSQTGQHAITSLPLAPHTAHRRTELQALYRQLDEQIGKLEERITDQAWQRPGARRLMTHPGVGPITALATEVFLGDPARFTDGKTLASYVGMIPSEYSSGGQQRLGGLSKQGNPLLRFLWCEAAIHAVRRDPELKRFYRRKLQQKGLGKARVAAARKLGIRLWIMLRDQIDYQEFCRRGQMRQKSGGARAGIPEEGRGPAV

SEQ ID NO: 348518 - protein, 344 aa, unidentified
MEHYAGIDVSLEASSVCVVDGSGRILREAKVASEPDALVLFFRELGCEVTRIGIEACPLSQWLHAEFTAAGFAVVLLEVRHVKAAISAMAVKTDRNDARGIAQLLRMGWYRPVHCKSQPSQDTRTLLTARKQLLVKAIDVELCLRGLLRGYGLKMGVTTGPRFAARVRELTAGHPVLEPLGETMLRARDVLRKEIAVLHRQLLAIARTDHVCRHLMTVPGVGALTALTFKTGVDDPTRFTSSKRLGAHFGLTPRKYQSGTIDVTGRITKAGDAMVRSALYEAAHSMLTRVKSFSSLKRWAMAVAKRRGLGRATVALARKLAIVLHRMWIDGTDFRFGKEEASTA

SEQ ID NO: 348519 - protein, 331 aa, unidentified
MGRQRVRPQYTIGVDIAQEECVWVVLEGPTQTVQAEGKVARTPKALASWAARLRQHWPHALVVLEATGGLERWVRQALHQAGLAVVVANPKRVQRLREAGGWAKTDSQDALALATWGWLFAAPQPQPSPAEERMRELVRRRQQLVDMLHRERMRYQRSQDAFVREQIQYMMTLLEEQLRRLEEEIQRQWERWQQDDPQVAEDLQLLQSMPGVGWWTALTLRLFLPELGQLDAKQVAALSGLAPMARDSGKKRGRRRIHGGRRRIRGALYMVALHWIRRKQGPLWAFYERLRRRGKPTFVAMVALMRRILVILNAMLRDRIPWTPEKAMART

SEQ ID NO: 348520 - protein, 346 aa, unidentified
MKKIFIGIDFSKEKFDATLIKAGGLKECAPSMHEVFDNKTSGFRRLVRWVKTQSEGLPIDTWLFCGENTGAYSIGLSNYLYASGYDMCLENAYKIKHSAGILRVKNDKADSKAIAEYAMRNYDKVRLHKPQSSSLTCLREVFLYRHSLVRQKVALTVRRDEKRLTQEKSDARAFMSFTSKHLITEINKAIYKCDQKIKETIAADDELREIFDIITSMPGIGIQNATCLMVYTDNFQKFDMDSRKIACYYGIAPFGRQSGTSVNSRPKVSPFANRMIKALLSQAALAAIKSDISVHNYYQRLIERGKHPLLIHNNIKNKMLHALVAMVRDRKKYNPDYVYQTNKSAA

SEQ ID NO: 348521 - protein, 428 aa, unidentified
MDQVNRNRLEEFRQLRKEVRHSEEYLIVGIDIAKDRHYAFFGTATGKTLLKRIVFSNDHEGFRKLLDQAEVLRVQHGLKKVVYGMEPTANYHKPLGEYLINLGRMVVLVSGVTVARNRESLDGRWDKHDGKDSANIADLISQGKCLYYEHPSAELRGLRGLLSLKRRLKKQEHGYRVRIRNHLLAQYFPEMDRDYERLGAEGLSIVRWCLAASQVAQLDVEPFIERVTSRRIRMEKRRRLEEVWEKAGESIGCEEVPGVDHEAKVMVEGLKQIREMIKETEGKIKELCEQFPEYHYILTIPGFGPDVSAKVLGAIGEPDRFQNGKQVLKMGGLDLSADRSGKDSDKAIPEISKRGKSDLRYALYQAAFIASTKNRDFMRYYTGKLLGREKEKGIRTKMWVKLAAKMLLIAWTLMKKKEAFDPAYLNVE

SEQ ID NO: 348522 - protein, 402 aa, unidentified
MAKVRSWAGLDVHAASVVACVVDGESGEMTVHRLPGETAAVVAFCAGLPGPARVAYEAGPTGYGLARALVAAGVECVVAAPGKIERPAQDRVKTDQRDAERLARLLMIGALHPVRVPTGEEEALRDLVRAREDLRGDLMRARHRLSKLLLRHDIRYDDTRSRWGERHRAWLAKVDLGERGAQLTLSEYVGAIDALEIRRQTLERAIGELIVSSPWAHDVARLRCLRGIDTLSAIGLAVEVLDFHRFEHPGLLASYLGLVPSERSTGEARRQGRITKSGSRHARRLLVEAAWHYRRAPRLGSTLERRQHGQDPATVAIAWKAQQRLYRVWRQLEQNRGKRRTLIAVAVARQLAGFCWAIVTHDPELPSRPGSAGIPAGGRPPHTASPQPPKHARRQPRRLTTA

SEQ ID NO: 348523 - protein, 367 aa, unidentified
MDSTKYIGMDVHKEATTIAVMNAAGKLVMESIVETKAATIVQFIEGLRGELYVTFEESTWAAWLYDLLKPHVTKVVVCNPRKNALLKSGNKNDRIDARKLAELLRAGLLSAVYHGETGLRTLKELCRSYLAISKDLARTMNRIKALYRSWSIPCGGVSVYAPRHRAEWLSKIMEPGVRRRAELFYQQLDGLQKLRQEARGDLLAESRKHGGTKLLQRIPYIGPIRAALLIALMQTPHRFRTKRQLWAYSGLALETHTSGEYHYVQGQLQRSKRPVALRGLNQNHNHDLKSIFKGAATKAGSAKGPFHDFYSALLAQGMKPTMARLTLARKIATITLLVWKKGVCFDAQQLKRTSRQTVRSRCRDLAW

SEQ ID NO: 348524 - protein, 339 aa, unidentified
MKITTIGLDIAKTIFHLYAVNKMGRYVKKKQLKRHQLLQYLARLEPCLIVMEACGGANYWAREIKQLGHEAKLIAPQYVKPYVKGNKNDYNDAEAIAEAAQRPTMRFVPIKSVEQQDIQNLHRQRERIKKARTALVNQVRGLLAEYGIVINKGIGAVRTGLPDILEDAENGLTMRSRELFAELFEELRLLDERFKQSEKQIENSNRGNDVCQRLDEILGVGPITASAAYAAAGDGKDFVNGRHFSAWIGLVPGQHSTGGKPTLLGISKRGNGYLRTLFIHGARAVLRHSASKTDRFSRWAQALLERRGHNKACVAVANKMARMAWVIMAKGETYRPAMS

SEQ ID NO: 348525 - protein, 348 aa, unidentified
MMIIGCDYHPSWQQICWLDTVTGETGEKKLEHASGEAEKFYRGLPGPALIGMESTGNCQWFVEMAAALGHDVWIGDAAKIRAAEVRQQKHDRRDAALILKLLLEGRFPRIWTPSREEKDLRQLLIHRYKRVRIRAQVKTELQHLAMNQGVTKKRKLWSKAGEKALRELPLKPWASRRREDLFRIREMLHGQIGLLDQAVVEAAEKNEKARLLMTQPGVGPITSMAFVLTMGDVSRFQRGKQVASYLGLIPREYSSGGHRRYGSISKPGNRFMRMLLVEAAQGAVRCDPGMRSEYLHRCHRKAKGVAKVAAARKLAIRLYWRLRTNTGYPEVVRVESSSRVPVVVRHGG

SEQ ID NO: 348526 - protein, 369 aa, unidentified
MGDRISYVGLDVHKDTIVVAVADGGLRGEVREYGRIANTAAALDRLARKLGGDGVMLRFCYEAGPCGYGIQRQLSARGHECVVVAPSLIPKRPGDRVKTDRRDAASLARLHRAGELTAVWVPDPGHEAMRDLVRARLDAVHALRRARQQLSGFLLRQGRHYGRPAWTKLHRRWLAGLKFDQAVHHLVLEDYLQAVEAAAARRDRLTAQIAAMLPDWTLAPVVAALQSMRGMALVNAATFIAELGDLSRFTNPRQLMAYLGLVPSEHSSGASVKRGGLTKAGNSAARRLLIEAAWCYRFPARISRELLLRQEELPKAIRDIAWKGQVRLCARYRKLARTGKPANVVTAAIARELSGFIWAIARRVPLAAS

SEQ ID NO: 348527 - protein, 391 aa, unidentified
MIYVGIDVAKDKHDCIIKNSVGEVVFKTFTIKNNLDGFNDLYQRIESVMEDVSKVKVGLEATGHYSYNLLGYLIDKGLPTFVINPLHTNLYRKSLSLRQTKTDKVDASTIASMLMSDVNLKSYSDTSYHNEELKSLTRYRFDKVKERAKLKTSISRLVCILFPELEKLVPTLHMNSVYSLLYEFPGAKQVASAHLTRFSNLLAEASNGHYGKDVAITFREAARASIGSNMPAKSLELKHTIKLIRELDSEIDEIEGEIKAIMDTINSPILSIPGISYRMGAMIIAEIGDFDRFDSADKILAYAGLSPSTYQSGQLDNCHPRMEKRGSKYLRYALFNATIYVCHWDPTFNAYLAKKRAEGKHYYVAVSHAAKKLVRLIYQLEKSHQPYSKAA

SEQ ID NO: 348528 - protein, 423 aa, unidentified
MDVVGIDWAWDFHICYSIEKNKIYRIKDNEAGYRELLNEVSKEAVFVIEESFNRISDFLLSEGREVYLLPPKRSKEARGYHSNGIKTDSLDARSIALTYSEHPEYCIRARNNEEGRSFREQLRVYRYYKDEASRLKNKLHNELHDHFPEFVEVMGNWKKNKGKILLLSITDELKSLSIEEIHNYFKENQIAFTNSLRKKAKELKKREWHITKYTLMMVANAARNLLEVERGKQEMKNEMERNLKESKYRVILSLPGVGVVTGVALVAAFLNHEFGNYRNFQKYCGTVPIIIQSGNFRKCVMRKHCDRNLKGTLHMMALSAVNKGSWMKGYYARKIKEGKSFGHALRALANTLVKIAFAMLKSLKSYDEELFLSSRGNKSPQSNYTTKTSTPETEKKTNEKSSLPASVAQTNCHLGTDSGRLSP

SEQ ID NO: 348529 - protein, 386 aa, unidentified
MDQATPSTASANTLHCALELSKKSWLLAIQFPDREQPSLYPIVGGDAERLMGKLTAARDRWAKASGALPMITLCYEVGYDAFWLARFLKVRGIECLVIDPGSLQVSRRGRRVKTDRVDVKALLRTLIAWCRGERHVWSPVRIPSIDEEDLRRSHRERSRLVRERTAHINRIKGLLFAQGIRDINVKSRYKTLAIDKLVTGDGHRLLPRLAGEIAREIQRLTMVQEQIAEIERERDAAPTTCEATERKRDLLSQLKSVGPAISAFLSREVYYRQFANQRQVGSFLGLTPSPYDSGEEERCQGISRAGSGHARAVMIETAWLWTRHQPKSALTRWFVKRTAGQSKRVRKIMIVAVARKLAIALWRYVELGLVPQGAILNPPMTRKARS

SEQ ID NO: 348530 - protein, 344 aa, unidentified
MGEVSTIGLDIAKSVFQVHGCDGTGAVVIRRRISRAKVLEFFATLPACLVGIEACPSAHHWGRALQALGHTVRLMPPNYVKAYLKRSKNDANDAAAICEAVTRPSMRFVPIKTKEQQTGLMLHRTRQLLVRQRTMLSNAIRGHMAELGIISAKGRNGTAELLQVIANAEDDRIAPVARFCLAVLARQYATITAEVAAIDKRIHAWHRSCEESRRLEEIPGIGPIVATALIAEVGDWREFRSGRNLAAWIGLVPKQHTTGGKDKLGSITKQGNRYLRWLLVAGAMAVIRYAQKHGPQRRPWLARLMARRPTKVAAVALANKMARMAWAIMVHGDSYKEPRLLLVA

SEQ ID NO: 348531 - protein, 310 aa, unidentified
MDMITVGIDVSKDRLDVVVRPSGEVFAVDRNAAGLELLAARLREVSPHLVALEATGGFETVAAAALASASLPVVVVNPAQVRAFAKALGQRAKTDPIDAAVIAHFAEATKPEVRPLPDEATRLLSDLVARRRQIIEMIGAERQREKRITLARVKKSIGRLIATLEKELASVDGEIDDAMQGSPVWRAKEDLLASVPAVGPTIARTLMAELPELGQLSRRQIAALVGLAPFTRQSGQWRGKSFIGGGRTAVRTVLFMGAMVARRHNPVLRAFFERLVAAGKPKMVALIAVARKLLVILNAIIRDNRPWQTA

SEQ ID NO: 348532 - protein, 394 aa, unidentified
MKLVGIDVGKNSHHFCVMDKETGEFNVTPSSFPNNKEGFDFLINSLKPYSKKSILIGMEDTGHYHVALLKFLLSNGYTVALINPKTTDLTRKMEGGITKNDKLDTITICDVLDTPERKKQYRITKVDRFDLYEQRQLTRHHHNLKEELNVYCNRLQKSIDLVFPEFNTLFSSKYSIVYMNLLKTFGSAEAIASTDIRTIRKCFEIKGRGNRISLTPEKLKECAKNSIGISSEVETIQIKHLVSQITLIKEQIAEIDKKIEEFSITNNSPILSIPGISHFSGTSILAELGDIGNYSKPSQIIKFAGVAPYHYESSQYNAQHTGITKKGSKYLRKTLYQIILTVINNNPVFKKYYRLKISQGKGHRCAQGHCIRKLLRIIYHLLETGQSFDPALLR

SEQ ID NO: 348533 - protein, 325 aa, unidentified
MIIIGCDYHPSFQQIAFVDTETGELQERRLQHREEAEKFYRDLAAQGMKVRVGMEASGHARWFERLLAELQLELWIGDAAEISTKRVRKQKTDRQDALLILKLMLKDDFPQIWVPSGENRDLRQLLWHRHRMVQARTRMMNQLQAVALNEGLRCKKKMWREAGREQLESFRLAPWASQRRQDLLELLDRMNPTIAKLTQAIDLEVEKCPEARRLQTHPGVGPLTALALVLIIGRADRFQCGQQVACYLGLVPLEKSSGNQRRLGQITKPGNSLLRFLLVEAAQVTARSLPEWRSKYVHLTMRRGRKIAKVASSPWCKSGFVSKNF

SEQ ID NO: 348534 - protein, 411 aa, unidentified
MRVIYERCCGLDVHKRTITACVLRWMGGQWQKEMRQFGTMTKDLLALSDWLVGEGCTHVAMESTGVYWKPVYNILEGQLELLVVNAQHLKAVPGRKTDMRDAEWIAELLAHGLLRGSFVPPVSVRELRELTRYRTSLVRDCARTINRLQKVLEGANIKLASVVSDIRGVSARLMLEALLAGERDTEQLAGLAKGRLKEKREQLVEALLCRLQPHQSFLIAEHLAQIDYLEGAIERLSHEIEERLRPFEQQIAWLDTIPGVNRRTAEVLWAETGGDMSRFASARHLASWAGMCPGNNESAGKRRTGRTRKGSPWLRHCLIEAAHGAAHTRNKYLSSQYHRLIARRGKKKALVAVGHSILVIAYHLLTRKQAYSDLGANYFDERDRQAVTNRCLNRLQKLGYKVTLEKMSLAA

SEQ ID NO: 348535 - protein, 362 aa, unidentified
MKKVSKQTPRMEASYAKPTMTVGLDMGDRFSHYCLLNGDGDVVEEGRIQSTEAALRRHFESEPCLRIALECGTHSPWVSRLLTALGHQVIVANARKIRAITASESKNDKNDAEKLARFAAHDPRLLSPIEHRSAARQLDLNMLRARSTLVRARTMIVNALRGLVKSAGGRLPTCSTASFPVRAAAAIPAPLVGVATPLIEQIALLTTQIEGMDKQIEDLGAKYPEIGLLRTAPGVGPVVAAAYVLTLDRPDAVSGNRAAGAFLGLRPRQSQSGDSDPQRRISKTGNSYLRSLLVQSAQYILGRFGPDCELRRWGLKLAASGGKRGKKRAIVAIARKLAVILHAMWRSRQSFQAFPQPATVAA

SEQ ID NO: 348536 - protein, 352 aa, unidentified
MQIVSALDVHRRQITYKTLDRETGEVKRGRIAPAARSDVREWLARFAGCEAEFVLEGTTGWRFVVDEIERAGHTAHLADPAETAAKRGRKRRAKTDNADCDLQLRLLLAGELPESWIPPAHILELRTRVRMRKTLVDQRSAWQQRLQAQLFHQGTAAGLRPRTRAGREALARVELSAAGRELVALALRMLDVIDLELAPLDGELGSFARRQPGCRALIAQLYGVGVITATAILAELGDCRRFTSSDDAVRHTGLDVTVHQSDSKRAPGHLSHEGPAVLRWALFEAAQSAARRSSPDHAYFCQVRERIDYNRACLSVARKLCRRAYHILRELGGQALAPVEFDQAEEAIEAAA

SEQ ID NO: 348537 - protein, 338 aa, unidentified
MSLKSKFFSSLAHAKAIGIDVSKAKLDICCLTEQSDITIEIHNDAEPIREFVEWLVKHHYCHKIIMESTGHYHWLMAVELSKHNLDLRLINPLLSSKHAKAGIRKTKTDKVDAYRLATMALTERDLPARWHKDAKWVEIRHKVGLLKQMEQSIQQLKSAISDHEEALAKIGVLEDEWLLTLKRQAFELSKVKQASEKSLTEYMHKSLSSERQKRFQSIPGVSPYLAGLLDVFMQDGVGSVKSWVAFVGLDIGIKQSGSWQGRSRLSKRGNAYLRKRLYQAAWGAKQNNAEFKAYYQQLREQGRPYVECLLILARKILRIAYNLSHKSENYIGKMWAKC

SEQ ID NO: 348538 - protein, 425 aa, unidentified
MNYKQNEKINQVKESTLVVGIDIGSTTQYARAFDWRGIELGKVFPFSNSREGFESFKAWMQHLQDKYKKLDAIVGIEPTGHYWFDLGAYLEDEGILLVMVNPYAVKQTKELDDNSQSKNDRKDPKVIAKLVTEGRYSAPYTPDGVYADLRIMVANRKRLIREMTQIKNRFARWFAIYFPEYTDVFGDYEAQSSMLLLKKVCTPEAIVELGAEKINQIWRDAKLRAVGMKRATTLCETAKRSIGLKKGSSAAQYEMKLLLEDYEYKKAQLDAVMEEIEKLCRKIPESEQMLAIKGIGVITVAGFLAEVGDVRRFESPRQIQKLAGLSLWENSSGKHKGQTTISKRGRSKLRAVLFNAAIPLIAKNPEFKSLHEYYTTRANNPLKKKQSVIAISCKLIRVFYAILANGVTYDSQKLLSDIHRQPQVA

SEQ ID NO: 348539 - protein, 412 aa, unidentified
MNIVYERCVGIDVHKRNVVVCAITPDAQGQRHKEQRTFSTMMPDLLRMRQWFQSLNVTHVAMESTGSFWKPIFNVLEGHMEVLVVNAQHLKAVPGRKTDLKDAEWIADLLQHGLLRPSFVPPAFQRELRELTRYRTSVIEERSRTINRLQKILEDTNIKLAAVASDLMGQSAREMLAALVAGEADPTVLAQLARGKMRAKHDLLVQALQGQFKPHHRVLISEQLAHIDTLDEEIERLSAEIAQRLRPYEAQLKRLVTIPGIKRRLAEVILAEIGPDMQRFPSARHLASWAGMCPGNRESAGKRLSGKTRKGSPWLRTALVEAAHAATHCKESYLSAQYHRLVLRRGGKKATIAVGHTLLVIVYHVLADEKDYQELGGNFFDEHDRQAVQKRLVHRLEKLGYEVTLVPTSPAA

SEQ ID NO: 348540 - protein, 443 aa, unidentified
MAMRTKKNELSVCYPNAAGIDVGGGSHFVAVPPDRSELSVREFGCFTEDLYAMASWLAECGVTDVALESTGVYWIPVFEVLESCGLRVLLVNARSVKNVSGRKSDVLDCQWLQQLMSFGLLSAAFRPPADVCALRAISRQRDTLLQEQGRCIQRMQKALTQMNVQLANVITDITGQTGLAIIRAIVAGERDPAVLAKHRNYRIRASAETIAKSLQGTWKEEHLFCLGQSLALFDTYRTMVAEVDAQLKTMIAPLRLHAAAPLQGKPKRRGKNAPDFDVREALQQWAGVDLTRIGGIDVGTALKVLVELGPDLSRFKTAKHFASWLGLCPGTRISGGKRLSGASKRIPNRVARALKLAAQGLSRSQCGLGAYYRRMAARMGAGKAITATAHKLARLVYAMLTQGTEYVEQSQAQYEERFVDRTFKYLQQKAKAMGYILVAEAAV

SEQ ID NO: 348541 - protein, 335 aa, unidentified
MKKFIYYIGIDVSKLKLDVTVLWESAQDTKTSYHVIANEMKSIAQFIKELSKRRKTEDMVFCFEDTGVYSLLLAYYFSNKGLCYSQVPYIEIKRSKGISRGKSDKTDSSDIAFYAYTHLHKLSLRVIPVVAVQKLKLLFAEREKVLKALAVFERTNENIGFIPAEIYSCVSSINKSVVSKLKNALSQIEEKMLEIIKRDDKIKEQYKLVTSIPEIGRQTAIYLIIATKSFDAFDNWRKLACYAGTAPFPYQSGTSIKGRTKVHPMADKKLKSLLNMCAMVAVRYDKELKIYYERKIKEGKSKMLVLNNVRCKLLARVFAVINRQTPFVDICKFVA

SEQ ID NO: 348542 - protein, 459 aa, unidentified
MPFERPTRMSRKRKTKIQKIRPVINPYAAAADIGAREIYVAVPVELSESAVRRFETFTEDLRQLVDWLAGLKITTVAMEATSVYWIALAELLEDAGIGVCLVNPRAVQNVSGRKSDVMDCQWLQYLHAVGLLRAAFRPEAKVRAVRTLWRHRSTLVRQSAQQVQHMHKALDQMNLQVHHVLADITGVTGTAIVEAILEGERDPCALARFRDKRVKASPQTLVKALTGDYRPEHLFCLRQAYQALRFIEKQITEADVHIGQKLDELTQTTGPLPATPPAGAPKRSAKHAPGYPAQERLRALFGVDLTSIPGVSTLTAQTVWAELGADLSAFPTVKHFCSWLSLCPDNRTSAGKCLSTKTRASANRLAHALRLAAQCCHHAKHELGDYYRKMRARLGAAEGLVATAHKIARILYAVITTRTPYEPSILARSSQHLHAWRVKKLHSMALHLGFHLVPNQHHI

SEQ ID NO: 348543 - protein, 388 aa, unidentified
MQATNPTSTTWSPSSDQAAIVVSLELSRAVWLVTALLPGGSQKMSRHQVPGGDLAELLSRFAELQRKAHARTGQLARIVVIQEAGLDGFWIHRVLESEGIESHVVDPASIAVSRRRRRAKTDRIDGEALVRTLLAYKRGEPRVCAMVRVPTPDEEDQRCLCRELKTLVSERVRHVNRLRGLFFSQGIADYDPRRPDRRARLDELRTGDGRALPPHLKAVARRELEVIELLDRQIEAVKAERDALLAAAQTAEVPSKAVQMLLGLKGIGSGFAGALWSEGLFRHFDNRRQVAAYAGLAPTPWKSGKIDHEQGVSKAGNPRLRAILVEMAWLWLRHQPGSALARWYHDRVRLGGRLKKVTIVALARKLLVALWKYVTHGVVIEGAGLKVA

SEQ ID NO: 348544 - protein, 341 aa, unidentified
MSDYSYFCGIDLAKNHFSLHAVDQNGKVILHKSVTRSKLLTTIVNMPLMRIGVEACGGAHYWARTLNKLGHDVRIMAVKYVVPYRTKGKNDLNDAVAICEAVQRPSTRFVPVKSPEQQAILSVHRMREHWVRERTALMNRMRALLSEFGLIIPVGRSSLMKHVPLMLEDAENELPHLARTVIADAYHHLGELNQRIADTEQVFESFAKVSANVQRVMQVRGIGPQTATAILASIGNGSQFDKSRDFSAWLGLVPKQYSTGGKPRLGRITKHGDKYLRTLLVHGARTVIANLGDKQDKLSQWCRGVLERRGMNRAIVALAAKNARIIWSLLHNQTEYKNYAA

SEQ ID NO: 348545 - protein, 422 aa, unidentified
MLEETHDNDQIIQRVAALDIGKAELVCCVRVPHPDRPGKRLQEVGSYPTMTRSLLVLVDRLGELGVTRVVMEATSDYWRSPFYLLEAHGFEVLLVNARDVKHLPGRPKTDRLDAVWLCKVAERQMLRPSFVPPPAIRRLRDVARYRVDLVEARTAEKQRVEKLLEDAQIKLSVVASDIFGVSGRQMLAALVAGERDPKLLAQLARGRMRAKLSVLAEAFTGFFTDHHGFLLAKMLARVDALDADIAELDRKLEELIVPFGQAVDRLDEITGVGRTAAQLILAEIGTDMGRFPTAGHLASWAKFTPGVKESAGKKKGKSSTGHGNRYLARVLGEAAVAAGKTNTFLGERYRRIARRRGTKRAIVAVGRSILVIVWHLLSDPDARFHDLGPGFYDTRIDAERKKRNHIRQLEALGYKVTLQPAA

SEQ ID NO: 348546 - protein, 354 aa, unidentified
MSEKLNTTVTVIGIDIGKNSFHVVGLDARGAIVLRQKWSRGQVEARLANMPPCLIGMEACVGAHHLSRRLKMLGHDARLMPAKYVRPYSKGQKNDFRDGEAIAEAVQRPTMKFVATKTAEQLDLQALHRVRARLVSQRTGIINQIRAFLLERGVAVRQGLRFLRAELAQILATRTDVVSPRMVHLIEDLASDWRRLDERIEGLSAAIETLAQHDPACQRLMSVPGIGPIISSAMVAAIGRGDVFSKGRDFGAWLGLVPKQTSTGDRTILGRISKRGNRYLRVLFVQAAWVVLIRPKSWERYGLKPWIEAARKRLHRNVLAIALANKLARIAWAVLNKERNFECVAKNTMTPRSA

SEQ ID NO: 348547 - protein, 367 aa, unidentified
MRLSVGVDLHKKQFTVYWRIEGREDGRNGRYVTDERGYGQFEKELEVFVGRGYEVTVAVESTGNTRYFKNRIEKLGISVVVVNTLKFKIVNESVKKTDRHDASTIAEFLEKDILPQARLCSQESEELRRLLKTRTTLVRTIVVVKNQIHGLLLSFGIESARGSLQSKQERRRVQDVLAAQQLTGAAVDPLFETIDRLSVEVKKLEKIIEEKTKDDRVVQLIRTIPGAGLITAATIRAYLDDIRRFEEAKHLSAYAGLVPWVQNSAEREHYGRITKRGPNELRTALVQVVLGMVRSKRRTGSYRIMERYDRLKRVKGSGRSIIATARTLSEIIWHMLDRDEPFDETQMKDPEIRKKAREMQAAAFNAA

SEQ ID NO: 348548 - protein, 390 aa, unidentified
MPEDAFRPAQAAIRTDLGAIFVSLELSRRAWLITSLSPGGGEKMSKHSVPAGDIAGLLRRFTQLKEKARARTGRDFPIITIQEAGLDGFWIHRVLQSEGIESHVVDAASILTSRRRRRAKTDRIDGETLVRTLMAFKRGEPRVCSMARAPTPQEEDRRRVCRERRTLVGERVTHVNRIKGLLFAQGVFGYEPLRKGRRERLEELRTGDGRPLPVHLKAQIIRELDRLEVLLEQLKSVEAERDALLKPSTDQAASPAAMLARLKGIGPETAAVLWSEGLFRQFDNRRQVAAYAGLAPTPWQSGSIDHEQGVSKAGNPRLRTTMVELAWLWLQNQPTSALSLWFHERVRLGGRMRKTIIVALARKLLIALWRYTTAGVVIEGAVMKAAPATI

SEQ ID NO: 348549 - protein, 358 aa, unidentified
MTQVKKLDFSGTTIYCGVDVHKKSWRVNIQDSEFELEDFTQNPDAVVLYKHLARRYPGAVYKIGYEAGFSGFSMQRTLSQSGCECWVVNAADIPTSDKDKKQKQDKADARKLCNYLQLKKLKGIHIPEAEWEHARTLVRTRERIVHNQTRCKNRIWQLLHFSGLPVPAAQQEGRYWSKRFTDGLQEMDCGGSIHLQQSLQLHLKDYLQTRQLLLEATRAIRALCREEKYAGDIKLLRSIPGIGEINAAVILFELQDVTRFKRFDYLCSYVGLVPDTSDSGDTKRTKGITHRHNYYLRTALVESSWSVVRKDPALLMKYKAYCTRMEKNKAIIRVAKHLLSRINFVLKNKKEYVTGVVA

SEQ ID NO: 348550 - protein, 315 aa, unidentified
MDVLSVGIDVSKATLVIAVSPTGESWSSETTPAAIDALVARLQGLTPTIIVVEATGGYERALVAACVAVGLPVAVVNPRQVRAFAQALGRTAKTDDIDGHVLAEFGARMQPTARAISDGETQALAALVVRRRQLVEMIGMERRRLEQAPPTGKITRDLRNHIRWLERRVEHVDEEIGTAIQASAVWRVQDDLLRSVPGIGPTTARTLLAELPELGRLDRRCIAALVGVAPFNCDSGQQRGQRHIWGGRAAVRAVLYMAAVSGTRHNPVLRAFYRRLRDAGKPAKVALVATMRKLLTIVNTMIKHQTKWNPEVRTV

SEQ ID NO: 348551 - protein, 350 aa, unidentified
MEKCIMKHYAGLDVSVKESAICIMDETGKVCREVKVVSHPEDLIEVLKDPAWRLVCVGLEAGPLSQWLFSGLVEADLPVVCIETRHTKAFLKAQVNKSDRNDARGIAQMMRVNLFRPVHVKTLVSQKRRALLTARKLLQEKAIAVENDIRGLLRNFGLKVGVVGVIKFEERIFELVDGMPDLAEIMTSLLEARRTLREQVGKLHQRLLSIVRENDACRRLMTIPGVGPIVSLAFTATIDIPARFKSSKAVGPALGLTPILNQSGESNRVGRISQCGDGMMRTLLYEAAQVMLTRTIKWSWLKAWAMNIAKRRGKQKAIVALARRLAVIMHRMWCDGTEFRWTKETVPAAA

SEQ ID NO: 348552 - protein, 402 aa, unidentified
MNAVGIDVSKGKSMVAIMRPFGEIVSAPFEIKHTASDIHSLVELINSVEGESRIVMEHTGRYYEALAHQLSEANLFVSAINPKLIKDFDNDSLRKVKSDKADAVKIARYALDKWQNLKQYSVMDELRNQLKTMNRQFSFYMKHKTAMKNNLIGILDQTYPGVNTYFDSPARSDGSQKWVDFASTYWHVDCVRKMSLNAFIDHYQNWCKRKKYNFSQSKAEEIYGKAKELVPVLPKDDITKLIIKQAVNQLNSASTTVESLRTLMNETASQLPEYPVVMAMKGVGTSLGPQLMAEIGDVSRFTHKGAITAFAGVDPGVNESGSYEQKNVPTSKRGSSNLRKTLFQVMDALIKTHPQDDPVYQFIDKKRAQGKPYYVYMTAGANKFLRIYYGRVKEYLSSLPES

SEQ ID NO: 348553 - protein, 344 aa, unidentified
MEVMIGVDPHKGSHTATMLDRRQRELRQITVRAGRRQVEQLLEWVDGVKPRTWAVESAGGMGYLLSQQLVAAGETVLDVPATLASRVRVLGTGQSTKTDANDARSVAVAALHAPALAVVRPADHVTVCRLLAKHHTDVARWRTKQCCRLHALVAELVAGGIDKEVVVTQARSLLERIEPQDVAAVERHRQAVELVDDIEHLDVVGKDSRARISAAVAASGTTLTDVFGIGPIVAGMLIGFSGDPLRFTTASRYAAYTGTAPIEFSSGGRIVHRLSRRGNRRLNHALHCAAITQIRHRHSPGRRYYERKLAEGHTPREAIRALKRRLSDVVWRHLVADARRVANR

SEQ ID NO: 348554 - protein, 426 aa, unidentified
MNRYTKDQSPVFIAIDIAKEQHVALIETPDGRRTKLIVANSRDGIDRFIAGAQALSYPCEVAFEATGDYHRPIAFAMLQAGFRLHFVSSIATNRTREALYNTWDKNDPKDAQVILSLLKAGHTQIYHDPLEHGHHDLQELANTYQQISKRRTRVYHSILTHYLPLYFPEAERFITNGRAEWFIEVLRRTPSPSAVLAMSKTAFVRKSLTKSGKPTIRQRLLEEFYDIAKTSIGLPVKADSPSVEMFRTILDEFVELAQRRRRIKALIDRVLANNRDYERLTRVPGIGSVIALIVLAEAGDLRRFDNYKKFLKFCGLNLSASQSGKTAGTPALSKRGNARLRYAFWLAATSAIRQRQNGFAEKYRRYIATDPDSRDLRRKAYTAVAAKMARVVHGLIRSGNDYRHLYEAAQGGRIPSPRAVEAFATS

SEQ ID NO: 348555 - protein, 403 aa, unidentified
MDSISQSQIIVRKELIIMKLVGIDIAKYKHAAFIMDASTGESLCEPFFFKNNKEGFQKLYMELNKYAKDELLIGMEDTGHYNFTIESSLLAEGYKVALINPITTKNLRKASLKSVKSDKEDALLITKALLDKDYYRIISIQDEKLNEAKQLTRYRIQLTIEMNRKKNILQRHMDIVFPEFNTLFKNGYTITYLNILRKYGDAYTIAHTDIRSLRKCFKYCSSFTAEELKELASNSVGIHDVSISFIIQSIVSSIDLINSQIEELDKKIEELAITQDSSITSIPGISKISGTSILAELGDISKYSNAGKVIKFAGVNPYISESGEFSADKTAITKKGSKYLRTTLYRVIIPVIRHNPAFNNYYHLKRSQGKGHLCALGHCVRKLLRIIYHLETNNLSFDINLLK

SEQ ID NO: 348556 - protein, 405 aa, unidentified
MDITAIHRRVIGLDVHQNKITACALIEQADGSVAVEQGEFGGFKRDRRALAAWVHGLAPDIVVMESTGIYWKSPYAALEKVGIAAWVVNARHVKNVPGRKTDISDAQWLATLARAGLVRASFIPPAEIRHLRLIARQRQKLGGMLAAEKNRLHKVLADAGIRLNVLLSDLHGQSARAMVKALLADQPIHAILERAGRLRASREDLFEALQPEELSAKHRFVLNEIMAHIQYLEATMARFEQQLLVGLAPWEPQMSLLETVPGIDRLGAAMLLVEIGTDMDSFGSAERLASWVGICPGNNESAGKRKSGRTRKGNAWVRRLLCEFAQAASRTRCALKDKFSALAIRKGHKRSIVALAHKMLRIVYAMLANTTPYQDRSVDYEALMVGRNAPRWLKMLAKHGYIATA

SEQ ID NO: 348557 - protein, 407 aa, unidentified
MQEATQHDAVDVFVGVDVDVDVDVGKGQHHAVALDRNGKRLYNKALPNDEVKLRALIAELKTHRRLLFVVDQPSTIGALPVAVARAEGVLVAYLPGLAMRRIADLHAGEAKTDARDAAIIAEAARSMPHTLRSLRLADEQLAELTMLRGFDDDLAAQVTQTSNRIRGLLTQIHPALERVLGPRLDHLAVLDLLERYPSPSALAAANEKTLANRLTKLAPRLGKNWAAEIVQVLNEQAVIVPGTQAAAIVMPRLAQQLAALRKQRDEIAAEVERLVLAHPLWPVLTSMPGVGVRTAARRLTEAAPKAFATATHLAAYVGLAPVTRRSGSSIRGEHPSRRGNKVLNRALFLPAFAALRDPVSRAYSSRKIQQGKRHNQALIALARRRCDVLFAMLRDGTIYPPKSAPDA

SEQ ID NO: 348558 - protein, 347 aa, unidentified
MRFYTKQHSFYCGIDLHARSMYLCIHDQEGVIVLHRNIPAKPEPFLSAIAPYREGLVVAVECMFSWYWLADLCDRENIPFVLGHALYMKAIHGAKVKNDRIDSKKISALLRAGLIPQSYVYPAPMRATRDLMRRRTHFVRKRAELISHILNTNSQYNLPEFGKKVAHKIHRQGVLDQFTDPDVRMSISADLDLIDSLDLVIGNLERYILRNARNHNPQALHLLRTIHGIGPVLALTLLYEIHDIGRFPRVQEFASYARLVKCPRESAGKRYGASGKKIGNAHLKWAFSEASTLFLRGNPEGMKFKKRLEKKHGKSKALSILAHKLGRAVYYMLKRSQAFDRRKFLGL

SEQ ID NO: 348559 - protein, 339 aa, unidentified
MQLYAGLDLHSRNTYIGIMDKEFKRVFSKRIANKLPLILATLKPFQNQLKGIVVESTFNWYWLIDGLMDAGYDCPHLANPSAMKQYEGIKHTDDQHDSFFLAQMLILGILPQGYIYPKEDRPVRDLARKRLFLVRHKTAHILSLQSLIARCCGKRVSANEIRKFTVEDLQQLLQQEYIVLSAQANLDTIVFLKQQILQMEKAIKNKVKLSKQFQQLLTVPGIGLILAMTIMLEVGDIGRFPQVGNFASYSRCVSSQRLSDGKKKGQGIRKNGNRYLSWAFTEAAHLSRRYNEDFRSYYNRKVAQANTSLATKALSNKLARICYYIMRDQVPFREEQQSH

SEQ ID NO: 348560 - protein, 366 aa, unidentified
MLIHVPPGVSVLAMDVHKSTISAAVLTVDAGSPVVDKVSSDDESVRRLVARFEDPGRVWACYEAGPTGYELARLLHGMGVRCEVIAPSLIPARPGDRVKTDRRDAARMALLFRAGQLSSVRVPTVAEEAVRDLCRARADMVIDQTRARHRLGKFLLRHGRVWRDGDSWTLKHRAWIRAQRFDDAALTATFGHYQATLTAREAAVDAVDADLQLWYSRAPFADAVSRLAAYRGITELGGLTLASEVCDWRRFPTAATFMGFCGLVPSEHSSGQRTQRGGITHAGNTHLRTQLVESAWAYKSRPAAGAAIKKRQEGLDPEVIARAWAAQLRLCGKFRRLDERKTNRKTVVTAIARELAGFVWAEMTAA

SEQ ID NO: 348561 - protein, 410 aa, unidentified
MDVVFDRVAGLDVGKKIVVVCVRTPGPGGKRVSETRTFRTMTRSLGLMADWLAECGVKLAAMESTATYWKPVFYCLEEQVETWLLNAAHTKAVAGRKSDVRDAEWIAQLLEHGLVRPSFVPPPPIRQLRNLTRYRVQLQGDRTRDAGRLEKLLEDASIKLSAVASNIVGASSRAMLGALVAGERDGAVMADLARSKLRRKIPELAEALTGRFDDHHALLVGQLLARIAATEQALVDLDAHLADLMIPWAHELELLQTIPGVGVHVAQAFIAETSGDMSRFPSPAHLAAWVGVAPAMHESAGRRQPAGTRHGNKFLTAMLVEAAQSASRTKDTYLAAQFARLTSRRGHNRAAVAVAHSILVSAYWMLVRDEPYRDLGPGWLDQHARTEAHTRHLIAQLEHLGHTVVLDPVA

SEQ ID NO: 348562 - protein, 341 aa, unidentified
MSKRLVPNCAVLHCGIDVSAAMLAVAVQPEGSDGFELREFANSTAGCRQLVAWLDRWQAPVRVSLEATGIYSLDVALALDRAAGIEVAVLNPRTVHRFAESLRRSKTDAADAVALAEYSRRMPFVAWVRPPEAALELRAISRHSATLTEEHARLKNRLHAACGSTSTPRCVREDLRRSMAGLEKRLLRLRREALAAIAKDAGLEQKFQHLTGITGIGEASAVQLLGELAGLDPEMTVRQWVAHSGLDPVHEISGTSVHKPSRISRRGSRHLRRALYMPALSATRFDPYMKAFYTQLQARHKTKLQALTAIARKLLHAIFGIFKTGTPYHPEKLFPQLLLTS

SEQ ID NO: 348563 - protein, 343 aa, unidentified
MKLSRIGVDLAKNVYQLHGVDRHGKTVWKRRLRRGQWLQALLDKAEPGCEIGMEACTGAHHWARELQSRGYTVRLIAPQFVKPYVKSNKNDANDAEAICEAMSRPNMRFVTLKSVEQQDIQATHRVRSEIKDQRNAKANQIRGLVAEYGLVAPTTLLALRRAIPCWLEDADNGLTDDFRNLLHGLWGDLAALDDRMTELDKQIKTIADSNEVTQRLQQLRGVGPLVATALVATVGTGEQYCKGKQMAAALGLTPRQCSSGDKQRLLGISKRGDVYLRTILIHGARAVVSQAKHRDDRLSQWVTSIAKRKHPNVAAVALANKTARMAWAMLRNDANYDPDFAIG

SEQ ID NO: 348564 - protein, 338 aa, unidentified
MGEQYVGIDLHRRRSVIVRMTGEGEVLETVRVDNDPVALSLELAKAGPDPEVVLEATYGWYWAADLLQACGAKVHLAHPLGVKMFGYQRVKTDARDSTNLAELLRMGRLPEAWLAPPAVRELRELERYRAKLVALRSGLKAQVHAVLAKEGVRVPMSDLFGVGGTRLLDQLQLGRAYGLRVTSLRSLITAYDQEIAMLGREIATALAGDVGYLAIQAIPGVGPVLAAVFVAEIGNVHRFAGAPQLCSWAGLTPRHRESDTTVRRGPITKQGPRLVRWAAVEAIQRLPKTSKQATDFYRIADRRGTGIGRVAAARKLLTLVFYGLRDGQVRCLAPREAM

SEQ ID NO: 348565 - protein, 345 aa, unidentified
MKKVMAGIDLHSNNLMIGIMDMDGKRVASQKLSCGLKEVVGFLSPFKKRLEQVAVESTYNWYWLVDGLQRLRYPVVLANPAGMEQYSGIKHADDTNDAFFLAELLRLKILPTGHIYDEQLRPVRDLLRRRLTLVHHRTALMLSFKSLYTRTTGKEMTLSQLKELEIKQAQDLYDHPANQLIAGMQIKHIEQLTESIERIEKVVLDCARELPLYTKLTTLPGVGTILGMTITMEVGDIKRFAEAGHFASYCRTVEAKRTSNGKKKAENNSKCGNKYLAWAFVEAANFARRYDEQCRKWYERKAAKRGKVIGTKALACKLAKAAWYLMALGTDYNAKRMFGQPATTQ

SEQ ID NO: 348566 - protein, 376 aa, unidentified
MLYVGIDVAKNKHDVTALNVPGKTVLKPLTFSNNKAGFELLDLSLRQLNQDCLIALENTGHYAFNLLNFLHEQGYKVYTCNPLLIKEFAKSLSLRKTKTDKKDAHGIALKLLSDPNREQFQHDNRQVDLKILARHIHRLKKKQSDWKVQYTRCLDIIFPELDKIVGKHSEYTYQLLTRYPNPQKRIEAGFDKLIEIKRLTASKIQDILSVAPRSIGTTSPAREFEIIEIIKHYKRLIDKAETCVNDLMAEFNSVITTVTGIGNRLGAVMLAEIRNIHAFDNPAQLQAFAGLDSSIYQSGQIDLAGRMIKRGSPHLRWALIQAAKACARFSPAFKAYLKTKLEQGKHYNVAIIHLAKKLIRTLFYILKKSCHLTNKK

SEQ ID NO: 348567 - protein, 359 aa, unidentified
MDATTVAVDLAKNIFELAVADGHWHVIERKRLSRTQFERWFANRAVSRVVMEACGSAHHWGRWLTSQGIAVQLLPPRYVRPYVKRNKTDATDAAALLEAARCADIVPVRVKSVEQQALQSLHRIRSAWMATRTARINGLRGFGREFGLVIAEGSRLGLEQIARALADPATAIPTLLRETMRLLLEEIRLLEARIAQIERELTAAARASAACTTLLSVPGVGLLTATAMVAATGGSVAHFKDARHFASWFGLTPKEHSSGGTRHLGRISKRGDRYLRMLLTHGARSVLRAATVAQRCGKPLEPLRSWALAVQARSNHNKATCALANKLARICYATLRDSTPFERTRLDHKLERQAFAMPL

SEQ ID NO: 348568 - protein, 341 aa, unidentified
MSLIAPVFSFGLNGYTGSGLALQDKAEKSLMRITIGIDISKETLDAYRFPDNQHIQVANGRAGHKTLVRWIGKQNGSLVVFEATGAYHRNLEAALAANGTAFAKVNPRQARRFAEATGRLAKTDRVDAVMLAKMGAILSLTAHEPKTEALPILRELITARRALMKDKVAAKTRLQTTRQTLLKNQINARLNQIKIQIRQVDAAIAEKVTQDEALSNKLAILISIPGIAETTAFSMLIEMPELGTLEGKQAASLAGLAPMSRQSGKWQGKERIQGGRAFLRRAIYMPALVATRYNPCLKAKYDQLIRAGKSGKVALTAIMRKLVVMANALLRDGRTWSELRP

SEQ ID NO: 348569 - protein, 294 aa, unidentified
MLHAGLDLSRKKVDVCLLSEQAEIVEEFAAPPDVDGLRGLARRVACRQEPVRGVIESMTGARFVHDTLEELGWDVLIADAAKVKGLAPPACKTDKIDARVLALLSQRDLVPEIWLPDPSVRRERELARFRLHLVKHRSMLKHRVHATMITFGHPCPVTDLFGVAGRELLDRLKIPQPWRATVDASLALMDDLDDQIQSINKQLRALSPEHRYMPLLMTVPGIGFVLSYTIAAEIGDITRFSAPNKLVGYTGLCPRVNQSGDRDRRGPLTKQGPKYGSPRVIVGEVRRSSVRVGA

SEQ ID NO: 348570 - protein, 342 aa, unidentified
MTQQRISYAGERVYVGVDVHKETYTVTCVCRKQIVKTATVPAEPASLAASLLQWFPGATLTAAYEAGFSAFVLHRALTQVGITNIVVNPASMAVAANDKVKTDRRDSKRWAIDLADGRLRGIYVPTEAEALARLLPRTRAQIVEHRATIARQIKAKLHQFGLIAPASRRLISNRYLREIAARALPPELHVRLTVLAEQWCFATRQLIEIRRLLREQAVAQAELEQVYRRVPGIGAVVARPLATALGDMTRFAHERALCSYTGLTPSAYSSGPAVRRGHISRQGSGRVRHLLIETAWRALPRDKVLQEILDRSAATRGKKRAIGASARRLTGRMRACVRQGTT

SEQ ID NO: 348571 - protein, 347 aa, unidentified
MKKIVKQVVGVDVAQNELVVCLGRMYEDWIPELYANKTFANTVKGFAALILWVKKLTEESIPTRYVMEATGVYHESFAYFLEEKGCEVSIVLPNKISNYMRTLEVKTITDRTASEAIARFGLERQLEGWKRPAEIFRRLRQRTRERDQLVTERTLVKNQLHAEHTEAYPSKESITRMKARIQLLNKQIRQIKEEMDALIKQDKEVNRSVELITSIPGVGVLTAATVLAETNGFELVRNKRQLTSYAGLDVREKTSGTSVKGKPKISKKGNRYLRKAMHMPALAAIRGEGRFRVLFIRLISKHGIKMKAAVAVQRKLLEMIYTLHKTNTTYDMDFLKKDLITLSTQEN

SEQ ID NO: 348572 - protein, 415 aa, unidentified
MSHKRISLECTVVVGVDIGSERHLGYIRGPNRLEVRAFPFSNDRSGFHHLASRVSAAQVAGGVQQVVLALEPTGPYGEALARWARSQGWRVVGVLGAHTSRAKELWGNSPLKSDPKDAQVICDLAVDGKWVTFSLRDGAYAELKALVVHREQLVRRQTALKNQVRALLRVVFPEFQRVVGTWGVFTKTALRLLERFPTPASYQATDEQELSHLLRRWSQGRLREERAQALLAAANQSVGVNAGLESRTWVLRRAVRGLTSLEHEIQAVEVRMAHWLERIPYGACLMSMPGVGVVTAATLLGECGDLDDYPSARELLKFCGLNLVSSASGQHQGRNRISKRGSRSARHQLYLLAGRLARWDGVWREDYDRLRARGAEKKETLVALSRKAVRVLFALARDRALYAGRYHRGGLRRAA

SEQ ID NO: 348573 - protein, 316 aa, unidentified
METPQPFVGIDVSSQHLDVDSLPASHHFSEPNTEDGIASLVLRLRKLSPQLVLLEATGGYEVPVAYALYEAGLPVVIMNPKALRHFAKAIGKLAKTDKLDAQVLALYAQRVQPPVRPLKDQEQLELANLMTRRRQLQGMIVMEENRRRTCTPKVRGNIDQSLAHLRQLLKDLDREIHDSIRRTPLWHENSEILQSCTGIGPKVSASLIANMPELGRLPGAKISALAGLAPMNRDSGQYRGKRKIQGGRPAVRQALYMAALVAAHHNPVIMEFYQRLRLAGKPAKVALTACMRKLLVILNAMLKKRTYWNPQLPLAA

SEQ ID NO: 348574 - protein, 345 aa, unidentified
MPIVGGLDIHRKQITFDYLDTATGEVRRGQIAPADRAHLRAWLARFAGRDDVACALEGCTGWRYVAEELAAAGVTAHVAEPADTAFARGRKRHAKTDKTDARHLRVLLEQGRLPECWIPPAQILECRALLEAYHDLRREHTAWIERIHAVFFHQGAPRLGEGALRTDRGLAALRQAAACHLSPAGQLQVATALDMLAAVEARMDTLRQQLLHAARHLAGARALQARLYGVGPLAGLAMTCWLGGAGRFSSSRKAVRFAGLDVTVYSSDGRRSPGHLSRQGPEILRWVAYEAGKTHGRAPAPGHDYYAQVKDRQDGKIAALSQARKLIRQACRILAELGDDALTAA

SEQ ID NO: 348575 - protein, 411 aa, unidentified
MLFVGDDWAEDHHDLEVVDDQGRVLARRRVGEGIAGMVKLHELIAEFLADDDDPGHVVIGIETDRGPWVQALIAAGYQVFGVNPKLAARHREVISISGAKDDKTDAHTLADMVRTRRHQLRVTEPDSQLAAGVKVLTRAHQGLIQERTRHMLRMRSALLDYFPAALVAYQLGTLTLTSSDVLALLTKAPTPAEAAKLTTAQITAALKTAGRRGDVPARVAAIQDALRTEHLGQSDLVAGAYAATVRSTVAILQVLNTQITALQEGVEAYFGRHPDVEIYRSQPGLGPILGARELAEFGDAPGRYTDAKARKNYAGTSPITRQSGKLKTVHARFIHNNRLVNALDLQASAATLHDPHVRAYYDELRDRGLGHHPALRQIANRLVGILHGCLKTHTLYNPETAWAHRTQTSAA

SEQ ID NO: 348576 - protein, 398 aa, unidentified
MLQPRQREKLAGGTSVKEHAMSEKLNSAVAVIGIDIGKNSFHLVGHDKSGTIVLRQKWSRGQVETRLANLSPCLIGMEACVGAHHLSRKLQMLGHDARLMPAKYVRPYSKGQKNDFRDAEAIAEAVQRPTMKFVATKTAEQLDLQALHRVRERLVSQRTGIINQIRAFLLERGVAVRQGLRFLRAELPGILATRSDVLSPRMLRVVEDLAGDWRRLDARIEGLSGEIEALAQQDQACVRLMTVPGIGPIISSAMVAAIGTGDVFSKGRDFGAWLGLVPKQISTGDRTILGSISKRGNRYLRVLFVQAAWVVLVKLGPKHWERYGLKSWIEAAKKRLHHNVLAIALANKLARIAWAVLNKERAFACVKTDATASRPAWFSPPCSEPSRRGLATAVRDVR

SEQ ID NO: 348577 - protein, 311 aa, unidentified
MTDDTIGIDISKATLDIHRLSDGKTMSFSNCPAGFKALSRFCAKTAVTRVVYEATGAYHSGLERALGAHLPLVKVNPLQARRFAQAQGLRAKTDAVDAKMLADMGNAFALEPDEPAAEIQHDLKELRSFRSGLIKDRTGIMSRMKTQTLSITRRQSKARLAQVDKQIAEINAEIERLINSSDTLAHSMKILRSIPGVGAICAATILIEMPEIGSMDRKQVASLTGLAPMTRQSGQWRGKSFIQGGRKIVRDALYMPALVAMRHNPDFKAKYQALIKAGKPPKVAITALMRKLIKLANALIKADRNWVTKGA

SEQ ID NO: 348578 - protein, 355 aa, unidentified
MDSTKYIGMDVHKESISIAVMNAAGKIGMECVIETKASMILQFIDGLRGNLHVTFEEGTSAAWLYDLLKPRVTKLVVCDPRKNKSMREGNQSDKIDARRLAELLRLDHLTPVYHGEHGLRTLKELVRSYLTITKDLGRVMTRVKAIYRSWAIPCTGKQVYARCHRAKWLGKINELGVRRRAEFYYQQLDALRVLRQQVRRDLLAESKKQQAWKRLCQIPSMGPIRSAVLLGILQTPHRFRTKRQLWTYSGLAIETHSSADHRRVNGQLQRAKKQVLVRGLNPNCNHDLKNLFKGAAVVASSKPGPFEQFYAALVAKGMRPEMARLTLARKIATIVLIVWKRGVCFDAQHLKPQTA

SEQ ID NO: 348579 - protein, 315 aa, unidentified
MSENTVEKFVGIDVSKGTLDIGIEPTGEALRVVYDDKGITQVVKRLVAVGPTLIVMEATGGLEVRLASELAAKGLPVAVINPRQARDFAKATGQLAKTDSVDAAVLAAFARAIRPAVRPIKDADTRELDELLTRRRQLIEIRVQETLRLGTASKVPRKSLVAHIAWLDKRIAALDVDLTKRLRASEAWRAKDDLLQGIPGVGAVTSLTMLAKCPELGSLNRREIAALVGVAPLANDSGKHRGKRFIWGGRADVRAVLYMASVTAIRCNSVLKAFAERLKQAGKPAKVVIVACMRKLLTIMNAMVKNNAQWSAKTA

SEQ ID NO: 348580 - protein, 355 aa, unidentified
MDNRKYIGMDVHQASISIAVSDAAGKVLMESIIETKAATVLEFIQGLRGSLWLTFEEGTSAAWLYDLLKPHVTKVVVCDPRKNSLLKAGNKNDRVDARKLSDLLRAGLVTPVYHGESGVRTLRELSRSYLAASKDLTRVMNRLKAIYRSWAIPCAGQQVYSPRHRTAWLEKLREAGVRRRAEQTYQQLDFLMGIRKETRKELLAESRKHPAREILEQIPRLGPIRVALLIALLQTPHRFRTKRQLWAYCGLALQTRASGEYRFSSGELQHCKRLPALRGLNVNHNHDLKNLFKSAATHVSTSTDPLGDFYRSLLAKGMKPTMARLTLARKMAAIVLSIWKKGARFDPAELKRQAA

SEQ ID NO: 348581 - protein, 330 aa, unidentified
MRQIYGIDLAKEKFDVNFLGLNGEEKPVVVDNRFQAIVNFPERVPDNAILCCEYTGVYGELLCHLAITMGKAIARATGYEIKHSMGLQKGKTDKTDARRIREYAERFCDKLRFAQALFPELKELRKLYNLRARLVKCRKMLLTSETGNKCADFQSLKAVQAANGVIENYNQAIETLESEMAEIIKSHEELLKNYKQVISVKGIGQVTACELIVKTENFKKIDSARKAASFAGICPFPNESGKMVKKSRVSKMSDKQFKTLLFMCSKVAVRSKPEYKLYFLRKKQEGKPYYLIINNVANKLLRTVFHLVKTEQKYILGHITEDPGKQKKVA

SEQ ID NO: 348582 - protein, 325 aa, unidentified
MKSQDLVAGVDVSKETLDVYYNDQEGRAHYLKTSNDAAGHRLLLKKLGLNRTYLMESSGPYYLRFAFAVKRLNGDVRVANPIAVKRFIQMHLERNKSDKKDAKWLYFYARQQETSEWNLPPKEQLYCMQIMGSIDLYSRQLVMITNQLHSLEQVPLQMKEVIKSLETTKHIIEKEIKKLEKSLALQLACWQGEQLNNITSIPGLGKRAVALLIVYTDGFKKVSNYRQLIALAGLAPREHTSGTSVRGRKGICKMGNGHLRNVLYMCSLSAIKHNKACKELYDRLKAKGKRSKVALIAVCNKLLKQAFAIATKGTMYQPNYKSSVA

SEQ ID NO: 348583 - protein, 350 aa, unidentified
MKIIGCDFHTRYQQIAMLDEATGELIERRLEHQNGEADAFYRSLAGAVRVGIEATGPIQWFQRLLAELGHQLWIGDSAQIRASAVRQQKTDQRDAALILDLLLTNRFPRIWVASPAQADLRQLLWHRHKLVRMRTMVGNQLHALALGQGLCRKAKLFTRKGRAELRDLSLGPWASRRRRELLMLLDQLDPSIQELDRAVMEQARRRQEAVRLMTHPGIGPVNALAFLLTLGPVTRFGCSKQIVSYLGLNPRERSSGGKQRLGAISKQGNSMVRWLLIEAAQHASRFDPALRQNYQRLKFRRGSAVAKVAIARKLAVRMYWMLRTGADYAQLVRMQGSPRGTLVSTASPIC

SEQ ID NO: 348584 - protein, 437 aa, unidentified
MGLIVPNAMHPEHDEQPMPYDWFVGIDRGSQQHQVCMLDRDRRRVGERVVDHDGASLARLADWLLTVAAGQPQRVAVAIEVPRGAIVEGLLERGFHVFAIHPKQLDRFRDRHSAAGAKDDRRDAFVLADSVRTDQPSLRRLQLDDPQLLRLRERSRAEETWLADFRRRANRLRDQLHRLYPQMLELCSAADEPWLWDLIDLAPTPAHAELLSGEQVHQVLQAYRIRRVEAREVLTCLQALALPVAPGAAEAAQAHCELLLPCLRVLAAQLQACHQQVSALLHTLAEAPGEEGRASDVAMVLSLPGVGRKITAWLFAEAAQALAERDYQVLRTHGGVAPVTKQSGKRRQVMMRRGCNSRLRHALYHMARVARQRDAHFSQVYAALRAKGQRHGQALRTLGDRLLRILMAMLRNGTCYDASRIRREPVVQRGENLTNGG

SEQ ID NO: 348585 - protein, 343 aa, unidentified
MTIVILGIDLGKNSCSVVGLDESGAVVLRRRMRRQTILGFAAKLPGCVIAMEACCGAHYLGRLLMVQGHTVRLMSPEYVRPYVKAQKNDDRDAEAIAEAASRPTMRFVELKSEEQLDIQTLHRVRSRLVAARKTLLNQLRALLLERGHIFPQGRRKLEQALDALVDDPAFAVSPRMRQLVLDMRAEWQDLDRRIAVLNAEFVELAGSDAAARRLTTIPGVGVLNATALVAAVGDGGPFRRARDLGAWLGLVPKQHTTGGKPKLLGISKRGNKYLRMLFIHGARAAMPTLAKSESPLGAWLRGLLARTHRNIAIVALANKLARIAWAMLRRDRDFAPNPGALAV

SEQ ID NO: 348586 - protein, 457 aa, unidentified
MKKDKGKTQKVVEVDALGQINENAAGIDIGSEEFYVAVPKGRDSESVRNFPTFTADIRRLADWLRQCGIDTVAMESTGVYWIPLYEMLEERGFRVYLVNARHLKNVSGRKTDVLDCQWLQQLHTYGLLKASFRPSEQICAIRSLVRHREMLVRYRSAHIQHMQKALQLMNLRLTNVLSDITGVTGMKIIRAIIAGERDAQVLASYRNGRCAQSEEEIKKSLEGNYKREHVFALKQALELYDFYDQQLQKCDQELEALYDEFDPPDQSGTQPPAPRTTKRRKNQPYFDLAQSLFRMSGGIDLTQVDGLDALSVQDILSETGTDMSKWPTVKHFASWLCLAPNNLVTGGKVKRSSTPATQNRASNTLRIAAQSLARSDCALGAYYRRMRAIHGAPKAITATAHKLAQIVYFMLKRRVPFQALDAAYYEKQHREKTIRSLQRKAASLGLRLETATPIFVS

SEQ ID NO: 348587 - protein, 421 aa, unidentified
MESENMNYAAWIGLDWGSQKHAICLKPANSETVEHYTLEQKSQALHSWFMNLIARFGGRKLAIAIEQTRGAVIHFLLGLACVHIFTIHPKSLKNYRDAIHPSGAKDDPTDAELLLQFLTLHQHRLKPWIPDKPEVRLLLRLVESRRKMVGKRVRLTNELTQLLKEYFPAALDCVGELDRVMACDFLAKWPTLEKLQESQPETIRKFYQEHVCRRRNVIEGRLKQIRSALPLTTDKPVIEPSVFLVQSIAPQLHSVIDAIAQFDQRIKEVFENHPDAQIFSSFPGAGSALAPRLLAVMGSDRNRFGSSLEVAAYSGIAPVTERSGKSKWVHRRFACAQFVKQSFHEFTAESILFCGWARCYCDQKKREGKSHHSAIRALAYRWIRIIYRCWKDRIPYDEGKYMKALRQRRPTWVQSLPLGKS

SEQ ID NO: 348588 - protein, 347 aa, unidentified
MYKANRRDGLCERSLTMFPVGIDVSKNTLDLCILYDGIKGRIKTRNIQNNRHSVENILRWLRLQHCGPEDVHVVMEATGVYHERLATELHDAGFRVSLANPHRSREFARGMGIMTKTDKVDAYMLACYAFLKKPHYWEPPAPEIRYLGALLRRRDVLLGDALREEKRLEKYLSTDTPADIISSCRRMAQLLREEVSNIERQIKAHIKASPALRRDYTLLNSIKSVGPQLGMHMLVVLRSHNFASAEQAAAFLGVVPIEKRSGTSVRSRPRMSKIGPPQLRAKLYMSALCGKIYNKRMRNIYDEMCLRGKPKMVAIGALMRKLVHWCYGVLKTGTVFNDEGLKQVLST

SEQ ID NO: 348589 - protein, 364 aa, unidentified
MIKLHYVGLDVHKETIEVLAFRENETNPCIEKRIPNCTKSIKKVFGNLLSEGSVIACYEAGCMGFTLQRLLEGMGVTTVVAAPGKLPRKSSERIKTDRRDARNLAIYLRNGDIEAIHIPTVDNEVVRDYLRAREDRRLDSVRMKQRLHKFLLRHGYLYESTRYWTGRHDKWLQSLEFVTPLMKATFDEYYYGIKELVEKLRMMEKRIEEIAVSSPYMEGVKKLRCFKGVEYLTALSIICEVGDFKRFKSAEAFMAFLGLVPGEHSSGSKRRQGSITKSGNTHVRKLLVEASWHYRYKSSPSKRLTDRRYGQPAELIAYADRAMKRLQGKFFRLVVRGKTSQTAVVAVAREFSGFIWGMMVGQTA

SEQ ID NO: 348590 - protein, 343 aa, unidentified
MEYIGIDVHKRESQVCILDDGAAVMEERRSRFGAVLGTRPRARILLEASTESEWVAQCLEELGHEVIVADPNFAPMYATRSRRVKTDRRDARTLAEACRLGAYRPAHRMSAARRELRAALTARDALVRTRVRYISLIRALLRREGIAVASGSSGAFLRRLETITLPAALQAALAPLVTVLAPLNAAITAADAHITEAMESDAVAVRLCTVPGVGPVTAAAFVATLDDVARFRGAPQVAAYLGLVPQERSSGDRQHRGGLTKAGNARARWVLVQAAWAIWRDRTPRTATLRAWAERIAVRRGKRVAAIALSRRLAGILYALWRDGTAYEPQRVGRRPAMRQVAA

SEQ ID NO: 348591 - protein, 334 aa, unidentified
MENVALIGIDLGKHSFHIHCQDKSGKALLRKKFTRMKLMQFLATCPPTVVVMEACAGAHFMARRISEIGHEAKLISPQFVRPFVKSNKNDFVDAEAICEAASRPSMRFVQPRTETQQAMRALHRVRESLIRDKVKTTNQIHGFLLEFGISLPIGDAVIKRLSLVLAEHDLPEYLSRLLVKLHTNYIYLVEQITELESELNHSIKSDDATQRIMTIPGVGPITASLLSSQLGDGKQFSCSRDFAASTGLVPRQYSTGGKSTLLGISKRGDKNLRRLLVQCARSFMMQLEHQQGRLAEWVRKQLSNRHSNIVACALANKLARIAWAITTNHNEYQA

SEQ ID NO: 348592 - protein, 358 aa, unidentified
MRIIGVDLHTRQQTIAMLDTETGEVTEKTLKHEGDTVRKFYEALPGPVQVGIEATGSMHWFLELMEELGIACRVGHPAEIRKAESRKQKHDRRDAALQLKLQIEDRFPSIWMPSTELRDLRTLLRHRHQWVRMRTRVQNALQALALSRGLRRGKTLWSQAGQQAIESLPLPPQAAYRRTELQGLYRLLHEKIEELDHRVREQAVQRPGAQRLMTHPGVGPVTALATDVFLGDPARFEDSKTLASYVGMIPGEYSSAGKQRFGKLSKQGNPLLRFLWCEAAIHAVRRDPDLQRFYRRKLQQKGLGKARVAVARKLGIRLWIMLRDQIDYQEFCRRGQMRRNSGGARAGMPEVGHSPAAQ

SEQ ID NO: 348593 - protein, 436 aa, unidentified
MEHVIIGVDPHKLSATIEVVDHQERFLGSGRFTTDRAGFTAMRTYAKAWPKRTWAVEGANGVGRPLAQRLLAAGETVVDVPAKLAARVRLFDTGHNRKTDAHDAHSIAVVAVRTEGLRVLQVDGELEAMRMLVDRREALTRRRVQTVGRLQALLAELLPGQAKKDITTGQAKEMLARVRPRDVAGKTRRRIAAEELAELVAVEAKMKKATAELKAMVTARGSHLMDLHGVGPVVAARILADVGDVARFADRNRFASWTGTAPLDASSGEQNRHRLSRAGNRRANHMIHIAAISQIRLETEGRAYYRRKRSEGKKPMEALRCLKRRISDAIYRQLLADAQAIQGQMSEAGPGGHRGATLIFSAAGSIPHTGTLNQPLPGPAPTTLPAHPVIANPTVGPAPRPTRRRADTVKVQRPTGRTTLTATSAGAYSKEPIPAP

SEQ ID NO: 348594 - protein, 423 aa, unidentified
MPQLWAGIDAGKTEHHCVVIDTNGTKLLSQRFKNRETAILTLMGDVASLPGGTDVAWATDLNHGGTGLLQTLLNSHAQPLFYISGRVVHHASGAYRGEAKTDAKDAVIIADQARIRRDMTLMRQADEVTAELRLLSARREDLVHDRTRAVNRLRAILVHYFPSLEGAFNYATTRGPLVLLTRYATPGAIRRMGEARLASWLKGQGCWKSAAVAKAAIDAAREQTSVVVGEGAAARLVNRSARDLLRIRDEVAELDAEIDAALQDSRSADLLVSIPGFGRRLAADFLAATGTDLAAFETPDRLASFAGLAPVPRDSGKISGNHHRPRRYDRRLLNACFQAAFIASRNCPVSRSFYERKRHEGKSHKQALIALARRRINVIWAIFRDQTTYNPTPTRPNDPVTPLPQHGPESPSRSGPAIALAAA

SEQ ID NO: 348595 - protein, 367 aa, unidentified
MGWMAPLRHLGAKVLVGENQSADKEPSMNEITTVGLDLAKNVFQVHGVDAEGTTVLRKQLRRAQVLAFFSRLPRCLVGMEACATAHYWARELRALGHEVRLMPAQYVKAYVKRNKNDAADAEAICEAVGRPTMRFVPVKTAEQQAAVLLHRGRERLVRQRTMLVNALRAHLAEFGVIAPQGLRNVGRLIAIIRDDDDAHLPGLARQVLQVLAVQIEQLEAAIAALEKRLMGWHKSNPVSQRLATVPGIGPIIATAIAAMVAEPSGFRSGREFAAWLGLVPRQNSTGGKNRLGGISKRGNQYLRRLLINGASANLLRSKATNADPWVIGLRRRRPSLVVAVALANKTARIAWAVMHRQENYQRMATAA

SEQ ID NO: 348596 - protein, 341 aa, unidentified
MMIIGCDFHPRFQQIAFLDQETGEYGELRLSHPEEAERFYRSLAGRQVRIGAEATGNFRWFRQLMHALGHEFLLGDPSAIRAASPRRQKTDKRDARHILNMLVEDRFPAVWQAPAENEDLRQLLLHRCRLVRMRARIKNQLDSMAKNEGLLSKRVWCAMRRKQIEELPLSGWNVERRKDLLFLLEELNRRIEPLDEAVLKAAEENPEARRLMTHPGVGPVVSLFYVLTIGDWQRFPRGKQVASYLGLIPAEESSSDKRRLGHISKQGNTLLRWLLVEAASKAQSSDPSWHRQYVRLSMNKHHGVAKVAIAHKLAVRLYWMLRSGQDYKQVMERGSHAGQSV

SEQ ID NO: 348597 - protein, 404 aa, unidentified
MDSGTTYAGVDWASRAHAVCVVDEHGIATERFEVEHSEPGLRSLGRRLTRAGVAGVAIERPDGPVIDALLAAGLTVFVIASRHVKALRTRYGTAGNKDDRADAYLLADVLRTDGQRLRPLQPDSPETVTLRATVRARKDLVQTRVRLMQQLRAHLELVYPGAVGLFFDLDSPIALRFLLRYPSAAKAAWLSPRRMAAWLRGEGYCGRTSPDELCRRLEAAPAGVTGQEADARAAVTLAFVRALLAVRDQVAELEARIAEQLELHPDGAIFRSLPRAGQVRAAGLLTEIGDVRERFPTPESLACLAGAAPSTRQSGQHLAVTFRFACDKKLRDALVDFAEDSRFANPWAAEVYGRARARHKTHPHAGRILARAWVYVIWRCWQDRVPYDPAKHRALQEVVLAKAA

SEQ ID NO: 348598 - protein, 334 aa, unidentified
MSAVRIGVDIAKNVFQVHAVTEENVVLHRRKLSRSKFLEFFATMSARAVVGMEACATSHYWARELLKLGHDVRLLPPSAVKPYVARGKKNDAADAQAICEALGRPNIHCVPVKTEAQQGVLALHAVRESLIVERTANINAVRAHFAEHGIVTGVGRASFNELKGMIEGLPLHTQAAVEVVLGRIASAERDLVRIEKALMDFLRTDETSQNLATIPTVGPLAATLIAAKVGDPTRFRRGRDFAAWLGLVPRQNSSGGKERLGRITKVGDRAIRRFLFLGALSVIWRTKPGTWLAQLRAKKPAKVVAIALANKTARTILAVLKRGEVWREQAPLAA

SEQ ID NO: 348599 - protein, 331 aa, unidentified
MNYSHFVGLDVGKKTFDASLMSADEKELSHKSFDNTPTGIQSLLDWIAGYHLSLSKLLFCAENMGSYVTELSVSSVSMGFSLALVCPLTIKKSIGLQRGKNDRIDAKRIANYAVLHYRKLELYKLPDKDLVRLRGWIIIRDNLVKQKVSSIKLLETFSRMAKLADVTESISFLKEQLKSIKERILEVEEDMEQLIAASTSLYTNYLLLRSIKGIGIINAIVLLCVTDNFQRFDNPRKFACYCGVAPFEHTSGISIRGKTQTSSLANKEVKVYLTRAAITAISWDPQMKAYYKRKIAEGKHKAAVINAVRAKIIARSFAVIRRQTPFVTLAV

SEQ ID NO: 348600 - protein, 312 aa, unidentified
MPTKLPPTYVGLDISKDQLDYCLSETAEGRCAYTPAGRAELIQKIRALPGARVVCEASGGYEKLIVAELLQAGIEVCVAQPGRVRAFAYAEGLMAKTDRIDARLLRRFGEKIALRLAVPGDPAAMTLRELLEHRRQTTTQLTEVSGRLPLAGPTLGKLLAAQQRFLEGQIAEVEKMIEQLVDQDPDLKRKSARLQQVKGVGPILSATVLAYVPELGQLDSPQLSALLGVAPFPDDSGKNPAPRHVRGGRAQVRHVLYMAAVSASRSNPILAEFYQRLRAKGKPSKVCLVAVMRKMACLMNKLIQDPEFVLAR

SEQ ID NO: 348601 - protein, 359 aa, unidentified
MQTQSNKIDFTGQNIYIGFDVHLKSWTVTVMTEKLTHKTFSQPPKPEVLYHYLAKNFPGATYYSAYEAGFCGYWIHNKLVELGVNSIVVNAADIPTTGKEKVMKTDPRDSIKIARSLRNGDLKPIHVPSIKTLEERGLIRMRSTLVKDLTRYKNRIKSFLYFHGIEYPEVFNRPKTHWSNRFNQWLEGIEFNDLISKATLDMLLGQSNSLRGSVLQITRQVRELAKTDRYKMQEKLLRSIPGIGILTAMIILTEIETINRFSNIDQLCGYIGLIPSTCSSGDKEVIGDLTPRGHSILRTAIIESSWVAARLDPALNKSYHDYCRRMEPNKAIIRIARKVSSRIRFVLKNNQPYVFSVVK

SEQ ID NO: 348602 - protein, 303 aa, unidentified
MNIVFLGIDLAKNFFQICGLNQAGKPVYTKRIGRKELLQTVANIPACLIGIEASTGAFYWLREFEKLGHNVKVISPQYVKPFVRGQKNDGNDAQVIAVALMQPTMQFVPPKSPEQQDIQALHRARQRIVNHRTATVCQIRGLLLDRGITIGAAVSRVHRAVPLILEDAENGLSVRMRRTIAELYDLFNDLGRRKNFFDREIDAVFRQSEACQRIAKVKGIGPKTATAVVAAIGKGTEFKNGRHFAVWLALVPRQHSSGDRQVLMNMTKKGDKHLRTLFIHGARAVVRVATNNNDGGLLSGLTS

SEQ ID NO: 348603 - protein, 336 aa, unidentified
MQHYCGIDLHSNNHVVVIIDEEDKRVLEKRLSNDLSQTLKALQLYRDTLCGIAVESTFNWYWLVDGLQEHSYPVQLVNTAAVVQYDGLKYSGDHHDAYHLAHLMRLGILPTGYIYPKEQRAVRDLLRRRLSLVRIASAQLIGVQSQLWRSTGIRISSDTLRRRDFSVPLEEGHTRQAIESCLAVYHAIQREIDALEQSAYQVVRLSKEFEVLQTIRGIGKILGLTIMLETGDIHRFANAGNFASYCRCVDSTRTSNGKKKGSGNAKAGNKYLSWAFSEAAHFSVRFEPLAQRFYERKKAKTNGIIAIRAVARKLARACWMMLKHQQPYEARLMFPG

SEQ ID NO: 348604 - protein, 351 aa, unidentified
MRTSQKITGIVTTIGIDIGKNTFHLVGFDQRGAIILQQKVSRSQLERRVANIPRCLIGMEACSGSHHIGRQLAEIGHDVRLIPAQYVKPFLKGHKNDYRDAEAIAEAVQRPTMHFVTIKTPEQMDLLALHRVRSRLVGRRTGVINQIRGFLIERGITVRQGPMPLRKALSEILSSDTGALSPRMVGLIADLAQDWRRLDERIAAVSAEIEALAEQDDSCQRLMTVPGVGPIISSAVVAAIGNGTGFKQGRDFGAWLGLVPKQESTGDRTILGKISKRGNKYLRTLFVQAAHVVLERRPRAAMRGLWPWVEQASKRLHRNMLAIALANKLARIAWAVLARGGTYQPRITHAA

SEQ ID NO: 348605 - protein, 343 aa, unidentified
MNEVGTIGLDIAKNVFQVHGVDAEGHAVVRKQLRRRQVLKFFAKLSPCLIGIEGCATAHHWARELRKFGHEVRLMPARYVRPYVKRNKNDAADAEAICEAVTRPTMRFVSIKTAEQQSVLMLHRTRDLFVDQRTSLINAIRSHLAEFGIVAGVGRNGVEVLLELIRKGEDDRVPLPARDSLMALAAQLDLVKRQILEADRRVLAWHRSNSTSKRLEAIPGFGPLIASAMVASVPDPHVFRSGRDMSAWIGIVPKENSTGGKQRLGSISKAGNRYLRKLLFVGALAVIKRVKMLGCSRHPWLASLLERRSVKVAAIALANKVVRIAWAMMTRNEAYRASKPVAA

SEQ ID NO: 348606 - protein, 404 aa, unidentified
MIIIGLDWARSKHDYLLMAPTGEILQRGRIPHNSTGLQELAARIEQYVGSDRDVRVGIEMNDGALLAWLIEKGYTVFGIQPKSAQRAREIYRPGGGKDDPVDTFVLAEVVRLSGDRLRPLQPDSPVTEELRELLRWREELVHQRTAASQRLRAVLAEWSPRLSALCNNLERIWQLDLLQKFPTEAIFYRAHGNRIRNFVRKHSLRQQTYKKIEDVRRADPMPMPAGRVLPVVRRVQFLVEQIRRLSAEIDQIEQDLKKQVAEHPDANIFQSLPIKGTVTVASLLSIFGQNREHAPSWEEYAARCGVAPVTVASGKRKTVRQRRACDHTFHQALIYFAFNTAFTDGCWAGKFYQRKRRDGVTHYASLRCLAKRWMKILYRLWTDNLTYSEEIHRRNQKSHEQRAA

SEQ ID NO: 348607 - protein, 354 aa, unidentified
MNKCSTEKKKIYVGFDVSEKTIEIFAVCGTETSKGSCKIDNNHDAIKKFLSIFKDPSRVCVVMETGTHSLWMSELIKGLGFEVIVAHARDLALIYRSDRKNDQLDAEKLARLAQADRKLLHPVKHMTLERQTDLTVLKARDLVVRQRTQLINTIRGLLRAAGHKLIEEEYSTRTIKKCCSALPEYMRPAIMPLLQQICYLDLAIKEYDRLVRKLCKKYPATKILQQITGVGELTSLAFVLIVGDPNRFDNAARLCAYLGVVPKQDQSGDTDKQLGITKKGNKLGRKLLIQAAHYILGPFGPDSELRSYGFRIQARGGKIAKKKSYVAVARKLVTVMLALWKNPDIEYDPNFINN

SEQ ID NO: 348608 - protein, 367 aa, unidentified
MKKVSTAGAKQIRNFAEQKLTIGLDLGDRSSWYCVLDEAGEVLLEQRLGTTPKAMQEGFGGMPRCRIALETGMHSPWVSRLLSELGHEVIVAHARNVRLIGESRKKDDRLDARTLARLARIDPQLLCPVKHRSAKAQADLTVIRARAGLVRSRTALINTARGLTKSYGERLRGCNPRNLNPEKAQGLSPELQAALQPLLAAIESLSERIYEYNQQIDKIAKESYPQVARLEQVKGVGTLIALTYLLTLEDPHRFRKSRDVGCYVGLQPGRRNSGQSEPQMHISKEGDPYLRTLLVQGAHHILGPFGADSDLRRWGLKLAERGGKNGKKRAVIATARKLAVLLHRLWVSGEAYEPMRHSHPAAMPAAA

SEQ ID NO: 348609 - protein, 437 aa, unidentified
MRTSHDEYVLAFDFSLDTLDAALMAPNGDWIIPHQAYDNNLPGFRELKRDVLAHLSNLDEARLTAAGESTALFWWHAFYQISTDPDFAPYTPSLALLNPLYVKNFRRAQPEEDKIDPKDARLIGTYYRTMGVKHHHTFDPRYLPLRQLSRAYFRLTHTLAAEKSFALTLLYLLGSEYRRIKPFSDNFGVTSAHILTEYPDIAAISTIPLDPLTEILDAISRGHLKDARQSARKLHQVAKNSYPLPDFLAPTVHTVFGMTLDHVRFLEHQQKTYERLIETELEHLPEAALALAEPGLGPILVAGCLGEIQDTRRFTTGRKFDRKKKRWRERTYRDGQAGVARLAGLWWPRNSSGRFEGDDRHLARERDPYLRYWFVQAAYSLKRNRGDYAAYYQRKYNEVKKHQHKRALILTARKAVRLIFALLHKGQMARLKEEAAA

SEQ ID NO: 348610 - protein, 448 aa, unidentified
MPGNSSPSRRRRARLRVVNPRSAGIDIGSRFHVVAVPAELDDDPVRKFSSFTNDLKSIAEWLLAIDIKTVAMESTGIYWVPLYEILVGRGIEVFLVNARHAKNVPGRKTDISDSQWLQQLHSYGLVRASFQPDPCIAKLRAYFRQRDILVRYRSSHQQHMQKALMQMNLQLHHVVKDITGLTARRVIDAILSGERNPEKLATLRDRRCKETEATIAAALDGNYQEEHLFELKVAVEMFDAYSEKIRECELAGQVVLNELAGVDYVEPEKQASDCQIRSNGFSFNPQALITSLAGHDLLSLPGLGPATVITLISECGLDMSRWPSAKHFVSWLGLSPQNKISGGRVLSSRTRQGATRAGSSFWMAAVPISRTNTALGAFQRRLSARVGKGKALIATARKIAILYYKMLRYGMAFQEPGASAYQKASQERHVRGLERRAKALGYQLVPTG

SEQ ID NO: 348611 - protein, 458 aa, unidentified
MKGKRRSAEKHPGMVTVHPNAAAIDVGATMHMAAVGADCTSDPVRSFGTFTGDLHRLADWFAECGVKTVVMESTGVYWIPIFELLDERGVEVFLVNARDAKHVPGRKTDVSDAQWLQRLHSHGLLRASFRPKGEIAELRAYLRQRERLLDYAASHIQHMQKALTEMNLQLHHVVSDITGATGMRIIRAIIAGERDPTVLALMRDTRCHAGVDIIEKALTGYYRRRASVRAEQALALYDEYQQKVSACDMRIQEVLMALASLRGHRGEPLGSPRRRMPRQANGPAFDVREALYALLGKDLTQIHGLGPYLALKLVAECGDDLSAWPSAKHFTSWLCLAPSNKISGGKVLSSRTRRSGSRVAALLRLAAVTVGRTETALGAFYRRLSARIGKAKAVTATARKIAVLFYNALRHGMDYVDPGASYYETRYRERVIGNLHRRAKAFGFILQQDTVASEVAVS

SEQ ID NO: 348612 - protein, 359 aa, unidentified
MGVMEGREHRIVGGVDTHKDLHVAAVVDEQDQVIETRCFATTRQGYRQMLTWMRSFGELQRIGIESTGSYGAGLLRFMQEAKVPVLEVTTPDRQDRRRRGKNDDLDAQNAAHAAFAGQRTVTPRSRDGMIESLRVLMACRKTAVSARRVALQMIHNTIVCAPDDLRDQLRSLTRMQLVRTLAAWRPDLTAYRDLDSAYRISLKSLARRYLELHDEIADLDAMITAIVDELAPNLVARNSIGHIGAAQLLLTAGDNPERLQSEASFASLCGVSPVPASSGKIVRHRLNRGGDRAANSALHIIAIGRLRTDQRTRDYIARRMAEGHSKLDAIRALKRYLAREVFTLITQRRREINATRIAA

SEQ ID NO: 348613 - protein, 336 aa, unidentified
MSEPTTLFVGLDVHKDSIAVAHAEAHRDDPPHYVGSIGTRQADIDKLVRRLHAKTSKLVFAYEAGPCGYVLHRYLTGKGLDCWVVAPSLIPKRPGDKVKTDRRDAVEIARLLRSGDLTHVYVPSVEDEAVRDLCRARDAALRTLKAAKLRLKSFLLRLGLHYAGRADWNEAHRRYLAKVVCPTAPQQIVFQESVHAVDEQVERLRRVEKELLDVIPKWRLYPIVEAFQALRGVQWTVATIVASELGDMTRFDNPRQLAAFVGLIPSEYSSGEKRRQGGITKTGNGRARRALIEAAWAYRHNPKISVHIQKRIESLPKPIQDIGWKAQLRLCKRFRR

SEQ ID NO: 348614 - protein, 392 aa, unidentified
MNTVGIDIGKRQHVAAVCRADRLEAERKVLRFGADRAGLAELGAWMARQGEIARVVMESSGHYWMPLAQALHREGLAVAIVNPLEAKYFGKSRLQRTKSDPADARTLAALGMRDRPATREPLAGAELREAARFAMTLVTEQAKVCQRILRLVDLGFPELGKAYEDPTCASALAVLRAVPTAAEAVRRRSTTIAEARTPGRRIGGTKAEQIRALAQDTIAPPELAEQVSFEMRMLIAQHDFLEQQIKEAEARVAGLLDGELARRLRTIPGVGPAICATLIAEIGAIRRFDDFDKLVAFVGIHPAEKSSGRKGADPETSWHMAKTGNAYLRAALYRMAVVGLQHNPVIKAHYARKRTQGKSKMNALGHCMKKALAIVWGVWRGEHDFVADVSES

SEQ ID NO: 348615 - protein, 426 aa, unidentified
MKDNRTKRINQVQESTLVIGIDIAKENHYACAIDSRGRELAKVWRIHQSREGFIQFEEYIHMLMNQHQKTDVLIGFEATGHYWMNLAHFLKAIDFPFVLVNPLHVKNSKEMDDNLQTKNDAKDARVIAKLLPNGYFSVPRDMTPVDHSLRQGSAIRERLRKDIGAVKNRIQRWIALYFPEFRQAFKNFGKQELTVLKLTPLPEDIKEASAEELVLKQKEAGAKYAGKPKMAKLINLARHSIGLTEGAQMARLEIQSLVHQLELLDAQLEEVTTQMVEQARYLPEFEYLVSVKGISENTVSELLAETGSLQNYEHPRQIIKLAGLTLRENSSGNHQGTKRISKRGRRRLRALLYKAILPLIHNNEAFNSVYTYYHSRQYNPLKKKEAMVVLCRKLIQVFHGLSRNQASFNPERMLADLSYITESRAA

SEQ ID NO: 348616 - protein, 364 aa, unidentified
MIEAVAEKKNSEDPYWVGADVAKQTFDAALIRPGQHYPETPLRQVPVATFPRSVEGVKTFLSWLAGQLHGSTSGLAIRMVMEATGSYSVELAGWVNELCPALAPAIANPRQTSAYLQSMGLRNKTDRVEARALAFYGAERRPAPYETPTPERAELRALSRHRDTLVEDKVREELRSQEPFTSKLLAALRKRHLAQLKRDIAKIEARMRDLVEKTPDLKRDVDLLRSIPGVAFITSTVVLSELGDLRRFDRARQATAFAGVTPRLIDSGTSVHGRPVLSKRGNPRIRQALYLSAMVSIRICGPLKDFYDRLVCKGMKKKAALCAVMRKMITLMRAILIHQTPYDPMWKQRGIKPVLPVDNCAQNA

SEQ ID NO: 348617 - protein, 389 aa, unidentified
MKIFVGIDIAKLNHFAAAISSDGEILIEPFKFTNDADGFQLLVSKLESFDKNSLIIGLESTAHYGDNLVRYLVTELYQVCVLNPIKTCQMRKNNVRKTKTDKVDTFVIAKTLMMQDNLRFVRFFDLDMMDLKALGRFRQKTIKQRTRLKIQPTTYVDQVFPEIQYFFKSGLHQNAVYALLKEAPSPKEIASMHMTHLENLLKVNSHGHFTKEQAKELRVLAQKSVGANDSAISIQITQTIQQIELLDSQLEKIEAEMTDIMKFNDSVIMTIPGIGYINGGMILGEIGDIHRFSNPNKLLAFAGLDPSVYQSGNFQAKTTRMSKRGSRVLRYALVNAAWNVVRNNATFKAYYDAKRAEGRSHYNALGHCAGKLVRVIWKMLTDEVEFNLE

SEQ ID NO: 348618 - protein, 377 aa, unidentified
MKRIRFVGLDVHAETIAIAVAEQDGEVRSLGIIPNREDSVRKLVRKLGPVEQLRFCYEAGPTGYALYWQLTRMGAKCEVVAPTLVPVKAGDRVKTDRRDALKLARNYRAGELTPVWVLDAAHEALRDLVRAREAAKKDELRARHRLNKFLLRHGRRPPMGVKPWTLKYLEWLKREVHFEQMAQEATLLDYLHEVEHAAARIMRLDGAIAEAVKLAPTKMRTVIAAWQALRGIAHVAAVTVVAELGELSRFARAKQLMGYGGIVAREGSSGERTRRGSITKTGNAHLRRVVVEAAWTYRHRPAVGTSLRKRQEHVSEEVKEIAWKAQQRLHQRYRKLLAKGKNKGVVVTAIGRELLGFIWAIGIKVEAAQKESLQRAA

SEQ ID NO: 348619 - protein, 382 aa, unidentified
MQPIHTVNPTILLAIELSASTWLVAVRVPGSEKPHLHRIDSGDTAALLALISSLRNRVARRLDAATGVVCCFEAGRDGFWLHRLLMEHGVTNHVLEPASILINRRARRAKTDRLDALGMLRVLAAYLRGDRQSCSMVRVPTADEEDAKRMHREREHLVQERLRIENRIEALLFTQGIRKRPSLRSWQRDLAVLRTGDGREMPSHLRAELDRLRRRLIMTLELIREVEGERDEAANTKPQDQTCRKIAALCRIRGLGDNFAAVLTREVFYRSFDNRRQIASYVGITPMPYQSGGMDRDRRISRAGNPRARTTMIQLAWLWLRYQPGSELAEWFRKRVGMLAGRTRRIAIVAMARKLLIALWRYVETGVVPAGVEIRAESVAAM

SEQ ID NO: 348620 - protein, 347 aa, unidentified
MTIVETTPLVVGGIDTHGQLHVAAALDEVGGLLGSESFAADPPGYAALLAWLESFGTVTKVGVEGTGSYGAGIARHLTRAGIVVVEIDRQNRQSRRNAGKSDPLDAVEAARANLSGKASGRAKSRDGWVEALRVLLVAKRSARSGRVKALTQMRQLTYSAPDQLQARLKGLSISEFVSVAAGLRPTRAPDVMTAATKASLSVLAHRVADFEAEIAELDAMITPILEAHAPDLLGLNGLGIDTAASLLVAAGDNPERLRSEAAWAHLCGVSPLEASSGKVTRHRLNRGGDRQANRALWHIVITRLASDPDAQAYMERRLKEGRSKREVVRILKMACSGDPLHRLRRPA

SEQ ID NO: 348621 - protein, 408 aa, unidentified
MYNAVGIDASKLKSTITIIQPAGVVIRKPFDVLHTSDELNTLVTYLKSLVGETRAVIECTGRYHEPVVKSLSEAGIFISAVNPKLIKGQKQNTLRNVKSDPADARKIAKYALDNWAELREYSSMDTTREQLKTLNSQFTFFMKQKVAAKTNLISLLDNTYPGVNKLFDSPTRDDGSEKWVDYAYSFWHVDCVRKIGLKAFTERYEAFCKKHHYNYQKNKPALLFEESKQLVAVFPKEKSYKLLIQQSIQQLRLASEHIEIIRKEMNELASTLPEYETVMSMYGVGETYGPQLIAEIGDVSRFTHREAITAFAGVDPGVNESGQFMQRSNRASKNGSTRLRKTLFQVMSTYLQNKPVNEPVYQFLDRKRAEGKPYLVYMTAGANKFLRIYYGKVKECLRNLEQSQIEES

SEQ ID NO: 348622 - protein, 344 aa, unidentified
MNQIIRIGMDTSKHIFQLHGVDAAEQVVLRRKLRRHQVPEFFAKLPPTIIGMEACGAAHYWARELRKLGHEVKLMAPQHVKAYVKRNKNDGRDAEGLCEAMSRPTMQFVPVKTEEQQAVLMLAGVRQQLIARRTQLGNAIRGYAAEFGLITAKGLDKIEPLLAQIAQDKTVPAMARELLALQGKDYARLQIELKAIEAKLMAWHRANATSRRLAQIPGVGPIGATALVMKAPDPHLFPSGRQFAAWIGLTPKDHSTAGKTRLGKITRAGDEMLRSVLVAGATAVVKQAKHGRGSPWLLALLKRKSPKHAAVALANKTARIAWKLMVTGESYDGARMPGAPALAA

SEQ ID NO: 348623 - protein, 356 aa, unidentified
MSQKLETSPAPAVIGIDIGKNSFHIVGQNLRGAIVLRQKWSRGQVEARLANLPPCRIGMEACVGAHHLSRRLQMLGHDARLMPAKYVRPYSKGQKNDFRDAEAIAEAVQRPTMKFVATKTADQLDLQALHRVRDRLVGQRTGVINQIRAFLLERGIAVRQGLHSLRSELPGILATRTDVLLPRMLRIIEDLAGDWRRLDARIEGLSSEIETLARQDKACERLMTVPGIGPIISSAMVAAIGTGDMFSKGRDFGAWLGLVPKQISTGDRTILGSISRRGNRYLRALFVQAAWVVLVRVKCWERYGLKSWIEAAKKRLHHNVLAIALANKLARIAWAVLNKGRAFECVNTEETASRPA

SEQ ID NO: 348624 - protein, 371 aa, unidentified
MTKHITTHVGLDVHKETTAVAVAAPGRPARFIGTVGPQFSELRKVLERLGSAATMQIVYEAGPCGYALVRALRGDGYRCDVIAPAKVARRPGDRIKTDRRDALHLAEQSRAGALTAVWVLDEADEAIRDLSRAREDAVRARSKARQRLQAMLLRHGRRYSGKTRWTAAHERYLAQISFPYPAQDLAYVEYRLAVSEAHRRVERLTEMLREYVNDWRLRPVVTALMTLRGIDFVAATTLVAELGDLRRFAKPRELMSFLGLVPSEHSSGKARRLGAITRTGNGYARRMLVEAAWNYRFPARLSRVLQVRQEGQPKAVREIAWQAQVRLSRRYRALKARQIAHNKICVAVARELSGFVWAIAQQAEPLAPTQA

SEQ ID NO: 348625 - protein, 343 aa, unidentified
MQHVAVDLGGRESQICVRSPEGKILQEGKVTTRDLGRYLKSQPQSRVILETCAEAFSVADAVLGLGHEVRVVPATLVRSLGVGARRTKTDIRDARVLSEVSCRIDLPSVHVPTELARQRRSMCGMREELIASRTGLINCVRGWARTRLLRIRMGQPETLPRRVRATALAQRDGLPEYVERVLVVIESLNEQIALADKELRQLAQRDPLCERLMSVPGVGPVTSLRFAAALDDASRFPTSHSVQAYLGLTPGENSSSQRHHRTSITKAGPAPVRRALVQAAWSLRRCRPADPITKWAAEIEQRRGKCIATVAVARKLAGVLYALWRDGTRYEANHASAKNAAAA

SEQ ID NO: 348626 - protein, 346 aa, unidentified
MKVKTIGIDLAKETFGLHGVDGRGRVVVHKRITRKHLVGFLVKLEPCLVGMEACGSAHYWAREIEKLGHTVRLMSPQFVVPYRKGNKNDPNDAAAICEAVTRPSMRFVPIKCEEQQDLQALHRVREQLVKNRTALANQIRGLLRERGIVVAQAIARLRAALPMILEDQSNRLSALMRVLLGEMAERLRMLDDRLRQYDRRIERLCQQDERCRRLVKVEGVGPLVPTAVVAAIGNARQFTNGRELSAWLGLVPREYSSGNRTVMLGISKRGNRYLRTLLIHGARAAARVAERKRDARSIWLSRLKLRGGPNVAAVALTNKNARVMWTLLARGDSYRVRTSMHSAAVA

SEQ ID NO: 348627 - protein, 343 aa, unidentified
MAYYVGLDVSLKHTSICVVNQTGSIVQEGVVESDPEAIALFVRSRAPGTVRIGIETGPTITWLWTELKRLGLPVICIDARHAKAVLKMQINKSDRNDAAGIARIMQTGWFKEVRVKDLDSHAVKALLASRALLVKIKRDLENQIRGLLKNFGLVIGRGKFNVFAVRAAELIENRPELIAAVRPLLEARKAIEQQVDDLDRKVHKLARHDVQVRRFMTVPGVGPITALCFKATIDDPTRFKRSRSVGAYIGLTTRRHASGEIDWSGRISKCGDAMLRMYLFEAAGVLLTRVPKWSGLKAWGAKLTKRNGLRKAKVAVARKLAVILHRMWIDGTEFNWSTKKAAA

SEQ ID NO: 348628 - protein, 330 aa, unidentified
MGTAATCLAGIDVSKATLDCCLLAPGGKAREHTFANDPRGHAALLAWADRHAAGRAVHFCLEATGPYSEAPATALADAGRLVSVVNPTRVKYAGLARGRGNKTDKADARLIADYAQRERPPAWQPPSPEVRELQGLVRRIDDLTEAAAREKGRLASPALTAAVRKSVARTVRFLEREAARLRAAAAALVAATPALRADRDLLESIPGVGRQTATTILAELPAVDRLPTAQSAAAYCGLSPREFTSGTSVRKKTRLSKAGNPRLRKALFLPTQTAVRFNPLLRGFFARLVAAGKPKMQAIGACMRKLVMIAYGVLKNRAPFDPAWPSRITP

SEQ ID NO: 348629 - protein, 370 aa, unidentified
MLDTTTFIGLDVHARSIKAVSLDVMTGEVRAATFGYDAGAVAEWVRSVDPRARCVYESGVTGFDLQKRLSGLGVDCAVGAVSKMIKPSADRRRKNDRNDAEFLARMLSVGNVVEVWVPDDECEAARDLTRALEDARDDLSRSKQRLSKFLLRHGLVFDERTPTGRRKGNWTRAHWSWIESIRFAEGADNDVLAYYVDAVRRAAEEKARLEGLVEAEARKPRWRKRVDSLRCLKGVDTASAADLVFEAGEFSRFRNARSFAAWVGLTPSEHSSGESDRRGAITKAGNKHLRKTLVEAAWHYLTCSGRPKGLAKGQAPDRGARRHAAKGVRRLVERREALLARGVHGNKANVATARELACWVWAVGLMAEEA

SEQ ID NO: 348630 - protein, 355 aa, unidentified
MEGTKYIGMDVHKDSISIAVLNCSGKLVMESIIETKAITILEFVHGLRGSLHLTFEEGTWAAWLYDLLKPHVAKLVVCDPRRNGYLKQGSKSDRIDALKLAELLYSNLLRPVYHGEHGVRPLKELARSYLTITKDQARVMTRVKAVYRSWAIPCAGKQVYGQRHRLEWLGKIQETGVRRRAEFYYAELDALRSLRLVVRSELLLESKKHNVSTLLTQIPSIGPIRAALLIALLQTPDRFRTKRQLWAYSGLAIETHDSAENQYVNGQLQRSKKQASIRGLNSNHNPDLKNLFKSASAVAAVKTGPFQKFYAALIGKGIKPEMARLTLARKIAAITLIVWKRGVSFDARYLNPQTA

SEQ ID NO: 348631 - protein, 326 aa, unidentified
MKKVFFVGADVSRDKIDFCFLTPVENIRPKFVSLPNDTDTIKAYLQSFIKDDIFIVFEHTNNYHLPLQSALTDLNIKHSALNPAKISHFLKHLTYQKSDVTDAYGLALYCRIFKSDLNPSVYNHEYSLIKSYNSTILLLSKIQTQLKNFKKSQDFVADTELSEIIKSLMLQVQKTQEKIKLIAFEILKSFVPNCEQIIKDNKGFGIDLALNLFPQLHFNRAKSEKQFVSFLGLSPRIYESGSSVHKSSKINKRGSSAIRRILFLNAISCARFNDKFKQRYENLVSKGKKKKVALVAVMCAIVRYLKSLFPLNESYINENLYHARTS

SEQ ID NO: 348632 - protein, 378 aa, unidentified
MEEDVYVGLDVHKATVAVAIAPGGRSSEIRYYGSVPHRPGTMADLARKLAGKHPGRRLTFCYEAGACGYGLARELTEAGHECLVVAPSLIPSRPGDHIKTDKRDATTLAKMHRAGELTSVWVPDTQHEAVRDLVRARETAMYWRNKARQALSSFLLRQGYRYNGTKAWTVAYWRWLATLEMEHPAQQIAMQEYILAIQEADARHDRLVHQIEAAVPSWSMAPLVAALQSMRGIALITAATIVGEIGDVSRFENPRRLMAYLGLVPAEHSSGTKVRRRGITKAGNARVRRLLVESAWTYCRAPRVSQSIQRRQEGLDLAIVQTAWKAQLRLHDRYRRLSTTGKPKNVVITAVAREFVGFIWAIGQQVAATNNQEVQLAA

SEQ ID NO: 348633 - protein, 341 aa, unidentified
MQIATIGLDIAKNVFQVHGIDGDEHVVVRKQLRRNQVLRFFDELPPCLVGLEACATSHYWARELAKLGHEVRLMPAKDVKAYIKRNKNDAADAEAICEAVRRPTMRFVQVKSADQQAQLMQHRARDLLMQQRTQLINAMRSHLAELGIIAPQGREGVKELLAIITHDDNRHLPVDARASLVVLAAQLQALQTMIGAIEKRIVKQHRASKESKRIQTVPGIGEIGASAIAATVTNPRIFRSGRDFAAWIGLVPRQMSTGGKPKLGPISKQGDRYLRRLLVVGAISVLRRAKLHPGKFPWVTQMLARRPFKVVAVALANKMARTAWALMMSGKTCRAARYAAA

SEQ ID NO: 348634 - protein, 491 aa, unidentified
MAPSATTINENGKRWRYAVARRVVQRSSALLVLKKPEDEFDPGRALAQRTVASSREERAREGDSPYRRVLDHTSMEVVMDVLHLRCCGLDVHKSSISACILLREAGRVQKHQRRFGAMTQDLRELAEWLRQLGVTQVAMESSGVYWKPVWNILERQFTVVLANAQHIKNVPGRKTDQKDAEWIAQLLQYGLLRPSYIPCEIIRDLRDLTRMRASLSQEASRISSRIQKVLEDANIKLASVATNALGKSGRAMLEDIISGEDDPEHLASLALGHLRVKIPQLRLALEGNIRSHHRFLLRRLLDQMQFVEHEIALLEERLEEIGGQRPELLQAVARWDTIPGIDRVAAWALLAEVGDNMAQFPTAEHLASWAALCPGNHESAGKRLRGATRQGSPWLRRMACQCAWAAARTKNTYLSSQFRRLAARRGKKRAIIAVAHTLIVIGYHLQKNQSNYDDLGGNYFDRIHSDGLKRYLVKRLQQLGHKVTLEPIEAA

SEQ ID NO: 348635 - protein, 352 aa, unidentified
MTAIRKVVVAGVDCHAEFHQAAALDEIGHVLGNDRFAATSQGYDQMAKWLHSFGEVDVVGVESSGSYGAGLTRHLLGTGLRVIEVNRPHAHDRHHRGKSDSVDAEAAARKVLSGEAAVVPKDTAGAVEAIRQLKVARDGAVKARSAALLQLGDLVVTAPAELRERLAARTRVGQASLCRRLRPDRRRLNEPTEAAKLALRSLAKRVRLLDEEVRDIDGELQVLVQHAVPKTLALLGVGTIHAAQLLVTAGQNIDRLSGEAAFAHLCGTDPKPASSGKTVRHRLNRGGNRQANSSLHMITIVRMRYCEKTQGYVKRRLADGKTKKEIIRCLKRYVAREVYYALMADLTPTPAA

SEQ ID NO: 348636 - protein, 346 aa, unidentified
MTIVEAARGITGGIDTHGEVHVAAALDELGGLLGTESFDATPEGYAALLSWLAGFGRVGTVGVEGTGSYGAGLARFLARAGVEVVEVDRHNRQARRRQGKSDPIDAVEAARAALSGRAHGKAKSRDGSVEAIRVLVVAKRSARQARVKALTQMRQLTFTAPDQLQCKIKGLATPQFIAAAKGLRPTRSSDPVTAATKAALSSLAHRIGELDQEVTQLGARITSLLQAHAPELLAVYGVGIDTAATLLVTAGDNPERLRSEAAWAHLCGVSPLQASSGKVARHRLNRGGDRQANRALWIIVISRLASDPETQAYMERRVKDGRSKREVIRMLKRYVAREVYRKLPRG

SEQ ID NO: 348637 - protein, 320 aa, unidentified
MSATITKQVYAGVDVSKGRLEVFVAPTAERFGVPNDDTGVDELLARLEESSPALVVLEATGGFERPVAAALVASGLAVAVVNPRQARDFARATGRLAKTDRIDAQSLARFAEAVRPAPRPILDEEARALGEILARRRQLVGMLTAENNRLVTATARRVKKRIEAHLRWLEKELARTDRDLKEAIEESPAWRENEELLRGVPGVGPVLARTLLAELPELGELKNKQLAALVGVAPLNRDSGILRGKRAIWGGRSGVRAALYMGALVATRCNPAVKAFYERLIGAGKPKKVALVACMRKLLIILNAMLRNRTSWRPPHALSP

SEQ ID NO: 348638 - protein, 363 aa, unidentified
MFTERTSVGLDVHARSVAAAAIDGVTGELFQAKLTPSFDHVRSWIAGLPGPVAVAYEAGPTGFGLYRNLTGAGIRCEVLAPSKLQKPAGDRVKTDAKDAVHLARLLRIDEYTPVAIPTIDQEAARDLVRAREDCRGDLMRARHRLSKLLLRHGIVYYGGRAWTGRHDSWLRSEALGQLSQRATRLAFDSDYETVLVTKARRDRLDAAIEQMAADSEFTPLVQRLGCLRGIGTLTGFGLAVELGDWHRFTGNTIGSFVGLVPCEHSSGGSRVQGSVTKTGNGHARRLLVEAAWHHRPRYTVGKTLRERWDLAPAAARARGDEGNRRLHHRWVRFIDHRKRGTVANVAIARELAGWCWSLAVMED

SEQ ID NO: 348639 - protein, 349 aa, unidentified
MAVTIVEEARSITGGVDTHADTHVAAALDSVGGLLGVREFPATAAGYCGLLGWLGGFGTVCLVGIEGTGSYGAGLARHVTAAGIRVVEVDRSDRQDRRRQGKSDPLDAVSAARAAQSGRARGAPKGRDGAVEAIRVLMVARRSAAGERTRTINQARALILTGPDDLRARFTRHTPAALVAALASLRPRPGDVAGYAVRVALRELGRRAQFLDGQLSRLDDLIVPLVTARAPGLLALYGIGPRTAALLLIAAGDHPGRLRSEAAWAHLCGAAPIPASSGKVTRHRLNPGGDRQANHALWRIVFTRLGSDPATRAYAERRTAEGKSKAEIIRCLKRYVARQVYPHLRPAGG

SEQ ID NO: 348640 - protein, 353 aa, unidentified
MRILGMDLGQSKSAWAQLDSTTGELQQGSIEHSDQALLRLLVRRQPDQVVIESGPLAARVHDLVTARGVAVLVADTTGEAWSWKHLKRKTDPDDALKLARLALVGQINPVHVPAPAVRQWRTLLEYRRALVAEQTRCKNRIRATVLASTGGRLANGAAAWTLSGRREWARGLCPLKDCRPDELWRGLVHCELQHLTDLEARLAEVESKLTALAQASPDVKRVDSVPGVGPLTAQVLVAVLDGAQRFPTRRQVSAYAGLTPRRFQSGAMDRSGRISKRGSRLLRWALNQAAWAAVRSRPEWRALFLRLGGGSKKRRKQAIVAVMRRLLVVAWAVLRDGTVYRSGRLQPKVAAAA

SEQ ID NO: 348641 - protein, 339 aa, unidentified
MELYVGMDLHSRNTYFGILNEEFKRVFKKRVANNLPLILNTLEPFKDEVKGIVVESTYNWYWLVDGLMDAGYGDIHLANPSAVKQYEGLKYTDDQHDAFWLAKLLALGILPEGYIYPKESRPVRDLLRRRSFLVKHRTSYIHSLQSMIERYTSLRVSGNDLKKLELEELHEIFKEEHLFLSAEACLQNIKFSTRQITRIQKAVKEKMKIQKPFDLLMTVPGIGEILAMTIMLEVGDIGRFPKVGDFASYCRCVPTDRRSAGKSKGKGNSKNGNRYLSWAFIEASNFARGYNERFRRYYQRKAAKINKIVATKALGSKLARICYYIMRDQVPFREEAVFC

SEQ ID NO: 348642 - protein, 351 aa, unidentified
MIAKTECSHYWSVGIDLHKHTMTVCVYCARCGEVHFRRLHCKCRQQIVEFFTNLPRPHVVAIEAVGFYRWLWQLLEPVVESLLLADATATRALAAGRIKTDEDDAFNVAELLALGRLPVAYAPPEEVQALRDWTRRRNRLSREHARVLHWVKSLMNTNNRPGPARLDSRGLIRYIKAQGPKLPQRHVRLLWHCVDQLTVIERQIDEIERIIAPLLDSPTFREKRDILTSFPGVALVTAATILAEIGDFTRFEHRKAIARYVGLNPRVYASGSKNRTGHIAKAGPPDVRWVMQQAAWTAIRVDPHIKRMWLKISRSAGRKAAAVAVGRKMLTWMWYAVRANEPYQRPAAKAA

SEQ ID NO: 348643 - protein, 372 aa, unidentified
MNYNTVYVGMDVHKESFSLCAYTIEAEKASHYQRTEADYKKVLNYLEFLRTIYGGDANFICGYEAGCLGYTLYHQLMANNVKCIILAPTTMLEQRSKKRIKTDKRDAEIIAKCLAQHNYSPVHIPTAKDEETKEFLRMRDDHKLALKKVKQQILAFCLRHNYRYDGNSHWTAAHLKWLKALILEALYKEILDEYLLTYQTLSDKLERLDKRIEELATQDEYKEAVKKLCCFIGVKTHTALSVLVEVGDFKRFASAQHFAFYLGLVPGENSSGDDQNRLGITKAGNRHVRLLLTEASQCYARGQVGFKSKELKARQSGNTPAVIAYADKANERLRRRYYKMVLNKCKKHNVVKTAIARELACFIWGMMTYNIA

SEQ ID NO: 348644 - protein, 355 aa, unidentified
MDSKKYIGMDVHKESISIAVMNSAGKIVMECVIETKASMILQFIDGLRGDVHVTFEEGTSAAWLYDLLKPHVTKLVVCDPRKNASMREGNQSDKIDARRLAELLRLNHLNPVYHGEHGLRSLKELVRSYLTITKDLGRVMTRVKAIYRSWAIPCTGKQVYASCHRAEWLGKIGEPGVRRRAEFYYQQLDALRTVRQQVRRELLAEGKKHQAWKRLCQIPSIGPIRSAVLLGILQTPHRFRTKRQLWTYSGFGIETQSSADHRSVYGQLQRAKKQISIRGLNQNHNHDLKNLFKGAAIVASSKPGPFQEFYAALLTKGIRPEMARLTLARKIATIVLIVWKRGACFDAQHLKPQTA

SEQ ID NO: 348645 - protein, 338 aa, unidentified
MESYAGIDLHASNNYTAVIDDHDKRLYGKNQPNRLDVVLSALDPFKTELKGVVVESTFNWYWLVDGLMENGYKVHLANPSAIKQYEGLKHTDDKWDAFWLAHMLRLNILPEGYIYPKEERPVRDLLRRRLLFVKHRTSHILSLQSMITRNLGVRMACRGIKKLMEEDAESMFDSPYLVLAAKNNIATIQFLKKRIKVIEREIRPLIKIREEFKNLLTIPGIGDILGFTIMLEVGQLSRFPKVGDYSSYCRCVKSERLSNGKKKGKNNKKNGNKYLSWAYIEAANFIRMHCPKAKSFYQRKMAKAGGIVATKALSNKVARASYYVMRDQVPFDEDKLFA

SEQ ID NO: 348646 - protein, 339 aa, unidentified
MKVSTLGIDLAKNVFQLHGVGCNGQTVLKKKLTRDKFLPFLMQLEPCLIGMEACASSHHFARVLRQYGHEVKLIPPQYVKPYVKTNKTDAADAEAICEAVARPNMRFVQIKTAEQQAILVLHTERNILIRERTACANSMRAILAEFGIIMPRALSQLYKKIPEILEEYDNELSPFVRCSVARQPEHLQGVEDQITLIEQELSRWAKTQPACQRVMKVPGVGLMTATYLVASVGNGQQFHSAKQFAAWLGLVPREFSSGGKQRLGRISKRGDRYFRYLLVHGARAVAAVIERHKDNMPWLYRLLNKKAYNVAVVAQANKTARILWSMLVQHTEYRTLSAV

SEQ ID NO: 348647 - protein, 348 aa, unidentified
MTVYVGVDLHSNNNYVGIISQTSEVLFKKKMPNDLSKVLEVLEPFRNDIAGIVVESTYNWYWYVDGLMEKGYRVHLANPAACEQYAGLKNVDDKRSALWLADLLRLGILKTGYIYPKEERPLRDLLRKRLHLVHHRSSHIISIKNILTRSLGIQIKSEEVRKLDEGQIRRLFPNEDLFLAVNASVTMMKHLNDQINRIEKAILAKARLRKEFKSLLTLPGIGEILGLTIMLEAGDIRRFEDVGDYVSYCRCVKSVRTSNGKNKGKGNRKNGNKYLSWAYVEAAHAARRYHPVIERYYQKKLAKTNKAVAAKAVSSKLARATYYVLRDQVAYDEKKLFGGKAEPGAVLG

SEQ ID NO: 348648 - protein, 326 aa, unidentified
MTQEPVATLGIDVAKAKVDVVLKSGGGESYETFPNTVTGFKELSRWLKKRKVTTGKAGLEATSVYHEDLALYLYEQGWQVYVINPGRLHAYAQSQHSRNKTDKGDATLIAHFVATQELDVWTPPNPAWRELQALVRHIQDLKDEKQVAQVRLQTARTPVVIASLEKLITFLQQQIDDLIRQIKDHLDQHPDLKSQHELLTSIPGIGDWSAAQILSELPAIQQFDEPKEVVAYAGLNPMHHQSGSSVKGYTAISKIGNARLRRALYMPALVGNRFNPILKAFYQHLLAQGKRKAVALTASMRKLLHLIFGILKSQKPFDPNFLNQKA

SEQ ID NO: 348649 - protein, 429 aa, unidentified
MQNESTPGARGPVFCGVDTHADSHWLCVLDWRGRKVLSRQFPADAAGYEALAGAIAAAGEPACVAMEGTSSYGAGLTRHLASLGMPVREALSPARTQRRRPGQGKCDEADAERAARAAMSGSRLGTPKSQDGWVDGVRCMLAARSGAVKARTSAINTARSLLTTAPEGLRSRFRGMAGPRLMEELPSVRAEGALGAALGALADLWAAARDAALDMERAIEASLEENCPALLAMYGCGPVSAAKLAVAAGDNPGRLRSEASFAAICGACPIPASSGKTVRHRLNRGGDRQANSALHEIARQRVMRDPETAEYAERARARGKSDREVMRCLKRYVAREAYRALMRPHEVRRPEDASGLVAARRAARVSQVRAASILGTSEKYISMLERGQRELKPIRRAYEAWVEAGLPLDWDRQAFEAERKMDSKKHLAK

SEQ ID NO: 348650 - protein, 401 aa, unidentified
MLPPSPGLSDALQVYHPHAAGIDIGEAEHWVAVPPGCDPQPVRRFGTFTADLDALADWLLDCGVTTVAMESTGVYWIPLFELLEARGLQVLLIDPRQAKRVPGRPKTDRLDCKWLQRLHTYGLLAGAFRPEAHVCVLRSYLRHRQMLLTYAAHHIQHMHKALEQMNLKLTQVVSEITGVTGLAILKAILAGERDPQRLAKLRNPHCHHDEEDIAKALQGTWRAEHLFALRQAVELYAFYHQQMTQCDQQIAAHLKTFGDKSAGQPLPPKAHRHKKTNEPRFDARTPLYRLAGVDLTTIEGIEEGTALVILSEIGTDMHRWPSVKHFCSWLGLCPQHTISGGKVLSRRVRPGAHRVTVALRLAARSLHHSQSALGAFFRRMKARLGTPKAITATAHKLARLV

SEQ ID NO: 348651 - protein, 422 aa, unidentified
MPGSQKTRGMTSGRLSTINPDAAGIDVGATFHVVAVPADRDDRPVRTFRTFSGDLHHLADWLTAIGITTVAMESTGVYWIPVFEILEAHGFEALLVNARDVKHVPGRKTDVNDAQWLQQLHQHGLLRGSFRPRDGVVQLRAYLRHRERLADYAATHIQHMQKALMQMNVQLQHVVADITGVTGLRIIRAIVAGTHAPDALAEFRDVRCAASPETIRAALTGNYRPEHVFALRHALELYDVHQAKIAECDTEIAAVLRTLNEARATPEAPLPAVRHAKARNEPKFDARPALYTLLGADLTQIHGFGPYTVLRLIAECGDDMSKWPTAKHFTSWLSLAPGNKISGGRVLSSKTRRSANRAAVLLRIAAVNIGRTQTALGAFYRRLAARTGKAKAVTATARKLAILFYNALRFGMTYADPRRLVL

SEQ ID NO: 348652 - protein, 324 aa, unidentified
MFYLGIDVAKAKIDCCLILENSASKKKTKTFSNTPKGFEQLQTWLKQHAATSTQTIILMEATSIYHELLAKYLFDADYQVCVTNPARARYFAQSMSKLNKTDKVDSEVLARFAMTADLHFWQPLPQPIQFLNALLDRRAVLCEDLQREKNRLEKAESTFTMEPVLQSIHKSIRQLNKHIQGIDQQIDAHIDQNPDLRNDKELLSSIPAIADRTSLLMLSFLRSHTFESASQAAAFVGLVPIQKQSGSSIHGRSRLSKAGSSKIRAGLYMAAIVATRHNPHIRGMNERLLVNGKTKMMAIGAAMRKLVHLCYGVLKHQQPYQADY

SEQ ID NO: 348653 - protein, 533 aa, unidentified
MSAWFRCECDYVNGGSVILEEGERLDPDGESDEFSPPGPSQFNPITEDEDSMKSTRQEQSSPSTQASVSVTWQGMNRKQRREMTRKIQSADIGLEVVHADAAGIDIGNEAHYVAVPPTRDSQSVRRFGCTTAELKDLAAWLKRCQIRTVAMQSTGVYWIAVYDILQAAGLEVYLVNARETKNLPGRKSDVQESQWLMKLHTYGLLRNSFRPSPEIRALRTYWRQRHDLVRSAGRHLQRLQKALTQMNIQLANVLSDVSGATGQAIIQAILAGERDPQQLAAWRDVRVKASQEEIARSLEGNWQEDLLFMVKQEQDGYQFCQKQIAECDQRLAQHLQQQTDRSAGAPLAEEKRKWRRKKKKGNNPQFDLRTELFRMIGTDLTRIDSIDVMTATTVISEAGYDMTRWPTEHHFVSWLRLCPDNQVSGDRVIGKKRLPTNNRLTVAFKMAANTLRKSDSYLGAQFRRLRTRLGAPVAIKAMAAKLARLVYRMLRHGLEFVDRGATFYETKHRQREINSLKRKAANLGFQILETPAA

SEQ ID NO: 348654 - protein, 310 aa, unidentified
MQDTIGIDISKDTFDIYRLSDRRHERFGSDKAGLAALRRWIGKAPVRIVYEATGRYHRDLEAVLGAAGHDLVKVNPTRARRFAQAVSQGAKTDRVDAAMLARMGAVLELDAKPVRSETMHEIRELHIARRALNKDRTACRNRLEAARNKVVLAQLRARLRQVDSQLEQIDTELARLIAEDPALARRQEILCSIPGIGAVTAVAMIVEMPELGTMEPKEAASLAGLAPITRESGKWKGRSKIGGGRRGVRNALYMPALVAIRHNLHLAETYRKLVDAGKPAKLAIAAIMRKLVILANALIRDDRKWTKTAP

SEQ ID NO: 348655 - protein, 397 aa, unidentified
MYIVGIDIAKRKHEAAVIDGEGAVIIKPFSFTNNCSGYNRLLAMLAKAKLPLDEVSFAMEATGHYWLALFTRLQKEGFRVQVINPVQTNSIRSFYIRQAKTDPRDALLIAEVIRFGHFSESTLHPENIYELRELCRGRHAIVSMQADVKRKVVALLDQVFPEYETAFTNMFSDTSMAILQTCPTPKELSEMPLEELCHLIEVSSHKRFRMAKAQELQALARNSFGFAMAGDVFSTMIRLYAKHLDFLKQQVREMDRKIAEIMDTLDTPITTITGIGPTLGAYILSEIGDINRFSSSAKLAAYAGIDPTMRQSGEYNGVRNRMSKRGSPYLRHAIWLATSSAVLHDPALKLYFQKKRDEGKPYMASVGHACRKMVSIIYAVMRDNKAYTPYIPNEISA

SEQ ID NO: 348656 - protein, 344 aa, unidentified
MKVTTVGIDLAKNVFQLHGVNEFGKTVIKKQLRRDQVSEYFVNLPACLIGMEACGSAHYWARKLQDFGHTVKLMAPQFVKPYVKTNKNDAADAEAICEAVARPNMRFVPIKNVEQQAVLALHRVRQGFVKARTAQANQIRGLLGEFGLIIPQGIGYIATRVPELIEDASNELPGSFRILVQRLLDHLKELDRQVGELEVQIQTWHRHSDASCKLAQIPGIGPITASALVASIGDAKNFDSGRQVAAWLGLVPKQHSSGGKQNLLSISKRGDAYLRTLLIHGARSVIYRAVQKPESCSWINGVVNRRNKNVAAVALANKNARIVWALLAHDREFRSDYTTAKAAT

SEQ ID NO: 348657 - protein, 347 aa, unidentified
MTTIVEIERAHVGGVDTHADVHVTAVIDPQGGLLGVESFRANPDGYKELSRWMRNFGTIGMVGVEGTGSYGAGLSRHLRSVGLVVVEVDRQNRQARRRQGKSDPLDAVEAARAAQSGRAFGVAKTRDGSVEAIRALMVARRSARESRTKAMNQIRQLIYTAPDELRERFVGTPPWRLAEGVAVLRVHADANPVRMATKTALATLGRRAVALDEEGSRLDALIARLVDNVAPELVQLVGVGYDTAALLLIAAGDNPSRLRSEATWAKLCGVSPLEASSGKVTRHRLNRGGDRQANHALWRIVLSRMSCHPPTKTYVARRTVEGKSKKEIMRILKRYVAREVYHYLPRE

SEQ ID NO: 348658 - protein, 370 aa, unidentified
MLESDQLQPRELPIVTTSTRIKCHLYIRLHDLPTIAQEELFTVDAILERCAGLDVHQDNIVACFLSGPLDQRPSKEIESFGTTTKELLRLQDWLQDRECTHVAMESTGVYWKPVWNILENTCELTLANPTRIKNVPGKKTDYSDAEWIARLHRSGLIEKSFVPNEEIRDLRDLTRYRRKLLQNVTQEKNRVHKILQDANLKLTTYMSDVFGVSGRALLESIVNGEVLDAEQVRDMVKSTLKRKVPELIEALNGRLRLHHRKMIRRHLEHIAFLEREIQELEAEIEQLLAPYQREKELLETIPGIKQDAAASILAELGPDMSHFPSDAHLASWAGVCPANHESNGKKKNEKRTNVEIKDLNPCSVNVAGQP

SEQ ID NO: 348659 - protein, 389 aa, unidentified
MLLEHPSDGLAAIRTHIGAIFVSLELSRKNWLVTSLSPGKGEKMSRHSVTAGDVAGLMKLFAEFRRKAEVRTGQSYPIITIQEAGLDGFWLHRVLQQNGVESHVVDPASIAVPRRRKRAKTDKIDGETLLRALLAYKRGEPRVCAMVVAPSPEEEDRRRLCRERQALIAERIRHVNRIKGLLFAQGISDYKPLRRDRRARLEALRTGDGRELPSHLKAQIGRELDRLELLLEQIKSVEAAQDALLAAATTPASQEAAPGPVTLLLALKGMGANFAAVLWSEAFYRQFANRRQVAAYAGLAATPWQSGGIRHEQGVSKAGNSRLRTTMIQVAWLWIGHQPNSALTRWFKERSPQGRKRAIVALARKLLVALWKYVTQGVVIEGAVMKTAA

SEQ ID NO: 348660 - protein, 416 aa, unidentified
MNAVGIDVSSRKSTVAVLRPLGEVVCLPFDVSHDADGLASLAEKLKALDGETRVVMEHTGRYYEAVAKALHEAGFFVCAVNPLLIKEYGANSLRRVKTDKADAVKIARHALDNWADLRDFTPMDAIRYDLKTLNRQFQLASKQRTASANNLIALLEQSFPGIRKCFDSPVRSDGTQKWVDFAHSFWHVDCVRKQPFPAFCERYRKWCKRHAYFFKLSNAEEVYALAKRAVVLTPKSKVVKVLVQEAANQLSSISRSVEVYRAEMDRLAAMLPEYPVVMAMYGVGKSYGPQLMAEIGDVRRFERKQALVAFAGIDPMPNQSGDKNVRSNKSSKRGSPYLRKTLFNVIRTYLQCAPQDEPVFQFLNRKRAEGKPFYVYMLAAANKFLRRYYAKLRDYFASLDTLQSVDPIPATLKASL

SEQ ID NO: 348661 - protein, 336 aa, unidentified
MQITTIGLDLAKHIFQVHGVDANEAVVEKRRLRRGQVLSYFAKLPPCRIGMEACATAHFWARELRRLGHEVRLIPPQYVKAYLKRGKNDVADAAAICEAATRPSMRFVPIKSEEQQAVLVMHRARDLLVRQRTQLINALRGHLAEFGLIEAQGLSHVRRLLESMRTDLTVPELARDTLDLMATTLDAVDAQINAIEAKIAAWHKANATSQRLATIPGIGPLIASAITATVADPTAFRSGREFAAWLGLTPRQKSTGGKQRLGRITRKGDQYLRRLLIIGAQTVLLRSKIAKASPWLQGLLARCARLKVAVALANKTARIAWAVMMRGDCYRAAAVA

SEQ ID NO: 348662 - protein, 334 aa, unidentified
MVAGTSLVRFTRQGSTKMSNTSTNTAGIDTAKHKLDIAVHGLTTRWQVENTLPGWRRLTADLKEVRVTRVGIEASGGYERGVVQHLRAAGFTVLVMQPIQVKAYARVHLRRAKNDALDAALIAACTVSLEQPRIEPDGRLAELADNLTFVEQIEEDIARFKTRLERVDDPRLRRLVMADIARLKARRAAELLRIVRALRAFDDLARRLDLVLSVPGIGERTALALRIRMPERGRVSREEAAALAGLAPFDDDSGKHKGQRHIAGGRSRLRRALFAAALPAAFRWNKALCDLYARLKTRGKAHTAALIACARKLLIYANTVVQRGTPWIEKPAAT

SEQ ID NO: 348663 - protein, 369 aa, unidentified
MILVGIDVASNKHDIVILNELGIAFKKAFSIKNDLDGYKKLLEQISLAKEFFKDSNVRIGLESTGHYSRNILHFLILEGYDVMFINPLLTNMDRKAASVRKTKTDAIDAEAICMFLIRNQNDFKPYTLSSYHIDELKTLVRLRKSLKSQINSKASMKVLSRYGLLSEFKRARFETLKELIRKSSMGHHGIKEAQMIKELPISSIGIDSSSLAFSIKQTIKRILMLEEQVNHIEKEVIHHVEKSHTTLLSIPGVGYTTGAIILAEIGDIRRFKTDDQLLAYAGLDPSVYQSGNFEGNYKISKRGSSILRWAIYQAAQATVKFDPVLNAYYLKKKYEGKRHCVIIGHVTKKLLRVIRSILKNHSVYSLNTH

SEQ ID NO: 348664 - protein, 397 aa, unidentified
MYIVGIDIAKRKHEAAVIDGEGTVIIKPFSFTNNCSGYNRLLAMLAKAKLPLDEVSFAMEATGHYWLALFTRLQKEGFRVQVINPVQTNSIRSFYIRQAKTDPRDALLIAEVIRFGHFSESTLHPENIYELRELCRGRHAIVSMQADVKRKVVALLDQVFPEYETAFTNLFGDTSMAILQTCPTPKELSEMPLEELCHLIEVSSHKRFRMAKAQELQALARNSFGFAMAGDVFSTMIRLYAKHLDFLKQQVREMDRKIAEIMDTLDTPITTITGIGPTLGAYILSEIGDINRFSSSAKLAAYAGIDPTMRQSGEYNGVRNRMSKRGSPYLRHAIWLATSSAVLHDPALKLYFQKKRDEGKPYMASVGHACRKMVSIIYAVMRDNKAYTPYIPNEISA

SEQ ID NO: 348665 - protein, 410 aa, unidentified
MLELFVGDDWAEEHHDVELMDPAGRRLGRARLPEGVTGMARLHAMIAAQLGEGVEDAVVKVGIETDRGPWAQALIAAGYEVFAVNPLQAARYRERHSVSGAKSDKADAHTLADMVRTDSHQLRPVAADTPRAEAIKVVARAHKTLIWERTRHTQRLRHALREYFPAALEAFEDLAASDTLELLSKAPDPAAAVRLSISQISAALRRAGRRKIEEKAAVIQTALRAEHLRQPEVVAAAYAASVQSTVAVLKVLVEQVKTLQGQVESHFGRHPVAEIILSQPGLGPILGARVLGEFGDAEDRYVSAKSRKNYAGTSPITRASGKKKLVLARFVHNDRLIDALNAQAFAALSASPGARAYYDRIRARGVGHRAALRQLANRLVGILHGCLKTGTVYDETTAWPADATDSPAAA

SEQ ID NO: 348666 - protein, 310 aa, unidentified
MDHFIGIDVAKATLDIASLPDGEGWTVSNDEHGLAELTPRLLALAPSLIVLEATGGFEFLAAITLANAGLPVAVVNPRQVRDFAKALGRLAKTDALDAAILADFAQRIRPEPRPLPDEAAQLLDSLLTRRRQIVEMLTAEKNRLGFARGPVKRDISQHIRWLEKRLADVNGDLQDAVAASPLYRAKAELLGSVPGVGPVTTLTLLATLPELGQLSRHQIAALVGVAPMNRDSGTMRGKRMVWGGRAPVRAVLYMATLVGLKHNPVLQVFYERLRAAGKPFKVAATACMRKLLTILNAMLKQNRRWDPEHA

SEQ ID NO: 348667 - protein, 378 aa, unidentified
MSKVRFLGLDVHADTIAVAVAEPSGEVRSLGTIPNRPESIRKLVKKLGGAEALRVCYEAGPTGYVIYWQLTALGVRCAVVAPTLVPTKAGDRVKTDRRDAEKLARSYRAGDLTAVWVPDAAHEALRDLVRAREAAKKDQLRARHRLGKFLLRHGRRPPIGMTSWTQRYLAWIKAAVHFEPPAQEVTLLDYLHEVEHVADRIERLERAIDEAVTTAPPSMRVVIEALQALRGIALVSAVTIVAEVGALSRFERAPQLMGYSGMGAREDSSGSRTRRGGITKTGNAHLRRIVIEAAWSYRHRPAVGRALRKRQATVSEAVKAIGWKAQLRLHARYRRLLGRGKCQQHVVTAVGRELLGFIWAIGVTVEREQRKTSSSIAA

SEQ ID NO: 348668 - protein, 380 aa, unidentified
MTQHSHVTTSNGLDYDRTLILAVEVSGRSWVVAAQVPGLRQKSAKQQLAPRADALMAAVEGYKRRAAAAGMTVERVIVAYESGGSGFWLARWLQQRGVEVYVMQPSSVPVDRRMRRAKSDRIDADMLLRTLLAWLRGEPRVCSMVPVPDEAVEDARRPIREREELIRARVALVNRIEAVLTVLGAGDYNPLRRDCRERLGQLRTALDQPLPPHARAQIERLLDRLDLIRQQVADLEAQRDQAVEGEAAGRTEQMIQRLARLRGIGVQTATVLVHEAFVRRFRNARALGSYAGLTGTPYSSGGTQREQGISKDGNRRLRATLVELAWMWLRYQPGCALSRWFHDRLGGSRGRLRKVMIVALARKLLITWWTMLLKPPRISC

SEQ ID NO: 348669 - protein, 353 aa, unidentified
MPSKADTAVARTIGIDTGKNTLHVIGLDEKGAIVLRERVSRTRIAARFVNVPPCLIGIEAGMASHHIARELVALGHEVKQVPPAYSKPFRQGHKNDFRDAHAVAEAAERPSTRCVPIKTDEQLDLQALHRVRSRLISNRTAVTNQIRGFLLEHGIPVRQGHHFLRRQLPQLLGTRTDVLSPRMIRVIGDLMSDWNYLDERIERVTDEIESLARADEGCQQLITVPGIGPIISSAMVAAIGTGAAFCKGRDFAAWLGLVPKQMSTGDRTILGRITRRGNRYLRTLFIQGARAILLRPTGWAKHSFGSWLAAAARRMHRNVLAVALANKLARIAWTVLAQARCYEARVEPRVEPA

SEQ ID NO: 348670 - protein, 386 aa, unidentified
MRRIGLDLGVRHIAYCEVAEGKVVDRAAVKSLSQLASRLGLGTEPAVVAFEACREGWHVHDMLREWGHDPRMLDTTRVRQMGVGQHGRKNDPIDAEAIAMALDAGRIAEAHVLSPERRVLRAQLSVRGALVETRAQYVTTIRGLARAAGVLLPTCDTENFVRKLDGLAMDEATRALVAPLVAVLATLETELARVEHTLAALAEKDPVLQLCATVPGVGLIVAATFVSVIDDAKRFKNAHAVGAYLGLVPSESTTGGPNKRRLGAITKQGNRMARAMLIQAAWTIFRSRDPNDPLKSWVEHLATKRHKRVAVVALARKLAGVLWAMWRDGTFYDPKGHTEQSEQGVRASIRQQVGRAQALQRAAKKLRRLAPDSSTQPTQSSQKGVL

SEQ ID NO: 348671 - protein, 349 aa, unidentified
MAMLADQVDAVIGVDTHKHTHTAALVTPTGGLVADVTIPTDAFGAKRVLAFAREHAPGRRVWAIEGSGSYGSGLTTYLLEQGEWVVEIDRPARPARRNGAKSDELDALRAAREALSREHLAQPRRRGDREAIRVLVCTREGAILSRTRAITHLHALVVNAPEGIRNQLRKLSTDDLLERCARLRTGPSQSIEHRSTIAALRSTARRALACEAEAGDLESGLELIVTRVAPELLAEPGVGVMSAARLLNAWSHQGRIRSEAAFASLAGVSPIPASSGQTIRHRLNRSGDRQLNRALHTIVLSRLQHHPETRAYAERRQAEGRTAREIKRCLKRFAARGLFRLLERSTLMA

SEQ ID NO: 348672 - protein, 399 aa, unidentified
MTALRRVVIGADTHLDTNHLAVLTDTGKPLADDEFPTSPAGYDDAVRWAQSFGVIAIAGVEGTSSYGAGLTRVLQAAGIEVAEVSRPDRAARRRRGKSDPLDAYAAARAALAGDRLAVPKDEHTTALRALLSARRSAVKAHTAATNQLHALLVTAPGELRERYRRHHITALVAALAQCRPATQGDPTSAAVLTAAKALAQRVKFLEQQRQDLTAQLDGLVGQINPALRAAYGVGPHTAAQLLVTAGTNPHRLRSEASFAALCGAAPVPASSGTITRHRLSRGGDRAANNALYRIALVRMSSHSQTRDYVERQVTKGRTKKEILRLLKRAIAREVFRLLTRPGPVDDYRDLRAARQAKNLTLAAVAQHFGVPIITISRLERGHQRNDTLANHYRQWLTAA

SEQ ID NO: 348673 - protein, 377 aa, unidentified
MKRILKIGMDVHSTNYTLCAMEPVIGAEDRVFANIQVAPDHKNILLFIENLKQKLGTDDTYDIECGYEAGCLGYSLYNKLTAAGVKCVILAPTTMLTEQGQRIKTDTRDAHLIAQCLSYGGYHPVYIPTEQDDSVKEYLRMRDDHKVALKKIKQQIGMFCIRHGYCYEGRKWTMAHMKWLRTIELSPMYQETLDEYLASYEEQSAKIDRFDARIEEIAAQTEYAERVHKLGCFLGIKTHTALSLIVETGDFTRFAKGNVYAAYLGLVPGEHSSSVKINRLGITKAGNSHLRTLLVESAAGLCKGAIGHKSKDLIQRQQGNSVQVITYADKANARLRSKYYRMIRRGKKRNIAVAAIARELACFVWGMMTDSISVTAA

SEQ ID NO: 348674 - protein, 388 aa, unidentified
MSSIAVVPAARSIIYLGMDVHKESITIAVLPAAARTPTRVDRLANDLAKLKRFLDRCAEQGELRACYEASGAGYVLHRALREWGYACDVIAPSLIPKRPGVQRKHDKYDAAELARLYRAGELTPVRIPTEAEERVRDVVRCRATFQREILRSRHYILKFLARRGFVFREGTNWCTPHLRWLQHLTTEQSPLAAADRLVFREYHALLLYKLQRRDELDREIARLAELPTLAPAVRRLQCFRGISLHSAMVLATELVDWRRFARPAQLASYLGLVSREDSSGDRERRGSITKAGNSHCRHVLVQAAWSYRHRPATSVDLKRRQVGQPPGVIAHAWKAQQRLHQRYNHLAFRKLPQIAAVAVARELVGFLWAVMQDVPVVESVEHPAASAA

SEQ ID NO: 348675 - protein, 341 aa, unidentified
MSEVSTIGLDIAKQVFQVHGADTSGHVMFRKRLTRARLIEFFRSQPRCLVALEACGGAHHWGREIAKLGHTVRLIPPAYVKPFVKRQKNDAADAEAICEAAQRPNMRFVAVKDEEQQASGVVFRARDVLVRQRTQCINALRGHLTEYGWVVPKGATHVPTLIDQIEDPNCQLPESARPIFKVLISNLKSLDENIAVLDVEIGRRSKEDPVARRLMTIPGVGPITATAIVALAPAAETFKSGRDFAAWLGLTPLQKSTGGKQRLGATSKMGERTIRRLLIIGGSAVVRQACMRGAPAGSWLARMLERKPRMLVTVALANKTARIVWALLSKDEVYRAPIVVA

SEQ ID NO: 348676 - protein, 321 aa, unidentified
MAQTCSKLESNAVVVGIDVSKDHLDAAQYPSGDLIQTSNDTKGLRTLLRWIGRQRAVHVVFEATGPFHRQLESYLARAGIPFSRINPRHARKFAEATGKLAKTDRVDAMMLARMGALPEPRTSTICNELQSALQELAAGRRNLTRDRTALLNRQQNLQLSLLKRLTRYRLRQIEAQIATIDQAISELISTDESLSRKRTILVSIPGIGEATAAMLIADIPELGTLQNGQVAALAGLAPVTRQSGKWQGKSFIRGGRIHVRNALYMPALVAMRHNPDLRSIYLSLTNKGKHAKVALTALMRRLVILANVLLRNNRLWEARHT

SEQ ID NO: 348677 - protein, 367 aa, unidentified
MKKGSTPAAKQSSNFSRQKLTIGLDLGDRSSWYCVLDEAGNVVGEQRVSTTAKAMREGFSRIARSRIALETGTHSPWVSRLLSELGHEVIVAHARNVRLIGESRRKDDRLDAQTLARLVRIDPQLLCPVKHRSAKAQADLTVIRARAGLVRARTALVNTARGLAKSYGERLRSCNVRNMNPEKAEQLSPELQTALEPLLAGIETLSEQIREYNQRIEALAQQSYPEMALLTQIKGVGTLIALTFLLTLEDAHGFGKSRDVGCYLGLQPGRRNSGQSEPQMHISKQGDPYLRTLLVQGAQHILGPFGADCDLRRWGLKLAERGGRNGKKRAIIATARKLAILLHHLWVTGEIYEPFYNRNCLATAAVA

SEQ ID NO: 348678 - protein, 350 aa, unidentified
MTIVETRAETRAITGGVDTHADVHVAAALDPIGGLLGVREFPATTAGYARLLDWLAGFGTVCLVGIEGTGSYGAGLARHMATAGVRVVEVDRSDRQDRRRQGKSDPLDAVSAARAAQSGRARGAPKGRDGAVEAIRALMVARRSATGERTRAINQARALVLTGPDDLRARFTRQSPAALVAGITRLRPRPGDIVGYAVRIALRELGRRAEFLDGQLECLDELIVPLVTTRAPGLLALYGIGPHTAALLLIAAGDHPGRLRSEAAWAHLCAAAPIPASSGKVTRHRLNPGGDRQANHALWRIVFTRMGSDAATRAYVERRTKEGKSKAEIIRCLKRYAARQVYPYLRPAAG

SEQ ID NO: 348679 - protein, 454 aa, unidentified
MSLEDRPVEQPDAAGVDIGAREIFVAVPHDPEGQPVRKFATFTEDLWRLADWLQGCGVTTVAMESTGVFWIPLYELLEQRGLKPCVVNARHMKNVPGRRTDWHECQWIQFLHSVGLLRAAFRPEEQVCAVRAIVRHRQQLVEMAAQHVQHMQKAMTLMNLQLQHVLSDITGTTGLAIVDAIVAGERDPKELSKLRDPRVRASSDVIEKSLCGNWREEHLFTLGQSRQFHRFYQEQIVICETNIERLLQQFDPRVDPQQTPLPPDNKCNRSGAKRRKKAGHVESQFDLRTEAYKLFGVDVTQIPGLETNVLPLFGEVGRDLSRWPTASHFISWLSLCPDNDISGGRVLWRGMRKTNNRAGQIFRLAAQSLHRSPTPIGEYLRRLKAKLGPAGAITATARKIATLFYTLVTRQVEFDYTLWHANDAQRQQRIQARLTRQARRLGYQLVPLEVSSST

SEQ ID NO: 348680 - protein, 345 aa, unidentified
MPSIVGGLDIHRKQITFDYADTVTGEVFCGQIAPADRAHLRGWLAGRFEHPEDAAFAVEACTGWRYVTEELTTAGIAVHLAEPADTATQRGKKKRAKTDRADARLQRILLAQGRLPECWIPPGHVLECRALLELYHDLRTEHTAWIQRAHAVLFHQGAPVFCDLSRAEAPAELAAVARGHLSPAGQLQVDACLRMLAVLEAELAAVRRRLLAAARHLRGARTLTESIYGVGPVTGLALTCWLGGAGRFSSARKAVRFAGLDITVYSSDSKRSPGHLSRQGPPVLRWAVYEAGKTHARPAAPDHGYYAAVKDRKDGKRAALSEARKITRRACHILSELGDDALAMI

SEQ ID NO: 348681 - protein, 349 aa, unidentified
MKIIGCDFHPSYQQIVMWDKATGEMLERALSHERKEEVRAFYAGLQGPVRVGIEASGQSQWFEQLLAELGPEVWIGDAAKIRASCERKQKTDRRDAELLVKLLEEERFPRIWVPTPAERDARQLLLHRHKLVRRRTQLKNQLQALALNQGVQRKRKLWSEAGRKPLEALPLLPWASRRRAELLVLLDQLEASIGELDGAAAEQANTRPAVRRLMTHPGVGPITALAFVLTMGPAQRFRRGKQVASYLGLIPTEHSSGGRGQRLGHISKQGNPFLRGLLVEAAQSAVRHEPERRRAYQRLAQRKCRALAKVAMARKLAVRLYWMLRREVDYAQLIQGSHAGQLESFRGRV

SEQ ID NO: 348682 - protein, 342 aa, unidentified
MNYYAGIDVSLEWSSVCVVDAKGLIIREGKVASDPGALIAWFRAAELTPVRIGLEAGPLSQWIYAAMNEVGLSVELLETRHVRNAFKTMPVKTDRKDARGIAELMRVGWYRPVHCKSLDAQETRAVLTARKLVDKKLRDVEMSLRGMLRGFGLKVGKITPTRFATRIKELVSGHGTLQSIADSLLAVHDVLLREYKVFEKRVRMIARDNADVQLLMTTTGVGPIVALTYSSAIDDPGRFKKSKMVGAHFGLAQKKYQSGETDITGRISKCGDEGVRTALYQAAHIMLTKPVKSSALKSWALRLARRVGMKKAKVALARRLAVIMHRMLIDRTPFNRTAGAAA

SEQ ID NO: 348683 - protein, 347 aa, unidentified
MRFYTKQHRYSCGIDLHARTMYVCIVDREGAIVFHHNLPSAPDAFLKAIAPYRDDLVVAVECIFTWYWLADLCAREGIPFVLGHALYMKAIHGGKAKNDKIDAHKIAVLLRGGMLPMAYVYPADMRATRDLLRRRCHLMRKRAELLTHIQNTNSQYCLPQFGKKIAYKTNRHGLPERFPDPSVQKSMAVDLALIDHYDKLLTEVELYITRTAKVHDVNAFYRLRSVPGIGKILALVMLYEIHDIARFPTVQDFASYARLVKCAKESAGKRHGASGAKIGNVHLKWAFSEAAVLFLRHNPPAQRYLDQLASKHGKAKALSILAHKLGRAVYYMLQRREAFDMKKFLGS

SEQ ID NO: 348684 - protein, 331 aa, unidentified
MYVGVDHHKRYTVATQMDLQGVILSQVRLKNDPDSLRTFASSLPPGSKIALEATEGWYYFYEMLESYCPEIYLAHPLKTRAIAEARIKTDKIDSTILAHLLRANLLPTSYIPPREIRDIREILRYRASLVSLRTAIKNKVHAILSKNGVVMTYSDVTGKKALHSLDLLPLRACYREELQGYLQCIETLKRLIAEVSETIKRLAEESPQAKLLITIPGISYYSSLLIISEIGDIGRFPSARKLCSYAGLVPRVHSSGGKTRYGSITKQGSKWLRWILVELSHHFIKGSPRLKCLYARIARSHGRNTARVAVAREMLKIMYVMLRDNRAFVIK

SEQ ID NO: 348685 - protein, 363 aa, unidentified
MNSTIKVESSSHEETRCQFNGSKAVIKLGIDVHQDFYVVVEQVGGSNPKPPQRFSEETFLHWAARLKQEGAEVHAVYEACGFGFGLQRRLSALGIHCYVVCPQKLDEQNKRVKTDRLDAKALCLKLDRFVEGNREALALVRVPTEAEEQVRAIHRQREQLVKARKVLEAQGRSLMVNHGLEPVQQWWKPRAFAKLQVPPWMKELLENSQPIVLALQEKIRAVSLQLQSAADPEQAPGYGALTSVVIDREVANWHRFNNRRQVGSYTGLCPGEHSSGDTRVQTCVTKHGNPRLRAALVEAAWRLVRFQPNYKPVVKWRKILAKGALATGAARKKAIVAVARQLAVDLWRIRTGRVKAEELGLSK

SEQ ID NO: 348686 - protein, 335 aa, unidentified
MNYIGMDIHKKNTYAVVKDELGNKLAEDEMASSKEALARFLAPFQPSESSIVIESTYITEYIYTLLEEMHYAITVANPHKLKAIAFAKVKNDKVDASMLADLLRANLIGKSYMPSLAIRQLREITRMRSMLVRHGTQIINALRAHLVRKGIKLPNRKLCKNAIVFLQKQCKGDIVVQNSLAVLQTVQRQLAKVDTQLHAHAKKSKDAKLLMTIPGIGPIRAMTLLAEIGDINRFPKAEPLCSHAGLVPTIRQSANTMHVGHCSAQANKQLKNVFVQAALTAKRMKRGNAIQTHYCNLVEKKGKQKAICAAARKMCCIVYAVLHKKEKFSFSYSSP

SEQ ID NO: 348687 - protein, 394 aa, unidentified
MKLVGIDVGKNSHHFCVMDKETGEFNVTPTSFSNNKEGFDFLINSLKPYSKKSILLGMEDTGHYHVALLKFLLSNGYTVALINPKTTDLTRKMEGGITKNDKLDTITICDVLDTPERKKQYRITKVDRFDFYEQRQLTRHHHDLKEELNVYCNRLQKSIDLVFPEFNTLFSSKYGVVYMNLLKTFGNAEIIASTDIRTIRKCFEIKGRGNRISLTPEKLKECAKNSIGISSEVETIQIKHLVSQIMLIKEQIAEIDKKIEEFSIKNNSPILSIPGISHFSGTSILAELGDIGNYSKPSQIIKFAGVAPYHYESSQYNAQHTGITKKGSKYLRKTLYQIILPVIKYNPVFKKYYLLKISQGKGHRCAQGHCIRKLLRIIYHLLETGQSFDPALLR

SEQ ID NO: 348688 - protein, 444 aa, unidentified
MAQAIKTIHHHAGGIDIGSVSVVVAVEDQEVKSFGTFTSEYNLLISHLRSHEITTVAMEATGVYWYCLYEMLEEAGIEVYLVNGAHVKNVPGRKSDANDAQWLQQLHSYGLLRKSYIPEDVIRQLRTYTRLREDHIESATSHVQHMQKALTSMNIRLHEVISQITGVSGMKVIRAILDGERNPEHLLQLCDKQIIKKKGEQVILSLEGHFKTEHLFALQQAVECYEFYQRQRSACDAQIEVLLQQINEQLPPPDCSTIDQPKVARHNQPEIKDLHRLLLTANGGKDVAAISGFSDKTFLKLTAEIGTTVDPWPSSDHFTSWLGLTPITAQSGKTKRKKKNRAKTKAGQIFRESAMAIAESKYLAIGSFYRRIRAKRGPKIAIMATARKLAVQYYNLLKYGVQFVEDGLKKYEEQQNQRLERFLLKKAQELGYQLVDLRTAEVVH

SEQ ID NO: 348689 - protein, 343 aa, unidentified
MQIRSVGIDLGKTAFHLVALGASGKVLVKKKFTLKQLLAFTANMQTSLIGLEACSGAHFLGRALKQQGHDVRLIAAQFVKPFVKSNKNDFVDAEAIAEAVERKNMRFVPIKTDDQLDLQAIHRVRDRLVSRRTAVINQIRAFLLERGMVFAQKPAKLKAAMPDVLENAENDLTPMMRKLIDRMWDEWKLVEEQLAELGDELERISAADAGCTRIRQIPGIGPVVATAIIAAIGNGAAFRKGREFSAWLGIVPRQYSTGGKAKLLGISKRGNVYLRKILIHGARAAVLRIKRDRVPIGAWLDRLDSRAPKNVVVVAMANKLARIAWAVLSSGEEYKPANVAITA

SEQ ID NO: 348690 - protein, 345 aa, unidentified
MAKIIRVGVDLAKNIFHIHAVDEDEKTIWQGKYTRKNWINAIVKRTPQTAIIGMEACGSAHHWARELSKLGYEVKLVAAQFVKPYVKTSKNDKVDAEAICEAINRPNMRFVAVKTVEQQDLQSMHRIREELISQRTAKANQIRGLTAEYGIVAPVGISHLRKCVPLWLEDAENSLSYLFRELLQIMYDELLLLNERIDCITNKIKNSVNNSLAAQRLMKITGIGPLVCSALLIDLGDGRAFKKGRDFAASLGLVPRQHSTGGQNRLLGISKRGNGYLRKLLVHGARSAFRHVKDKADPLSLWIKKLSQTKHANVAIIALANKIARISWAIVAKNEDYNTSLAAAA

SEQ ID NO: 348691 - protein, 348 aa, unidentified
MLIIGCDYHPGFQQIAFVDTETGECGERRLSHREEAEQFYSALKGHIVRVGMEASGHARWFERWLRELQFELWIGDAAEIRTKRVRKQKTDRQDAQLLLRLMIEDRFPRIWVAEADNRDLRQLLWHRHRLVQMRTRIMNQLHVVALNEGVRRKKALWRPAGRNELEALKLAPWASRRRQDLLDLLDQLTPKIQELTRALEEEVEKRPVARRLMTHPGVGVLTALAFELVIGTPERFQRGKQIASYVGLVPSEESSGDRRRLGHISKQGNALLRFLLVEAAQVTVRSQSQWRSKFFHLAMRRGRKIAKVAMARKLAVHLYWMWRQGLDYGQFEKLGSHAGEPGNRHGEQ

SEQ ID NO: 348692 - protein, 321 aa, unidentified
MNKDRKIYGIDISKGVFDLYNDTAGHLDFKNEEKGFKALLKSLPKDALVVMEATGCYHYRLAQYLHNNKVLVSVVNPLSVKRFIQMKLAKVKTDKSDAKFIFDYATVNEVPLYRALTELQSECLQLYQLLDVYIKQSTVTKNKLHGEKVLGIPSKAVYNSLNRTLKHLQKEILIIENRLLELVKQEQQEQLTLLQTIPGIGLKTALFLVVTTNGFEKFETASQLCSYAGITPTIRQSGSSLRGKSRISKVGNRKLRRLLFLSAFSACRYNKACKAIFDRLVLKGKSKKLALIAVANKLLKQAFAIAKSRLPYDENFVSKLV

SEQ ID NO: 348693 - protein, 309 aa, unidentified
MKIHPGFVGCDISKAHLDLFDGAVGVAERIANQAEAIAQRLEPWRHGDILVVFEATGPYDRVLAQALTEAGIAFVRVNPARARDFARATGVLAKTDRIDARMLAAMAQTLRPAPRQPRSPERNRLAELHKRRDQLVAMRKQERTRRQGCSDEIADDIRETLAWLDIRIAALERTIQACIKASADLAGAEARLRSIPGVGPVASATLIALLPELGQRSPKTIAALAGLAPYNVDSGQFRGSRRIHGGRRRVREALYMAAVCAARIEQRFADAYRRMINAGKPPKVALIAIARKILVIANAMLRQRLSFNP

SEQ ID NO: 348694 - protein, 367 aa, unidentified
MSTISMLRRGVTHLGLDVSKNSIAVGILHPSGEAVDVEKIFADEESVRRLIGRFPNPRALRACYEAGPTGYELYRLLERLGVPCDVVAPSLIPTAPGDKVKTDRRDARRLARLHRAGELVTIRVPTPAEEGVRDLCRARKVAIADRRRCRQRLSSFLLRHAEVYRGGSSWTVRHEQWLAARHFEDPAVARAFAFYRAEIIARDATVEAMEAELRPWFGHDLFADAVSRLGAYRGVDQLGALVLAAEVCDWRRFSSAGVFMGFSGLTPSEYSSGERTRRGHITHAGNVHVRTQLVESAWAYRHNPALTVGIRRRQDGLDPQTCARAWAAQQRLCQRFKALAARKDSTNTVITAVARELAGFVWAEMIA

SEQ ID NO: 348695 - protein, 394 aa, unidentified
MILVGIDIGKNKHTFSIVDKGTGEILSNPAIFDNNLAGFLYLIKKLRGYVKSELLIGMKDTGHYHLALLKYLLDNRYTVSLINPTTTDLTRKIQGGIAKNDTLDSITICDVISSNRRKKPYRITKVNRFELYEQKQLTRHHHDLKEELNIYKNRLQKCIDIVFPEFNSLFNSKYGIVYMRVLKTFSSANAIANADIRSIRKCFEFKGRGGRISLSAEQLKMSAKISVGIPSVAEEIQIRHLVCQIELLEEQLSEIDKRIEEFSIKNNSTILSIPGISHFSGTSIIAELGDICNFQKSSQIIKFAGVAPYHYESGQFTAQHTSITKKGSRYLRKTLYQIILPVINNNEVFRTYYNKKLAEGKGHRCAHGHCIRKLLRVIYHLLTTGQQFNPEFLA

SEQ ID NO: 348696 - protein, 409 aa, unidentified
MPENSASPQRFIGLDIHKHYLIAIAVNPAGEQIGGPWRAELLDLDAWAKRHLTRQDAVALEMSTNTWTIYEELKPLVLSLTVVHPPHVALIVRAQVKTDQRAALALAQLHAKNLLPALWVPPEPVREQRATLAQRTKFVRLSTQAKNRLHAALQRHHLALPDGSPFAAANRDWWLKLPVSVSEKARLQSDLETLAFAEQQIARLTTALTAEAAQDERLPLVLQLPGCGVINSLTVLAAIGDIRRFETAKHLVGYAGLGARVHDSGQLHRTGRITKAGRRDLRAAVVEAAQTAANTHPHWQAELARLEPRLGRNKAIVAIARKLLVVLWHVLTHGEADRFADPELVARKLLAHAEHLGKNGRPAGQTAGAYVRNQLDRLGLGAELTHIQRGRKQRVLMPPATVEPEAVRG

SEQ ID NO: 348697 - protein, 459 aa, unidentified
MNGYLGIDVSKGYADFTLLDDEKNQLEKTFQLDDTRQGHDALKKLLIAMPKKYGLAQIYCALESTGGFENNWHHSILQWSKDFPLKVVRLNPYVVKSNTTATLKRNVTDALSSRYIAEYLITQSKSIKYDELPSSVDYSAFRSLNNHINLQKRQCSQLINELKSVLYSVFPELLRYCKDSVPGWVLEVLIKCPSCTEIAKASVAKLCRINFVDQAKANSIISKSKSSVAARSNPADAFLVRQLAKDILQKQEAIKELKTYLSSQCNGDEVDLLTSICGIGKYTACVAIIEIENINRFSSPKKLVSYFGLHPELKDSGDKKVVYRMSKRGRASMRGALFMCAQTAVMHDPHIKKIYHKHRSKGFNHKQAIGVVMQKLLRIIWGVLTHRLAYNAQVDETNQKKKVGADANYSYAELKVKRRYQELDTEAPISARQNKRRKAHAGSQVSNADLVRDHQNTPV

SEQ ID NO: 348698 - protein, 344 aa, unidentified
MTFVGCDLHTRKQQVAVLDTCTGEVSEHQLAHDGTAVEEFYAALPRPVTVGIESTGDAAWFHTLMQRLGHTLLVGDAAKIRAMVIRKTKTDRRDALHILDLLSHDRFPTIWVPDPATRDLRALLTHRMRLVRIRTMVKTGLHAIALTHRLARGPKLLRQAGLAHLQALALPPHTAQRRDQSLELLAGLTTQIHELDDAITTAALAHPDALRLITHPGVGALTALATVVVLGPVTRFHDSKHVVSYVGLAPALTASADTYHLGHITKQGSTLLRFVLGQAAPHAARADTDLKRPSFTLLHRRGPPQAQVAVARKLLVRLFIMLRDQIDYDEFRRRGRRAPAVASA

SEQ ID NO: 348699 - protein, 366 aa, unidentified
MKKHNSNKRITTKGDQKETFAFYIGIDLGDKMSDVCVLDPAGEVSEQFRLRMKGTDFQAYFTAIPRSRVAVEAGAQSRWVAELVEGCGHQVYVSNTGKVPYIHESDDKNDSGDAYKLAELVHWKPRLLHPIQHRSQQAQADLSWIRAREVLVESRTQMLNAIRGMSKAFGERLRRCSAESFTAQRAEQIPAAIRGAVGPLLEMIDHLNEQINYYDQMIHHVARTRYPKYWLLDQVGGVGVHTALAFMLTIGDPERFAKSRTVGCFLGMRPRKQDSGERKPQLGITKAGDGYLRKTLVNCAHYILGPHGPDSDLRRFGLRICERGAQNAKKRAIVAVARKLAVLLHRLWVTGEVYEPLRNSQTATAA

SEQ ID NO: 348700 - protein, 475 aa, unidentified
MARKNMKMPRLKVVNPDCAGIDIGKDRHFVAVDPARSSEPVRAFDCFTRDLQAMSDWLSSCGVTTVAMESTSVYWIPVYEVLERAGFEVLLVPPRMTKQIAGRKSDVLDCQWIWQLLSYGLLRGAFRPGDAVCPLRSYVRQMKRLTEDRSRSVQHMQKALTEMNVRLDSVITDITGQTGMKILRAIIDGERDPQRLASFRHRQVKASADAIAASLEGTWREEHLFAVEQAMQRYDFLDRQIEDCEARIGEQIDHLTPPDGSEDDGGSDDMPLPGADGAASNTASHRSGGRKRAVHDKALTAALTHMMGVDLTAIPTIGTGIALTIASEIGPDFSAFPSAQHFCSWLGVAPGTRISGGKPLPGRAPKAVNPVGQALRMAAMSARRSQTFIGARHRGRLARKDSPVAITATARELACLIYLMVTRGEEYVERGMEAYEKRRIDHTLANLHRKARTLGYQLVQPAEDREVPRGGMALA

SEQ ID NO: 348701 - protein, 376 aa, unidentified
MTAKTDPQPSSVCEAALYVAFDLGKTSWTVAMTTGLGVAPWVRAVRAGAWEEVGSVVVRARARFGVAATAPVISCYEAGRDGFWIHRALVAHGWANRVVDSASIEVNRRARRTKTDRIDACKLVVLLVRVCLGDRGAWREVHVPPVEAEAARHATRERMALQKEHTALLNQMRGWLTTWGTALPSRRRDAWWERLRDWRGAALPVAVQARLARASARLALVREQLRALTRAEQRAVQAAAPTSAAGRLMRLRAVGVKGTTTLLGEGLLWRGFTNRRQVGGMLGFAPTHASSGEQHRDQGISHAGNWRWQGTLIQLAWSWVRLQPTSALTQWYLARFGTGKRARRIGIVALARKLLIALWRYATTGLVPAGAVLKTV

SEQ ID NO: 348702 - protein, 339 aa, unidentified
MDTVRFLAIDLAKNVFQLHGVDAAGNLVLRRRVGRAQLTELVLRLPPCTIGMEACSGAHHWARQFQHQGHMVKLISPQFVKPFVKGNKTDGNDAEAICEALQRPSMRFVPIKSVEQQDVQSLHRARSRLVSNRTGLVSQMRGILTERGIVFAQSITRARREIPAVVADMSNALTPLAREMLADLMDQLRELDKRIAGFDRRIDAVFKASETCQRLAQIEGVGPKTATAIVAAVSDPKDFRNGRHFAAWLGLVPRQSSSGDRTHLLGISKRGDRHLRTLLIHGARAVLRTAPTKHDKKHAWALALQARRGANRAIVAIANKMARVIWSMLVTGQSYQKAV

SEQ ID NO: 348703 - protein, 381 aa, unidentified
MSIVALDIASKAATFCVLGTQGITGQGSLTFDYDGFSSFFASEQVSDASLFVMESTGGYHLPLYHFLLNHGRKVRIINPLLIKQFHDGQTLRRTKTDALDAVTIARYAQSHMSALEEERMQLDSESKMLARRRARNAEDLAKAKTILKSDLSVAFPELLRFNVFIKTLLEFLSVYGCAKDVLAATEEQLQQALDVQKGRKSDVVTVQKIQELARISIGVSYRAAMVRDSAKAVLACQQRDEELTKALVELENALHKRQMEILTSIPGIGEVTASHFLSEIPDITQFATYQKLIAFAGTDPGIYESGNTSKALKISKRGNPLLRKYLYLMADSCMRHNVVFNAYYHKKREEGFPHRKAMVATMNKLIRTLHALLTKDETYSI

SEQ ID NO: 348704 - protein, 431 aa, unidentified
MPSKTNNTSTVSVVHEICCGLDVHKKTVCACLLWSDGFGTEQSEVMEFETFTDDLIRLKEWLIERECPVVAMESTGPYWTPVHNILEGFFRVILVNARHMRNVPGRKTDLSDSRWLAGLLRHGLLRAAFIPPKYQRQWRDLTRMRNKYQQTVGDFKRRVHKLFQEANIKIDSVLSDLFGLTGRNLMKLLTSKNATPSLGEVEQCLRGSLKAKRTELYRSIQGFFEEHHRDMLALMLETIEKLENQVKVLDLRIIQAMRSHQSKIDGLDEIPGISDVSAPAVLAEIGPTLEAFPNADALASWCGLCPGNNQSGGKRYSGKSRVRKNRLKTIMIEIAWPAIKKKGSYYRAKYYALKARLGPKKAIVAVAHRILKAIYHVIKYDTPFKDLGEAYLLEKNRDAKIRYLTRQAALLGFELVPGPLAPAQPEQPIFP

SEQ ID NO: 348705 - protein, 394 aa, unidentified
MKLVGIDVGKNSHHFCVMDKETGEFNVSPSSFSNNKEGFVFLINSLKPYSKKSILLGMEDTGHYHVALLKFLLSNGYTVALINPKTTDLTRKMEGGITKNDKLDTITICDVLDTPERKKQYRITKVDRFDLYEQRQLTRHHHNLKEELNIYCNRLQKSIDLVFPEFNTLFGSKYGVVYMNLLKTFGSAEAIASTDIRTLRKCFEIKGRGNRISLTPEQLKECAKNSIGISSEVETLQIKHLVSQITLIKEQIAEIDKKIEEFSIKNNSPILSIPGISHFSGTSILAELGDIGNYSKPSQIIKFAGVAPYHYESSQYNAQHTAITKKGSKYLRKTLYQIILPVINYNPVFNKYYQSKISQGKGHRCAQGHCIRKLLRIIYHLLETGQSFDPALLR

SEQ ID NO: 348706 - protein, 399 aa, unidentified
MRRVGLDLGVRHIAYCEVVDGKVVDRTTVTSLSQLSGRLGPGTAPARVAFEACREAWAVHDKLAEWGHDPRMLDSTRVRQMGVGQHGRKNDPIDAEAIAMAVDRGQLAEAHVLSPARRELRAQLSVRGALVETRAQYVTTIRGLVRATGVLLPTCDTADFVAKLDGLAMDDETRALVGPLVAVLRALEVQMTAVEHTLAGLAAKDDVLKLLATVPGVGLIVAATFVSVIDEAGRFKNAQAVGAYLGLVPRESTTGGPDKRRLGSITKQGNRMARAMLIQAAWTIFRLRDQNDPLKRWVDHVAQTRNKRVAVVGLARKLSGLLWAMWRDSTVYDPKGHAEQSAQGVRAAAHDQLGRAQALERAAAKLRRPGTRTPTAAKPRRPVTHTPTTRRKSSQRKAV

SEQ ID NO: 348707 - protein, 314 aa, unidentified
MNHDCPQFHRVVGCDVAKHSVTLHDLASGRTFTVDNEPEALGQALAAFRGHDLAVCEATGGHEDVLLGVLHGLSIPAHRGHGTQISAYARSFGLAKTDRIDARVLALYGRERGPRLARWRPVDEDSLQLVALVRRRMDLVELRKAERTRAGGPRAAAVAASLTRSLAFLDAEIAELDDRIRDCVTASSRLEARSRVLRDLPGVGDTIAAGLLALMPELGTLDRRRAASLAAVAPHPRDSGTIRKHRTTSGGRRELRPMLFLAALTAVRGKNVLADFYRRLVEAGKPKRLALTAVMRKIVVIANARLAQLEAQLT

SEQ ID NO: 348708 - protein, 412 aa, unidentified
MEVLYTSCCGLDVHQATVVACVRRAGKGRRRASTVRTFGATTAELLRLADWLTEQEVTHVAMESTGVLWKPVFNILEGTCEVILVNPQHFKAVPGRKTDVRDCEWLAQLLEHGLLRGSFIPPQPIRELRDLTRYRKVLIQQRVTEANRVRKLLESANIKLGVVATDVLGASGRAMLRALQSGERDGAVLAELAKGTLRQKRAALADALTGRFTGHHAALLGDLMEHIEFLEATIARVSQRIATAVMPMAEQVAHLQSIPGVDRVAAETILAEIGPDMSRFPSAAHLASWAGICPGNNESAGKRKTGKTRKGNRWLKPLLVECGWGAGRGRRTYLGAQYARLAHRRGKKKAALATGHSILVAAYHILRTGVAYRDLGPAHFDRLASDRLTRHYVHRLEQLGHRVTLNTVPGVA

SEQ ID NO: 348709 - protein, 429 aa, unidentified
MQNESTPGARGPVFCGVDTHADSHWLCVLDWRGRKVLSRQFPADAAGYEALAGAIAAAGEPACVAMEGTSSYGAGLTRHLASLGMPVREALSPARMQRRRPGQGKCDESDAERAARAAMSGSKLGTPKSQDGWVDGVRCMLAARSGAVKARTSAINTARSLLTTAPEGLRSRFRGMGGPRLMEELPSVRAEGALGAALGALADLWAAARDAALDMERAIEASLEENCPALLAMYGCGPVSAAKLAVAAGDNPGRLRSEASFAAICGACPIPASSGKTVRHRLNRGGDRQANSALHEIARQRVMRDPETAEYAERARARGKSDREVMRCLKRYVAREAYRALMRPHEIRGPEDASELVAARRAARVSQVRAASILGTSEKYISMLERGQRELKPIRRAYEAWVEAGLPLDWDRQAFEAEHKMDSKKHLAK

SEQ ID NO: 348710 - protein, 350 aa, unidentified
MTIVENHLLTVTGGIDTHLDFHVAAAIDSNGGVLGVETFDTTTGGYRQLVAWLAGFGTISLIGVEGTGSYGAGLTRHLTGKGIRVVEVDRPNRQARHRAGKTDAIDAIAAARAALTGTATGTPKSRTGNIEAIRVLTVARRSAANEWISVLNQIRHVTFTAPDEIRTRFIGLSPITLVRTTAALKPRRTDPDIVRYTTLSTLRELGRRALFLREQKMRLNTEMRPLIREVAPSLLDVYGVGFDVAAKLLIAAGDNPHRIRSEAAWAHLCGVAPIPASSGKIQRHRLNRGGNRQANSALYRIVIVRMASDQRTKAYVAKRTAQGKTIGEIARILKRYVAREVYPHLPSTIG

SEQ ID NO: 348711 - protein, 345 aa, unidentified
MPIVGGLDIHRKQITFDYLDTGTGQVQRGQISPADREHLRGWLARFTGSDDVAFAVEGCTGWRYVVEELAAAGVAAHLAEPADTAFARGRKRHAKTDKTDSRHLRQLLADGRLPECWIPPGHILECRALLELYHDLRAEHTAWVQRIHAVLFHHGAPALGAGTLRTGQGVAALQAVTASCLSPAGQLQISTALEVIEALEARMHAVRHQLLAAARHLTGAKVLAARLYGVGPVTALAMTCWLAGEGRFSSSRQAVRFAGLDVTVWSSDRKGPPGRLSRQGPPVLRWAVYEAGKTHARSSAPDHRYYAQVKDRCNGKRAALSEARKILRQAHHILAELGDDALSAA

SEQ ID NO: 348712 - protein, 378 aa, unidentified
MDVLYHRCAGLDVHAETIVVCALLGEEDHIQKEIETFPTFTKDLFRLLKWLEDRGVTHIAMESTGVYWKPVFNILEDYFDITLANAQRIKNVPGRKTDVSDAEWIAKLFRYGLIEKSFVPPADIRELRDLTRLRKKWIGQLTAEKNRIQKVLECSNIKLSSVISDIFGVSGRKLLERLMKQGYIEEPEIDACIHGRMKGKRQQIQDSLFGTLTEHQLFMIRQSWKHIESLESLLREIEERIDQLLQAYKQEMELLVTIPGVKKETAAVIIAEIGVDMGQFPTSQHLASWAGVAPGNHESAGKRKSTRTTKGNPHIKSALCEAAWALSRCRNQRLAAKYWSLAARRGKKKALVAMAHRMLTIIYCMLSRKEPFREQPTY

SEQ ID NO: 348713 - protein, 290 aa, unidentified
MNATTRIQKIQSCTGVVVGVDIAESVFQVCEADTNWRRRGSHRLSRTQFERWFDNRDIALVVMEACGTAHHWARWLRQRGIDVELLPPHYVRAYVKRNKTDAADAAALLEAARCADIQPVRIKTVEQQALQALHRTRSMWMGWRTATINSMRGACREAGLRISKGAKVGLSQMAKLIADDQSAIPALLRGTMKSMLEEVRQLEVRIDAIEKELRAVVRHSEPCQLLQSVPGVGLLTTTAMAAATGGDVTHFKRSRGFACWFGITPKEHSSGHNRRLGRISKQGDTYLRML

SEQ ID NO: 348714 - protein, 399 aa, unidentified
MNSVGIDISKGRSTIAVMRPFGEVVISPFEVRHTDSELSELARQLKSLDGETRVVMEATGNCHASVAKLLHNAGLYVSVVNAKLVHDYGNSELRRVKTDRKDAVKLANYGLDRWLTLPRYITRLLLKNCYRQYRQYSKVQTVLKNNLISLLDTVCPNANRLFSSPIRGDGSEKWVDFVAEFWHCRCVSEKSERAFTSKYLRWCRKHGYNFREAKAHTIYAEASGHIGVMPKSETTKLLVEQAVAQLRATSAALAALKHEMQSLVSMLPEYPVVMDMFGVGPTLGPQLMAEIGDVRRFYSKKALVAYAGLDAPPNDSGDVTGRHKSMSKVGASSLRRTLFLVMSVYLQTAPLDEPVYQFMDRKRAEGKPYRVYMMASANKFLRIYYATVKAYLESLEHTA

SEQ ID NO: 348715 - protein, 351 aa, unidentified
MSHKTAATVAHTIGIDTGKNTLHLIGLDDKGAIVLREKIARGRIAARFANVPRCLIGIEAGMATHYVARELIALGHDVRQVPPAYAKPFRQGHKNDFRDAHAIAEAVQRPSTRCVPVKTDDQLDLQALHRVRSRLVGQRTAVINQIRGFLLEHGIAVRQGLRFLRQQLPDILAKRGDVLSPRMIRIMEDLSGDWRRLDERIKHITEEIEVLAHGSESCRQLMTAPGIGPLIASAMVAAIGNGTAFAKGRDFAAWLGLVPKQMSTGDRTILGRISKRGNRYLRTLIMQGARVILLRPANWAKHSFGLWLTAAAQRLHHNVLATALANKLARIAWTVLAQGRSYEARVVPKVA

SEQ ID NO: 348716 - protein, 389 aa, unidentified
MALFVGIDVSKEKFDACGVGDDGTKVFSVTCPMNREGFEKLVLHLPETALIGMESTASYHIALFSYLTAQGYRVAIINPLLIANFAKLSLRKTKTDKKAASTIAEFLLLKKEALAMETEPPRLGELKDLSRRRERLADQMTALKNDMLRILSVTFPELETITGVFTKSTLRFLVQFPSAHAIREAGYDAVATIVTSHSRGRKSAASVKTLMDTATTSVGVASPSKDLILTQEASLLLHVQEQAEEIMKVIVRLSDEKMKRDTEILTSMKGIGDKTALNFLIELGGDIKVFENDKKLIAAVGIDPTVYESGKYRGQSKISKRGNRHLRRVIWLMTTKVIISNEVFRAYYFKRRKDGLIYKMAVLATAHKLIRVMFSMLVNQRHFEPERRK

SEQ ID NO: 348717 - protein, 345 aa, unidentified
MQPMYYIGLDVHKRKISYCVKDGSGKVYAEGSLPATRADLDLWMKTLPQPWSAAMEATMFTGWIYDQLKPHAAGLKVAHPLMLRAIAAAKKKNDRIDANKICDCLRCDFLPECYMASTAIRERRRTLRYRNLLVRQMVQMKIKISSLLMEAGVSYNKQRLHKAGYFRELLATNPDINEGLKPLLQLCRETVVRLQKTESAMVRSLERDSLLMDRVERLMTIPAVGPITALTWVLEVGDVQRFSSIKKAISYCGLCGAEKSSGSTVQRTPLSKQRNKHLQTTLIEAAKMAPRNSPDLAMLYDREKQKGNANRATLAVARKLVAYLVAVDRRQKEFLTVERENRTAA

SEQ ID NO: 348718 - protein, 470 aa, unidentified
MKRKPQSKTRQRHSKRGKREQKLLEKIHLNAAGIDIGSGSHWVAVPEDRDEQPVREFKSFTHELIELALWLEDCGIDTVAMESTGVYWVPLYEILEERGIEVLLVNARHVKNVPGRKSDVFDCQWIQQLHTFGLLRGSFRPNAEITAIRTLVRHRDKLVEDAAACIQRMQKALTLMNLQLHKVISDVTGVTGMLILRDIVAGEIDPTVLARHRDSRCKASEEEIAASLTGHYRDEHLFVLRQQLEVYDFYQEKIHHCDEQIEIRIHALEALCESPARELPTPRRPSPKKKPQDNAPSFEIRSPLFKLSGGVDLTELPGIGPYGALKLISEIGLDMHCWPTENHFTSWLTLAPSNKISGGKLLSSRTQPSANRAAKIFRIAAMALHRSDHALGAFYRRLAARTDKPKAITATARKLAILVYRMLKYKMPYHETSAAEYDKRQHTRILRGLRKRAKSIGFDLVDTSTGLVMS

SEQ ID NO: 348719 - protein, 418 aa, unidentified
MHNYAKTLFVGADVGLDSVDICYLDYMGNKLNPKRLVYPNNLPGSQELAEQIAKTMSHHDLDAIMFGIEATSFLGWHLEVAILNSPILWKFKPSVFCFNPAQVKAHKKALGIYPKSDPIDAFAVADRLRCGKLPKPAAFNFPYIALQRLTRLRFHLADYMAREKNIFLSVLFLKFSSLRQSDIFSNTFGAASLAIINDFLTVDELAARPLPDLIDFLMDKGRAHFEDPTVIAKQLKDAAAKAYRLHSDLQKPVNFALKTTIENIRFYSKQMTIVDEQIKKQITAFDNPLTSICGIGPVFSAGLIAEIGDVTRFNDDNALAKYAGLTWQFSKSGRNQRADDTSITRSGDAYLRYYLTESSNLVRQLVPEYFTYYQQKYNESKTHKHRRALVFTARKLVRLVFALLRDNRNYSPKFRRCN

SEQ ID NO: 348720 - protein, 345 aa, unidentified
METMYYIGLDVHKKTISYCVKDGSGRIYAAGSIPATRLTLDMWMKTLPQPWTVAMEATIFTAWIYDHLQPHAAAVKVAHPLMLRAIAVAKKKNDRIDAKKIADCLRCDFLPECYMASTEIRERRRTLRYRNLLVRQAVQMKNKIAVLLMEAGVSYNKQKLHKVGYFRELLATNQDIDEGLKPLLRLCRETVVRLGKTESALVRSLERDSLLVERVERLMTIPAVGPITALTWALEVGDVKRFSSIKKAISYCGLCGAERSSANITQRTPLSKQRNKHLQTVLIEAAKMAPRNSPELAMIYEQEKQRGNANRATLAVARKMVAYLVAVDRRQKGFLVVENENRTAA

SEQ ID NO: 348721 - protein, 398 aa, unidentified
MNKHSKNAAKRKMRGALRVADCNLLADAVAIGIDLGDSSSNICVVDAAGEIESESRIRTTEAGVRAYFEHLAPARVAMETGTHSGWVSRLIAEYGHHVIVANARELRNIHQSNHKNDRADAEALARMLRADPRLLAPVTLRSAAMQNDMALLRARDVLVRTRARCTTAARGLVKASGKRLPGCSTESFPRKVRAYIPAELQGALEPLLAVLEALDVQIRSCDEQIATMAQERYPASAVLEQIAGIGTLTAVAFMLTLGDCGRFEHSRDVGPYLGLVPRQADSGACSPQLGITKAGNSSMRRLLVGSAQYILGRFGPDTDLRRFGLRIAARGGKNAKKRAVIAVARKLAVLLHRLWVTAECYEPLRNERLAQTASPTATTATASTAASSTATTAVETAA

SEQ ID NO: 348722 - protein, 394 aa, unidentified
MMICVGIDVAKDKHDCFILSSEGKVLADVFTIPNNAEGFDTLLQAIRRSTRPEDKIKVGLEATGHYSYNILGFLLDKGLPTYVINPLHTNLYRKSLSLRKTKTDRVDARTIAAMLMSDVDLKSYTDTVYHNEELKSLTRYRFDKVRERAKLKQSVSRLVTILFPELEKLVSSLHSASVYALLSEFPGAKQISSTHMTHLKAVLKNASQGRYGQEMAETIRNAARSSVGSVMPAKSLELQHTIRLIRELDAEIEDIETAIQAIVDEMQSPITTIPGMGVRMGAVILAEIGDFSRFDSPDKILAYAGMSPSTYQSGQLSLSGAYSHMEKRGSRYLRYALYNATKHVCHWDPTFAAYLAKKRAEGKHYNVALSHAAKKLVRLIFAMEKSGRAYLTTT

SEQ ID NO: 348723 - protein, 343 aa, unidentified
MDYFAGLDVSVNNTSVCIVDGAGKVVREVKVASEPDALLQVLRNPAYCFKRIGLEAGPLSQWLFSALGEANLPVICVETRHMRAVLKAQINKTDRNDARGIAQMMRVGLYRPVHVKTLRSQKLRMLLTHRKLLQSKAIAIENDLRGTLRNFGLKVGIAGWTKFEARIEELVEDVPDLAVLVESLLVVRRVLREQIAVLHRRLLTIVRDDEVCRRLMTIPGVGPVVALTYRATVDVPARFRKSKSVGAVFGLTCSRDQSGERDRPGAISRCGDEMMRAMLYEAAQAMLLRSAKWSWLKAWAMQIARRRGMKRAIVALARRLAVIMHRMWVDGAEFRWTKEAAAA

SEQ ID NO: 348724 - protein, 412 aa, unidentified
MTVYCGIDWAESHHDVALVNQDGQLLAKRRISDDLAGYRLLLDLLAEHGDSPETPIPVAIETAGGLLVAVLRTGKRKIYAVNPLAAARYRDRHGVSRKKSDPGDALVLANILRTDMHAHRPLPDDSDLARAITVLARAQQDAVWSRQQIANQVRSLLREYYPVALDAFSSKQGGLTRPEARAVLALAPTPSAAARLTLPQLRAALKRAGRSRGIDAEADRLKTALRAEQAHQPALVEEAMGQQLLALLTQLDASCKAVDDLTEAVESLFRQHPDAEILLSFPGLGVQLGARVLAEIGDDRARFADARALKAYAGSAPITRASGKKRFVGRRYIKNNRLTNAGHQWAFAALTASPGAAAHYRRRRDHGDWHAQAQRHLFNRMIGQLYHCLQTRQLFDEQHAFTSSPAGLAMAA

SEQ ID NO: 348725 - protein, 334 aa, unidentified
MVLELLAIDLGKRSFHLYGIDGDGVILSRKVSRAKLADVVNEIAPATIAMEACASAHHWARCWLSAGCKVRLINPRFVKPFIKGSKNDAVDAEAIFEAAMRPTMRFVPVKSTDQQDLQSLHRARDRLICQRTALINHTRGLLAEYGIVLPQGPWRFAARAPAAVAEAELSDLVRTIFGELLNQLDDLDRRIKKFDEITVTLCRTNEACRRLAKLPGVGPVVATAIVAAVDQGRQFRSGREMAAWIGLVPRQYTTGGKPRLGGIGHRANHYLRRQLIHGARAVVTRLSGHLDRRSMWLKALVARRGFNRTIVALANKTARIAWVLLSRSEEYAAR

SEQ ID NO: 348726 - protein, 331 aa, unidentified
MSVVGIDLAKSIFHLVGTDERGTIILRKRLARGEVLSFMAQLPRVLVGMEACGGAHDWARHLREQGHEVKLMAPQYVKPYVKTNNNDLRDAEAIAEAVTRPSMRFVPIKHVAQQDLQALHRVRERLMGARTALVNDMRGLLAEYGIVLPTGVNAFRHAWAAKLEAEHAKLTPLSQELFGKLWAECKQVEAEVAYDDEKLQALATTHPESQRLLSIPGIGPITATALIAAVGEVGGCTNGRQFAAWLGLVPKQHSTGGQTRLLGIRKRGDRYLRKLLLHGARATLRWARTKTDSRSRWIRGVLERRGWNRTAVAVANKHARIVWALLSRGGV

SEQ ID NO: 348727 - protein, 336 aa, unidentified
MRYIGVDLHTTQITVCYLTEEDEISIRKYQLCEIEKFVSDLLKTDKIAVEATCNTRWFCEEVKESVSRVVLVNPREFEVVKNSVKKTDKHDAINLARFLKADLLPEVRAKKEEAEKVQSLVNTRTKLVRLKTSLLNKIHALYVSNGRKLRKTSLNSEKGLERVLQEVWSEIERLELEVIIEQIRSLKTSIKKLEKAIAEESEKLRGFENLKTISGIGSLSAGILLSVIGNVKDFATADKLASYFGIVPRVSNSNETINHGRITKRGNKTGRTTLVQCSLSAIKKNLYLKRYYEQVKARRGHGKAKIALARKYLGIIYNTLTNNWVFADFNNFELAE

SEQ ID NO: 348728 - protein, 343 aa, unidentified
MKLRTITIDLAKTVFQACGVNEHMKPQFNSRLKRDQLLDFMRQQEPTMVVMEACYSSHYWGCEMAKLGHDVKLIPAQHVTPFVRGNKNDHNDAFAIAEASQRPFIRFVPIKTEHQQEICCLHRIRERLGKNKVALSNQSRGLLSEFGVVFPCGHAAFLHGLTSIIDNPQYSHRLQDMVIDMLSGYKTTINRLKRIEKQLTEFVDGCESGRILLSIPGIGVINASAFLASIDKGQAFSSSKEFAVWLGLTPKQHASGNISKMGGITKRGDRYLRKQLIHGARALVSRAPKSSDPLALWAMKLRVTKPFNKVAVAMAHRLARLIWVLLTRQEHYRAMPASLEVSA

SEQ ID NO: 348729 - protein, 342 aa, unidentified
MKIATAGIDLAKNVFQVHGVDGQGKAVLRKKLDRSKMVEYFVKLAPCLIGMEACGSAHYWARKLAAMGHTVKLMAPQFVKPYVKTNKNDAADAEAICEAVTRPNMRFVPIKTDEQQAVLSLHRVRQGFVRARTAQANQIRGLLSEFGEVMPQGIAHITKRLPEIMEKPDLPGTFRDLLQRLYDHLKELDKQVDELDAKIQQWHKASDASKKLAEIPGIGPITATALVASIGDAKSFENGRELAAWLGLVPRQHSSGGKSVLLGISKRGDTYLRTLLIHGARAVIRFAENKPVSSWLNKLLERRNKNVAAVALANKNARIVWALLMHDDRKFRADYALAGAGA

SEQ ID NO: 348730 - protein, 477 aa, unidentified
MVSTRASALNRQQRKDLKRQLRAEDPGLEVIHPNAAGIDIGNSAHYVAVRPDRDPDSVRRFECFTVDLHRIADWLQQCEVTTVAMQSTGVYWIPLYEILDSRGFDVYLVNARHTRNLPGRKSDVQESQWLLKLHTYGLLSNSFHATADIRMLRIYWRQRNDHVQAVSMCIQRMQKVLTQMNVQLANVISDLSGATGQRIVRAILAGERDPQVLAKLRDPRVRASVDEIAKSLEGSWQPALLFLLKQEVDMYDTYLQRITECDREVEAHLKRFADRDTTSAQDATTSPGATTSPEVPRRKRRKTAHSHAPQFDLASELRRISGVDLTRIDGIDVGVAQTLISEIGLDMSCWPTEGNFASWLGLCPDNRITGDKVRSKGTRRVISRAANALRIAASTLLKSRSYLGAQYRRFRTKLGAPKAITAMAHKLARLVYRMLKYGQEYVDKGVQYYEERHRQQQITLVKKKAAKLGLLLVEPVV

SEQ ID NO: 348731 - protein, 423 aa, unidentified
MTTVAKKLASIKPGSLFAGADLGLDSLVVVVLDADGRRVDRFKTEHSQDGYQYLVTRLGRLVQQHQASGVWVGMEPTNYYWKLVGTYLSQQQIPFRLVNPYTVNRHREGDQLDKAKDDWRDGQMIADLLRSGKFTETQLRTGAYAELQIGYAVYWRLRHDRSRQVTLLTNSLRQVFPELQHVFKDLTGQTAQAVLRSGPAAGRIRTLSCVEFIAQVRQANEGRRLAVARLRRLHQLAQTSIALRDGLDSLCFDVQTSLANLRMLDQHSERLFAQLRQQFEALPEAKFVCSIQGLDECFALGLLAEIGELSAYPTGKSLIKLAGTQPTPNASGRFQRRKTPFSKRGRSRLRGVLYWATLRMLKRNEAIHYHYQRLQTRADQPLTKMEAIGACMNKLLWYVWATGHQHVLYDPERWRTLGTSELT

SEQ ID NO: 348732 - protein, 404 aa, unidentified
MIFVGLDWAEDHHDVCVVDEAGDVRGKRRIADGVEGVAELHALVGTHAQEPNEVVVGIEIDRGLIVAALLSAGYEVYAINPLAASRYRDRHATSGAKSDPGDAKVLADLVRTDRHNHRQIAGDTELVEGVKIIARAHQNAVWGRQRQVNALRSSLREYYPGALAAFGTDLSSSDAISVLSIAPTPLLGRQLSRSKIISALRRGGRTRNVEKRAAEIQIALRAEYLEAPPGIGEAHGEVARSSLSLIEAYTKQIATLEVSLDERFEQHPDAKVVLSLPGLGTVLGARVLGEFGDDRTRYAGSKSRKNYGGTSPVTKASGRSRVVLARYARNRRLATALDRWAFCSLTHSDGARRYYDDLRARGKTHGQANRQLANRWVGILHHCLERDELYREDIAWPRGPELAA

SEQ ID NO: 348733 - protein, 372 aa, unidentified
MNYNTVYVGMDVHKESFSLCAYTIEAEKASHYQRTEADYKKVLNYLEFLRTIYGDDANFICGYEAGCFGYTLYHQLTANNVKCIILAPTTMLEQRSKKRIKTDRRDAEIIAKCLAQHNYSPVHIPTAKDEETKEFLRMRDDHKLALKKVKQQILAFCLRHNYRYDGKSHWTAAHLKWLKALTPEALYKEILDEYLLTYQTLSDKIERLDKRIEELATQDEYREAVKKLCCFIGVKTHTALSVLVEVGDFKRFASAQHFASYLGLVPGEDSSGDDQNRLGITKAGNRHVRLLLTEASQCYARGQVGFKSKELKSRQSGNTPAVIAYADKANERLRSRYYKMVLNKYKKHNVAKTAIARELACFIWGMMTDNIH

SEQ ID NO: 348734 - protein, 413 aa, unidentified
MIYCGIDWAEKTHDVALVADSGQLLAKRHITDDAVGYKILLDLLAEYGDTEDNPIPVAIETARGLLVAVLRTGKRQVFAINPMAAARYRDRHSVSRKKSDPGDALVLANVLRTDMHAHRPLPNDSDLARSIAVLTRAQQDATWNRQQMSNQLRSLLREYYPAALDAFAAWTNGLCRPEARELLKLAPTPAKAARLTRAQITAALKRAGRKRGIEADTERLREALRGDWARQLPLVEDALGKQMLALLVQLDAACTAADDLAEAVDEAFPQHPDADVLLSFPGLGVQLGARVLAEIGDDHTRFADARGLKAYAGSSPITKASGKKSSITPRRVKNDRLNHAGYLWAFAALTASPGAKVHYRRRRDQHGDWHASALRNLFNRLVGQMHHCLQHGERYDEERAFPARPDAPDSTAA

SEQ ID NO: 348735 - protein, 449 aa, unidentified
MKKFSSESHGLPVIHSRAAGIDIGSRFHVVAVPADLAEAPVRTFQAFTADLERMADWLIDLGITTVAMESTGVYWIPVYEILETHGLHVVLANARDARAVPGRKTDVNDAQWIQRLHACGLLRASFHPDREIAALRSYLRLRERHLDYAAAHIQHMQKALTHMNLQLHHVVSDVTGVTGMRIIRAIVAGERNPTKLATMRDTRCKSSPEVIQSALVGNYQPEHVFALAQALAMYDAYQVQLEVCDQQIAQSLLRLSQQKSPPSEPLPKPRHRTRQPNALNFDVRSLLYQLVGVDLTQIHGIGPYLALRLVAECGTDLSRWRTAHHFTSWLTLAPGCRISGGKVLSAHTRKTKNRVTAHLRLAAVTIGRTNTALGAFYRRLSARIGKAKAVTATARKIAILFYNAMRFGMAYQDPGADHYEQKYRERVVKGLHRRAAEFGFTLQAVEGVS

SEQ ID NO: 348736 - protein, 335 aa, unidentified
MDFRYFIGIDIAKDTLDWAVYNAQGLQFNTHTANTHAGISMVLTQLKALPEWNPKQAVFCMEHTGIYNAHLLEILHHAKLFIWLESSLQIKQGSGMQRGKTDKVDAQRIAQYAFRFRDQVRLWQPPREVVQQLAYLSATRQRLNQAYNLLAVPLAEQEIFIDHSLQKKLKAHAKKPLAILRDERQAVERQIHQLIQADTRLKELFTLMVSVPGVGPAVATELLIATNEMQTINEPKKMACHAGVAPFEYRSGTSVRGKTRVSHQAQKRLKSLFHLGAMSAIQTNGELQTYYQRKVAEGKNKMLVLNAVRNKLIHRVYAVVRRGEKYDKNYVPTLA

SEQ ID NO: 348737 - protein, 371 aa, unidentified
MEHTRFVGLDIHKERISIAVAESGRSGAVEYLGEIANDPDAISKLCDRLGRPGKPLVFCYEAGPCGYGVHRQLTSLGHRCDVVAPSLIPVKAGDRVKTDRRDATMLARLHRAGELTPVWVPDADHEAMRDLIRLRSVVRQIVTRARQHLQGFLLRHGRKHGRGTAWRMAYRRWLSTLAFEHPAQQIAFQDYVDAVTDAERRLQRVEEQILSLLPEWNLRAVVDALQAMRGIALINAVVLVTEVGDFTRFSNPRELMAYFGLVPGERSSGETVRRGGITKTGNAHARRALVEGAWAYRMKPRIGRHKVDRIEALPKVVRDIGWKAQVRLCARYRRLSARGKTANVVNVAIAREMVGFIWSIACTIQSAPKAA

SEQ ID NO: 348738 - protein, 319 aa, unidentified
MKTIDYEQLISVGCGIDVHKDVIVATVRRSSKDFETRQFDAYTSSLTELRDWCRDKGVSHVAMESTGIYWKPVFNILEEDFQIILVNARHVKNIPGHKTDKKDSAWLSKLLLSGLLKGSFIPPQEIRELRDLMRYRKKKVQFVASETNRIIKVLEDCNIKLSSVVSDIKGVSASKIIRDIIEGKDEIAHLLTHVHGRVKTPREEMAEALTGRITPHHRFMLKMIRETIDENEKLIAKLDTQIDVIAAQYQVELELLQTIDGVGKDTALTIISEVGVDMDAFPNQHHLSSWAGVSPGSNESGGKKKAPGSSMGTNTSNPA

SEQ ID NO: 348739 - protein, 309 aa, unidentified
MKQSVVYIGIDVAKAHLDVAWAGTFRRLPNERSGHAALVRWIKQSTTPVQLICEASGGYEQALLESLEKSEVKVTLVQAVPVRQYARAAGILAKTDRIDAKVLAAFGSAMQPQPTSPLSAEQKRLRQYEAQRRQLSRILVAEENRLAQLSCTELRTLSRSLISKIKTQIKTLDRGISDLIAQDQTLCVKAQKLTAISGVGVRTAALLLAQMPELGQLNRRQAAALAGLAPFNHDSGSVRGKRAIFGARPALRSGLYMAALSAARFNPILSSFYQPLRTKGKPHKLALTAVMRKLLLALNQTLKPLPCST

SEQ ID NO: 348740 - protein, 422 aa, unidentified
MISNRPVIGIDVAKDFCFYAAASPDGTPFLKPFKSLNTKQGLLSALRQIKKVEETFSSKPVISLESTGHYSARIVHFFLKQGFEVFLINPLISHSIKNSAVRKVKTDSVDAFELAKLLFLQDFHPTYIPSDAFANLKILTRTRFQLACQRTTLLNQLVAAIEQVAPLFPKVLDPASLTALTLLTTFTSPAEWLKEINQQAILSMLETLPRKGKTYGAKKYMALLDCAKDAEVTGIDLMANVMTIQFYANGVIFMDQQLKALDHQIDEVAMQLPEFALLKSIPGIGAILASLILGEIGDINRFSNAKQLVAYCGMDPSVRQSGNYVGTKNRVTKRGSPFLRRSLYMVATTAIRKNAKGALVNSVIYDYYQKKIQTKTRKQSLGAVMNKLLRIIFSVLKNKQAFHVITPDEQVRLYQNSREKAA

SEQ ID NO: 348741 - protein, 314 aa, unidentified
MTFYLGIDVSSKTLDVAFFSPTDQAMRCEQYANSAAGAKKLLHAMGQLDVEHVVLEATGGYENLILDALAVQYPTTRIASHRGTAFARGLGLFAKTDRVDAMMLARMAQTIPPQPYVPMGPAQRHLRGLVKGRDQLIAQRDDNRRRIKQSESAIVTAALQRVNDLLAAEIQALEVQMHEAAHAPADGRAEQLLQVPGIGKIAVATLLAFLPELGQRQNRQISALVGVAPYTRQSGRRDGPRQIMAGRPFVRRILYMAALAAIRSARSPLRAHYQALVARGKPRKVAIVACMRKLLITLNAMVRDGTTWRGLEPT

SEQ ID NO: 348742 - protein, 347 aa, unidentified
MNTVGIDLHRKRSVLAVIDDQGEVHPPVRIDNEPQRFLELLGELEGETQVAVEATYGWEWLAELLEDAGYDLHLAHPSGTKAIASARVKNDAVDARTLAQLLRAEMLPEAYVAPRELRDVRELLRQRIALVQMRTALKNRVHATLARQGIQHGHADLFGRGGREFLAALALREPTRRRIESLLALIDDFDREIDASTREIDALARADDRVAVLCQIRGIGHYTAMLIISEIGDITRFPDARHLCSWAGITPRVRSSDQKVRLGHITRQGSAALRWALIEAAQKASQGGGPLRETFERIAKRRGPKIAKVAVARKILTLCFYGLRDGEIRCLALRARAGTGIELEASR

SEQ ID NO: 348743 - protein, 438 aa, unidentified
MKNTQNQKISQIKNETLVVGIDVAKETHYARAFDYRGIELAKLLKFSNTAEGFKLLDQWMQDICKQKGKTEIVAGFEPTGHYWFTLGDHLKSQGHKLAIVNPFHVKRTKELDDNSPTKNDRKDPKTIAMLVKDGRYREVYIPDDIYQELREAVSERERLQEQLTSIHNRVVRWLDIRFPEFTTVFKDWRRNAALITLRSFPTPEKVMEMGVDKIVETWRKQMKRASLKRAEALVKAASRSVGRTSGKVASEASLQNLLAEYDLYCQQYDKQEQLMQDLLMQVPNADKLLDIKGVGLITAATFVGEVGDISRFQDPRQIQKLAGLNLVENSSGKHKGKTTISRRGRRRLRHSLFFSMIAMLGKNQEFRLLHQRNLTRENNPLNKMQSIIALCGKLIRVFFAILTKGVDYSPEKMLGDMEQSIRVAVNVNQKLGHLLVRN

SEQ ID NO: 348744 - protein, 408 aa, unidentified
MNTLYVGIDVSSKSNVVYLMLPNGDKHSNFSVANSHEGSTLLVKKIYSALTSHSLDTVLIGLEATSVYGDNLVYFLREDATLAPFNRKIHVLNPKQVKKFHDTYNDLPKNDYVDSFVIADCLRFGRINKEVYMGDYRYKALQNLTRARFFAVQNLVKEKQRFMNVLFKKYSTMTQEKVFSDAFSTTALAVYDEFESAEALANMDLHELTDFIIEKGKNRFPDPDAVAKAIQKAARSSYRLPKTVNDSVNQVLSISITSMKALESQIKEFDKAIIALMELLPNVLISIPGIGTVYSAGIMAEIGDINRFDNQASLAKYAGLAWKQHQSGGSEAEVTRLIPSGNRFLKYYLCEAAFSLVRCDKEYSDFYHLKYKEVNRCQHKRALALTARKFVRLVFRLLKDNRLYCPAK

SEQ ID NO: 348745 - protein, 359 aa, unidentified
MRIIGCDLHSRQQTLAMLDTTTGEVERTTLQHEENVVREFYSNLPRPVRVGIEATGSMQWFVNLMEELGIECLVGHPAEIRAAEPRKQKHDRRDAELLLSLLVEERFPTIWLPTKELLDMRALLRHRHQWVGLRVKIQNGLQAIALANGLRRGSSLWTQAGQQAIASLPLSPHAAYRRNELQAMYVKFEAEIKKLNQRVEQQARERSGARLLMTHPGVGPITALATDVFLGDPSRFANSKELASYVGMIPGEYSSGKRQRLGGLSKQGNPLLRFLWGEAGIHAVRRDPELKRFYHRKLMQKGLGKARAAVARKLGIRMWIMLRDRIEYHEFCRRGQMQQTSGDARAGMPGPRYGAKVTG

SEQ ID NO: 348746 - protein, 369 aa, unidentified
MAKASTFVGLDVHKNSIVIALLRPGQATPLEWKVRNEPGAVHRLIRKLEREDGVQCCYEAGPTGYVLKRQLDRAGISCQVIAPSLIPVKPGSAIKTDRRDARKLAELLRAGMLTEVQPPTEDEEAVRDLTRSRDDAQRDLTRARNRLSKFLLRRGCVYAIDRKPTWSQKYRSWLRALRFERVADQVIFEDYVLAVEQVEGRLEALTDRIEHFAEQEPWRERVQALRCFHGINTVTALALVAEIHDPRRFAHPRRLMSYLGLVPRESSSGMRERRGGITGAGNRHVRRLMVEAAWHYRHKPVVGRALRLRRREQDPKAIALADRALRRLTLRQRRMLYQGKHPNLVNIAVARELVGFVWNVLHTRATVQA

SEQ ID NO: 348747 - protein, 353 aa, unidentified
MEKKDIWIGTDVGKKNCVAAVDFPTAGSSFSRRKVADLPAFEFENSLVGVKKMLRWIDRLTKEYCQENNIPANIVEHHFLMESTGCYSRQLEGFILETRPTLKPIIENAALIHSYRKSLNLKNETDFLDAKGIAYYGSDRQPEYRQKNPEIYRTLAEMCRLRELYVTQLGALQNFYESLQMPMLKRMNTATIKMLNSKIDDLTREIQKFVREHEELRQQAEIMVSMPGIAILSASIILAEIGPLRDFSNRNQIGAFCGLNPKQKISGTSIHRSKLSKAGSSLARKILYLDSTQAVKIDPYLAEFYHRLIVNGKSPKTAKCACMRKMLTILRAMVAANRRYTPELFTKKLQKTA

SEQ ID NO: 348748 - protein, 343 aa, unidentified
MLYAGVDAHRTATHVTIMDEAGKVLARKRIPSSGNELRKFFAHYQEPIKAVVEATYNWGPVYDWLDELVDDVVLAHPARVRAIADARIKTDTIDSQTLAHLLRADLIPEAYAPSKETRAIKRVLRQRMFFVRVQTMVKNRIHALLAQHAIEIPDVTDLYGKAGLAWLQQLALPAPDGQLLRDDLSLLTTLRERIIATDHLIAQFAKGDEIVTRLASLPGVGPFFAVLLRYEVDDMTRFRNAKKFACYTGLIPSTYASNTRVYHGPLTKQGNKWLRWAFIEAVGPALRASSSVRRYYDQIKARRGAHDARVCTARKLAQLAWTVWTERRCYEDRPARPAEEAAS

SEQ ID NO: 348749 - protein, 373 aa, unidentified
MPKYSTAFGMDVHLRSTTVCALDADTGEAVTRRFPGNPWGEIAGWMDGFPGPSLAAYESGYLGFAPQRELAGLGVECVVAAVSKIPRSAADSASKNDRNDAARMAKAILAHDISPAWVPSPEVEGIRDLAGAYDGATARLATAKQRLLAFLARRGFVYGGTTPAGNPRKYWTYDFLRWLDKVRPEDDGGVRALAALRNEVEAAAEARADLLSEYRAAVDASPIAAEVAALQSIKGCAFALAAAFSAEVGDFTRFRSGRRVTAYFGLAPSQRSSGDSVRLGGVSGAGNALVRKLAVEGSWCYAAARHQPKLMPRDTGVPLEIRMHGRKGSERLLRRREEMLARGVPAAKANAATAAELVRWLWALGMMCREGAE

SEQ ID NO: 348750 - protein, 442 aa, unidentified
MISRAYRATCVNDVKWDEIARGREGLGITLGVDVGKLTLWTVCRWGDGRFERPWRADNPIEIPSLVSLIKRMSAGRRLKVAMESSGTYGDSLRQALADNEIKVERVGNKASHDYAEVFDGVPSQHDGKDAAVVAELAALSKAVPWDYQPADAWEQELAYWVEWMVAHRQALTIWQGRLEGLLGRHWPEASQVLKLSSVTLLRALKQYGSPQALAADPQAAQQLARWGGRFLEPKKIKQLVDNARSSVGVRAGEWQQRQIRDYAQQALAARAEGQRANRRLYDLAAENVVLQAQGKVVGVPTACVLWTSTGDPRKYHAAAAYRKAMGLNLVERSSGQYKGRLRISKRGSARSRQWLYFAVLRLIQKSGVRPWYEAKKARNEDDARIAVVAVMRKLAVALYHVGIDNREFKPRRLFGRICKRVGNSTELPSRMKIKRKAADVKA

SEQ ID NO: 348751 - protein, 338 aa, unidentified
MYYVGLDIHSKSITICVLNGNGKVHRRCTVRQIDQRMAVLERLPEPFQVCYEASTGYGIFFELLSKVADHVAVAHPGLLKLIFRSKQKNDRRDAEKLAKLLYVGEVPIVHVPTADVRAWRELISFRRRLVEKRTRAKNGIRGLLRSLTIRSPQRPGLWTREGIAWLEQLPLDNAMHALRRDLLVEEVATLSGQIHRVETELARDSIHNPAVKLLRTIPGVGLRTAEAVVAFLDDPHRFANSKRVGAYFGLVPSQDQSGSTNRLGHITREGSATVRHLLVEASWQAVRRSPTVAAYWARIGRGDKARRKIALVATAHYLVRVMWSMLKNQTVWKETVAA

SEQ ID NO: 348752 - protein, 361 aa, unidentified
MKTTTHHLIAEVPRRQSRVELTIGIDLGDVWSHYCTLNEDGQVVDRGRFRTTPKAIDKWFTDVPHARVAMEAGTHSIWISEQLQELGHEVIVANVRELRAISHSDRKSDQVDAEKLARYARLDPEILRPIAHRTVEQQETLTLIRARDLLVRLRTAAVNAVRGLTKSCGHRMPASSTRCFAKRGLAVMPPGLQQALEPVLQQIAEMTLKIKQYDRQIQLLTQTEYPETQALLKVQGVGHITALTFVLTLGNKERFKRSRDVGCYLGLRPRRSQSGEHDPQLGITKAGNVYLRSLLIECANHILRPHGRDSALRQWGLNLAARGGKQAKSKAVVAVARKLAVLLHHIWVTQELYVPFYEVAA

SEQ ID NO: 348753 - protein, 391 aa, unidentified
MKKNSNKETVKEQESIGKAGIGLLKKLEIARKKQEASSAGQGIEYYIGIDLGDRKSHYCILDKEANILVEGNLPTTAAGFAGHFKALGRSRIALEVGTHSPWVSDQLEQQGHDVYVANPRKMGGRKNRRKNDRLDAETLSRQVRSDPAQLYPIRHRREKSRRGLILLRARDAFVNARTKLVNAARGLVKSSGYRLPKCGSEVFHKLCLEGLPEELRVVLKPMLEQIGQLTEKIKGYDKEVNQISLKAYPETKILRQVKGVGPLVALAYVLTMEDPGFFRNSRDVGPYLGLVPKQYDSGNSSPQLRITKTGDRMMRKLLVQSAQYILGPFGPDSDLQRHGKNIAERGGKNGKKRAVVAVARKLAVLLHRLWLTGEVYEPLYNSRLNDLQKAA

SEQ ID NO: 348754 - protein, 346 aa, unidentified
MATVPFFVGIDIACDDFTVTIVDQPGHVIGAREKIPNRSDGFHDLDAWLGQQGVTVETCVVCMENTGVYGEALCYYLAAAGYHVAVVPPHHAKKRFTTLSKTDRIDSKQLAEYACRYYDQLHFWRPREPVLEQIRVLYATREHFTRQLIANKNALTAMERKVVQTPLAASSYREMIAELTRRIKALDKEIEKLIKDNPAYKQLSDLADSVPGVGQPLANSLMVITEGFTTNLDHKKLCSLLGLAPHEHQSGKSIQYRPRSVGHGNPRIRKLLHLAARSVATHIAEFRHYFLRKLAEGKPKLLIYNNIANKLIRIVMAVVRSRTPYIKGYRSVNPTYLASKTLSLCH

SEQ ID NO: 348755 - protein, 343 aa, unidentified
MQTVTTIGLDIAKSVFQVHGVDANGQVVIRRQLKRRYILAFFQKVPPCLVGIEACASSHHWSRELQALGHTVRLMPPAYVKPYVKRHKNDATDAEAICEAVSRPNMRFVATKTPGQQSCLTLHRTRHLFIRQQTSVINAIRAHLAEFGIVAPVGRHGVEQLLQVVADKSDKRLPEVARICVAALGAQLQTLKAKILEFDRLIMAWHRSSETSRRLDDIPGVGPALATALVASIADPNAFRSGRDFSAWIGVVPKQNSSGGKDRLGSISKRGDRYLRGLFVAGALAVIRYAKIYGTKHRPWLTALLARRPTKVAAIALANKIARMAWAMMAKGQRYKEPVALAV

SEQ ID NO: 348756 - protein, 334 aa, unidentified
MQNITLIGIDLGKHSFHIHCQDKSGKALLRKKFTRTKLMQFLATCPPSVVVMEACAGAHFMARCISDFGHETKLISPQFVRPFVKSNKNDFVDAEAICEAASRPSMRFVQPRTETQQAMRALHRVRESLIRDKVKTTNQIHGFLLEFGISLPIGDAVIKRLSLVLAEHEIPEYLSRLLVRLHTHYFYLVEQIAELESELSQSINADDTAQRIMTIPGVGPITASLLSSQLGDGKQFSCSRDFAAPTGLVPRQYSTGGKSTLLGISKRGDKNLRRLLVQCARSFIMRLERKHGKLAEWVREQLNKKHSNVVTCALANKLARIAWAITTQKKEYQA

SEQ ID NO: 348757 - protein, 344 aa, unidentified
MDHFAGMDVSVKETSVCILDDAGKIVKEVKVASEPQALLKVLGNPAYRFKRIGLEAGPLSQWLFSALAEAELPVICVETRHMQAVLKAQINKTDRNDARGIAQMMRVGVYRPVHVKTLRSQKLRMLLTHRKLLQSKAIAIENDLRGTLRNFGLKVGMVGMVGFEARIQALVATIPDLAMLVEPLLVVRRALREQIVILHRRLLAIVRDDEVCRRLMTTPGVGPVVALTYRATVDVPARFRKSKSVGAVFGLTSSRHQSGEIDWSGRISRCGDEMMRVMLYEAAQSMLRSKKWSWLKAWAMQIARRRGMKKAIVALARRLAVIMHRIWIDGTEFRWTQGPATAAA

SEQ ID NO: 348758 - protein, 357 aa, unidentified
MSVRGVLPVSSSSSTVVVAVDVGKRAFAVSVSGADRGRLLGPVECMMTRPAVDRLVEQVRAVLPGPGCVVRVGVEAAGHYHLPLIAASSWPADWQVWELNPAHVTEQRRVMGRRRVKTDAIDLEAITELLLAGRGQPVTDRAQVRGELAAWAGHRSRRVAARTATKNQLLGQLDRAFPGLSLVLPDVLGTKAGRLVAGHFADPARLAALGPARLVRFAAARGLQLRRPLAERLVAAARDALPTRDAAVARQVLGADLALLAELDGRVLAAEAHLARLLPLTPFRTLTSVPGWGVVRAASYGAAVGEPARWPGPRQLYRASGLSPMQYESAGRRRDGAISREGSVELRHALIDLGIGL

SEQ ID NO: 348759 - protein, 466 aa, unidentified
MRTESSADVNRKSKKELARRLRSADPGLEVVHPDAAGINVGNESHYVAVRPDRDPEPVRRFACFTADLYRMAEWLRSCGVKTVAMQSTGVYWIPLYDILEEFGLEIFLVNARHTKNLPGRKSDVQESQWLLKLHTHGLLNNSFQPPSDIRVLRTLWRVRAEHATGLTTCIQRMQKALTQMNIQLANVISDLSGKTGQAIIRAILNGERDPLKLAELADRRIQAPKEEIAKSLHGNWRPELLFIVQQQLAMYEVYQERIAECDQQLREHLARFATAPSISVDSSTPPQSKKSKRYRYMPQFPLSNELMRISGVDLTQIDGVDAMTAQTLISEVGLDMSRWKTESHFASWLGLCPDNRISGDRVLSRGTRRVINRAATALRIAASTLIKSKTYLGAQYRRLRTKLGAPKAITAMAHRLARLVYRMLKYGQTYVDKGANYYEQRSRQQQIDFVRKKAAQLGLQVTLPEV

SEQ ID NO: 348760 - protein, 317 aa, unidentified
MSKSFIGIDVSKNNLDVHILPEAMSLSYRYETKPMKTLIKKLKTYAPELVVLEATGGYEITIGIALADAGLPVAIVNPRQVRDYARALGILAKTDKIDAYVIARFAQDVKPEARGQLTFKEQELKSLVVRRQQLVEMRSAEVNRLSRTTIPQVKNGIQKVVRVLDAQIKAIDDDLDNEIKKNPIWNQKLEVITSFTGVGDHTANTLLFGLPELGTLNRQEIAALVGVAPFNRDSGMLRGKRTISGGRANIRKALHMPTLSAATRWNKDLMVFYQRLIARGKKHKVALTACTRKLLITLNAMVKNNELYNPKFREVRP

SEQ ID NO: 348761 - protein, 343 aa, unidentified
MQAVKTIGLDIAKSGFQVHGVDADGQVVFRRQLKRRNVLAFFQKVPSCLVGMEACATSHHWSRELQALGHTVRLMPPAYVKPYVKRQKNDATDAEAICEAVTRANMRFVATKTPEQQSGLMLHRTRHLFIRQQTAVINAIRAHLAEFGIVAAVGRNGLEQLLNVVADAGDKRLPEVARTCLMALGTQLQALKAKLLEFDRMITAWHRSNETSKRLDAIPGVGHVLATALVASIADPKVFRSGRDFSAWIGLVPKQHSSGGKDRLGSISKQGDRYLRSLFTAGALAVIRYAKIYGTKHRPWLTALLARRPTKVAAIALANKLARMAWAMMSRGERYKEPVALAA

SEQ ID NO: 348762 - protein, 341 aa, unidentified
MFTERTSVGLDVHARSVAAAAIDGVTGEVQQTRLTPSHEHIRSWISGLPGPVAVAYEAGPTGFGLQRSLTDAGIRCVVVAPSKLQKPAGDRVKTDARDALHLCRLLRLDEITSVSIPSVAQEAARDLVRAREDCRGDLMRARHRLSKLLLRHGIVYYGGAAWTGAHDQWLRTVAAPQLRASATRMAFDADYDHVLTMQARRRRLDAAIEERAADGEFTAIVRRVSCLRGVNTLTGFALAVEIGDWNRFTGNTIGSFVGLVPSEFSSGSSRAQGPITKTGNTHVRRLLVEAAWHHKPRYHVGAVMRSRWDRASAAARARGDEGNRRHGMAGGLASWSDVSDP

SEQ ID NO: 348763 - protein, 402 aa, unidentified
MNAVGIDVSKGKSMVAIMRPFGEIVSTPFEIKHTTSDINSLVELINSVEGESRIVMEHTGRYYEVLAHQLSEANLFVSTINPKLIKDFDNDSLRKVKSDKADAVKIARYALDKWQNLKQYSVMDELRNQLKTMNRQFGFYMKHKTAMKNNLISILDQTYPGVNTYFDSPARSDGSQKWVDFASTYWHVDCVRKMSLNAFIDHYQNWCKRKKYNFSQSKAEEIYGKAKELVPVLPKDAITKLIIKQAVDQLNSASTTVESLRTLMNETASKLPEYPVVMAMKGVGTSLGPQLMAEIGDVSRFTHKSAITAFAGVDPGVNESGTYERKSVPTSKRGSADLRKALFQVMDVLIKTHPQDDPVYQFLDKKRTQGKPYYVYMTAGANKFLRIYYGRVKEYLSSLSES

SEQ ID NO: 348764 - protein, 335 aa, unidentified
MKKIHVGIDISKEKCNLCFRSGLEIVREEECSNDVKALKKAFKAALKVLGASLEEVLVCAEYTGRYIYPLTVACEELDIFLWLDDPTRIKNSMGLTRGKNDVIDAARIAEYAYRYSDKAIRYHIPDAALVSMKNLLADREFLLIDKKRYQSQLTDQKKYMAPGDFKHKSSRWKKVIKSIDEQIAAIDTEIEALIAADPVLTRQKELLVSIDGIGERIAINMIAITGGFTRFQNARQFCSFAGLTPYRYDSGTSVRSKAKISKRANQTMKALLHLSAVNVATRMKSGEYKDYYERKLKEGKHVMCILNVLRAKLVHRMFSVIKRDTEYTKEYKSAG

SEQ ID NO: 348765 - protein, 341 aa, unidentified
MSDYSYFCGIDLAKNHFSLHAVDQNGKVILHKSVTRSKLLTTIANMPLMRIGVEACGGAHYWARTLNKLGHDARIMAVKYVIPYRTKGKNDLNDAVAICEAVQRPSTRFVPVKSPEQQAILSVHRMREHWVRERTALMNRIRALLSEFGLIIPVGRSSLMKHVPLMLEDAENELPHLARTGIADAYHHLGELNQRIADTEQIFESFAKVSANVQRVMKVRGIGPQTATAILASIGNGSQFDKSRDFSAWLGLVPKQYSTGGKPRLGRITKHGDKYLRTLLVHGARTVIANLGDKQDKLSQWCRGVLERRGMNRAIVALAAKNARIIWSLLHNQTEYENYAA

SEQ ID NO: 348766 - protein, 343 aa, unidentified
MRVIIGVDPHKRSHTAVAIDQKEKELARVEVRASKRQLDQLRKWAGPYAQRTWAIESASGLGYLLAQQLVAAGEHVVDVPPTLASRVRLLGTGQTNKNDPNDSRSVAIAALRSPGLASVRSADHSAVLRLLAKRNLDLARERNRVACRLHALLCELVAGGISKEMSTFKAERLLEGVQAETPVETTRVSLALELIEDLVRLDEQLKEMRRRISDALAASKTGLTDLFGVGPIVACLVIGYSGDIGRFETRSRYATYNGTAPIEMSSGGRITHRLSRRGNRTLNYAIHIAAVAQIRHAHSEGRAYFDRKLAGGKTKKEALRSLKRRVSDAIYQQLVLDAERRRA

SEQ ID NO: 348767 - protein, 423 aa, unidentified
MTQDTTAEFAALVGIDWADRKHDICLQALPGETREHAVLEHRPEAIEEWANGLRTRFGNRPVAVCLEQRRGPLVFALLKYEHLVLFPVNPQLLAGLRRAFHPSGAKDDPTDADLAVDILLQHRDKIRPWVPDDARTRQLQALVQARRRLVEQRVRTTNRLLANLKGYYPQAVECFESLDSVLACDFLTQWPSLGEAKRARAPTLTRFFHQHGVRSQEQIEARITLLQGALPLTTDSGVIVPSLLATSTLVAELRALIAGIDSYDATIARLFKAHPDAFIFDSLPGAGATFAPRLLAALGSDRTRFASVASMQQYLGIAPVTERSGKSSWVHWRYAAPGFLRQSIVEWAGMSIRYSFWAQAYYRQQREKGKKHHVAVRALAFKWLRILYRCWTDRKPYDETKYLFALKRRATASRTQAPLTSLG

SEQ ID NO: 348768 - protein, 349 aa, unidentified
MRHIPKTETAAYGIDIGKKVFHVVALDGTGTPIQKLKFGRDTLLAFFAKAPASLVGMEACPGSQWLARKLIEIGHDARIIPGRFVKAYVKSNKTDTVDAAAIAEAVTRPTMRFVQVRTQEQVDLQALHRIRDKMIRNRTGLMNQARAFCLEYGLAMRVGASGFRTDIRRHLDAPDNDLTAAMRLLLRDLLDDLDHLEKRIGALDRTIEATARSNEAAVRLMSIPGIGALGATALLAAAGDGLQFRKARDMAAWLGLVPAEHSTGGRQRLLGISKRGNGYVRRLIIHGARSCRLHLNREGHAIGRWLSVLEARTHHNRAIVALANKITRIAGAVLTRPGQLYMRTKGAAA

SEQ ID NO: 348769 - protein, 327 aa, unidentified
MNLSTVVLGVDIAKLKFDVCLIKENGKAKHKVFTNTKHGFEQLVTWLASHQAGSLHVCLEATGSYGEALALYLFDAGYRVSVVNPAAVKAFAVSRLIRTKTDKVDAELIARFCQLQQPQAWTPPASEVRGLQALVRRLESLIEMRVAEENRLSSGISIEAVRHSLEEHIAYLVAEIKQTELMIREHINNHPDLKEQSDLLDSIPGIGATTAARLLAEITDFKQYKSARQVAAYAGLVPRERRSGSSVRGRTCLSKVGNARLRKALYFPAITALRSSGFFQQWASGMRERGKSKMAVIGAAMRKLIHLAYGVLKTGKPFDPQWTTKIA

SEQ ID NO: 348770 - protein, 357 aa, unidentified
MLGMGDSAPRKGADAMTFVGCDLHTRMQQVAVLDTGTGEVSEQRLSHEGTAVEEFYTALARPVTVGIESTGYAVWFHAVMQRLGHTLLVGDAAKIRAMVVRKTKTDRRDALHILDLLHHDRFPAIWVPDPATRDLRALLTHRMRLVRIRTMVKNGLQAIALNARLTCGSKLLRQAGLVQLQALALPPHTTQRRDQSLALLAGLTTQIRVLDDAITTAALAHPDAPRLITHPGVGALTALATVVVLGPVARFPDSKHAVSYVGLAPAVHASADKAHLGRITKQGSPLLRFVLGQAAAHAARMDPDLKRTYRALVHRRGRPKAKVAVARKLLVRLFIMLRDQIDYDEFCRRGRAARAAA

SEQ ID NO: 348771 - protein, 387 aa, unidentified
MSQVDDLSRSLAAFDQNTTLTVVVELSEASWLVAGLVPAVDRQPLKKQEPDPRALLRLLERWRAEAAKTGRMIERIVLAFEAGRDGFWLARWLRARGIEVYVIHSTSVAVSREHRRAKTDRLDTGMLMRVFLGWLRGERGHCRMVAIPTLEEEDAKRPSRERESLVGERTRIINRMKSALARLGIRGFKPVLRKAPQRLEALRTPEDTPIPPNMLDEVRRDMIRLAVVREQIDAIERARLVRLEQAPARGSHPMVRLLARVIGVGIETADMLVQEVLSRKLRDRRAVARYVGLTGSPDESGKRRREKGLAKAGNARVRRGLIQLAWRFLRFQKDSALAQWYRARTEGPKGVRKTTMIVALARKLLIALWRLVMTGEIPVGVVLRAAA

SEQ ID NO: 348772 - protein, 428 aa, unidentified
MNCNTQNAKIASITEKTLIVGIDVGSETHYARAFDWRNYEYTRKPLEFSNTETGFQTFKAWMEDIAAKHGKTAVIPGMEPTGHYWFALGKFLQDSGMRPVHVNPHHVKKSKELDDNNPNKNDRKDPKTIAALVNEGRFSYPYIPTGIYAEIRSLSNLRFQTQEELTRIKNRIARWFAIYFPEYKDVYGDYKAVSGRMVLKEAPLPEDIQKLGVEGVNKIWRDAKLRGAGMKRAKTLVSAAEHSVGSKEAPGAARMELKNLLNDMDVYTSRLEELLLKIEEKLKEIPYVDKLMGIKGIGMVTVSGFIAEVGDIGRFDNPKQLQKLAGYAIVANDSGKHNGESRISYRGRKRLRYVLYEAAISLIGKNAEFKAIHEYYRTRKENPLKKMQSVVAVACKVLRVFYTILTKGVDYDAGKLMGDIRRPQVQAA

SEQ ID NO: 348773 - protein, 340 aa, unidentified
MTITTVGIDLAKNVFAVHCVDQNGKTVLVKSRVTRAALPGLIAGLPPCVIGMEACSGAHYWARLFRQYGHEPRLMAAKFVSPYRMAGKSGKNDAADAQAICEAVRRPHMRFVPVKDESQQAMQCLHRTRQGFIEEKTATYNRLRGLISEFGVIAPQSTDALRHIVFEQKNSLPLQVQQCVDDLLEHVARIEDNIAEYDRILSRMAKTDHRSQRLMELKGVGPTTACALVASIGNAHDFKNGRQLAAWLGLTPSQYSSGGKSKLGRITKAGDSYLRTLLVQGARSVLIGAEKRTDLFSRWICSLVERRGYWRAVVAIAAKNARLCWASLHYGDDFRLYSAS

SEQ ID NO: 348774 - protein, 381 aa, unidentified
MEKACGLDVHKDSVFACILDEQGKKILEKRYGTLTPDLTSLRDTLVSNGCGRIAMESTSIYWIPIWHVLSSDFSLKLANPYFIKQLPGRKSDVKDAQWIAECLQKDLIKGSFVPDGVLQEMRQLSRQCFRLTKNRVRLEQQMDNQLQRCNIRLSNYVSNQGNNVSLRKVIGALIQGECDPCKLAHLVHGRTKNKHGHQVITDSLDGVLRQTDIEMLKQCMEQLDLLEKQQAACLNHLEELADNYFAREISLLCTIPGIQKYSAMCILSEIGNDMEVFGKASHLVGWAGLRPRNDESAGKIQSRKTLHGNKYLRKMLIQVSWSATHTNKSFLSKKFGVLSKRMKSQKALLAITRKVLVIIFNVLLTGQPFDANRNLQALMPV

SEQ ID NO: 348775 - protein, 353 aa, unidentified
MNKFYKSKTDGSVFKNMFVGMDVHKNYLQVAVLDEKGKVVSNSRVDNNLIKVNEFFDTLHPGNNTKVVMESSGMWYNIYESLRKKNLDVRLSNPTKTRAIASAKIKTDKLDAVKLADLLRGGYIAECYIPTRGTMELRELVRHKAALVRMRTKLKNKIHSIIAMNGTSISYVGTTFTKGHIEKLKELNDYRINGYLRIIESLNDEINAVSKKIILLAQEDEMAKLLMTVPGIGYYSALLIVSEVGDINRFPDSHHLCSYAGLIPSTHSSGGITYHGSITKTGSKYLRWIMLECLHAHIRNDKNSNVTQFYHRISKKKGNSKAAVAAASKLLKIVYWVMKENRTYHNNKSKYNV

SEQ ID NO: 348776 - protein, 349 aa, unidentified
MNYFTGCDAHKKYSIFTGIDDECKIQFTHRVEHDREGFRSYLEGLPPSLPIAVESTGNWYWIIDEIEKAGHYPRLVNAGKAKLMMGNVNKTDKLDARGLAIMLRNGSLPSVWIPPAEIRDQRELPRMRSALVHMRTMLKNRIHATFAKYAITFEGTSDLFGKRGRDLMKKSLGELPPQTSSSVEQELELLNQIEIQISLAEKRIKEVIAVTPSMRLLTTIPGVGPILAITIALETGDISRFPDSEHFASYAGTVSRVSSSGGKTRMGRVRADVNHYLKYAFIEAANVIVLHQDRLARRHAVLLYLRIRDRRGHGKAVVAVARHLAEATYSMLKKNEPYMEGKRVARMGS

SEQ ID NO: 348777 - protein, 346 aa, unidentified
MRYLGIDLHTNQMTVCYLVDGNYSFETYMVSNIEQFKKLLLPTDKMAIESTGNSSYVYRHCKDLVAEIVVVNTLQFKVITKSCRKTDKNDAKLLAEFLSKDLLPKARVKTEVDDRLHSLVDSRSKFIDLRSQLKNKIHNLLNRCGIKIKKESLSSNKGLTKVLNMEVDELVKFELEQIVDEIKHLNDKVDRFDMKIEEFGKTLPGYENVKSIKGIGTNTAVMLLSAIGDINDFESEKKLAAYFGLVPRVNNSNETVRHGRITKKGDKLVRKALLQCALISIKYNPILSGFYQRIKDRRGFAKAIVATAKKLLTVVYHTLKNGWYFIDFVNNVREIRPINRNVAGII

SEQ ID NO: 348778 - protein, 404 aa, unidentified
MSVHAAPVTSSTIVVAIDVGKTSALLSATDGARRRVLGPVEFAMTRSGLGAIVHRVSAVVPAFAQVKVGVEAAGHYHRPVLDYGWPPEWEVLELNPAHVAEQRRVAGRRRVKTDVIDLEAVTELVLAGRGRVITEREVCIGELAAWAIHRSQRIATRSATKNQLLGQLDRAFPGLTRALPDVLGTKIGRLVAAEFADPARLSALGVNRLIRFAAARDVQLRRPVAERLVTAARDALPTRDGSVARRVLATDLGLLADLDTQIADAEGELAALLPASPYSTLSSVPGWGVVRISNYAASLGDPDRWPGPRQIYRASGLSPMQYESAGKRRDGRISREGSVALRRALIDLGLGLWLTEPSAKAYAAELKSRGKPGGIIGCALAHRATRIAYALVRDHTIYNPSRWV

SEQ ID NO: 348779 - protein, 342 aa, unidentified
MQITTIGLDIAKNVFQVHGIDAAEKVVVRKQLRRSQVLGFFKALPPCLIGLEACATAHYWARELTKLGHQVRLMPAKDVKAYVKRNKNDAADAEAICEAVRRPTMRFVQIKSAEQQGRLMLHRTRDLLMRQRTQVINALRAHLAELGTTSAQGREGLKELLKIVASDADERLPADAHASLVVLAAELQAMQTLIGSIEKRIVTQHRENKASKRLLTIPGIGIIGATAIADTVTDPKAFRSGRDFAAWIGLVPRQDSTGGKQKLGPISKQGDRYLRRILVVGAHSVLRRARLNPQKHPWLTQLLARRPFKVVAVALANKMARMAWALLAKGGAYRAPALAATA

SEQ ID NO: 348780 - protein, 401 aa, unidentified
MNAVGIDVSKGKSMVCVMRPFGEVVLEPFEVLHTAQSLNDLAGKLKALDGETRVVMEATGNYHKPVAFVLHDAGLFVSVVNPVLIHDYDNNSLRRVKTDRKDAVKIANYTLDKWTRLRQYLPEDDTRLALKNCYRQYQQAVAVRTMLKNNLISSLDLTFPDANKLFSSPAKSNGCEKWVDFIGDFWHSECVSSLSSDAFAKKYLKWCQKHGYNFTRSKSDTIYACAVNAASLPKSPTSKLLIQQQVAQLKAVSQSVAAFQQEMLRLSQQLPEFDTVMEMYGVGPSLGPQLMAEIGDVRRFSSKKSLIAFAGIEPQPNDSGKIVGNDSGISKVGSAVLRRTLFLIMTVILKTQPQDEPVFQFMNKKRSEGKPYKVYMMASANKFLRIYYAKVKAVMDSERSQ

SEQ ID NO: 348781 - protein, 419 aa, unidentified
MRNGNTKKVKRISEETLLVTIDMGKVRHTGYYRFPDGAEGKIFEFSNSRNGFEDMWQRVCHAKRSRNLTEIVVGFESTGPYAEPLLHFLRKRNVRLVQVNPFHTKRLKELQGNSPSKTDQKDPKVIADIIELGHALTVIIPEGTAAELRRLTQARERGIQRRSMLMSQVQDLVFLIFPEFMPVMKDITIKSTQYLLKRYPRPQDVVETGVKLLTQSLKKVSRGKLGEERAEALYQAAEASVGLREGQESIVIEIKEIISVIENIERFVKELEKHMSKHLKDIPYSRFILSIKGIGEITTAGLIGEIGDFREYSTISEVIKHAGLDLFEISSGKHKGTRRISKRGRPLLRKLLFFASINVVRKGGILHKQYLQHLDKGMPKIKALIAISRKLLSIIFALVRDHSVYIAQYSEIQQLKEAA

SEQ ID NO: 348782 - protein, 450 aa, unidentified
MREPLEIEDRQGEQVVLRVAAVDVAKASGVVCTRVPREGEPGRFTTKVWPVGATTNAILELADHLAGLRIEKVVLESTSDYWRPFFYLLEAAGLTVELVNARDVKNAPGRPKTDRLDAVWLAKLAGWGMLRPSFVPPAEIRQLRDYTRLRVDLTRERTRHWQRLEKLLEDALIKVTTVASRIDTMSVRDMIEALIAGQRDPRRLADLARGRMKAKRAALIEALTGRFDDHHGELAAILLAQIDSLTAQIDQLTIRIEELITAVPAAQGVDPDGTTGPQAGRGPDAPVLPAISRLAEIPGISRHAAQVIIAEIGLDMTRFRTAAHLVSWARLCPRTIQSGNRTQPGRTAKGNPYLKGVLGDAAAAAGKTSSFLGERYRRLVRRRGKLKALVAIARTILVIVWHLLADRAARYDDLGDDFYLTTINTDRKARSHIRQLEALGFMVTITPAAA

SEQ ID NO: 348783 - protein, 312 aa, unidentified
MANTICGVDVSSKALDAQIGRSGPFQRFERSPEGIAALAAYCQSHAVDLVVMEATGGYEKLPFALLWKADVPVAIVNPRAVRDFANAMGFLEKTDRIDASVIAWFAATKGILPQKPASSNQERLAALVTRLRQLTDSRTVQANQRRLLDDPDTIASVDAIVALINRQIRSFEAKIAGLIDDDPLWQKLDAEFRSIKGVADRTVARIMAHMPEIGTLSNKAVAKLAGLAPLARDSGNAIGKRKVRGGRDSIRAVLFVVAEIVRRHEPDFAAFYKKLCESGKPKKVIRIALARKLLVRLNAKARETRKSFIIAT

SEQ ID NO: 348784 - protein, 361 aa, unidentified
MEQFIGCDAHKKYSVFVAINERGEASGAVRVDHERVPYRQFLERLPAGSQIALEAGGHYYWMVDEMEYAGHNPRLVHPLEAKKRMGKTGKKTDKVDAKGLGILLRNGTLPEVWIPPAELRDQRELLRLRMFLVQQRTRFKNRIQGALARYNIQLGVRDVFSVEGRRRLGVQLTELPQHTRASVELELVTLDFVDMQIEEAEKRLETVLQVSAEADLLKTLPYVGPILSMVMALEIGKVERFPSAAHLASYAGLVPRVHSSGGHTRLGQICGDVNQYLKWAFVEAGNLVVIHQKHLAGRHVVRLYQRVKRKRNYQKAVVAVARHLAEAAYWILKKQEVYREPQSKLKSSKAEIANALSSTHG

SEQ ID NO: 348785 - protein, 433 aa, unidentified
MQDAQDEPLFAERAAGLDIAKAEVEVTIRVPSDTTPGRRQQESRTFGTTRRELESLGDWLACWGVTKIGMEATGDYWKPVFFLLESRGLDCELYNAAQVKALPGRPKTDRADSVWLTKIVERGMICSSFVPPEPIRRLRTHTRYRRHLTQARTAEKQRVEKLLEDGHLKLSSVISDIHGVSGRDMLSAIAAGQRDPRALAQLARGTMRGKIRRLEEALDCSFFTEEHATVLAMMLAVIDHYTTQIEALTARIEILIEPYLRQVEQIDAVHGIGRTGAQDIIAEIGTDMGVFRTAAHLVSWARWSPQVKQSAGKRKGSNSTGRGNPYLSAALGETSIGASRTQSFLGARYRRLARRMPKKKALVATGNSQLTIIHALLSDPAACYTDLGADYYEHRMHTRRQARNHVKSLERLGYKVTIQAINPDTGELLAAAG

SEQ ID NO: 348786 - protein, 346 aa, unidentified
MCSLPVFVGMDYHDSFVRVVVQDTDGSEMGNADRTNHWKAIADFGDRFGRPVRAAIESCCGAADLAEELVSCAGWSVALAHPGYVQRMKQNPDKTDCQDAQLLADLERVGYLPRVWLAPRYIRELRHVVRYRLQLTEQRRATKLRLRALLREQRCHAPEGLNAWTKAWQHWVRHTAELSAQGRWLVKQHLRELARLATRIRQVEKRLEHLTANDVEVQRLQQQPGIGPVTAWTIRAEIGHFDRFRTGKQLARFCGLSPRNASSGQRQADAGLIRAANPALRTVLIEAAHRLVQYDPSWQKFAQRLRARGKPGSVVAAAVANRWMRRLYHEMKTPSGELAVAVGPAQ

SEQ ID NO: 348787 - protein, 344 aa, unidentified
MDHFGGLDVSVKQTSVCILDDAGKIVKEVKVASEPQALLKVLGDPAYRFKRIGLEAGPLSQWLFSALAEAELPVICVETRHMQAVLKAQINKTDRNDARGIAQMMRAGVYRPVHVKTLRSQKLRMLLTHRKLLQSKAIAIENDLRGTLRNFGLKVGMVGMVGFEARIQALVATIPDLAMLVEPLLVVRRALREQIVILHRRLLAIVRDDEVCRRLMTTPGVGPVVALTYRATVDVPARFRKSKSVGAVFGLTSSRHQSGEIDWSGRISRCGDEMMRVMLYEAAQSMLRSKKWSWLKAWAMQIARRRGMKKAIVALARRLAVIMHRIWVDGTEFRWSRGPATAAA

SEQ ID NO: 348788 - protein, 319 aa, unidentified
MTDPATFVGIDVSKDTLDVHVRPRGDAFAVGNDPQGIADLVARLAVARPALVALEATGGLGHACAAALAAAGHPVAVVNPRQARDFAKATGRLAKTDAIDAEGLALFAERVRPEPRPLPGEQAREFEALLQRRRQLLEMRAAERNRLGAAAAAPVRASLQAHIDWLSKQLEKVDKELGAAVEASPVWRAKDELLRGIPGIGPAVSRTLLAALPELGALTRQQIAALAGLAPVSRDSGRRKGQRSIGGGRAEVRSLLYMAALSAARYNPALRGFSERLRRAGKAAKVRLVAVARKLLTIANAVLRDGRRWDAALCGTERG

SEQ ID NO: 348789 - protein, 320 aa, unidentified
MTTVPDKIQSALGCDVSAKTVTIFDSGTKTTITVANDAAALRAALKPYGRRADLLAVCEATGGYEDALLHVLARLAIPAHRADAVRVKAFIRSCGTIAKSDAIDARHIAAYGLSRAAQLPRWQPPQPHEARLKLLVQRRADLVAMRAQEQNRLKAPRNKPIEREIAGHIGELARRIAVLDTEIEAIGARDHRINGRQSILRTIPGIGKVIAPVLLALMPELGQLDRKRAASLAGCAPHPRDSGTWKGRRFAQGGRRQLRPLLFTAAMAASQGKNSLAITYKRLIAAGKSKMTALGAIMRHIIVIANARLREYEAQQMRLT

SEQ ID NO: 348790 - protein, 360 aa, unidentified
MNATTVAVDLAKSVFQLAVADGSWRVTEKHRLTRTQFERWFANRDVDLVIMESCGSAHHWARRLAGLGIAVKLLPAQYVRAYVRRNKTDAADATALLEAARASDIRPVRVKSVEQQALQALHRIRSLWMGTRTSRINALRGFCREFGIAIPVGARTGIEVISRVLADPQTAVPDLIRATARMLVEEIRLLEARIAQVERELAQAARLSPACTTLLSVPGIGLLTATAMVAATSGDVTHFKDARHFASWFGLTPKEYSSGNTRHLGHISKRGDRYLRMLLTHGARSVLRAAAAARTKGIEVAGIRRWALQVQERSNHNKATCALANKLARICYATLRDKQRFDEEQPSSKKMNRQAFAMPL

SEQ ID NO: 348791 - protein, 345 aa, unidentified
MKILALDLGNYKSVACIYETSSLSHRFTKVVTTPKAIHDLLVEEEPDRVVIEICPLAGWVSDLVRALGIELQVASTTHDAWRWKNVKRKNDRQDGLKLAQLSALGQLTLVHVPEQGVRQWRALINYRQRLVSRRTKIQNHIRALLLRQAVAMGAGHRGWTRAGLGQLEALARPLHEVEREELWRGELALELEGLKALAEPLRQVEQKLDELGAADERVQLLRTIPGVGPRGAEALAAVIDKAQRFKRGKELGAYLGLVPKQIQSGESNRLGRITRQGNRLLRSLLVEISWSGLRYNSWMRSVYEQVRRGSKARKKIAIVAVARRLLIRCWAMLRDGTTWRPASST

SEQ ID NO: 348792 - protein, 350 aa, unidentified
MKYVGLDWAYRSAQWCALAPGGEIASEGRVAADRDGLARLVFELGDEVKACVEMMSGALWVRDELVACGWQVEVADARKVKTVAPLAAKTDKVDARLLAELSRRDLVPALWLPSLDERALRERLRRRMHLVRLRTSAKARIAGLQTQWGVRVSLHRLRHADGIELLERAGMPAVWRRSVSECLAVIDFLDARIEPLDQELKPFAHADPRAVLLDTIPGVAELLALTIAVEVGEIGRFAGPEKLVSYGRLAPRVHQSGQARPRSGPLSKSGSRLLGWAAVEAAQQAWRESNPWHDLYTDVARRSHNKNSAKAAVARKILIAAWHMLSRNEPFNPAPRTTSVSASSRFALAA

SEQ ID NO: 348793 - protein, 403 aa, unidentified
MNNVAGIDVSKGKSVVSVLRPFGEVVAKSFSVGHTGSELKELANYLKSLDGETRVVMEHTGRYYEPVARFLHEEGIFVSTVNPKLIKDYGNNSLRRVKTDKADARKIARYGLDNWVELRQHTPMDTIRMQLKTLNRQQGLYSKTKTMMKNNLIALLDQTYPGVNALFDSPVREDGSQKWVDFATTFWHVDCVRAMSLTAFMERYRKWCKRHGYNFSQSRAIEIHTDAQDLIAMLPKDTLTKTMVRQAVDALNAVSKSLEQLKAEMRTLAAQLPEYPVVMAMHGVGDSLGPQLMAEIGDVTRFAHRGSITAFAGVDPGADQSGTHETKSNHTSKSGPPELRKALFLVMDCLLKTQPEDDPVYRFIDKKRSEGKPYLVYMTAGANKFLRIYYGRVKEYLASLEEN

SEQ ID NO: 348794 - protein, 402 aa, unidentified
MAGSPTRFFGLDIHKEYFVAVGVNAQREVIFGPQRVSNYQLDDWVSRVLTTQDSVVLEMTTNTYLFYDTLLPQVHSVIAVHPPSVTLVTNAQVKTDKKAALTLAQLHAAGMLTGVWIPPHEVRDLRALIARREKMVRLSTMAKNRLHSILHRNHLTLPEKPFSPEQRTWWESLPLSATEQFLVRSDLDTLAFAQKQVEQAEECLKKESAQDERIPLLVQLPGVAMLTAITILAAIGDITRFPTAKKLVGYTGLGTRVHDSGMTHNTGRITKAGRKDLRRAMVNAANHAIEHHPHWKKEFERLEPHLGRSKAVVAIARKLLVAVWHVLSEKTADRFADPDNVARSFFAHAYRVGVRNLPEGQSALAFTREQLDRLGIGKGLQEIPWGSKRHKLPPSKLLLEKE

SEQ ID NO: 348795 - protein, 317 aa, unidentified
MKTAVEIFVGIDVSKVWLDIAIHEQTETYRMSNDDEGIAKLVQKLTEWDPIRIIIEPTGGYESLVVAELGAAHLPVALVNAKRVRDFAKATGQDAKTDKLDARVLAFFGAAIKPALRDFKNEQEEQLTALLTRRRQVLDMLTVEKNRLTTVRERMRPDIQTHIQWLSSNLKGLDQEIEELVKDSPFWAEQDALLQSVPGVGPVTAATMLGMLPELGKLNRQEIAALVGVAPVNKDSGKKKGKRRVYGGRADVRSVLYMATLAAKKFNPVIRNMYERLLKNGKEKKVALTACMRKLLVILNAMMHSGQHWRIPAQLSS

SEQ ID NO: 348796 - protein, 346 aa, unidentified
MNHYAGIDVSLEYSSVCVVDGSGKILCEAKVPSEPEALIAFFHGLGFGLERIGLEAGPLSQWLFAAMKAAGLAVELLETRHVRKAFEAMPVKSDRNDARGIAQLMRLGWFRPVHCKSMEAQETRTVLTARKLVQSKLRDVENSLRGILRGFGLKVGPTTERTFCGRIRELVAGHPNLATVAEALLQVHAVLLREFNGFEKQVRRMARSDTKAKLLMSTPCIGPVVSLTYASAIDDPARFKSSKQVGAHFGMTPKKYQSGETDYTGRISKIGDASVRAALYEAAHIMLTKPVKGCSELKSWAMRIARRAGMSKAKVALARRLAVIMHRMLVDGTPFNPTHKQIAAAA

SEQ ID NO: 348797 - protein, 343 aa, unidentified
MEYGAIDLHLRRSQIRIVDEVGTIVLDRRIETSRTALDELFSSRPRLRILIESSTESEWVAQHLEQRGHDVIVADPNYAAMYGARSRKVKTDKRDAAALAEACRTGVYRRAHRVSAPARQLRQELRVRQHLVDLRRRTINLVRALVRQHGRRLASGSAERVVARLDQLALPAPLAAVLAPLRTTLTQVTALLAEVEQAVEARAAEPSTQRLMTAPGVGPVVALTFQAALDDPQRFGGRAARASAFVGLVPAEDSSAERQRKGHITKTGPRDLRALLVQASWVIWRGRSHAGAGLRTWAHALAARRGRRIAIVALARRLTRILYAMWRDHRPYQPPRRAAVTTA

SEQ ID NO: 348798 - protein, 320 aa, unidentified
MNQDHKRLFGKRLPNSLDEILMVLEPFKSDLKGVVVESTYNWYWLVDGLQEHGHRVHLANPSAIKQYEGIKHTDDKWDSFWLAHMKHLNILPEGYIYPKEQRAVRDLLRRRLFFVKHRTSNILSLQSTITRNLGIKMSSNAIKKLAMDDACDLFECSNLVFMAQNNISTIKHLAKIIKGIEKQVKPQIQLRKEFEMLTTIPGIGLILGLTIMLEVGDIGRFFKVGNYSSYCRCVGSKRLSNGKKKGENNKKNGNKYLAWAYVEAAHFAKRHIPKAQRFYQHKMAKSNGAVATKALANKLARASYFIMRDQVAFDEDMLFR

SEQ ID NO: 348799 - protein, 433 aa, unidentified
MEEAEHEPLFCERAAGIDIGKQMVMVTVRVPSETRRGGRAQETREFGTTRRQLLGLADWLRSWGVERVGMESTSDYWKPVFFLLEQQGFDCALYQASKVKAQPGRPKTDKLDSAWLAKVTERGSVAGSFVPPQEIRRLRTHTRYRRRLAQARTAEKQRAEKLLEDAHLKLSSVISDIHGVSGRDMLRALAAGQRDPRALAELARGVMRRKLAALREALDCSFFTEQHAFVLAMMLDNIDHYSAQIAALDEKIDALCEPYRRQIAQLDQIPGFGARNAQDLIGEIGVDMTVFPTAGHLCSWARVAPRVKESGGRRKGGSATGKGNPYIGATLGEAAASAGRTQTFLGAKLRRLVRRMPKKKAQGAVMRTQLVIAHALLSDPEASYTELGPGYHDQRANASRQANGHIRSLERLGYKVTLEPVDPDTGELPAKAS

SEQ ID NO: 348800 - protein, 322 aa, unidentified
MRYIGIDVSKATFVVAYSSDKGGEIRTFNNTTTGIKQFIGALPKDGSIHCVMEATGNYSALLLYMLNVAGITVSMENPLKIKNFARAMLSTVKTDKIDARLIALYGEKMNPQPFKIQGEAILRLRQKRTVIRQLTKQITAMSNLRGSLACLPVPDKGATHTVDETIEFLEKRRDRLQSELTDLVEVEFSRQLALLTTIKGIGITLATALIITTGGFTYFQNAKQVSRYLGICPTYEQSGTSVNIRGHINRNGDAYTRGLLYVAAWTASRFNTKCGETYTRLRQNGKPGKLAMIAVANKLVRQAFAVVTHDKEYVDGFVSNRP

SEQ ID NO: 348801 - protein, 348 aa, unidentified
MTLVGCDLHSRKQQVAVLDTTTGEVLEQELVHEGDAVERFYRALRPPVTIGIETTGYTQWFHALMHRLGHTVLVGEAAKIRAMVVRKIKTDRRDARHLLELLKHDRFPTVWIPDPDTRDLRALVAHRVRLVRMRTAVKNGLQAIALSHRLALRSKLWTERGRAALKGLVLPRHTTRRRDDNLDLLMWLTARIDDLDAQIAAAAAADPRAALLLTHPGVGPLTALATVLVLGPIARFPDSKHVVSYIGLAPAINASADKQHLGKITKQGNALLRWVLAQAAPLAARADEDLRRRYFAVLSRRGRPKAKVALARKLLVRLFVMLRDRIDYDEFCRRGQVRRTARVPVAAM

SEQ ID NO: 348802 - protein, 377 aa, unidentified
MAPAPPALDVPKCSCQRLLGKEPPNDSKDRGPGSLTGRALRSNVPRGMAKDVFQVHCVSVTGRKIINKKIKRAKLIAFFETLPRCVVGMEACGSPHHWARELSKLGHDVRLMPAAYVKPYVKRGKTDAADAEAICEAVRRPTMRFVEIKSEDQQAVLSIHRARDLVVRQRTQVVNMIRSILREFGHILPTSIEAVSKFAREHDIEEQLEMPEIANGILGVMCHQLNGLNARVDGLTKLIEQHAWLDADARRLMRMPGIGPITASAVVATIGDAKQFETGRDLAAWLGLTPLNKSSGGRERLGRITKKGDRYIRKLLIVGMTSRALMAKNSPEKADTWTAKLLDERPFRLATVAMANKSAGIIWALLTKQEEYRQPIA

SEQ ID NO: 348803 - protein, 347 aa, unidentified
MTQAQIYIYGIDLGKNWFHLVAMDRMGHVLTKQKLTRSQLKQFISTTPPCRVAFEACPGSQYWGRLFQQAGFEPKIIPAQFVKPYLKSNKNDFNDATAIAEAGSRGTMRCVPLKSHEQLALQATHRVRQRFIVERTATVNQMRALLLEYGLTVPVGRKVFERSLPTILEDAENGLPDFIRALVLRLRERWQQLDIQIDDMSLMLGQASSASGLCQKISTVPGIGPIVSTALIAAIGNGSQFKKARDLSAWLGLVPRQYSTGGKSSLGGISKRGNSYLRQMVIQGAKALKIHIKRDKSSLGEWVARLEVGHHHHVVLIALANKIMRICWKVLTSGMDYQPYPNTSSAV

SEQ ID NO: 348804 - protein, 340 aa, unidentified
MEVATIGLDVAKNIFQVHGATASGCVAFRKPLRRDKVLTFFGGLPPCTVAMEACGGAHYWAREIGKAGHTVRLIPAAYVKPFVKRQKNDAADAEAICEAAQRPTMRFVAVKSADQQASAVVFRARDLLVRQRTQTINALRGHLAEYGHVVAQGAAHVAKLIDRIEDPGSDLPEAARLALAVLVDTLRSLDGRIGQLDHELARRAREDEDARRLQTIPGVGPITATALVALAPSAAAFAKGRDFAAWLGLTPLQRSSGGKQKLGATSKMGERTLRRLLIVGASAVVRHAARRGTRDGSWLACMLARKPRMVVIVALANKLARIVWAVMAKGGHYRAPVVAA

SEQ ID NO: 348805 - protein, 413 aa, unidentified
MRVVYPRCAGLDVHKKTVVGCVIIPDEQGWQQELQTFKTTTAELLKLADWLRAHRVTQVAMESTGVYWKPVFNILEEDFEVMVVNAKHIKFVPGRKTDVKDAQWIAELLQHGLLKGSFIPEAPQRDLRELVRYRTHLIQERTREVNRVHKVLEDANLKLSSVATDIMGASGRAMLAAIIAGKDDPAALADLAKGRMRTKIEELEQALTGRIKNSHRLLLRLHLEHIDDLNAKLEELEAEIDKLMPPFDQDALVERLDEIPGVNQVTAQVIIAEIGTDMARFPTANHLTSWAGLAPGKNESAGRNRSSRTLKANRYLRPALVQAAHAAGKTNTYLGEKYRRLARRRGKKRAAVAVARTLLVIVYHLMRDGTRFEERGADYFDQLKPQSTQQWLTRRLERLGFKVTLEPIEPVAA

SEQ ID NO: 348806 - protein, 433 aa, unidentified
MSASTGCDAALWLCGSEKGRSMSAAVYRFYVGIDWATEKHRVVVLDAERRVVREREVCHEGAALESFADWLTQLAASAVETVAVALEVPRGAVVDVLLARGFHVFALNPKQLDRFRDRFTVAGAKDDRRDAQVLASALATDLATFRRLEPEHPLLLELRELSRLEDDLQEELGRLTNRLREQLHRYYPQLLHLVPAADEPWLWTLLERAPTPSVAQHLPRATVRTILSRHRIRRVDTDAVLATLRAPALPVAPGTVQAAQRHLAVLLPRLRLIHQQRAECATQIEGLLERLGESQEHRDVPILRSVVGVGRVVAATMLAEASRLLAARDYHGLRAQTGVAPITRQSGRRTLVCMRYACNPRLRQAAYHWGQSAARHDPVSRAHYERLRARGHSHARAVRGVVDRLLHVLIAMLTAGTLYDPARRRLPVGEAVA

SEQ ID NO: 348807 - protein, 394 aa, unidentified
MDTATTTATTTAATTATAGPILAIDLGKYKSVACVHDEATGAFRFTTFETTRAELQRLMAKQQPAVVIIEACLLAGWVHDLCAELGIRCLVANTASEAWKFKHLKRKTDRDDAQRLTQLYLLDQLPTVTLPPATVRQWRSLIACRQVLVGRRIAVQNRIRALFVAQGLPAPRGAKAWASTGLAGMATWAKPLGDCAADELWRGLLELSLTEYLQLCELIDQAQTKLDALGKQSADVVLLQTTPGLGPRTAETVAAYLHDAPRFQTAKQVSAYSGLVPRQHQSGEMDRRGRISKRGPALLRKMLVECAWCMIRYNVWARGIYQRLTGGGQRRKKQAIVALARKILVRCWAMLRDRKPWHDPQTGPKPTLSPSKQRRQAEAQQRRQAKERVAQAAT

SEQ ID NO: 348808 - protein, 394 aa, unidentified
MKLVGIDVGKNSHHFCVMDKETGEFNVAPSSFSNNKEGFDFLINSLKPYSKKSILIGMEDTGHYHVALLKFLLSNGYTVALINPKTTDLTRKMEGGITKNDKLDTITICDVLDTPERKKQYRITKVDRFDLYEQRQLTRHHHNLKEELNVYCNRLQKSIDLVFPEFNTLFSSKYSIVYMNLLKTFGSAEAIASTDIRTIRKCFEIKGKGGRISLTPEKLKECAKNSIGISSEVETIQIKHLVSQITLIKEQIAEIDKKIEEFSIKNNSPILSIPGISHFSGTSILAELGDIGNYSKPSQIIKFAGVAPYHYESSQYNAQHTAITKKGSKYLRKTLYQIILPVINNNPVFKKYYLLKISQGKGHRCAQGHCIRKLLRIIYHLLETGQSFDPALLR

SEQ ID NO: 348809 - protein, 451 aa, unidentified
MGIDVSKGYADFLLLDNEAKVLEKGFQLPDNKAGRKKLKELIAAWQQQGLEDLYCGVESTGGYENNWYSYLKSGFGGNKVYACRINPRGVKAVSDASLKRTITDEVSAENIAIYLIKFPEKLDYGTNAQMVNECYKEGRTHLTCIKMQVKQKVQLNNQLEKLLYQYFDEILMYCRHGTPLWLLGMLAKYPTAAEVVKAGAARISAIKGISPDKAKSIIGKAKDNMHTVSPQIGHVIMVTAKEMLHKAVLINDEKDYLAAIYAQTDDVKLLTSIPGIGTDSAIAIALEIEDINKFETAKKMASFFGVHPTFKQSGDDIWGNHMSKKGRGEIRGVLYMASISAVRFNPVLKQVYARFRAKGMNHYQAAGVVMHKLLRIIYGMLTSKTKFNVATDEENQKNADEKQQKKEEKDKADKKVKQQEKHRFETVTKEAPISKRKEQKLKKQEASQTLS

SEQ ID NO: 348810 - protein, 427 aa, unidentified
MGRLKIVYPVCCGMDVHRDFVIACIATTNSQGVTDYLSKRFSTYSGGLRDLAAWLLANNCKDVCMESTGKYWFPVQNILEKSCNVVVSHPKFVKAIKGKKTDKKDAMWIADLFKHDLVRGSFIPPEEIRQLRDLCRYWVKLTAYNTGEKNRAQNCLTVSNLKLDSVFSNVFCKSASAIISHMLEHPGEQFPVAPFVHPRCKSPIEDIQAAVDGAFSPWQAEKLMVIRTHMDDLASLKQSLEALIFKLAQPFTRQIELLLTVPGISEPMTAIRIIAEIGADMSQFESSKHLCSWAGLTPQNNESAGKKKTTRIGKAGQYIKPLLLQCAIAACNPRSKRYPQILAKYQQLYKRRGKKKARIAISRRLLTAIFHMLLNDEPYAPFEASARHTIPDSRVLTPDQALALLRANGYIIQEPPVLAPAGIASSG

SEQ ID NO: 348811 - protein, 394 aa, unidentified
MDAAGRVLARKRLPEGVAGIARLHALIGRELGPDAGDDAEVVVGIETDRGPWVAALVAAGYTVFAVNPLQASRYRERHGVSGAKSDRGDAHMLADMVRTDSHQLRAVAGDSPGAGAVKVVARTHKTLIWERTRQVQRLRHQLREYFPAALAAFDDLDAPDALELLARAPDPARAARLTRAQVSAALKRARRRDITGKATAIIAALRSDQLGQPEAVTAAYAVTARSLIAVITVLNEQVKTLESQVEANFGRHPDAEIYVSQPGLGSILGARVLGEFGDDPDRYDSGKARKNYASTSPITRASGKKKVVAARFIRNDRLTDALMAQAFAALTASPGARALYDAERARGAGHNAALRKLANRLVGILHGCLKTRTLYDEATAWGHRENLPQSSVAA

SEQ ID NO: 348812 - protein, 474 aa, unidentified
MTAKTKAKPDLKAIPMLLNESMYIGVDIGKFKHVAGFVSTTLLQRHQRFESCPAFTFEQSREGFQAFLDRVRAFVPLEHCFLLMEQTGHYHRALQQYLVEQDLPVYVIHVQRREAGMIKTDKRDALGLANQLYNQLELGVQVTDKLQVVHRAIPPTEAAAQLKGFMRHRYELVNEETQRRNKLTAICDEMFPEFTHIFRDPNRPIALDLREKFPTPQAIATASPIALREVRRRNHPSEAQLIQLQACAAQSIGTKNVARQRGLVLEQSLLIKELRLIQEHMERLDTEICQIVEHSREGQILLSIPPVSPLFAAAILSTLGHIANFPSAGHLKSYFGWAPKRAQTGVSFDRTNLTRGGSREMKKTMYLVAWQAIQTETEWATLYKRLIPRLCSYDERTQSYQGKGKVLGHIIGRLITLIYALLKQDDETLSHLAPGTKPPEPVLYDPEIHHQHRMGHYQPLKKKQSGNRIVLVQQ

SEQ ID NO: 348813 - protein, 367 aa, unidentified
MSQPIVVGLDVHANSITAAILEADQDEPEVITLPADLMKIRRLFRRLSDRGPVRSCYEASGAGFVLQRVLASDGFACEVIAPSLIPRKPGDRRKTDRLDAVMLARLYRSGHLTAVHVPGEDHEALRRLLRLRYTYHTYCTATMHRISGILRNHGHIYREGRSTWTKKHRQWLAAIRHSLDGPLATALAMELEHLEYLESQQNALDAELKRFAQQPQYRRLCEALCCLRGVKTLTALTLLCEIDDIRRFPSPRGLMAYFGLVPSERSSGLKERRGPITKAGNIHVRRLLVEAAWNNHHRAGADLILNRRRQGQPPQVVAIALKAQHRLYKKFWRLDQRKHRHVAIVAVARELCGFIWAILNAAPQATT

SEQ ID NO: 348814 - protein, 392 aa, unidentified
MRGPVSETQYLAVCTTRHEAEGDRPVTHTNRTTLAATLAPSTLPAMVGLDLGDQYTHFCVMDRGQQVLERGRFRTTPEAVREAFAERHRSPVVLEAGSQSPWISALLGELGFDAMVVDPRKIDLISRSHRKTDTKDAELLAELALGVPRLLGRVTHRKPSEQAALTILRSRDLLVRQRTSAVLHVRGTCKAAGVRLRSCSSKSFHRQVLEAVPERLLPALEPVLAVLSALEEQIKVCDKKLKQLTAEYPVTSLLQQVNGVGLITSLGFVLTIGDPSRFQKSRDVGSYLGLCPRVRQSGDSNPQLRISKCGDPFMRRTLVQAAHYILGPHGRDSDLRRYGERLHQRGGKAAKKRAVVAVARKLAILLHRLWMTGEAYDPLRNSTALLASEGRA

SEQ ID NO: 348815 - protein, 430 aa, unidentified
MKSQLTLQSDGEFAAFIGIDWADTKHDICLQAADGVQREFAVLPHRPADIDDWVVTLRHRFHGRPVAICIETSRGALVYALQKYDFLVLFPINPATLAKYRQAFKPSRAKSDPTDAQIALEILMNHRDKLKPLRPQSSGIRTLTLLLEERRQIVDEQRRLTNRLISNLKQYYPLAHEWFENKNTTLFCEFMARWPTLKQLRQARRKTLEAFFREHNCHHHKLVEERLASIKNAVPLTEDPAIIRPKQLLVESLVEQLRITLKSIARFDAEIDALAPTLPDYDLFRSLPGAGPTLAPRLLVAFGEQRDRYSSAAEIQMYAGIAPVTERSGKQHWVHWRMQCPTFMRQTFVEWAALTIPRSYWANAYYRQQRAKGAAHQAALRALAFKWARILYRCWLTRTPYDESKYLTALKRRGSTLLSLPVLTEAAQTA

SEQ ID NO: 348816 - protein, 437 aa, unidentified
MRRKKSKASKRVNLQSLPVIHPDAAGIDVGAKEHVVAVPCDRDERPVRTFQAFTPELHELAAWLKRCGIRSVALESTGIYWISLYEVLEQHGFEIRVVNARHVKNVPGRTKTDVLDCQWIQKLHSFGLLNGSFRPDQQIRKLRTYMRLRDNLVVNSTQAVHHMQKALFEMNVQLSNVISDIVGETGLRIIEAIIAGERDPEQLAALCSTRIKASRQTVAKSLHGNWDEALLHCLKTALETYHFNQEQIQHCDGYIHRHLGQFESRAQLPSSPKDLQGQLHRVCGVDLTKIPAIKEQSAQIIISEVGLDMTKWNTEKQFSSFLGLCPNNSISGGKVLRRATRKVYNRAADTLRLCAQSLTHSKSALGAKYRRLRARLGAPKAIVAMAHHLARLVYRMLRYGDKYVEKAIEHYEQKFRLQRIKWLKKEADSLNLQLVAV

SEQ ID NO: 348817 - protein, 356 aa, unidentified
MQNKSSKFLNFSGHNVYVGLDVHKASWAVTILVDNIEHRTFSQPPDAIVLYNYLVKNFPGADYFSAYECGFCGFHHHRKLKELGIDNIVINPADLPVTDKEKTSKRDPLDSRRLARALLNHQLKAIYVFDPNHEQFRTLNRMRWKAAKEHRRVKNRIRSFLLYFGINPPAELNPEYWTTAFVTWLKQLKLPDQAGTLSLGYLLNSFQSTKDHLLDLSRHLRKQVKILYPNIFNRLMTVPGIGPINAMCLIAEIGDINRFKSCKQLASFVGLVPRSHQSGSKDPDCSLTYRSNKYLRSALIESAWMALRSDPALLQYYKEKIARHKAQIVITKIAHKLLNRIRNVWLYDKSYQAGVM

SEQ ID NO: 348818 - protein, 414 aa, unidentified
MKIVYPICCGVDVHKRMLVATIASTDSNNMTMYTTETFLTSNSELEQFRNWLISNQCFHVCMESTGKYWIPVFNILEKDIHVILTHPKYVRAIKGKKTDKKDSKWIADLFKFDMVRSSFIPPAEVRAMREIARYRFKLICMRSSERNRYQNSMTISNISLANILSDPFGKTSTLIMDYILSSDTFNEDYCRSLIQKSAKKKTDLILDSLNGFKIQSDQHFKMKVAKAHMDYLEQKIIATETELFTRVHPHYPLVQHLAEIPGITELSAALILAEIGVDMTVFEDAKHLTSWAGLTPSNNESAGKKKSVRIAKAGQYIKPLLVQCALAATKSAKEPYFASKYLNLKKRRGHKKAIIAIARMMLVCIYHMILTGETFNPSDYEELQNPKPARQEMTVSNALAFLEAQGFDISKLVV

SEQ ID NO: 348819 - protein, 354 aa, unidentified
MNEDKYIGMDVHQASIVCAVHNPAGKCIAHSIIETKAETVRDFLRGLSGTLHATFEEGTQAHWLYELVRPLVSELIVCNPRRNHLLKEGSKSDRVDASKLAELLRAGLLKSVYHGAPAVRPLKELAHAYDHLTADRVRVMSRLKALYRARAIPCAGTTPYSQARRGEWLAQLEAGAGRFRAEWLYAELDAVSGLRRAARNRLLGEARGMPAYKLLLNIPGLGPIRVAQLIAAVGSPHRFRSKRQFWAYCGLAVVTKSSAEQELVAGRWVRRERAAQTRGLNEQFNHRLKAVFKGAALAALKDATFKRYYERLRARGLRAEVARVQVARKLAAVSLAVWKRTQEYDESKVLKQAA

SEQ ID NO: 348820 - protein, 366 aa, unidentified
MLQEAELSGQADSENNLGGSSETMYYIGLDVHKKTISYCVKDAAGCVHGEGKIGSTRRELDAWIRILPQPRMMAMEATIFTGWIYDHLLPHADKVKVAHPLMLRAIAAAKRKNDRIDAAKIADCLRCDFLPECHMASTAIRDRRRTLRYRNLVLRQAVQMKNRVSGLLMETGVSYDKLRLHRMGYFADLMSSSDEIGDSIRPLLKICREHIDRSIKLDTGLLRSLERDPLLTDRLRRLRTVPGVGPITALTWALEVGDTSRFHSIKQAISYCGLCSSEKSSADKMMRTPISKQRNKHIQQVLVEAARLAPRYSEELALLYERERQRGNSNRATLAVARKMVAHMLAVERRNTDFVPAGQFKRTSAA

SEQ ID NO: 348821 - protein, 422 aa, unidentified
MSISKLALDASSQDYMNKKSVTYPVLKLYFGGVFMYLIGIDISKYKHDCFIATEAGIPIKAFSFDNDRLGFDLFLETLTSLDQSQEIRIGLESTGHYGSNLKQFMCASGYTYLEFNPYLTHMFSKALSLRRTKTDKVDAKTISSMLGSVDYKTLHTRFYHINELKQLVRYRHVQMMNRSKVLIEITNILDRIFPEFKPFFNERLSGTAIFILKKFKSRERISKLSNKDYESIKSYSKGKISYVRVQKLKSLALSSVGYETKSDLLLLKLAIKHYEDLSDTLECVDEEIISFMRDIPQTLTSIPGVNLISAAIIIAELGDFKNFTNPAQVISFAGLDTSVNQSGTMETRGHLVKRGSGLLRMTLWQITFSSLRLNPKLYDYYLKKRAEGKHHKVAMVHCVRKLIRTLYYLGVNQLTFDHSLFK

SEQ ID NO: 348822 - protein, 370 aa, unidentified
MSNATTFVGLDVHARSVKACAFVPETGETIRKSFGYEPGEIASWASSLPQPARCVYESGVTGFHLCRELRSMGVDCVVGAVSKMHKPAADRGRKTDRRDAQFLAVQLALGVVTEVHVPDAECEGARDLARALADARDDAVRAKQRLSKFLLRHGLVYDERNAAGQRRNRWTGDFWAWVGRIDLGDSAAMATLDHYCVRVREADAAKAALEAKVKELAQQPRWKPTCDALKCLKGIDAVTAVSIACEADGFARFAAASGFAAWVGLVPSEHSSGESRFRGGITKAGNKHLRKLLVEAAWHYKGASRSPKGLAKGQIVDEATRRHANAGVRRLVDRRRAMDDAGKQSSVANVAVARELACWCWAVGRMAEGA

SEQ ID NO: 348823 - protein, 364 aa, unidentified
MRKVSKRALQMEAKHNSAPAMTVGLDLGDRFSRYCLVNAQGEVVEEGRIRSSEEAMRRHFEGQLRLRVALECGTHSPWVSRLLSQLGHQVVVANARRIPVITASTSKNDRNDAQQLARLAAYDPRLLSPLKHRSPQRQQDLNLIQVRATLVRARTMLVNALRGLVKSAGGRLPSCSTESVAVRGPAHIPPALAAAARPLLEQMVALNGQIAGLDREIEKLREKYAEIGILRTVPGVGPVVAAAYVLTLDSCDRASNRAAGAWLGLRPRQKQSGDSDPQMRISKEGDRYLRSLLVQSAQYILGRFGPDSALRRWGLKLAQSGGKRGKKRALVAVARKLAVLLHSMWRSGKRFQPFPQPAATAVVA

SEQ ID NO: 348824 - protein, 341 aa, unidentified
MNITTIGIDLAKNVFQVHGTDERGKAVLTKVLRRSQMMQFFAQRPPCLIGMEACGSAHFWARKLTALGHTVKLMAPQFVKPYVKTNKNDARDAEAICEAVGRPSMRFVAIKTPEQQALLALHRARQGLVRARTAQGNQIRGLLAEFGCVIPKGRRHLESSVPQMLEDAENGLAGMSRELFARLLEHLRHLDTQVLALEAQIKAWHREDAASQRLEQIPGIGPLTASALVASIGDARNFKNGRQLSAWLGLVPRQHSSGGKSNLLGISKRGDVYLRTLLIHGARASLRIAKPGHWGTALAERSNKNLAAVALANKNARIVWALLAHGRCFEAGYRALRSQAA

SEQ ID NO: 348825 - protein, 401 aa, unidentified
MNAVGIDISKGKSMVCVMRPFGEVVLEPFEVLHTAQNLNDLAGKLKALDGETRVVMEATGNYHKPVAFVLHDAGLFVSVVNPVLIHDYDNNSLRRVKTDRKDAVKIANYTLDKWTRLRQYLPEDDTRLALKNCYRQYQQAVAIRTMLKNNLISSLDLTFPDANKLFSSPAKSNGCEKWVDFIGDFWHSECVSSLSGNAFAKKYLKWCQKNGYIFTRSKSDEIYACAVNAASLPKSPTSKLLIQQQVTQLKSVSRSVAAFQQEMLRLSRRLPEFDTVMEMYGVGSSLGPQLMAEIGDVRRFSSKKSLIAFAGIEPQPNDSGKIVGNDKGISKVGSAVLRRTLFLIMSVILQTQPQDEPVFQFMNKKRSEGKPYKVYMMASANKFLRIYYARVKTVMDSEYSQ

SEQ ID NO: 348826 - protein, 403 aa, unidentified
MNSVGIDISKGRSTVAVMRPFGEVVISPFEVRHTDSELSELARQLKSLDGETRVVMEATGNYHAPVAKLLHDAGLYVSVINAKLVHGYGNNDLRRVKTDKKDAVKLANYGLDRWLTLPRYIPEEDTRLLLKNCYRQYRQYSKVQTVLKNNLISLLDTVFPNANRLFSSPIRVDGSEKWVDFVAEFWHCRCVSEKSERAFTSKYLRWCRKHGYNFREAKAHTIYAEASGHIGVMPKSETTKLLVEQAVSQLRATSTALAALKHEMQSLASQLPEYPVVMDLFGVGPTLGPQLIAEIGDVRRFYSKKALVAYAGLDAPPNDSGDVTGRHKSMSKIGASSLRRTLFLVMSVYLQTAPLDEPVYQFMDRKRAEGKPYRVYMMASANKFLRIYYATVKAYLESLEHTA

SEQ ID NO: 348827 - protein, 334 aa, unidentified
MQNITLIGIDLGKHSFHIHCQDKSGKVLLRKKFTRTKLIEFLAGCASSTVVMEACAGAHFMARRIADLGHEAKLISPQFVRPFVKSNKNDFVDAEAICEAASRPSMRFVQPRTEAQQAMRALHRARESLVSDKVKTTNQMHAFLLEFGISMPTGVAVVKRLSTVLAENELPPYLAQLLMRLHAHYIYLVGQITELEIALEQELSRDEVGQRLQTILGIGPITASVLSSQLGDGKQYSCSRDFAASTGLVPRQYSTGGKNTLLGISKRGDKNLRRLLVQCARSFIQRIENQSGRLADWVRALLARKHSSVVCCALANKLARIAWAITTQQTVFER

SEQ ID NO: 348828 - protein, 329 aa, unidentified
MKEFLIVGVDISKSTLDICFKPMNLFLKIQNDVKGFKQWSTKLKKIGYTNASVLVIMEHTGQYTYRFETFLRKNSIAYCKISALQIKRSMGVTRGKSDKMDAERIAEYGWLRRDILTADQPLNETTRRLRSLLGLRAKLVKDRSGYISRLKEMKASGSCTASSFEAQVQQQLIRTLTSAIDKTEREIKLLINTNEPIRKTCELLRSIKGIGWIIAAYMIGCTENFLKFSNARKFNCYAGLAPFKSESGSSIRGQSRVSHLANKEAKTLLNLGASCAIRCDRELKKYYQKRVAEGKRKMSCLNIIRSKLVARMFAVIKRQTPYQPLPVAA

SEQ ID NO: 348829 - protein, 343 aa, unidentified
MDHFAGLDVSVKETSVCIVDDTGRIAKELRVASEPDALLRVLGNPAYRFKRIGLEAGPLSQWLFGALAEAGLPVICVETRHMRAVLKAQINKTDRNDARGMAQMMRAGLYRPVHVKTLRSQKLRMLLTHRKLLQSKAIAVDNDLRGTLRNFGLKVGVVGTVKFEARIKELVESFPDLAELVEPLLIVRRTLREQIGILHRRLLAIVRNDDVCRRLMTIPGVGPVVALTYRATVDVPARFRNSKAVGAVFGLTPSRYQSGEIDRPGAISRCGDEMMRVMLYEAAHIMLVRLAKWSWLKAWAMKIARHRGMKKAIVALARRLAVIMHRIWVDGTEFRWSREVTAA

SEQ ID NO: 348830 - protein, 443 aa, unidentified
MSRAKALTRGDRRRNERLVRLRSIVRRDYAIVAVDLASAKQAAVVADHDSIVLGRRMFSGDAWVIDDILDWAEPIAAAAGFAGVVLGCEPTGHRWKPVLDRARARERELVCVNPMLVHRGREEEDFTRDRSDFKDATIIAKRVAELRCYVPYALEGHWCRLRHLGARRNDVLVAAGSARLRLRDLLECAWPAVLSAASEPLDALTWRAAMAVATDPEQIAAMSLDAVAAAVREQLPRWGGARRNLRILRAIHAAAQAPGGVATERAAACERAAYALDDWHRALDQLADVEARMTAVLDTLGLTELVTTIDGLSAVGAAAILAETGDPARYDCARTWAKHAGLCPRANESGNFHGATTVSRRGRPALRTAAWRAIWGALRHNKIYADRYTHLTTRPGNPLRDGQARAAIAAALLRQLFVVVTRRVAWDPALAAAPAEGVAPQAA

SEQ ID NO: 348831 - protein, 316 aa, unidentified
MSGQPIYAGLDVSKARLDVAVRPSGEFFSAANDKPAVSRLVKRLAALDCTRVVVEATGGYETIIVAALYAAGVPVVVVNPRWVRNFAKGLGWLEKTERIDAKLLASYAEHAELKHQQLPDEATRRLAELCARRIDVLEMMEAERNRLEHASSAVRRAINSHIDYLRKQLKRIEHDIDGAVRGSELWRHKDELMDSVPGVGPTLRACMLAWLPELGQLNRGEAGKLVGVAPLPDDSGTIRRVRRIFGGRAPLRKVLYMATMGAMLHNPQLRAHYDRLRARGKLHKVALVATMRKLLLILNAIIKTDTPWRESCLESA

SEQ ID NO: 348832 - protein, 383 aa, unidentified
MQPTQEHKCTTGENVLAVSLELSQSSWKVALHDGKRDKPALHSVKSERAGERLKQVLKVIRETQKKWGLLPGIRVVVVYEAGQDGFWISRALAKVGIEALVVDGASILVPRQARRAKTDRLDAIALVMSLRSWLAGERGRMRVVHQPEPDAEAERHLTRERGQLQKEVQQHRDRLVKLLRTVGCWDSGERDLPERLKCGELRCYDGTALPRELQQRLEHECERASLVQRQLAQLEASVVAQLPDAQQQRIAQLMQLKAVGRVGALRLVLELYWRNFDHRRQVGACVGLVPQPYDSGESRVDQGISKQGNRRVRALLIEMAWMWLRHQPHSALAQWFTQRTQGSGPNKRGRRIAIVAVARRLAIALWRYLEHGVVPPGAVMKAQ

SEQ ID NO: 348833 - protein, 341 aa, unidentified
MDHYVGIDVSLEASSICVVDSNGKIIREGKVASEPGALIEWLRNLKLQLTRIGLEAGPLSQWLYAAMRQAGLAVELLETRHVRNALETMPVKTDRNDARGIAQLMRLGWFRPVHCKSIGAQETRALLTARKLVQVKLHDLEMSLRGILRGFGLKVGPTTPVRFEGRIRELVAGHPSLEAIAESLLAVRVTLRREFERFEKQLRTMAGCDTRVRLLTSVPGVGAIVSLTFVAAIDDPTRFKSSKEVGAYFGLTPTKYQSGETDIDGHISKIGDAGVRAALYEAAHIILTKPLKGCTALKSWGMKLAKRGGMKKAKVAMARKLAVIMHRMLADGTSFRHVAAA

SEQ ID NO: 348834 - protein, 341 aa, unidentified
MQITTIGLDIAKNVFQVHGIDAAEKVVVRKQLRRSQVIAFFKDLAPCLVGMEACATAHHWARELANLGHEVRLMPAKDVKAYVKRNKNDAADAEAICEAVRRPTMRFVQVKSAEQQAHLMQHRARDLLMHQRTQLINATRSHLAELGIIAPQGREGVKELLAIIANEADTQLPNDARASLIVLAAQLQALQTTIGAIEKRIVKQHRASKDSKRIQTVPGIGEIGASAIAATVTNPRIFRSGRDFAAWIGLVPRQMSTGGKPKLGPISKQGDRYLRRLLVVGAISVLRQAKLHPGKFPWVTQMLARRPFKVVAVALANKMARTAWALMMSGKTCRAARYAAA

SEQ ID NO: 348835 - protein, 350 aa, unidentified
MLIIGCDYHPSFQQISFIDTETGDYGERRLKHKEEAEQFYRDLRALGRKVRIGLEASGYTRWFERLIEELGFELWIGDAAVISRQRVRKHKTDREDAELILRLLMENRFPRIWVASGEERDLRQLLWHRHRLVQMQTRLRNQLHAVALNEGVQLKKRMWRPKGRAQLEALELMPWARRRRQELLHLLDQVDAKIAELTAAIEQEAEKRPEVMRLMTHPGVGALTALAFVLIIGTPDRFPRSRQLSSYLGLVPKEDSSGERRRLGHITKQGNTLLRFLLAAAAQATVRADPDWRRRYLHLTMRHERAVAKIAMARRLAVRLYWMWRNECDYAQLPKLGSHVGQPGNPHGRQ

SEQ ID NO: 348836 - protein, 315 aa, unidentified
MQKLLNISVDVAKDAVVVGCDEQGSAVRSIPNQRTALTAWLASLPGPSRIGMEATGCYHELLADLAYQSGHTVFVLNPKDTRHYAQAVGLRAKTDRVDALLIARLIAHEHARLHPYHPATCAQRQLGRLLRRRAQLVKLKGALKQSMRGMTGLVRDTSALVERMDALIAKLEQRMDALIASMPGTREDRRRLETIDGVGAVVSAALIEPLTRLPFHSSDAFVAFAGLDPRPRDSGHKVGKRRLSKRGPAELRRLLFNAAMAATRTHVWKPIYEHYRARGLPTTAALVIIARKIARIAWSIHRYHTNFDPQRLKTT

SEQ ID NO: 348837 - protein, 342 aa, unidentified
MYLYCGIDLHARLLAICIVDQAGAVVLQVQIPADKQLLLKTLAPFRPDVVVAVECLFAWYWVADLCREEKIPFVLGHALYMKAIHGGKAKNDDIDAEKIGRLLKGGNIPVAYVYPKGLRETRDLLRRRMYFVHQRAALITHVQIVNAQYNLPEFSKKLIYAKNRAELKIAERFDNPQLRKSVEVDLALIDALDERIAEVELHLERTAKVEDPQTFHLLKTIGGVGKILGLTLLYEIHDIKRFPDVGEFLSYARLVRCRHESAGKKLGSGGHKIGNAHLKWAFSEAVCLLVRHFPVVKIWQARHEKKHGKKKTLGILAARLGRTVYHMLRKREAFDVKRFLGQ

SEQ ID NO: 348838 - protein, 387 aa, unidentified
MYFIGIDISKFKHDCAIIDEAGDTVTASWSFANNCEGFSLLKQLLDALDGQKKIGFESTGHYGHNLKLFLEANNFSFMEFNPLLVSKFVRSKSLRNTKTDSLDAVSIAQYLMTVEYKPYPPSFYHIDQLKSLTRFRDSLVRQHSRQLVELTNILDKVFPEFKPFFDGRFSATALYILTHYQSPEKIANMNAKSYEALRKKSRGKFSMVKFAQLKTLAKNTVGRSDAFLLKQMEITIDIENQLDAKIDEIESQILECIRALNPPILTIPGIGELTAAIILSEYGNINKFENPAQLLSFAGLEPGYYQSGLAEHQGHMVKHGSSHLRYALMNACLPLITYEPVFAEYYAKKRAEGKPHRVALTHVAKKLLRVIFTLQTKNISYDPTLIR

SEQ ID NO: 348839 - protein, 404 aa, unidentified
MTVTIGIDPHKGSHTAVALDGREDVLGQLRLRSGPDQLARLAEWANAWPDRTWAVENASGLGYLLSQQLVAAGERVVDVPPKLAARARLLDNGDANKNDPNDARSVAVAALRAKRLSEVAKEDHAAVMRLWSRRRKDLSSARTRVANRLHAVLLELVPGGYPGQIHASKVAGLLEALEPAGAVATARAELAEELLGDLRRLDGQLAELKERLAAVVAASGTTTTEVFGVGPVVAAMVVGLTGDVGRFANRAHFAAYNGSAPIEVSSGEKKIYRLSMRGSRQLNHALHMAAVTQVRFSHTQGRGYYERKLAQGKTRKEALRALKRRISDAVYAAMVADARRDSQASGGPGGQTGNGSIACATGSHPATPALRPSHSRAKAKASPARKAAHPVNRAGNQKKIRKAS

SEQ ID NO: 348840 - protein, 406 aa, unidentified
MMNAVGIDVSKRKSTVTILRPGDEVVLSPVDIPHTRSSINKLIGLISGLDGDTKVCLECTGRYYEPVASSLSDAGIFVSAVNPLLISMFGDESLHAVKTDKADSSKIARFALARWSKLPQYGLMDETRNQLKTMNRQFGFYTDRKTAMKNNLIALLDQTYPGANSFFDSPARDDGHQKWVDFVYTYWHVDRVRGMSLNAFTRDYQKWCKRAGYNFSPTKAKEVYEASADLIAILPKDDMTKMLIRQAIEALNAVSSAVETLRIKMNETAATLPEYPVVMGMRGVGPSLGPQLIAEIGDVTRFEKRGSLIAFAGVDPGKDDSGDRNRKSVPTSKKGSPHLRKTLFQIMDILIKTAPVGDPVYDFLDKKRSQGKPYYVYMTAGMNKFLRIYYGRVNEYLAQLEEAEES

SEQ ID NO: 348841 - protein, 351 aa, unidentified
MIIIGVDYHPSFQQIAFMDQETGECGERELNHSDGEAERFYRELKERGVSVRVGMEATGHARWFERLLAELGFELWIGDPAEIKTKRVRKQKTDREDARLMLKLLLENRFPRIWVPSPENRDLRQLLWHRHRLVQMRTRIMNQLQAVAMNEGYRWKKKLFGQQGRALLEKLSLAPWASRRRKELLELLDQLDPKIAELTAAVEREANKRPEVVRLMTHPGVGPITGVAYVLVIGTPDRFPCGKKIGSYTGLIPCEDSSAGRQRLGHISKQGNTLLRFLLVEAAQAAARCNADWRRRYMHLMMRREKRIAKVAMARKLAVRLYWMWRNNWQYSQLVEFGSNAGKLGTVHGMK

SEQ ID NO: 348842 - protein, 416 aa, unidentified
MVDDHQWFVGIDWATRSHSVCLLDAGGRRVGEREFAHGGTGLTELRDWLLEKTKAAPRQIAVAIETPHGPVVEMLLEHGFVVFAINPKQLDRFRDRFTVAGAKDDRRDAQVLAGSLRTDRQAFRRLASNNPTVIELREWSRIADELQQERTRLANRVRQQLWRYYPQAAELTDDVADDWFLALWQEVPTPDRAAKAAEKTITAILKHHRIRRLDAATVLKTLRKTPLFVAPGTAEAACAHIRSLAARLGLINHQVKEAQQSLDRLCIKLEEEESPSGQSFEQCDVMILRSWPGIGRIVLATLLAEATEALHRRDYHALRALAGVAPVTRRSGKQRFVIRRLACNGRLQLAVYHWSRVAIQHDAAARRRYDALRQRGHGHARALRSVGDRLLYALCTTLKRQTPYDAGYNNAQMMKG

SEQ ID NO: 348843 - protein, 376 aa, unidentified
MQVVHERCCGLDVHKKNVVACVLSSEGEQVRTFGTMTRELLGLLDWLQERGVTCLAMESTGVYWKPVYNLLEGQGIELMVVNPGHMKAVPGRKTDVKDAQWIADLLRHGLLRASRIPERPQRELQESIRYRRSLVEMRADEVRRAAGVTDSDQMAELARGKLQKKRPALRLALEGSIDQHQRSMIQRLLRHIDFLEQGIEQISAENEARMRPFEPAMAAVQQIPGVGPMTAQTILAEVGTDMTHWPNHKAFASWAKICPGNNQSGGKRRSSSIGHGNQSLRGSLVEAAQSAVRVKDSYFAALYHRVKARRGPKRALVAVAHAILVVIYHMLKDGTVYQDMGSDYFDRLDREAILKRTVRRLENLGYKVTLEEPAAA

SEQ ID NO: 348844 - protein, 399 aa, unidentified
MMYQQFCGIDVSKDSFDITLLNSNGEIKLQDKLLMNRDGFNALLKHLSSYPKEKLLVAMKATGIYHLPLLSFLLENSFKSVVVNPILIKSFIGSTTLRKTKNDKKDATSIALFSLKSYQSLHLATSDAIENIRPLIRERESLSKEVARLKTEIKAILTQLFPELSKNTNIFTRSILNLLLKAPSRKAIRNLKKQKIQKILDNTSGNKVRISADEILSLAKNSIAISDKYLEKVLTSKIRRLIYIQDELSFLDTELQNSLEDTDINNDIEILQSIPGIGSVTSKNFMIEVSSVEKFKSVKQLCAFIGIDPSVKQSGTSINYRGKISKRGNANLRRTIWQMAIGVIRSCDKFNDYFSKKREEGKKFKQAVIAVANKLLKTIFVLLKNKTKFDENLALGVSK

SEQ ID NO: 348845 - protein, 362 aa, unidentified
MRIIGCDLHARQQTLAMLDTATGEVVHKTLSHEGESVREFYSTLPGPVRVGIEATGSMKWFLRLMEELGIDCQVGHPATIRAAEPRRQKHDQRDAELLLRLLVENRFPSIWQPSQELLDLRGLLLHRHQWVRLRTRIQNALQAIALANGLRRGSSLWSESGQRAIASLPLATHTAQRRSELQAMYARFEAEIEQLNQQVLEQAGQRPTAGLLMTHPGVGPITALATDVFLGDPKRFSDGKALASYIGIIPREHSSGGRQRLGGLSKQGNPLLRFLWCEAAAHAVRRDPELQRFYRRKLVQKGLGKARVAAARKLGIRLWIMLRDKIDYHEFCRRGQMQQRSGDACAGMPRGRYGAKSHRLID

SEQ ID NO: 348846 - protein, 454 aa, unidentified
MGFEDEAEQSIGRPCRQTNGGSKRPSELTSSIVPRGTSCHHAVELEFPPIAFDPAISCRYGFPGPAEFGAINPDNGMDRPCSNRVNGNAAEAQLIRERERAMTDIAMHNDRIATIGMDLGKRSFHLIGMDARGKVIMRQQLSRGRFERHMANLQPCLVGVEACAGAHHIGRRLSAFGHNVRLIPAQYVKPFRKGQKNDYRDAEAIAEAVQRPTMRFVPIKSAEQLDLQALHRIRSRLVGHRTAVINQLRGFLLECGVIVPQGPAMLRKILPSVLAQRTDVLSPRMIRLIEELADDWRRLDDRVDAVTSEVQALARQDEGCRRLMSVPGIGALTASAVVATIGNGAAFTKGRDFGAWLGLVPKQLSTGDRTILGRLSKRGNKYMRTLFIIGARAVLAKPGSWAKFGLEGWLVGAAKRLHHNVLAAALANKLARIAWSVLYHGRSFARDFEPQSVS

SEQ ID NO: 348847 - protein, 360 aa, unidentified
MISERTSVGLDVHARSVVATGLDSKTGEVFKTTLVPAHDEVIGWLRQLPGPVATTYEAGPTGFGLYRALTAAGIRCEVAAPSKLTRPAGERVKTDAKDALLLAQLLQVGQITGVRVPTVSQEAARDLVRAREDVRGDLMRARHRVSKLLLRHGHVYYGGNAWTAKHQAWLRRIRFDQPGTGAAYEADLEAVEFALARRDRLDAAIAAMAADSEFTAITRKLCCLRGVSTLTGFALAVEIGEWERFTGSSIGAYLGLVPSEYSSGQSRRQGGITKAGNSHVRRLLVEAAWHHKPRYTVGKVLQARWDQAPAAARARAHLGNQRLHRRWTTYTARKKKHTVATTAIARELAGWCWSLATLPD

SEQ ID NO: 348848 - protein, 376 aa, unidentified
MERGSLMLNTTTFVGLDVHARSIKAVALDAMTGEVRSATFGYDSAEVAGWVSSVDPSAKCVYESGVTGFDLQKRLSSMGIDCVVGAVSKMIKPSADRRRKNDRNDAEFLARMLSVGNVVEVWVPDDECEAARDLVRALDDARDDLKRCKQRLSKFLLRHGHAFSETTPSGRRKGNWTAAHWAWIKSISFAEKADDDVLAYYIDATRQAMEDKARLERLVEAEASKPRWKRRVDSVRCLKGIDVMSAADLVFEAGEFSRFKNARSFAAWIGLTPSEHSSGESVRQGGITKAGNKHLRRVLVESAWHYLGCSPHSKDLAKGQAPDPGARHHAAKGVRRLVGRRAAMLERGVHKNKANVATARELACWCWAIGCMVENG

SEQ ID NO: 348849 - protein, 310 aa, unidentified
MDAIYVGIDVSQARLDVHVLPSGEAFAVARDGKGLEELIERLRAFSPQLIAVEATGGFETIVAAALAGAGLPLVVVNPAQIRHFAHALGKRAKTDPIDAAVIAHFVEAVKPELRALPDEAQRLLAELVGRRRQIIEMMVAERQREKRAANVRVRKSILRHIRVLEKELPEIDEDIGTLVRGSPVWRKKEDLLVSFPGIGNTLARTLLAEVPELGELTRREIASLVGVAPFTRQSGHWKGKSKIGGGRGSARRALYIAALVASRHNPGLRTFYRRLLAAGKPKMVALIAVARKILTTLNAMLRDKRKWQPA

SEQ ID NO: 348850 - protein, 404 aa, unidentified
MSVHVAPVTSSTIVVAVDVGKTSAVLSVTDAARHRLLAPSEFAMTGSGLTSAAARAMAAAPAAVQVKVGVEAAGHYHRPVLDFRWPDGWEVLELNPAQVAEQRRVQGRRRIKTDVIDLEAITELVLAGYGRPVTDRDVVIGQISAWAVHRSRRVATRSATKNQLLGQLDRAFPGLTLALPDVLATKIGRLVAAEFADPARLAGLGVNRLIRFAATRDLQLRRPVAERLVAAARDALPTRDAVISRRILAADLVLLGDLDDQITVAETALASLLPRSPYATLTSVPGWAVVRVSNYAAALGDPKRWPGPRQIYRASGLSPMQYESAHKRRDGAISREGSVALRRALIDLGIGLWLNEPAAKNYAHGLKDRGKPGGIVACALAHRANRIAHALVRDHATYEPTRWA

SEQ ID NO: 348851 - protein, 316 aa, unidentified
MSEPVYVGIDIAKASFEVAASGETQTLNLGNDEAGHAELCQVLVPLAPRLILLEATGGHEQGLALALAAAGLRVSVINPRQARDFARCMGKLAKTDRIDAQMLRGFAELLDAQGHEPRALADEQQRELTAMVARRRQLVAMLVAERQRLALAHPKAKASILAIMDAIAAQLHDMDGELREHVHAHHADLARLLTSVKGVGPTTASTLLAQLPELGKLNRKQITSLVGLAPVNRDSGTLRGQRHIFGGRADVRRVLYVAALVGTRFNPVLKAFYAALLAAGKPKKVALVACMHKLLIILNAIARTRQPWRDDFAVAA

SEQ ID NO: 348852 - protein, 321 aa, unidentified
MNPVSCVGIDVAKAKFDVALLKPDGKYRSKVFSNNPEGFRQFLDWLEKQEALKAHLCMETTGAYGRSLARFLAQQQLLISVMNPALIHAFGKTELSRAKTDKADARLIARYCQMHQPAPWVPPAEAIVTLQALVQRLDDLLGMQNMENNRLEMAEPAARASIEALLLTIHQQIDVVRRQIQDHMDDHPDLKSQKALLLSIPGIGEATAAMLLAFLSPLTRFHSAKQVVAYAGLNPRIRESGQWAGKSHIAKAGNVLLRKALYLPAVVAKRYNPAIAAFCDRLLSRGKCPMQVIIAAMRKLLHIAYGVLKSGQPFDPEKALA

SEQ ID NO: 348853 - protein, 345 aa, unidentified
MKIVGCDLHTRYQQIAMLDEETGELVERRLEHGNGEAKEFYTHLSGSVRVGIEATGHTRWFEQLLTQLGHELWVGDAARIRAAEVRKQKTDARDAALLLDLLLSGRFPRLWRPGPQERDLRHLLWHRQKLVWMRNAIGNQLHALAMGEGLCRKKQLFTRKGRCELEALRLDKWASRQRQELLHMVDQLDASLAQFDQAVNEQAAANGDAVRLMTHPGIGPVTSLAFVLIVGPAARFERSKQLVSYLGLNPCEHSSGGKQKLGAISKQGNPMLRGLLVEAGHTAARMDPELRQDYQRLRLRRGGSVAKVAIARKLAVRMYWMLRRQVNYTQLVRTQGSSRATLVQQ

SEQ ID NO: 348854 - protein, 369 aa, unidentified
MKKHITFVGLDVHKNSINVALADEDRNGEVRYYGAIGGTLADLDRLVKKLASSSREFHFVYEAGPCGYEIYRSLTEKGYTCSIVSPSRIGKKPTDRVKTDRRDAMMLARLHRAGELTYVFVPRAEDEAMRDLTRAREDAVKAQRAARQQLGGMLLRLGFRYQGKTAWTPVHFRWLAAQKMPSPSQQVVFQEYIDAIEETTKRVERLTRQIEDLVPSWRMAPVVKALYALRGVSRIVAATMIAEIGDLTRFENPGKLMAFLGLVPSEHSSGQKRRQGAITKTGNGHARRALVEAGQAYSYQARITPPLLKRQEGVCKEVKDISWKCQIRLCARFRRLTAAGKNRNTVVTAIARELAAFMWSIAKQVPISV

SEQ ID NO: 348855 - protein, 354 aa, unidentified
MIIIGADYHPSFQQIAFVDTETGEVQERRLEHPEEAEQFYRDLGAQGSSVRIGMEASGHARWFERLLSELKFELWIGDAAKIRAKRVRKQKTDRQDAELILKLMLKDDFPQIWMPSGENRDLRQLLWHRHRMVQARTRIMNQLQAVALNEGLLCKKRLWRETGRKQLESFPLAPWASRRRQDLLQLLDRLTPTIAELTQAIEREVENSPEAQRLQTHPGVGPLTALAFVLILGKADRFQCGKQIASYLGLVPLEDSSGKRRRLGHITKQGNSLMRFLLVEAAQVTVRSDPEWRSKYFHLAMRRGRKIAKVAMARRLAVRMYWMLRKGWDYEQLNKFGSHAGQPGNRHGVPLNTE

SEQ ID NO: 348856 - protein, 335 aa, unidentified
MEITTIGLDLAKHVFQVHGIAADGLVVLKKRLRRGQVHAFFASLKPCRVGMEACATAHFWARQLRQLGHDVRLMPAQYVKAYLKRGKNDAADAAAICEAVTRPSMRFVPIKSEDQQAALMLHRARDLLVRQRTQLINAIRGHLAEFGVIEAQGPWNVPRLLAGMEEADLPDPVPGLVRLLASQLEEVELHIHEIDTQITAWHKASPVCQRLAAVPGIGPLVATAIVATVPDPTVFRSGREFAAWLGLVPRQNSTGGKTRLGRTSRQGNAYIRRLLVIGAQSALFCSKATKANPWVQTLLAKRPRLVVAVALANKMARIAWALMARQTTYQAAAAA

SEQ ID NO: 348857 - protein, 418 aa, unidentified
MEVLHERCAGLDVHKKTVVACVRLARDGGVEKEVRTFKTTTADLLALGEWLDGHDVNHVVMEATGVYWKPVWHLLDDGDRELVLANAAHVKNLPGHKSDVSDCDWLSDLEAHGLIRGSFVPNRQTQELRGLLRTRKQKVRERSSNTLRLQKKLEEANIKLDSVISNVIGVSGRRMIEAMIGGETDPVALAALADRRIKAPPEVLCEALRGRVTGHHRFLLGLQLEHIDALDGMIDKIDQQIDASVEPFRAAAGLLTTISGVNQLAGRAIVSEIGIDMSRFETAGHLISWAGLCPRNDESAGKRRSTRIRKGAPWLKDILVQCAWAATRTKATYLHAQFVRIRSRRGPKKAIIAVAASILTAAYHMLKNGVPYRDLGPQHFHSRNKQAQAKRLLARLRDLGFTAEFDSLKPIPDAVVSY

SEQ ID NO: 348858 - protein, 343 aa, unidentified
MEHYAGIDVSLERSSVCVVDSSGRIIREAKVASEPEALVRFFRELGVPLTRVGLAAGPLSQWLHAGLTGAGFAAVLLETRHVKAALSAMVVKTDRKDARGIAQLLRMGWYRSVHGKSPDAQEVRALLVGRKLLQAKLRDVELSVRGILRGFGLKVGEVSKGRFAARVEELVAGHEMLETVIGAMLQAREGLRAEFARLHRRMLAIVRNDTVCRRLMTVPGVGALVAITFETAVDDPARFRTAKAVGAHFGLTPKRYQSGETDVSGGISKVGDAMVRTALYEAANAMLTRTSRVSALKRWALEVARRRGMKRAKVALARKLAGVLQRMWANATDFRWGKEAAIA

SEQ ID NO: 348859 - protein, 342 aa, unidentified
MNHYAGIDVSLEYANICVRDGNGEIVREGKVLSEPAALIGWFGGLGLSLTRIGLEAGPLSQWLYAAMQQAGLAVELLETRHVRNAFKIMPVKTDRKDARGIAELMRMGWFRPVHCKSMEAQETRALLTARKLVQKAMLEVEASLRGILRGFGLKVGKTTPVRFEARIRELVEGHPSLVEIAHALLVVRGGLRREFNGFERRLRALARCDTRARLLMSTPGVGAIVALTFASAIDDPARFKSSKIVGAHFGLTPSKYQSGETDRSGRISKIGDSSVRTVLYEAAHVILSKPLKGATALKSWGMRLAKRAGTSKAKVALARKLAVILHRMLADGTPFAAQPARA

SEQ ID NO: 348860 - protein, 352 aa, unidentified
MQIVSALDVHRRQITFRTVELASGETGRGRISPAAREPVRAWLERFAGQDAHFALEGTTGWRFVVEEIERAGHTAHLADPAETAARRGRKRRAKTDDSDCELQLRLLLGGELPEAWIPPTHILELRTRVRLRKTLIDQRTAWLQRLQAQLFHQGAPPGLKPRTAAGRRELATLALSPAGREVAEMCLRMLDQLDRELAPIDRALHSFARRQPGCRALTGRLYGVGAVTATAILAELGDARRFKSSDDAVRHCGLDVTVWQSDRKRAAGHLSHQGPALLRWALFEAAQCAARRPSPDHAYYLQVANRIDHNRACLSVARKLCRRAHHILRELGDDALAPTASSITTQLVDAAT

SEQ ID NO: 348861 - protein, 449 aa, unidentified
MSDRSGVSRGDRNRNARLARLREAVPVTNAIAGIDLADSKQMVVVTDHESRVLARRVFRRRAWELGAALDWAAARAAAAGFAGVSVAVEPTGHRWRVVGQLATERGMAFVCVQPLMSAWARRAEDLTFDKTDDKDAVLIARLAAQLRCYLPEPVDETWGRLRHLGIRRARLVAESVSQVQQMRDLLECAWPAVLDAARQPFKSTTWHAALTVALARADGGDLHRVTRLGRRRFEAAARRQVARWDAVNPWRKIIDGVFTACADPAGVKALRRGALERVALLLADWRDTQARLADTEQRMVAVLAELGLAELATSITGLSAVGAASVLAETGDPARFTTGRALVKHSGLAPRQKNSGNSTGRTRTTGQGRPALRLAAWRAVWGALKSNPVYAARFTHLTSRDHNKLSTGQAHAVLAATLLRHLHAVITSGQRWDPAIATGGRPGQPLIAA

SEQ ID NO: 348862 - protein, 352 aa, unidentified
METAYDGRQVVGMDLHRRRSVLVRMTEDGRRLGAVRITNSPLELTAAIARAGKSPKVVLEATYGWYWAADTLAAAGAEVHLAHPLGVKAFTYRRVKNDRRDAADLADLLRMGRLPEAWIAPAGVRELRELTRYRHKLVDLRTSCKDQVHGVLAKLGVPVTCTDIFGVAGSAWLDGLGLPQPYAGKVASLRHLTGELTGEITMLSEVIADLLAGDRGYQVIQQLPGIGPVLAAVIIGEIGDVTRFRNAAQLCSWAGLTPRHRESDTRVARGHVTKQGSRLLRWALIEAVQHVPADTLAGGVKAAIIARRGKEAKNIAKVAAARRLLTLVFYGMRDGQIRCLAGHRPDPPARPA

SEQ ID NO: 348863 - protein, 470 aa, unidentified
MAFVGIDWADMKHDFCIQAAGSDQHEFDTRDHSPEAIAKWAYSLQDRFGGPIAICLELAKGPLVCALQRFEFLVLFPVHPSTLAKYREAFVPSHAKDDPTDAEMALDILLRHPEKLQPLKLQSTAMRTLATLVEERRSLAGDVNRITNRLVSALKQYYPQVLDWFEHRDTLIFCGFLSRWRTLKHVKRARRSTLESFFHLHNVRRAYLVEERIQGIRAATALTEDESVIRPNQMVLQAKVEQLRALLQSIDHFDAEIDAVGKSLPDYDLFAALQGAGHILAPRLLVAFGEDRDRYTNAAQIQSYSGVAPVIERSGNKCWVHWRIACPTFLRQTFVEWVGSTIPRSFWAGAYYQQQRQKGCSHRVVVGALAFKWIRIIYRCWKTRTLYDESVYLKALKLRGSPLLANVSESAKNDLTECLRPRSGYSKLGEIGHTLRVCCNTSHKPFITESFRIAWISGYGNYLARRQAFP

SEQ ID NO: 348864 - protein, 357 aa, unidentified
MIQGPQNLIPRRPYMRFYTHQHQFYCGIDLHARTMYLCILDQEGKIVLHRDIKTNPDIFLKTIAPYRQDIVVAVECIFTWYWLADLCSQENISFVLGHALYMKAIHGGKAKNDKVDAYKIAALLRGGMMPMAYVYPSEMRSTQDLLRRRNHLARKRAELLAHVHNTNHQYNLPAIEKNLGKKGNREGVAKRFPDLCVQKSVELDLGLVDHYDQLLHRIEHEISLIAKQYDADSYFCLGIGRILGLTILYEIHEISRFERVQDFVSYCRLVKCAKESAGKIIGSSGKKIGNAHLKWAFSEAAVLFLRRNPQAVAYRNKLARKHGAAKSLTILAHKLARAVYNILKKKAVFHPDVFFAK

SEQ ID NO: 348865 - protein, 415 aa, unidentified
MHEIQTWFVGVDWASQKHDVWLADANGKRLGKRTFAHSGEGLAQMCDWLVATSGGKPEVIHVAIEVPHGPVVETLLDRGFKVYAINPKQLDRFRDRFSPAGAKDDSRDAETLSSSLRTDRRAFHQVVLADPAIIELREWSRMADDLRADKIRYANRLREQFRRYYPQMLQLGSDLAEEWIFALWEAAPAPAQAARLRQTEVGKLLKRHRIRRIGAAEVLAILKQPALVVAPGVTEAALAHVPVLIESIRLFTRQLKEVHQQLDRLCKLLAEPVASENALQPEQSLIAIIQSLPGAGMIVLSTLLAEAFEPLQRADYPILRKLCGVAPVTRRSGKSRAVTRRLACNPRLRNAIHYLADAARRCDEKSKAKYLALKGRGCSHARALRTIGDRLLYVACAMLKRRALFNPCLQSQKCA

SEQ ID NO: 348866 - protein, 388 aa, unidentified
MDESSITFVGLDVHKDSIDVAIADAGRDGEVRHVGRTGGDLAALDKALRRLVSAGRRLHVVYEAGPCGFVIWRHLIGQGLRCEVVAPSSIARPVSERIKTDRRDAMLLARLARAGDLAVVRVPDQADEAVRDVVRAREDAVREQRNGRHRLKALLLCNGTPCAGKSSWMAAHLRWLATLKLPHPAQQIAMQEYLHSITECTARIGRLEQALRELLPQWHLAPVVQALQALRGVQLIAAMTLVAELQDFSRFASPRQLMAFVGLVPGEHSSGAKRRQGSITKAGNSAARRMLVEVAWHYQHEARVSPIIAKRQDGLPSAVTDIAWKAQLRLSSTFKRLTARRLLKNKAVVAVARELAGFVWAIACEVQASGWRGLAIDQTAGSSASAAH

SEQ ID NO: 348867 - protein, 409 aa, unidentified
MEVLFERVAGLDIGKASLTVCVRTPGPRGRRAQTRTFPTMTRSLEVMRDWLLAEGVTIAAMESTSTYWKPVFYCLEEVMDTWLCNAAHIKGVPGRKTDVKDAEWIAQLLECGLIRPSFVPPADIRRLRMLTRYRVQLMGDRTREITRLELMLEDASIKLSSVAASLSSVSARAMLTALIAGERDPAVLAELAKTRMRRKIPALTEALTGHFDEHHAQLARSMLHRLTLVEDALAELDAVLAQACRPWAHQLELLQTIPGVGEKVAQVILAETGGDMSRFPSAAHLASWAGLAPGVHESAGRRQRPEQQHGNKWLTAMLVEAAGSVGRMHGANYLAAQHARLTARRGRARAQVAVAHSMLVSAYYMLSRDEPYRDLGPDWLAKRNDEAHTRRLVAQLERLGHTVVLDPAA

SEQ ID NO: 348868 - protein, 361 aa, unidentified
MTKVSTMTDRAATTDFIGLDLSDKTGTYVVLSAEGQVVGDGKLRLTSAGISKVFAARPPARIAIEVGGHSPWVSRALTQLGYEVTVANPRQVKLISHGPKKNDKLDAENLARLLRLDPILLRPICHRSETAQADLALLRSRDAVVRARTRLINSARSMVKAAGGRLPKCSADSFHHKVQGRLPEMLKPALEPLIEVIAGLTQQIITATRQLEKLADERYPETRILRQPKGVGVITSLGYVLTLEEPQRFGRSRSVGAFVGLTARQYDSGESQPQLRITKAGDPFLRRLLVQSAQYMLGPFGEDSDLRRWGLKLMRDGNNKILKKKAVVAVARKLAVLLHHLWLTGEVYEPLRQAALEEEAA

SEQ ID NO: 348869 - protein, 343 aa, unidentified
MKVMIGVDPHKRSHTAVAIDDREDEMARIEVRATKRQVDQLRKWAAPFDERVWAIESASGLGYLLAQQLVAVGESVIDVPATLAARVRVLGTGRSNKNDPNDGRSVAVAALRAPTLPAVQPADHSAVLRLLAKRNLDLGRERNRIVCRLHAMVCELVPGGIAQEIRASRAEQLLTAFTPTTAVQAAKQTMALELVADIRRVDTQIVDIKRRIRDAVVASKTSLTDLYGIGPVIAALVIGYTGDVTRFATRDCFAAYNGTAPIEMSSGGRIVHRLSRRGNRTLNYAIHMAAMAQIRQRASEGRVYFDRKVAEGKTTREAIRALKRRISDAVYRQLLVDADRQRA

SEQ ID NO: 348870 - protein, 438 aa, unidentified
MSCSPSTPSDWAAFAAIDWGSRQHAWSLLPAPSGPVQSGVLSATPEAVELWAMELHQRFSARPIAVAVEQKRGPLIYMLGKYNHLVLHPVPPTMSASYRRAFIPSGAKSDPSDARLLLDLLLHHREHLRPLSAETSQTRLLQFLVESRRNFVQQKVDGVLRLTDCVAQYFPQLRTWFGKLDTPLIADLLQRWPELGQLQHCHPGTVRRFLVDHNCRKEELIEQRIQLIRSAVPAVTDEVVIEACSCKAQALSRLIGVLRTDIAKLDKRITEVAADHPDAPLFASFPGAGRATVPRLIAAFGTRRDAYASAADLQCFSGIAPAKITSGNSTAIRMRRACPKFLRQTFHEFAGQSIPHAAWAKLFYQAHLRGDKRHHHAAVRALAFKWMRILFHCWKNNEPYDERKFLDAQARSPHAAGRALSVVLDPKTGFFRPKANSI

SEQ ID NO: 348871 - protein, 328 aa, unidentified
MTMSPTHVAFNHVVAFEVAKQTLVIHSLPGDGQCTIANKPKAVRKLLMREMRRNREADLGPLLVICEATGGYESHVLEICVELGLAVHKAHGSRVRHFAKYMGLLAKTDPIDARVLALYGLRTHNLRLYVPPSPEQVALKDLKTRRDQVQRMLIAETNRFEHAHHPRVMRSLKTHVASLRKDLAALEAEIAAHIRSNDALARKARLMRSLKGVGPATAATLLAHMPELGTFRKGEVACLAGLAPINNDSGTSRAPRHIEAGRSTIRAALYMAALVAVRHNPIMHRFAASLRQNGKPFKVVITAVMRKILVTLNAILRTDQPWAHANHA

SEQ ID NO: 348872 - protein, 422 aa, unidentified
MSYCPVAGIDVSKRFSDMCILSPDNKIFAQEKIYHDETSINRANALLQKAERLFFSKPVIVMESTSHYHLILFQFFSEHGYDVIVVNPLQSNSMKDFSIRKRKTDRVDAFKLAMMYRTKTLRPSQIPQTATRALRQLCRHRAELLNDVSSYKNRLTALLDQTFPGYDKVFSDVGGVTSCAVLVRFPTPTILLVEEESELVEVIAAASKSGYSFAKKKAGLLISAAQKAQTLGIHSCADETLIVCTIQMLRTLSESVLQIETAIDNLLAQIKEMRNNVSLLQSIPGIGSHSAALLLGEIGDISLFKKPKQLAAYFGLDPTERQSGSFRGTKNKLSKRGSPYARAALHMGIVNSICKRGKDSAANPVLLSYYEKKCKNKPAKVAQAASMHKLVFIVFAVLRDQKPFELKTPEQHAVEQGFVKAA

SEQ ID NO: 348873 - protein, 445 aa, unidentified
MVRKTKKQRLTIVHPRCAGIDIGSREHWVAVDPERCDQPVRCFTTFTDDLHRLADWLKSLDVEVVAMEATGVYWIPLYEVLDARGFDVHLVNSRATRQVSGRKSDVLDCQWIWQLMSHGLLKGAFRPGDAVCALRSFVRQRAGKVQEQSRCIAHMQKALTQMNIQLDNVVSDLMGKTGTAILRAIVVGERDPQHLAKLRDRRLRADEATVARSLHGNWREEHLFALTQALAHYDFLNEQIGACDQRISQALATLPKLSEEPAPKPVKPLRNPHRTTAQQKDLHQALHAIMGVDLCAIPTLGIDTVLVLAAEIGPDLSRFPTEGHFCSWLAVAPPTHISGGKPLPGRKPKVFNRAGQALRQAAANARRSESYIGACHRARLVRMDSAKAIKASAHQLARLIYAMLTKGQSYVEKGIEAYEALSKDRQLRALQRKASKFGLTLAEAA

SEQ ID NO: 348874 - protein, 347 aa, unidentified
MRFYNRQHRHYCGIDLHVKTMYVCILDSAGQVVVHRNVKSTPEAFLEIITAYREDLVVAAECMFTWYWLADVCAAEGIAFGLGHALAMTAIHGGKAKNDKIDSHKIASLLRGGLLPQSDVYPAAMRSTRDLIRRRLHLVRKRGQLLAHIQNTRAQYNLPAFERRLAYPANRDGVSAHFADPSVLKSIDVDLALIDQYDTLIVDLELTIVREAKRHDADAFHRLRSVPGIGKGLALTILYEIHDVTRFGRVQEFASYARLVKCVHQSAGKKLGTGGAKMGHVHLKWAFSEAAVLFLRHTKDGKKILARIEQTHGKGKALSILAHKIGRAVFYRLSRGTVFSMEKFRAA

SEQ ID NO: 348875 - protein, 400 aa, unidentified
MAGRDRAWIGVDIGKTHHWVCAVDANGQRWLSLKVLNDEAQILEVITAVGEATADRVWAIDILGTPSALLVALLARAGEQVRYASGRIVAAMGTAYTGEGKTDAKDAYVIAETARIRTDLAVVDTDTDLVRTLGVLTGHRSDLVADRVRMINRLRDLLTSVFPALEREFDFASCKGALVLLTGYATPAAIRRMGEARLSRWLRQRRVRGYADVAARAVAAAHSQHTVLAGQDVTASIVAELAGSILSQHERLKLLDQQIQDAFAQHPQAKAIESMPGFGPVLGASLLVAAGDLAAFPTAGHLAAAAGLVPVPNDSGRRAGNLHKPRRYSRPLRHALYLSAQTSMMRAGPNRDYYLKKRDQGRTHSQAVIALARRRIDVLWALLRDNRTWTATPPTKAQAA

SEQ ID NO: 348876 - protein, 414 aa, unidentified
MGLPRWVGRAIGLDVHRDFCVVAICEDGVVRSAGRVPSTPEGLLTLAESLLPTDRVALEVTGSCWEVARLLEPHVERVIVVSPDDTGITSARAKTDKLDARTLASLLWKGELEAVWMPDDRCRVLRRRLARREQLVHSRTRAKNEIHAVLQRRLQGKPPCSDLFGVKGRQWLAGLELPPEERESVDAGVRHVEFLDWEIAEVERLIAKQALAWPEIRRLMSVPGVNLVCAASFIAAVGSPNRFLTSRKLVAYLGLDPKVRQSGEAPTRSGRISKRGSASARWALVEAAWTAVQQPGPLHAFYERTRGRRGHGKAIVATARKLAVLFWCMLTCDEDYAHQQPSLTNKKLRRLEITAGAPKYAKTARGTWNTNVAMRQAERQLAEQAEASYKRMVKDWQAGAPTRKTGASATPERA

SEQ ID NO: 348877 - protein, 413 aa, unidentified
MDIIYQCVAGLDLHKETTVAAVRSIGAAGKVETDLRTFGTMTRDLLELSEWLAAHGVTHVAMEATGVLWKPVWNILDGRFELLLVNPRELKQVPGRKSDIKDAQWIAQLLQHGLLRSSFVPSRPQRELRDLTRHRAQLEGEHTRAANRIHKLLEDANIKLGVVASDILGVSGREILERLVEGEEDAAKLAQSARRRMRSKIPQLELALQGKFLPHHRFMLKQLLSHLDHLEQQIAQFTARIEDLMIPFVDEELQDKLDAVPGIDVNTIQNVVAEIGTDMNQFPTAGHLASWTGICPGNEESAGKRKRSKTTKGNRWLRRALTQAAWAATHTKDSYLGAQYHRLAGRRGKKRALVAVAHTLLVIIYHIIKYRVDYQDLGPDYFLRLEPERQKRYLVKRLEQLGYEVQLAEKHAA

SEQ ID NO: 348878 - protein, 344 aa, unidentified
MDHFAGLDVSVKETSICIVDDTGRIVKEVKVASEPEALLKVLVNPAYRFKRIGLEAGPLSQWLFSALAEAELPAVCVETRHMQAVLKAQINKTDRNDARGIAQMIRVGLYRPVHVKTLRSQKLRMLLTHRKLLQSKTIAIENDLRGTLRNFGLKVGMVGKVRFEARIQELVENLPDLAELVEPLLIVRRALREQIVILHRRLLAIVRDDEVCRRLMTTPGVGPVVALTYRATVDVPARFRKSKSVGAVFGLTCSKYQSGEIDRSGSISRCGDEMMRVMLYEAAQSMLRSKKWSWLKAWAMQIARRRGMKKAIVALARRLAVIMHRIWVDGTEFRWTREQAASAA

SEQ ID NO: 348879 - protein, 347 aa, unidentified
MLVVGVDAHKRTHTAVVVDGLGRQVGQRTVKALTADHLELLRWAERLGAERLWAVEDCRHVSRRLERDLLVAGERIVRVPPQLMAGARRQVRAAGKSDPIDALAVARAALREPDLPVAGLDGAAREVRLLVDHRDDLVGERTRIINRLRWHLHELDPSWDPPAGSLDRYCTLDRIAVRLNQHDGTVARIAGDLTVRARALTVDINRLEREITALITPLAPTLLAVCGVGALTAAKIVGEVADVHRFRSKDAFARHTGTAPQPAWSGQSDRHRLSRGGNRQLNAALHRVTITQGRYHPDAVAYLARRRTGGNTKAEARRALKRRLSDVIYRCLVADTALVDQTLATAA

SEQ ID NO: 348880 - protein, 387 aa, unidentified
MPPLNDLSRSLVALDQDSTIIAVVELSQSSWLVAGVLPGIERQPQKKLEPSAERLLGLLHRWRDEAVRAGKKITRIALAFEAGRDGFWLARWLNARGVEAHVIHPSSVAVSREHRRAKTDRLDTELLKRGFLGWLRGERGHCSMARVPTIAEEDAKRPNRERECLVGERTRIVNRMKATLARLGVRNFKPTLRKAAERLATVHTPEGTPLPRNVLAELQRDMARLGFVVSQIREIEQARQKRLEQETETGPHTMVRQVARVIGIGIETADMLVHEVLSRPMRDRKAVARYAGLTGSPDESGARRREQGLARAGNARVRRGMIQLAWRFLRFQKQSALAQWYRARTADSRLGTRKTMIVALARKLLIALWRFVTTGETLEGVILRPAG

SEQ ID NO: 348881 - protein, 355 aa, unidentified
MSNEKYIGMDVHQATISVAVTDSQGKVVMESILETKASTLLEFFAGLRGSLFVTFEEGTWAAWLYDLLKPHVTEVLVCNPRKIPLQKQGNKSDKIDARKLAERLRLHDLKSVYHGETGVRMLRELARSYLTVVKDLSRAMNRLKALYRSWAIPCAGRDVYYRRHRSEWLEKIPEAGTRRRAEQLYQQLDLLQHLRQQARRELLAESRKHAITAKLRQIPSLGPIRCALAVALIQTPHRFRSKRQLWTYSGLGLETRDSGEYQFVQGQPRRRKKQATIRGLNKDYNHDLKGLFKGAATRASVKPGPFQEFYQRSLAKGIKPTMVRLTLARKIAAITLTLWKKGEDFDIAKLNSQAA

SEQ ID NO: 348882 - protein, 347 aa, unidentified
MLYVGLDLSRKRLDWHALLADGERLGAGACPPDSDGLAHLVHRLGAEQRPVLAAIESMSGARFVHDQLELAGWDVRIADAQRVKGLAPLACKTDRIDAWVLAELARRELVPEVWLPDPGVRAERERVRFRLFLVHKRTALKNRVHALLFQHGLRAPVDDLFGAGGRRFLERTQLPEPWHSTLAASLHLIDVLEEQIAGLERELRRQGAEHRYVGLLMSCPGVGWVLGSTIAAEIGDIARFATAAKLVGYTGLCPRVRQSGEVDRRGALSKHGPPYLRWALIEAAHNAIRSHPAYRARAERTRARLGQKRGGTIAALTVARSLAEAIWWMLTRNEAFAPAGATIPLTA

SEQ ID NO: 348883 - protein, 408 aa, unidentified
MQVLYPRCAGLDVHKDTIVACVRCVSAPMHQEVRSFDSTTAGLLALADWLALHNCTHVAMEATGVYWKPVWHILEGNFELVLANPQHIRNVPGRKTDVNDAMWIADLLAHGLIQSSFVPPAAIQELRDLTRTRKQLVREISQHSLRIQKVLEDANLKLGSVLSDVLGHSGRAMLKAIVNGEGDPERLAALAQGNARKKSAELREALRGRITEHHRTMLKLHLDIIGALEHTLAELDAVVGKALAPIRQRARLLTTIPGVSDLTAQVLLAEIGVDMTRFPDAGHLVSWAGLCPRNDESAGKRRSTRVRKSGTWLKTALVTAAWAGVRVKTSYLRAQFLRIKARRGAKKAILAVAASMLTAAYHMLRDGVEYADLGPDYFDRHDVNKTIRRLLKRLADLGCNVDPMAHAV

SEQ ID NO: 348884 - protein, 403 aa, unidentified
MIFVGDDWSEDHHDVYLMDEAGKRLGSRRLPEGLVGIRQLHELIATHAEEPEQVVVGIETDRGLWVGALTGAGYQVYALNPLAVARYRDRHHVSGAKSDASDAKLLADLVRTDRHNHRLIAGDSADAEAIKVLARAHQNLIWSRTRHTNALRNALREYYPAALVAFEDLSHGDALAVLDRAPTPVQGTHLPLSAIQAALKRGGRQRNIAARAREIRAALRSEQLAAPAPVAAAFGATTRAAVGIITELDRQIGELETTLAEHFETHPDADIYLSLPGLGVILGARVLGEFGDDPNRYTDAKSRKNYAGTSPLTIASGKKRAVLARHVRNRRLYDAIDQWAFCALTNSPGARTFYDQHRDAKQTHHQALRALGNRLVGILHGCLHHQQPYNEQTAWAHRTPIAA

SEQ ID NO: 348885 - protein, 445 aa, unidentified
MAIQRSHEGMPYITQKKGRIQSVRKSCLESMRSSSKGGIRMDGPIITVDVSKGSCHYQPFLEKGKPLRKPKVLYDTIEGFEELQKAIDQTEEKSGSKVSVAFEATGVYHRCLQKYLDDHDIPYFIISPLLSAKYRQIDLHANKTDALDCAHIAKAYYGDEKLHVFEKQEDRFISLQRLNRMYEDELQHLRKRKVAFRSVLDIIYPRLDRCFKGKASLYDPVVMEILKKYPHPKLLLKHKEETIAKAIERRTDHNVLFISKIVHKVCECALQCYSGCDINDIEVLKFPDMIEELQDQMERCESLLSELVKKASEIEYFNNVASIIGIGVNLASRIIAEIGDISRFKNRKAICAYAGLNPKILQSGDKDGIHLKISKKGNRHLRCLLYLGATCNYRLKKGDPLYEFNQKKRQQSQSPLKSKAANIAAAHKLLVIIYALCKNGEQYRF

SEQ ID NO: 348886 - protein, 411 aa, unidentified
MRIFVGDDWAEDHHDVHLMNDDGARLAARRLPEGLEGIRTFHELVAAHTADSGDVIVGIETDRGLWVTALVAAGYQVYAINPLAASRYRDRHNVAGAKSDKGDAKMLADLVRTDRHNHRQVAGDTEQAEAVRILARGHQNLIWTRTRHTNMLRSALRDYYPAALETFADLADRDTLAVLAKAPTPTQGAHLSISQIEAALKRGGRQRNLRPRATEIQAGLRAGQLAAPDAVADAFAATTIATVAIITELNRQIVDLETTLTASFEQHPDSDIYHSLPGFGVVLGARALGEFGDDPNRYANAKSRRNYAGTSPLTIASGKNTAVLARHVRNRRLYDAIDQAAFCSLTQSPGCRAFYDERRAAGDHHHQALRALGNHLVSILHGCLDHRCLYDEHIAWGHRQHQEPTNTQQAA

SEQ ID NO: 348887 - protein, 325 aa, unidentified
MQNQTIVGIDVSSATLDICVSNQQGQHSFVINNQLKNISMFFSRFKESLIICMENTGRYNWALYEALKESNHCIFVVSPLHLKKSMGLVRGKNDKIDAVRIAAFIQKNYLELPQWKPSCQAIQKLKILLTERNSRVKSRRQLLKQQYDYAKMKHLGIDKSLMALNKQQLALLNKQLVLIESEIEAVIKSDEQIKTQAKLIRSVPGVGKVLCWMMLAKTEAFTTITEPRKMACYSGVVPFSHQSGTSIRGRDRVSAYADKALKTTLHLAAMSAIRLENELKIYYRRKVQEGKNKMSALNAVRNKIIHRIFAVIKKQMPYQQHLLLS

SEQ ID NO: 348888 - protein, 355 aa, unidentified
MKLFVGLDVSSEKLDVCFLSDDDQLTILLEDSLGNDIEGANQIKQKILAFQKVYSFSQIVIGMESTSMYSFHPATFFNEDRELQRINTVVTIENPFRIKQFSRIFDEDKTDKNDAMRIADFLRIQRYTTSPIKEEKYMALQRLTRTRYQLIGQLVETKQHFLENLTYKCNALTRELKNSDTNSSVFGATLLALMTEDYGLDELALMPLTDFTSLLQEKGNGRFKNPEGLAKTIQRAITMSYRLSELAQESINIILSVLAREIRALEASIKDLDKAIEQLVIVLPEYQCLTSIPGIGKVYAAGLLAEIGQIQRFEDQTKLAKYAGLSWKIKQSGNYQSENTPFNQTRQSLSSLLLS

SEQ ID NO: 348889 - protein, 343 aa, unidentified
MGEVSTIGLDIAKSVFQIHGVDAAGAVVIRKRITRAKLLEFLASLPACLIGIEACPSAHYWSRRLQALGHTVRLMPPSYVKAYVKRSKNDANDAAAICEAVTRPSMRFVATKSEQQQSGLMLHRSRQLLVCQRTMLSNAIRGHMAELGIISAKGRNGPAELLKIIANEQDDRIPAAARFSLDILARQYAVVRAEIVAIEKRIHAWHRSSEESRRLEGIPGVGPIVATALVAEVGDWKVFSSGRSLAAWIGLVPRQHSTGGKERLGGISKQGNRHLRWLLVAGAMAVIRYARQHGTKRPWLARLMDRRPIKVAAVALANKIARMAWAMMVRGERFKEPKLLPAA

SEQ ID NO: 348890 - protein, 362 aa, unidentified
MTAVMIGVDPHKGSHTAVVIGPAEEPLGELRVRASAGQVEKLVAWAADWPERTWAVEGAAGLGRLLAQQLVAAGERVLDVQPKLACRVRLLQAGDTNKNDPNDALSVAVAARRSKTARPVMAEDYPAVLKVWSKRHRDLARLRNQVACRLHAVLCDLVPGGHPKEISAAQAARILEQSSPSGAVDRARAELAAQFPGDMRRLDAQLRGTRKKLAAAVRASGTTLTEVFGVGPVIAGTIIGDIADVSRFPGRDHFAAYNGTAPVEVSSGDRKIHRLPLRGNRRINHAIHMAAITQIRHRHSDGRAYYDKKVTEGKTHKEALRSLKRRISDAIFACLLARVSDDHGFLIASPLVRRHIEAGLSL

SEQ ID NO: 348891 - protein, 456 aa, unidentified
MQHYYLGIDVSKGYADFVILNDKKRPIEENFQLDDTFEGHCCLYERLLRFFDDHPDSTMYAALESTGGYEDNWFRALIKFQGTLNLKTARLNPLGVHANSKADLKRNVTDKISAQNVAEYMIAHPEKISYQQEDHLASLRKQWGFIKMLTKQSTQLLNQLESLIYTANPELLVYCRDGVPEWLLKLLIHYPTASSLSKAKIVKVARIPYISADRAKELVGNAKKSVASATDKVTGKLIVATVKQILHLKQVIKVQTGLMAQECSVPEVDLLKSFTGIKDFSAIGLMLEIQTVERFLSAKKLASFFGLHPVYKVSGDGIGGFRMSKRGRKEPRQILFMVALSAIQSNPLIRGIYLEHIQKGMEKMAAIGLCMHKILRIIYGMLKHNSVFDPEIDRRNREKMVHRNNRVSKDKNRRYQAFDSRAPISRRQHSKREERKQSHSDNNTNNGIIAPAPLST

SEQ ID NO: 348892 - protein, 390 aa, unidentified
MIPMPQVDDLSRSFVAFDQTASLVVVVEMSQSSWLVAGMVPGVVRQPLKKLEPDPDELHRLLERWRAEAMKSGQTIERIVLAYEAGRDGFWLARWLQARGIEVHVIHSTSVAVSREHRRAKTDRLDTAMLMRVFLGWLRGERGHCGMVAIPAIEEEDAKRPSRERESLVEERSRITNRMKSTLARLGIRGFKPALRKAPERLAALRTPEGSAIPPNTLDELRRDMARLAVVRGQIKEIEQARLERLEQAPAAGPNAIVRLLARIVGVGVETADMLVREVLSRNLRDRRAVARYAGLTGSPDESGSKRREKGLAKAGNARVRRGLIQLAWRFLMFQKESRLAQWFRARTEGPKGARKTTMIVALARKLLIALWRMVTTGVVPEGVVLRPVA

SEQ ID NO: 348893 - protein, 316 aa, unidentified
MEREVFVGIDVAKAHLDVAFNDEADCTRYTNDDAGISKLVEYLKSRQVALVVLEATGGYQRQALSELLAAGLPGVAVNPRQVRDFAKALGKLEKTDEIDAKVLALFAASIRPVSRPVVDDTTQEFQALLARRRQLMEMLVAEKNRLHQRATKAVRRSIEAHIDWLKKQLRDTDKDLEDRLRDSPAWNPRVDVLESEPGVGRITSMTLLSELPELGTLNRKQIAKLSGLAPLNRDSGTRRGQRSIWGGRATVRTTLYMATLVATRFNPTIKSFYARLLGRGKAKKVALIAAMRKLLTILNAKLRDHARGTNRNLLPT

SEQ ID NO: 348894 - protein, 338 aa, unidentified
MKTHVGVDLHQRFCYLTAVDASGKTFKQGQVVNEGAALRAWLRQLPGPRQVVVEASGFWPAFAQAVAPELERLVMVHPQRVKAIASARLKNDRVDSATLAHLSRCDLLPEAWMADEATQQLRLLVRLRITLGRQRARAKNQLQAVLHQEGFKKPVTDVFGKRGRAWLKGLELSPAGRQVVDTWLREVDHLDVELGAQTRELERMASADARARCLQTVPGIGPYAAMVIVAEVGDVERFGNKRALASYAGLTPVVRESAGKRKRGGITHQGSNTLRWIMLQVAQVAARCSPGARSYYAGLRQRKPAQVARIALARKLLTVVWALLHHGVCFDEELFIRS

SEQ ID NO: 348895 - protein, 440 aa, unidentified
MNPEDRSRLEEFRQFRKGVRGSKEYLLVGIDVAKDKHYAFFGTATGKTLLRRLVFENNLEGFRKLLVQAEAMKVQGGLTKVVFGMEPTGNYHKPLGEHLIRCGRGVVFVSGVAAHENRKTLDGRWDTNDTRDAANVADLVSQGKCLFYEFPVGALQDLRNLLSLKRRLKRMEHGHRVRIRNHLVAKYFPELDRYYEQSEATALAIVRWCLDPSEIAGLEYKEFAGMVGSIRGRSSQERRLQAIWKVAVDSVGCEAGPVVEFEAQVMGEGLKQIRESIRQIDEKIQELCSPFPEYEFLLSIPGFGPDVSAKVLGAIGNPFRFQNRRQVLKLAGFDLSAKRSGKNSESVIPVISKKGKADLRYALYQAAFIASIRNQDFIVYYTNQLRGREREPGIKTKMRVKLAAKLLIIAWTLMKKKEPFHPSYLRAAGPSVSTGDGRER

SEQ ID NO: 348896 - protein, 346 aa, unidentified
MKSYTAGIDLHSNNLTLAVVDESGKRINCRKLNCDLSLVLQALDAFKNELRSVAVESTFNWYWLVDGLIQHGYPVVLANPAAIEQYNGIKHADDKNDAFFLAEMLRLGILPTGYIYDAQLRPVRDLLRRRMNLVHQRTALTLSLKSLHHRTVGQTLALNKIKATGNADVAELFEHPANRLIATLQKQHIEALSQSIEIIEKEALKSAKSRSYYDRLKTLPGVGVILGMTIALEVGDVSRFKTPGDFASYCRTVDSRRLSNNKQKGSNNQKCGNKYLAWAFVEGANFAKQHHENCRRWFDRKAAKCGKIVATKALACKLAKAAWHVMSTGEDYDEKRMLPHLSGTKI

SEQ ID NO: 348897 - protein, 420 aa, unidentified
MKNDSTKKLKRVNGRMLIGAVDIGKIKHTGYWRRADGTDIRPFEFFNNGRGIQRFWHSICQGKEGYGIEEVVVGFESTGSYAEPLLHFLRKRGVRLVQVNPLHTKRLKELQGNSPNKTDQKDPKVIADIIELGHALTVIIPEGAAAELRRLTNARERAIERRTALFNQLQDLVFMIFPEFLEVMKGVKGKTSQYILRTCPTPEDIIERDVAVLAQELKEVSRGKLGRGRAEALYKAAWGSVGIKEGQKGIVLEITECLLWIEAAERFIRRVEKEMAEALKEIPYSRCILSIKGIGKVTAAGLIGEVGDFREFRTVSEIIKLAGLDLFEISSGKRKGKRRISKRGRPLLRKMLFFASINTVRKGGAMYGVYQRYVQRGMPRNKALIAIARKLLRVIFALVRDHSTFVREYLEIPYHFKEAA

SEQ ID NO: 348898 - protein, 343 aa, unidentified
MGNRSMFVGMDVHKETIDISVAEGGRQGEVRHYGVIAPDLEALDKVVRALQAPSRVVHFVYEAGPCGFGIHRHLTTKHGLDCVVVSPSMVPKRSGDRIKTDRRDSGMLARLHRAGELRAIHIPDALDEAMRDLVRAREDGVVVATQAKYRLKAFLLRQGRRYPGREGWTIPYRRWLADLSFASVAQHTALQEYRDAIDETERRIERLTEQLRQLAPTWRWAPLVAALQALRGVSFITAMGVVAELGDVTRFGHPRELMASLGLVPSESSSGSSVRRGGITKAGNPHVRRLLAEAAWAYQGIPRIGRQQLYRQEGLPKVVCDIAWKAQLRLTGRFRRPDPVRSE

SEQ ID NO: 348899 - protein, 329 aa, unidentified
MFVGLDLHKNYLQAAVTDDQGRVLSQERIPNNDENIEEFTRKTLKDSHAEIVIESSSTWYHVYQLLSEKENCHVVLSNPVKTKAIASAKVKTDKVDALTLANLLRGGYIPESYVPPKHIMDLRMMVRYRASLVKMRVEAKNKVHAILLQNGTRIKDRPFTLGFIEELRRLGDYRIDGYLNIISSLTQQIDTVSSTIKREAKEDESTRLLMTIPGIGYYGALLILSEVGDINRFPDSHHLCSYAGLTPSIHSSGGVTYHGRITKTGSSHLRWMLTESARVHIRTQKDSALTKFYREVAKRRGGSKATVAAASKLLRIVYWILKEKRPYHG

SEQ ID NO: 348900 - protein, 430 aa, unidentified
MPTESLPTALANLPSWMRYERFFGLDIHKQYITVVAINREGEVILQVRRVPTIEWPQWAAKNLGHTDAVVLESTTNAWTVFGQTVDHVGRCVVAHPDRKRRVKTDIQDAKGWAERLLVNDIKEVWVPPQHVRDLRGLISYRIRQITVRVRLKNRLQSIVHSNQLIPPEGALFAAKNRVWWKNLALSQIERFRVQQDLASLDLIELQIKEIDHKLAGFSQDEQWREEFPYFMQLPGVGLIVGMTVLGAIGDISRFESPQQLVGYSGLGASIEQSGDKHRNGGITKTGRKDLRFVMVEAARVAVRQNGRWKKQYERLEPRIGSNKAVVAVARKMLVVIWHLLTKKVVDQFANPDLVAGKIMKLAWQLTEEQRGGMKLKEFIRYYLTILGLGKHVKKLFRGGRNRPIATLEELIARFPELTDLPEFEAALAEP

SEQ ID NO: 348901 - protein, 331 aa, unidentified
MTTEYIGIDLHKAFFQACAIGPAGERRWEGRFPRTADGIAQLVGRGLGADAAIAVEASGPTWAFVDALAPTGARVCVVDPRKTRLKAGFAAKTDRLDARRLADALRRESVVSIYVPAPAIRELREVCRGRHQVVRLRTRLAQMIRALLLRCDAGEPPGTRLYAPAALTWLAQVQLPTAADHTLHRLERLYRAVHADAQAADREVRERAKADPIAARLDGLVGVGPIMALTVRAEIGEVARFRSGPALASYAGLVPRVDSSAGRVYHGGITRAGSPWLRWALVQAARHAIRRDDARARWARRLAVRKGINKARVALARVLCDEVIRTWTATN

SEQ ID NO: 348902 - protein, 410 aa, unidentified
MMSATLPGVRANAIGRPRSSAKQWMLLVNPPRERPIAWLQAPLYGWPAPHRAALLGWQGSGDEERSETMPITVLGIDLGKNSCSLVGLDATGRVVLRRRMRRESVIAFGAQLPSCVVAMEACCGAHHMGRTLAAQGHTVRLMSPEYVRPYVKAQKNDDRDAEAIAEAATRPTMRFVALKSEAQLDMQTLHRVRDQLVGERTALMNQIRAILLERGHVVPQGRARLAARLASLLDDEAATDLTPRMRTLVTDVRERWQFLDQRIAALDAEFSEQARSDESARRLTTIPGIGALNATALVAAIGDVTTFARGRDLAAWLGLVPRQVTTGGRPKLVGITKRGSKYLRKMLIQGARAAMPTLRQSETRLGQWLRGLLARAHANTAVVALAAKMARTVWALLRHERVYEAAVIAA

SEQ ID NO: 348903 - protein, 343 aa, unidentified
MDLGDRWSFYCVLDEAGRILLEQKVATTPEALKQAFAKIPRSLIALETGTHSPWVSRLLTELGYKVIVAHAQKVQLITKSNRKDDRHDARTLARLARIDPELLGPVRHRSVQAQIHLTVIRARAELVRARTALVNAARGLVKSYGQRLPKCGTRQVSRELGAGLHGELREVLEPLLQEIESLNERIKEYDARMEKIAKESYPHVELLKQVKGVGTQIALTYVLTLDDPQRFPKSREVGCFLGLRPGRRDSGESQPQMRISKEGDRYLRTMLVQGAHYILGPFGEDSDLRRWGLKLAARGGKSAKKRAVVAVARKLAVLLHRLWVSGEVYEPLRNSQKAMGAAA

SEQ ID NO: 348904 - protein, 316 aa, unidentified
MLYVGIDVAKNKHDVTALNVPGKTVLKPLTFSNNKAGFELLDLSLRQLNQDCLIALEDTGHYAFNLLNFLHEQGYEVYTYTPLLIKEFAKSLSLRKTKTDKKDAHGIALKLLSDPNREQFQHDNRQVELKILARHIHRLKKKQSDWKVQYTRCLDIIFPELDKIVGKHSEYTYQLLTRYPNPQKRIEVGFDKLIEIKRLTASKIQDILSVAPRSIGTTSPAREFEIIEIIKHYKRLIDKVEKCVNDLMAEFNSVITTVTGIENRLGAVILAEIRNIHAFDNPAQLQAFAGLDSSIYQSGQIDLAGRMIKRGSPHLR

SEQ ID NO: 348905 - protein, 309 aa, unidentified
MEITVGIDVSKTRLDVYVHPSGTLFSLGNDEAGLAELVAKLGQVQPDCIGMEATGGYEKLAAATLSAAGLAVVVLNPAQVRYYAKALNQRAKTDSIDARIIAQFVAAAEPSVPVMTGEQTSALAELMARRRQLMGMLVAEKNRRDRLPPGKIRLSVVRIITVLNDELAQIDKDMGDLIESSPVWREKQDLLASVPGIGDKIARALMADLPELGSLDRRAIAALAGLAPYTRQSGKWRGKSFISGGRAAPRSALFIGALVAARHNAPLKAFYNRLLQAGKSKRVALIATARKLLTILNAIIRDKKPWQTA

SEQ ID NO: 348906 - protein, 345 aa, unidentified
MAEIITIGLDIAKNVFQVHGVDAAGTVVVRRQLRRAEILKFLGKLAPCVVGLEACGTAHYWARQIAALGHEVKLLAPARVKPYVKLGKKNDAADAAAICEAVTRPHMQFVPVKSAEQQAALMLHRARDLLVGQRTMLINAMRGHLAEYGFIARQGKAPFAGLVALVRDDEAARLPDAVRMALRLLADQIDACTAKIEALECDIVARHRGSEVSRNLATIPGIGPIIASALAAAVPDPAMFKSGRQFAAWLGLVPSQNSTGGKQRLGGITKAGDRYLRRLLVVGATGLVRYKRENVPGGLAWLTKLLGNKPVRLVTVALANKMARIAWAVMTSGEVYREVPVPQAA

SEQ ID NO: 348907 - protein, 399 aa, unidentified
MFYIQSKHGEVLLKPVEYSHNLKNFNLIDQIIDERGVKSDITVFLESTSSYHYPIERFFVTKEYKVHTVNPNIVKISKTDLRKTKTDALDCVLMAACYFKEKFKSNSVKTSDIYDSLKTLNRQYLAYEKTITSLKNRYVRLLDICIPCHDVLMYSPNGKPNKAKRYTAKFMNFFSQYPHLDMIINTRIDKLANVLNETLELNLKKRLTQEAIVIKAVCKESYAGVESTHTEVDNLRQVIDTLTNLMKTQGEIASNIIELSKKTKYFTNINSINGIGELTTGQIIAELGDINRFKSYKEITAYLGLDPILRQSGKSVYYGPISKVGNRNGRKVIYTVIKNIVRTSSTKDTNNPIYVYYHKRLAEKKPKKYATVACSTKLIRLIFCLCKNDTFYISQTFTT

SEQ ID NO: 348908 - protein, 357 aa, unidentified
MLSSNVKYIGLDVHKEAVAIAVLNGAGKLVMESIVETKAGTLLDFLKGLRGELHVTLEEGTWAAWLYDVLKPHVAELVVCNPRRNALLKEGSKSDKVDARKLAELLRSGMLRAVYHGEHGLGTVRELARGYLTVGKDQRRVMSRLKALYRSWGIPCSGKQVYTPRHRQQWLNKITQPGVRRRAELMYQQMDGLSAVRHTVRGELLAESRKHAAIKILRQIPLIGPLRAALLLALMQTPHRFRSKRQLWTYSGLAVETHDSAQHRYVDGQLQRSKKPQQIRGLNQNHNHEMKEIFKSTAVSASCCAGPLQDFYQGLLAKGMRPDMARLTLARKIAAITLTLWKKGEPFDAEHLKSQAA

SEQ ID NO: 348909 - protein, 335 aa, unidentified
MNYIGIDVHKDDSLVAVLDNDGEVVKEIRVQNANLDDVAEEYVGAKAAIEATGNYYTVYDTLDEHLDVVVADPSQTKAIGYAEVKNDRLDAKLLAQLRRAGMIAESYVPPEELRERRALVRGRKRLVEKRTDFKNEVHSLLDKHGITYDWDPFSVNGREILASEDFSLDVVGDQLLESFLSIIDELTAQIEELEEVIEETAASLEETQLLMTIPGVSFYSSLLITSEIGDIDRFDEANQVVSYAGLDPVVRESGDSRTEGSISKRGSGDLRWILVQCVQTAVHRCNDPYLGRFYARLKQRKNHKIAIVATARKLLVSIFHMLEREEVYDPPEVSA

SEQ ID NO: 348910 - protein, 355 aa, unidentified
MFIVGCDYHPSFQQIAFVDTETGELREQRLMHREGAEEFYRALAATGQRVCVGMEASGHARWFERMLAELKLELRVGDASEIQRKRGRKQKTDRQDAQHILGLLLKDDFPPIWVPSWENRDLRQLLWHRHRLVQARTRIMNQLQAVALNEGLRCKKRLWRAGGREQLESFRLAPWASRRRRDLLELLDRMNPTIAELSQAVEREAENNPEAQRLKTHPGVGALTALAFVLIIGDPKRFQCGKQVASYLGLVPLEDSSGNRRRLGHITKQGSSMMRFLLVEAAQVTVRSLPEWRRQYSHLMMRRGRKTAKVAMARRLAIRLYWMWREGRDYEQQKSSVRTQDSPEIAMVCTTTPRN

SEQ ID NO: 348911 - protein, 410 aa, unidentified
MTVLSASPAGATFGKEGSSSMTGTASADLPDELVVSGVDSHSSTLHVAVVTDRGGHLDDAEFPTKAAGYAAAIGFLQAHGTVTAVGVEGTSSYGAGFTRAARQAGLTVVEVNRPDTAERRRIGKSDPIDAYAAARAVVSGRATSAPKDSAVDGIRALQTAARSAVKARTAALNQITHLLVTAPDPIRIKYPAQPGDKRIAAPAQIRPATDHENTALLTALRTLARRVQSLTEEHTALTAELDKLVTGLGPGLRAAYGVGTDTAAQLLITAGANPERLRTQASFAALCGAAPVPASSGKTNRHRLSRGGDRAANAALYRIALTRDGPRPTHTRVRRPADRRRSHQDRDHPAAQARHRPRGLPAADHPRPGAPCRGPAADPAIEEHHPHHRGEPLRGLARCHLQHRARPAPR

SEQ ID NO: 348912 - protein, 428 aa, unidentified
MDDIARFQRFCQLRRQIRGSGDHLIVGIDIAKDKHHAFFGTATGQSLWRRLIFTNDRIGFQRLIEQVDTLMSQHALDKVVFGLEPTGNYHKPLIHWLTRQGYLAVLVAGKAVKDNRELLDGRWDKNDTKDSANVADLVSQGKCLFYENPDPDILALRNLLSIRRHLKKEIHRLRMRIRNGLLAKYFPEMDRHWGSCVAENLAIVRWYLDPCKIAATDFEVFVRHVTTTDRGERQLRRLRKIHDAAAFSIGVRTDAAAVHEAKILVERFRAVEAELAAVMEQIESICRGMPFYRLLLTIPGFGPYITPLVLSALANPNRFHSRKQVIRLAGLDLNASRSGKKSQQQVPVISKKGDAELRYGLYQAALIASYHNEAFRRVYNRMLEGRQGERGIKTKARIKIAAKMLVIAWTMLKNHMPFDPKHLLAEPV

SEQ ID NO: 348913 - protein, 344 aa, unidentified
MSHFCVLGADGRVLEEERVATTPAGIRRVFGRRAPAVIAMEAGTHSPWVSRLLTELGHEVLVANPARLRLIYENQSKSDRIDARFLARLARFDRQLLYPIRHRSERAQGDLAVLRSRDALVRSRTALINHVRGSVKSLGARVSGGMTATFAARARKALPEALKPALLPVIAMIESLTIRIRKMDAEVERLGREKYPETRRLREVDGVGPIVALAYVLTLEDPNRFRSSRSVGAFTGLVPRRSQSGDSDPQRRITKCGDTMLRRLLVQASQHVLGRFGRDSDLRRHGLRIAERGGKNARKRAVTAVARKLSVLLHRLWRSGETYDPLHAERSRRLPVPDRRRRAA

SEQ ID NO: 348914 - protein, 313 aa, unidentified
MREQQWVGIDVCQKYLDVYVRPKGKLFQVSNNEIGITQLVQTLMAIQPELIVLEATGGMEINVAIKLAEAGLALAVINPRQARDFAKATGTLAKTDAIDAKVLAHFADAIRPEVRQMSDESSRQLEDLVQRRRQLSEMITAEKNRLRGKTNLIQSNINEHIEWLEKRLKEIESQINKAIALDDNWRQKMKLLTSVPGVGEVVAITLISSLPELGQLSPKSLSYLVGVAPLNKDSGKFRGKRRIWGGRAKIRCVLYMAALVAVRHNPVIKDFYERLINQGQLKKVALTACMQKLLIFLNAMMKNNSYWQPPLIN

SEQ ID NO: 348915 - protein, 341 aa, unidentified
MTQFYAGLDVSLEMTSICVVDEGGHICLETKVASDPTSLAQSLVALEGEFVRVGLEAGPLSQWLYFGLRDAGLPAVCIETRHLKGAIGAMAASKTDRNDARAMAQVVRSGWFKAVHVKSTESQELRTLLTAREFLVNKVRDHENEMRGVLRPFGLKVGRVGPAGFEARVRELVADRPGLALCMEALLRAREGLRRELNVLHLALLRVVKNDELCRRFMTIPGVGPVTALAFKTAIDRPDRFRRSADVGAHLGLTPRQHQSGEVDRRGRITRCGDAFTRTALFGAANVMLSRTTQWTALKAWGVRLAARSSMKKAKIAVARKLAVIMHRMWRDETPFRWTAA

SEQ ID NO: 348916 - protein, 394 aa, unidentified
MRFAGIDIAAETHVVALVDEHGARLVKPTPFAEDAAGYQTLRTLLGDPEDLLVAMEATGHYWQNLFAVLVAEGFAVALLNPMRTRRFAGEDLARAKTDAIDAVGIARFAAQKRPAVTRLPEAATQELRELVRLRDRLRQEFGDRTRQLHRLVDLGFPEFTRVIPDLKGRLATALLAAYPTARAFASVSVVRLAALRADGTHRVGAALARALLAAAKVSVGQHHGPAYQRQVRYLCEDLELLRRRIDALEEDVATTLQAHEVGTLLTTITGIGVQTAARLVGELGDPARFRSAAALAAYVGVVPGTRESGKRRLTHARLAPTGHARLRAALWMPTLVAVRTNPWLRAYYARLRARGKLPKVALIAALHKLLFAVYSVAKHRRPFVPHLTVQGVQA

SEQ ID NO: 348917 - protein, 371 aa, unidentified
MKKSSMFIGLDIHKDSIEIAIAEAGRDGEVRSYGGIDGTLDALDKVIRKLVSKGCNLHFVYEAGPCGYDVYRHLTAQGFDCVVVAPSKIPRQSGNRIKNDRRDAQMLARLHRAGELTAVYVPFVEDEAMRDLTRAREDAKAVEKKAKQRILAFLLRHGHRYSGKSTWSRAHFRWISILKMPHPAQQIVLQESLDALAECTRRVDRLTEQIQTLSPQWRLFPVTQALQSMRGVSLIVATTTIAEIGDLTRFGRPAELMSYLGLVPSEHSSGQKTRRGSITKTGNGHVRRVLVEAAWAYRLPARVSRKLLIRQEGLSQEVCAISWKAQLRLCARYKRFTAKGKSHQLVVTAIARELCAFMWAIAHEVQGPVKM

SEQ ID NO: 348918 - protein, 319 aa, unidentified
MAQNDLVVVGIDVAKDKVDVCIRALGMRQTFPSTTQGHRKLVAWLRKHQVNKAVMEASGGYERGWARVLREAGIEVRIVDPKRVRSFALSAGRLAKNDTIDAEMIAWFAETFSDAPSQKHDAAHEELQALVKARLSLIDFRMRLVSQSGHAAPGLVQKTHAHILKSLGCEIAWLEAAICAKIKSMPDFAERAEIIESVPGFAETSSANLVAGMPELGLVSNKIAAALIGVAPYDDDSGKRRGERHVKGGRRWVRNAIYMPCVGAATLNNPVLKAYYQRLIAKGKEPKVAIIACMRKLIIILNTLIARRQKWDPSRYVVS

SEQ ID NO: 348919 - protein, 326 aa, unidentified
MSKITVGLDVGDRFSQVCAVNIDGVIIQEGRVATTREALRDRLPARPSCRVILETGPHAGWISRELSAAGHEVLVANGRKLRWLYANEHKTDRVDAQYLARVGRWDPTLLSPIRVRSASADGALRLLRARASLVRARTRLINHVRGAVKSVGCQLPAELHDALQPLLTQIAALTQLIANYDRHVEQLATRYPETARLRQVTGVGALTALAFVLTIDDPARFRNGRAVGAYFGLTPRRADSGAQRPQLGITKCGDGLVRQLLVQAAHYILGPFGPDCRLRRWGMALSERGGKNAKKRAIIAVARKLAALLFSLWIHQSDYEPEPLEQ

SEQ ID NO: 348920 - protein, 378 aa, unidentified
MNRIIKIGMDVHTTNYTLCIFEPSFEHDGTVHCITQVKPEVKNIIRVIETFKKKHENEELNIVCGYEAGCLGYSLYHELKEKGIECVILAPTTMKTEKGGRKLKNDYRDAKMIAECLAYGGYSAVHVPTELDNSVKEFIRMRDDIKENLKSIKQQIIAFLTRNGKQFEGKSFWTRKHIDWINTISFSEPLLQDTLKEYMIEYNHLCDRVETLDKQIEEISLKEEYVEKVQQLQCLIGIKTHTALSLIVETSDFNRFKKGNMYSAYLGLIPGDDSSGGHVNKLGITKAGNSHLRKLLVEAAQGYTRGKVGFKSKDLKSRQEKCSSEVVAYADKANERLRRKYYRMILRGKKYNVAKTAIARELACFIWGIMTDHIDLCN

SEQ ID NO: 348921 - protein, 453 aa, unidentified
MARKRKQGVRTSSATMPVMRPDAAGIDIGATEIFVAVPADRVVENVRSFPTFTQDLYGLADWLRACGIKTVAMESTGVYWIPLFQILEERGFEVCLVNARHVKNVPGRRTDVCDCQWLQFLHSVGLLKASYRPAQEVCAIRSLLRHRESLVQMAATHVNHMQKALDQMNVQLHHVISDIAGQTGLAIVDAILAGQRDPLELAKLRGERIKASEAVIAKSLVGDYRHEHLFTLKQSLEAYRNYQKMIDDCDREIRLQLEDLQPPTTPNAPATQVDDSSKKKQSPEGILRAELQRVWSVDLTKIPGIRTGIAQTLLGEIGPDFTKFRSASAFASWMGLCPDNDISGGKVLFVATRKVKCRAALALRMAAQSLHHSKSALGDFYRRMRAKLGAPKAITAAAHKLARIIFHLISTRQEFDDSKFAADQLRYQKRQEIKLRAKAKSMGYELIPLERAG

SEQ ID NO: 348922 - protein, 351 aa, unidentified
MVVVGADVHKRTHTFVGVDEAGRELGHKTFPATTEGHRAAVRWARERFGLEVRWAVEDCRHLSARLERDLLSAGQAVVRVPPKMMAEQRRIARTRGKSDPIDALAVARAALREPDLPVACHDATSRELKLLIDRREDLVRTRTATINRLLWRVHELDPGWAPPAKSLDLAKHQRALQARLAEAPGIVAELARDELAEIVELTGKIKALAKRIEQRTVQVAPTLLAMPGVGALTAAKIVGEAAGVARFKSEAAFARHAGIAPIPVWSGSTAGRPPAHPVGQPAAQRRDPPHRGHPDPPRRPRAGLLRQEEGRRHVHSRSAALPQTPPRPRRVPPPQHRPDSRCDSPRRGRLT

SEQ ID NO: 348923 - protein, 441 aa, unidentified
MSESIPEFAAFVAIDWADKKHVWALRVAGSGPVEKGELDNTPEAVESWAAQLALRFSGRAVAVALEQRRGALVAMLSKYAHVVLYPIHPNTQANYRKAFYPSGAKSDPTDAALLLELLVKHRDRLPPLKPESEETRKLQFLVEERGKLVDQKTAFSNQLTGWAKQVFPQLLVWFEDISSVLVCELLQKWPTLAQLKKVRPATLEKFFREHNCRPLERIQQTVQAIQPAVVATTDPALLEVAQLAMLSLVGLITELRHSLSVYDKRLATISQAHPDFAIFDSFPAAGPVMLPRLIAACGTDRQRYPTAVHLPCHSGIAPVTESSGQPQWVHWRWACPKFVRQSFQEWSHLTIRFCGWAKEFYDRKRQAGLGHHAAVRALAFKWQRILFRCWMDRQPYLESRYLEALAKSSRRQAAPSAGSAQRPKIVMKSCGSFTKLEGLTS

SEQ ID NO: 348924 - protein, 347 aa, unidentified
MRFFTDPHTFYCGVDLHARSMYICILDQEGHVRLHRNLPTEPDDFLEAIEPFREDVVVGVECIFTWYWLADLCAEQDIPFILGHALYMKAIHGGKAKNDRIDSRKIATLMRGGTFPVAYVYPAQMRATRDLLRRRNYLTRKRADLISHIQNTNSQYNMEPFGAKITYKANRLAVAEQFIDPDVRTSIEADLDLIAQLDVIKQRLELYVLHNAREHDPQAVYRLRSVPGIGQILSLVILYEIGDIARFPRVQDFVSYARLVKCAKESAGKRHGTSGGKIGNAHLKWAFSEAAVLFLRNNPDGQRYRQRLQKKHGKAKSLSILAHKLGRAVYFMLKRDQAFDLQRFVAA

SEQ ID NO: 348925 - protein, 369 aa, unidentified
MLIIGCDYHPGFQQIAYVDTETGELQEQRLPHPEEAERFYRDLAAREARVRVGMEASGHGRWFERLLAELNFELWVGDAAAIRAKRVRKQRTDRQDAQHILNLLVEDRFPRIWVANWENRDLRQLLWHRHRMVQARTRVMNQLPAVALNEGLRCKKRLWREQGRQQLESLTLAPWTSRRRRELLELLDRLNPTIAELNQVIEQEAEKNPEAQQLMTHPGVGALTALAYVLIIGDANRFSRGKQIASYLGLVPTEESSGDRRRLGHISKQGNCLLRFLLVEAAQVTVRTDAEWRSKYFHLAMRRGRKIRQGGDGQTVGSGFVLDVASKMELRAVAKVRFARGTAWKSLWCAVNHRRNDWASRSSSRRSLK

SEQ ID NO: 348926 - protein, 451 aa, unidentified
MDRGFLEHLRLLPRAVIGPGARFLDFYCTEPHAGDATREEQMELLHRRCCGLDVHKATVVASLRIVSDGKVTTEVRTFQTTTADLLHLSEWLAANGCTHVAMEATGVYWKPVWHILDDGEFVLVLANAAHVKNVPGRKTDVSDAMWLAELLAHGLIRASFVPDTQTQEMRNLLRTRKQLVREQSSHVLRVQKTLEDANIKVDSVLSDIMGKSGRAMIEAMIAGETNPVKLASLADRRVKASQEELREALRGRVTNHHRFLLRLHLNQIDALDAATATIDVQVEANLAPFRTAVDLVRTIPGFRNLGAHAVVAEIGIDMSRFPSAAHLRSWVCACPRNDESAGKRRSNRLRRGGTWAKTTLVQCAWAAVKKKGSYLQALFYRIRARRGPQKAIMAVVAAILTAIYHMLKNGTPYHDLGADHFARRSADQHKNRLVKRLADLGYAVELKPLAA

SEQ ID NO: 348927 - protein, 403 aa, unidentified
MNMNAVGIDVSKGKSMVAILRPYGEIVSSPFEIKHTSGNIQSLIKQIKSIDGESRIVMEHTGRYYEPLARELSQANLFVTAVNPKLIKDFGDNSLRKVKSDKADAVKIARYTLDSWTDLKQYSLMDEIRNQLKTMNRQFGFYMKHKTAMKNNFIGILDQTYPGVNTYFDSPARDDGSQKWVDFATTYWHVDCVRKMSLNAFIDHYQKWCKRKKYNFSKAKAEEIYGAAKELVPVLPKDDLTKLILGQAAEQLNSSSKTVEELRTLMNKTAAKLPEYPVVMEMKGVGPSLGPQLMAEIGDVTRFTHKGAITAFAGVDPGVNESGTHVQKSVPASKRGSSVLRKTLFQVMDALIKTKPQDDPVYMFMDKKRAQGKPYYVYMTAGANKFLRIYYGRVKEYLMSLPE

SEQ ID NO: 348928 - protein, 410 aa, unidentified
MRYYLGVDWADQTHAVWVVDESGMKITARAVSHTAEGLDEWGRELDEWRAQGVELWAAIERPDGRVVDLLLDHGVVVYPVNPKALDRARDRFRQSGAKSDPFDARVLADFLRTDHGHLRALQPSSEAAQELKLLTEDCQRHIRQQTRLVNQLTATLKAYYPRALEVAELTSALARAFLPAYPTPEALTALTERQWQRWARTHRLTEARTGELWTVLRQPQLPVPAHVVRAKARLMRALVDQLMPVMAAVAQYRRAIDDFFASMPAAQWARTLPIGKHGITAPTLWARLGDAPGRWESFRHLQAHAGTVPVTKRSGKQQRVVQFRFACDKALRYVVDQVAFLSMLSSAWARAYYDQQRARGHSHRQALRALGAKWLKIIFVMWERHVPYDEQYHLATMTRQQLGQHQKKLA

SEQ ID NO: 348929 - protein, 417 aa, unidentified
MSKSNTAKKLAQVQPGTLHAGVDLALEKNVVIVINERAERLDHFSFPQDRGGYDYFLRRLEGLRQKYLASEVVVAMEPTNYFWKLLAKELEEKKISYHLVNSYTVKKHREGDQLDRSKDDRRDAVQIAELSRNGKYTETHLQKGAYEDLRQYATLYDQSVQAIRREKQVLWGLAGQAFPELSQVFKNLVGETGQALLMTCVSAASICQLSVEDFITQVRAAYTGKKLSVAKLRRAHQLAATSIGVTEGLDAIQLAIQVHLAELHIFQEQLNRVTAAMTTCLASLPEATYLLSVLGAVSAAIFLAEVGDPTRYHAAAQWVKLAGTQPAPNTSGKKQRSQTPMSHQGRARLRTMLYFTCLRMIRFDNHFAQIYAHLQRRQNNPLTKMQAIGVLMNKLLHILWALIHNQTFYNPSFGQSI

SEQ ID NO: 348930 - protein, 416 aa, unidentified
MKVFCGIDWSERHHDVALVDQDGTLIAKRRIGESVEGFAELLTLLAEAGDSPEEPIPVAIETSRGLLVAALRATGRPIYAINPMAVARYRERHCVSRKKSDHVDAMTLANILRTDAHAHAHRRLPADSELAQAITVLARAAQDAIWRRTKAIQELRALLREFYPGFLAAFADGTVTNLASPQARAILAIAPTPAAGARLSQARIATALRRAGRQRGITTLAAHLHRTLRIPQLRQPALVENAMGCQVNALLATLATECANADQLTAAATEAFTQHPDHQIITSFPGLADLTGARVLAEIGDDPTRFTDARALKAYAGSAPITRASGRSLSITRRRIKNDRLNAVGFLWAFATLPRPGPPKDHYDRRRAHGDRHAAALRHLFNRMLGQLYHCLHTRQTYDPIKAFGQPTTTTNQATT

SEQ ID NO: 348931 - protein, 309 aa, unidentified
MKQSVVYIGVDVAKANLDVAWAAASRRFPNDRNGHAALVLWIKQSAAPVQLICEASGGYEQALLESLEQNNLAVTLVQAIRVRQYARAAGILAKTDTIDAKVLAAFGAAMQPKPTPPFSAEQKRLRQYEAQRRHLGKVLLAEQNRLAQVSCAELRSLSRNLISKIKKQIDTLDTGIANLIAQDQVLCVKAQKLTAISGVGARTAALLLAQMPELGQLNRGEAAALAGLAPFNHDSGSTRGKRAIFGGRRALRSGLYMAALSAARYNPILSSFYQRLRAKGKPHKLALTAVMRKLLLALNSSLKPEPILA

SEQ ID NO: 348932 - protein, 368 aa, unidentified
MKQGTTYVGIDAHQKDLFVAMLIGTQTVPVTWTVPNEPKAVRRLVRKLERETPGAVRVFYEAGPCGYALQRQVTTSRVRCDVIAPALIPRKPGDRVKTNRRDARKLAELGRAGLLTAVQPPTPEDEAVRDLARARDDAREDLQRCRHRLTKLLLRRGLHFSGRNWTRAHRQWIDGLTWTQAAERAVVEDYRLAIDHTEARLLALDARLAEIAAHEPYCEPVGWLRCFRGIDTLTAMLILAELHDFRRFASAPALMAYLGLVPGEDSSGEKHRRGRITRAGNALVRRVLVETAWHYQHRPGIGVALRQRRKGQPARVIAIAEKAQQRLCRRFRKLAAEHKPAPKIAVAIARELAGFIWAALQPVATPMR

SEQ ID NO: 348933 - protein, 410 aa, unidentified
MRRVIGMDIHRTFGEVVIWEGGKLGHAGRVDMTRSALEGFGKSLRATDEVVIEATGNCMAVSRVLSPFVARVVIANPLQVKAIAHAHVKTDKVDAGTLASLHAAGYLPEIWTPDAATERKRRLVARRYQIVRHRTRIKNEVHAILHAHLIPRCPHADLFSGVGRSWLERQPVPDDERIAIERHVRELDRMAEDLGALDKEIAGLSLDDASVARLMTITGVNLIVASGLVAAIGDIGRFSSPQKLVSYFGLNPRVRQSGLGAAHHGRISKSGRSHARAMLVEAAWAAAKAPGPLHAFFVRIRARRGHQIAAVAVARKLTVLCWHLLTKETDYRWVRPALVATKRRAMELRSGQPQKKGNKPGPAHAYNVKALRNQEMEIARHAEQAYEHFVAQWETRPRNRVRGRPKSAGL

SEQ ID NO: 348934 - protein, 370 aa, unidentified
MKKSIMYVGLDVHKNSIEIAFADAGRDGEVRSYGKIDGNLTALDKVIRKLEAKGAELHFAYEAGPCGYEIYRHLSSNGYDCIVVAPSMIPRQSGNRIKTDRRDAQMLARLHRAGELTSIYVPALEDEAMRDLTRAREDARSVERKAKQRILAFLLRHGYRYNGKTPWSKAHFRWIAILKMPHPAQQIVLQESLDALSECTERVNRLTEQIQRLLPQWRMFPVAQALQTLRGVSLIVATTTIAELGDLTRFASPVELMSYLGLVPSEHSSGEQTKRGSITKTGNGHVRRVLVEAAWAYRLPARVSTKLHLRQAGMPQHICAISWKAQLRLCNRYKRLLGKGKANQLIITAIARELCGFMWAIANEVETSAA

SEQ ID NO: 348935 - protein, 316 aa, unidentified
MPRKELFIGIDVAKDVLDIAVRPTGDAWQVTNDDVGIAALVERLRGLRPALIVLEATARLHVAAVGALAAAGLPVQAVNPRQVRDFGKATGKLAKTDAIDAGVLAHFADAVRPAVRPLPDAQTQALSMLLARRRQLVEMMTAERNRRYGVSPSIRAEIDEHLVWLKARLAQADRELVRLLRGSPLWRERDDLLEGVPGVGPILTATLVADLPELGTLSHKQIAALVGIAPLNRDSGRMRGKRAIWGGRSAVRAVLYMATAAATRCNPVIQAFYRRLVASGKLRKVALVACMHKLLTILNAMVRRQTPWAPPVALVG

SEQ ID NO: 348936 - protein, 413 aa, unidentified
MIVGIDVGSEKHFFRAFNWRGIELTRKPVPFSNSMEGFNSFYSTVVELMQKNNLEEAMVGIEPTGHYWFDLGQFMGGKNIRFVMVNPNHVHKTKELDDNSPSKNDRKDPRLIAALVKDGRYFYSYMPTGVYAELRNASNRRFVLVEEQTRAKNRLQKWIAVYFPEFRGIYTHVDAKGGLLVLKKAATPEEVVRLGVDGVNQIWREAKLRGNGRKKAMQIVSAAMNSIGLKEGLTEARMEIQDLIEDYELHTKRLERVNDLIKELCAQIKYADKLLEIKGIGITTVAGFIAEVGDITRFNDAKELQKLAGLELVADSSGKHNGKSRISKRGRKRLRYLLFEAAISVVGKNEEFRQIHEYYTTRDKKPLKKMQSLMAVACKLIRIFHVILTRGVSYDASKMLGDIRHPGTQPKAA

SEQ ID NO: 348937 - protein, 362 aa, unidentified
MEYFAGLDVSIEETAICVVGDDGKVVLETEVPTEPELIAEALERFAGRLRRVGHEAGSVSPWLHAGLIELGLPAVCLETRHVRAALSAQRNKTDAADALGIAHIMRTGWFRQAHIKTEECYRIRLLLVQRRNLKRKFLDIENAIRHSLKVFGIRLGKVGRGSMAKAVREAVAGDAMTAGLMDCMLRARAALWEEYLILHKLVTQLAMRDELCRRFMAIPGVGPVTALSFKSAIDDPTRFRRSRNVAAYFGLTSRRWQSGSSIDVKGRISKAGDPDMRRALYEAASAMLTRFKGRDTIKTWGLKLAKTKCHAKARVAVARKLAIVMHAMWRDGTFYVGDPDAEAHEFDSAYAAKMQRLSYARS

SEQ ID NO: 348938 - protein, 318 aa, unidentified
MYVGIDVSKSQLDVAVFGQSEGWQVSRDHAGLSELIRRLKELGGPVTLVVLEATGGLERDVAVTLALAMVPVAVVNPRQVRDFARATGRLAKTDSIDAAVLAQFAQAVHPTPQPLPDPVASKLEAAVSRRRQLVDMLTSEKNRRGMLMLQRSASKKILKSLQKHIEWLEAEIAQLDEDIDDTIKQSPVWREKDDLLQSVPGIGPVVSRTLLSRMPELGSLSPKQIAALAGLAPMNRDSGIMRGRRTIWGGRADVRAVLYMAAVTAARCNPSLRAFYKRLLAAGKKPMVALTAVMRKLLTTLNAMIRDGARWNPPALNP

SEQ ID NO: 348939 - protein, 347 aa, unidentified
MNITRIGLDLAKNVLQVHGVDERGKALLRKRLKRGEVVAFFARLSPCLIGMEACGSAHHWARELAALGHTVRLMAPQFVKPYVKANKSDARDAEAICEAVGRPSMRFVPVKTLEQQSVLSLHRARQGFVAARTAQANQIRGLLSEFGIVIAKGIRQIEGRVPEILEEAENGLCGMNRALFQRLFEHFRQLDRQVKQLEEQIHAWHREQVDSRRLAGIPGIGPLTASALTAAIGNAREFANARQLAAWLGLVPRQASSGGKDRLLGISKRGDVYLRTLLIHGARSVLRRTRACPDAAQGWLAQLVHRRNPNVAAVALANKNARIVWALLAHGREYQPGYVGAPLPTAA

SEQ ID NO: 348940 - protein, 341 aa, unidentified
MEQATTIGLDIAKHVFQLHGADAAGHVLFRKRITRVKLLGFLAAQTRCVVAMEACAGAHYWAREIAKLGHHVRLIAPAYVKPFIKRQKNDAADAEAIREAAQRPSMRFVPVKTEQQQANGIVFRARDLLVRQRTQCVNALRGHLMEYGYVFPKGITHVEALVALVEDLQSSLPDSVRVILKLLVDTFTALEAQIAVLDAEINQRSKSDPTARRLMTIPGVGPITSTAITALVPAAEGFPAGRDFAAWLGLTPLQKSTGGKQKLGAVSKRGERTIRRLLIIGASAVVQQASRRGAPKGSWLAQMLARKPKMLVTVALANKMARIIWALLVKGGTYRAPAVAA

SEQ ID NO: 348941 - protein, 338 aa, unidentified
MKLYGGIDLHSNNSMISLLDENDRIIYEQRLPNELDIILVELAPYREALVGLVVESTFNWYWLVDGLMEAGHTVHLSNPSATKAYEGLKHTDDRHDARWLAHMLRLGILKQGYIYPKAERAVRDLLRKRAQLVRIQTSQILSIENLLSRNTGRRLNSYRIKRLSSEALSELLALPEQALAAQSNLAVLKTVMAQIKVLEDEVKAQVKPQGELKWIKTVAGVGEILGWTILLESGDIRRFSKVGRYASYCRCVQSKRLSNAKKKGENNRKNGNKYLAWAFVEAANFAVRYHDQVKRYYQRKRSRTNGIVAIKACAHKLASASYYVQRDQVAFDMTKAFG

SEQ ID NO: 348942 - protein, 321 aa, unidentified
MAILGIDVSKADFHAFLIDGNQTAKKSFSNTTAGFKQLQHWLRNRGAREIFACMEATGSYWEALALHLHEAGHQVSVVNPSRTKAYAQSELLRAKTDAVDAAMIARFAQAQNPALWRPPAPETRLLQDLVRHLEHLKTNRAEQKVRLQTPGLQPVVKTSIRKLIAALDGQIREFEKAIDDHIDGHPGLKEQRALLVSIDAIGDTTAALILAEIPNISQFYSGRAVAAYAGLSPKTKQSGSSIRGRGAVCKTGNARLRKALYFPALTAMRFNPILKAFADRLALRGKPPMVIVVAVMRKLLVLAYGVLKSGRHFEPALPAAA

SEQ ID NO: 348943 - protein, 384 aa, unidentified
MAQMALQANDSGLVGVLYMALELSKSTWKVGFEYQGKRRIKNVTGGEVGELRQALDEAMQKLGVPAEALVRCCYEAGRDGFWLHRLLEDWGVENVVVDPASIEVSRQARRTKTDRVDLLSLLSKLRQYHAGEFGVWKVVKVPSEQDEEGRLLHRELERLKKERTGHVLRIKALLFAQGVRVEQVGGKKWAGYLMGLTRYDGRALPADLMAQVRRESERLAMVQEQIQAIEKEQERRVREAAEVGGVMAMVQALRQFKGIGSVAAWVFVMEFFGWRQFKNGKEVGALAGLTGTPYASGQMQREQGISKAGNRRVRALAVEIAWLWLRYQPDSALSRWYAERFAGTSKRHKRVGIVAVARKLLVALWRYLQTGELPTGARLKPAKA

SEQ ID NO: 348944 - protein, 355 aa, unidentified
MEQHYVGLDVGLEETSLCIVDSEGKTVREVKVSTEPAAIRSALEGYADRLSRIGVEASSLGLWLYRELQAEGLPIIVVEARHMRVSLSTMRNKTDRNDARGIAQMMRLGWFRAVHVKNVEMQKMRTLLTNRKLLKRKLVDIENHIRGALRTYGLLVGAVGRGQYEARVRELIERTDIVFSTMIETMLDVRRAIFDGYAKLHRVLLQVVQHDAVCRRLMTVPGVGPVASLSFKVGVDDPLRFTRSRTVGAHFGLTPRRHQSGTSIDYEGHITKQGDVSVREALCEAAASLLLRVKKWSALRAWGLRIAKRSSMLCAIVAVARKLAGILHRMWIDGSDFKVGFGAKVTQRLKLKPAQ

SEQ ID NO: 348945 - protein, 344 aa, unidentified
MTIVEDACVITGGVDTHADTHVAAALDSLGGLLGVREFPATSAGYADLLGWLGGFGTVALVGVEGTGSYGAGLARHLAAAGVRVVEVDRADRQDRHRQGKSDPLDAVSAARAALSGRASGAPKGRDGAVEAIRTLMVAKRSARAERTQAINQARALIVTGPDELRARFAGKRAAALAEAVAALRPRPGDAADYSLRVALRELGRRVEFLDAQIGRLDDLIIPLVTARAPGLLGLYGVGPDTAALLLIAAGDHPERLRNEAAWAHMCAVAPIPASSGKTRRHRLNRGGNREANHALWRIVITRMSAHPATRAYLERRTAEGLSKKEIIRCLKRYVAREVYPYLRG

SEQ ID NO: 348946 - protein, 357 aa, unidentified
MQIMNEDDRRVIGGVDAHADTHHAAALDERGVLLGSRSFTVSASGYRELLAWLRSFGEVERIGVESTGSYAAGLTRYLVGEGVLVIEVNQPHPHTRRRRGKTDAIDAELAARHVLAHPTPVIPKQTTGIVESIRQLRVARESAVKSRSAAIQQLGDLILTAPSELREQLASAKTLRGKAGLCTRLRPDHSRLQDPVNAAKLALRSLARRIALLDSEIAELDGQLTPLVASAAPRTTALLGVSTGHAGQLLLTAGQNIERLRSEAAFAALCGASPVPVASGKHGRYRLNYGGDRQASRALHMIAVCRLRYCPKTRAYVERRSGEGKTKKEIIRCLKRYIAREVHASLRQDLGSLSPTP

SEQ ID NO: 348947 - protein, 395 aa, unidentified
MKGPIVSIDVSKGKSDYQAFKDVNVKYTGSRSIKHNKEGFDEIVNLVREMEKKLETEVCVVYEATGVYHRVLKKVLEDNNIKQFIINPLLSAKTRKNDSLRSPKTDKLDPKSIAKTYYSHSLHNSHKQETIYHELRELSRYYEDILVHIRKDKVAFRAQLDIVFPGYDTLYDDLYGPVALAIIEKYPHPEMLQKKKINTVSKVIQNKTCHRQAVSDTMADKAIEYSKTIYSGCDKDDIEVLILQRFIKKLNEDMAEAERTIGEMIKLAQELPDFNIIKSIPGIGDNLAARIIAELGDMTRFKKKNELVAFAGLDPRISESGQNDGDHMHITKKGNKRLRCLLYLAVTCSIRLKRDDNSIKDFYMCSKAAKTACASKLVRIIYSMCKTGELYQYNK

SEQ ID NO: 348948 - protein, 411 aa, unidentified
MAYTAIPAFFCVFDTLAFGSMTLGSDGVFGLRAPFPTTAFVEVLRFELMVERGLFEAATSIREEARAMKHYAGLDVSLKETAICIVDENGRICREAKVVSHPEDLSKALTGTGFRIERIGLEAGPLSQWLFEGMARAGLPVICVETRHTKAFLKAQINKSDRNDARGIAQMMRVNLYRQVHVKTLASQKRRALLRARKLLQEKAIAIENDIRGLLRNFGLKVGIVGAAKFEARIKELIEDMPDLEEFIDVLLAARRKLRDSFSRLHGKILELVGNDAACKRLMTIPGVGPVTALAFISTIDIPARFRRSRSVGPALGLTPVLKQSGESERVGRVSLCGDGMMRGLLYEAAQSMLTRVKKWSWLKAWAMTVARRGGLKKAVVALARRIAVIMHRMWIDGSEFRWSREGAAEI

SEQ ID NO: 348949 - protein, 320 aa, unidentified
MNNVSVVGIDISKQYFDVAWAVENGQCEQRCFRQDVEGFAELVRLTPEGSVYVMEATGVYYLRLAHYLHATGVRVAVINPLVIRRYGQMKLLRAKTDRVDAQLIASYGQTGSFALWQPAENAISQLQQLQSWLEGLLQEQTRLKNQQEAWRQRPEASAFVGAAQAQRLEQLQDQIHACEQEMQQWVQRHYAGVYQRLISIPGVGPKTAIQLIAVTDGFRRFDRVEALVSYVGLCPRVYTSGSSVRGSRHITKLGMGRMRQLLYLCSWTAQRCNQACARLHARLKAKGKPERVIKIAIAHKLLRQAFAVAMKNEMYSEAWT

SEQ ID NO: 348950 - protein, 341 aa, unidentified
MEYGAIDLHLRRSVFRIEDASGDVVMEGRIDTTRADLTRIFGERAPMRLLLESSTDSEWAATLLESLGHTVIVADPSYLPMYGARHRSVKTDRRDVRALVSACREGHYRRAHRVPASTRALRQELRVRRHLVQMRTQTINVLRSLLRQEGLRLPGGDANHALARLARVTRPAALAHVLGPLQEWLATLQALITQADTAVDTRAAADPIARHLMTVPGVGPVIALTYRAVLDTPTRFGGNASRASAFVGLIPSEYSSGEQQRRGHITKRGPRELRALLVQASWVVWRNRGATSAPLRAWAQALAARRGRRIAIVALARRLSRILLALWRDQTDFRPHVLTQA

SEQ ID NO: 348951 - protein, 329 aa, unidentified
MKTKVSAFKLYCGIDVSGDTLDVCYQLSDGTFEWAKHINGTEGFKQIWKLTGKAYHFVMEATGVYQLPFCFFLEEKKARYSVLHALQIKRYIQMKLERNKSDKKDAFHICMYGIENNPPCYQMPNHLYFECRALNNAIETITKEITAFKNKMHSVSRLDIDTKVIDAAYKKILRDLLAELKKLETELYKKLEAWQPALVKQVRSVVGIGKRATAILVVSTQGFAHTETYQQLISYAGLSPKEYSSGSSIRGRVRICKQGGALLRHTLYMCALNAKETNAACKALFERLVAKGKNKKLAVIAVANKLLKQVFGVVKTGTLFDRNYYKNLA

SEQ ID NO: 348952 - protein, 320 aa, unidentified
MTYIGIDVSKDSFVAAYPAQSGYTTKTFKNTTGGAREFIKSLPIGCHCVMEATGNYSMLLLYLLQMANITVSMENPQKIKHFARAMLSTTKTDDIDAKLIAMYGEKMEPTPYKIPSECIMMLKQKRTLLRQLKKQLTMMLNLQHSMSVLPKQDPTTKAATEQTIKFFRKKIAMLEDEITHLSNKEFKRQMELLTSIKGIGKTLASALIVATGGFAYFSNAKQISRFLGLCPTYQQSGTSVNFKGHINRNGDTYLRSQLYIAAVSSIKFNAACKETFERLKARGKSGKVAVIAVANKLIRQAFAVVTNNRPYVNGYVSALP

SEQ ID NO: 348953 - protein, 337 aa, unidentified
MMYSGIDLHSNNSVVAVIDDADRVVAQKRLPNDITTIVGFLARWRDQLAGVVVESTYNWYWLVDGLQDAGFHMHLANTAAIKQYEGLKHSGDETDAQHLAHLLRLGILPTGTILPREHRVVRDLARKRMQLVQSCTTHVLAVENIMARQLGGRMTSNQIKRLTGDTIDSLPLAADIGLAIKANVAVIATLQSQIEVLEKRLQERVKPRAQYGLLTSVPGIGQTLATVILLETGPIERFAEVGNFASYARCVDSVHTSNRKKKGEGNVKNGNKYLAWAFVEAANFARRFCPEAKRFHERKKARTNNIVATKALAHKLARACYHILKEGKPFDVTRCFA

SEQ ID NO: 348954 - protein, 425 aa, unidentified
MAYKIAGIDVHKKMLAVVVADVEVEGDYHFERLKVGTSPAQLRALADWLVEREVEEVVMESTAQYWRPVWEALELHWRRPRRTHGGASPLSGTLHLAQAQSNRGTGGRKRDFPDAERLVKRLVAQELTLSFVPDAEQRLWRTVMRRKYQITRSRVQLHNRLESLLEEAHIKVSSVVSDLLGTSARRMLQGLADGETDSSALAALADSRLRATPDQLRNAFGACADLHPVYRRLVKLTLEELRVIEDHLTQLDQQMAELLGHHHDAVQRLAEIPGLGVDSAQQIIAEVGATAATFPSPKHLASWMGACPGTEESAGKNYSHRCPKGNRQMRRVLNQAANAAVKAKGTIFAIVYRRLVPRLGHAQAIGAITHRLCRLIWKILHQSVRYEERGPAVSVEAKKIRTRKMIRELRTLGYRIELISPAPVA

SEQ ID NO: 348955 - protein, 465 aa, unidentified
MEVRVIRRLVGVDLGIASAHTVRVLTEDGREVCRRRCEPTVDSLRRVETAALAGAPAGTVLEVVMEPTGPAWLPIAVFFTARGHRVFRVSSGKAADLRRFLSRHAKSNGIDADTLARLPLVDPAGLYPLELPGTEAAALDRRVRATDRLTVLAAQHKVRIKDLTRQLLPCSPLTGDLGVADLAVLERWADPRALLAAGPARLTALIVKASNGHLGADRAQQWRAAAAAAVELYGDHPAIAWTDLAAEVGTEVRLLRATQAELATHAQERETAYRYADLGGLARSLPGVGDVGGPVLVAGMGRPGRFPNGAAFKSYTGLAPRAAETGNTDRKGQPMSKAGSSLLRTTLIRAADTARKQDPQLARIYYTQMVERGAEHLKAVCVVAGALAERIWTVMNRQMPYVICDIDGTPVTPEQAKQIIAQNFTVPDEVRRRRRSSKTPSRKPAQQPTISSKGGRPLSKPHTAA

SEQ ID NO: 348956 - protein, 369 aa, unidentified
MKKHNTVKQSPKRAAAGEAGPITIGMDLGDKTSCYCVLGGDGEVLSEGSVATTKKAMTQKFGGMGRCRIAMEVGTHSPWLSRLLSRLGFEVIVANPRQVRLISASSRKNDRMDAQLLARLARVDPKLLRPIRHRSEEAQADLLKIRVRASLLEARTSLINAARGFTKAQGDRLPACDADAMDVEKMEALPESLQETLRPLLEQVEGLTEKIQKLDTTIEQIARTKYPETELLRQVNGVGTLIALTFVLTVEDRRRFDRSREVGCYVGLRPKQGESGESQPQLRISKEGDLYLRQLLVQGAHCILWRGPDTDLKRWGLKLAARGGKNAKKRAVVAVARKLAVLLHRLWVTGEVYEPLRNSQAQQEKGRAA

SEQ ID NO: 348957 - protein, 377 aa, unidentified
MRYFGVDVHLEFCEIAVAEDGRVSQVGRIASTPEAIREFAAGLGSEDQVVLDASGSVMAIARILRESNVGRVVVSDAAQTRAISHARVKSDRFDAAMLARLLSSGMLSEVWVPDEATLALRRRIARRAAMIRARTRIKNQVHGVVMRCLLGRPPVSDLFGRKGRVWLAEQQLPEEETETVQGALRQIDFLNGEIAQLDQKIAEQALVWPGLGRLLTIPGVDIGTAAAVIAAIGDISRFPSAGQLVAYLGLDPKVRQSGSEPARYGHISKRGNAQARSMLVEAAWIAIRSPGPLRAFGERVRARRGAQVAAVAVARKLVVLCWQLLSKDEDYAFARPSLTRQKTRRLELTAGASRRPRLHDGLTVSPTTAQRAAEREL

SEQ ID NO: 348958 - protein, 368 aa, unidentified
MKKVSTAAVKRMRNFSQHKLTIGLDLGDRSSCYCALDEAGGIVMEQKLSTTVKALQSAFGAMPHSRIALETGMHSPWVSRLLSGLGHEVIVAHARNVRLIGESRRKDDRLDAQTLARLARIDPQLQCPVKHRSAKAQADLTVIRARAGVVRARTALVNTARGLAKSYGERLRGCNVRNMNPEKAEGLSPELQSALQPLLVGIESLSEQIREYNERIEKLAQSSYSQVALLKQIKGVGTLIALTFLLTLEDAHRFRKSRDVGCYLGLQPGRRNSGQSEPQMHISKEGDPYLRTLLVQGAQHILGPFGTDCDLRRWGLKLAERGGKNGKKRAIIATARKLAVLLHRLWVSGEVYEPLRNSNRMAMPAAAA

SEQ ID NO: 348959 - protein, 342 aa, unidentified
MQITTIGLDIAKNVFQVHGIDAAEKVVVRKQLRRSQVLAFFKALPPCLIGMEACATAHYWARELTKLGHTVRLMPAKDVKAYVKRNKNDAADAEAICEAVRRPTMRFVQAKSAEQQGRLMLHRTRDLLMRQRTQVINALRAHLAELGITAAQGNAGLKELLAIIASDEDERLPVDAHASLVVLAAELQAMQTLIGSLEKRILAQHRKNEASRRLETIPGIGFVGATAIAATVTDPTAFQSGRDFAAWIGLVPRQDSTGGKQKLGPISKQGDRYLRRILVVGAHAVLRYARQNPEKYPWLTQLLARKPFKVVAVALANKMARTAWALLAHGGTYRAPRLVAAA

SEQ ID NO: 348960 - protein, 419 aa, unidentified
MEILYERVAGIDVGKKEIAVAVRTPDARPGAARVQRVRKFKTFYPVLAQMVAWLTEQQVTHVTMESTGVYWRPVFHALCEAQPPIEVLLVNAAHVKNVPGRKTDVNDAQWLAQLLEVGLLRGSFIPPAEIARIREMTRYRRKLTEARTSELQRLAKVCEDAGIKIDSVASSLTTVSARDMIEALIGGERDERVLADLARGAMRKKIPDLSMALAGRFDTHHALLARMHLEHIDHLAGMIARLDGEVEAMTSPFCPQLALLCTIPGIDIRTAQVIISEVGVDMSRFPTAEHLASWAGLCPGNNESAGKHGRTRARKGNSRLRSALIEAAWAAGRTHTYLGARHQRLLRRFGKKNAAKASFAIAHDLLTITWHVLHDAAPYRDLGADYFQRPDSPASNARKNQLIRELKALGYTVHATPAA

SEQ ID NO: 348961 - protein, 387 aa, unidentified
MSRNARVPIPVTTLDQDSTLVVVLELSARSWLVGARVPGIGRMSRYALAPSAEALAAWLGTAKARAGATGRTVVRVVLAYEAGRDGFWLARYLEARGVEVYVIQPSSVLVDRRARRAKTDALDVEMLMRTLLAWLRGEPGVCSMVPIPDVAEEDGRRPVRERQGLIGERLALLNEIDGLLATFGITGYRPLRRDRRAQLAALRTPEGDPLATNAAARIGRILARLELVMQQIAELEQARDAVLAKEAAIGEAETMIRGLARLKGIGAELATVLVWEAYVRSFPNRKALGAYAGLTGTPFASGSTTREQGISKAGNRRLRSSLVELAWLWLRYQPDSKLAAWFRSRTGSVGSRMRKVMIVALARKLLVALWRFCRDGVLPEGAALKAT

SEQ ID NO: 348962 - protein, 405 aa, unidentified
MFCGIDWASERHAVCVLDDAGHQATAFEIAHTAEGFDQLLARLRRYRDPATLPVAIERPDGRLVDRLLEAGHPVVAVQPNAIKAWRDAEVLSGAKNDPGDAALIADYLRLRQHRLRVLQPFSAETRALRAVVRTRDDLVDQPTTASNQLGACLDAFWPGAKGVFADLASPITLDFLARYPTPESAASLGERRMAAFLTKHGYCGRRPAAELLARLRAAPPGLCGTVEVEARRDAVLAMVRVLRALVAAIKDLDRAVVAHLGEHPDAEIFTSLPRSGRINAAQVLAEWGDCRPAYVDAEAVACLAGATPVTKQSGKHTAVQFRWACNKRFRQAICTFADNSRHGSPWAAKVYAEALARGHDHPHAIRVLARAWIRVIWRCWIDQVPYDPAKHGAAHKLTEMATSAA

SEQ ID NO: 348963 - protein, 444 aa, unidentified
MGKPQVFDDQEQERVFERVAAVDVAKASGVVCMRLPHPAQPAGRRSQVWEVPATMHAVTELAGRLAAEGVQKVTLESTSDYWRIWFYVLEEAGLAVQLVNASQARNLPGRPKTDKLDAMWLARLTEMGLLRPSFVPPAEIRVLRGYARARTRLTHDRTRCWARMEKLLEDALIKVSAVASKLTTRSVQDMIRAMISGQRDPQVLAGLARTRMKAKHDALAEALAGLFTDHHAELAQLLLDQIAFLDTQIARLTMLTGEQLASIRAAWGIDADGPTGPSPGAIPLPVISRLDEVPGVGAELAASIISETGLDMTRFPSPGHLASWAGLCGRTIQSGARTRTGKGQGNAWLRGYLGQAAIAAARTNTFLGERYRRLARRRGAARAQVAVARSILIIIWHLLNDPTARYHDLGPGHYQARTDKSRKARNHIRQLEALGYTVTITQAA

SEQ ID NO: 348964 - protein, 370 aa, unidentified
MAKSTPLFVGLDVHKDSIAVAHAAGGRPDPPVFVGAIGTRQADLDRLIRRLQGKAPELRFVYEAGPSGYGLYRYLTGKGLACDVVAPSLMPRRPGDKVKTDRRDAVELARLSRSGDLTAVYVPTVEDEAIRDLCRARDTARITLKDAKLRLKAFLLRLGLHYVGRADWNAAHKRYLAKVVCPTPAQQIVFQEGVRAVDEQVDRLQRIEAELQALAPCWPRYPVVEALQALRGVQWVVALTVVAELGDLTRFDNPRQLAAFVGLVPSEYSSGSARRQGGITKAGNGRARRVLVEAAWAYRHPAKVSLHIQQRIDRLPKALQDLGWKAQVRLCKRYRRLIARGKHPNVVVTAIARELIAFMWAIARAMPARA

SEQ ID NO: 348965 - protein, 313 aa, unidentified
MDTSEINVGIDTSSKQLDIYVRPNGQFFSVSNDDAGIKEAVKSLQTLKPARVLIESTGRLELAFVCAAHKAGLPIVICNPGHVRHFARSAGRVAKTDKLDARDIAHFGEAMKPRLSSIKPEKLRAISDLLVVRSQCLEMSTMQKNRLKRMPRTVHKPIQSILKAIKKELDMIDRQLDKLVDSVAEWRQKRDVLLSAKGVGKVLAYTLMSELPELRTLNRKQIAALVGIAPMNRDSGSFQGKRYIRGGRHRVRTVLFVSMMSAIQCHPKLKPMYQRMVLAGKPKKVALVACMRKQLTILNTMVKNNTYWDEKMA

SEQ ID NO: 348966 - protein, 322 aa, unidentified
MNTIALIGIDLGKHSFHVHCQDHSGKALLRKKFTRTKLMEFLAGCSPATVVMEACAGAHFMARWIADLGHEAKLISPQFVRPFVKSNKNDFIDAEAICEAASPPSMRFVQPRTEAQQAMRALHRVRESLVRDKVKTTNQMQVFLLEFGISMPKGIAVIKQLSTVLDEHELPPYLVQVLLRLQAHYHYLVKQITEIETALSQEIAQDDTGQRLMTIPGIGPITTSVLSSQLGDGKQYARSRDFAASMGLVPRQYSTGGKTTLLGISKRGNKTLRQLLVLCARTFILHIEHRKGKLADWVQQQLERKHSNIVACALANKLARIA

SEQ ID NO: 348967 - protein, 427 aa, unidentified
MNQHDTSTNFAATIGLDWADKKHDLWIQGREGGKPEHMIIGQTPEALHEWVAKLQQRFGGQPVAIAIETSRGAVISALQAYDFIVFFPINPQMLSNYRAAFCVSGAKDDRTDAMLLEEYVRLHGAKLRALRPDTELTRKLAGLVENRRHLVDERTRLVNQMHSLLKTYYPLVEALFNDMTLPLAAQFVLKWPDLAPLKKVGAVGLRKFFYGHNCRSGKILEERLGAIEKAQPLTSDPALIEPAVLKVSALAGMLEVLHEAIQKTEESIEKALDLHPDAAIFRSFPSAGPAMAPRLLLAFGTDRDRFESAQETQQFYGIAPVKKQSGQSKVIHMRHRCPKFGRQTFHENAGHAVRADGWAKTFYDQQRARKKGHHASVRSAAFKLMRIYYRCWKDKKCYDASAYEKALEKHGSPLAGLTKKQAPSSGK

SEQ ID NO: 348968 - protein, 414 aa, unidentified
MTDSHTTPEAAILVAVDIAKDHNEVLIELRHNQRRRFRVANTLEEYKRLGAYLRQFDAPALVGFEATGNYHRPLAYFLHAQGFELRLIPTMALARTREAMHNSWDKNDPQDAQVILHMPKTGLSQTWHDPLVSGTNDAQELSKTHHQVTLARTRVWHRLRNHYFPLYFPEIEHFIRSDHSDWLIQLLLRFPTAGSITAVASVDFVAQAWSLVGRKVHKAALLAEIYAAAQRSIALPVPPDGAAVAMLRLVLEEYLVLGRMRESIAQQAEIVLASNLDRRRLMTVPGVGPLTALTILAEAGDLRRFAHYRQFLKFCGMSLSTQQSGRFRGISRLSKYGNARLRTAFWMAAKTAVRMRENSLRRKFDRYVRANPLDADLRRKAYSAVAAKLARIVYGLIKNGTDYRPFFEEAIPGG

SEQ ID NO: 348969 - protein, 375 aa, unidentified
MKELHLTERPDPTNKEVINGPQAELSKGVTIMYIGVDLHKKYSYVTRMTHEGEILAQERIEHNSEALGAFVQSLDKDDKIAVEATGNWYYLYELLEDRVPDISLSHPLKTRAIAEARVKTDKIDSKTLAHLLRADLLPRSYIPTREIRDLRELLRYRFSLVKIRTQLKNKIHAILSKNGISSPFSDPFGKGGLGFLREIELRSYYRKAINGYLDTMEQLNHLLQEISDEINQIARYDSQAQILMSMPGIGCYSALLILSEIGDITRFPNAKHLVSYAGLAPSVRSSGGKTHYGHITKQGSRWLRWILIEATHNAIRGSLRFRLLYQRVSKKHGKSTARVAVAREMLSVIYHMLTKGEEFRDKEQKSHKQQSQGNQ

SEQ ID NO: 348970 - protein, 402 aa, unidentified
MNAVGIDVSKGKSMVAIMRPFGEIVSAPFEIKHTASDINSLVELINSVEGESRIVMEHTGRYYEVLAHQLSEANLFVSTINPKLIKDFDNDSLRKVKSDKADAVKIARYALDKWQNLKQYSVMDELRNQLKTMNRQFGFYMKHKTAMKNNLIGILDQTYPGVNTYFDSPARSDGSQKWVDFASTYWHVDCVRKMSLNAFIDHYQNWCKRKKYNFSQSKAEEIYGKAKELVPVLPKDALTKLIIKQAVDQLNSASTTVESLRTLMNETASKLPEYPVVMAMKGVGTSLGPQLMAEIGDVSRFTHKSAITAFAGVDPGVNESGTYEQKSVPTSKRGSADLRKALFQVMDILIKTHPQDDPVYQFLDKKRTQGKPYYVYMTAGANKFLRIYYGRVKEYLSSLSES

SEQ ID NO: 348971 - protein, 372 aa, unidentified
MEIIIYVGMDVHKDNNVVCCYDASTDRFLYEKSMKATTANVLKYLASINKQLGGNVTFICGYEAGPTGFGLYRDLQKEGIACVVMAPTSIKHPASYRSKNDWIDARMLAKTLFTKDYSAVTVASEKEEAIKEFCRMRLSLKKQLKTAKQVLLSFLLRMGKKYTDGTTYWTKKHREWLNRVSFDDVYLQESFEEYMLTLNSLESRIKKIERRLEEISQDSAIKHKVDRLVCFSGIDTVTAVSIAAEIGNFDRFRRAFDFVKNLGLVPAEWSSGGSKNGLGITKAGNGYVRKLLIESAKSIKNTSPKGKKSKRLEERQKGMSTDVIAYADRCRYRLKSRMTHLEMKGKHPNVATVAAARELACFIWGMMTNNIA

SEQ ID NO: 348972 - protein, 415 aa, unidentified
MDVLYERCCGLDIHKKLVVACLITPGPKGAPCKAVRTFGTMTSDLVALSDWLEEQGVSHVAMESTGVYWKPLFNLLEERFTLVLANAQHIKQVPGRKTDVRDCEWIADLLRHGLLRPSYVPDRPQRELRELTRYRTTLVRERAREVNRIQKTLEGANVKLGDVASDVLGASGRAILDALVAGTTDTAVLADLAQGRLRDKRADLERALAGCMGAHQRFLLAEQLAHLDALDRLIERLSAEIAERVHPFEAVIERLDVIPGVGRRVAEVLVAEVGTDMRRFPTAAHLASWAGICPGNNESAGKRKSGRIRRGSPWLRTALVEAAHAAIRTKGTYLGAQFRRLAARRGAKKASVAVAHSILVAAYHLLQHECAYVDLGSSYFDERDRDQLARRLVQRLQGLGYCVALDLTLPPAPAA

SEQ ID NO: 348973 - protein, 346 aa, unidentified
MNDTILAIDLGKFNSVFCWFEPDSRAQSFRTATTTPENLRRELLRQPVARVVFEACSQAGWAHDLCEELKLPALVASTTGAAWQWKHLKRKTDRDDALKLARLAAVGEVEGVPVPPRALRQWKSLIGLRKRLVSERVRAQNRIRGLLVSQGLSAPMGAKAWTELGLAGIGQFARPLADCPPAELWRGELHLLLERLRFLDTQTREVEARLDTLAASDSRVSLLTTVPGVGPRTAEVIAVHLFDARRFRGADEVSAYAGLVPRQYQSGETDRRGRITRRGPKLLRAALVECAWCSLRYNAWARDTWLRLQANGLSKKKAVVALARKLLVRCWAILRTGQPWRASAAA

SEQ ID NO: 348974 - protein, 429 aa, unidentified
MNYNTQNAKIASITEKTLIVGIDVGSETHYARAFNWRNYEYSKKPFAFSNDEAGFSSFKDWMDDIAEKHGMEAVIPGMEPTGHYWLNLGAYLQEQRMKPVHVNPHHVKKSKELDDNNPSKNDRKDPKTIAGLVNEGRFSYPYIPTGIYAEIRNLSNLRIQTQEEITRIKNRIARWFSIYFPEIKDVYRNPDAVSGLMVIKQAPLPCDIKELGVDGVNKIWRDARLKGAGIKRATTLVTAAEHSIGNTEAPRSARKEIRNLLDDYEGYKKRMDELMEEIEETLSEIPYIDKLMEINGIGIKTVSCFIAEVGDIGRFDNPKQVQKFAGYAIVADSSGKHNGESRISHRGRKRLRYALYEAAISVIGKNREFKEIHSYYRTREKNPLKKMQSVIAVACKLIRIFYTILTKGVDYDGQKMLNDIVRPEIQLTA

SEQ ID NO: 348975 - protein, 438 aa, unidentified
MPIIRSNAIRIKRFRELKADLRTRRDRLLVGIDIAKAQHVAQLRLAHTRVLDKQLVIPNTQAGFDAFWAHVQRRQAETGCPELVCAVEPTGTYHEALAQCLEAHGADVVLVSNTVAHANRRTLDGTWGKSDPKDAHNLCDLLERGLVLFYSLPDSRVATLRRLVRLLRQARVELGACKARFQNTLLPRLGPAGEPLPPALVARLPAPLRRLCPPADATPRRRGRPRGRAAVPAEPAGELPAPLACELPDLVARLAAVQGRIAQLETALVQVAQPLPAYGWLHSLPGVGPTLAAILLAEIGDIAWYTRFSQLRKLAGLDIQRVQTGQWAGTARISKAGRPLLRWALYQAALGAARTPTWRARREGLIAKRRGDRYAFFKATVELAAKLLRLVWGVWRSGCAYDPARVGPGPAARPAIAPRAARAGRRRAPPTPQGQAEN

SEQ ID NO: 348976 - protein, 366 aa, unidentified
MEVTTVAIDLAKNVFALCGADAKGRVVLRKELRRAQLPDFMRRLGPCVVGMEASGGAHYWARQLTALGHEVRLISPSLVTPYRKGNKTNRNDAEAILEAVTRPTMRFVAVKSVAQQDLLALHRVRSQLVKARTALCNQLRGLLRERGVVVRIGPTALKRALPPALADESNELSGEIRELLGEMSQWLRALEERIASCEAKIAHQFKRDERCARLAKVPGVGPLAATALVAAVGNAQEFKNGRELSAFLGLVPRQHSSGGKRVLLGITKRGDRYLRTLLIHGARSALRWCTLKGDKQSRWAARIKTERGPNVAAVAMANKNARVLWALLSRGDRYRSDSAITHTVLRSGSPSPVERARGAKLLLTQN

SEQ ID NO: 348977 - protein, 399 aa, unidentified
MLAVGIDISKSKSVAAILNQDGSMHTSPFEFHHTQPELDAFIKYILNSNQSATILMENTGHYHYPVLKAFQEAGLPVCIVNAYQIKKFGDMDLRKAKTDKKDAVRIARYALEKSYSLVPYTSMEQKYEDLKFLARQYNQRMLTLKTNKVFLLNLLDETMPGITNILPLTTRTPETSLSVLFINRFKSYDRIKKMGKSRFLDAFEKITRKSRNRQTKTYGLAIYEAALRNITTRGENEYTLAAQDQCLELVCESQKAADSIILKMQTLAETLPEYAVLRSMAGVGDRLGPLILAEIGDIRRFHSGKALNAYAGNDAPPYQSGTFESHNRHISKRGNAALRKYCFEVMQALKLTQPQDDPVYLFLLKKEQEGKPYNVAKMAGVNKFLRIYYARAMETLKQQ

SEQ ID NO: 348978 - protein, 347 aa, unidentified
MRFYTGQHQHYCGIDLHAATMYVCILDAAGEIRVHRNVKSNPAAFLEIIAPYRDGLVVAAECTFTWYWLADLCARENIPFVLGHALAMKAIHGGKAKNDKIDSHKIAVLLRGGVLPQAYVYPAAMRSTRDLLRRRLHFVRKRGQLLAHIQNTIHQYNLDPFGKRIAYPANREGLLEHFPDPAVRKSVEVDLALLERYDTLIADLELTIVRHAKRHDADAFHRLRSVPGIGKILALTILYEIHDVTRFDRVQQFASYARLVKCAHESAGKKLGTGGSKQGNVHLKWAFSEAAVLYLRHGVDGKKILARLERKHGKGKALSILAHKIGRAVYYILARGTVFSQEKFANA

SEQ ID NO: 348979 - protein, 427 aa, unidentified
MSVTQNEKIRQVTDTTMVIGVDIASELHWARAFDWRGLELGKTVKFENSAEGFNFFLRWVSELTVEQKKDSVMVGLEPTGHYWFTLAAHLQGGDFKLVLVNPYHVKRSKELDDGHPSKSDKKDPKTIAKLVLEGRYVYPYIPQGLYAELRVAMNCRWRIRKELASLQNQIQRWLKIYFPEHSKVFGRFTGAGSMALLHSAPFPSDLISLGVEGISGIWKQMKLRGIGRKRAQRIYEAAQTSVGCTTGMEAARMELQILLEDYDAKLQQYERVMQVVENLCSQIPTVAELLKIQGLGLVTVAGLFAEIGDIRRFESPRQIQKLAGLAITENSSVKHKGPTEISRRGRARLRAILFRAAIPLLAKNREFQLLHRYYTTRQNNPLQKIQSVIAICCKLLRVFYALATKGCAYSPEKMLADIQRNQPLKAA

SEQ ID NO: 348980 - protein, 374 aa, unidentified
MSNHSEAFVGFDTSKLRNAVAIADGGRTGEVRFFGEIDNTEAATAKLVKKLAARYQRVTFCYEAGPTGYGLYRQIKGLGHECIVAAPSLIPKRPGDKVKTNRRDAVSLAKLLRAGELTAVWVPDRHHEAMRDLVRTREAAMLDLRSKRQRVSAFLLRQSRPYAGRTPWTKAHMNWLASQTFDYPEQRIAFEEMMLAIRQAQERLDRLEQAIRDAVPDWSLAEAATALMAMRGIDLIAATTFLTEVGDLSRFRTPHQLMAYLGLVPSEASTGNTIKRGPITKAGNRRARRMLVECAWSYQHPPRVGRNKQQKVDAASPAVREIAWKAQCRLHKRYRAMIRRGKLKAVAITAVARELAGFIWAVGREITTVRAAAN

SEQ ID NO: 348981 - protein, 340 aa, unidentified
MTITTIGIDLAKNVFAVHGVDQNGKTVLVKSRVIRAALPRLIAGLPLCVIGMEACSGAHYWARLFRQYGNEPRLMAAKFVSPYRMAGKSGKNDAADAQAICEAVRRPHMRFVPVKDESRQAMQCLHRPRQGFIEEKIATYNRLRGLISEFGVIAPQGTDALRHIVSAQKNSLPLQVQQCVDDLLEHVDRIEANITEYDQILPRIAKTDHRSQRLMKLKGVGPTTTCALVACIGNAHDFKNGRQLAAWLGLIPSQYSSGRKSKPGRITKAGDSYLRTLLVQGARSVLIGAEKRTDSFSRWVCSLVERRGYWRAVVAIAAKNARLCWASLHYGDDFRLYSAS

SEQ ID NO: 348982 - protein, 337 aa, unidentified
MKRYLFIGIDISKITLDVCVLSASESMEISYHEFSNSSKGFIPLLKWLKQKSRGVAIEDWRVCMENTGIYSLELNCFLHEKRIWQSMENALQIKRSMGVVRGKTDKADCKTIALYAYRFYDKLKAYILPGETLLRLRALFSQRERLVSMHSQLLVANQSMKGYSLELVKDIKDQNETLLKNLAEQIKTLDKSLKECLQQDEELQRKARLIQSVPGIGQQTASYMLIVSRGMESFTTAREFACYSGCAPFAHTSGTSVRGKTKVHFIANKKMKMLLHMAAMNAITFNEELKAYYQRKVAEGKNPMSVLNAVRFKLICRIFSVIKRNEEYQKEYKKNVA

SEQ ID NO: 348983 - protein, 408 aa, unidentified
MRLYVGDDWAEDHHDVEVMNEAGKVLVKKRLPEGAAGMSQLHDLIGRHVPEDADDAEVVIGIETDRGPWVAALIAAGYTVYPANPLLASRYRERHGVSGAKSDGGDAHVLADMVRTDSHQLRPTAGDSPEAEGIKVVARTHKTMIWDRTRTVQRLRHQLREYFPAALEAFDDLDAPDVLELLAKAPDPARAAKLTRAQVAAALKRARRHHVPARTDAILAALRGEHLGQPAELTAAYAATARSLIAVLVTLNEQVRFLEAQVKEHFGRHPDAEIYQSQPGMAAVLGARVLAEFGDDPYRYESAKARKNYAGTSPITRASGKKKVVAARFVRNNRLIDALMAWAFTSMLSSPGARAFYDEQRAKGFEHNDALRRLANRLVGILHGCLKSRTLYDEDAAWGHREELKRAA

SEQ ID NO: 348984 - protein, 338 aa, unidentified
MKLYGGIDLHSNNSVVALSDEDDHLVYRQRLPNEAKVILAALAPYREAIVGLVVESTYNWYWLVDALMDAGYRVHLANTAAIVQYSGLKYSDDDSDAAWLAKLLRLGLLPEGYIYPKEQRAVRDLLHRRSRRVQQHTANVLAVQNLLARNRGQSLSANKVNRLTPQAVQELLPDGNLALAVQSTLLAMRGQEAAIELLEHAACAQVRCKPAYRHLITTSGIGKVLGLTIVLETGPVERFARVGNYASYSRCVGSERLSNGKRKGRGNTKSGNKYLAWAYLEAANFAVRYNPTIKRYYQRKRARTNGVVAIKTVAHKLARACYYMLREGTDFDVERAFA

SEQ ID NO: 348985 - protein, 344 aa, unidentified
MITFGIDTHKGTLAACAVDDMGREVAARTFPNTVRGHHALVDWADAMGPERRFGIEGSGSYGAGLARLLVGAGENVVEVPSNLTARERRSLRRAGKTDAGDALAIARVTLREPDLGPVPMPGLSEDLKLLVDAREHKVGERTRVLNRLHAHLVILLPGYERTVPNLAASRHRREVARLLERRGGVRAELARAELARAGELDAECVALEGRIRVLVRSSGSSLPTIVGVADITAAKIMGETGDPRRFRSAPAFAAMSGTAPIPASSGQTSRHRLNRGGNRQLNRALHTIALTQSRVDPRAKAYMEKRKSEGKSWLEALRCLKRHLANVVLRTMLADASTGSTTWA

SEQ ID NO: 348986 - protein, 444 aa, unidentified
MLRFVGCDVHKRTAVFTILLEDGPLFATYTVPVTREALTAFAERQLGAEDRLAMEATTNTWAVAGVLRPFVQEIVIGNPLRVRAIAEAKIKTDKVDSRVLAELLRCDYLPMVWQPDKETQRLRRLTHRRAALVSDRTRLKNRLHSILHHTLVPLPDGDLFSKKGIAWLRQVPLAQEEALARDSDLRLLELTELEIAELDELLVREAWQDEKVRLVMSIPGIDYTVAQTCLAAIGDVSRFANAKKLAAYLGLNPSTRESGGHCYHGKITKQGNAHARWLLVQAAQHLGQYRGPLGQTMRKILRRKNRSVAVVACARKLAVLLWHVLSSGEPFRYAPPKSLQAKFSRLRVRATGQRRRGGVAKGTPRSAQYGHGRTRALPSLSQVLVENGLPETAPLAKGERVMLERKKLEGFYRELQVPSRIEANARRAQVEECEEDAKSELTQS

SEQ ID NO: 348987 - protein, 317 aa, unidentified
MTNVTFPQLIHRGCGIDVHLKVVVATIDGVGIRKETRTFDTFTSCLTEMKEWLLANGITHVAMESTGVYWKPVMRVLEADIPNVWIVNARHIKNVPGHKTDKMDREWICKLFLAGLLKPSYIPPKEQRQLRDLTRYRNKLIQAIAAEKNRMMRVLEDCNIKLSSVVANTSGVTATALIDMLCEGRKLTIEDIESVYHKKLSASPQELLEACTGFVEEHHVYMLQMIRKSIAQTQGLVDELSKRIKEILIKYDNVLELLKEIPGFNTKVVEDLVSEIGLDMSAFPSEKHLASWAGICPGNNESAGKKKAEELLTVTNK

SEQ ID NO: 348988 - protein, 386 aa, unidentified
MVRTVNDLSAATHGETVRCLIAIELSKKSWVVAFNTPLSEKISRRTLTGCKWKKLLELIEDVRARVSRQMGRPVEVMSCYEAGYDGFWLHRQLEVHGVRNYVIDPASLQVDRRARRVKTDRIDTERLLRSLMAYLRGEPKVWSVVRVPSVAEEDARRLHRERDRLVSERVQHVNRIKGLCALHGIYDYDPLRRRAMAQLEQLRMTEGEALPPRLKSEIKRELQRLELVVEMIATLEAERDAIVEDEASPHVNAKKIQNLHKLKAIGPEFAAVLVGEIFHRGFNNRRQLASYVGLAPSPFQSGNVAHDQGISKSGNRKGRTTGIELAWLWLRYQPDSDLSAWFRARVGITKGRIRRIAIVALARKLLVALWRYLETGLVPRGAVFKG

SEQ ID NO: 348989 - protein, 372 aa, unidentified
MEEGIKFFVGLDVHKDTIALAVAEAGRTPGRLVGCFAHNVAKLLKLLARYGEASAVEVVYEAGPTGYGLQRALAQRGYCCHVIAPSLIPKRAGERIKTDRRDCLRLAELARAGELRAVWIPDPADEAIRDLARAREDAVNARTQVRQQLKGFLLRHDVRYPRRTSWSKSFYRWLATVSFTRAETQTAFTEYWQAVSSADERVARLTTALAKSIEGWRFEPVVQALQALRGIDQLSAIGLVAEIGDIGRFAHPRQLMAYLGLVPSEHSSGERVARGSITKTGNAHARRLLTEAAWNYRFGPRIGYQAQRRAEELPQAIRDIAWKAQVRLSARFARLKARGVQVNKVCVAVARELAGFVWAIASARAKLPVPQK

SEQ ID NO: 348990 - protein, 421 aa, unidentified
MKNSVARKLKQVPVGYLIVGVDAHKKKHAAVAINEDLAVQTKFKFANSRDGFDEALEKARTEMVKTGCRGVMFAIETGGHFWRNFAYFLDERGIPFRLISQLTLKRMRDGRDLNRRKTDFRDAEMAAGVLRTGDFTETKLPQGVYAELRGTHSAYSRLVKERTRIINLMKGLLDGLFPEFTQVFKNPCGLTALLVLSICPSPAAIASMNEDVFMDLIRSGRQGRLMKKKLCALHQVARTSIGIKPGADAVATEVALLVGRYNLIQQQVDRLVRSLIRLVDETEEGKYLLSIPGINYLSAAALLAELGSFRSYNNARQLIKMAGTNPIESESGGKRLGKTPMSKKGRPRLRYSAWSAVIPLFRHNPDFRAWAKRLRERPAHENPLNGKEVVGAALNRLLRLVFTLVKKQEFYRSPQMALVAN

SEQ ID NO: 348991 - protein, 333 aa, unidentified
MDKITLIGIDTAKQVFHLVGVDAHGHYVWRKQLSRRRLLSSLAQIESCKVVLEACGASHHWARSIKALGHTVRLIAPQHVRPYRRGQKNDYRDAEAIISAALSPGMHFVGVKRVDQEAEQALHRVRSRLMSHRNAAANELRGLLGEYGVVFGRGLKPLRAGARCFVETEEAHTLGLVELVNDVLEEMDVLQRRMDHYERQINQRVQADEISRQLREELSGVGKLGASALRVKVADVRDYPSGRQFAAYLGLAPGHSGTGGTVHIGHLRRGHDRYLRQLLIHGARSALRHLGDKQDPQSCWLRGLLERRGFNIASVALAHKNARQAWAIMAREQ

SEQ ID NO: 348992 - protein, 432 aa, unidentified
MAEGKTGSEPEFAAFVGIDWADRKHVWCLQAAGSRKREAGELEHKVETVDAWVAELCRRFGHRPIAVAVEQVKGALVFLLNKYECLHIFPVPSTTTAKMREALYPSGAKDDPRDADLLLDILGQHRDKLHRLSPDDETTRRVQNLVEERRKLTAERTAQSNRLTSYLKIYFPQMVEWFEKLDMPLVCDLLERWPTLEELQRVSPEELRTFFCQHHCHRGLRERRILAIGGAIPAKGDRAVIEAKSAVVKVIVQLIRSLLEGIAELDRKIAEAATEHPDFFIFDSLPGAGAVMAPRLLAAFGSQRDRYLCAAELQTYSGIAPVTERSGKRKWVHFRWACPKFLRQSFHEWAGHSIAQSVWARAYYQQQRDRGSDHHAAVRALAFKWIRILFRCWKDRVAYDERKYLAALAKRGSPLGKLLVVDMAACEIPCGS

SEQ ID NO: 348993 - protein, 339 aa, unidentified
MKYTPVGVDIAKHLIQVHFINEHTGEVVDKQLRSRDFLTFFSNREPCLIGMEACGGSQHWARELTKLGHKVRLLQARFVKAFVMGNKNDVMDARAIWMAVQQPGKEIAVKTEEQQSVLILHRTRRQLVKFRMAQINSLHGTLLEFGESIHKGQAAMEQEFPEALERMKERLPPYLITVLEDQYNRLSELDSLIDDIEKQLTSVARQNETCKRLLDIPGIGPLIATAAVATMGEASAFKSGREFAAYVGLVPKQTGSGGKIRLLGISKRGDTYLRTLFIHGARAAALLTGEPGPWITELKKRRPASVAIVAMANKLARTVWAIAAYGRKYDKNHVSIRPY

SEQ ID NO: 348994 - protein, 426 aa, unidentified
MDRLWADLYEHIVGGSWMNRIFVGVDVGKEIHWACVLDRDGHVLLSRKLRNDEDDITLVLSEVASLGSPENTTWTVDLIAVEASLLLAILFDHHQSVQYLPGSAVNRASAGYRGEGKTDAKDARVIADQSRMRRDLTHLQPDETVVREMRMLITRRNDVVADRIRTISQLRQQLTAVCPALERVSKIAEHHGWVILLSRYQRPKAVRRAGVSRLTSLLTSQGLRPTTAAKIATAAVDAAKTQSVHLPAEELAAELVADLARDVLRLNALLVELDAKIESRFRQHPLAEIVISMPGMGPRLGAEFLSAIGTIEAFASPDRLASYAGLAPVPRDSGKTTGRHHRPYRYNRQLRRVMYLSALHSIRFCPESKTYFEKKKAEGKHGNAAVMALARRRTNVLWALIRDHRVWSPAPPHAVGSAGQSNAGAA

SEQ ID NO: 348995 - protein, 365 aa, unidentified
MREFINWVGFDEDAKKIVVAVLVGYEERVRETFTVELNDKGLRQLVRRLKQLPGETRCVYEAGGSGYEIYRYLRRHEIACEIAAPSLTPHKPGMRVKTNRIDAAKLADHYRGGQLTMIHVPDEARESLRDLVRAREDAQQDLLRQKNRLTKLLYRRGVRHGDGRRWTQAYWRWLRAVRVGNDHLQAVLDEAITTIEQTADRLKRLHRLVLEAAGQPAYAPTVDRLMVFRGVGVLTAITIIAELGDLRRFPAAKKLMAAIGVTPSEFSTGPHQRRFGITKTGNAHLRYLLVEAAWQARHRPSVRGAILKRRANQPREIVAIAERCEQRLHRKYVRMVNRGKPSSKAAVAVARELLGFIWAVAQLPA

SEQ ID NO: 348996 - protein, 343 aa, unidentified
MDHFAGLDVSVKDTSVCIVDDAGRIIREVKVASEPDALLAVLTNRIYHFKRIGLEAGPLSQWLFSALAEAELPVICVETRHMRAVLKAQINKTDRNDARGIAQMMRVGLYRPVHVKTLRSQKLRMLLTHRKLLQSKAIAVDNDLRGTLRNFGLKVGMVGTAKFEARIRELVENLPDLAVLVEPLLVVRRVLREQIGILHRRLLAIVRDDEVCRRLMTVPGVGPVVALTYRTTVDVPARFRKSKSVGAVFGLTCSRDQSGERDRPGAISRCGDEMMRAMLYEAAQSMLGRSSRWSWLKAWATQIAKRRGMKRAIVALARRLAVIMHRIWVDGTEFRWTREAAAT

SEQ ID NO: 348997 - protein, 351 aa, unidentified
MFYTAIDFHKRYSVAYTTDAAGTRVKEARIDNSPEAFASYFRTLPETHRVVIEACWNWAWLHDVLEEIDSIDRVILANPGKTRIIADAQIKTDRLDAKALCTLLRGDLIAEAHAPSYATRAKKHVLRQRVYWVRVRTQLRNRIHVILDRQRDLDTPVCTDLFGQKGLTWLRQLELPDPDGALLKQSLLLQDTIGAQIRELEGRMKKEHEADPSVQLLRTVPGLGPILSAVVATEIDGIERFNRADKLCAYAGLVPTTYASGGHTYHGRLLPFCNRWLRWAFVEASWTAIARSAYFGSIYQRHRARGKKANTAIMAVARRMCQISWTMLRERRNYHKVPSAKTPSPVAPAPI

SEQ ID NO: 348998 - protein, 384 aa, unidentified
MKNDNIVFIGLDTHKEQTQVSYTLDHRTAEVNDLGRIQTTKTGFVKLARQLQSKYPHATLHFVYEAGPCGYWIYRLLTSLGHCCFLVAPSLIPKKPGDRVKTDKRDAQNLARLLKNNDLDPIYVPEPEDEAVRDLSRAREVAMRDLNDAKHQLKSMFLRNNIRYSGSDSWSLKHLRWLTEIVLPHPCQQIVLQEMIQIISERMARLKRLDNELTHQVKQWRYYPVVKAIQAMRGIRLLIATGMIAELGDLSRFDTPRKLMKYVGLTPSEHSSGNTRRLGAITKCGNGRARRLLIEGAHSYRHAAKISKEMQLRQEGLPKQIIDKAWEAQMRLCRRYQRLIMRGKPRNVVITAIAREMIAFVWSISREVVLPKVDPRTRLSRVPA

SEQ ID NO: 348999 - protein, 334 aa, unidentified
MSLDLLAIDLGKQSFHIHGIDSDGVIISRKISRAKLIGAIEELAPAVIAMEACASAHYWGRRFLATGHQIRLINPRFVKPFVKGSKNDAADAEAIYEAALRPTMRFVPVKSIEQQDLQSLHRARERVVCARTALINHMRGLLAEYGVILPQGAWRFTTQVTTAIEEAELSELTREIFMDMLDQFNDLNRQLDKLDAQLVTICRTNETCRRLSKVPGVGPVIATALVAAVDDGRHFRSGRELAAWIGLVPRQYTTGGKPRLGGIGRRANHYLRRQMIHGARSVVMRLAKHDDRRSEWLKGLAARRGFNRTIVALANKTARIAWALLTRNEDYVAA

SEQ ID NO: 349000 - protein, 456 aa, unidentified
MGHARKRKIPAQLVEDEDYQLRHERVAGIDVAKAKADVCTRLPPQRGGGRRRSRVEEVPATAREVTDLGARLLADGVELVVMESTSDYWRVWYYLLESLGLAVQLVNPSHARQLAGRPKTDRLDCQWIARLAEMGLLRPSFVPPPEIRALRDLTRTRLQLVRDRTREWQRLEKLLEGALVKLSSVVSSLAAVKSARLILEALAGGERDPKALAALAHGNVSGGRAAVERALEGMRPGDHHPMLIRGHLDHITFLDRQVTALEDEIAAALAAIPAAWGITAAGEPSPDPGPGAAALAAAARLAEIPGVTPDLAMAVIAETGLDMTRFPTADCLVSWAGLAPVARQSGPRNRKPKKGQGNAYLKGYCAQAATGTARTATFLGERYRRLHKRIGGARAQTAVARSVLIIIWHLLADPTARYTDLGPGWHTRKADRDRKIRTHLRQLQALGLDVTITPAA

SEQ ID NO: 349001 - protein, 414 aa, unidentified
MSKQRVEFDQLIERGCGIDVHKKVLVATIRGTGLKEETRSYDSFTESIEQLRTWLEANGVTHVAMESTGVYWKPVYNILEEDFEVILVNARHIKNVPGHKTDKKDSKWIAKLLLSGLLKASFIPPRATRELRDLTRYRRKIVGSIASEKNRVHKIFEDANIKLSSVVSSLSGSVATKIINALLDGEEDVAELVKYYHGKMKASKEELAASLKGCLSDHHRFMLQLIKRSIAEKEALLADLDAQIEQHLSAHDMETDSNLLQSIPGVGKDAAASIIAEIGTDMEQFSTAQHLASWAGMSPGNNESAGKKKSSRITHGNNYLRVLLVQSAWAATRTKGTYLRSKYDSLVVRRGKKKALIAVGHKILIAAYHILKNRVAYKDLGSDFLNNKKKSKQIQHHLKRLKELGYVLEPQKVA

SEQ ID NO: 349002 - protein, 458 aa, unidentified
MSQAKRSRGRQELSPVHPNAAAIDIGATMHVAAVGPDCDEQPVRTFQTFTDDLHRLADWFAQCGVKTVVMESTGVYWIPIYEILEQRGFKVMLVNARDAKHVPGRKTDVSDAEWLQRLHEYGLLRPSFRPQAEMAGLRAYLQQRERLLDYAAAHIQHMQKALTQMNLQLHHVVSDITGVTGMRIIRAIVAGERDPAILASYRDVRCHASVETVRQALVGNDREEHIFALTQALELYDVYQAKVAACDGQIEAVLERLKQSAVPPTEKLPAARHKAHSSNAPAFEVREALHAILGVDLTQIHGLGPYLALKLVGECGTNLSAWPTAKHFTSWLGLAPHNKISGGKVLSSKTRRTSNRAATLLRLAAITVGRTDTALGAFFRRLSGRVGKAKAVTATARKIAVLFYNTLRHGMAYADPSASYYEDRYRQRVLSNLQRRAKSMGFVLQQQAEPAGAQADVF

SEQ ID NO: 349003 - protein, 336 aa, unidentified
MSNVAIFVGLDYHQDSIQVCVLDPEGRVLLNRSARNDCQEVGRIVHPLGVVQRVGIEACCGAADFGEELVQQWGWNVSLGHPAYIAKIKSSPDKSDYSDGRLLADLTRVGYLPRVWLAPANIRELRQLVNHRQRLVNHARALKLQVGAVLREQRVKIDRERGRRWGKVWTASVRDNDRLSEHARWIVNDLLDDITYTHDKIAKVEGRLREATAEDAVIQHLMEQAGIGEVTGWVLRAYVGDFGRFKTAKQLSRYCGMSPCNASSGNRVADAGLIDGCNKLLRMTIVQAAHRLIRTVERWRKLADSLKRRGKPACVIVGAVGNRWIRNLHHAMKDQH

SEQ ID NO: 349004 - protein, 346 aa, unidentified
MHATTVAIDLAKDVFELAMADASGRVIRRERLSRSHFGLFVETLPTCRIVMEACGGAHHWARRFQAVGHQVVLLPGQYVRPYRRRNKTDRADCLALLEAAKNREILPVAIKTPQSQAILGLHRVRSQWMATRTARINALRGLLREYGVSLPGGAVAGLRVVAAAIDAEAVPPVLRPALHALLAEIRALEARILELEQQLESLSRQSPAILRLRKVSGIGLLTSTALVSSAGSADAFRNGRHLASWLGLTPREYSSGSARRLGSISKRGDVYVRMLLVHGARAALNRAKQLAKAGHVLTKLQRWALDLESRAGHNKATVGLANKLARIAWACWKFERDFIGDCVRVT

SEQ ID NO: 349005 - protein, 340 aa, unidentified
MSVYVGIDVHRKRSQVAIVGEDGKVMVNRNVVNGSEAMARLTGSVPAGTAVAFEAAYGWGWLVSLLEGQGLEPHMVHPLRCKAIASARLKNDKVDAAILAQLLRADLLPEAWIAPAAVRDLRALVRHRVALVRLRTRVQNRIHAVAADHGHDRPGSYWTGPGRAWLESLDLPPAARYVTGSCLEVIDHLGPQIAGADAQLRAHARSDPRVAVLTALPGIGPFTAVVILAEIGDITRFPSARKLGAWAGLTPTVRGSDVKVRHGHISKQGSPVLRWALNQAAQTARKSPEFAPAWESIARRRGTKIATTAIARKLLCRSWHLLAGHAAATGSPLPPGRSAA

SEQ ID NO: 349006 - protein, 483 aa, unidentified
MRLRITNNPTPTVDVFSFSFEFAGALEIVNEYSGFAVTSARYIAFAELKQCTSHLITLSLWEVFMSSLTQEFTAFIGIDWADTKHDICLQPANSQQREFDQLPHQIPAIEQWAYSLQKRFGGTIAVVLELSKGPIVYALQKYDFFVLFPVNPSTLAKYREAFKPSRAKDDPTDAELALDLLLCHGDRFKPIKPQSVEMRTLTYLVEQRRQLVGDKTRLVNRLCNTLKQYFPQTLDWFEHRDTVLFCDFMTRWPTLTQVKRARKASLETFFKTHNVRFDTVIATRISGIRAATPLTLDVAVLTAHQLQAMAQVNQLRTTLQAIDQFDDAIAKLAPTLPDYALFNALPGAGPHLAPRLLVAFGEQRERFTSAAQFQQYSGVAPVTERSGKKCWVHWRWQCPTFLRQTMVEWAAQTINKSFWAGAYYRQQRDKGCSHQTAVRALAFKWIRILYRCWQNRTPYDESKYLNALKRRDSPLLKQVTTTS

SEQ ID NO: 349007 - protein, 342 aa, unidentified
MMTAIGIDTHKSSLAACAIDELGTARAEATFPNDPAGHRQLGAWATGIVPAARIGVEGSSVYGAAAARFLLAAGHDVREVPPHLSRHERVRTRRAGKSDPGDALAIARVTARETDLPPVRTADLSGEIQLLTEARDDVVGEATRTRNRIHADLVILVPGYEARAANLVAARHRKTAGRLLRGIRGVQAELARDRLRRLEQLVAEAGRLERRLVELVGDHPLVGLKGSGVLVAAKLIGETGDVRRFRSADAFAMLAGVAPIPASSGQTQRLRLNRGGNRQLNRALHIIALSQSLHHPPARAFIARKRAEGRTWREALRSLKRHLARVVFRLLVAGAARTEPAT

SEQ ID NO: 349008 - protein, 412 aa, unidentified
MQNGCIAGVDVHKKMLAVVVRRECDGQVAYAKRKFGTTQKEIEHLAAWLQQEQAGEVVMESTANYWRPVWYGLERHFSQHLVHPLKVRAPQGRKRDYRDAQRLADRWRSGDLEDSFIPGSEQRQWRWLTRSRVQLKRMIVVIRNQVEGLLEQGGIKLTSVASDPFGVSGWAMLQLIAKGETNVEVLAAEARGAMRKKQAQLQEALAGKLDPRYRFLLKQRMEQVELLRQQISELNDELTRAMKEHLGVLQRLSKIPGVDVYAAQELLAEIGPGAAAFAAAKQFASWGGGCPGSQESAGVCYSHRSAKGNRYLRRLLCQIAWAAIHAKDSFFAALFGRLKPRIEGKGAAWAVAHRIAKVIWLIMHEGVEYQEKGAAPLSPKTLQRKLRRLMKEFAKAGINPQDAMAQAVETEG

SEQ ID NO: 349009 - protein, 404 aa, unidentified
MYNAVGIDVSKGKSTVTVLQPGGTVIRKPFDVSHTSQNLNELSSYLESLDGDTKIVMECTGRYHEPILKALSEAGLFVSVVNPHLIKNFGSNTLRKVKSDPADARKIARYTLDNWAELRQYSSMDNTRTQLKTLNSQFSFFMKQKVAAKANLIALLDNTYPGVNKLFDSPAREDGSEKWVDYAYSFWHVDCVRGIGLKAFTERYQAFCKRHHYNFQADKPEKLFNASKELVAVFPKEKTYKLLVQQSIQQLNLASGHVERLRREMNELASTLPEYNTVMGIYGVGKTHGPQLIAEIGDVSRFTHREALTAFAGVDPGVDESGQHKSKSNRASKVGSARLRKTLFQIMTTLLQNAPEDDPVYRFLDKKRSQGKPYYVYMTAGANKFLRIYYGKVKECLRNLEQES

SEQ ID NO: 349010 - protein, 370 aa, unidentified
MERNITFVGLDVHKKSISVAVAEGCARGAGRFVGNIPNAPDALSKLAAKLADKGGTFRFCYEAGPCGYGVWRHLTGLGHDCVVVAPSLIPRKPGERVKTDRRDALGLAELDRIGALTPVWVPDVDHEAMRDLVRARAAAVRALRRARQQLTGFLLRHGHVRHGKNWTLAHRRWLSTIRFDHPAGQIVLQDAIHAVEDAEARRDRLTGQIEELLRDWSMAPVVEALQAMRGVALIVAVTLVAEVGDLTRFDNPRQLMAYLGLVPSEHSSGQNVRRGGITKAGNGEARRVMVEAAWSHRMQARVSRARLGRMQGLPKAVRDIAWKAEVRLCARYRRLNAAGKPANVVTAAIAREMLGFAWAIARHVKPQPAI

SEQ ID NO: 349011 - protein, 349 aa, unidentified
MIWIGVDAHKRIHQAVAISETGIVSEQTVPNTAAAWAALLEWAQQWPERQWAVEGAWYLGRGLAQFLAEHGERVREVSGRLTAQRRTLNRRRGKSDRLDAHAVAQLLREEGPKLPEVVALDDDVAAVQLWSRVQAELTKDQTRLINRLHDLLLLCDPQYGSKLPALTTKAGITALRTYQAPGAGALARERERIIRQTADQLALLYEQNRELTKKLERVSTTRFSPLRQIEGIGALIACSFIAELGRPRAGFGEEQLAALSATAPLEASSAGEIRHRLNRGGNRRLNLAFHRIVLTQGRMYAPAREYLARRKTEGLTKREARRALKRLLVRRVYRAWCACFEINIERVAA

SEQ ID NO: 349012 - protein, 458 aa, unidentified
MGRKGKRTKGIEEAHPFAGMSQVNKDAAGVDIGAVEIVACVAGKNSTQIVKGFGNYTVDLQSIGNWLKEHNVKTVAMESTGVYWIPLFEELERQGFECLLISSRSLRRVPGRKSDIEDAQWIQTLHSYGLLESSFRPQADLVALRTMLRHRAQLLEHRAPHIQHMQKALLQMNVQLSQALSDVMGETGQAIIRTIVKGERSPQLLAAFREPNCKKSEEEFGKALTGTWREEHLFVLKQSLELYDFYTQQLEVCDKEIDRMYALIRPDWETGELPSIPKKKQKTHSKNAPESAKEIRLHLKRINGVDMSLVDGFGVSLAQTVTMEVGSNVSEKFPTEKNFCSWLGVAPKHEISGGKVLKNKTLKTKNRAGQAFRMAAQSVKKSDSVFGVMYKRFRARQGPAQATVSTAHAIARVVYRMLKYQVEFETISVSEYEKKYEEQQVRYFKKKAAKLGYQLVPA

SEQ ID NO: 349013 - protein, 353 aa, unidentified
MTTHYIGLDVHCQFTEFAVVTSSGRLTKRGQCPTTIPALVAAIESVKRPRYVAFEEGPMAEWLYRNLLASADGVTACEPRRNRWIAQEGEKDDPLDAAKVAQLHRGGYLKAVHHPESEERSILKGHVGVYHDRVRQRVRTANRIIAQFRSHGVVIQEADFATPGQRQGLLRRLPADPLLQKDLDVLWESYDLTAFHAGELERSLRQLVRNYEILRRFQAVPGIGPVWATTFYVYVDTPWRFRSKEALWKYLGIGLERRHSGNGPVQVRVSKSANRRLKGMILSAAESAIRSLDSPFAAHYARGRNAGLPHHSARRNVARSLAATLWGMWKSGDKYHPEWVGRGATVGAGSGSR

SEQ ID NO: 349014 - protein, 425 aa, unidentified
MKIQTIHSKIIPDNKLVVAFDVGKDKLDAYCEYGQHCFNDSFANNTLKIEQKLITFSGIAESIGYDGLRIIAEPTGVYHLKLFRTARRLGHQTALVNPESVHKFKVVESNDSGKTDNKDPRVINLLAKYGKTLIDRNIRDEYLLLRQLNTMIIDEEKAYTATRCKIHRVLTELFCDYSFNNEYLYTNVGRIFMKKYHANPYRIVQRGYAAFYQRMKAAASRIRESTLQRLWRDAQSSIRHQLPADYVQVLESRFNYLWEELLLRENRMAEIEDAMIGVTDELREKDPNIPLPAKGVVTAFRIAQVLAETGSLNDFESIEELMRYAGLNIRERQSGYYRGNNKISKKGRSNLRRVLGYIVLPLVKKKSLYGTVYHAKKNSGMVGNKAMVAMMRKFLRMFYGWYKSGLPFNKNRVFTDEVNCVQITQ

SEQ ID NO: 349015 - protein, 353 aa, unidentified
MEYGAIDLHKKESQVRILTESGEVIDQRIRTTRDRLTALFWGRPHARIVIEASTESEWVAQHLETLGHEVIVADPNYSLMYGHRSRRVKTDRRDVAALAEACRHGIYRCAHRRSSRQRVVQWHLNVRRELLDARTRLISVVRAITRSQGYRIAGGATDTFLTRLAALDLPVSVSESLVPVRSVMELLNQELAAADQRFEALVAEDPIVKRLTTCPSVGPITATAFVAALDNVHRFAGRRGAAQVTSYLGLVPREYSSGEQQQRGRVMRSAHPYVRVLLVQAAWRIRRSSDARAGALRTWAQAIARRRGQNIAIVALARRLTRILYAMWRDEIDYQPDRIRSARRDTAAAKPAA

SEQ ID NO: 349016 - protein, 385 aa, unidentified
MTFAATVHSIIPAHFDIFAGLDVDKKSMATTFIDHGTLFKSLRLPYSSTQLLNYVDKHFPGQRIAFAYEAGPTGFGLHDDLVAQNRTCLVVAPSMVATAPGNRVKTNRLDSKKLSVQLRGGELRGIHVPGRSYRELRHLVQLRDTQTRQLTATKCRIKALLLYEGIAFPETSERWNAQAIAGLRTLPCSSEVRFKLDHLIGTLYFHFNSAAVVQKRIRQFCQNDPELRQSISLLTSLPGVGWITAAHAVARLGDWRQIKNVRQIAGFLGLVSSEHSTGDKENRGAITRSGDSRLRNKLVQCAWVAINKDPELRAFYRSVFVRQPKKVAARKAIVAVARKLTIRMYVVLKEQRPYIIRPDSSIAPLTAEETVGPRERLDGAQNEQL

SEQ ID NO: 349017 - protein, 354 aa, unidentified
MNTTQVFEKRKIAVAIGIDLAKDHCDVVAYNADNKICFTKANWAYPHLMEWLANAQPAVVLMESCKGCHVRARDIADLGHDTRLVKGADVKALRNVCQKNDIRDADYIARLLYVPGTKFVFVKNQRQQSLQFLQNEYKSIQELRIQVGNQIHAGLEEFGCPGPKSKKFIQSRMMAHLEKNAEPISDEVMSSFLRRREMWLNLFEQEEKAKKRMEEIAKTDDDAQRIMTVPGVGAQTAVGMLVHIGGDIGRFKNSGQFAASIGLVPKQNSTGGNTTLNGITKCGPKRLRANLVQCGQVILMHADKLKGNFGDWVRKLRDSGKKRGVIVCAIAAKIARIVYRLMKDKVDYTPVPSR

SEQ ID NO: 349018 - protein, 405 aa, unidentified
MFVGIDWASTEHAVCVLDQTGKTVRAFGIPHSAAGLDDLVARLRRLGAPAGLPVAIERPDGRLVDRLLEAGHPVVPVRSNAIKAWREGEVVSGAKSDTGDAKVIAEYLRLRHHQLRTLTPFSDATRALRAVVRARGELVRQRVAAINQLTATLDAFWPGAKAVFPDVEREIALAFLERYPTPESAAGLGEQRMAAFLTRHRYCGRTPAAELLARLRAAPAGVAGGAEATARRDAVLAFVGVLRALNQAIRDLDRSVIARLGEHPDSKVFASLPRSGQINAAQMLACWGDCRDAYDGPEAIAALAGIVPVTRQSGKHAAVSFRWACNKRFRNAMTTFAHNSRLASPWAAKLYADAIARGHDHPHATRILARAWVRVIWRCWVDQVPYDPVKHRAAQRLAEEAAAAA

SEQ ID NO: 349019 - protein, 340 aa, unidentified
MKKILFIGIDFSKSKFDASLLKSMSDEEVVSGSFENNRGGYVLFLKWVSDHTRIKKEDWLFCGEHTGLYSRDLTEFLSKKNLTVWLENPYQIKCSCGIKRAKTDKIDALEIARYAYRFQDKCTPYQPVDKAIESLSLLLSYRGRLIKEKVLLEVSAKETRRVISRDTTSRFVFENSMRNIERIKKEIKAVEEKMHQILMDSPLKENYLLTVSVKGIGLVTAVALIVHTNNFSTFNTARQLACYCGVVPFEKSSGTSLNRGKHISHLANRELKTLLTLCARCAIEHDKELNVYYHKKLSEGKEYKVIINNVRNKLIHRIYAVVTHKMPYMENYLNPFRECA

SEQ ID NO: 349020 - protein, 425 aa, unidentified
MKNTQNQKILQIKNETLVVGIDVAKETHYARAFDYRGIELARLLKFSNTAEGFKLLDQWMQDICKQKGKTEIVAGFEPTGHYWFVLGDHLKRQGHKLAIVNPFHVNRTKELDDNSPSKNDSKDCKTIAMLVKDGRYREVYIPDDIYQELREAVAERERLQEQLTSIHNRVVRWLDIRFPEFKKVFKDWRRNAALITLRSFPTPEKIVEAGARKICETWKTEMKRPSFKRAEALVEVASNSIGRTSGKLASEASLKNLLAQYDLYCQQYEALEQLMLELLMQVPNASKLLDIKGVGLSTAATFVGEVGDISRFQDPRQIQKLAGYNLVANSSGKHKGKTTISKRGRKRLRHSLFFAMIAILAHNPEFRSLHQRNLTRENNPLNKMQSIIALCGKLIRIFYALLSKGVDYDPEKMLNDIHQPMQQAA

SEQ ID NO: 349021 - protein, 284 aa, unidentified
MNYSHFVGLDVGKKTFDASLMSADEKELSHKSFDNTPTGIQSLLDWIAGYHLSLSKLLFCAENMGSYVTELSVSSVSMGFSLALVCPLTIKKSIGLQRGKNDRIDAKRIANYAVLHYRKLELYKLPDKDLVRLRGWIIIRDNLVKQKVSSIKLLETFSWMAKLADVTESISFLEEQLKSIKERILEVEEDMEQLIAASTSLYTNYLLLRSIKGIGIINAIVLLCVTDNFQRFDNPRKFACYCGVAPFEHTSGISIRGKTQTSSLALYEGQKNGIIRVFCCLFLL

SEQ ID NO: 349022 - protein, 340 aa, unidentified
MDKMQVEACGIEVSAKELVVALSGKKGEAVLRRFANTPVGHRQLLQALTRGGRRVRACLEATGVYGLDVALLLSAHTGIELMVANPRAVRHFAQATMRRSKNDQLDAVMLREFALRMEFIAWTRPDENTLALWSIARRLEALTKQCAAEKKRQHAAAVSQAIPACVRASVARTLRWLQREIQKLRKTARQYIASDARLQRHYQLLRTIPGIADSSAIQILAELALLPTDRDVRQWVAYAGLDPREYSSGTSVKKRTRISKVGNRHLRCALFMPALVASHCEPHLRGFYEHLVAAGKKKKQALTAVARKMLHAIFGMFRSDRPYDGNRVYPLPLSESPLQA

SEQ ID NO: 349023 - protein, 426 aa, unidentified
MTDGMTSVALDAVCVELEGAIVAGFDVHRRQITFDAVDTRTGELLRGKIESTPAAVERWVGRFPGRVVHVAVEACTGWLFVAQALERAGAVTHLAEPVETSALRGRKRRAKTDRMDARWLRQLLLEGRLPESWMPPEHIRQWRSRARLRNTLAGERTGWVQRIRATLYHHGIAGAPDDLRTLAGREFLDGLDLPVDASERIRVALEMIDLLEIQIATIELELRKLARRQTGCRALMDKIYGIGELSSLVVVCELGDVSRLHASRQAVRIAGIDIGVHRSDRHARLGKLTRQGSPELRWALYEAAQSACRPTSPDYQDYHALKQRGLSHTRASLTIARKLARRSYHVLRELGPAALAPITTEPVTRSDQAHTSTMRPTQLPAGSRSGRGTHDPVATHQRPSGRSRSPRNDRSTIKSPAANPGGRGPR

SEQ ID NO: 349024 - protein, 346 aa, unidentified
MHYIGMDCHITTLDFAVVNEAGRLVKANSVATSVNGFMEFVKTVPPPRTIYMEEGTLAAWVLETCVRFREKLVITDAKKNHWIGSSGQKGDSIDALKLAQLARGGYIKEIHHPVGQRRRFRELMIAYHDTVRSTTRIKNKIKAKFRQNGIQCTGVTVYSETYREEWKGKLPQEATLLLILEGLWRQLEQSEQTEKELLAAARAQAKHYPEIKHFEALPGIGFISAATISAILETPYRFADKRKVWMYAGLGIMTRSSGGKIYSEKLSTDYNRLLKYTLKQAAEAAIQAKDNPFRRKYLDMTLLHGIAPHRAKLTIARDMLSTMWAMWRKGEKYDPEIREKAAYKQG

SEQ ID NO: 349025 - protein, 320 aa, unidentified
MEKIIFDQVVKVGCGIDVHKDIIVATVRKSEQDFETKEFSSFTGSLTELREWCKSQGVTHVAMESTGVYWKPVFNILEEGDFEIILVNARHVRNVPGHKTDKQDSQWLSKLLLSGLLKASFIPPVEIRDLRDLVRYKRKVVAQASSEKNRIIRILEDANIKLSSVLTNVDGAVGSKIIDDLIAGKTDINGLMQHYHGHIKASREEFRKALQGRLTKHHQFMLRVIKESITDKEKLIDKIEKQIDELAKEYTVEIELLQTIPGVAYDSAVGIISEIGADMKQFSSDQHLSSWAGMSPGSNESGGKKKVQPPSMGTNTYKPS

SEQ ID NO: 349026 - protein, 398 aa, unidentified
MLSIGIDVSKGKSTVCGMKPGGEIVYTPFEVQHTREGMSELVSLLRGSGEEVRVVLESTGSYHCPVVTALLENGIFVSVVNSLRMKRFCSQSIRRVKTDQIDAMQIALYGLAYWPELQPTRLPENTYRELQLLARQYYQMTSILIKAKVDFNALCDQVLPGMQELMNDHAGRHKLSDFVLRYRHTTHILEMGETRFRKDYCKWAEKKGYRNRERMAALIFATAQNGIPVLPDAPSTQIVITEAIRVLHTVEASRDAILTQMQALAKTLPEYSLVREMPCIGDTLAPRLIAEIGDVRRFHSKRALIAYAGIDAPPYQSGKFSANNRHISKRGNRYLRKTGYEVMQSYVMHKPANDPIFTFIEKKRSEGKSGKLAMVAGLNKFLRVYYGKVTELYRSLPQ

SEQ ID NO: 349027 - protein, 430 aa, unidentified
MAYRIAGIDVHKKMLAVVVSDVEIESEFQFERRWFGSNPEQLRSLAAWLLEQEVEEVVMESTAQYWKPVWEALERYWKPIREKREGARRRSGTLHLAQALSNRGRRGRKRDFPDAERLVKRLVSRELTLSFVPDPEQRLWRTVTRKKYQLTRDKVRLQNQLEALLEEAHIKLSSLVSDLLGASARRMLQALAEGETNPAALATLADQHLRATPEQLCDALGACTDLKPVYRRLLKMALEQLQFLEQQMGQLDQEMANLLSQHQDAVQRLAEVPGLGVDSAHQIIAEVGPSAATFPSEECLSSWVGVCPGQEESAGVNYSHRSPKGNRNMRRLLNQTANAAVKAKGSIFEIVYRRSVPRLGHNRAIGAIAHRLCRLIWLILYRKVRYEERGPAVSQKSKQARTSRMIRQLRRLGYRIEPPNTQHASSAQVQ

SEQ ID NO: 349028 - protein, 342 aa, unidentified
MTAIGIDTHKATLAACAVDELGRPVCEATFANDPAGHVAFITWARALAPEVMIGVEGSSSFGASVARSAQSVGLEVREVPPHLSRVERLRTRRPGKSDPGDALAIARVTAREKNLPPIRLPDRTTELRLLLEAREDLSVDATRARNRLHAHLLTLAPGYGGKVANLVSARNRATAGRILRGVGGVQAELARGLLLRLAHLDREVKALTSRIEMLVAGHPLLGLPGAGPITVARLIAEVGDVRRFRSADALAALAGVAPIPASSGQVQRMRLNRGGNRRLNRAFYFIAVTQSRFYPPAKAYVTRRMEVDGKSWREAIRALKRMLVRPVFKLLVEGARAQLEAA

SEQ ID NO: 349029 - protein, 360 aa, unidentified
MNRMTAQPTARTVIVGVDTHKQAHVAVAIDTCGMRLGDQSFVADASGYRALLAWAETYGPIEVFGIEGTGGYGVGLARAVRRASHRVLEVNRGDRRLRRVAGKSDTIDAEAAARSVLAGQATATPKTADGAVEMMRQLKVARDTAVKARTAAMNTLKQIIINAPSVVREPLHGLTDQRLLRRCASLRPGPLETPTASAKHTLRALARRWFALAKEIATHDRPLARLTTQTSPTLRASFGVGANAAAELLIVFGDNPERIRSEAAFAKLCGACPIPASSGRTTGRHRLYRGGHRQANAALYRSVIVRMRYHQPTVDYVVRRTADGRTKREIIRCLKRFLAREVYQRVMTDFRARQDVTHAV

SEQ ID NO: 349030 - protein, 341 aa, unidentified
MTIVMLGIDLGKSVCSLAGLDEHGRLVLSKRLKRNGVVAFVSSLPVCGVAMEACCGAHYLGRRLADLGYEVRLIAPQYVRPFVKSQKNDDRDAEAIAEAALRPTMRFVSVKTQAQLDLQTLHRVRERLVERRTALINQMRGILLERGITLRKGKYHLARALPELLSEEANGLTPRVRTLLEQLREEWRMLDDRVADLDAEFLNVARQDDAIRRLIEIPGVGALTATALVAAIGKGEAFDSGRDLAAWLGLVPRQATTGGKPRLLGISKRGNAYVRRLFIHGARAALRTHADRQTRLGGWLRGLLERRHRNVAVVALANKLVRIAWAVLRGGAHYTEFAAAN

SEQ ID NO: 349031 - protein, 344 aa, unidentified
MGEVSTIGLDIAKSVFQVHGVDVAGVVVIRKRVSRARVLEYFGKLSPCLVGIEACPSAHHWGRELQALGHTVRLIPPSYVKAYLKRSKNDANDAAAICEAVTRPSMRFVPIKTREQQSALMLHRTRQLLVRQRTMLSNALRGHLAELGIVSAKGRNGTAELLRIIADDRDSRVSAAVRGILNVLARQYGAIGAEIASIDKSIMALHRGCEASRRLAEIPGIGPIGATALVAEIGDWKTFSSGRSVAAWIGLVPKQHTTGGKDRLGSITKQGNRYLRWLLVVGAMAVIRYARKHGTARRPWLGRLIERRPTKVAAVALANKMARMAWAIMVRGERYKEPKLLLAA

SEQ ID NO: 349032 - protein, 349 aa, unidentified
MPFNIIYKIQCKVMNYFYFIGIDISKLWFDAAIRQPGKPRYIRHRQFENSEKGFIAFLNWLKQNQINDFSLVFVCMEHTGVYTVPLWNFLSEQTITYTLIPGAEVTNSQGITRGKSDKLDAKRIAAYALKNREEIRVHTLPSEQIRILKTLLAYRERIIKARHGFMISIKEIKAFETDTVANSIEEDSRQMIDNCSKQIKKIDKQIDSCIETHPELDKNFKLLLSVPGIGRQNALYMIVFTKNFVSFNCPKKFAAYAGIAPFKNSSGKSLNSSSKVSQKANKKMKALLSSAVVCSLRSCTEYRLYYERQLEKGKNQYSVKNLIRNKIVARAFAVIRRNSKYVNTHAFAA

SEQ ID NO: 349033 - protein, 363 aa, unidentified
MNESMRVTIGLDVHASSVRLAAVCGDELLDERTLPYDHEAVERSLRRWPVVRCCYEAGPTGFGLHRHLVERGIDCQVVAPGLVPQRPGDRVKTDSRDARKLARLLAGGLLEPIHVPAPELEAARDLVRAREDARLDRMRDRHRLSKFCLRHGRRLPRLSWGVARRKWLSEQRFEFAAQQQTFDAYLHTVDLVDARIEALERAIRETAEQEPWRALVARLRCVRGIETLTALALVSEIGDFARFQTAEEFMAFVGVVPSERSSGEQRRQGSITKVGNAHVRRLLVESAWHARRRPSVGYQLARRQRGQDALVIERAWRCQQRLHARWQRMAGRGKPQQKIVVACARELAGFVWAIATEQPLRSA

SEQ ID NO: 349034 - protein, 377 aa, unidentified
MKKELYLGLDVHKECIAIAVAEGGRKREVHELGSISNGLHAVEKLIARLRKAHGKETRFYACYEAGPCGFGIARRLRQLGVECEVVAPSMIPTRSGDRIKTDKRDARKLARLLRAGELTAVYIPEATDEAMRDLCRARTDAVDDRNRSRHRLKGFLLRHGYRYQGKSSWNAAHERYLRELVFSHPAMKVILEEYLQGVTAAGERIARAEAAMHELLENWRLVPAVRALMAMKGFQTVAAMILVSELGEVHRFVHPRQVMAYLGLVPTENSSSDRRRQGHITKCGNAHARWLLVECAQHYATPPKVSAHLSRRQEGQSKEVRAISWRAQLRLHSRYNRLLGRRLLRNKAMVAIARELCGFVWELLRTQPCYQAQSTLH

SEQ ID NO: 349035 - protein, 379 aa, unidentified
MEIITRNEKILYIGIDVHKDTYSLCCFDFFRNELSDEMTIKATTKAVIKYLEAIKKKHKEEILFACGYEAGPTGYGLCRGLQKAGYGCVVMAPTTMSNPDGKKRVKTDRIDARAIARILAYKSYSQVHLPSEEMEALKEYTRARDAKKRMFKKAKQELLSFLLRNGKSYPESGNYWTEKFFKWIKTVQFSEKWMQEALNEYLAEVYSLKAKIELMDARIREIAELEIVKDKVDKLICFSGIDVITAVETVVEINDFSRFATAAQFVSYLGLCPGEDSSGKTKNMLPLTKAGNKRVRALFCESAKAIKRTNPYGQKSKRILERQKNASPEIVAYADKATKRIRTKMKHLEERGKNYNVSSAAGARELACFVWGMMNGKIA

SEQ ID NO: 349036 - protein, 423 aa, unidentified
MRFIGLDVDRDFCEVAIAEGGELRLAGRVQTEPEALALFALSLGGDDEVALEATGNALEIARIIEPHVGRVVLANPKAVKGIRRAGPKTDKIDARTLAQLLAGGFLPAVWLPDEQTRILRRRISARAQLVRQRTRAKNQVQATLMRNLKGKPPVSDLFGARGRRWLAAQDLPADQQETVAACLRQIGFLDGEIGLVERTLAEQVLASAEMRRLLTLPGVNFVTAAALLAAIGDIRRFASARQLVSYLGLDPRVSQSGLEPARHGRISKQGRGETRQVLVEAAWQAARTAGPLRAFHQRVAARRGGNVATVAVARKLAVIAWQMLSRGQDYAFARPSLTREKIRKLELATGAERQKGKRIGVWVTKEQHRLDKELAAQAELAYRRLVQDWQPAIKGTGAAPGRASCGPSSGQAARQETAPPPAL

SEQ ID NO: 349037 - protein, 295 aa, unidentified
MDIRHFIGIDISKATLDWAVFDGKDIVFQSQSANSQAGVKATVKLIRALPGFAIAESVCCMEHTGIYNRTGGPAHALSCLHKLGFPLWLESSLQIKKSGGMQRGKNDAVDAARIARYACRFRDRLRLWQPPRPVIQKPAYLNALRQRLQVARQQLQQPVNEMQGFADKSVSQQMAKSCRSPLKALDADLVSAEGQIKELIGQDERLNELSGLVTPVTGVGAATAAEVFVATNEFKDTADPKKLACHAGIAPFEHRPGTSVRGKTRVSQHARKRLKSLFHMGAMAAIQVKPGARWR

SEQ ID NO: 349038 - protein, 429 aa, unidentified
MNYTQNEKIEQVTDTTLVIGVDVGSQLHYARAFDNRGKELTKRVLSFPNSIEGFNTFNQWVEKIRTENDKTKVMIGCEPTGHYWFAFAKYVSDHQMTLVMVNPFSVKKIKELDDNSPKKTDIKDPKTIAKLVVDGRYSIPYMPEGIYAEIRDLVYSRDRIVKQHNISANRIQRWLALHFPEYLGIYTRFDAASGLAVLEKAPLPKDIVALGIEGIRKIWHDNRMRGRGVTEDRAKILVEAAHNSIGLDGGAGTRSELYMLLEEHQLWISQLEAVEKALEETTLKVDHVEKLLAIKGVGIITIAGFIAEVGDIRRFKSPKQIQKYAGLELVENSSGKHKGRSRISKRGRRKLRRILYQVMIPLLARNKEFREIYDYYVIRVKNPLKRRQAMVAVSCKLIRVFYAVLTKGVDYDRFKMMSDIHRDSELIAA

SEQ ID NO: 349039 - protein, 401 aa, unidentified
MRYCLSFDIAKGKSVAGLFDENREVLIKPHEINHTKRDFDHLMQCLADDVKDRMDVIMESTSIYHEPVFHYFTENGIVPIVLNALIAKMQKQTLRKTKTDKLDCAHLATIYFENKQNLQTTHARVYREMQELSRHIIGLTKTLIIHKNRFRQLIGKSFPLLEEIWKTKFFFGETALRFMIRYPHADIVSETRIDALGNALSSVSGRHKKQYLKMALKVKQAARDSLTAVDKTSVVCEEVSELAEIILVLENQIEVRKRQLIELAEKTKYYKNINSIFGIGDWTAASLITELKDVTRYSNIKKLTAGCGLDPTIVKSGKTINYHGPISKRGNPRARCVLHSAVSTIVTVASKNQKDNPILLYYKKKRSEGKHHYAALTASATKLLRIIYTICVDDSTYRHSL

SEQ ID NO: 349040 - protein, 335 aa, unidentified
MKHYAGLDLSMETTQVCIVDENGRKLVSEKVESAPEALASMLERHGPIERAVIETGRMSPAICLGLRELGVPVVCIDARQAHQSLKAMKANKTDPHDAAGLAQLARTGFYKEVHVKSPAAHGVRSVITARSHLVEARVRLDNMIRGLCATFGYRPGVGQGKAFLERIMQAAHIPGLGDAITSLLSVRAALVEQIKEMDRRLRVIASQSQACEILMSIPGVGVQTSAAFAAAIDEAGRFRQSRNAGAYFGLVPRRHQSGELDWTGRITKQGDGTVRKLLYEAANSILTRSRETFALKTWAMKIAKRRGLKKARVALARRLAVIMHAMLRDGTLFQA

SEQ ID NO: 349041 - protein, 381 aa, unidentified
MTTAATHKEQSNTTEATLFVAFELSEKTWKLGFTTGHGQKPRERTVTARQQERVLDEIAQAKRRMGLPETALVVSCYEAGREGFWLHRFLQAQGITNHVVDSSSIEVNRRRRRAKSDGLDVRKLLSMLMRYEQGERHVWQVVKVPAVEAEDQRHLHRDLETLKQERASTTTRIQGLLSSQGLRVTSMTRLPEQLDALRLWDGSPMPPGLRRRVLRVYAHYTFLSEQIAAVEVERRSLLQTSAEASLDKIRQLMQLKGIGINGAWLLVMEFFGWRAFKNRREVGGLAGFTPTPYQSGESAREQGITKSGNRHVRWMTTELAWSWLRFQPDSALSVWFRARFGGGGKRLRRIGIVAVARKLLIALWRFLETGVLPEGAVLKEA

SEQ ID NO: 349042 - protein, 453 aa, unidentified
MKTFSLSVGIDLARRSKHMAVFAPNPLSVPHKTKKTLSFCHDVEGFEALFDNIRHILGTDDLKHVSLVMEPTGNAWCDVANYFIPKGASAFFVRTDVISALRKAQSRFAKTDRIDARTLASMPWTLPERLIPIQIGQGALRILRELSTQRFRIVQECTRWKNRLLSHLEIVWQPLLVQLPKAISLSKSMLLFWEKFPHPQDLVSYGAKRFHRWFEQHAHAGLSKKTEETILCFAAKAANLRLQVGTVVSEQGFVGLTIPHMLKMIRLLEDELTLVETWITQARKDVPECDILDEIPGVGPVVCVSLATTLMPIERFDNIKKCAAYTGFISRKKASAGHEIQGMRITKTGNRRLKRDLALAADCAMRRDPLLAAFAIRLLAAGKHYNQVRVAVGRKLATYAYSLLKRVSRGEKNVHYEYRDVRGNVISKEEARKLAETLWQKSERKAKKRKSAA

SEQ ID NO: 349043 - protein, 344 aa, unidentified
MQHYAGLDVSVKETAICIVDENGRICREAKVVSHPEDLSKALTGTGFRIERIGLEAGPLSQWLFEGMARAGLPVICVETRHTKAFLKAQINKSDRNDARGIAQMMRVNLYRQVHVKTLASQKRRALLRARKLLQEKAIAIENDIRGLLRNFGLKVGIVGAAKFEARIKELIEDMPDLEEFIDVLLAARRKLRDSFSRLHGKILELVGNDAACKRLMTIPGVGPVTALAFISTIDIPARFRRSRSVGPALGLTPVLKQSGESERVGRVSLCGDGMMRGLLYEAAQSMLTRVKKWSWLKAWAMTVARRGGLKKAVVALARRIAVIMHRMWIDGSEFRWSREGAAEI

SEQ ID NO: 349044 - protein, 408 aa, unidentified
MNPLFVGIDVSSKNNVAYLMKPDGSKHSSFSVQNNLGGAKLLSEKIVSALHSMQLNDVVIGLEATSIYGDSLVYALREDGGLGRFQRKIHVLNPKQVRKFKEAYPDLPKNDWVDAFVIADHLRFGRIAKEVYMDDYRYQALRTLTRARFDIIQNLTREKQRFANYLFLKCSGIAQDKDIQNTSATTIALMEHFETVDDLANADLDELTAFISEAGRGRFVDPDATAKAVQAAARGSYRLPKTVNDTVNQAMSVSIASMRALKEQVKVLDKAIEQQFEIIPNTLTSIPGIGKVYSAGIIAEIGDIHRFNSQASVAKFAGLVWHRNQSGDFEAEHSQMIKSGNRYLRYYLLEAANSVRRCDSEFRRYYDLKLKEVNKYQHKRALALTARKLVRLVFRLLKDNRLYIPPEG

SEQ ID NO: 349045 - protein, 349 aa, unidentified
MRFYTNQHPYYCGIDLHARSMYVCVLNQEGEVLVHRNLPTTREAFEKVIAPYCAQVVVCVECIFSWYWIADLCCELGIAFVLGHALYMKAIHGGKTKNDKIDSQKIAALLRGGNLPMAHAYPQEHRSTRDLLRRRMYLMRHRAELLAHIQNTNTQYNLAGFEKRIGSRSNRATLADHFEEPMVRTSIEADVQVLDRLHEVLLMMESTVLAQAREADPVALQLLRSIPGVGKILSLVILYEVEDVNRFAKVGNFISYARLVKCSRESAGKNSGARNSKIGNAHLKWAFSEASVLFLKDHQAAKDWHDKLVGRYGKGKALSIIAQKLGRTVYFMLKRKEPFDPKKFFGTDA

SEQ ID NO: 349046 - protein, 396 aa, unidentified
MDQDRFDVFVGLDVGKEHHHATALNSAGRRLHDKALPQDEAALREVFDKLTVHGSVLVIVDQPATIGALPVTVARAMGIEVAYLPGLAMRRIADLHPGNAKTDARDAFIIAEAGRTMPHALRRVGGDDDLIADLAVIVGFDDDLASEVNRVSNRIRGMLTQIHPALERAIGANIGHPAVLALLAKFTGPTGLAAAGRRRLTTTTKPLAPRMHTRLVDAIIKALTEQTVVVPGTRAAELVLPQLAAQLQGLLAQRAAAAKQVEEALDAHPLSQLLMSMPGVGIRTAARLLLDVGDATAFPTAGHLAAYAGLAPVTRRSGSSIRGEHPSRAGNKHLKRALFLSAFAALHDPDSRAYRKRAAGKKHNAAIICLARRRVDVLHAMLRNGSFYQPRTPAAA

SEQ ID NO: 349047 - protein, 377 aa, unidentified
MQDLLEVCCGLDIHKENIVACLLTGSTDVKPTSEIRTFSTMTYGLQELKAWLNDSNCQHVAMESTGIYWIPVYETLESESENMHLLVVNARHMKNVPGKKTDMRDSEWIATLLRAGLLRSSFVPEKRIRELRHLTRYRKSIVHDVTAQKNRIEKFLQSAGFRLSVFLSDTFGVSGKNIMRHLITHSSIDLKDLENCLKGQTRRNANNILVSVNGTMSAHQQQFLAISLDHLEILEAHLKQIEQALEQEAKKFEAAMNILTSIPGISKIAASSLVAEIGINMSCFPTAEHLSSWAGMSPGNNESAGKRRSTAVNHGNPYLKSMLCEIAWVIAGNRNAYLKQMVLETQTAQGGQKGDCCSRSKTTGDNLCYAKKRHCLR

SEQ ID NO: 349048 - protein, 452 aa, unidentified
MPKTTASENLTRMNPGAAAIDIGSTMHMAAVNPESNGTPIRAFGTFTHDLHDLAAWFRCCGVTSVAMESTGVYWIPAFEILEQHGFEVILVNARYAKNVPGRKTDVNDAAWLRQLHSYGLLRGSFRPNAQVATLRAYLRQRERLVEYAAAHIQHMQKALMEMNLQLHHVVSDITGVTGMKIIRAIVSGQRDPDVLASLRDVRCHSTVETIRASLIGNNRDEHVFALSQSLELYDFYQAKMLECDRKLEAAIASMTTELEATLAPLPKIRTKTKQTNAPSFDVRAALYGLTGTDLTQIHGLGSSLTLKLIGECGTDLRAWSSAKHFTSWLCLAPGNKISGGKVLSSRTRRSSSRAAALLRLAATTIGRSDTALGAFYRRMAGRIGKQKAVTATARKIAVLFYNALRFGMVYRDPGAAAYDERHRGRVIANLQRRARSMGYELTPMVCAKECVS

SEQ ID NO: 349049 - protein, 339 aa, unidentified
MQIHSVGIDLGKTTFHLVALGAAGKVLVKKKFTQRQLLAYTANMQTSLIGLEACSGAHFLGRALRKQGHDVRLIAAQFVKPFVKSNKNDFVDAEAIAEAVERKNMRFVPIKTDDQLDLQAIHRVRDRLVSRRTAVINQLRAFLLERGMVFAQKPAKLKAAMADILENAEADLTPLMRNLIDTLWGEWKLVEQQIEELNVELERISASDAGCTRIRKIPGIGPVVATAIVAAIGNGAAFRKGREFAAWLGIVPRQYSTGGKAKLFGISKRGNVYLRKILIHGARAAVLRIKRDRASIGAWLDALDARAPKNVVVVAMANKLARIAWAVLSSGNEYRPVAA

SEQ ID NO: 349050 - protein, 333 aa, unidentified
MVEGTLGSHHKEGSKKMSKYSMICAGIDTGKRKLDVALDGRAERLQVDNNADGHKALSVWLRRHRTKRVGIEASGGYEQAVVAELRRDHFQVIVFQPAQVRAYAKFHLQRAKNDKIDAALIAACTAAAKKIHAPPDPRLAPFSQHLTMIEQITEDIARFKTRRESCRDPRIGRFWDEEVARLKRRLKIELEQLLAAIREHRDLAERLDLIASVDGVGERTALAILVRMPEIGTLSREQAAALAGLAPYDDDSGDQVGARRIDGGRERLRKSLYAAALAASFRWNAQLGAMYRRLLAAGKAHKLALVACARKLLIFVNTVVARGTPWLAQAAAH

SEQ ID NO: 349051 - protein, 401 aa, unidentified
MIYCGIDWAEKTHDVALVDDDGTLLAKRHITDDATGYKILLDLLAEHGDTEDTPIPVAIETSRGLLVAVLRTGKRQVYAINPMAAARYRDRHAVTRKKSDPGDALVLANILRTDMHAHRPLPQNSDLARAQQDAVWNRQQLANQLRSLLREYFPAALDAYLHWQNGLCRPETRVLLELAPTPSRAARLSLAQLRSALKHAGRQRGIDADAERIREVLRAEYAHQPPLVEDALGKQMLALLRQLNAACIAADQLAEAVEEAFPQHPDAEIILSFPGLGTQLGARILAEIGDDHTRFTTARGMKAYAGASPITRASGKKSSITRRWVKNDRLNHTGYLWAFAALTASTGAKAHYDRRREVGDWHAAAQRNLFNKMIGQLYHCLQKHILFDETLAFRTELPAAA

SEQ ID NO: 349052 - protein, 313 aa, unidentified
MNEILVGIDVSKARLDVAVGEGERYSVANDLTGHAQLSERLMAVKPRLIVMEATGGWERAAAAHLTAQALPVRVVNPRQVRQFAQAAGILAKTDQLDAAVLVRFARAMQLEPRELPSEQVQALRALIARRNELTEMLTMERNRLRLAHKSVRQRLKKSIEWLERQIGSTDHDIDGMLRECGIWRDKVELLESVPGIARLTSLRLVTTLPELGTLNRRQISALAGVAPFNQDSGQWRGKRRIYGGRAEARTALYMAALVGSRHNPVLRAFYQRLRAAGKPAKVALTACMRKLLVILNVMLRERRAWDPRVTSAA

SEQ ID NO: 349053 - protein, 419 aa, unidentified
MVYVGVDIAKVDHVVGAVDGRGERVCRPMSFKNSEDGFARLGAWLEGVAGDPSEAVVGMEATGHYWMACYAFLTARGYPVAVINPMQVRAVRDLRGRSRVKNDRVDSELIAETMRVGQCDPTRLATDDVQALRLHTRYRQNLRDAVAEAKTQAKCLLDAYFPEYEGTFSDDFGAASMAVLKRCPTAVECKRTQARTLSRLMSEASRGRLGDAKAAELKGKAASSVGIDLAWEAASLEIRGHVAHIEYLEGEIAKLDRVVSEMLRKVEPLVLTVPGVGATVGAQIVAEIGDVSRFRNAAALVSYAGLNPGVSQSGKFEAADTHITKKGSAYLRRAMWLAASRAYQYDPALGEFYARKRAEGKSHREAVTAVARKLCHIVFAVMRDQRPYDPSLPGRDPSQSDAKKQPVFDSQSTSNADKS

SEQ ID NO: 349054 - protein, 399 aa, unidentified
MAQPVWAGVDAGKADHYCMVINDDAQRLLSQRVANDEAALLELIAAVTTLADGGEVTWAIDLNAGGAALLIALLIAAGQRLLYIPGRTVHHAAGSYRGEGKTDAKDAAIIADQARMRHDLQPLRAGDDIAVELRILTSRRSDLVADRTRAINRMRAQLLEYFPALERAFDYNKSRAALILLTGYQTPDALRSAGGARVAAFLRKRKARNADTVAATALQAANAQHSIVPGQQLAATVVARLAKEVMALDTEIGDTDAMIEERFRRHRHAEIILSMPGFGVILGAEFLAATGGDMAAFASAARLAGVAGLAPVPRDSGRISGNLKRPRRYDRRLLRACYLSALVSIRTDPSSRTYYDRKRTEGKRHTQAVLALARRRLNVLWAMLRDHAVYHPATTTAAA

SEQ ID NO: 349055 - protein, 339 aa, unidentified
MEVTTIGLDLGKDVFQVHGITADGTVVFNRSIRRRQLIKFFETLPNCLVGIEACGSAHHWARELTMIGHDVRLMPAAYVKPYVKRGKTDAVDAEAICEAVTRPTMRFVAMKSKEQQALLTIHRVRQLIVRQKTQMLNVIRGLLREFGHVVGNGPVAAMRFIKTFQTDNNLDMPDVAKSMLKTLCEQVIALDERVTFYDKLIEYHSRIDERAKRVRTVPGVGPITASAIVATIGDGKQFKNGREFAAWLGLTPLNKSSGGKERLGRISKKGDRYLRRLLVIGMTSQVQRARGYPERVHPWIMQLLERKPVRLATIAMANKAARIIWAILTKDTYYRQAAA

SEQ ID NO: 349056 - protein, 343 aa, unidentified
MNLSRVGVDLAKNVYQLHGVDRHDKMVWKRRLRRAQWLQALLDNTDPGCEIGMEACTGAHHWARELQSRGYTVRLIAPQFVKPYVKSNKNDANDAEAICEAMSRPHMRFVTVKSVDQQDIQATHRVRTELKDHRNAKANQIRGLVAEYGLVAPQTLLALRRAIPEWLEDADNDLTDYFRSLLHGLWNDLLTLEDRLKELDKTIETLARNNEVTKRLQQLRGVGPIVATALVATVGTGEQFKNGRQMAASLGLTPRQSSSGDKRRLLGISKRGDVYMRTQLIHGARAVVSQAKNRDDPLSRWATDIAKRRHPNVAAVALANKTARMAWAMLQNETDYDPNLAVG

SEQ ID NO: 349057 - protein, 400 aa, unidentified
MISIDGVGVFLGLDVGKQTHHGHGLTPAGKKVFDKPLPNSEPKLRAVFDKLRDKFGTVLVIVDQPASIGALPLTVAQDAGCQVAYLPGLAMRRIADLYPGEAKTDAKDATVIADAARTMPHTLRTLDLTDEVTAELGMLVGFDQDLAGEANRTSNRIRGLLTQFHPSLERVLGPRLDHQAVTWLLERYGSPQALRKAGRRRLVEAVRPRAPRMAERLVEDIFTALDEQTVVVPGTGTLEVIVPSLAKSLAAVHEQRRALEARIEALLEAHPLSQVLTSMPGIGVRTAAILLTTVGDGSSFPSAAHLASYAGLAPATRQSGTSIHSEHAPKGGNRQLKRAMFLSAFAALHDPASRTYYDRCRARGKTHTQALLRLARHRISVLFAMLRDGTFYEPRTPRTA

SEQ ID NO: 349058 - protein, 345 aa, unidentified
MKNSNVIGIDLAKHVIQVCKIDKHGELISNKAISPSKLKELLAKTVPSIVAMEGCGACHYWSRLAQKYGHDVRVISPKKVKGFLQGHKTDANDALAIAIASIQLGMKFSQIKTEEQQSLQTLETSRKFLDKELVALNNHIRAYLYEYGIISRRGRKSLRETMAIVLDDLDTRLPACLKNTLGLLWERYKLTVEQLTEAEKYKAHLVNQLEPCQRLMDLEGIGKVCASMLYANIGDGREFKNGRQASVYIGLTPKQHSSGGKTYFTGIDKQGGNKELRAALYQGALSVIYKLPSEPRTLKEAWLIELVKRAGVKRTCIALANKTVRTAWALLATGKSYEPVPLGRS

SEQ ID NO: 349059 - protein, 392 aa, unidentified
MQVTRIGIDIAKRQFEVHGVDERGTVVVRKSLKREQVSEFLAQLPRCEIGMEACGGAHYWHRELSKLGHTVRLLSAHKVKPYVVGNKNNRHDAAAICEAMSRPTMRFVEPKSPAQQDLQILHRARALLLRERTALSNQLRGVLHEYGIVMPLGAAALKRKVAEVLAGDDERASSVLRTVIGEQLERFTYLSQRLAKYDRQIAQFCHQDERCRRLLAVEGIGPLSATALVATCGNGQEFQNGRHFSAYLGLVPGHSNTGNKTVMLGITKRGNRYLRTLLIHGGRAALYAARRRSDPRSRWLKRLQERHCTNLAAVALANKNARIAWALLRYGQEYCPTRAHAQTATSARTARPAQSTPASAVHRARPVRSRTHSSAAPSAHHEGRGERMLRKN

SEQ ID NO: 349060 - protein, 377 aa, unidentified
MKGTSPSRGCDEVVANGNESAMMEMSVFINTTGGEVMNIVTVGIDLAKNIFALHGVDQSGRAVLVKPKVRREQLLELVASLPPCLIGMEACTGAHHWARQFEQHGHTVRLIAPKFVTPYRMSGRRGKNDAQDAAAICEAITRPHMRFVPIKNEHQQAILTVHRTRQGFVEERTALYNRLRGLIAEFGVVLPQKIERLRCEIGQYLEQLPGWANRCVGDLLSHADRLDERIREYDRAIAEMARDDARCQRLMRLPGIGPTTATALVASIGIGHDFKHGRQVAAWFGLTPGQYSSGGKTRLGRITKAGDAYLRSLLVLGARAVLNSLGDKTDRFSRWARNLLERRGYWRAAVAIAAKNARLAWAVLKYGEAFRLELDVT

SEQ ID NO: 349061 - protein, 367 aa, unidentified
MKKVSTTAAKQIRNFSQQKLTIGLDLGDRSSWYCVLNEAGEVLLEQRLATTPKAMQEVFGGMPRCRIALETGMHSHWVSRVLSELGHEVIVAHARNVRLIGESRKKDDRLDARTLARLARIDPQLLSPVKHRRAKAQAHLTVIRARAGLVRSRTALINTARGVTKSYGERLRGCNPRNMNPEKAEGLSPELQAALAPLLAAIEALSERIHEYNQQIEKIARESYPQVARLEQVKGVGTLIALTYMLTLEDPHRFRKSRDVGCYVGLQPGRRNSGQSEPQLHISKEGDPYLRTLLVQGAHHILGPFGADSDLRRWGLKLAERGGKNGKKRAVIATARKLAVLLHRLWVSGKAYEPLWNSSPVRMTVAA

SEQ ID NO: 349062 - protein, 354 aa, unidentified
MTETSPCEIIVGVDTHKHTHAAVAINTLGARLGAMTIPVSTTGYRDLEAWAKPFGPIRAFGIEGIGCYGGGLSRFLQANGHPVFEVNHRQLRHQHGKSDPLDAESAARAVLGGQATALPKTSTSTVEMIRHLKVARDTAVKGRTQAMQTVKAIIVTAPAGLREQLDGITGKMALIRRLAALRSGKLTSTTASAKASLRAIARRWLALDTEIKAHDRHLEELTQECAPAMLEGHGIAAGTAAEMLLLVGDNPDRIRSEAAFAKLCGACPIPASSGKTTRHRLNRGGNRQANAALYRVVIVRMRGHQPTLDYVRRRTAEGKGKMEIIRCLKRFVAREIFGYLCGQPKSTLVAQSDP

SEQ ID NO: 349063 - protein, 414 aa, unidentified
MDVVVERCAGLDVHRDSVVATVRVPGTGKSRRRREQRTRSFGTTIGQLETLADWLADFGVTLVGMEATGVYWKPVFYVLERRFECWLLNAQHLHNVPGRKSDVIDSAWCCQLLEHGLVRPSFVPPPEIRRLRDLTRLCIAQVEERTRAIQRLEKVLQDAGIKLTSVASATYSASARAMLEALLGGVTDPDQLAELAKGKLRAKIPQLREALANRFELAHHGVLVAGLLAHIDALDQTVATLNARIEAATEPYAELVELLRTIPGVSVNTARVLIAECGVDMSVFGSAEHLVSWAGICPGINTSGGRRRSGKTRYGSRWLRKTLTESARAAARSKGTYLASHYWQIRGRRGDAKAIGATRHDILIAYYHITRDRVPFRELGADWLARRHSVEHRTRRLVRQLEALGHTVTLEATA

SEQ ID NO: 349064 - protein, 313 aa, unidentified
MSYTSRFVGIDISKSSLDVCVLPDGQMAAYQNTPAGIADFLTFVVSLEGIERLVLEPTGGYERHVVAALQAARLPVAKVNAKQVRQFARAGGQLSKTDRIDAFILADYARRMETRILLQRSSRERVLADFVSRYRQLSHMIVQEKNRREKASGQTKDWVEESLNFLLDQRQTIVDAMTACLKADADLGRKAEVLMSLKGIGLRTACFILADLPELGHMDKGKIAKLVGVAPLNRDSGLMRGKRMIAGGRRQLRDALYVAALPAIRFDPDMKAFFQRLKQKGKPSKVALVAIMRKMIIILNARIRDANATVLDT

SEQ ID NO: 349065 - protein, 417 aa, unidentified
MTDDAQWFAGIDWASQAHRVCLIDASGKIVGERAFAHGGAGLAELCAWLLAMTGAAPTVIAVAIEVPHGPIVETLLERGFQVYAVNPKQLDRFRDRFTVAGAKDDRRDAHVLGDSLRTDRHCFRRLSTEDAMVVELREWSRMTEDLQQERNRLANRVREQLWRYYPQALAISDDLAADWFLELWAAAPTPTKTARLRETTVDRILRKHRIRRITAAEVLPLLRQKPLAVAPGTAEAASAHIRTVAQRLTLVNRQIKQAHRRLDELCARIADNEAGSAVGQKPEQRDVTILRSVPGVGRIVLATLLAEAAEPLRRRDYHALRTLSGVAPVTKRSGKRCIVIMRQACHMRLRTAVYHWARVAIQHDQLSRHRYAELRKRGHSHGRALRSVADRLLAVTCAMLTRQAQFDPDYSVKRMAA

SEQ ID NO: 349066 - protein, 418 aa, unidentified
MKKHSKSSQRSEPTLKRRKARGPVQRDAKEVLAEVLGKLTGKLDAPAVSTSAKENRRRNTVGPNRDRLTVGVDLGDRWSQYCILGLEGETLAEGQLRTTQEDVREFFQALTVARVVIEVGTHSAWVQDVITEWGHEVLVANPRLMEGSKRRKRKSDRIDANKLARLGRVDPQSLHPIRHRSREVRQDLVVVRARDALVAVRTELINTARGLVKSMGTRLPRCSSPSFAEKVKDAIPVEVREALLPLVQLVETVKDCIARYDQKIEELVREKYGHTTLLRQVKGVGPITSLAYVLTLEDPQRFSSSREVGPYLGLVPKQEDSGDSQPQLGISKAGDRMLRRLLVGSSQYMLGAFGPDTDLRRYGLRLCERGGKNAKKRAVVAVARKLAVLLHHLWVTGDVYEPLHHTGAETRTAQATAA

SEQ ID NO: 349067 - protein, 399 aa, unidentified
MAGFDVHRRQITVDALDTATGEVSRGQIESTPAAVEEWVAGFAGRVVHVAVEACTGWLCVSRALERCGAIAHLAEPVETSALRGRKRRAKTDRADARWLRQLLCEGRLPEAWQSPEHVRQWRSRARLRNTLVAERTSWTQRIRATLYHHGVAGAPDELRTLAGRRLRAGLQLPVDAQERITIALEIIDLLDAQLAELERDLRELARRQAGCRALMAQYGMGEICSLVTLCELGDVTRLHASRQAVRMAGIDIGVHRSDRHAQLGKLTRQGSAPLRSALFEAAQSASHRGSPDYHDYHALKARELSHTRASLTIARKLARRSYHILRALGPAALDPPDHRSDQAHQSPMRSKRAASSRSDRGTHAPRGGPRKTERPQSLHRNDRSTIKSPAANARGRGPR

SEQ ID NO: 349068 - protein, 430 aa, unidentified
MPYRITGIDVHKKMLAVVVSDVEVEGEYHFERRRFGSNPEQLRSLAAWLLEQEVEEVVMESTAQYWKPVWEALERHWKPLRQKKEGASRRSGTTHLAQAQSNRGRRGRKRDFPDAERLVKRLVARELILSFVPDTEQRLWRTVTRRKYQLTRDRVRLQNQLESLLEEVHIKLSCLVSDLLGVSAQRMLKALADGETNPAALAALADRKLRATPEQLCDALGACTDLKPVYRRLLKMVLEQLQFLDQQIGQLDQEMAMLLNQHQDAVTRLAEVPGLGVDSAQQIIAEVGPTAATFPSAKCLSSWVGACPGDDESAGVNYSHRSPKGNRHMRRVLNQTANAAARTKGSIFEIVYRRCVPRLGHNQAIGAIAHRQCRLIWLILRQGVRYEEQGPAVTKQSKQRRTARMIRQLRALGYRIELPNPQHSSSAQVQ

SEQ ID NO: 349069 - protein, 425 aa, unidentified
MSEKIVVGIDVSKAFSDICILSPNNDIIKRLKISNDITGMKSLIYVLEKVEDEYKDRAVIIMEATAHYHQILANFFRKHNYEVIVINPIQSGALKNINIRKIKSDKTDAYNIALLYRIKNYNETTTHSDTVNSIKKLCRQHKELTDEIVEHINRLIAFLDISFPDFKKVFTDLQGKTPLSLLEKYPTIQEVLSPENKQDIIQLIKENSHKSSSYAEVKYEKLLKAAEKSIEVCIASLSSAVLIQTTVRVIFSLQEALKAIDDEIKRLSLLDEKFHKEIVLLQSIPGVGEYTACVVLSELGDISNFSKPKELVAFFGLDPGVTQSGTYNRKNNKISKRGSPHVRSILHMLAKSNVYPNRNREYLNPVMRAYFEKKIAEKPYKVVMCAIMRKMVQIIFAVLRNQKSFELRTPEEHQKLIREKSKLVA

SEQ ID NO: 349070 - protein, 351 aa, unidentified
MSHKTAATVVHTIGIDTGKNTLHLIGLDDQGAIVLREKIARGRIAARLANVPRCLIGIEAGMATHYVARELSALGHDVKQVPPAYSKPFRQGHKNDFRDAHAIAEAVQRPSTRCVPVKTDDQLDLQALHRVRSRLVGQRTAVINQIRGFLLEHGIAVRQGLRFLRQQLPDILAKRSDVLSPRMIRIMEDLSGDWRRLDERIEHITKEIEVLAATDVNCGQLMTVPGIGPIVASATVAAIGNGAAFARGRDFAAWLGLVPKQMSTGDRTILGRITKRGNRYLRMLFVQGARAILLRPKSWVKHSFGPWLTTAARRLHRNILTIALANKLARIALSVLIQGRSYETRIVLAAA

SEQ ID NO: 349071 - protein, 342 aa, unidentified
MYYIGLDVHKKTISYCVKDASGQVHQEGKVGATRRELDSWIKTLPQPRTMAMEATIFTGWIYDHLLPHAQQVKVAHPLMLRAIAAAKKKNDRIDAGKIADCLRCDFLPECHMASTQIRDRRRTLRYRHLLVRQMVQMKNRISGLLMETGVSYNKQRLHKVGYFRELLSTNEDVHESIRPLLKLSRDTVVRLQKTEYALVSSLQRDPLLADRVKRLRTVPGVGPITALAWALEIGDVARFRSIRQAISYCGLCGEEKSSADKVMRTPLSKQRNKHIQRVLVEAAKLAPRQDHDLALVYETEKQKGNANRATLAVARKMVAYLLAVDREERDFVRAENYQRAAA

SEQ ID NO: 349072 - protein, 374 aa, unidentified
MSFHSNTILVALELSNSLWLVGIRLPGEEKSRMHRIKAGDAAALLRLLEGIRERRSTISGFPATVICCFEAGRDGFWLHRLLTAHYIPTHVVESTSILVSRRAKRAKTDRLDAEGLLRVLAAYLAGDTQICRMVRVPTPEEEDGKRVHREREYLVQERTRIENRILALLATQGIRRRPSLRTWAQDMAILKTGDGRMLPRHLAAELDRLRRRLVLTMELIRELDAERSDLLAATPNDALSNKIIALQRIRGIGENFSAVLVREVLYRPFANRKQLASYVGLAPMPHQSGNMDRDRRIGRAGNARARKTLVQMAWLWLRYQPESGLSIWFRERVGELQGRTRRIAIVAMARKLLIALWRFTETGEIPDDVTLGTA

SEQ ID NO: 349073 - protein, 449 aa, unidentified
MREPQEIEDEEHEQLVERVAAVDVAKAPGMVCTRVPHPSRPGRRRTRVQEVDATTNSIIELGGQLAAEGIEKVTIESTSDYWRPFFYLLEAAGLAVQLVNAHDVKNAPGRPKTDKLDAVWLAKLTERGMLRPSFVPPAEIRQLRDYTRLRTDLTRDRARHWQRLEKLLEDALIKVSAVASTMDTLSVRDMLEALIAGERDPKVLAGLARGKMKAKRAALIEALTGKFDGHHAELARMLLDQIDALTAQTGTLTTRIEELIAAIPAAQGVDADGTTGPGAGTGPDAARLNAITRLDEVPGISAHGAQIILAEIGLDMTRFPTHGHLVSWAKLCPRTIQSGAKNRSGKSGKGNPYLKGILGEIATAAAKTDTFLGERYRRIVKRRGKLKALVAVARTILVIIWHLLADPAARYEDLGAGYYASRTDTERKTRNHIRQLEALGYTVTLTQAA

SEQ ID NO: 349074 - protein, 366 aa, unidentified
MLFVGLDVHANATTLTVRDAQGLIIRRDVVVTTREALRRRFRTIRGRVRIACEAGPLAGWISSVLTTRLREVVICDPRQNNLLLKGTKTDRVDADNLSELIRLNALRPVFLGDSENRQLRRLMGHYLSSQNDRRRHIHRLHSLFRNLGIQFEPQPGKPERVPLRRLKDRASRFVAHAQLDQIAGLKTIVADARRELLAKAAQFPGFYLLQTIPYIGEIRAAEMIAIVGIPQRFRSLRQFWAYAGLAVVRRVSSEHRAQDGRTVREQVARGLHLNRNRNLRLKKIFKDIALYASLGRGEFRAVYDRHIARGKHPSIARVSLARKVAAIARAVWCSGEQFKSTRMAEHNGNSSGRASMRKFGPEEAPS

SEQ ID NO: 349075 - protein, 347 aa, unidentified
MVIIGCDFHPGFQQIAMLDSDTGEIRQVRLAHKQEAQQFYAQLRGREVLVGMEACGYTQWFEQMLEQMGHRFQIGDAAAIRASYVRKQKTDRRDAGHILRLLVEGRFPALWVPTSGDRDARQLIVHRHKRVQLRTRVKNQLHALALNQGLRLRWQLWSKKGLEQLRALELLPYAAARRGDLLRQLEEMDGEIEQLDQAVRREAEARPAAVRLMSHPGVGPVTALAFVLTIGDVERFRRSRQVASYLGLIPVEHSSGGKQRLGHISKQGNPLLRFLLVEAGHIAVRGDVELRRVYTRVQHRHSTGVAKVAVARKLAVRLYWMLRKQIDYAQLRVGPYAGKPVSFCGRK

SEQ ID NO: 349076 - protein, 356 aa, unidentified
MSHDVKYIGMDVHKEAIVIAVLNGSGKLVMETILETKASSILQFIHGLRGELHVTWEEGTWAAWLYDLLQPQVQQVLVCNPRRNALLKEGSKSDKVDARKLAELLRTGMLRPVYHGENGLRTLRELGRSYQTISKDLTRVMNRVKAVYRGWGIPCAGTQVYVPRYREEWLSKIPQSGVRRRAELLYQQLDGLLALRREVRGEFLAESRKHKAAKLLRQIPCIGPIRAAGLIALMQTPHRFRSKRQLWTYSGLGIETHDSAQYRYVNGQLQRSKKPQQLRGLNRNHNHEMKEIFKSTATSASCGRGPFHDFYAALLDKGMEPEMARLTLARKIATITLTLWKKEERFDAEQLKTQAA

SEQ ID NO: 349077 - protein, 355 aa, unidentified
MKNFKNIQDFIMNKNIYCGIDVHFKYWFLCFVCDGEIVEKIRVYGNYSNLKQVLKRYHQSKNIRLVYEAGFSGFWLYRELTKDGYNCMITSPSLMPTTADKVKTDKRDAEKLAYYLVAGILKSVYVPSEIAEADCRVMRCRAQVVKKQNRAKHQIRSFLNLKGIKKPEYIKSNWSKQYLTWLETMTFKFESEKFCLSILLQDYHHNNSKLEEVTLYLRKMSESPTYQKNYKSLTSAPGVGLITGMTLLLEIYDFGRFKSGERFGSYLGLTPSQFSSGPHVRLGHITRQGKAVVRKVLIEAAWTAIRFDPHLRAKYNRIRAKGENGKKAIVAVARSFAIRLRSALLDGTDYVIGVC

SEQ ID NO: 349078 - protein, 453 aa, unidentified
MPKSSSSMPQNLTRMNPGAAAIDIGSTMHMAAVNPDCADMPIRSFGTFTHDLHDLAAWFRSCGVTSVAMESTGVYWIPAFEILEQHGFEVILVNARYAKNVPGRKTDVSDAAWLRQLYSYGLLRGSFRPNAQVATLRAYLRQRERLVEYAAAHIQHMQKALMEMNLQLHHVVSDITGVTGMKIIRAIVSGERDPDVLASLRDVRCHSSVQTIRASLIGNDRDEHVFALSQSLELYDFYQAKMLECDRKLEASIASMTVDPEAPLPPLPKVRTKTKQTNAPSFDVRAALYGLTRTDLTQIHGLGSSLALKLIGECGTDLRAWPSAKHFTSWLCLAPGNKISGGKVLSSRTRRSSSRAAALLRLAATTIGRSDTALGAFYRRLAGRIGKQKAVTATARKIAVLFYNALRFGMVYRDPGAAAYDERHRGRVIANLQRRARSMGYELTPMTAGDRVS

SEQ ID NO: 349079 - protein, 350 aa, unidentified
MIIIGADYHPGFQQIAFVDTDTGELQERRLEHREEAEKFYRDLAAQGMRVRVGMEASGHARWFERLLGELQFELWIGDAAEIRTKRVRKQKTDRQDAELILRLLLEDRFPRVWVPSWENRDLRQLLWHRHRMVQARTRIMNQLQAVALNEGLRAKKRLWRDAGREQLESFRLSPWASRRRHDLLELLDRLTPTIAELSQAIEQEVEKCPEAQRLQTHPGVGALTALAFVLIIGRVDRFPCGKQIASYLGLVPLEDSSGQRRRLGHITKQGNSLLRFLLVEAAQVTVRSDPEWRSKYFHLAMRRGRKIAKVAMARRLAVRLYWMWRKEWDYEQLKHFGSHAGEPGNRDGVR

SEQ ID NO: 349080 - protein, 313 aa, unidentified
MFTLGFDVAKDHHDIALTNKSGQIKDRWQIPNTYQEVSRLLTTIHLAHSKLTVGCEATGSYQLPVMQACLRLGIPCRLLNPLTTKQYTKTTIRGRKTDRDDALSIARLTQRGEGNLVTVATLNPARNYVRLATKIQQHLHAIKLEQRYLSDITGKEVDLGFLAVAAELEQLTLNLRAQATTHVDLVSYQLLLSLVGVGPAIAVSLSAEVGDINRFDSAKQLVAYAGLDPRVRQSGTVLNRNTRLTKRGSSELRHSLFLAANIARQHDPDLKTYYQKKRNEGRTYTEATVATARKLCYRIFAVLSRGTPYVKSS

SEQ ID NO: 349081 - protein, 360 aa, unidentified
MESTPLIAFDQHAATTVAAVLLPGQRTPAVHTLASDSPTILRFVERLRRQGAVRCCYEAGPCGFELQRALTSRGIPCDIIAPALIPRRPGDRIKTDRRDASQLAVLYRAGALTAIHVPTEQEEAARDLLRCREDIRADLLRARHRLSKFLLRHGRRFTATKAWSKRHEVWLRAQTWPLLALEQTHRAYLRTVEEAIARLRAVEQDLRALLALEPLRPRVVRLRCFRGLDDLTALTIAAELGDARRFPSAPSTMAYVGLVPSEHSSGTKQARGAITKTGNAHLRRVLVEAAWHYRHHPFVGDALRRRQQGAPDTVVTQAWAAQQRLYRRYQRLAARGKPKQHVVTAVARELTGFLWAALTQ

SEQ ID NO: 349082 - protein, 346 aa, unidentified
MNKITRIGLDIAKNIFVLHAVNEHGKTVKRQTLDRSKVLSFFAQIEPCIVGIESCASSQHWAREITKFGHTVKLMNPKFVIPYRKSGKNDANDAEAICEAVGRPNMRFVPVKSVEQQAVCSLHTGRQFLVVQRTALINHCRGLLTEFGIIMPLGADKVRRLFAEILADENASVPLFLKDLLQQHLQDLARLEQRIDAIDKQLAEWAKTNQQAMTLLQMLGVGVITATAFAAGVCDAQLFENGRQFAAWLGLVPRQYSSGGKNKLGSITKAGDVYLRTMLAQGARSIVFNAKKKSDPFSLWIQRLLERAGMNKTVIAVAAKQARIMWAIMAKNQDYQPERICSPLSA

SEQ ID NO: 349083 - protein, 416 aa, unidentified
MTNPVLVGIDVHRKTNTVCIMDSQGQELTERFTVDNNRPGTDEFVKRVAKSVSDGSFDSIHVAAEATGWYWFHFFVTLSQDAFLNQWQVNLYPVNPRLTKNFKKTYVDMDHTDTTDAFVVADRLRMGRDLPVPFQYDDVYWPLRFLVRYRYHLVHNLAREKAYCMSLLYLKASEYSRVKPFSTIFGAASQAVLKEFSSVEDIAAIPFDELVEFIDRKGKRRFSDPTENAAKLQEVARNSYCLPEAMQQPVHLILKLSLQHITFLERQLKRLDTAIAQRMESITHILYTIPGFGPVFSAGIIAEIGDPQRFDYDQAKVAKYAGFKWRKHQSADFKADESKLTRTGNRYLRYYFCEAANSVRMRDRDYAAFYNRKFREVRKHQHKRAIVLTARKLVRLVVRLLATNQPYQLRRWTAAS

SEQ ID NO: 349084 - protein, 318 aa, unidentified
MNTLEKVTNKIGVDVSKKKLDIAINEDTVITIENTESAFQYLLETLSYPLEEVHFVMEATGGYERKFARFLLSKSVSVSIVNAKRVRDYAKAMGKLAKNDVIDARVIRAFANAIELIHLEEKSDKDYKLESLVKRQQQLIKLQTIEKQHLETASEKIIIRSINTIIKLLEKQIVSTEKMIVTLMENTEDHHERKKLLLGVQGIGERTASTLLIQLPELGKLNNKQISALLGVAPFCNDSGPRKGKKQIWGGRKIVRSSLYMPMLSAIQYNPVIRAFYKRLVARGKIRKVAVIACMRKLLTIINSMLRNNTEWNPKYGI

SEQ ID NO: 349085 - protein, 345 aa, unidentified
METMYYIGLDVHKKTISYCVKDGSGRIYAEAEIPATRLDLDMWMKTLPQPWTAAMEATIFTAWIYDHLKPHAAAVKVAHPLMLRAIAVAKKKNDRIDAKKIADCLRCDFLPECYMASTEIRERRRTLRYRNLLVRQAVQMKNKIAVLLMEAGVSYNKQKLHKVGYFRELLATNQDIDEGLKPLLRLCREMVVRLGKTESALVRSLERDSLLVERVERLMTIPAVGPITALTWALEVGDVQRFSSIKKAISYCGLCGAEKSSANITMRTPLSKQRNKHLQTVLIEAAKMAPRNSPELAMVYEQEKQKGNANRATLAVARKLVAYLVAVDRRQKEFLTVERENRTAA

SEQ ID NO: 349086 - protein, 335 aa, unidentified
MKEITTVGVDLAKSVFTVHGVDGMGRPVLRKTVRREKLMELVAGLPPCLIGMEACGGAHEWARRFEGCGHRVGIMMARFVAPYRKSSKNDGNDAEAICEAVARPNMRFVPVKSAEQQAVLSLHRVRQGFIEQRTATLNRIRGLLAEFGIVLPQRADQVRRAAMIAAEELPVLARAAVADLRGHLAYLDDWIGRYEQQLVALAKQHGPARRIQQVSGVGPLTASAITASIASGHEFANGRQFAAWLGLVPRQYSTGGKARLGRITKRGDAYLRTLLMLGARAVLQSAAQKTDRLSRWAQALRARRGYHRAIVAIAAKNARIIWALLANNREFALPV

SEQ ID NO: 349087 - protein, 392 aa, unidentified
MSAISDRVVIGMDPHQRSATIEVMTSDETIVGGGRFDTNRSGYTAMAKYAKQWPHRVWAIEGCQGIGRHIANRLLADGEQVVDVPPKLSARARVFATGQGRKTDATDAHSIALVGTRMTGLRPVVNDEQLALLRILVDRRRSLGVDHTRMVSQLHQLLLELIPGGAKKSLSAAQAKALLATVRPRDAVGKARRRVAAELIGDLERIYRRSKEADKELKELVASTGTTLMDLHGIGPSGAARLLVEVGDITRFPNRAHFASWNGTAPIDASSGEQIRHRLSRAGNRQINRVLHIMATVQLRNPTEGRAYFDRKKASGKTSMEAMRALKRRLSDIVYRCMIEDATAAMAAGPGGQQGTATGSSATDSHPPAGSSEKSLPGPAETQDRTLLPAVS

SEQ ID NO: 349088 - protein, 413 aa, unidentified
MQTLVEHGCGLDVHQSTVVACLLRVRKDGKVQKQLRTFGTTTRELLGLREWLLAEGCTHVAMESTGVYWKPVYAVLEGGELEIVVANAQQVKKVRGRKTDVKDAEWIADLLGHGLLRSSFVPPQPIRELRDLTRYRRKLVESRSAERNRLLKLLESANIKLASVATDVFGLSGRLMLKALVAGQASLLEMAELAKGKLRRKIPQLELALEGKLQEHHRFLLQLQQDRLDAVEKDLATLEHRIRQKLEPYAAQLALLQEIPGVDQTLAAVIIAELGVDMSVFHSVSQLASWAGVCPGNNESAGKRKSSRIPKGNVYLKTALVEAASAAARAKGTYLRDKFYRLKARRGYRRAAVAIAHKILVSIYHMLSQSVSYNDLGDLYLDKLNTHHLTRNLVHRLQRLGYTVTLTPQEKAA

SEQ ID NO: 349089 - protein, 388 aa, unidentified
MEAARGVVLGFDVGRYSHHMTAIDARTGEVVASRGVEQTEPDIREAIEPYALGDAAVVVDQPGDLSSLLLAVARDMGLGVGFITPRAMAKGIELYGGELKSDAHDSFVIADLAARIPSLVRPVPERRADVEELASLMSYDRELTDDVRRAASRIHELLLATCPALGAVYAGQRVKQRLPLAMLARFGGAGGLSAAGRGEVEGWARGQPRCGARGLAFVGSALDAVGSQGVATTSSPFYDELLRIEAASLRSALDAREAVGARVDELLGRIPDAQALLSMPGVGRVTAATFVSEVPDVGAFASAAKLAAYAGLAPRVRQSGRSLNSVTRPRAGNRRLKRALVLSAARSVDFCEESRAYYDRKRSEGRCHYSAVVALMLRDGKRYESRLG

SEQ ID NO: 349090 - protein, 337 aa, unidentified
MNYSGIDLHSNNSVVSVIDETDRVVAERRLPNDLAKILALLAPWRAELAGVVVESTYNWYWLVDGLQAAGFVVHLANTTAIKKYDGLKHSGDETDARYLAHLLRLGILPTGTILPAEHRQVRDLARKRMQLVRSRTSHILAVENITARQSGTRITSNQVKQLDQAAVDQLHLPDDVALAVRANVALITTLSSQIAIVEKRLQEKVAPRPDYSLLTTVPGIGQTLATIIVLETGTIERFASAGNFASYARCVDSQRMSNGKKKSEGNTRNGNPYLCWAFIEAANFAMHFSTEARQFYERKKARTNSVVARKALAHKLARACFHMLKERKPFDVNRCFA

SEQ ID NO: 349091 - protein, 390 aa, unidentified
MERPMQKSNDLSRSLTALEQHGTLIAVIEMSLSSWLVGGIVPGVERHPVKKLAVDESSLLKLLHRWREEAEKAGHRITRIAVAFEAGRDGFWLARWLKASGIEAHVIHAASVAVSREHRRAKTDRLDTELLKRAFLGWLRGERDHCKMVAIPTIKDEDAKRPNREHESLVGEQSRIVNRMKAALIRLGIRGFNPKLKKAAARLEELRTPENEPIPPNTLAELRRDMERRRLVRDQIRQIEEARVERLDHAPCDGPHAMVRLLARVIGVGLETADMLVHEVLSRNMRDRRGIARYAGLTGSPDESGRKRREKGLARSGNGRVRRGMVQLAWRFLMYQKDSALAQWYRARTEKARGTRKPMIVALARKLLIALWRLVRQGVVPDGVVLRPAQ

SEQ ID NO: 349092 - protein, 430 aa, unidentified
MKSNTQNAKIEAITEKTLVLGIDVGSEMHYARAFDYRGIEYSKKPFKFSNTEAGFVTFKEWILDLKERHEKDKVVSGMESTGHYWFNLGKFLQDNEMKPVLVNPHHVKKSKELDDNNPTKNDRKDPKVIAGLVREGRYMIPYLPDGVYADLRTASNIRFQLQAELTRIQNRISRWFNIYFPEYKTVYGKPDAKSGMLILKAAPLPEDILTLGIDGVNQIWRDAKLRAVGKARAKTLIEAAEHSVGSKEGAVSARMEIRMLLEDYESRNTRLQEVMVLIEELVRKIPMAEKLLEIKGVGIRTVSGFLAEVGDISRFNNPKELQKLAGLALVENSSGKHKGETTISRRGRKRLRYLLFEVAMSLVAKNPEFRELHNYYTTRRQNPLKKMQSLMAIAAKLIRVFYAMLTKGVDYDPKKMVSDIKKPAVYLQAA

SEQ ID NO: 349093 - protein, 407 aa, unidentified
MIFAGVDWAEAHHDVHIQDEEGRRLGGGRLPDGIEGIARFHELVAARADDPGEVVIGIETDRGLFAAALVAAEYQVFAVNPMSVSRYRDRHKVSGAKSDPGDAKVLADLVRTDRHNHRRVIPDTELAEAVKVLARAHQSMIWNRRRQLNQLRSALREFYPAALAAFDDLASGDAIEVLKVAPEPALGAALSKTQIAAALRRGGRTRRIDERAAAIQAALRGPQLQPPPVIAAAMGTSVAALVPVIGEMTRQITGLEQQLAADFEQHPDAEVVRSLPGLGTILGARVLGEFGDVPDRYADAKSRRNYAGTAPITRASGTRRVVLARHARNKRLADAIYLWAFAALTASPGARTLYDRRRAAGDTHHQALRAPGNRLVGFLHGCLATRTLYDEDIAWARYTVSTHTKAA

SEQ ID NO: 349094 - protein, 350 aa, unidentified
MLVIGCDFHTRFQQIAMVDTTTGEIVERRLEHATGEARKFYAGLPGPARIGMEATSDAPWFERMLSEYGHELWVGDAAKIRAAMVRKQKTDTRDALHILDLLVTDRFPRIWIPSRAQRDVRQMLRHRHKLVGFRTSAMNQLHFLAMGQGVCRRKKLWTTVGRRELEGLELGPWASRRRRELLQLLDQLHAWIKELDQAVEKEAASCPEAILLMKQKGVGPVTALALVLTLGPVSRFPNSKRVVSYLGLNPSEDSSGGKQRLGGISKQGNSMMRWLLVEAAQTAARFDPELRRDYLRLKFRRGPGVAKVAIARKLAVRLYWSLREQTSPAPPARMQGSPSVPMVDESPSTF

SEQ ID NO: 349095 - protein, 349 aa, unidentified
MITIGIDPHKRTHTAVAVNDVGQLLGEITIPADEEGHRRFLAWANGLGGEEELRFALEDCRHVNGRLERFLLAAGVRVLRVPPKLMAGARKSARTRGKSDPIDALAIARAALREESNLHPASHDPAARELKLLVDHRDAVVRERTVLASRLRRQLHDLEPGLEPVARSLDQASTRRGLSQRLARREQSAQVRICRDLLARIGDLTRRERQLAGEIGERVRDYAPELLAIPGVARLSAGKLIGEIAGVERFKTDAQLAHFAGCAPIPASSGNTQRWRFDRHGNRQLNTAFYRIALTQARVHPGARAYLARKRAEGKSSAEALRCLKRLLVRVVWKTLRASGEPRVALSQS

SEQ ID NO: 349096 - protein, 407 aa, unidentified
MKKQKILRQSIGIDISMSDFTARYTSLDMEGNIKHTKPKSFSNDSSGFKALLKWAEKIKDPEIELRFTMEATGIYYEKLAFFLLDKGKYVSVLMPNIAKKFNESLNNKTKTDGIDARTLGRIGVERNLPKWKISPKIYRDLKKLSRERVRLIKNRTATKSQLHAEEKSGEPMKIIIKQLKQEINFFDRQIKKVEQAMKKIIDSDEYISRKLKKIITIPGVNFITAVTITAETQGFENFTSLKQLWSYAGYDVQQRQSGKYQGRTRISKKGNRHIRRAMYMPALSATQHSKTYSRFYNRLNERKEKKKISLTAVQRKLLGLIYTLWKNDTEFIDNYEEIKANQEESNIGINKKTLLSAKLFSNKEISKEKSLAENNGKNSNEVSKQSSGSRTPTTQDRQKIQKGILSS

SEQ ID NO: 349097 - protein, 276 aa, unidentified
MNIPHYIGFDVHKKTVNYCVKTADGQIVEEGKLPALRMKLREWATSRPCPWQGAMEATLFSAWIYDTLKPHAEQLLMGHPAKMKAITAGKKKSDRLDARTIADLLRCNLLPACYVLSPEMRDLRRLLRYRNLVLQESVRMQNKIAGLLMETGTPFVKEKLHGKKYFAHLLQTLEEVPESVKDLLQMSRGAMEMFQSTQKRLVRCLRANPSLAPRIERLASIPGVGPITALTWALEIADPHRFSSNGDAMSYCGLTSALRSSAGKQQRSPLSKQRNA

SEQ ID NO: 349098 - protein, 323 aa, unidentified
MERFVGIDVGKTWLDVAERPGGGAWRVANDPAGWEQVLAQIGPADPAEAPLIALEASGGYEAGVVLTLDAAGLTPAVANPVATRRFAQSLGRRAKTDKIDAAMLAQYAERMRPTPRPVPDATARRLRELLARRAAVVKMLVEEQNRAHEASALVRPQVEAVVALLTAQKRELDHLLASAVAADPDWQARVDRLDSVPGIGALTATVVAVGLPELGTGSAKGQAALLGVAPHPHESGRFRGRRRIAGGRAWVRHVLYEATLTTVRCEPTFTAHYRQLRARGKTHKQAMIACVRRLLGILHAMLRDGLTWQETKVGQGRFLPHGT

SEQ ID NO: 349099 - protein, 463 aa, unidentified
MRKKDSRGSRQQKPSTASIEEMRLDVVHPHAAGIDVGNEAHYVAVHPKQDDDGEPVRRFACFTADLHRLAEWLKRCRVRTVAMQSTGVYWIPLFDILEQHGLEVYLVNARETRNLPGRKSDVQECQWLWKLHTHGLLQNSFHPAAEVRRVRTLWRQRGDQVSSASRCVQRMQKVLTQMNLQLANVISDLAGVTGQAIVRAIVAGERDPMKLAALRHPRTKASREQIAGSLQGNWRDELVFVLKQELAMYDAYQQRIVECDQHLESYLQSLPEAPSPEPEQPAPPASHKRQRAQGNAPSFDLRAELIRISGVDLTRIDGIDVLNAQTILSEVGWDMSKWKTEGHFASWLGLCPNNRKSGDKILGRATRRVTSRAASALRMAASVLLRSQSYLGAQFRRLRMKLGAPKAITAMAHRLARLVHRLLKHGHAYVDRGTAYYEDRYREQQIRLLQKKATQLGIILQMP

SEQ ID NO: 349100 - protein, 467 aa, unidentified
MTPHKDFFLDSGPPAPTPTRLEPSVLSDALQICHPHAAGIDIGEAEHWAAVPPGCDPQPVRRFGTCTADLDALADWLLACGVTTVAMESTGVYWIPLFELLEARGLQVLLIDPRQAKHVPGRPKTDRLDCKWLQRLHTYGLLAGAFRPADQVCVLRSYLRHRQMLLTYAAHHIQHMQKALQQMNLKLTQVVSEITGVTGMAIIKAILAGERDPQHLAQLRNPHCHHDTDAIAKALQGTWRAEHLFALRQAVELYDVYHQQITQCDQQIKKHLETFADKSAGQPLPPKARRHKKTNEPRFDARTPLYRMAGVDLTTIEGIEENTALVILSEIGTDMHRWPSVKHFCSWLGLCPQHKISGGKVLSRRVRPGAHRVTVALRLAARTLHHSQSALGAFFRRMKARLGTPKAITATAHKLARLVYSLLRHGSAYVQQGLDAYEAQYRERKVTTMAKQAKALGYTLVPLAAQG

SEQ ID NO: 349101 - protein, 338 aa, unidentified
MAIIAIGIDLAKNVFAVHGVDEAGKAVLVKPSVRRDALLELVAKLPACVIGMEACSGAHHWARQFQQFGHQVRIIAAKFVAPYRLSGRKGKNDAADAQAICEAVQRPHMRFVPIKTEDAQGRLSIHRVRQGFIETRTATINRIRGLLSEFGVVLPQKAEVVRREAGRHLEDLPGWANTAIGDSLSELHHLDERIAEYDRHIEAMAKADDRGRKLMDMPGIGAKTASALLASIGNGHDFKCGRQLAAWLGLVPGQYSSGGKQRLGRITKAGDSYLRTLLILGARAVVAAGKNKTDRLSRWAQSVAERRGYWKAVVAVAAKNARMAWAMLSKGEAFKPLA

SEQ ID NO: 349102 - protein, 463 aa, unidentified
MPKARKSRKKLALKVDVTAGLEALHHHAAGIDVGNAEHYAAVPVGRDPQPVQTFGSFTADLHRLAKWLKACRMETVVMQATGVYWIALYEVLEGYGLQVNVVNAKYTKTLPGRKTDVLECQWLQKLHSFGLLNNSFLPPEEIRVLRTYLRQRENLVAAAGACIQQMQKVLTQMNVQLANVSSDLSGMTGMAILQAILDGQRDPQQLAALADPRVQASRKEIAQSLAGHWREDLLFVLRQVHGLYFTYLESITACDQRIEAHLKTMPAKVDVVAQPLPEARPKDRLPNRKHIPQFGLREELYRITGVDLTRIDGIQVQTAQVLVSEVGVDMTGWPTEHHFSSWLGLSPNNQITGGKVIRRGTKKVLNRAATALRLAAQTLHRSQSYLGAKYRRLRAKLGAPKAITARAHHLACLIYRLLRFGTQYHDKGVEQYERKYRETEMKWLQKQAAKLNMQLIPTGALTK

SEQ ID NO: 349103 - protein, 316 aa, unidentified
MDVLGIDISKADFHGCLIQGKKQAKNSFPNVPVGYRRLRTWLRNRGCTKVHVCMEATGAYWEGLACALHEAGLEVSVVNPARTVHFARSQLRRTKTDRVDAEMIAEFCKTQKPDRWSPPAPEILEIRGLLSFRAQLLDDKLRLSQMISQIHVSKELHRLYSTQVKTLNASIAAAEKQLKTVAKTHRTLHRQVQKLTGVKGIALLTALEIIAKLPVERLRDAKAAAAYVGLTPRERQSGTSIHGQPHICKTGNASLRRALYMPAIVATRFNPILKAFADRLKAKGKPAKLVVVAVMRKLVVLAFAILNRDLKEVAMT

SEQ ID NO: 349104 - protein, 345 aa, unidentified
MEITTIGLDLAKNVYQVHAINGAGEVVVRKTIRRAQVLRFFERLDPCLVGIEACGTSHHWAREIRRLGHEVRLMPPAYVKPYVKRGKTDASDAEAICEAVSRPTMRYVAIKSCEQQAALTIHRTRDLFVKQRTQLVNMIRGLLAEFGIEIRRGLTHALSLAERIAAGDMPGIPALAAKMIASLAGQILDLEARLREIERELLAWHRSSEIARRLATIPGVGTVCATAFAASVTDTHQFRSGRQFAAWLGLTPLQHSSGGKERLGRISKMGDKYLRRLLVVGMTSLVRRAKYKPDAVDRWLTDLLSRKPARVVTVALANKAARVIWAIMARGGTYRAPQPAGAAVA

SEQ ID NO: 349105 - protein, 316 aa, unidentified
MGERSVFVGIDVAKAQLDLAQRPEGPGLSAANTESGIATVVAHLRIVKPTLIVLEATGGLERPLVRALVDATLPVVVVNPRQVRDFAKATGQLAKTDALDAQVLARFAQAVRPALRPVPDAPTQELAALIARRRQVVEMLTAERNRLGGAPKRVQRRIQVHLNWLTAELARAGDDLDQAIRNSPIWREQEDLLQSVPGVGPVVTRTLLAELPELGTLNRKQIAALVGVAPLNRDSGMLRGRRMVWGGRAQVRAVLYMGAIVAARFNPVLRAFYQRLRAAGKAKKVALTACMRKLLIILNAIMKHRTPWRTEIAQCA

SEQ ID NO: 349106 - protein, 494 aa, unidentified
MGACELESGDVALATIPIRKMTIGIAQTLLLIIEWRIAMPKKRTAGDRPELKPVNVGAAAIDIGSTMHMAAVNPACTDVPVRSFGTFTRDLHELADWFKTCGVTSVAMESTGVYWIPVYEILEQRGFEVILVNARYAKNVPGRKTDVSDAAWLRQLHSYGLLRGSFRPDAEIATLRAYLRQRERLVEYAAAHIQHMQKALMEMNLQLHHVVSDITGATDMRIIRAIVAGERNPDVLATYRDVRCHSSIATIRAALVGNDRHEHVFALTQSLELYDVYQAKMLDCDRKLEVLIAALNNKGAKPIGKLSKPRIKTKQVNAPTFDVRTALYGVLGVDLTEIHGLGPSLALKLIGECGTDLRAWPSAKHFTSWLCLAPSNKISGGKVLSARTRRSSSRAPALLRLAATTVGRSDTALGAFYRRLSSRAGKSKAVTATARKIAVLFYNTLRHGMHYRDPGADHYEQQYRGRVLANLQRRAKSLGFVLQVIPGAPDPAVS

SEQ ID NO: 349107 - protein, 343 aa, unidentified
MQISTIGLDLAKHWFQVHGVDVYGRVVVRRRLWRSGVIAYFRSLEPCLVGMEACATAHYWARELMALGHTVKLMPPAYVKAYVKRNKNDAADAEAICEAVTRPSMRFVPIKEAEQQAVLMLHRARSLLVRQRTMLVNALRAHLAEFGIVAPQGLRYVEILTKTIAHQQARLPELARSILQTIVDQLNGTMARIQEIEGRLARWHRQSRVSRLLATVPGVGIMGASAIAATVTDPSLFRSGREFAAWLGMTPRQNSSGGKERLGRTSKRGDKYIRSLLTAGAVAVLPHARNRPTRDGEWVRALVARKPTKLAAVALANKTARIVWAVMMRADGYQPREVFRQPA

SEQ ID NO: 349108 - protein, 425 aa, unidentified
MSENEVLQELQFSAFVGIDWADQKHAWCLQAADTTQRENGEVEHTPEAIEAWVGQLCRRFDNRPIAVAVEQVKGALVFMLSKYGFLHLFPVPPTMSAKMREALYPSGSKDDPRDADLLLELLLQHRDKLRRLSPDSEATRRVQNLVDERRNLVDEKRAQINRLTHQLKIYFPQMLEWFEQLDTELVCTLLERWPTLEELQKVSPEGLRTFFHKQRCRYPELIERRLVGIRQAIPAIRDRAVIEAKSTVVKVSAQVIRSLVRGIADLDRKIEEAAAAHPDFFIFESLPGAGAVLAPRLLAAFGSQRERYASAEELQTYSGIAPVMKRSGKKKWVHFRWACPKFVRQSFHEWAGHSIAHSQWARSYYQQQRKHGKGHHAAVRGLAFKWIRIVFRCWKDRAVYDESRYLMSLAKRNSPLAAVPGGTRL

SEQ ID NO: 349109 - protein, 313 aa, unidentified
MAQMAPSVGVDVAKDRLDVALHPEGLRFSVSNDASGWRQLCRELAPRGVRGIGIEASGGYERGVISTLLRAGLPVCRVNPWRLRQFAKAAGPLAKNDRLDARAIAWFVATLPCRRIERDPRREQLAELVDARRQMVDLQLALSNELSHRQDRELCRMQQRRLRRLAADLLRLDQRIAAAIAAEPAFAHADRLLRSVPGVGPVLAATLLAHLPELGRIPRRQLGALVGVVPYDFDSGKMRGLRCIFGGRAGVRRVLFMAAQAAALSNPVLRTYKQRLLAVGKKAKVAIVAVMRKLLVILNAMLRDDQPWQTVTP

SEQ ID NO: 349110 - protein, 394 aa, unidentified
MHFYVGVDAAKDIHWACVIGADARPVFSHAVRNDPEGIAALIGELSVLNAESITVALDLLGGCATLLCAMLAEAGMRIVHTPGLAVNRARQGMRGGENKSDPRDAATIADLARTRTDLRPVEIETEIDVDIRLLVGRRREVVVDQTRRLARLRDLLSSLFPALERRIDVKTKAGLVFLSLFAAPHELRGARPHHLVRALTKVYPRMRDAQSMAQDAIALAKAQTINVPGAQTRAKLVQDLAGEALAARAQRDRIDGDLQALLESHPDAALILSLPGMGAVLTADFIACVGSTRRFRSADALAAAAGLTPVLRQSGKSRTVRRSTGGNKTLKRVFFQSAFNALADPESRAFYDRKRAEGKRHNQAVIALARRRVNVVWAILQTRMPFSQNFKNAA

SEQ ID NO: 349111 - protein, 410 aa, unidentified
MEVLYPHCAGLDVHKETVVACMRHMVGGTVKREVRTFDTITTGLLALADWLASERCTDVVMEATGVYWKPVWHILSDGDFTLVLANARHVKNVPGRKTDVNDATWLADLLAHGLIRGSFVPAAETQVLRNLLRTRKQLVRERSSHVQRLQKTLEDANIKLDSVVTDIIGMTGRAMLEALIAGETDPGKLAVLAHPRIKAPPARLREALRGRVMKHHRFLLRLHLQQIDAIGTAVAEIDREVDERIEPFRITVELLTTIPGISELSARIVVAEIGNDMSRFATAAHLISWAGLCPKNDESAGKRRSTRMRKGAPWLKTALIQCSWAAARKKGSYIQAQFHRIRSRRGAKKAIGAVAASILTAIYHMLKNGTCYQDLGSDHFDRRAKTTKTKHLVARLQNLGYAVQITPLAA

SEQ ID NO: 349112 - protein, 322 aa, unidentified
MSGSILGVDIAKKKFDVALLVNGKLKHKVFSNNQGGFEGLELWLKKHGANHVHVCLEASSTYGDELAAYMHDAGHAVSIVNPARIKGFAQSELVRIKNDKVDAGVIARFCHAMHPEPWTPAPPEIRQLQSLVRRVDALINMRTQELHRLGTAQDTVEQSIQEHITYLDKQIAALKQQVAALIKNDPDLTAKKDLLKSIPGIGETTIAAILAELHMFERYDSVGKVVAFIGLAPRQFISGSSIKGKPRLSKVGHARLRKALYMPALVSIQCNPIIQIFYHRMKENGKNGKVIVCAIMRKLIHLIFGILKSGRPFDPNYTTNHA

SEQ ID NO: 349113 - protein, 375 aa, unidentified
MRESVIYVGIDVHKDTNSVCMFDSRDNTFFAESTLDAGTDVMVKYLKKAAKDYGLSCETQFLLGYEAGPTGYGLCRGLKKHGYNCVIMAPTTIRKSSGDKVKTDRKDARLLSMTLASDGFRKVYMPDLADESTKEFTRTRNTLKKHLKKAKQNLLSFLLRVGVTYPESGNYWTEKHTEWLESVSFSDKMLQLSFDTLWQEVKDLDAKIANLDAAIEEIANSERYKDKVGKLVCFAGIQTHTALSMVCEVGDFTRFPTAEQFSSYLGLCPGQESSGKTVRYGGITKCGNSRLRLLLIEAVKGIKRSNPYSRKSKRLLLRQQGQSPAVIAYADKGSKRIKQKMTSLEKKGKAANVAATAGARELACFIWGMMNGKMD

SEQ ID NO: 349114 - protein, 370 aa, unidentified
MKKYSEAFVGFDTAKKKHAVAIADGGRKGEVRYLGEIDSSPATVEKVIGKLAERYAKLHVCYEAGPTGYGLYRQIKALEHDCAVVAPSLIPKKPGERVKTNRRDAVTLARLLRAGELTSVWVPDAVHEAVRDLARAREAAVADLRKKRQQLLSFLLRHGRIFSGRKHWSLAHLRWLAKQSFEHPAQQIVFQDAINTIEDAATRLHELDRQLLAIVPTWSMAPVVAAYQAMRGVSFVVAVTFAAEIGDVRRFDNPRQLMAFLGLVPSERSTGETVRRAGLTLTGNRRARRVLVEGAWTYRYPARVSETLRARLEGLPKTVRDIAWKAQVRLCARYRRLVAAGKKTPVVIAAIAREMAAFLWAIGRQVEPLT

SEQ ID NO: 349115 - protein, 342 aa, unidentified
MQISTIGLDIAKNVFQVHGIDAAEKVVVRKRLRRRQVLEFFKALPPCLIGMEACATAHYWARELTKLGHRVRLMPAKDVKAYVKRNKNDAADAEAICEAVRRPTMRFVRIKSAEQQGQLMQHRTRDVLIRQRTQIINALRAHLAELGLVAAQGNAGVNELRAIVTDEQDTRLPIDARASVIVLAAQLEALESVIGAIEKRIKMQHRSSEASQRVEAIPGIGVIGATAIVATVADPTIFRSGRDFAAWIGLVPRQDSTGGKQKLGPISKQGDRYLRRILVVGAIAVLRRAQENPGKYPWLTQLLARRPFKVVAVALANKMARMAWALLAHGGTYRAPELAETA

SEQ ID NO: 349116 - protein, 338 aa, unidentified
MGTYAGIDLHSSNNFIGVINDKDKILYGKRHSNRLDDVLRALDPFQDSLQGVVVESTFNWYWLVDGLQEHGYAVHLANPSAIQQYEGLKHTDDQWDSFWLAHMYRLGILPEGYIYPKEHRAVRDLLRRRLLFVKHSTSHILSLQSMISRNLGLNMSGREIKKLKPEEVDDLFDCPNLGFMANNSLEAINFLKKIILDIEKKVASQVKMRKEFLMLLTIPGIGNILGLTINLEVGDIGRFPAVGDYSSYCRCVESKRLSNGKKKGENNKKNGNRYLAWAYVEAAQFCRRYCVKAQSFYQSKAAKTKPVVAVKALSNKLSRASYYIMRDQVAFDEDKLFS

SEQ ID NO: 349117 - protein, 316 aa, unidentified
MVPSPLFVGIDVAKATLDIAVRPTAETWSASNDATGIDALVLRLGALAPTLIVLEATGGYQGPLVAALAAAALPVVVVNPRHIRAFAQAVGILAKTDRIDARVIAHFAEAVKPAPRPLPDAETQELRALLVRRRQLVEMVSAERARLDTAPPSIQDAIQAHIAWLTTQVAGLDDALTRASQTHPVWQAKDDVLQSIPGVGPVLARTMLGQVPELGTLGPKPLAALIGVAPFNRDSGTLRGRRTVYGGRAEVRAVLYMGALVATRHNPVIKTFYERLLAAGKAKKVALTACMHKLLTIMNAMVRDLKPWQPQEVPSA

SEQ ID NO: 349118 - protein, 402 aa, unidentified
MHYLGIDVSKASHQCVILDAEGEALGKSFTIQSSKDDFANLVKKLSDLNIPQTDITAGLEATGSLWENLYVYLKERGFNIVLLNPFQTSKFHQAMLKKAKTDSIDALVIAGLLRSGCAASSYIPDEEIQSLRDLVRLKDGYLKDTKNYKRKAYSLLNLVFPEFLNLIKDPFNISCTEILSKYQTASDFKNIRPKDLLKIARGHQGNNYDEAWAGKVIQAAKDSIYSGKASKARSIVLKSLVLNIKNLKEQMSELDNEIQNILKTDGGSSNNDIDNLLTIPGVGPKTIAVFIAEVGDITRFTSCKDFIGFVGLYPKIEQSGSSLNRAKLTTKGSRILKHALYMASVASLIHNPYLKSVYNDKLSQGKCAKQALIVVARKIACIMYSMLKNNAVYNPGRIAIAV

SEQ ID NO: 349119 - protein, 317 aa, unidentified
MVYLGIDVGKADFHCALLSDGRSKPNSFPNSQKGFERLRSWLRNRGVDRVHACLEATGGWSEELALFLQEQGHAVSLVNPMAIKSFGQSELSRTKTDKADAALIARYCGAMQPRLWEPPSPSQRRLQRLGRRRTALVEMRTQEHNRLEGPGIAEVRESLEKSIAFLERQIADIDREIASVINDDPDLRNKRDLLESIPGIGERVASTLLGELPQITEFRNGKALAAFVGLCPREFRSGSSVSTSWLSKVGNPHVRRVLYMPAITAMRCNPILVDFSARLRARGKRNKQIIAAVMRRMLVIAYGVLKSGRPFNAVPSS

SEQ ID NO: 349120 - protein, 365 aa, unidentified
MDAIYIGVDFHARQQTICYLKIETGELVIHELKHQDKQEVRAFYAQFKGQVIVGLEASGYSPWFERLLEELGCEVWLGHATEIRRRARWRQKNDRRDAELILDLMLHHEFPRLHRPAVQSREVLRMLRYRQKLIKIRTMSKNSVQAIALQSGLAKGSRLFTKPGQQELTTAEMSPVMQWQREHWLQLLEPLNKQLLETMVWFKAQSKGDVCITRLRTHPGIGLLTSLCILHTLQPVSRFRNARKVAAYAGFDPVERSSAERKCFLGISKAGSRLLRYLLVEAAQTAVRKDEDLKRFYKRLAERRGRPKAKVAAARKLLIRAYIMLRDEIDYAEFRHRAVAARLARRGQRPNVPEVLIGQPASPAQ

SEQ ID NO: 349121 - protein, 341 aa, unidentified
MRKTLFCGVDLHCNNAMYVITDRRDKQLFRKRLPNRLPTILEFLEPFRQRLKVVAVESTYNWYWLVDGLQDHDYPVVLANPAQMDQYNGIKEADDLTDAAFLARRARLNILPTGYIYPKEDRPVRDLLRRRTLVVQHRTAIKQSLQNMAMRQTGQSLGWRAIRKLSDAERTELLGDNDCLAFVASQQVDLIELLSEKIERFEKKILEHAQLKPAYVCLLTIPGVGMILALTIMLETGDIGRFETVGDYTSYCRCVRATRTSNGKSKGKNNSKNGNGYLAWAFVEAVHHAIRNCPQAKRFYDRKLAKRNGALATKALAAKWSKAAYYIMKRQEAFDLTRVFG

SEQ ID NO: 349122 - protein, 343 aa, unidentified
MPHYVGLDVSQKTTTICVVDEQGQRLWRGACVTDPGAISARVLRHACVDAKVGVETGSMTPWLVHGLRSAGLDVECLDARRVKAALQMRLNKTDENDAEGLAQVMRTGWYRAVHVKSLNAHRARALLGARAQLVGMTTRLSNMIRGVLKTFGLLPGTGRGLRFDRKVETLLEGTPEIAMIVRPLLATWRQVREQIAVFDKAVQQRVRADPICRLLMTVPGIGALSSLVYVSTIEDPGRFSRSRAVGAHLGLTPRRYQSGETDRSGHISRCGDGLARTLMYEAAVVILHRVKRSLHLKDWAAAIEQRSGPGKARVALARKLSVILHSVWRSGEPFRWAPQTIEA

SEQ ID NO: 349123 - protein, 433 aa, unidentified
MGLIVPTTIHPEREDQPLPYEWFVGIDWGSQQHQVYVLDRDRRRVGERVVDHDGASLARLADWLWTLSAGQPQRVAVAIEVPRGAIVEGLLERGFHLFALHPKQLDRFRDRHSVAGAKDDRRDAFVLADSVCTDQPSFRRLQLDAPQFILLRELSRAEETLLEEFRRSANRLREQLHRFYPQMLQLCSAADEPWLWDLITLAPTPAHAMLLSEEQGQRVLKAHRLRRLKAPAVLACLQAPALPVAPGTAEAAQAHCGFLLPCLRVLAEQLQACSQQVSTLLRTMADEPGEGASPSDVAIVQSLPGVGRKITAWLFAEAAQPLAERDYQVLRTHGGVAPVTKQSGKRRQVVMRHGCNPRLRHALYHMARVAMQRDAHFSSVYAALRAKGQRHGQALRNIGDRLLRILMAMLRHRTCYDTSRIRCEPVVQMGQKM

SEQ ID NO: 349124 - protein, 344 aa, unidentified
MDSMYYIGLDVHKKTISYCVKDAGGQIHAEGIVASTRTDLDCWMKTLAQPWTAAMEATIFTGWIYDHLLPHATQVRVAHPLMLRAIAAAKKKNDRMDAGKIADCLRCDFLPECYMVSTEIRDRRRTLRYRHLLVRQMVQLKNRISGLLLETGVSHNKQRLHKVGYFRELLTTNKEVTESIRPLLQLSRETIVRLQRTEYALVSSLARDPLLKERVKRLRTVPGVGPISALTWALEIGDVARFRSVKQAISYCGLCGAEKNSADIAKRTPISKQRNQHIQSVLVEAAKLAPRQHHELAQVYEKEKQKGNANRATLAVARKMVAYLLAVDRREREFVIAEDKSTAA

SEQ ID NO: 349125 - protein, 339 aa, unidentified
MMIIGCDYHPSFQQIAFVDTGTGECGERKLSHKLEAENFYRGLHGQQVRIGMEATGHARWFERLLAELHHELWIGDPGEIRSKRVRKQKTDRQDAELLLQLLVENRFPRIWVPSAENRDLRQLLWHRHRLVQMRTRVKNQLQAIALNEGLRRQKGLWSKLGRGQLEALQLAPWSARRRQDLLELLDRLNPRIDELSASIQQAAEQRPEAQRLMSHPGVGPITALAFVLILGVPDRFRCGKPVGSYLGLIPCEHPVAAGSVSGTSVKQGNSLLRFLLIESAHAVVRYEPDWRRRFLHLAMRRGRAIAKVAMARKLAVRLYWMWRRGWDYQQISKFGAHVE

SEQ ID NO: 349126 - protein, 424 aa, unidentified
MNCTQNERINQVSEQTLVIGVDIASELNYARAFNWRGIEKGKVFKFFNNLEGFQAFNEWAHQVMSANKLTNLIVAAEPTGHYWFGLADYLKDEKLKLVLVNPFYVNRAKELDDNHPSKTDAKDPKTIAKLVIEGRYMEPYIPEGVYADLRIMYNCRQKVTKAMISLENQLKRWFKIYFPEYLSVFGNLSGQGSMAVLEKAVLPEDIISLGVDGINKLWRERKLRAVGMKRAESLYEAAVKSIGRREGSVGGRAEFRMLWEDYCHKMEQMEKLNIELESLLHKVPQAEEVLKMKGIGVVSVAGFFAEVGDLRRFESPKQIQKLAGLAIRENSSGKHKGQTTISKRGRARLRTVLFNAAIALVGRNGAFKSIHEYYIGRKANPLKKKQSIVAVSCKLIRIIYAICRHKEAYDEAKMLRDIRREQLA

SEQ ID NO: 349127 - protein, 413 aa, unidentified
MSILDVALDPSTVVVAVDPGKVMNRVWVSNGQGLLEEPVSLPVARAGIEQLEVLLAAHPASAQVIAIEATGSLHRAWAAELERRHPGALRLFAPSETRAARTQLGSGRFKTDDRDCAALTYLARQGAGRRHEEEARIDCLRAAVRHRRCLVADRKVAQQRLHDQLNTLCPGLSAPAGHTELGRSLPIESPTGQAVLACAVAFAGRAPAVRSLVARAPGKLTRATAEYWVTRWRGCLPPPADAEQRAARLGRDLVRYQTLLTDIAVADHEIEVLLADTDGQVLTSLPGVAANRAAAFAVHSLPIARFPDAEHLYSATGLAPAMYESATVRKRGRISRQGLAEHREALMGIAWGLVTYSPAFAQRDAEYRARGMAPIQARVAIARHACRLTYRLLVTQQPFDEERYRRGRLNSGR

SEQ ID NO: 349128 - protein, 345 aa, unidentified
MPIVGGLDIHRKQLTFDYLDTETGEVKRGQVAPADRAHLRAWLARFAGRDDVAFALEGCTGWRYVAEELAAAGVAAHVAEPADTAFARGRKRHAKTDKTDSRHLRQLLAEGRLPECWIPPSLILECRALLETYHDLRAEHTAWVQRIHAVFFHQGAPALGDGALRTDRDLQALRAAAAAHLSPAGQLQVDTALDMLAALEARLDVLRHRLLAAARSLTGARVLASRLYGVGPVTGLAMTCWLGGAGRFSSARKAVRFAGLDVTVWSSDRKGPPGRLSRQGPPVLRWAVYEAGKTHARSSAPDYRYYAAVKDRQDGKRAALSEARKILRQACHILAELGDDALTAA

SEQ ID NO: 349129 - protein, 319 aa, unidentified
MDSTPQALVGIDVAKDSLDVCLLATDKCFTIVNEPTGFRQLLRELPAAGSCQVVLEATGGYQRPVVAALLAAGHTVAVVNPRQVRDFARGLGILAKTDRLDARVIARFGQHAQPRPVAVRSEKQAELEELVSRRRQLVELRTAEKNRLETATTKTVRHNIRHHVDQLDKQIRQLEEAIAKQVQSDSELATKATLLETVPGVGTVTVTSLLVDLPELGHLNRQQIAALVGVAPFNRDSGKFHGRRAIWGGRAAIRSVLYMAALTARLSNPIIRAFAQRLEATGKPFKVVLTACMRKLLVILNTMVQRNLPWNPNYRPLNA

SEQ ID NO: 349130 - protein, 483 aa, unidentified
MSKKKREYIRGEKEERFKRKIKGIEKKKILGISIDVSKDYHKALIFDFEGRLVDGPFEFSVFKDGYENFKQRVGEAIKKKGAKKIFFGLEPTGPYHENLARHLKENFKEVEFINPSATYANRAQDMLVGLKTDDIDLGAIGDLLMRGKGYEYNLEEAGMYLSLKEETFWREKKLKMQTRLKNQIKARLNKIYPGLMSKYHNNEPLFSDLWRSRVARGLIRSRLTPAQIQIMKAEELIGEFERIGYALTRKWAEKIAQYTKRILAPHDKIIEIDLDLVNRDLNLLEALEGEMSIVEERMIEEVKETDSSFLLGKIKGLSDLQIASFVGAVGRIENYRLGKQIFSKSGLSSKVNQSGKRNIKGLGIRRVGSKILRSILFKMADSVKKHNPYFALYYSYLTEEKGKLWKKAHIAVSNKLVRVMFAMLRDRADFNPPTAKIDYLEMLFSQRRNRRRQERKKEKENSPSPFFGPKGIRASERIPSPVR

SEQ ID NO: 349131 - protein, 354 aa, unidentified
MTSDHGQTAQTFASIGIDIGKDVFHIVGFDAAGRIVLRKKFKRLALESELAKLAPSIIGLEACLSAHFVSRTLRRLGHTPRIIPAVYVKPFIKGQKNDYNDAEAIAEAALRPNLRVVQEKTQDQLDLQALHRVRARLVSRRTATINQIRAFLIEHGIAVRTGANALRRSLFAILENRADELSPRMSDLIVGLYEDWLWLDERIETLTGEIEQVSHREANCKRLMSVPGIGPIISTAVVAAIGTGEAFERSRDFGAWLGLVPRQYSTGGKSILGRISKRGSRYLRTLFIQAANVILMRPQTWERFSFGAWLKAAQPRLHRNKLATALANKLARIAWSVLRHNTAFDAHRHEVVAI

SEQ ID NO: 349132 - protein, 376 aa, unidentified
MNRIIKIGIDVHSTNYTLCALEPVIGAEDRVFANIQVTPDYKNILMFIQNLKCKLGTSDDYSIECGYEAGCLGYSLYNQLTSAGVKCVILAPTTMLTQQGKRVKTDARDALMIAQCLAYGGYHPVYIPTESDDSIKEYLRMRDDHKLALKKVKQQINAFCLRHGYHFTGTKWTSRHIAWLRELELSALYRETLDEYIVSYNEQTAKIERFDNRIEEISNQKKYQQKVKELGCLLGIKTHTALSLIVETGDFKRFSKGNTYAAYLGLAPGENSSGDHVNRTGLSKAGNAHLRRLLIESSRGICKGAIGYKSRELRSRQEGNSVEVIAYADKANTRLRGKYYKMIRHGKKRNVAVAAIARELACFIWGIMTSNIAIAS

SEQ ID NO: 349133 - protein, 401 aa, unidentified
MNVMYPRCCGIDDHKNFIVACLSIREEGETRKEVRRFGTMSRDLIALRHWLLEEGCTHVAMESTGVYWRTVYSHLHGFFEIVVANAQHMRAVPGRKTDVQDAEWIADLLQHGLLTASFVPSPEQQDLRDFTRTRISLVQERARLVNRIHKLLEEANIKLASVLSNVMGVSGRAILHALANGEEDPEKLAGLAHRTIEHKHERLVQAVEGQVRPHHRFLLRELLRLIEALDLSIAHIEQEIAERLHPFEEQLKRLEAITGVSRRILEVLFAEVGWDMSRFPDAAHLASWAGMCPGHDESGGKRRSGRIRKGNPYVRAALVQAAHAVSRTQTYLGEQYRRLAKRRGGKRAAIAVGHSILIIFYHMVKTGEDYHEKGVGFFQQADKQRVQRHLVQRLEHLVLQW

SEQ ID NO: 349134 - protein, 357 aa, unidentified
MLYLGIDQHARQITVSLRDEQGDVVQARQVSTRPEKIQAFFQQLTRQCARTGERFVAVLEVCGFNDWLIRMLGDYRCQKVILIQPEERKRRKTDRRDAAALSELLWVNRGRLLEGKPVRGLRVVEAASPTDQENRRLTTLRKEARKVRTRVINRIKLILRRHNLLWQLPTKTFPTLAAVAWLKKLALPTIDRLEMNHLLTDLEHAEQRYQDLERVIAERCEASEETLLLATMPGVGAFTAMALACRVGRVERFPRANSLANYWGLTPGCRNSGENDQRLGHITKAGSSMARWLLAQVAYQALRKDARLREWFKRIKRRRGSSIARVAVMRKLATIIWHMLTHRKTYLECRLLSTAPT

SEQ ID NO: 349135 - protein, 319 aa, unidentified
MTKRVTNIFVGVDVSKDHLDVYLLPSKKHMRIKNNSDGLNYLLRRLKKLHVSRIVCEASGGYESLLVSTMSQAEHAIWRIDPKRIKAFIASEGVKAKTDSIDAAMIALFAQQKQLAEYTRIKPQKIDDEKLKAIVKRKETLTRIAAQEKTRLKHPQQSFCRQEIKDHITFIAQQIKILEQEIGKKITNNENWQQKSKIITSIPGIGETTTASLIAHIPELGTIGNKQVAALAGLVPYTCQSGNQTKQSRIREGRSAPRKALYMAALSAIQYNHDMKIFYNRLVKLGKKKKVALVAVMRKLIILVNVLICENRVWKELNV

SEQ ID NO: 349136 - protein, 403 aa, unidentified
MDFYVGIDVSKFKHTIAIIGEDGEIRKKSFDISNSREGFDSLLNELGLLGQKEQIKIGMEATGHYMNCLVRCLNSNGYQVQIYNPSLISRFRDSESVNLAKTDSLDAMLIAKYAATHPFTSSPQISYLIGEIRKITRAKYFLFGDRTACYNHLLRYLDEIFPEFVPFFKKNEDGTRKNMGRNLFDSPTIRFLLSEYTSASKMAKMRIETGETLRRMSKGAISFNRFNQLRELAKRSIGHSTEVDEQIVRNLIDQVRMIDEEIDNLNEMLSPLMDELNSPLLSIPGIGVNLAAMIIGEIGDINRFSNPEKLIKFAGLDVKIYQSGTINHKGRIRKRGSPILRYALSLSVQKLRIHSPVFSEYYYSKIKQGKATNVAIIATTRKLIRVIWKMMMTNQVFENVKRD

SEQ ID NO: 349137 - protein, 457 aa, unidentified
MPKTKRSRREREMSPVHAGAAAIDVGATMHVAAVGPGRDPEPVRSFGTFTADLHRLADWFKQCGIKTVAMESTGVYWIPAFEILEQRGFAVVLVNARDAKHVPGRKTDVTDAQWLQRLHEYGLLRASFRPERRIAALRDYLRQRERLLDYAASHIQHMQKALMQMNLQLHHVVSDITGATGMRIIRAVLAGERDPAVLAALRDQRVKASEETVRQALVGNDREEHVFALSQAVELYDAYQAKVAACDVRIEAALKELEASCPPPAVPLPAPRHRTQQPNALAFPAREALHRILGVDLTQIHGLGPYLALKLVGECGTNLSAWPSAKHFTSWLCLAPSNKISGGKVLSARTRRSSNRAAALLRLAAVTVGRTETALGAFYRRLAGRVGKAKAVTATARKIAVLFYNTLRHGMDYTDPGASYYEDRYRQRVLTNLQRRAKSLGYVLQSAEPAPASTGVS

SEQ ID NO: 349138 - protein, 373 aa, unidentified
MPRYSTAFGMDVHLRSTTVCALDAETGEAVTRRFRGNPWGEVAEWMSGFPGPSLAAYESGYLGFAPQRELSGLGVDCVVAAVSKVPRSAADLSSKNDRNDAARMAKAILSHDISPVWVPSPEIEGLRDLAAAHDAATARLAAARQRLLAFLARRGYAYGGTTPAGNPRRYWTYGFLRWLDGIHPADDGGIRALAALRSEVEAADETREALLAEYRAAVAAGPLSAEVEALQSIKGCGFALAAAFASEVGDFSRFRSGRQVTSYFGLAPKQRSSADSVRLGGISGAGNALVRRLAVEGSWSYVQASHQPKLMPKGSGVPLGVRIHGRKGSERLLRRREEMLARGMPQAKANAATAAELVRWLWALGAMCREATE

SEQ ID NO: 349139 - protein, 421 aa, unidentified
MSNSTLSKKLASVKPGTLFVGVDLALDRNVAVVLSERAEQLGRFGFPNERDGYDYFYRRLEVIQEQQQAPALLVGMEPTNYFWKLLAADIEQRRPEYSYRLVNPYTVKKNREGDQLDRSKDDNRDAFAIGNLIRTGKYTETRLLHGAYAELRQYVTLYMRLQRDVQRQRSLIYNVAGQLFPELPQVFKDLTSLTALAMLRSHAAAAAVQEITQEAFIAGVRADFRGRRMQVAKLRRVHILAECSVGLTDGVEALQMALRLHIDALVTLQQQLETIRKALVDTFLALPESKHLLSMHGLGIITAATILSEIGDPNHYTTACQLVKLAGTQPVPNTSGRKTRSQTPMSRKGRPRLRTALFFAVMRLVRMDEAFAREYQRLQRREKNPLTKMQALGVLMNKLLRILWALMRNQTLYSPDFQGVA

SEQ ID NO: 349140 - protein, 297 aa, unidentified
MRCIPTDAVGITLGVDTHKDFHVAVALDCLGRRLGTLSIPTTPAGYEKLMDWANGFGALEGVGIEGTGSLGVGLARSLRAEGTKVLEVDRPKRRDQYRSGKSDPIDAELAARAVLAGTATGRPKGADGEVEMIRTLRVTRRSAVKARAQAINQLKNLLITAPEGLRSELRGLSTAKLVAKVSEFRPGTNPSDVEAATKFAMRSVARRHQRLSEEISELEEQLDRLVAEAAPELVAMEGVGTDTAASLLIAAGDNPERLKDEAAFAHLCGVAPIPASSGKSVRHRLNRHGNRDANRAL

SEQ ID NO: 349141 - protein, 386 aa, unidentified
MTQISRIGIDTSKAVFALHGIDQAGHPVLRTNLRRTQMVPFFKKLPPTEIALEACASSHHWARMLAALGHTVHLIPPQYVKPFVKRAKNDRNDAEAICEAAGRPGMRFVPVKSTAQQAEGMVLKVRETLVGQRTQLVNALRGHAAEFGLIAPKGISRTTALLAAIEAETAISAAAREMLALLGRQIEQLDTQLKALEAKIVAMHKANPVSRLLATIPGIGPIIALTLALEVDPTAFKSGRHLAAWLGLTPKEHSTGGKQRMGGISRAGNERLRQLLVTGATAVIRCAERPGSKLATDWLLKLLQRRPRKLAAVALANKMARIAWAMMTSTLSRSHCGVQPLQLDAGVGRGEVPVSFGVFLVAAVLPCGDFLGQGLFVGDAPIETLA

SEQ ID NO: 349142 - protein, 402 aa, unidentified
MITCGIDIGKGKHAVAVIDESGRQLVRTRFYDNTKAGAEKMLAELLSHAEPSQIHVGMESTGNYWRAYYDFLTDRGCVVDVINPIVTSASSAGDIRGRKTDKRDAEAIAEVVLRGKYVRRRDEGLQERKLRALTRQRGFIVEERTAAKLHLASQVAEAFAEFESLFEDPYGTLALAVLSKYPTARHLARARKSSLAKIVRANTRGRDVDAEAQRLIGAARDSISLACEITDALARCIISSIRTIMDLDERVKDVEEAIKGFDPPDLASKLMSINGSGKIMPMVVAAEFGDISRFRTNPKDGSEAGMHKRLLAYAGCEPRIRESGKWKGRKFISKRGSRQLRTALYLIANNIRQWDPYFKAVYKRKIEAGKHHSVAVFYVVVKLIEVLCALYKSGRNYAVIQP

SEQ ID NO: 349143 - protein, 364 aa, unidentified
MMEWMAPLRHLGAKMLGVESPADGEPSMSEIKTIGLDLAKHIFQVHEVDAEGTTVLRKQLRRGQLLVFFSRLPRCVVGLEACATAHYWARELRALGHEVRLMPAQYVKAYVKRNKNDAADAEAICEAVLRPTMRFVLVKTAEQQAALLLHRGRERLVRQRTMMVNALRAHLAEFGVIAPQGLRNVGQLIAMIRDESDARLPDLGRRVLQVLAAQIEAAVAELERQLMAWHKSNPVSQQLATIPGIGPITATAIAATVVDPIAFRSGREFAAWLGLVPRQNSTGGKTRLGGISKRGNQYLRRLLINGASANLLRSKATNTDPWVIGLRRRRPSLVVAVALANKTARIAWAVMRRQEDYRRVAVAA

SEQ ID NO: 349144 - protein, 338 aa, unidentified
MKVATIGLDIAKHIFQVHGADAEGHPLLRRRLRRSQVAGFFANLPPCVVGMEACCGAHYWSRVIGRCGHTVRLIAPQFVKPYVKSNKNDAHDAEAICEAVSRPQMRFVAAKSVEQQDIQSLHRVRSRLVSSRTQLANQIRGLLTEYGIVLPQHISQLRRGLPLILEDATNELTAFSRRLFASLYDELLSLEGKIEAIDEQIWAVYQASESCQRLAAVEGIGPLIATALVAAISDGKTFRNGRQFAAWLGLVPRQYSRGGKARLLGISKRGDPYLRTLLIHGARSVVYRARQKTDRRSLWIADKQRRLGTSKACVAVANKNARMVWSLIARGEVYRRAA

SEQ ID NO: 349145 - protein, 336 aa, unidentified
MKMNYIGMDIHKQFTYAIAKDKEGNKLAEEKFNNETENFESFLQEFEPKETKIVLESTSVWEYIFDLLEERGYEVIMANPVKTRAIAEARIKTDSIDAGTLCDLLRADFIARSYVPPKEIRNLRNIMRQRKAIVKGQTQIKNKIHAVLLMNGIKLPYSTLGKSAMEWIADEIKTTSIKTILISYINLLEQYQFELKKIEERIKDIAARNIQAQLLITIPGISSIRGMEIITEIGDIKRFDSSNKLCSYAGLVPSMKQSGSTVKIGRLVKQSSKNLKHAFVGASWSLVRTKEPNRFQIFYKKLMKKKGKSKAICAVARKLCCASYAMLKKNQEFMIL

SEQ ID NO: 349146 - protein, 476 aa, unidentified
MGKGSGMTRGDRRRNARRERLRAMLPRDGAVIGIDLGDEKQAIAVVDHDVRVLARKTVRVKAFRLGEALEWAVAQARGKGFTAVAVACEPTGARWLQVQRLCAERGLPLVCIQPLVSHIAREQQDYTTHKSDESDCVMIARLATELHCYIPEELDEAWAQLRHLGRRRAQLITSATASVQRVRDFLSVAWPVAPEACKHPFESVTWLAAMQVVTSRCGGQPGKLAATGLAEFTALVRQAVAGWGGQRPAGPVCRAVFAALASTEGVVVSHRRGLLRRCADELGDLRRIRAQLRAVEAGMVAVLGELGLSRLADIPGLTAADAAAILAETGDPCRYDSSSSLARHAGLSPSGNASGAFEGQAHISRRGRPGLRLTVWRAIWPLLSCNSVMAAKYAAMIAAADAAAAQAAQAQSGTGSRQGSAAAAARARRAKARVACAAALLRWIYSIAGCDTGWDPDVASGAASRPHAPRYQPEAA

SEQ ID NO: 349147 - protein, 424 aa, unidentified
MSKKKSSVAGLGALYARVCGMDVHKNSVVACVRILNAKDGTVQSTLRRFGTMTADLLELRQWLREQQVTHAAMESTGVYWQPVFNLLEGHLEVWVVNAQHIKKVPGRKTDMKDAEWIAQLMQCGLLKPSFVPEREQRELRDLTRQQSKLVQQRNAVDNRIQKVLETANIKLGSVASEVLGVSGRRMIEALIAGEKDTSVLADLAQKKLREKIPQLQRALEGEVSEHHRFLLRQLLDQYDFLEKEIARVSERVGAVAPSSFRAAVEQLDAIAGVGERGARALLAETGTDMSRFPSHKHFASWAGRCPGNRESAGKRKSGKTPAANRHLDAVLTEMAHAAVRKKDSYFKSQYHRLAGRRGKKRAIGAVKHSLLVTIYFMLRDHKPYKDLGADYFDKLNPQHQIRYHVRKLKDLGQKVELSPMADAA

SEQ ID NO: 349148 - protein, 326 aa, unidentified
MTQVHILAIDLAKRSFQVCGTDRGGAVLFNRALSRARLHQLLNEQPPCIVAMEACATSHFWGRLAQGCGHNVRLIPPIYVKPFVKRQKNDAADAAAIAEATLRPNIHYVEVKSAEHQARAVAFRTHQCFVRQRTQLINALRGHLGEFGIVIAQGPANLGTVAGILSDEANDLPEGVREIGQLYLDQVRLLTEKIDGLMLKLREATKANEDMRRLCTVPGVGPVTAGAILAFAPDLSAFKSGRNFAAWLGLVPRQRSTGGKARLGGVSKMGQTDIRKLLIVGAMSLIRWIVRKRVLPDNWLEAFWGASLEWWRLSRSPIRWRASYGQ

SEQ ID NO: 349149 - protein, 351 aa, unidentified
MSQNPNTAIAIVGIDIGKNSFHIVGLDQCGAIVLRQKWSRGQVEARFANMPPCLIGMEACVGAHHLSRKLKALGHDARLMPAKYVRPYSKGQKNDFRDAEAIAEAVQRPTMKFVATKTADQLDLQALHRVRERLVSQRTGIINQIRAFLLERGVAVRQGLRFLRAELPRILATPPDVLSPRMVRIIEDLAGDWRRLDERVQNLSDEIETVARQDGGCERLMSVPGVGPIISSAMVAAIGTGDGFSKGRDFAAWLGLVPKQISTGDRTILGKISRRGNRYLRVLFVQAAWVVLIKPKSWERHGLKPWIDAAKKRLHRNVLAIALANKLARIAWSVLARGRSFEARPAVALAA

SEQ ID NO: 349150 - protein, 452 aa, unidentified
MEQPQEVEDEAYERVYERVAAIDVAKATGVVCTRVPGDGPSGRRSMHVWTVSATMAAVTELGDHLRCQGVEVVTVESTSDYWRVWYVVLEAAGLTVQLVNARAVKNVPGRAKTDKKDAVWLAKLTERGMLQPSFVPPYDIRRLRDYTRLRADLVHDRARHWQRLEKLLERALIKISSVASTLDTQSVRAMLEALIAGQRDPRAIADLAIGKMRAKRKELAEALNGKFEDHHAELARMLLDQIDALTRQIDQLSARAAELIAQIPAAWGVDADGATGPQAGRGQDAAVLPAVARLDEITGCGIISAQAVIAEIGLDMSVFGTPGRLVSWAKRCPQTRQSGKKNTAGSPGKGDPWLNGPLGEIAASASRTDTFLGERYRRLAKRRGKRKAQAAIARSILVIIFHLLADPAARFRDLGSGYYDERISAERKIRNHVRQLEALGLTVTISPAEDAA

SEQ ID NO: 349151 - protein, 367 aa, unidentified
MKQQTSQAPETLVKGRDIIDYAGKTIYVGIDVHQKDYQVAKVLNGICLGNHRMVADSDALIKHLHSHYPGADFKCVYESCSWGFNLQRKLTAAGIECIVVHAADVSTSDKERKRKTDKVDALKLARSLAAGDLKAIHVPDETLQKERNLIRYRSKLVGDINRSKNRLKGLLKYQGIEIPAQYANSHWSKNFLMWVEQQAMKDELLAETLLLMLEQVKLLRQLLLKTERKLRVLRKGKYQQHVKLATSVPGIGPTTTMQFLLEVGDIKRFKGFDALNDFIGFCPDTDSSGETERDRGITSRRHKQLRSGLVEAAWQAIRVDPALMEAYQQLIKRMKPHAAIIRIARKLLRRLRAVLLTGVEYQKGVLS

SEQ ID NO: 349152 - protein, 382 aa, unidentified
MNRIVKIGMDVHSTNYTLCAMEPVLDGEDRIFANIQVTPDYKNVLQFIENLKNKLGPDDSYSIECGYEAGCLGYSLYNQLTSAGVKCIILAPTTMLTQQGKRVKTDKRDAVMIAQCLSYGGYHAVHVPTDKDDSVKEYLRMRDDHKLALKKIKQQINAFCIRHGYFYPGTKWTIKHLQWLRKLALKDLFREVLDEYLASYDEQTAKIERFDKRIEELAADPAYKDNVRKLGCLLGIKVHTALSLIVETGDFSRFKKGSTYAAFLGLAPGESSSGAHINRTGISKAGNTHLRRLLIEGAKGICKGQVGHKSKELRSRQAGNSAAVIAYADRGNTRMRSKYYRMMRHGKKKNVAVAATARELACFVWGIMTNNMEPRTSGKKAA

SEQ ID NO: 349153 - protein, 285 aa, unidentified
MQAVTTIGLDIAKSVFQVHGVDAEGKVLIRRKLKRRYVLAFFQKLPPCLVGIEACATSHHWSRELKALGHTVRLMPPAYVKPYVKRQKNDAADAEAICEAVTRANMRFVETKTPEQQSCLMLHRTRHLFIRQQTSVINAIRAHMAEFGIVAPVGRQGVEALLEVAADGGDNRVPEVARSCLAALGAQLRALKAQILEFDRRITAWHRSNETSRRLDAIPGVGPALATALVASVADPKAFRSGRNFSAWIGLVPKQHSSGGKDRLGSISKQGDRYLRSLFTAGASP

SEQ ID NO: 349154 - protein, 377 aa, unidentified
MKKELYLGLDVHKDCISTAVAEEGRKGEVRDTGAISNDLHAVEKWITRLRKAHGKETRLRACYEAGPCGFGLARRLGQLGVECQVVAPSLTPTRSGDRVKTDKRDACKLARLLRAGELTPVYIPEPTDEAIRDLCRARSDAVDDRRRSRHRLKGFLLRHGYRYQGKSSWSAAHERYLRELVLPHPAMKVILEEYLQGITAAGERIARCEEAMRDLLEQWRLAPAVRALMAMKGFQSVAAMILVSELGEVHRFTHPRQVMAYLGLVPTENSSSERRRQGHITKCGNAHARWLLVECAQHYAAPPKVSRELSRRQEAQSHEVRAISWRAQNRLHGRYTRLLARRLQRNKAIVAIARELCGFIWELLRTQPCYQAPSPSV

SEQ ID NO: 349155 - protein, 392 aa, unidentified
MYIVGIDIGKNHHEASIVSPEGKQIGPSLRFATTHKGADSLMSFIFKNIGNSPCVFGMEATGHYWYPIYSFLKAKGYTIYVINPIQSDSLRKMYIRQTKNDSIDSFLIAEVIRFGQFGTTSMADENILAMRQLCRYRDSVISSRTEIKLRIGTIMEQIFPEYEKQFSSLWVSTSMGILEKYLTPENIENAPIDELFEIIKDKSHNRLTKAKAISIKEAAADTFGIKIAQDAFSFQLKQLIDRMNFLDKQIEALDIEIMKYYKQFDCYLHTIPGIGIIGAATILAEIGDISRFKNSSALVAFAGIDPTVRQSGEFNSTHNHMSKRGSPYLRHAIFLAATTCSFHNSPLNAYYKKKRDQGKHHLTATGAVARKLTTVIYAVLRDSKPYEPKSFC

SEQ ID NO: 349156 - protein, 412 aa, unidentified
MNVYCGIDWAERHHDAALVDQAGTLLAKRRITDDAAGYRVLLELLAEYGDTPEDPIPVAIETGHGLLVAALRTGNRRIYAVNPLSAARYRDRHGVSRKKSDPGDALVLANILRTDMHAHRPLPADSDLARAITVLARAQQDAVWHRQQLVNQVRSLLKTFYPAALDAFLGKQHGLAQPETRAVLATAPTPARAARLSLPQFQAALRRAGRVRGIEAEARRLKEIFRGDHARPPQTVEDAMGYQLAALLVQLDAACRAAEELAEAVEESFRKHPDAEILLSFPGLGVQLGARVLAEIGDDRDRFADARALKAYAGSAPITRASGREKFVGRRFIKNDRLIAAGFLWALAALTSSPGADAHYRRRREAGDWHAQAQRHLFNRLLGQLHHCLQARQHFDEHHAFTPSSADPAVAA

SEQ ID NO: 349157 - protein, 406 aa, unidentified
MIDTGDIDVFLGLDVGKGEHHATAVTPAGKKAFDKRLPNTEPKLRELFSKLKAKHGTVLVVVDQPASIGALPLAVARDMGCPVAYLPGLTMRRIADLYPGEAKTDARDAFIIADAARAMPHTLRAIDGEDETIAELEMIVGFDDDLAGEATRVANRLHGLLTQIHPSLERVLGPRLQHPAVLTLLERFGSPVQIRKAGRRRLVTLLRPKAPRMAERLVEEIFAALDEQTVTVPGTEAAALIVPSLARSLAAVLDQRKLLAGRIEELLEDHPLSKVLTSMPGVGVRTGARILIEVGDGSTFPTAGHLAAYAGLAPATRSSGSSIRGEQPSRRGNKQLKRAFFLSAFAALGDPASRAYYDRKIAQGKHHTQALLCLARRRADVLFAMLRDGTFYEPQPSAARQGVQTA

SEQ ID NO: 349158 - protein, 376 aa, unidentified
MNKSSTKVCRFVGLDVHAETIAVAVAESEGEVRSLGTIPNREDSVAKLIKKLNAGGPWEACYEAGPTGYALYWQLAKLGIACMVIAPTLVPVKAGDRVKTDRRDAERLARSFRAGELTAVWVPDSAHEALRDLVRARESAKRDELRARHRLGKFLLRQGRRPPEKMRAWTKTYMEWVKHQVRFDEPAQQWTLEDYVNEVEHCSQRIKRLDGLIDEAMETAPAVMREVIAALQALRGIAKVSAVTIVAEVGQLSRFPTARQLMGYSGAVASEYSSGERIHRGRITKTGNAHLRRIVVEAAWTQRFKPLISEALKIRQEGLDPEIIEIASKSMHRLHQRYMRLLAKGKNKQQVVTAVAREMLGFIWAIGVTVERKYAE

SEQ ID NO: 349159 - protein, 458 aa, unidentified
MSKKKVSLEVVNPHAAGIDIGSRSHWVSIGQDSEDVKEFGVYTEDYQSMAKWLHEHKVTTIAMESTGTYWQNVFSYLISQGFDVILVNGRQTKNIKGKKTDILDCQWIQKLHTLGLLSSSFLPDSTTDVIRTYSRHRQNLIKQVSSTVLKIQKYLRLMNLRLDVVVNDIVGLTGKAIISDFISGQTNGKELAKHRHYNCRKSEEEISKALQYNGRKDYFFALKQEWKTYLHLQKQIDETDKEINRLLKSIIKNDEKKKSQKVKKKDHKRKNKNSIRNTDMNKIGVQYFEGIDLMAIEGINDATVMAFISELGLEGIKRFKTSKEFTAWLRLAPNNKISGGKVLSHHLPKGSNRLKIALRQSANAIGNLKEGHLNDFFRRINYKKGRATAISATARKLAVIIWNMLYHKQQYKPPTEYLFLDQKRKLKLVSRIKKNIAKFDIKPEEIGISNSLSISANS

SEQ ID NO: 349160 - protein, 388 aa, unidentified
MSKVIMIGCDLHERSMLLKVAVGRGGSLQLSYDNNAAGRRRMIQRLKGLAKKHNSTRIVLAYEASGLGHGLSDELFDAGIECHVLSPTHLPKTPKSAKLKTDARDAQMLLEQVRGYVLAGNSLPVVWTPPQRLRDDRELVRARVDVADEMTRIKLKMRSLLKRYDNPANYPTKTNWTKTHVRWLREKIVPELEMTVSVKLRLLLDRLEMYRHEEGELDKALKILSREERYKIPCSELRKLPGVGLLVSMTYLTEMGDLARFHNRREVAAYLGLCPSCHESGKADERKGRITRQGPARLRKMLCQAAWVSISKCCEQAAAYHRIRQNQKQRTKKALVALMRKLGIKMWHCALRCGVSEELVGRGGPHDLAGASPGQRAKAADRPVGCPA

SEQ ID NO: 349161 - protein, 397 aa, unidentified
MGREVGVDVMVERGCGLDVHQAMVVACLLTGPPGRRPQKEIRSFRTMTAALREMREWLQENGCTHVAMESTGIYWQPVYAVLDGAFELVVGNAHHIKNVPGRKTDVKDSEWIANLLRHGLIRSSFVPAKPVRELRDLLRYRRKLVDACAAERNRLLKLLETANIKLSSVASDVFGVSGMAMLRALIAGTVTPAEMAGLARGRLRHKLAELELALEGCVEDHHRYLLSVQLRRIEAAEYDIKELDARITAKLEPYDEQLQRLMRIPGVDWFVAAVIVAELGIDMTVFPSAAHAAAWVGICPGNYESAGKRNGGNIRKGNRPPQDSPGHRGGGRLAQDRQLPQGQILSPARPARPTARRRRGRAARRTCGRSGRRRVPGSVRRSGCRAARARRSARRRR

SEQ ID NO: 349162 - protein, 387 aa, unidentified
MQTPHDNSKASPAAFMQDNTLIAVIELSLSNWLVAGLIPGVSREPLKKLEPNPEDLLKLLHGWRDEAIKAGRPITRIAVAYETGRDSFWLARWLRERGIDAHVIHATSVTVSREHRRAKTDRLDTAMLKRGFLGWLRGERGHCTVAIVPTMEEEDAKRPHREREGLVHEQTRAVNRMKSALIQFGVRNFNPKLRQASVKLETVRTPEGKSLPPNTIAALRRDMERLKIIKEQIKAIEQARLQQFEQKPEALANRIVYLLVRIYGLGLETADLLAHELLSRTLRDRKAVARYAGLTGSPDESGSKRREKGLSRSGNARVRKIMIQLAWRMVKFQPDSALVQWFKQRTESAKGSRKPMIVALARKLIIALWRYANDGVIPEGFRLHSAA

SEQ ID NO: 349163 - protein, 269 aa, unidentified
MNKNKHFIGIDISKNVFDAWSPKLGHKQFKNNPEGFEKFLLLLDSDCWCIMEYTASYYQQLACFLYENQVPVSVINPLVIKRFIQMKLQHNKTDKSDAKMMVLYAQEQPVSLWIPQPEYIEECKDLQTTTSLYHKQKTALNNKLISLLDKGVKGRVITSLKRQIRQLEAEIKLLEKEQEQVLLSNISSIPGIGKKTAILLIICTNGFRSFENAKQLSAFFGLSPVLTMSGTSVRGKTRISKKGNPLVRNHLFMCSFTACNSNPQCKACQ

SEQ ID NO: 349164 - protein, 339 aa, unidentified
MPIVGGLDIHRAQITFDYLDLRTGEETRGTIRPATREVFRQWLGQFGRKQVAFAMEGTTGWRFVVEELEAAGMEAHLAEPSETRARRGPKRRAKTDRADARLLRDLLLTDNLPESWIPPAHLADLRTTVRLRKALVDARSGWNRRIQAQLFHHGLPSAPHLQTLIGRQYVSTVDLPAAGRQVVEVGLRMLDVFDEEIEVLDHQLEHFARRQLGCQVLQREWGMGPITSTAILAELGDTRRFTSSRQSVRFSGLDVTVEESDGKRTRGHLSRQGSPVLRWALYEVAANAWRKASPDHEYYLEVKRRLGGKRARISVARRILRRVHHELANAGDDAFADVA

SEQ ID NO: 349165 - protein, 340 aa, unidentified
MKVATIGLDISKHVFHIHAVDGQGQVAGRQRLRRGEIVSFFSSLAPCLVGIEACATAHHWAREIRQFGHDVRLIPPAYVKPYVRRGAKNDAADAAAICEAVTRPNMRFVPIKSVENQGFLMLHRARGLLVRQRTMTACAIRAHFAEFGIIVGQGRQRVDGLVDLLDDEELTLPAHARTALAVLVNQLKELGRQVEAIERELTQIQRVNPMAKLLSSIPGIGPITATALAATVPDATMFRSGREFAAWLGLTPKQNSTGGKDRLGRITKQGDSYLRHLLVIGARNVVRYPKARSRIGGGWIEALLERRRPMVVAIAVANKLARIVWAMMTTGKFYRPKLAA

SEQ ID NO: 349166 - protein, 454 aa, unidentified
MRKKKVMAEAATGEFAAFVGIDWGDREHRWALQPAGSQKRETGKLAQTPEAIEEWAAGLAARFGEARVAVALEQSRGALVCALCRYQHLTVYPIPPAASAGFRAFAAPSGSKNDSQDAGMLLDMLLWHGEKFRALRPAEEPMRKLQGLVQFRRQLVDQKTAATNQLTAHLKLCFPQALEWFDETGSPLMTAFLRRWPTLPQLQAEAPPTVLAFLHAHNCRSAARNQMRLEQFASARPLTTDAAVIDPAVLMIRTLLQVIENLRQGIGDMDRAIDQLWESHPDRGIFTSFPAAGPVLAPRLSAAFGSDRSRFSSASEVQTFSGIAPVVSQSGQSSWIHFRWSCPKFLRQTFHEYAGVSIQFSEWARGFYDRQRSKGKGHHAAVRSLAFKWIRILFACWRDRVPYNEQRHGHNVTARCALLSNTRPDRTAATQSQKPVDFQFKSIAGFSKFSGLTS

SEQ ID NO: 349167 - protein, 354 aa, unidentified
MGLKHQKEKRSMDYFGGLDVSVKDTSICIVDDTGGIVREVKVASEPEALLAVLVSPLYRFKRIGLEAGPLSQWLFSALVEAGLPAICVETRHMRAVLKAQINKTDRNDARGMAQMMRVGLYRPVHVKTLRSQKLRMLLTHRKLLQSKAIAIENDLRATLRNFGLKVGVVGTVRFEARIRELVENLPDLTLLVEPLLVVRRVLREQLDILHRRLLAVVRDDNVCRRLMTVPGVGPVVALTYRATVDVPARFRKSKSVGAVFGLTCSRDQSGERDRPGAISRCGDEMMRAMLYEAAQSMLRSKKWSWLKAWAMKIARHRGMKRAIVALARRLAVIMHRIWVDGTEFRWTREAAVAA

SEQ ID NO: 349168 - protein, 313 aa, unidentified
MPRFSPKAGIDCSADRLDVHIHPLDIVFSVANAPHGWRELDRRLADAQVEIVALEASGGCEREAGRFLLEQRYSVRLLNPYRVRQFAKAAGKLAKNDRIDAAIIALFVAMIPTRPMVHHKHLDTLAELVGARAQLLDQLIVLRNQERWHRDPVLRRLDSRRAARLAADAQTLDRRIAALVDADLGLRAKNAILRSMKGVGPVLAHTLLALLPELGQLTRKQIAALVGVAPFEDQSGKRQGVRFIQGGRAAVRGPLFMAAMVAGAHNPVLKACRERLRNAGKKPKVAIVAVMRRMITILNALVRDDVQWQDRAA

SEQ ID NO: 349169 - protein, 438 aa, unidentified
MSNKVIFNLDELFISVGIDVGADFSWMSIALPNQQFVGKPYKILHNSIDSLTTAVSKIKEAEELYSLESRIFLESTGIYHYPLFCYLRDKGFNCSVINPIITKNSTNINIRKVHNDRFDSKKAALVGLKPDLKVSLMPSDLALNCRNLCREYCDLMDNRSAYVNKLQGELRMAFPQYLGIFSKVTINTSLTLLETYTSPSAFLKADKQEIIDIIKSTARFGLTYAQNKYNAIIQAATDANQFGYIIDSNIKRIRLYISFIRKYDEEINSILESLHELVDANEDSDFVKQIHLIETFKGAGFLSAVSIMGEIGDFSAFSKPKQLFAYFGLDPAVKQSGKFEGTKVQMSKRGSAIARRVIHTLTLQSISISRNREAKNPVLREYYLKKCDSKPKLVAMGAVSHKVCNMIFAILRDNKPFKIIAPQEHIKQYNSAKCDIAA

SEQ ID NO: 349170 - protein, 385 aa, unidentified
MLTLNHTDTPAVIEYATVYVAFELSKAKWRLGVILPGSQKLSRFTIEGGDLAALSGHLAKWRAKAGATGKPVQIISCYEAGYDGHWLHRWLTDQGVINYEMDPASIQVNRRARRPKTDRLDLEQLMSTLLRYLRGEPRACSMVRVPSPEDEDRRRATRERDRLLKERTGHTNRITGLLHAQGIRDANPFARGFVVSLNTMRTGDGRPLPARLKDEIMREHQRLCLVQQQLKAIEAKSRTELRAPAPGSVEAKINHLVDLKGIGVVSGRKLMHEAFYRSFDNRRQVGSFFGLTNSAYDSGDTHRDQGISKAGNARVRRLAIELAWLWLKHQPESDLSRWFRARVGELKGRIRRIAIVALARKLMIALWRYVTTGIVPTGAVCGQSI

SEQ ID NO: 349171 - protein, 390 aa, unidentified
MMRFAGIDIGAERHMVAVLDEQGEVLCRSSPFGEDASGYARLFELLGPTADCLVALEATGHYWRNLFVALIAKDYSVAVLNPLRTARFAEEELRRTKTDAIDALGIARFAQQKRPRAAQLPDSVTEELRELERLRERVAKDFADRLRQLHRAVDLGFPEFTRYVRTLESRLAATILSRYPTAASFRGVSVKKLARIVYDGSHKIGEELARNLIEAAEKSVGAHHSEPYRLRIKYLCEDLDVLRRRLKDLARDVERKLDDHEVGKLLMTIEGLGPLTAACLIAELGDPARFDSPSAIASYVGVIPRIRQSGKKRFTKGPAIPLGNARLRKSLFMVVLQMVRRNPWLRQYYERLRAAGKPGKVAIIAAMRKLLTAVWSVATHRRPFVPIMPA

SEQ ID NO: 349172 - protein, 342 aa, unidentified
MELKTIGIDLAKAVMQVHGIDERGKSALKKQLRRDQLLPFFANLKPCLVGMEACGSAHYWARKLEAMGHTVKLMAPQFVKPYVKTNKNDAADAEAICEAVSRPNMRFVPGKNGEQQAVLSLHRARQGFVKARTAQANQIRGLLAEYGIVIPQGIRNIPKRLPVILEDAESDLPGVFRQLLQRLGDHLKELDRQVGELELQIQLWHRECAASRTLAAIPGIGPITASALVATIGNAKAFDNGRQLAAWLGLVPRQHSSGGKSTLLGISKRGDAYLRTLLVHGARAMVRIAERKASAGDGWIGRLVGRRNPNIAAVALANKNARIAWALLAHDRHYDAEFRTAQ

SEQ ID NO: 349173 - protein, 456 aa, unidentified
MAKKQMTLEVVNPNAAGIDVGSRSHWIAVGQNAEDVKEFGVYSEDHHSLCEWLKKHKVVTIAMESTGTYWQNLFSSLVAYGFEVILVNGRQTKNIKGKKTDIKDCQWIQKLHTLGLLSSSFLPDSTTAIIRTYSRHRQNILKQSASTVLKMQKYLRLMNMRLDVVVNDIVGLTGIKIITSFINGEKSGKELAKHRHYNCKKPETEIAKALQYNGREDYYFALQHEWNTYLHLQKQIDEVDAQIKKHLTGVIDKDDNKKQHIASKKPYKRKNKNTIRGTDMNQLSYQYFEGIDLMAIEGVNDATIMAIISEIGLKGIKKFETAKQFTSWLRLAPNNKISGGKVLSHHLPKGSNRLKIALRQAANSIGNLKEGHLSDFFRRINYKRGRATAVSATARKLAVIIWNMLVKGMPYNPPTEYLFLDQKRKMKLISRIKKNITKFELKPEDVGFNKVLNVST

SEQ ID NO: 349174 - protein, 374 aa, unidentified
MKYYSTLYVGMDVHRDSFTLAHYALDMKQPTGIVKTDNDYRRIVAYVHHLREKYGQETRIVCGYEAGCLGYTLYHQLSKVKIECIILAPTTLPSPRGGKRVKTDGRDAANIAQCLAYGTYSPVHVPSAGDEQVKEFIRMRNDHCQMLKKLKQQILSFCLRHGYQYSGTRSNWTQAHMKWLDALQPEGLLGDTLEEYLTSFRYHQNKLERLDRRIEEISREETYREPVGKLCCLIGVKSLTALSVISEVGDMHRFATAEKFAAYLGLVPGEHSSGNSVRRGGITKAGNVHVRTLLTEAAQSYTRGKVGYKSSALKKRQSGQSETVIAYADRANERLRRRYYQMTLQNGKRHNVAKTAIARELACFMWGLLTEHVA

SEQ ID NO: 349175 - protein, 387 aa, unidentified
MPELNSLHRSRVALEQDTTLIAVVEMSLSSWLVAGIVPGVERQPLKKLEADEGGLLRLLERWRGEAAKTGRTISRVVVAFEAGRDGFWLARWLHARGIEAYVIHPTSIAVSREHRRAKTDRLDTEMLKRAFLGWLRGEPGHCSMAAVPSLEEEDAKRPTREHESLVSERTRVVNRIKASLARLGIRGFKPMLRHGAERLKALRTPEGVGLPPNTLAEMRRDIARLQFVREQIKQIEGARTERLERASGEGGNAMVRLLVQVVGVGLETADMLVHEVLSRPLRDRKAVARYAGLTGSPDESGAKRREQGLAKAGNARVRRGMIQLAWRFLLHQKGSALAQWYRARTADARPGTRKTLIVALARKLLVGLWRLVTTGEVPEGIVLRPAT

SEQ ID NO: 349176 - protein, 368 aa, unidentified
MKDNSEVFVGMDVSKSRIAVALAEAYGAGETRFLGEIEASEASVTKLVRRLSAKHGKLRFCYEAGLYRLIGELGHECRVVAPSLIPRKPGDRVKTNRRDALSLARLLRAGELTAVWAPDERHEAMRDLVRARSASAFDLRVKRQQTGAFLLRLGRVYPGKKTWGGAHRKWLASQAFAPLEQRIAFEERVAAMEETKARVVRLEKAIEEAVPDWSLAPMVTALMAMRGIDLVAATAILAEVGDLGRFQTPRELMAWLGLVPSEASTGDRIRRFGITKAGNGRARKALIESAWCYRFPARIGQAKLARVEAAPPAARRIAWKTQTRLTARYRALMRKGKLKTVAVTAVARELAGFIWAIHRALETDEVVA

SEQ ID NO: 349177 - protein, 368 aa, unidentified
MKQYKLKAAPAALTQEIKNQKAPKAKRILVGIDTGLGNNQASRKVDNAAIGPVQNLRNETEVALYIDKQLELAEQVVVVYEAGPFGYGLYRQLTARGAKCLVCAPDSTQQKRKRRKNNPIDSRTLTSNLSNYLNGNEAALQLVRVPSEEQERARLVSRQHDQLVEERKRLGAQGNALLLSQGFGSWQNWWRPKAFHSLQRVVPEWLLEMLRSWVDLLKVLDEKIQKAKAAQAKGWSGPRPKGAGANSLVQLQSHVLDWNLYPNRRKIACLAGMVPSEWSTGKSQRLGSITKVGVPAIRRIITEMVWRMILFQPHYRPVQKWQEVLRGTNKTLKKKAVVAIGRQLIVDLWRLQTGRSTAQELNLIMIGG

SEQ ID NO: 349178 - protein, 319 aa, unidentified
MSKVTLGIDVAKLKLDVALLTPAQTYVKQFENSPAGFQALQAWLGSFSLLSVHACLEATGTYGDAVALFLHEQGHVVSLINPLRIKGYAASKLQRNKTDKADARLIAEFCATQNPAPWTPPTPEIRQLQALTRRIETLNEMLQMEKNRRDTAPAETHDSLDRISAALTEEITKLQKEIQQHLDQHPHLKAQRDLLLTIPGIGEKTAHLLLSEIDFARYEDARQVAAAAGVTPRRQESGTSLKRTNLSKLGNGRIRKALYFPAVVALRHNPIVKEFASRLKKNGKTPMQIVCASMRKLLHQAFGVLKNNCSFNPNLVFAG

SEQ ID NO: 349179 - protein, 412 aa, unidentified
MDEVVEFCAGLDVHRDTVVATVRFPQGRHRGSETKTFGTDTAELVALGDWLISHRVTRVGLESTGVYWKPVFYLLEDRIEQLWLLNAQHLKNVPGRKTDVVDSAWIAQLVEHGLVRPSFVPSPPIRELRDFTRHRRVLSEERTRMVQRLEKVLQDAGIKLTSVASTVLSKSARAMLEAMLAGESDPVVLAELAKGRMRSKIPALTDALRGSFRVCHHGVLVRQILAHVDFLDAQLAEIDEQITTRVATFEPIIERVQTIPGVARKCAIGMIAEIGVDMSVFATPAHLASWAGICPGNNASGGKARSGRTRHGPVALKTVLTEAAQAAARTKNTYLGARYHAIRGRRGTFKAVGAIRHDILIAYWHIVTADVGYQDLGVDWLARRHSREHQIARLAKQIEKLGAAVEITMPAA

SEQ ID NO: 349180 - protein, 408 aa, unidentified
MNAVGIDVSKGFSTVAIIRPFGEIVRKPFEVVHTPEKLSELANLVLSLEGESRVVLENTGKYSDPVVKVLSGAGVFVCPVNAKLIHDYGGDTIRRDKTDPLDSLKIAGFCLDKWAKLECFLPVDESRKTLKTYNRQLDEFMKIKAMLKNNLISLTDQVFPGVNRLFSSPGRENDGHEKWVDFLSRFWHCECVTSLSKDAFAAAYKKWCKRNGYHFSPSKTVQIHEYASRQQASLARNDFTKTLIVHCVGQLNHICTTIAKLKTEMTTMAKTMPEYETVMAMYGVGKSIAPQLIAEIGDITRYPKRSSLARFAGIEPPQNQSGSYSQRSRRISKQGPPQLRKALFQVMRCVLLLGNPDEDTFRFLSRKRSEGKPFKVYMIAGANKFLRIYYARVKECMDLSAQNRTTRA

SEQ ID NO: 349181 - protein, 411 aa, unidentified
MRRVIGIDVHRTFGEVVFWEDGRLRHAGRIDMTRTALEGFGKTLLASDEVVIEATANSMAVSRVLAPFVARVIIANPLQVKAIAQAHVKTDKIDAGTLASLQAAGYLPQIWTPDAETERKRRLVAGRYQVVRHRTRLKNEVHSILHAHLIPKCPHADLFNARGRAWLAAQQLRNDERAAIDRHVRELDRLAEDLALLDREIARDAIDDLAVNRLMTITGVNLAVAAGIVAAIGDISRFDSPQKLVSYFGLNPRVRQSGLGAAHHGRISKIGRSHARAMLVEAAWAAAKAPGPLHAFFVRIRARRGHQVAAVAVARKLTVLCWHLLTKGEDYLWARPALVANKTRAMQLQAGHPQQKGSRRGPAYAYNIKALRDREMLIAAQAERSYERLVSQWKPRRPKPGARAPQLGRTK

SEQ ID NO: 349182 - protein, 370 aa, unidentified
MDKISVRQIEATEVIKDRGEARDRRIEFLVRSTRTVARALKPVFARTGILTHEVVAMSFVGIDVSKRELEICRLSSEETRWTIQNEPANVAEFVKQMQQQPPTLIVLEATGGWEALVTSALAVVGLPVVVINPRQVRDFARASGLLAKTDKLDARVVAQFGRVMNPVPRPIASESVQELQALMARRRQIVEMISAENNRLGISPRRVRDDIRQHITWLQRRLKETDQDLDGAVRNSPIWREKENLLKSVPGVGPVVSRTLLAHLPELGGLNRRQIAALVGVAPFNRDSGTLRGRRTIWGGRGAVRAVLYMGTLSAVRFNPLIRNFYERLRNAGKAPKVALTACMRKLLVVLNAILRKERPWQPTDGRAAT

SEQ ID NO: 349183 - protein, 402 aa, unidentified
MAYDCVIGMDVGKYFHHACVLDPQSRQVLSKRINQHEGSLRKLFGKFLANDAEVLVIVDQPNNIGRLTVAVAQAMGADVRYLPGLAMRQLSRIHVGNSKTDVRDAYVIAHAGLNLPDALRSVDRVEEVFLQLKVLNGIDEDLARAYTRLINQMRSALVGTYPAFEHVLHGQMIHRKWILHLLAKYGGPTKIRRVGKARLAAFARSHRARNPEPVIDAMLAAIEGQSVTIAGAEYAELGVAMSAKDALAKLEHRKEIEAQVLELIQDIPQTEILLSMPGVGPRSAAQILMTVGDMSDFPDAAHLASYAGLSPRTNQSGTSIMSNSPNRAGNKKLKNALWQSSFASIRFHERSRQFYERKRKEGKRHNAAVVALARRRLNVLFAMMRSGELYRDISTVQEAAAA

SEQ ID NO: 349184 - protein, 430 aa, unidentified
MEIVYPRACGVDVHKSFIVAVICISESINPRYIKKRFSTFNNQLIQFRDWLIENNCHNVCMESTGKYYIPVYNALEGHIPNVVVANPKWVKAIKGEKDDNKDAKWIADLFKFGIVRSSYIPEKDIRILREFTRYQYKLVNIRSSEKNRFQNALTVGNCKLDLVFTDVFGKSASSIVDTILSDEPYTSEDILSKVHGRCKASSDDILSAVEGTNMNQYQKARIKIVQKHMEYVDSLLDEVQHHIDMMVESYENYIQLLMTIPGVNRKSAIIIISELGIDVSQWSSARKLAAWAGLAPGHNESAGKKKSVKISKAGIYLKPCLVQVAHAAVKDKTCSYYAEKFGRISKRRGKKRAIIAIARKILVAIYHILKTGEVFNPSDMADVETTKEQRIAYITNNFRNAFNQLSRTGLSEEEILSIIIKKSNNSPQTE

SEQ ID NO: 349185 - protein, 384 aa, unidentified
MMGDNKRKTKTIPIRQNMNNNSLIAGIDLGDSSSLTTILTPEGDVADRFSFQMDDQGYTLFANKVPRDTRLAFEATSMAYPFFRMLKGLGYDDVTVAHPTELAWIVRSKKKNDRADSLKIAKLHLAGLLPESHLLPQTEQVERDLLIQRVKLGSEIGRIKSRIISYLKREGVYGYLPKSKDNFSARRRAAIASLRFNDDRDLVLKTMIDRLEFMERQCEPLEERIKGNAKGNKYVKILMSIPGIDYYLASLYTSYIGDPHRFPSFDHVASFLGIIPESKDSANVRRRGRMSKDGPPIARWGLGIMTDTVMLYNPNIKAYYVRVKQRTGRGSYAHVLTMKKLARMIHHMMITEQNYKWENEALTEEKISRLGTDADAAGGESSSA

SEQ ID NO: 349186 - protein, 352 aa, unidentified
MRRPKHQVISGEDLFVGIDLHKHRWHVTVRTVDLELFSASIPGTWEALQRVLARYHGHQLQAVYEAGYFGFRLHDRLVDHGIPCIVTPPSLVPQEYGNRVKTDRRDSRKLAHLLAKGLLKRVWVPSEEELYHRQVIRRRRQLVRDRVRTQSRIKAELRFYGIHLDEPRGRWTQMYFETLKSVRFENRWMQESFNRLLEQYEFLSVQIDKQTQLLRELSETPRYRKRVEILQSIPGIGLISAMELLLELQDVSRFRRAEQLAAYVGLTPSQYSSADKVRMGRITGIGKDTLRSLLVEAAWTLIRKDQAMREKYDRIKVRSGGKRAIVAIARTLLLRMRRMLLDEQAYALPRAA

SEQ ID NO: 349187 - protein, 438 aa, unidentified
MRRKKNKATKKVHFESLPLIHPNAAGIDVGSKEHLVAVPLDRDPQPVRTFQAFTPDLHQLAAWLKRCGIETVALESTGIYWISLYEVLEQYGFEVRVVNARHVKNVPGRSKSDVLDCQWIRKLHSFGLLNGSFRPDQQIRKLRTYMRLEDNLVVESTQAVHHMQKALFEMNVQLSNVISDITGESGLRIIEAILAGERDPEQLADLCSTRIKASRQTVAKSLHGNWDEALLFCLKTALETYRFSQKKIQDCDQCIERQLATFEIKAPLPDSKQNLQTQLHQVCGVDLTKIPGIKEQTAKIIISELGLDMTRWNTEKQFSSFLGLCPNNLITGGKIIRRSTRKVYNRAADALRLCAQSLTHCKSALGAKYRRLRTRLGAPKAIVAMAHHLARLVYRMLRYGQDYVEKGIQQYELKFRLQRIKWLKKEAHSLNLELVAAQ

SEQ ID NO: 349188 - protein, 368 aa, unidentified
MIVHIMTYERSTLVNSEKYIGLDVHQATISVAVMDSKGKVVMESILETKASTILEFFAGLRGTLSVTFEEGTWAAWLYDLLKPHVAKLVVCNPRKNALLKHGNKSDKIDARKLTDLLRLNDLEPVYHGETGVRMLRELARSYLTIVKDLSRVMNRLKALYRSWAIPCAGRDVYYTRHRSQWLEKIPEAGTRRRAEQLYQQLDMLQHLRQQARRELLAESRKHTITAKLRQIPSLGPIRSALAVALIQTPHRFRTKRQLWTYSGLGLETRDSGEYHYVQGQVRRRKKQVSVRGLNKDHNHDLKGLFKGAATMASVRPGPFQDFYQAALAKGIKPTMARLTLARKIAAITLTLWKKGENFDAEKLKSQAA

SEQ ID NO: 349189 - protein, 344 aa, unidentified
MEITTLGLDLAKNVFQVHAVSSTGEVVVRRALRRAQMIPFFSKLSPCLVGMEACGTSHYWARELTGLGHEVRLMPPAYVKPYVKRGKTDAGDAEAICEAVRRPTMRYVPMKSVDQQAALALHRTRDLLVRQRTQLVNMIRGVLAEFGIDIPKGITYALAFVRRVVAGEAQDIPQLAARVIGALAEQALEGQARIRQLERELLAWHRSSELSQRIATVPGVGLLGATALAATVTDPAQFRSGRQFAAWLGLTPLQNCSGGKERLGRISKMGDQYLRRLLINGMTSLVARNVRRPDMADPRINALLARKPLRVATVAMANHTARAIWAIMTRGETYRAPAALEAAA

SEQ ID NO: 349190 - protein, 347 aa, unidentified
MFTIGLDLHKRETQLCIGHEDGTFEERRIATTRDRFTAVLAAYCPARILLEASTESEWVARHLEQLGHEVIVADPNFAPMYATRTRRTKTDRRDARTLMDACRLGAYREAHRASDERRHVRAELAVRDALVRTRTRYIALIKALIRRDGLRLNSTASHLFAQRIAVLDASQQLRAELQPLLEVLAPLNTQIDTADERISALEHTDPAVALLMTAPGIGPITASAVVATVDDITRFATAHQFESYLGIVPGELSSGEKRRVGPITKAGNARVRYLLVEAAWRILASKQEDAAVLRAWALKIMVRRGKRIAAVALARRLAGILYAMWRDNHAYSAKRICAPRSVLARAS

SEQ ID NO: 349191 - protein, 423 aa, unidentified
MKHRKMRFTYVGVDSHRDTHTAVFLDCFLDKLGEITFDNLPSKYAAFMIEAEKLKQEDTDLLFGLEDTGSYGRTLAIFLTDNRQQVKNVGSNLVAKERSNLNIKQKTDSIDAECAARVLLSKFEELPDADPNDKYWILRTLVVQRDQIVQANRRAKTTLHNLLTQHYPNYRQFFVGTFGKTAIAFFNTYPSPKTLENVTVEELADFFQEASNGGIFGPGLNSIDRARLIFDTLQDTAVLHQEIRDEAVRSTIRQFEFNMAEIERIEMSMAIYLETFECTLTSMTGIDVVSACQIMSCVRDVKRFPTPAKLAQYSGIAPVTRASGNKELQFANHRGNRELNSLLYWLAVRISTPCGPNQKILNKFFYDYYHRKMSEGKTKRQALKCVQRRLVNIIWTMLTNGEEYVNPPVMDIPEDETEKNGQG

SEQ ID NO: 349192 - protein, 344 aa, unidentified
MKYFTGIDVSLRSVSICVVDEAGEVQYEGKVPAEVDLIVAALQRCKAEIMQVGLEAGTLTQYLTYGLQKAGFEVICLEARQTAATLAAMRNKTDRNDARGLAQILRTGWYRTVHVKSLESHQVRALLASRKALLARCVDLENELRGLLKIFGVRLAPHVTHNRFDETVRAAVSTTPELNTCLLPLLDARTVLYKTYLKLDNAVKSVVRHDPICQRLMTVPGVGPVTSLTFKAGVDDANRFRSSRNVAAHFGLTPRRYQSGETDNPGRISKAGDVDVRQALYTAAHALMTRSDAWSTLKAWGLRLAKVRGHRRAVIAVARKLAVILHRMWVDGTDFRAARLQGVA

SEQ ID NO: 349193 - protein, 410 aa, unidentified
MSKLYVGIDVSLRKNNVHCMAAGGDTLKKFKVPNTFDGALALVDNIVELSAQHSLQEVILGMEATSNYGYHLAAFFKNSEKLAPLSPKIHILNAKAVHNFKKSYSDLPKNDDLDAWVIADKLRFGRLPQEVFMDERFLALQRLTRTRFHLVKTIKREKTYFLNNLFLKFSSLRQEKIFSNNFGATAMAVVEEFLSPDEIATMPLEELVSFLEQKSKNRLVDADGIAKALQKAARSSYRLSKSLADPVNACLASSISVIKALQSEVKKLDKLIEEHMKAIPQTLTSLKGIGPVYSAGILAEVGEITRFKNQKALAKFSGLVWNEQQSGEWKAEDIKRVRSGNKYLRYYLVEAANLIRVHDQEYAEFYRAKYDEAHTHKHKRALVLTARKLVRLVYALLRTNQLYIPRKRGG

SEQ ID NO: 349194 - protein, 314 aa, unidentified
MAEHSMICAGIDVAKKKLDAVIYPGGAHLCVAYDAQGLKRLDAFFQEHNVRRVGFEASGGYEWMLLAHLRGGPIAAARFQPGQVRHFAKSRLCRAKNDKLDARIIAAFTASLDEMPPLPEARFDALDAELTYLEQLEEQIATLKTMVETTRPAHLKRLHEADIARLEKRRKKHIALMVATLNKDAALGRRLELLVSIKGVGPRTALALVIRLPELGSISREEVAALVGVAPFDDDTGQTHRRRHVRGGRSRLRKSVFIGAFCATQWNPDLKAFYERLRGNNKSHLCATIAVARKLVILANAIVARNTPWTPAHQ

SEQ ID NO: 349195 - protein, 355 aa, unidentified
MEHLAIDLGGRESQICARSSDGVIVEECRVGTGSLRKLLEGRPQSRVVVETCAEAFAVADAALALGHEVRVVPALLVKSLGVGARGVKNDRRDARVLSEVSCRIDLPSVHVPSPEARARKTMCGMREGLVGCRTKLVNAVRGWLRGRATRLRTGGVDTFARRVRAAVKDLPGYVERLLCAIEQLAQQIAQADTELEELAKKDAVCQRLMTVPGVGPVTSVRFTATLDEVGRFASAHELESYLGLVPGERSSGDRKRLTSITKAGSTKMRWALVQACWSARRWRPHDPMVKWSLEVERRRGKRIAVVALARKLAGILYAIWRDGSSYDPSRGAALLTRSMPAPDMTQVFAMPAQTI

SEQ ID NO: 349196 - protein, 308 aa, unidentified
MDGMVVGIDVSKSRLDVHISPGDEAFSVSRDAAGLEELVARLAPMTVATIAVEATGGFETVVAASLAAAGLPVVVNPAQVRAFAQAVGQRAKTDPIDAAMIARFVVATNPEIRPLPDAETQALADLVTRRRQIIQMIVAEKQREKRAPQRTRKSIARLLKALEKELTSLDQDIDGAIRGSPAWRDKENLLASVPGIGPVIARTLLADLPELGTLDRRQIAALVGLAPWTRQSGQWRGRSFIGGGRTSVRAALFPGAMAAARHNPQLRAFHQRLIAAGKPKMVALIAVARKLLTILNAILRDNRPWQNA

SEQ ID NO: 349197 - protein, 318 aa, unidentified
MAQRKPVVGIDVAKDKVDAAIRSAGVAQCFANTAQGHGDLLRWLAQHGVGLAVMEASGGYERVWARLLEEAGIAVRIVDPKRVRHFAKSAGRLAKNDPIDADMIAWFGETFDDAPARTHDPEREALAQLVTARMALKELQGKLVNFGEHDQPAVVRKVHQAIAKTVAAQLLKLEAEIADSIAATERFAKRAEIIESVPGLGATSAAGTIALLPELGTIANKPASALLGVAPFDDTSGKHQGRKFIQGGRQKLRNLLFLPIVGAATRYNPVLKAHYQRLITRGKPPKVALIACMRKLIVILNTMIARGEKWDPTRHAAA

SEQ ID NO: 349198 - protein, 422 aa, unidentified
MTTLLQVGIDPGPKECVGRAVDQYGVVQGKPIRFRPDREGVARLVERTIALAPEAERRFYVEASGSHWYGLVGWLRAQDEPVSLVCPSYTKAQRRVSSRYAKSDARDAEALARAAFQMGERAQHPADLPEGPRLNLRFLCRHRYRLQRDCTAIKLRLLGWLGFTTPGLAEWLGGDFSPADRALLARYPVVAKAVRRGKAKVREFLERHAERAVDDAALDALFELARQAYSPRDLDDALVAEQFRMELQRLALNEKLIRQLDQRIAQVLPQCDPHGWARSLPGFGAVVAPILVAEAGTDLSRFANPHRFAAWTGVVGRAHGSAGRQAEGLPITKAGRGIVKSALFLAANVARQHDPRLRAVYEGLRAKGKHHNQAVIAVARRLAELYWYLMTEQRPYTVEPPPAPAAGQPTLPSATLSPPDGG

SEQ ID NO: 349199 - protein, 387 aa, unidentified
MQTKTPATTVETTVRDHSNTLFASLELSKAKWLVTANSPGEEKFSTYVVAGGDGASLLVLLARLKAKAEQRRGVSVKVVVIQEAGLDGFWIHRLLVQSGIESHVVDAASIAVARRHRRAKTDAIDGVSLLRTLMAWARGERRVCSMVRPPSPEEEDQRRLSRERGTLLKERIQHTNRIKGLLSGQGIRGYDPLKPDRLERLDALRTGDGRPLPDRLKAEIRRELARIDVVASQLATVERARDALVRTQTTEPTNPSALLIKLKGVGIEFASLVWLEGLFRSFTNRRQVAAYAGLAPSPWQSGATDRDQGISKAGNHRLRRVMIELAWFWLRHQPDSALSRWFRNRVGTAKGRVRRIAIVALARKLLVALWRYVTQGIVPEGATLKAA

SEQ ID NO: 349200 - protein, 351 aa, unidentified
MKYYTTTTEFNCGIDLHARQMYACVMDRQGKVLLHTNIQGNDFDYFLKRVEPYRHDLTVVCECTFNWYWLADACEAAGIKFVLAHALYAAHIHGGKNKNDRIDSEKLAHLLRSNLIPPAYIYPSERRPIRALLRQRMSYVWQRAELMTHLSMNQTAQNCVPAMKGGHNRDVWQERILAQTPNPYHQLAVRCDMDAIRTYDTLIAKLDGTITLHARQHQSREYTLLQTVPGIGDVLAMTILYEIDTIARFPTVKDFTSYCRLVKGSVASAGKLKGLTGGKMGNAYLRWAFGEAAVICKRAHRLLSPYADRLVARHGTFKGNAILANQLARAVYFMLQSGQAFDPERIIKASI

SEQ ID NO: 349201 - protein, 412 aa, unidentified
MRVLYPTCAGMDVHKKDIKVCLVTRDNQEQRQEDVRSFRTMTRDILAMRAWLQAHGCTVIAMESTGVYWKPIFNLLEGDFTVLLVNPAHIKQVPGRKTDVKDCRWIAELLEHGLLRGSFIPPIEIRDLRDLTRYRRQLVNTHSAEVNRLQKVLEDANIKLASVATDVMGVSGRAILRALLAGVVSPEALAELAKGRLRKKKPDLQAALQGRFRPHHTQLLTHILAHIEFLEESIAACEAQIEARCRPVAEVITLLDTMPGVSQRTAQDLIAEIGVEMAWFPSAKHLCSWAKVSPGNNESAGKRKSGRTGKGNKWLRALLVECAHAAGHTKETYLGTKFRRFASRKGKKRAAIMVAHRILEAAYFILRDKVPYRELGDQYLDAHHREHIIRHHVRRLERLGLHIEVHELPLTG

SEQ ID NO: 349202 - protein, 412 aa, unidentified
MDEVVEFCAGLDVHRDTVVATVRFPQGRHRGSETKTFGTDTAELVALGDWLISHRVTRVGLESTGVYWKPVFYLLEDRIEQLWLLNAQHLKNVPGRKTDVVDSAWIAQLVEHGLVRPSFVPSPPIRELRDFTRHRRVLSEERTRMVQRLEKVLQDAGIKLTSVASTVLSKSARAMLEAMLAGESDPVVLAELAKGRMRSKIPALTDALRGSFRVCHHGVLVRQILAHVDFLDAQLAEIDEQITTRVATFEPIIERVQTIPGVARKCAIGMIAEIGVDMSVFATPAHLASWAGICPGNNASGGKARSGRTRHGPVALKTVLTEAAQAAARTKNTYLGARYHAIRGRRGTFKAVGAIRHDILIAYWHIVTADVGYQDLGVDWVARRHSREHQIARLAKQIEKLGAAVEITMPAA

SEQ ID NO: 349203 - protein, 347 aa, unidentified
MLHAGLDLSRKKLDVCLLSEQGEHLDQLGVPPDVDSLRRLARRIDEVHAEPVSAVVESMTGARIVHDTLEQEGWEVEIADAQKVKGLAPLACKTDRIDSLVLATLSQRDLVPAIWLPDPRIREERELARFRLHLVKHRSMLKHRIHSTLINFGRPCPVTDLFGVEGRRLLERLEVPEPWRGNVSASVVLIDDLERQINEINRRLRQGHTEHPYIPLLMSAPGIGWVLAFTIAAEIGDISRFPSPEKLAGYTGLCPRVNQSGDSDRRGPLSKHGPTYLRWALLEATMHALKHPAYSERYQRNKRRLGKQRGAKVAQIDIARRLAQAIWHMLTRNQGFAPRGAALRLAA

SEQ ID NO: 349204 - protein, 359 aa, unidentified
MQPQVKKLDFTGQKFFVGLDTHKNSWKVSIVHEELLLKTFVQPPEPDKLFAYLKRNYPGAEYYSAYEASYCGYWIHYRLTELGVNSIIVNPADIPTTNKEHVQKEDKRDSRKIARCLRNGDLTPIYIPSMKTLQDRTLVRNRYTIVKELKRFKHRIKSLLFFYGVNIPDEYNNRSGHWPKRLIAWLDTLTFEEPSATYSLHILVKQVKNLRDILLDMTNHIRELSKTSTYKRNIELLTSIPGIGLITAMLLLAELEDVCRFKSLDQLCSYVGLIPSTNSSGDKELVGEITSRGHSRLRTAVVESAWITIKNDPALLMAFAKLCKRMDANKAIIRISKKLLNRIRYVLKNQQEYVTAVVK

SEQ ID NO: 349205 - protein, 451 aa, unidentified
MTKKKMELDIINPNCSGIDVGSKSHFVAVGQALEDVKEFGVYADDLTAICLHLKEYGITSVAMESTGNYWQNLYVELEKHGMEVTLCNGKFTKHAKGKKTDVKDCRWIQKLHALGLLTGSFLPDETTEQLRTYCRQRTNWIDLAAEASHKMQKYLRLLNFRLDVVVKDICGLTGLAIIADICKGNLDPEKLSLHRHGNCRKSQEEIAKALKGNNRTDFLFGLKQEYESYLFFQKKIEACDVQINSFLKMQINTHPDKKKLQTDNKNHKRVNKNSIKGIDLNQASYQYFNGVDLMKIEGLSHSTILTIMSEVGPEGFIKFESSKQFTSWLRLAPNNKISGGKILSNKIPKGSNRLKIALRHAANAIGNLKDTHLSDFFRRVAYRKGRATAVSATARKLAVILWNMITKGIAYNPPIEYLFLDQKRKLRLVQNIKRNIAKFEIKPEDVGFASV

SEQ ID NO: 349206 - protein, 361 aa, unidentified
MQIIGCDLHARQQTLAMLDTTTGEVVNLTLLHEGNNVREFYSKLPRPVLVGIEATGSMQWFLNLMQELGIECQVGHPAKIRAAEPRKQKHDRRDADLILKLLAEKRFPAIWLPTKELLDLRALLLHRHQWVRLRTRIQNALQAIALANGLRRGPGLWSYDGQSAIAFLPLLPHTAYRRSALLAMYGKMEAEIEKLTQQVAEQAGNRCGARLLMTHPGVGSVTALATDVFLGDPRRFVDGKALASYVGIIPREYSSGGRQRLGGVTKQGSPLLRFLWGEAGAHAARRDPELQRFYRRKLVQKGLGKARVAVARKLGIRLWIMLRDEIDYQEFCRRGQKQQSVAACAGMPETRYGANSHRPID

SEQ ID NO: 349207 - protein, 418 aa, unidentified
MEAIVESCCGLDVHQATVVACLLVGEPGKKPRKDVRTFGTVTAELVRLREWLVAEGCTQVGMESTGVYWMPVYTILEEAFKLVVGNATHIKQVPGRKTDVKDSEWIADLLRHGLIRPSFVPPKPLRELRDLLRYRRKLVESTTSERNRMLKLLEMGNIKLSTVVTDVFGVSGRSMLQALLDGQQTPEQMAKLARGRMKGKLLQLTAALDGRMEEHHRFLLKMQLERLEEVEADIAHLDQRIDEKLEPYREQHTRLMQIPGVDRVGAAVLIAELGVDMSVFPSVCHCAAWAGVCPGNNESAGKRKGQPARKGNVHLTTALVQAAVSASHAKGTYLKDKYWRLKAKRGPKRAAMAIAHKILIAAYHMLSRGVDYKELGPTFLDQLSADVTKHGLVKRLERLGYEVTLRPIEPQPQPTIAA

SEQ ID NO: 349208 - protein, 345 aa, unidentified
MEQISRIGMDTSKHVFQLHGVNAAEEVVLRKKLRRKEMVAFFRALTPTVVGIEACGGSHHWARLLRSFGHEVKLIAPQLVKPYVKRGKNDAADAEALCEAMSRPTMRFVPVKTTEQQAALMIVGLRDRLVRNCTQLSNAIRGYAAEFGFTVAKGKAHLKSLLERIQADESIPTLARELFAAQADEYARLQTQIHELNVKLMACHKADECSRRLAEIPSIGPIGAVLLRLKTPAPEMFRSGRQFAAWIGLTPKDHSTAGKVKLGGITRAGDETLRSVLVAGATAVIQHVRRGGRGAPWILKLLERKPPKLAAVALANKMARVAWKLMVTGERYATKSAPAALASAT

SEQ ID NO: 349209 - protein, 323 aa, unidentified
MRKSIGIDVSKTKLDVSIFDGDEHRQISGGNTESGLKELLGRMSRLQGKELVITMEATGTYHLRAAMGLHEAGYRVSVVNPLIIKRYSEMKMLRAKTDPVDARLIAEYGYYERPAEYRPNNKECQELVYLLKTIEGLYRVRGQNRNRIEAFTQSPVCVSVAIESIQRINTAIDDEIKLLERRIRQLIGETYQEEYRRLLGIPGIGKRLGAAIIGYFQEFEHFEKAKQVASYIGVNPAPRNSGSSVRGRGAISRKGNTYLRKLFYMASLAASRHNHECSKLYNRLLSEGKKKKVALIAVSNKLIRQVFAIVKNQREYSPLYQAV

SEQ ID NO: 349210 - protein, 321 aa, unidentified
MAKNDFDELMSIGIDIGKDAFHLVGFDHSGQRVLRKKIKRLALVTTFEQLPRCIVGIEACLSAHFVSRTLRKLGLKPRIIPAIYVKPFNKGQKNDYNDAEAIAEAALRPNLLTVSEKTQDQLDLQALHRVRSRLVSRRTATVNQIRAFLIEQGITVRKGLRALKISFEVILEERKDEISPRMRMILIGLYGDWLWMDDRIDTVSKEIEQISRTEENCINVMTVPGIGPMISTAMVAAIGEGEAFDRGRDFAAWVGLVPRQYSTGGRTVLGRITKRGSRYLRMLFVQAAKVILMRPHRWHDFSFGEWLTRASERMHRSGAIK

SEQ ID NO: 349211 - protein, 321 aa, unidentified
MNKCNQIYGVDISKNVFDVVDSKGNHSQFKNDAKGFKAFQKALPGDALVVMEATGYYHYRLAQFLYEQGVMVSVVNPLSVKRFIQMKLSKVKTDKSDAKAICEYATVNEVPLYTARDKNQAECLQLLRLIDTYLKQSTAIKNKLHGEKTLGKPSKTVYHSLNRSLKAVQKEIQILEDRLLEIVKEEQQKQLTLLKSIPGLGKKTAIMLIVLTDGFSNFENASQLCSYTGITPTLRQSGSSVRGRSRITKIGNTKLRNLLFMCSFSASKHNKACREIYERIIAKGKSKKLALIAVCNKLLKQAFAIAKSGLPYQENFVSKLA

SEQ ID NO: 349212 - protein, 338 aa, unidentified
MPLYGGIDLHANHSVVVLLNEQDQVIYQRRLSNHLPTILEQLAPYHSDIKGVVVESTYNWYWLVDGLMEADSRVHLANPAAMQHYSGLKYTDDHSDARWFAQVLRLGVVPEGYIYPKAARAVRDVLRKRAPLVRQHTANVLSVQNILARNTGSRFSAKQIHACTKADREGLLPEANQVLAVTSSLALLDCLSHQIKTLAKAVTTSLQHTPAYEQLLTVDGIGTILAQTIGLETGDIGRFPTVGNSASYCRCVKSTKISNGKRKGQGNVKNGTPYLEWASMEAAQFAIRFNPTVQRFSQRKHAKSHLMVARKAVAHTLARACYDIMRDLVPFDVHKAFG

SEQ ID NO: 349213 - protein, 336 aa, unidentified
MRSIIYVGLDVHKESYTACCYSFDKDELQYKQKMASDYKLVLKYLEQVRKHYSDEVEFVCGYEAGCLGYTLYHQLTNHGVACKILAPTTMGITNTNRIKTDKKDSGNIARCLAFNTYSAVSIPTAEDEAVKEYMRMRDAQKKLLKITKQQILALVLRHGHRFEGGRSYWTIKHVSWLKSLNIGGVIQESLDEYLVTYEYLTDKIERLDQRIKELADSERYQEKVKKLSCLLGVKTHTALAVISEIGDFKRFTKPGNMAAFLGIVPGEDSSGDKQRQGSITKAGNAHLRRLLVEAAQSYTRGVAGHKSKELRRRQNGNVVEVIAYADKANTRLRSRY

SEQ ID NO: 349214 - protein, 355 aa, unidentified
MTFVGLDLHKRYITACALDDRGTIVSEIRQLPTSMASVLDWLTAVPAPVTVAMEATLYWEWLVARLQEAGHPAMVADAYQVKLIWQARSKTDIIDARKLAELLRSNLLPTIWVPDLETRRRRQLLRGRAFLVRERTRIKNRIHGHLTAENHCYPRSDLYGRAGRAWLAAVPLSPVLAAETQRLLHLHDVLTTEIAGLDAQVQRAARQDPIARRLATIPGVGVVGAMFLHAEIGPIDRFHSSHQLAAYAGLVPTTHSSGGKTTHGPLAPMSNHWLKWILVEIVQTLKLAPGPVGTYYRHLLRAKGKPKATTAAARKLCTYLYWMLHEEWTYAQWLDQHQISRRPEVRPTLRLGAMA

SEQ ID NO: 349215 - protein, 401 aa, unidentified
MEGPIVSIDVSNGNSHYMCFIKNNKRFGKVKKIDHNIEGFKRLLEDIQKLEAETNEKVCAVFEATGVYTKPLERFLSKNSIKTYMINPLESARKRKEEIHNKKTDKLDPISISKVYYDKEEMMELKKKDETYNWLRKKNRLYEDQLNHLRKYKVTFQNQLSICFPGYLDLFKDGYSDIPMTILKKYPHPDLLKNKKAETVARYLEKNTCHTHKVSLEYALKIIEFAKKTYPGCEKDDVEVEIFKILLDKVIETQRECEKTLNEMITVASTLEEYRYILSIDGIGTNLAARIIAEIGDIEEFESREALVAYAGLDPHIYQSGDQDGKHLKISKKGNKYLRCLLFLAVGCSIRGAKDNPVNRFYQKKKQQSNPLNSKAAKTACTAKLLKIIYGICKNKTTYER

SEQ ID NO: 349216 - protein, 333 aa, unidentified
MNKITLIGIDTAKQVFHLMGVDAQGHYVWRKQVSRRRLLTTLARLEGCEVVLEACGASHHWARCIKELGHTVRLIAPQHVKPYRRGQKNDYRDAEAIISATLSPGMRFVGVKRVEQQAEQALHRVRSRLMSQRNAAANELRGLLGEYGLAFGRGFKPLRAGARSFVETEQAHTLGLVELVNDVLEEMAVLQGRMDHYERLIDQRVQVDETSARLREELSGVGKLSASALRVKVADVRDFPSGRHFAAYLGLAPGHSGTGGKVSIGHIKRGHDRYLRQLLIHGARSALHHLGDKQDAQSRWLRGLLERRGFNVASVALAHKNARQAWAIMAREQ

SEQ ID NO: 349217 - protein, 422 aa, unidentified
MVSNYPIIGIDVAKHFCFYAAVSPLGKPFLKPFKAFNTKQGLLFALDQIKKAENAFGIKPLISLESTGHYSARIVHFFLKQGFEVFLINPLVSHSIKNSAVRKVKTDPVDALELAKLLLLQDFHPTHLNSDALTNLKLLVRTRFQLASQRITLLNQLVAAVEQLAPLFTTVFNPGSLTALSLLTQFPFPSQWLDQNNHTVILSLLESLPRRGKAYSKNKFTALLACAEDALVSGMNYSAHGTVVQVYAKTLCVLDQQIATLDDEIKSVAAQLPEFSLLKTIPGIGDTLAPIILGEIGDITRFNNSKQLVAFCGVDPSVKQSGNFIGSKNKISKRGSPFLRRALYLAATTAIRKDTKGRLVNPVIYEYYHEKVLYKPKKLALGAVMNKLVRIIYSVLKNMQSFHLISSAEQVELHLNTRKKAA

SEQ ID NO: 349218 - protein, 416 aa, unidentified
MSRKFMRTNTCGKLSQLLNIFERWFSHMYSYFVGIDIAKNTHWASCLSSDGEIILEPFSFSNDNSGFQKFISKLESLDKTKILIGLESTAHYGENIISYLFNLDFNIGLINPIQTANLRRSNIRKTKNDKVDTKIIIKALTLGNYSLITSRDINNLKLKGLCRSRRNLVTMRSKAKIQLVSYLDQIFPELAQFFKGNLHLNVSYQLLKEYSSPKQISSLNLTKLSNILHDNSHGRYNKQDAIRLRELAKNSVGIDNLSLSLQIKHAILQIELYNEQIAEVEALYKQILDEMNTPILSIPGMSYNQAAVIIGGIGDINRFEHSCQLLAYAGLDPSVIQSGNFQARSTRMSKRGSGMLRYSLVYSAHNVVKNNKTFRDYYELKRSQGKSHYCALGHVAHKLVRIIFKMLKDNVAFNLD

SEQ ID NO: 349219 - protein, 359 aa, unidentified
MQAIIERCCGIDVHKKIITACLIIGKFNELPTVIIKTFSTMTRDLLACKDWLESEGCTHVALESTGVYWKPVFNILEDSMEIILANARHIKNVPGRKTDVKDCEWIATLLRHGLIKGSFIPPRPIRELRDLTRYRKKLIQQRSSELNRIQKFLEDANIKLASVVTDITGVSAQDMIHHLIRKDMTPQEMAELARGRLRTKITELEKALEGALREHHRLILTLSIQMIASYDQAIDTLDREIDERMKPYSKESERLQTIPGIKKRAAETIVAETGVDMSRFPSANHLSSWTGVSPGNNESAGKRHSGRTTQGNKWLKAVLTESAWSASKTKGTYLKARYQRLAARRGKKRAAVAVAHTIS

SEQ ID NO: 349220 - protein, 343 aa, unidentified
MDHFAGLDVSVKETSVCVVDDTGRIVREVKVASEPDALLAVLTNPTYHFKRIGLEAGPLSQWLFSAVAEAGLPVICVETRHMRAVLKAQINKTDRNDARGIAQMMRAGLYRPVHVKTLRSQKLRMLLTHRKLLQSKAIAIENDLRATLRNFGLKVGMVGTVKFEARIRELVESFPDLGMLVEPLLIVRRTLREQFDILHRRLLTIVRDDDVCRRLMTIPGVGPVVALTYRATVDVPARFRNSKAVGAVFGLTPAKHQSGETDRTGGISRCGDEMMRTALYEAANIVLVRSTRWSWLKAWAMKIARHRGLKRAIVALARRLAVIMHRIWVDGTEFRWTRETAAA

SEQ ID NO: 349221 - protein, 399 aa, unidentified
MFIGIDWAIDAHEVCAVDASGTIRHRATIPHSQDGLDRLVGSLGRWAGEGELLVGIERPEGRLVDRILEAGHPIVLIPTFAMKDFRRRYGIGGAKSDRADGYVLADVTRTDGHRLRRLEPLSPQTRALRAVVRTRDDLVDQRRALANQLRATLEAYWPGAAAIFADVDSEICLAFLECYPTPASAARLTQARLAGFLTKAGYSGRRPAGELLARLTAAPAGVLGAEAEARADAVRAMVRVMRALLGSIKDLDRSVVAHLGEHPDAEVFTSLPRSGQINAAQMLAEWGDCRQAYPQADSVAMLGGLCPVTHASGKHRDVSFRWACNKRLRQAMTCFANNSRRTSPWAAEIYRQAIARGCDHPHAVRILARAWTRVIWRCWQDRTPYDPALHRAARRLKAA

SEQ ID NO: 349222 - protein, 352 aa, unidentified
MRFYTGQHQYYCGIDLHTKNMYVCILDQAGNILIHKNIPASPHALLRILEPFLPDVAVTVECIFTWYWIADLCQNENIPFILGHALYMKAIHGSKTKNDKIDSHKIAVLLRGGMIPMAYVYPQEMRSTRDLLRRRMHFMYKRSELLSHIQNTRSQYNLPEFNKCISRKRNRAGISEQFEDPSVRKSIELNLTLLKQYDSLLNDVELYLVRHTKDHRPNDLYLLRTIPGVGKILSLVILYEIQDISRFQRVQNFSSYARLIKPQKKSAGKVTGSGNRKMGNAYLKWAFSEATLLLIRERPEIKDLHLKLKNKHGKARALAIISHKLGRAVYYMLKNHQAFDMRHFLQIKDRAA

SEQ ID NO: 349223 - protein, 421 aa, unidentified
MKSASTTLITQLPETPPNDVTGGLDWARDDHAVSVVDARGRELVRHSVEHSAAGLAELVKVLLGAGCREVAIERPDGPVVEALLGADITVVVISPNQVKNLRGRYGSAGNKDDRFDAFVLADTLRTDRARLRPLVPDTAQTVTLRRTCRARRDLVAHRVALANQLRAHLRNVFPGAVGLFADIDSPISLAFLTRFPTQDKADWLSPLRLGNWLASVSYSGNADPALLHAQMSAAPRGLTGADAGVNAHITAALVEVLSSLLEQIKALTTQIEVQLAAHADAHIVTSLPRAGRLRAARLLAEIGDCRARFPTPESLTCLAGVAPSTRQSGKSRAVGFRWACDKQLRDAVCDFAGDSRRASPWAQDLYQRARDRGHDHPHAVRILARAWLTVIWHCWQDGVAYDPAKHRALQHILNAPQTEAA

SEQ ID NO: 349224 - protein, 344 aa, unidentified
MRIVEVTGGVDTHADNHMAAAVDQNGGLLGIESFPADQTGFESLLGWLVGFGPVIEVGVEGTGSWGVGLSRFLGDHEVSVVEVDRPNRQKRRKEGKSDPTDAVAAARAALSGEATVTPKTRNGPIEQIRVLMVARRSAREQRIQSLNQLRHLVFTAPDEIRVRFKDRPKTGLINEAANMRPRKGSAPVTHTTYVVIRNLARRIRALNAEMAEIDRMLTGLITETAPELFELYGVGVDTAASLLVTAGDNSDRLHAEGSWAHLCGVVPLPANSGKVTTRFRLSRGGDRQANAALYRIVLTRMARDPQTRAYVTRRREEGLNTPEIMRCLKRYVARQTYKHLPHMI

SEQ ID NO: 349225 - protein, 320 aa, unidentified
MMAQNDLVVVGIDVAKDKVDACIRSLSLKGTWPSTVQDRRKLIVWLRKHKVGKAVMEASGGYERDWAKALREADIEVRIVDPKRVRSFARSAGRLAKNDAIDAEMIAWFAETFGEAPGQAYDAARQKLSQIVNARQGLLDLQTNLQNRGEHAGPEPVQKMRARLLKQLALEIDKLEAAIAAMIKATPYFAERAEILESVPGVGAITSAGLIAAMPELGQVSNKVAAALLGTAPYDDDSGRRRGERQIKGGRRKVRNLFYMACLGAATRHNPPLKAFYRRLIAKGKKAKVALVACMRKLIVILNIMIARGEKWDAHRYAVG

SEQ ID NO: 349226 - protein, 341 aa, unidentified
MKRYFVGLDVSKDATAVCLRDDRGNILMSFKKPTDPDVLTRALGAEMEHIVCVVLETGRMANWLYGELSQRGLPMVCIDARQAHAVLSQMHNKTDENDAAMLSELARTGFYKKIEVKSRLAQERRALLRAREVATKMRMNAENRIRGLLASFGIRLPKHLKTYEQRVQKVLEGQAVLAGVIEPLLKLRTEALRQTAVLTKEMTRHSRDDEACRRLMTIPGVGAVSAVTFVATIDTPDRFKRSRSVGAYIGLTSRRYQSGDIDYGGRISKRGDRMLRTVLYEAANSLLCPVKSGPGQALKDWATALKKRTSHKKAVVALARKLAVIMHAIWKDGTEFEMKEA

SEQ ID NO: 349227 - protein, 408 aa, unidentified
MKRYYMGVDWGDRVHQVYVSDEEAAKVREMKVQETPDGLAEMGRWLDERRIEEIELWAAIEKPAGRVVDFLLDHGVTVYPVNPKAVDRVRDRFRMSQSKSDGFDAYVLAEFVRTDHAHLRPLRPNSAQGEELKLLTRDQQRLVHQNTRLLHQLKVTLKEYYPRPLEVFSDLDTQIALDFLKAYPTPAALSELKRKQWNRFAKQKHHLSKPRYEELWEKLKQPQLVVPEHVVRVKAQLIAVLIDQLEVSLKAVKSYSERVKSFFASMPAAKLVKTLPGAKTGTIIATLWAELGDAQSRWESFRHLQAEAGVVPATKSSGKSRVVQFRFACNKILRHAAYWLAFGSLNRSEWANHYYRDQRAKGHSHHQALRALGAKWLKIIFVMWRDHKPYDENYHLANIARQKMRQAA

SEQ ID NO: 349228 - protein, 465 aa, unidentified
MPNHPKPRSKPRKTTRKMDPTEGLPPLNLNAAGIDVGSAEHHVAVPGDRDAEPVQSFGSFTADLHRMARWLKDCRIQTVVMQATGVYWTALYDVLESYGLEVNVAHAQHTKTLPGRKTDVQECQWLQKLHTFGLLNKAFRPAEEIRVLRSYLRQRENLVAAAATCVQHMQKALTEMNIQLANVISDISGTTGMAILRDIVQGERDSEKLARHKHALIRATRQEIARSLEGTWRPELLFVLEQSLDLYDTYQDKIQSCDQRIDEHLRSMEAKVDPLREPIPQPPRRGKGARPHQPRFDLRGHLYRITGVDLTQIDSIDVKIAQTVISEVGLDMSRWKTEKHFASWLGLCPDHRISGGKVLKRGTRRVINRAATALRLAAWSLIRSQSALGAKFRRLRSKLGAPKAITAMAHTLARLIYRMLKFGRQYADRGIEYYEAKYRQQQLYWVAKKAATLNMQLVPIPDVAN

SEQ ID NO: 349229 - protein, 300 aa, unidentified
MISFHENTHGNDTDGFELIIAELRKHSVALVLMEATGGLEAAVACSLQAEGFDIAVINPRQARNFSRAMGYLAKTDRIDAKVLSQMAEVINRHPERERFIKAIPDAERQILAAMVVRRRQLITMLVAERNRLHPAHPQNRKSINTIIKALEDELSRIDEAMNNHIKTHFKELAARLSSIKGVGAMTVATLLSEVPELGSLSRREISALIGVAPVNRDSGTMRGRRTIFGGRAGVRTALYMAALVATRFNPVIKDFYTRLITAGKVRKVALVACMRKLLTILNAMIRKNEEWSDSYHKFSL

SEQ ID NO: 349230 - protein, 352 aa, unidentified
MAQTLKTAIAVIGIDIGKNWFHVVGQDERGAIVLRQKWSRGQVEARFANMPPCLIGMEACVGSHHLSRKLNSLGHDARLMPAKYVRPYSKGQKNDFRDAEAIAEAVQRPTMKFVATKTADQLDLQALHRVRERLVSQRTGIINQIRAFLLERGIAVRQGLRFLRAELPRILTTPPDVLSPRMVRIVEDLAGDWRRLDERVERLSNEIEAIARQDAGCERLMSVPGIGPIISSAMVAAIGAGDVFTKGRDFAAWLGLVPKQISTGDRTILGKISRRGNRYLRVLFVQAAWVVLIKPKSWERHGLKSWIEAARKRLHRNVLAIALANKLARIAWSVLARGRDFEARSIANAQPV

SEQ ID NO: 349231 - protein, 386 aa, unidentified
MQKLNDLSRCLTPLEPDSTLIAVVEMSLSSWLVAGIVPGVERQPLKKLAVDESVLLKLLHRWREEAEKAGYMIKRIAVAFEAGGDGFWLARWLRARDIEVHVIHTSSVAVSREHRRAKTDRLDSELLKRAFLGWLRGERDHCKMVAIPTIKDEDGKRPNRERESLVGEQSRIINRIKATLVRLGIRGFNPKLKKAAERLEGLRTPEGELIPPNTLSELYRDMERRRLVRDQIRQIESARLDRLEHAPGEGAHAMVRLLARVMGIGIETADMLVQEVLSRNLRDRRAVARYAGLTGSPDESGKKRREKGLARSGNARVRRGMIQLAWRFLLFQKDSALAQWFRARTENARGTRKTMIVALARKLLIALWRLVREDVMPDGVILRPAQ

SEQ ID NO: 349232 - protein, 378 aa, unidentified
MNHHTEAFVAFDTSKLRNAVAVAEAGRAGEMRFVGEIDNTGVATAKLVKKLAARYERLTFCYEAGPTGYGLYRQIKSLGHECIVVAPSLIPQKPGDRVKTNRRDALSLAKQLRAGDLTAVWVPDERHEAMRDLSRARGAAVEDLRGKRQQVSSFLLRRGLHYPGKKTWTKAHMVWLASVKLAHVEQRVAFEEMLLAVRQAQERIERLEQAIRDAVADWSLAEVVTALMAMRGLDLISATTLLAEIGDLSRFQTPRELMAYLGLVPSEASTGDTVRRGPITKTGNHRARRILVECSWSYQHAPRVGKLEKVAAAPPAVREIAWKAQCRLSARYRALIRKGKPKNVAVTAIAREFAGFIWAVSREVAPAGLRPHSGNSMK

SEQ ID NO: 349233 - protein, 370 aa, unidentified
MSIKRILVNTIDTDLEYEVIGIDLAKNCVSAILLTTDGEIFGIDRLDYQELEKSAQELSPTIFAMEPCTEMNYMVQKLEDWGHHCIVISGKNVKDYVESHFSNQKTDLNDAQALAFLTKDTQLRTVKAKDPEQLKYASLTTLREQYVKQYRQTMVSLKGICQVWGLSISKGISGKARLKDMIENHAGFPAELRTALVGMVAHAQAVQKDLKSVTKILEELAKKDKACQLIQTVPGLGTICSCRLRATVGDIQRFKHPKDFPAYYGLVPRSMATGHNEKKGKITHRGDKTMRSLMVQGAGIVINQATKGNLHSKQLTKWILKKQKEKMPWGKLVCAVAAKLLRIVRAILISGKPYNPKIAGVAKCSLPKAS

SEQ ID NO: 349234 - protein, 370 aa, unidentified
MNDAKYIGLDVHQATISVAVRDCTGKLVMEAILETKAETILQFFRGLRGSLHVNLEEGTWAAWLYDLLQPHVTRVVVSDPRKNALLKDGNKNDRIDARKLAELLYLNKFNAVYHGQHGLRTLKELARSYLTITRDLTRVMARIKAIYRGWGIPCAGQHVYALSHRAEWLGKLSEAGVHRRAEFYYQQFDALALLRQEARRELLVESRKHGAVKLLRQIPSIGPIRAALLVALMQTPYRFRTKRQLWAYIGLALTTHASGEYRFERGQLQRSKKVLAIRGLNRNHNHDLKNIFKGAATWAAANSGPFKNFYEACVARGTKPHLARLTLARKIAAITLLVWKKGARATPSGWLYEPETLSENLNRCEGGHHT

SEQ ID NO: 349235 - protein, 379 aa, unidentified
MRRVCGLDVHKDSIYMCILYENGSKIESVFGVLTPELDKLRDLLVSHHVCEVALESTSIYWIPIWNILSVDFSLKLVNPYFIKQLPGRKSDVKDAEWIATVLQKGLIRGSYVPDRMIQCLRQYERRNHELSKNIVHAEQRMDMILQRCNIRISNYVSCISCKGYQKVVNAIISGESNPKVFVTLIHKRTLNKHGRQVVEDSLNGFVSDTDRDILRQYRDERMQMEQHKSENKAKMQAICEAHYCEELELLQTLPGIKEESAANIIAEIGVDMKMFLTASAIVGWAGLKPRNDQSAGKIKSRKITHGNKYLRKILVEAAWSAARTKDSRFMKMYQRLLARGKSKQKALIAVARKLLVLIWNMLSKKEAFNPEYKRRIQAA

SEQ ID NO: 349236 - protein, 352 aa, unidentified
MSKITTIGLDLAKKVFHVHGVDVAGNVVVARRLKRKEVLAFFAKLPPCLVGVEACGSAHHWGREIAKLGHTVRLMPPRYVKPYVKRGKTDPIDAAAICEAVTRPTMSFVPIKGVEQQGLSMLHSARSLLIGQRTQLINAVRGHLSEFGIVAERGLLGLAELAAIVRDERDQRLPATARAALMVLVRQIEAISAEIASLDSILMKENKASELGSRLDTIPSVGPVIASAFRARVTDAKLFENGRHLSAWIGLVPENDSTGGKLKQKGLSKKGDRYLRSLLVNGAMAVVRQAQKRPDKHPWVTKLLGRMSAKQAAIAIANKTARIAWALMVHGGVYETGHRAPPYRAQACAAAG

SEQ ID NO: 349237 - protein, 310 aa, unidentified
MENIALIGIDLGKNSFHIHCQDHRGKAVYRKKFTRPKLIEFLATCPATTIAMEACGGSHFMARKLEELGHFPKLISPQFVRPFVKSNKNDFVDAEAICEAASRPSMRFVQPRTESQQAMRALHRVRESLVQDKVKTTNQMHAFLLEFGISVPRGAAVISRLSTLLEDSSLPLYLSQLLLKLQQHYHYLVEQIKDLESQLKRKLDEDEVGQRLLSIPCVGTLTASTISTEIGDGKQYASSRDFAAATGLVPRQYSTGGRTTLLGISKRGNKKIRTLLVQCARVFIQKLEHQSGKLARIAWALTARQQTYEA

SEQ ID NO: 349238 - protein, 342 aa, unidentified
MWIIGCDYHPRFQQIAFVNTEGGECGHRRLQHVAEAEQFYRALQGQTVRVGMEAGGHARWFERLLAEVGHELWIGDPRKIRAAETRKQKTDARDAAHLLELLRNGQFETKMRIWVPTAEARDVRQLVLHRHRLVGMRTRVKNQLRAVALNEGMGPKPGLWSQKGQAQFRALPLPVWSERRRADNLELLAELVRRTEPLDQAVLAEAERRPEAVRLMTHPGIGPITALTFVLTIGDPLRFANSRKLTSYLGVIPAEDSSGGRQRLGHISKQGNVLLRSLLVEAAHSAAQREPELGRCYRRLAMRKNPAIAAVAVARKLAVRLWWMWKRGLNYQQFRASGSHAG

SEQ ID NO: 349239 - protein, 443 aa, unidentified
MSKKHSSHLRGERGQAFAELIRGVPAEQILCVSIDISKYFHLAMIHNGLGEIVMRPFEVDIYQSGFDQLCQAMDQAQAQTQAQVVLVGMEPTSHYFENLARHLTAHSQPVKLINSFSVKQNREQQLMRREKSDEIDVAAIGDLLRRGEGTPYQPVSGIYLRLQQFDRARLSKLKIDTMLKNQIIGHLDRIFPGLLLLDEAARKRYTSLFRTDFWQCQTLQDLIRVCPNPNELVKMEPTELVHAFHAQERRLGPAVAAKIIARAHATLLPDPELAGIRCELLQHDLTLLENTQAYLSQLEGYLVELVAQTPYQIWTQLKGLSAIQVASLAAAIGDPTHYTTAAQVFRRSGLVSGRNDSGKHQRKGKGNHILKTGDVYLRRALMNAVATLFLHQPGLMRYNKHLQITKHPGVARVATARKTIGILWAVLRDQSSHTLISCKGAEM

SEQ ID NO: 349240 - protein, 468 aa, unidentified
MVALTLGIDVAVRAAHQATLARDGKTVWRGRKFLTRPEDLERVWADVGAQDPAELTVVVEPTRNAWIVIGEWFRRRGATVVMVPTTQSADLRRYYSKHAKNDRIDSELLARLPLLHPEGLRPYTGQGPADPLRRLTKQRSTMVKRRTAVYARLDSLIELLGPAWYAVLGSNYGNAALEFLARYADPHAVIRLGQARLARFLATRSRGNWRDEHAVGLIAAAKETLLLWNVDGTDGMDFAELAADIAHEAEQALFLTRQIKEIDERIANLYADADPHGIVASAPGVGPTISAVIAGRIGDPHRFTSLAAIRAYTGLIPKVSQSGVAKTESSITKAGDPLLREMLYTAADQARKVDPQFAAKYHRLMAGNRHHDSAICHLATMLITRIATCMRTGQPYQLRDVDGTAVTESQGRAIVKQRYQLDPRQRDHVRHKLMRERRKKAGQESQKSPSAPTSQPAKRNPTTNPQVA

SEQ ID NO: 349241 - protein, 459 aa, unidentified
MSWLKQSDPVPVGTSHRPIPVPRRSISVPRCTWRPSSRTRPSEQPVRSFGTFTSDLQRLADWFTSCGVRTGAMESTGVYWIPVFWIPVFEILDQRGFEVVLVNARDAKHVPGRKTDISDAQWLQRLHAYGLLRASFRPKGEIATLRAYLRLRERLLDYTASHIQHMQKALTQMNLQLHHVVTDITGVTGTAITRAIVAGERDPATLAALRDPRCHATVEAIRQALVGNDREEHVFALTQAVELYDFYQTKVAECDVRIQAVLERLRDLAPAPMGKLPPARHKTKQPNALAFDVRAMLHGLLGCDLTQIHGLGPSLALKLVGECGTNLSAWPDAKHFTSWLCLAPSNKISGGKVLSSRTRRSNSRAAALLRLAATTVGRTETALGAFYRRLSARVGKAKAVTATARKIAVLFYNTLRHGMAYADPGASYYEDRYKRRVLTNLERRARSLGYVLQEAPVPA

SEQ ID NO: 349242 - protein, 427 aa, unidentified
MAYRVSGVDVHKRMLAVVVAEVDGEGEYKFERRKFGSTPDQLHLLAQWLIQLEVEEVVMESTAQYWKPVWAALERYWKPARQQREGASKMSGTLHLCQARSNRGPRGRKDDFVDAERMVKRLVAQELVLSFVPDPEQRLWRTVTRRKHQLTGDRIRLQNQLEALLEQGHIKLSSLVSDLLGLSARRMLKAIAEGATDPAAVAALADCRLRATPAQLSDALGACTELNGIYRQLIQMALEQLKLLEEQMEQLEKVASGLLQAHQDAVQRVAEVPGFGVDFAIQAIAEVGAGAATFPSAGELSSWVGSIPGSEVTAGKSHSTRSPKGNTTMRRLLNQAAQSAVKVKGSIFDVKFRSLLPRLGYKQAIWAIAHRLCRLLWMILHQGIRYEERGPAVTARSQRTRTARMIKELKKQGYVIAGGPLPAGAQA

SEQ ID NO: 349243 - protein, 406 aa, unidentified
MEVLYPRCAGLDVHKDTVVACVRCVSKPERREVRTFGTTTRDLGALSEWLESSGCTHVAMEATGVYWKPVWHVLEGRVELVLANAQHIRNVPGRKTDINDATWIADLLAHGLIRSSFVPPARIQDLRDVTRTRKQLVREIAQHTLRIQKTLEDANIKVASVLSNVIGTSGRSMLGAILAGEEDPERLADLAVGTARRKHRELVEALRGHVTPHHRQMIKLHLDLIAALQTALDELDDAAGKLLAPIHERAALLTTMPGIADIAAQVIVAEIGVDMSRFPTAGNLVSWAGLCPRNDESAGKRRSTRVRKSGTWLKTTLVTAAWAAVRKKDSYLQAQFLRIKSRRGAKKAILAVAASMLTACYYMLRDAVPYQDLGSAHFDRRDRTKTIRRLIRRLGDLGCTVEVHAA

SEQ ID NO: 349244 - protein, 415 aa, unidentified
MERILERCCALDVHKNQVTACVHVPDREGQRSELRAEFSTMTAELLALRDWLQGLGVTHVAMEATGVYWKPVYYLLEDDFELMLVNAQHVKNVPGRKTDVQDAQWLCQLLEHGLVRSSFVPPKPIRELRDLTRYRKSLTWERSREANRLQKQLEDANIKLASVATRVLGASGRAMLEELCQGNNDPEALAELAKGKLRRKLPALRQALEGRFSAHHALLVSHLLAHVDYLDETIESLSSEIEERLRPFERELELLQTIPGVGRITAEVMLAELGPDMSRFPSDRHAASWAAICPGHDESAGKRRSGKTRKGDRWLRTALIEAANSAAGRTRGTYLNAQYLRLKSRRGHSKAIVAVAHSILISAYHVLERDQSYEDLGGDYFTSRVDTEHLTRRLVRQLERLGQSVTLTPMTAEAA

SEQ ID NO: 349245 - protein, 363 aa, unidentified
MFTERTSVGLDVHARSVAAAAIDSVTGEVFQTKLTPSFEHIRAWIADLPGSTAATYEAGPTGFGLYRSLTTAGIRCEVAAPSKLQKPAGDRVKTDARDALHLARLLRLDEITAVAIPTVEQEAARDLVRAREDCRGDLMRARHRLSKLLLRHGIVYYGGQAWSGAHDRWLRTVAAPQLTWPATRMAFDADYDHVLTMQARRRRLDAAIEEMAAASEFTPVVRRMCCLCGVSTLTGFGLAVEIGDWTRFTGNTIGSFVGLVASEYSSGSSRVQGSITKTGNTHARRLLVEAAWHHRARYHVGAVMRSRWDRAPAAARARGDEGNRRLHERWVRFLERRKRPVVANAAIARELAGWCWSLAVMDC

SEQ ID NO: 349246 - protein, 418 aa, unidentified
MTATHSIAPTLLVAIDISKHRHEVLIGIPGKTRRRRLTVMNTLEDFQRLSAALASYDLPVRIGFEATGNYHRTLAHHLGRAGFDLKLVSSVALARTREALHNSWDKNDPKDAQVILHMLEIGAVQFFHDPLAAGTSDIQELSKTHEIVSRSKTELWHRILTHYLPLYFPEAERFHRSARTDWFLAFLEKYPSPHMISAMGRDAFIADAWDVVGRKVSKEQLLSDVYATAAGSVGLPVHPDSDAVRMFRLVLAEGRSLVRRRDEIEARAVELLSDLPDYQLLTTIPGIGPINAMTILAEAGDLRRFRHHRQFLKFCGMDLATVQSGMFRGQSRISKYGNARLRRTLWMAGQTAVLKRTNSFRDKFERYISKDRHNAHLRRKAYTAIAAKMARTVHAVVNHGEPYRPFFEGVSPGGRTSL

SEQ ID NO: 349247 - protein, 351 aa, unidentified
MDVLYQSCAGIDVHQANIVVCILHGPLTSTRPKREMATFDTTTKGLRACHDFLSQFHVEAVGMESTGVYWRPVWHALCDDFKLILAQPAHMKAIPGQKTDKKDAHWIAKLTRIGLLPRSFVPDEAIQELRELTRQRKHYVESRNRETNRIHKILQSGGIKLTTYIEDIMGLSGRNLLQLLVDGTPITPRIVHQSVYTSLKKKVPQLLEALDGYFSDHHRFMLKQSLEIYDFYQKQIELLEERMNVYLSQYENHVEILDSIPGIDVITASVIISEVGVDMSQFPTAGHLASWAGLCPGNNESAGKKRSTKIRHGNSYLKKCLCQAAFAIKKQKGSPLANVIKLTNLSRFVVG

SEQ ID NO: 349248 - protein, 360 aa, unidentified
MAKARSLVGLDVHAAKIVAAVLDAETGELQFFSMTADIGKTAGFCACLPRPVRVAYEAGPTGYGLARELANRRVECVVAAPSKIPRASGDRVKTDRRDAELIVRLLLAGKLHAVRVPGAEEEALRDLVRAREQVRVDLMRCRHRLSKLLLRHGIRFEDGNAWTDRHRQWLQTVELEWPAAQATLLDVRGAIDALTHRRDALERQIVAMLPSSPWCTQVSALRCLRGVDTLTAVGLCAEVGDFQRFARAEQLMSYVGLVPSENTTGQQRRLGAITKTGSGHARRLLVEAAWHYRPRPNLSKALTERQADQPPAAVAISWTAQKRLHRTWTRLEHRGKRRTIIAVAAARELAGFVWAITQIE

SEQ ID NO: 349249 - protein, 331 aa, unidentified
MQSGVLTRALSLPDGGFMSKAIVGVDVSKGWLDIARADGSEVVRIANTQAAIAAWVLEARVDGLQLVAFEPTGGYERDLRDVLRAHGVVFVRVHPNQVVAFRKSRRIKAKTDRIDARLIAQFAAEELLRRGLPIAIAGDEALRELAARRRQLVDTLQAEKCRLAIARSAVVRASLTASISGLQASLEAIQVALLSHITANPELAQQHALLQTLKGIGPVSAMTLIAELPELGRLSGKQIAALIGLAPQTHESGKSSHRAATGKGRGDIRRVLFNAARCAIRHNHIMRDFYRRLVEQNKRAGKVALVGVMRKMLVTLNAIARDQQPWKHHAA

SEQ ID NO: 349250 - protein, 353 aa, unidentified
MASQQNSFANVATIGIDIGKTTFHLIGQDRRGAIIMRAKLSRTQLMRRLVNVPQCVIGMEPCAGAHHIARRLSELGHDVRLVPAQYVKPFLKGHKNDYRDAEAIAEAVQRPTMDFVAIKTPEQCDLLSLHRVRSRLVRQRTGTINQIRGLLLERGITAPRGPAPLRKALNEIFAEPPADLSSRMLCLIGDLALDWRTLDARVEAVSREIEMLAENDEACQRLMTIPGIGVIISSAVVGAIGNGGAFKQGRDFAAWLGLVPKQDSTGGKTKLGGLSKRGNKYLRTLFVQAAHIVLIRKPAAAQRALWSWIERASQRLPHRNLLAIALANKLARIAWAVLARDHDYHPTANTDAA

SEQ ID NO: 349251 - protein, 315 aa, unidentified
MAEENVFVGIDVSKAWLDVAVEPTNEYWRTENSLPSITELARRLAVLQPSCIVVEATGGYEAQLVKCLCAANLPVARVNPGRVRRFAQGLNWLAKTDKIDARLLARFGDKANPRLTVLPTEHERRLAALAKRRKQVLDMLVSEHNRLDTADPDVCPYIQGTLSMLQKQLDELDQAIQSLIDNTPDLKGKQDLMLSVPGVGKVTAATLASQLPELGSCDRKEIATLVGVAPFSHDSGKKRGKRMIKGGRPAIRSVLYMATLSAMRYNPVIRRFYDHLIGNGKETKVAIVACMHKLLTILNAMIRDHKAWQPDLGPS

SEQ ID NO: 349252 - protein, 346 aa, unidentified
MKILALDLSKFKSVGCVYEAESGEHRYRRVVTRPAELHDLLVEIEPDRVVIEVSSVSGWVSDLVRALGIELQVVNTNGEAWRWRSVKQKHDQADALKLARLSAMNQLELVHVPAPEIRQWRAVIKYRQHLVGRRTDLKNHVRELLVREGVVLPRGRKCWSQEGCAALEEMSRSWEEVGISELWRGELQSELQQLQVIQERIREVEAKLETLAKADGRVGLLQTIPGVGPRLAEAMVALIDDPHRFKRARDVGAYLGLVPRQYQSGEMNRLCRITKRGSKLLRSLLVEVSWVSLRYNPWLRSLYERMNRGSKTRKKIAIVAVARHLAIYCWAMLRDGTTWRQPCTNQ

SEQ ID NO: 349253 - protein, 428 aa, unidentified
MNEDELSRLKEFRQLKKRIQGSDTHLIVGIDVAKDRHHAFLGTATGRTLVKKLIFANTSVGFTELLARVEAVRAQSGLSEVVFGLEPTSNYHKPLGRYLISEGCHVVMVGGKAVKNNRELLDERWDKHDTKDAANIADLVSRGKCFYYDMPSREIEELRDLHSLRARLKKEEHSLSLRIRNNLLAKHFPELDTFYSACERETLAIVRWGLNPQKIAAMPFEEFFKRVAPNARGIAQKLRLQKIHRLAHESIGCPVGSAVQFQARLLAEKIKEVRGQISDVDHLIAQACAPFPSYEYLLSIPGFGPYVASKVLATIADPRRFDSAKQIIRTSGYDLCADRSGKRSDQAVPVISKKGNSQLRYALYQAAMIASSRHRFFMAYFARMLQGREREQGIRTKMRVKLAAKMLVIAWTLMKKGEPFNPEYLNAQ

SEQ ID NO: 349254 - protein, 599 aa, unidentified
MPSSSVKYVGLDVHKEAIVVAVRDGAGKVVMESIVETKASALLDFLHGLRGELHVTLEEGSWATWLYDVLKPHVHEIVVCNPRRNALLKEGSKSDKVDARKLSELLRAGLLRAVYHGENGLRSLQELARSYEVVSKDTMRVMNRIKALYRSWGVTCSGTQVYSRRHREQWLIKITQPGVRRRAELFYQQLDGLQALRRTVRGEFLSESRKHQAVKVLRQIPFIGPLRAAQLVAIMQTPHRFRSKRQLWTYSGLAVETHDSAQYSYVGGQLQRSKKPQQVRGLNQNHNHALKDIFKSAALSATRCTGPFQNLYEGLLAKGMKHGVGSHHNRAQDRLRYPRKQKTDRRDAGHILKLLLEGRFPRVWVPGAALRDLRQLVLHRHRVVEMQTRVKTELQHLALNQGIQQKRKLWNKQGRSTLLQIPLGTWANQRRADLLCLLDVLHDQMLLLDRAVEGAANSHLPARLLMTQPGVGPNTALAYALTIGDPKRFPRSKQVASYLGLVPREHSSGGKQRFGSISKQGNPLLRTLLVECVTIAVRLDPSFRKEYLHRCHKKHSAVAKVAAARKLAVRLYWMLRTQTPYPQILHIEGSPPHSLVSAS

SEQ ID NO: 349255 - protein, 348 aa, unidentified
MIVIGIDSHKRTHTAVAADGTGRKLAERTVAATSTGHLELVRWAARFPDRRWAIEDCRHLSRRLSTDLLRAGEAVVRVPPKLMAGARRSSREPGKSDPIDALAVARAALREDLPVATLDGPDREVRLLVDHREDLVAERTRAQNRLRWHLHELEPGNEPAARSLDRGVVLAALDRDLAEVPGTVARIARELVARIRDLTAAINDLEREIGRLVAGLAPTLLALPGCGPLTAAKLVGEAAGIGRFRSAAAFARHNGTAPLPVWSGNTERHRLSRTGNRQLNVAVHRISITQLRIDERGRAYVERRRTMGNTKTEAIRALRRRISDEVFRRMRHDEAARAARPTGLAAAA

SEQ ID NO: 349256 - protein, 387 aa, unidentified
MPQSNDLSRSLAALDQDSTLIVVIEMSQSSWLVAGIIPGINRQPLKKLAAAETALLGLLHRWRDEATKAGRPVSRIVVAFEAGRDGFWLARWLRTRGIEAHVIHATSVAVSREHRRAKTDRLDTELLKRAFLGWLRGERGHCSMAAIPTLEEEDAKRPNREREGLVGERTRIVNRIKSTLARLGIRGFKPTLRRAPERLAALLTPEGTPPPPNTLAELRRDMARLRFVIGQIREIEAARLERLEQHPQQGAHAMVRRLAQVIGVGVETADMLVHEILSRNLRDRRAVARYAGLTGAPDESGARRREKGLARAGNSRVRRGMIQLAWRFLMFQKDSALAQWYRARTADARGATRKTMIVALARKLLVALWQLVTTGEVPQGVVLRAAA

SEQ ID NO: 349257 - protein, 487 aa, unidentified
MTSRGRREAARAKAATRRAHLTPVPLLARESLYVGIDVGKQAHVAGFISTTLLERHTHFEGCPALAFANGREGFTALLDRIRAYVPLQQAFVLLEKTGHYHLALLGFLQEQGLSVHVMHVQRRSAGLLKSDKRDALALGNHLYNQLEKGVQLAERSQLVRQALPPTPAAIKLKALVGHRFELMHDSTRRRNKLTAIADQLFPELTTVLRDPNAPSALALRLRFPTPRDIARASQADLLGVRLGGQPRVEKLARLRELAASSIGVTGLAYQRALIFEQETLIAELELIRRHLVRIEEEVAHVLVSSREGRILRSIPGVGPLTAAAALAAIGNIGNFPTAGALKAYFGWAPNVTQSGTTLDHASITRKGNRVTKQILYMAAVAAVHEEGSPWQALFERLVPLKCVRDGRTGQWRGKRVVLGRVAGQMTRMMYAFLKADAELVARTPVGQPLPEPLLYDPAVHRAHRTGSYRPLKPQVRPPTIIRLPQSG

SEQ ID NO: 349258 - protein, 472 aa, unidentified
MKSKSSRKPNPVDPVAEEIPDAEHELVIERVAAIDVAKASGKVCVRLPGQTGRRFSRVWDVPARTGAVSELAEQLIESGVEKVTVESTSDYWRIWYYLLEAAGLDVQLVNARDVKNVPGRPKTDKLDAVWLAKLTEKGLLRPSFVPPAEIRQLRDYTRLRVDLTRERTRYWQRLEKLLEDALIKISAVASTLDTLSTRDMIEALIAGERDPGRLADLARGKMKAKRSELIAALDGRFDDHHRELARMLLDQIDTLTAQIAALTSRIEQLLAAMPDTRSRGDGGTGGDPDRPSTGHGVEPETAARFTDATLLTPVERLDEITGIGELNAQVVLAEVGLDMTRFPTPAHLVSWAKLCPRTIQSGPVTRGGKTGRGNPYLKGALGEAAAAAARTDTFLGERYRRIVKRRGKLKALVAVARAILVVIWHLLANPEARFRDLGPDYHTQRIHTERKLRNHIAQLTAMGYRVTLEPAA

SEQ ID NO: 349259 - protein, 353 aa, unidentified
MAEYVGMDVSLEEVSICVMDGAGRALAHGRTPTDGRTPTDPAAIVAFIEEWAPDVVRIVHESGQISIWLTRELKSLGAPVICIDARMAHKALSARPNKSDRADAEGLAHLARTGWYREVHIKSAASDRLRTLIGARDRLLRIRKDIEGHVRGVLKTYGIRLSPVTSARNRASFRDQLQAVAQGDPVLEVVATSFIVAHEAVCNECAAIEDEMVALARESALARRLMTVPGVGPIVALSFIATIDDAARFGKSTQVGAYLGLTPKRYQSGEIDHSGRISKCGDAAMRALLVEAASTLIAKVKRFSPLKAWAVRLAARKGFKKAAVATARKLAVILHRIWCDGTTFAWRRQAATG

SEQ ID NO: 349260 - protein, 372 aa, unidentified
MKLQAIKTIGVDVAKSVFQIHGTDARGTTVLRRQLRRAQMLPFFAQLSPCLIGMEACAGAHHWARELGKMGHTVRLMAPQFVKPYVKTNKSDRADAEAIAEAVMRPGMRFVGVKQVWQQDLLAEHRVRDRQVRAHTALTNEIRGLLQEYGIVFARGSAALREGLLELLASEDERLSAGMRRLLPRLLEECSFLERALDEGEKTIVRESRSREVCRNLETLSGIGPITSTALVATVGDPQVFKNGRHLSAFLGLVPRHEGTGGKIRLGGISKRGDRYVRKMLIHGARSALRATIARKHERPPWAVQLADRRGFNKACVALANKNARRCWAIMAGREVPAAHAEDAFPTALPLGRLRSPRGSTVENARSKCLSS

SEQ ID NO: 349261 - protein, 352 aa, unidentified
MKEYIGCDGHKQYSVFVAVDELGRAGPAQRVKHQCSEFQEYLRGLPPGSPIALETSGHWYWMVDAMEQAGHHPVLVHARKAKLLMGLVNKTDKLDAKGLATLLRNGTVPSVWIAPGALRDQRELPRLRMTFVRMRTALKNRIHAAFAKYGIAFPEVSDLFGVAGRELLEGRRSQLPPETQRAVRDELALLDPLQDQIEALEVRIQAVVRATPVMERLQTLPGVGPILAIVLALELGTIDRFPQAEHFASYSGTVPRVVESGGHRRYSGAVRQDVNHYLKWAYVEAANCIVLNQKRWEERHVVQLYQRLCRRKGHAKAIVAVARHLAEASFWMLKRGEPYREPAWTRRPVPRG

SEQ ID NO: 349262 - protein, 352 aa, unidentified
MVDKVTEAAVVGGMDTHKDLHVAAVVDQNNKVLGTQYFSTTRQGYRQMLAWMTSFGTLKRIGVECTGTYGSGLLRYFQNAGLEVLEVTAPDRMERRKRGKSDTIDAECAAHAAFSGIRTVTPKTRDGMIESLRVLKTCRKTAISARRVALQIIHSNIISAPDELREQLRNMTRMQLIRTLGSWRPDASKYRNVTNVYRISLKSLARRYLELHDEIADLDVMIAAIVDELAPELIKRNAIGYESASQLLITAGDNPQRLRSESGFAALCGVSPVPVSSGKTNRYRLNRGGDRAANSALHIIAIGRLRTDAKTKEYVARRVAEGHTKMGNDSNLLIVFYVQIMPDDFVMQLHRF

SEQ ID NO: 349263 - protein, 344 aa, unidentified
MDHFAGLDVSVKETSVCIVDDSGKIVREVKVPSEPEALLAVLKMPAYYFKRIGLEAGPLSQWLYSALAEAELPVVCVETRHMQAVLKAQINKTDRNDARGIAQMMRVGLYRPVHVKTLRSQKLRMLLTHRKLLLSKAIDIDNDLRGTLRNFGLKVGMVGTVKFEARIRELVENLPDLAVLVEPLLVVRRVLRKQIEILHRRLLTIVRDDEVCRRLMTVPGVGPVVALTYRATVDVPARFRKSKSVGAVFGLTCSKYQSGEIDRSGRISRCGDEMMRVMLYEAAQVMLTRTNKWSSLKAWAMKIARHRGMKKAIVALARRLAVILHRIWVDGTEFRWIREQAVAA

SEQ ID NO: 349264 - protein, 426 aa, unidentified
MDIVHPRVAGIDVHKKVIWVAVRLPGERPGERAVTVRRFAAFWRSLQKMAGWLCELGVTDAAMESTGVYWWPVYHALAQAEITACVCNAAHMRNVPGRKTDLRDCQWIAELHEHGLLRPSFIPAAEVAVLRQRTRYRKKLIEQRSSELQRLAKVLEDGGIKIDSVASTLTTVSARDMIEALIAGERDPAALARLARGVMRKKIPELEMACDGRFTTAHGQMCRLHLDAYDHLGARVADLDQLVAEASAPFGRLIARLVTIPGIGDRTAQVIVAETGGDMTRFATPGRLAAWAGLAPGDNESAGKRKRAAARKGNQHLRTAMTESAWTVSRTATRPGARFRRLARRFGRGHEKKAAIAVAHTLISIAWAVMRYDGDYAEAGADYYDRRDARNHEHLVRHHQQALARLGYQVTLNPPGDGNPPPAQAA

SEQ ID NO: 349265 - protein, 352 aa, unidentified
MAQTTLPRVTIGVDTHKDTHVAAARDQLGRRLGTTMASATAAGYAQLLAWARGLGEPVAWGVEGTGSYGAGLARFLANHSQRVLEVNRPDRAARRRHGKSDPVDADAAARTVQAGEATGTPKAQDGTVEMVRSLRVARQSAVKARTQAINAIKALLVTAPTELREQLEGLTTTKLVRAAAALDPGTLATPTAAAMLALAGLARRCQHLDAEVSQLTGALDQLTATAAPKLRALLGVGPDSAAALLIAAGDNWQRLHSEAAFAALCGSSPVEASSGKTRRHRLNQGGDRQANAALHRIVIVRLRWHQPTRDYATRRTTEGKSRKEIIRCLKRYVAREVFAALHQTDGKLTTAA

SEQ ID NO: 349266 - protein, 341 aa, unidentified
MSEVSTIGLDLAKNVFQVHGANASGAVVFRKKLRRDRVLKFLAAQPACTVAMEACASSHYWGREIAKLGHEIRLIAPDYVKPFVKRQKNDAADAEAICEATQRPTMRFVAVKGEEQQAAAVVFRARDLLVRQRTQIINAIRGHLAEFGMVVAKGPFHIAKLVAAIEDNHAGVPAMAQPILRLLADQLRSLDERVVVLDRELARRAREDEEAKRLTTIPGIGPITATALVALAPAAQAFKRGRDFAAWLGLTPLQRSTGGKQKLGETSRMGERTLRRLLIIGASATVRWAMRKGSTTQPWLARMLNRKPPMLVIVALANKMARIAWALMARGETYRAPAMAK

SEQ ID NO: 349267 - protein, 341 aa, unidentified
MKITTIGIDLAKNVFQIHGADERGKAVLKKQLKRDQMVPFFANLVPCKIGMEACGSAHYWARKLQALGHSVQLIAPQYVKPFVKRNKNDAADAEAICEAVTRPNMPAVPIKNASQQAILSVHRARQGFVKARTAQANQIRGLLAEFGIIIPQGISHIAKRVPEIIEDGENELPGSFRLLIQRLVDHLKVLDQQVGELEREIQAWHRENEASKKLAKIPGIGPMTASALVASVGNARSFRNGRQLAAWLGIVPKQHSTGGKATLLGISKRGDTYLRTLLIHGARAVIRVAERKPQPDAWLGKLLTRRNKNVAAVALANKNARTIWALLAHDRAYESDYRMAA

SEQ ID NO: 349268 - protein, 326 aa, unidentified
MTHKLGIDISKAKFDVALLKADGKYRSKVFPNDATGFKSLLQWLDTHVPTGKAEVHVCMEATGSYHEALALFLSDQGVAVSVVNPLLVKRFIEVDRVRNKTDEGDAKCLARFCQMTQPELWEAPSVGVRTLQALVLRLDTLQEMLQGELNRLEIAHASVRQSMRDVIAGLERSIEAVREQIRQTIDDDPDLKQRQGLLASIPGLGDKTIPQLLAYIGRPERFKSVKALIAYAALAPLIRQSGTSLNQHKGTHPQGHRALKSALYYPAMVAGKYNPLIAAFWQRLKAQNKPGKVIVVACMHKLLAIAYGVLRSKKPFNADHLKPIVT

SEQ ID NO: 349269 - protein, 338 aa, unidentified
MCNSIIGLDIAKNVFHLFTLQSNGKTMKKKLKRAELLTFFATYPASVIGMEACGGAHHWARELTRLGHEVVLLNARYVKGFIVGNKNDFNDAEAIFTAVTQPNKRVVVPKTIEQQDIQMVHSVRSELIGRRTALVNQIRGLLSERGIVINQGIRQVRSHLPLILEDAENNLSALSREMFAEQYEKLKALDREIKEQDQRIARLCSANQLSQRLLEVPGIGPLAATIIAADIGGNSKGYKSSRDYAASLGVVPKQHSSGGKQILLGISKRGNRYIRTLLVHGARSVLRHCTDKTDKLSLWLQALISRRGFNKAAVALANKNARILWAMANSDRDYKAFA

SEQ ID NO: 349270 - protein, 347 aa, unidentified
MEYFAGLGVSLEETAICIIDDTGVIVREARTTSEPEALVAFFRACGMAMKRVGFEACSLTAWLHQALTEAGIAAICIETRQAKAAMGAMPNKTDRNDARGIAQIMRTCWYRAVHVKDHCCRSWRALRAARRMVLNKRRDVENGIRALLREAGLKVGTPSRRNFAARVIELVADDPVLAALSRSLLSVISVMTEEIDRLTKRVLDEVRIEPTCRRLMTVQGVGPFTALAFRATIDRPDRFQRSRDVGAHLGLTPRRYQSGETDVQGGISRCGDELARTALYEAAHSLLIRSTKWSALRAWGMNVAKRRGMARARVAVARKLAVILHRIWADGTEFRWTKQAAASVTAA

SEQ ID NO: 349271 - protein, 368 aa, unidentified
MKNVPTYVGIDAHKKDLFVAMLIGTETTPVTWQLANEPNAVRRLVRKLERDAPGPVRVFYEAGPCGYALQRQVTTSRVSCAVVAPALIPRKPGERVKTNRRDARKLVELGRAGLLTAVRPPTPEDEAVRDLARARDDAREDLQRCRHRLGKLLLRRGLHDPGRNWTRAHRQWIDSLTWPHAAERAVVDDYLLAIDHTEARLLELDARLAEIAEREPYREPVGWLRCFRGIDTLTAILILAELHDFRRFASAPALMAYLGLVPGEDSSGEKHRRGRITRTGNTLVRRLLVETAWHYQHRPGVGVALTRRRKGQPGRVIAIADKAQQRLCRRFRKLAAEHKPAPKIAVAIARELAGFLWAALQPAPPSVN

SEQ ID NO: 349272 - protein, 366 aa, unidentified
MNMNAVGIDVSKGKSMVAILRSYGEIISKPFEVKHTVSGIRSLIEQIQSIDGESRIVMEHTGRYYEPLVRELSKADLFVSAINPKLIKDFGDNSLRKVKSDKADAVKIARYTLDSWTELRQYSLMDEIRNQLKTMNRQFDFYMKHKTAMKNNLISILDQTYPGANTYFDSPAREDGSQKWVDFSATYWHVDCVRKLSLNAFIDHYQKWCKRRKYNFSRSKAVEIYEASKEIVSVLPKDDLTKLIVKQAVEQLNMASQTVEQLRAMMNEAASKLPEYPIVMAMKGVGRSLGPQLMAEIGDVSRFTHKGAITAFAGVDPGVNESGSYEQKSVPASKRGSGTLRKTLFQVMDALIKTKPQDDPVYLFMD

SEQ ID NO: 349273 - protein, 412 aa, unidentified
MGYRIAGIDVHKKVLMAVVLEVETGHAQAAPQRRRFGATTSELIQLRLWLEEQGVKEAVMESTAQYWRPVWMELEPHMDLQLAQAYSNRAPRGRKHDFKDAERLVRRRLADELILSFVPQPEQRAWRTMTRMKTQLARDRVRLHNQLEGLLEEMRIKLSSVVSDLLGASGQRILRALADGQTDARKLAALASSQLQCGQQRLIDALNGTPSAMHRQLLGLYLERLEVLDTQIDKLNHMIAAAMKEHEDAVMRLAEVPGFGADSAQQVIAEVGPEASTFDSAAQFTSWAGTCPGKEESAEQNHSSRSAKGNKYLRRVLTEVAQAAVKTKGSHYQIVFRRLLPRLGYKQALWAVVHRLSRLVWKILHDRVTYIEQGLQRDPKANQQRARTLARQLRRLGYNVNIQPIPPNSATA

SEQ ID NO: 349274 - protein, 361 aa, unidentified
MDVSRDEPHTTAGLDIGDKYSYLCLIDQQSGEVIEEGRLRTSPEAFKRRFASERPPMRIAIEAGTHSPWASRMLEECGHEVLVANARKTRLIYANKRKTDEVDAENLARLARLDPKLLYPLKHRGEDSQAHMAIVRSRQVMIGCRTQLVNHVRGAVKSFGARLPKCPARSFHKRAAAHIPEALRPALEPILQQIASLTERIRDFDRRLVAVSEEHYPHETELLRQVEGIGPLTALSFVLTLEDPYRFERSRSVGAYLGLVPARDQSGDRDPQKRISKEGDEMLRRLLVGSAHYILGPFGSDSDLRRHGEKIASRGGKNAKKRAAVAVARKLSVLLHHLWVSGEVYEPLYNAHRRQEQKEAA

SEQ ID NO: 349275 - protein, 344 aa, unidentified
MKFIQFIGIDVSKKTLDASIFVAGEVINKFPHIQVRNDKQGFKDLFRWAKEQGVKTKDSLFGLEFTGYYSDALEQFLAKKQISYTMLPTTVVKHYQRGPHDKNDKIDSAKIADYLFRFNGTECIKLRVLPSKALQKLKELKSERKFLVQNRVGCECRLQVAKSKSEEKHMQKLIDLYKEEIEQVEKEMLDVVAQDPDIYTTYRLLNSIPGIGFVNAINTIANTQNFTAFETARQYAKYVGVAPSEHSSGTSVQWRRRPSPHADLQAKADLSMAALHAIELSREMRQLYERKLGNKPKDKDMQKKALNAVKFKLIREMFSVAKQARNFELRGLDKAQAEAHSTEE

SEQ ID NO: 349276 - protein, 411 aa, unidentified
MDVRTDEEFITVGIDPHKNTVVAFFFNVTTKEKWTYRFPATPLAITAFAQNCLKRNMLVGIEEGPNAYAIASILKEYVDRLLIICREKRSGKVKTDEIDAEEIAIALATSTYKSRWIPPLALERLRRLIHSRDSIARKVAGQKNRIRSFLAQELIRLEANDPFSKKGIAEMKQLAYKSLPMDKGLNLLIEVVIYEFLSHILRMFDDFLRSLGKDNPVVQTLISMPGIDVIAAVYLIAEMGDPSRFPSPKKLAKYAGLVPSLYQSGERSRNGRITKAGRKLLRWIMVQIANNAVRFPGHIQEFFLRLKAKKGYAVAIVATARKLLCAIWHMLTKNELYRDYVARLYKKKLRALERTKKVELPKAPNLEMLFKEIEKFLKERGIVWKAEEGLMLGLIEHIIDWEMLLPKNLYP

SEQ ID NO: 349277 - protein, 355 aa, unidentified
MTIVANTFAYVIGADTHSRTDTLAVLDARTGAKVDTQTFPTTPAGLSRAVAWIGRRTSGLADVLVAVEGVGSYGARLARCCQDAGYRVVESFPTPARERRGRGKSDEIDAELIARSVLGVDADRLREPRQDAGVRAALRVLIGAREMLNTERTRSINALTALLRTVDLGVDARASLSTAQFALIGSWRTRQEDLATATARREAIRLARRITACDDELAANRGEITALVAASDEAVLLDEPGIGAINAAVIIAAWSHPGRVRSEAAFAVLAGVSPVPASSGNTTRHRLNRGGDRRLNRALSSITLTRMSHHPPTRAYVARRRAEGRTTKEIRRAMKRYIARQIYRRLAHENGLDRT

SEQ ID NO: 349278 - protein, 441 aa, unidentified
MPQPILAVGVDPAKRLHRAVAVLFPDEVVLDVELPNAFDAVANLDLRLCELANQHGADLVYGLEDHRRYGRLFCQVLTERGRDVRVVNPLWTNRQRAFYGQDKDDAIDGRSIAAVVLRRHLQLPLASDFGEVAQAIREAERSLQDLSKVRTQLGNRLHLQLSDTYTAAYEEYFGKLKSPLALRFFRRFPLPQDLVGHNVEMLASLLLDLAGGKVGPHKGGNRLIAMRSKAQAILETSGAMRALPRTLALELKAELIRQLCDELLANHDRIIRLERMLREQLLPATKQTITTITGISTILAATIIGETGSITRFRSPAAFAVYNGTAPARNSTGGRDRHKARRDCNHRLKRAFYLAARAAVLHDPLAKAYHQSCKSRGLSYVEALKRVARRMSDLVYALLKSGKAYDRSIIEHAIERRREQAAHAACKPCETKPSPLPTKKI

SEQ ID NO: 349279 - protein, 312 aa, unidentified
MNQSQKAFVGVDISKETFDVFINVGNFYQKFTNNQTGHVDFINLLKNYDVAQIVMEATGRYHCVLAANLSVENYPVSVVNPRQVKHFSLSLGNLAKTDKLDAMVLSRFAQVVLPPLTVASDEQTQRLAQMVTRRRQLIDMRTMEKNRLDGVHLDVAELIHHHIEWLNSQIKDLDDDIGRQLRVMPLWQEKAKILSSVKGVGPTTTATLLALLPELGTLSRRKISALVGVCPYSHDSGKLKGKRAIWGGRSAVRAALYMAALVAKKNNNEIKTFYDGLIARGKLKKVALTACIRKLVTILNAMVRDGREWAAN

SEQ ID NO: 349280 - protein, 420 aa, unidentified
MDRSTQNWSERTTFVGFDWAGNHHDVVVVDGHGRIVEDFRFEDTAEGWQYLVQALSKRPDPAVAIETSSGATVERLLEAGYAVYPVNPKAAKRYRERKAPSGTKTDRIDAWSLADALRLDGHTWRVLKADDPLTVELRLLCRDEIGLIEQRTTLITQLKAALHQYYPIALQAFDDWTLRSTWAFIEAFPTPEALSKAGKRKWEKFLHTHKIYRADSYQKRLDLFAQAQTFCGNRATTNAKSMLAVALAGQLRTLQKHLDQFRGRIQALFAQHPDHDVFGSLPGAGDKLAPRLLAELGDDRQRFDSAQALQCFVGTAPVSYQSGQIKKVCFRRACQKVFRHTVHLWADLSRVKCPWAETYYRKKRDEGQSHACALRCLGQRWLKILWKMWQTKTPYDAELHQRNQIKHGSWVIALQTTPTT

SEQ ID NO: 349281 - protein, 420 aa, unidentified
MGRLKIVYPVCCGMDVHRDFLIACIAATNAQGVTEYQSRRFSTYTGSLRELRDWLLANDCKDVCMESTGKYWFPVHNILEESCHVVVSHPKFVKAIKGKKTDKKDAQWIADLFKHDLVRGSFIPPKDIRQLRDLCRYWVKLSSYMTGEKNRAQNCLTVSNFKLDDVFSNVFGKSASAITTQLLEHPGEQFDVAPFVDGRCKTPIAQIQEAVDGIFTYEQAEKLKIIRGHMDSLERHKAELESLILEIAQNYLPQIELLLTVPGIHDAFTAIRILAEIGADMTVFDTSKHLCSWAGLTPQNAESAGKKKTTRIGKSGAYLKPLLIQVALAASRGEKHPEIYGKKQALQKRRGKKKAIVAIARRLLTAIYHILSKNEPYDPAAYIQEDKNPMARQISQEKAFEMLARMGFIVSNPSPLSSSG

SEQ ID NO: 349282 - protein, 288 aa, unidentified
MSNRINSIVTAMGVDIGKNAFHVVGLDRRGAIVLRQRWSRGQIEARLANMPPCLIGMEACVGAHHLSRQLQLQGHDARLMPAKYVRPYSKGQKNDFRDAEALAEAVQRPTMKFVATKTTDQLDLQALHRVRERLVSQRTGIINQTRAFLLERGIAVRQGLRFLRAELPGILAKRSDVLSPRMLRVIEDLAGDWRRLDERIGGLSGEIEALAQQDQACVRLMTVPGIGPIISSAMVAAIGTGDVFCKGRDFGAWLGLVPKQISTGDRTILGSISKQGNRYLRALFVQAA

SEQ ID NO: 349283 - protein, 343 aa, unidentified
MQTVTTIGLDIAKSVFQVHGVDAAGQLVVRRKLKRRYILAFFQKLPPCLVGIEACASSHYWARELQALGHRVRLMPPIYVKPYVKRQKNDMADAEAICEAVTRANMRFVPIKTPEQQSGLVLHRTRHLLIRQQTAVINAIRAHLAELGIVAPVGRKGVEELLRVVADGNDKRVPDVVRACLGALGTQLLSLKKQILELDRMIMVWYRSNETSRRLHYIPGVGPLLATALVANVADPGAFRSGRNFSAWIGLVPKQHSSGGKDRLRSISKQGDRYLRSLFVAGALSVIRYAKAHGSNHRPWLTALLARRPAKVAAIALANKLARMAWAMMAKGERYRNPVALAA

SEQ ID NO: 349284 - protein, 342 aa, unidentified
MAEVTIIGVDLAKNVFQVHGAATDGSVLFRKKLSRPQFARFMAEQPSCCVAMEACASAHHWARQMTQQGHEVRLIAPHYVKPFIKRQKNDAADAEAIVEAAQRPTMRFVEPKSADQQARAVAFRTREQLVKQRTEAVNALRSHLYEFGHVAPEGIGYVPRLERVVADPDAGIPDLAREICRMLLEQINHLTDRIKALKAKIAAISDEAELPRQLQTMPGIGPITALAVETFAPPMEQFRRGRDFAAWLGLVPRQHSTGGKQRLGKTSKMGQRDIRRLLVIGATAVIRWTSRRGAPKGSWLARMLERKPIPVVAVALANKMARGIWAMLTRGESYRGPVLIGA

SEQ ID NO: 349285 - protein, 352 aa, unidentified
MDKGSKIDFTGQPIYIGMDVHKKSWSVSIHTKHFEHKTFTQPPEVEKLVHYLQRTFPGATYYTVYEAGFSGFWIHDRLQEQGIHCMVVNPADVPTKDKERAGKADRVDCRKLARNLRSGEIKGIYVPSRMKVEDRNLVRTRQSMVRKQTRCKNQIKSILFFYGIPIPEEGHWSRRFISWIETIRMEKTSGDLALKAHLEELLHLRQIIATLNRAILALSRTEEYRAYVLLLKTVPGISTLTAMILLTELYDIFRFPSLDRLASYAGLAPDIKSSGETEHTVGITYRRNASLRSVLIEASWVAVRKDPALMIAFNKLSLRMKKTKAIVHIARKLLNRIRFVLKNRQRYVPAVV

SEQ ID NO: 349286 - protein, 351 aa, unidentified
MKYYTTTTEYNCGIDLHARQMYVCVMDRQGKVLLHTNIQGNDFDYFLKRVEPYRHDLTVVSECTFNWYWLADACDAAGIKFVLAHALYAAHIHGGKNKNDRIDSEKLAHLLRSNLIPPAYIYPAERRPIRALLRQRMSYVWHRAELMTHLSMNQTAQNCVPALKGGHNRDVWQERILAQTPNPYHQLAVRCDMDAIRTYDDLIAKLDGTITLYARQHQSREYTLLQTVPGIGDVLAMTILYEIDTISRFPTVKDFTSYCRLVKGSVASAGKLKGLTGGKMGNAYLRWAFGEAAVICKRSHRLLSPYADRLVAKHGTFKGNAILANQLARAVYFMLQSGQAFDPERVISTPL

SEQ ID NO: 349287 - protein, 390 aa, unidentified
MDVRKSYRIRLENAMTELTHGPIVRVGVDLSKRLYQVHAVDQWGHRVLAKSLSPERFYAWCTTLPQDCLVVTEACGGSHHVARQLRAIGLDARLIAAHFVTPYRMAGKSGKNDANDAAAICEAASRPHMHFVPIKSAAQQGQLVVHRLREGYKQEHNACTNRIRGLLTEFGLVFPQRPEKLRKVLAGVLEDASNELPGVVRLALERALLHWIDLDIQIAWCDERIAAHLRSDERVQRAAQLQGVGPITASALIATVGEFQQFRSAKQFGAWLGLVPSQNSSGGKTSLGNITKRGDDYLRALLIQGAKSAVNTAAKRSDRLSQWLVQLKARVGWQKAAVALANKNARILWCVMTRDTVFDVGHVPPMPRQRQRSHDALQVAPNLVQLPASY

SEQ ID NO: 349288 - protein, 427 aa, unidentified
MKKADLLSTLFVGIDISSRENVVALMDFESTKPIASFAVPNNEPGAEEMAQKISEFITPESGLHRLVIGLESTSFYGVHIANYLSTCRILMPFHTEVYCLNPKSIANYKKSYIGLGKNDYIDAFIIADFARVGRITTKPWRGCQYLALQRLTRHRLHLVKALTREKTYMLSNIFLKFSEFTMLDTEEQPFSNEFGATASAVLTEFLSTEEIVDMPMEKLVEFICEKGRNRFPDPLKTAKLLQAAARNSYRLDKCLYEPLTVAIASSFTMISTYNAEIKKVNQAIETTIKGLNPNAFLSLQSIPGIGPVMAAGIMAEIGDITVFNSQEALAKYAGLVWRENQSGQFKADDTSMSKAGNSYLRYYLLEATSHIKLHCPEYGEYYSKKYTEVKTHQHKRALALTARKAIKLIFGLLAKNQLYSRNRVGQA

SEQ ID NO: 349289 - protein, 419 aa, unidentified
MGTLLARLGQELPERNYLGLDVGYKEHVATVISLKTFIRGGERWKRARCLHFPSTRRGLDKFQRYLDSYSAGPGTFLGICEPTGGCYGAAVYQHMLDQGYRMWMIENALTRHMREKIMGGIAKTDEVDARVMARICYLHEAVGEEFKLRPLRIAKPEDVNLLAMCRDSWKLSQMVVRGKNQFGQLMAVVFPELKTFFTKSVSTIAPVSLIGAYPTPGDLAAASSEEVKEVLWKVGAYHHAKRVAELQELARSSSGLLPDPGRAWRLEWLTDFLLSNLKAQAELEKQVEVSVSQHAGYKWIEAVPYSGPATLGVILAVTGDVNRFSTYRQYVAYTGYFAGLEKSQTIDRTRMSKKGNRNLKRAYFQIAAPLVWFDRGENPYKELFGCKVAEGRPWYKAMPFVCAALARHIYHCLKYESLS

SEQ ID NO: 349290 - protein, 347 aa, unidentified
MRYVGLDVGKAKCRAALMNQKGDIEGEFFFENNSRGISNLVSALTSEDKVVMESTGNLWLNIYDALEHRNISVVLANPLKTKAIASAKVKTDKVDARILAHLLRTDLVAESYVPPRNVREMRALVRHRLSLVKMRTMVKNKAHAISDRYGYRCEYSDMFGKAGMEWLRTLEFGELDRLMLENHLSLIEAINAQMNRVDEAIRKKASQDEDVHLLLSLTGIDVYTALLLRSEVGPITRFPDYRKLVSWAGLAPSVHQSGNVEYHGAITKRGSSMLRWAMVEAARTAVQHDERLGAFYERVRARRGDQKAAVAVACKMLKIVWFMLTRRETYGNANGRLYGEKLKKIGV

SEQ ID NO: 349291 - protein, 366 aa, unidentified
MATNISNHKQEKNHNSSLKNSYVGKKVFVGIDVHKRTYSVVTVVEEVVVKKWRTVATPEKLVQQLTRYFPGASIETAYESGFSGFVLHRVLEEAGIHNIVVNPGSIEVAVHNRVKTDKRDALKIATLLEADRLKGIRVPSVAQEQQRLLTRTRQQLVEDRSAIKNKIRMKCHQMGLINPDDKREMSHKLVSEMLSLTPSPEFTLVIEAYWQVWKSIETQIKKIEQKLNEQAEIDPNETIYRSAPGIGPLSARILSNELGDLSQFANERQLFSYTGLTPSEFSSGDTVRKGHITRQGNKRVRYILNQAAWRAIKKDRELKAFFERLAPRTGKKRAIVAVARKLIGRIRAAFKTGKPYQINPIGLQTA

SEQ ID NO: 349292 - protein, 338 aa, unidentified
MNIVFLGIDLAKNVFQLCGLNQAGKPVYTKRTDRKELLQTLANIHACLIGIEASTGAFYWQREFEKLGHKVKVISPQYVKPFVRGQKNDGNDAQAIAVALMQPTMQFVPPKSPEQQDIQALHRARQRIVNHRTATVCQIRGLLLDRGIPIGSAVSRARRAIPLILEDAENGLSSRMRRTIAELYDLFNDLERRIHFFDKEIETVFRQSEACQRIAKVKGIGPETATAVVAAIGKGTEFKNGRHFAAWLGLVPRQHSSGDRQVLMNMTKKGDKHLRTLFIHGARAVVRVATNNNDGHMNQWVNQLKERRGFNKTTVAVANKNARIIWSMLRNETEYQVV

SEQ ID NO: 349293 - protein, 466 aa, unidentified
MENNYILYVGMDVSKGKADAAILKVSDRRSVKPKFLRKKLSFKFVKSEVASFLETVRSYSDVNCTSICFALEVTGIYSTNVYDYIKANLYENESIKFLNTDFVNQWRIAHNIAKSDPLDAQTISTIIGTDSDVQYVNDNVFENKNGYQDLKALVHRHYQIKKIYSQEINRLIAQCDCLFPELQYVFEPKSAAFIAVLSSYPTTHDIINASRVEVFDVVYEATKHRCSMDKVDKLFELCQDTLVPDDISSYGKSIILDLVENIKNIKGQLKSIERYIRDVASLNPAYKLLLTITGCGPITAATVIAETGNIRRFKNADCFVSYSGTSPRNKRSGTSVETMGKISKKGSRYLRHAIYMIAEFARRHNPVLKHQFERIKNGNKKRHKLANIAIANKIARYIYSIMKNKSSFVILHDHIMRLPEETRDTFFNSISLDFPKNTRKQIYQYSDINGELHRFVYIKTDEMIPA

SEQ ID NO: 349294 - protein, 416 aa, unidentified
MNDTHREEYQLYVGIDWASAAHRVIILDAARGVVADQEVAHTGAALAALADELTARAGGDAAAVAVAIEVPRGPVVETLLERGFAVYALNPKQLDRFRDRYSVAGAKDDRRDARVAAEALITDRAAFRRVRLEEPGVIRLRELGRTEAELQQELTRLANRLREQLLRYYPQALALCPAADEPWFWALLAVAPSPAAAERLALGRVRTLLRAHRIRRLTAEAVLAPLHTPALRVAPGTAEAASETIGWLLPRLELVARQRQVCARRVQEVLDQLTTSGQPSEQRDVLILRSVPGIGRVVAATLLGEAAAEVALRDYHALRTHAGLAPVTKQSGKRRNVQIRYACHARLRVAFYHWGRVSVQRDPRSRAHYTQLRQRGHSHARALRGVVDRLLAMLMAMLRTQTCYDPSRRQPLAQTA

SEQ ID NO: 349295 - protein, 335 aa, unidentified
MLSIGIDISKKKVDVAIYDGMKYVFETYENSVRGVKGMLRKIKKREPIDSELVFVMEATGVYHLRYADSLYESGYKVCIVNPLIIKRYGEEKLRRAKTDKADAKLISEFGYYNIIRFDSDAEDKLPYQYSPNSEVSSKVKLMLKAIEQLQRQKNKNINYVEALKQHKKEYSKDLIKMFNDINRETDKKIKKLEKKTEKLIGESEEHKETYDKLLKIPGIGKRTAGAVIGYFDKFDNFENAKQVAAYIGLNPRIRESGTSIKGKGKISRIGNAYLRKLFYMDALSASQYNVQCKSLYERLLMKGKDKPKIFMAVGHKLLRQMFAVAKYDRDYDPNY

SEQ ID NO: 349296 - protein, 346 aa, unidentified
MKYYAGIDVSLESASVCIVDERGLIVREGKVASEPEALIGWLGKLGPKIVLTGLEAGPLSQWLHGGLSQAGLTVELLETRHVRAAFRAMSVKTDRKDARGIAQLMRLGWYRPVHCKSLPAQEMRALLVARKLLQKQLHAVEMSVRGILRNFGAKVGQTTSRGFEGRVRTLVEGQPTLQAVADALLAARTVLARELSSLEKRVRSAARHDDRVRLMMTAPGVGSIVGLNYVSAIDVPQRFRSSRSVGPHFGMTPTRYQSGETDISGRISKVGDGTVRSALYEAAHIILTKPVKNAGALKRWALAIAKRAGRKKAKVALARKLAVILHRMWTDWTPFDPTKAVGAAAA

SEQ ID NO: 349297 - protein, 341 aa, unidentified
MSVATIGIDLGKNSCSLAGLDGAGAVVLRRRLTRERLVAFLAGQPACVVAMEACCGAHHLGRVFMAQGHEVRLMSPEYVQPYVKAQKNDDRDAEAIAEAATRPTMRFVALKSAAQLDQQTLHRARSRLVNGRTRLMNQVRAILLERGITVAKGRRALGLALATLVDDEGSGLSPRMRALLAETRREWAELDARIAALDREFVETARSSAPARRLATIPGIGALNATALTAAVGEAEDFASGRDLAAWLGLVPRQTTTGGKARLGGITKRGNAYLRTLLIHGARAALPGLSRSETPLGAWLRGLGERAHPNVVVVALAAKLARIAWAVLRSGTDYGRRTAAA

SEQ ID NO: 349298 - protein, 454 aa, unidentified
MPKKAKIEKTATGKILKVVNPNAAGIDIASSEMQVCVPEDRDSECNRTFGCFTQDLKQIADWLKSCRIDTIAMESTGVYWLPLYFILKERGFDVILVNARDVKNYSGRKTDEADAEWLMMLHSYGLLKCSFQPENEARAIRNLTRHRSNLLQSSSREALHMQKAMEQMNLKLGNVISDLLGKSGMSIIRAIISGNHDPRELAALAEENCKASKEEIAKSLEGSWAEDHLFELEQAFDLYNFIQEQVNKCDRQIEMHLIRYRAKLDHPSDDNFQRCKKKIGKKNAVDFDVEKYAFDIWKVNIMAIPGMSAISLLQLIGELGHNFADKFETCHSFCSWLNLVPNNKVSGGKLLSSKVPKKTNICGQVFRLCANSLKRNKTTLGYYFRRIQSRCGYSQAIVATAHKIAKIFFTMIKNRTEYDESETGINERDLLERKITMTQRRLDKLNRQLEVALV

SEQ ID NO: 349299 - protein, 406 aa, unidentified
MKSNTQNKKIEAITGKTLVIGIDVGSETHYARAFDYRGIEFSKKPFKFSNNEAGFEMFKAWILDIKEKHEKDKVVPGMEPTGHYWFNLGKFLQDNEMKPVLVNPHHVKKSKELDDNNPTKNDRKDPKVIAGLVKEGRYMIPYLPDGIYADLRTASNMRFQIQSELTRVQNRISRWFNIYFPEYKTVYGKPDAISGIMILKKAPLPEDILTLGVEGVNQIWRDAKIRAVGKKRAQTLVEAAGHSVGTKEGTTAARIEIRMLLEDYESRNNRLQEVMLLIEELVKQIPMAEKLMEIKGVGIKTVSGFLAEVGDITRFSSPKELQKLAGLALIENSSGKHKGQTTISRRGRKRLRYLLFEVAMSLVAKNPEFRELHNYYTTRRLNPLKKMQSLMAIAAKLIRVFFCDAD

SEQ ID NO: 349300 - protein, 354 aa, unidentified
MKRAKSELQPGDKVFVGIDMHKLKWHVTARTADFELFSGSIPGKWEALQRILERYKGHQINTVYEAGYFGFWLHDDLVEYGAECIVTPPSLIPQEYGNKVKTDRRDSRKLAHFLAKGMLKRVWVPTEKERYHRQVIRRRRQLIGDRIRAQSRIKAELQLHGLNLSAPHGKWTKIYLTNLGRIRFNNRFMQESFKRLLEQYHFLDEQIAKQTGLLQELSATKLYKQRVEILMTIPGIGMIAAMELLLELQDVNRFQRADQLAAYVGLTPSQYSSADKIRMGRITCVGKNSLRAMLVQASWALIRKDGVMREKYDRLKSRSGGKRAIVAVARTLLIRMRRMLLDNNPYVVGLVATN

SEQ ID NO: 349301 - protein, 426 aa, unidentified
MPYKVLALIVDVTLDNIDQKQEGKTMNKGKLLVGIDVGCRTHHVAIGENEGIAEEFQITHDSQGFQHLFAQIANQQKRQKLTKVIIGMEGTNGYARPLDQLIKQKRYTLLNVNNLKLARFKEIFATPAKTDNLDAKTILLMMKMAPQMEQIKESLQEVYDIAETEQQLKKISRRRRQLTNDKVVIQNRMQADLQAVCPGLLDTIKQIDANYVLNFLSNQKDLKKLAKLKPEKLQKIRGIGKGHAAKLSNWQNTAFFGPEIDWVGPMIHEDAKRILELKKSITELEKQMGKLVRESRLAKLLESIPGFGTVCAAEVAGEIGNIERFKSEAGLAIYLGLAPLDNSSGNYQGTKSPKQVNKRAKAAMIVAMSHNIRYVERSKTYYDKKRSEGKKHNQALRSLGRHMVRVIWSMVKNDCTYENRLGAKAA

SEQ ID NO: 349302 - protein, 428 aa, unidentified
MLKINPLSTLYVGIDVSSKSNYVCALDFYKNKYINSSFANNQPGAEELAQKILECLKEHPDLNTVVAALESTSVYSIHIANYLSSCEELLYLKPYVFVVNPKCTANYKKSYIGVGKSDPIDAFVIADYARAGNIETDPWRGSQFLALKRLTRHRLHLVECMTREKAYLVSNLYLKFSELQMLEKEDQPFCDIYGATSSSVLTEYLSPEDIISSSEEELVSFLAEKSRNRIKDISKTADLLKKAARDSYRLDKALYEPLNVSIASSFNCIETFKKEIKVIDAAIEREIKGLNPNAFIILQSIDGIGPVFAGGIVAEIGDISAFHSSDALAKYAGLVWKSNQSGDFDGEDTPMSKAGNRYLRYYLGEAANSMRKHNVEYGAYYRKKYNEVPKHQHKRALALTSRKFVRLVYGLLARNQLYSGVSLDTSNK

SEQ ID NO: 349303 - protein, 391 aa, unidentified
MIFVGIDVAKDKHDCFILNSEGTVLADVFTIANNRIGFETLLSRIQSCSQGESKIKVGLEATGHYSYNLLGFLLDSGLATYVINPLHTNLYRKSLSLRRTKTDRIDARTIAMMLMSDVDLKSYSNTAYHNEELKSLTRYRFDKVKERAKLKSSVARLVNILFPELEKLVSSLHIAVVYALLSNYPGASYIANANTEELAETLCTASKGRYTKSKTAEIKVAAGVSIGSKMPAKSMELKHTIALIRELDKEISEVESAIDKITSQMDSPIFTIPGIGRHMGAMILAEVGDFSNFASADKLLAYAGLSPSTYQSGQLQNCYAHMEKRGSRYLRYALFNAAKYVCLWCPTFSAYLEKKRSEGKHYNVAISHAAKKLIRLIFAMQRSGKAFLADY

SEQ ID NO: 349304 - protein, 314 aa, unidentified
MSTEYFVGIDVSKDTLDVCVYPTQDTYRVPNSPDGLDELIKRLKTIEPRLIVCEATGGYETLAVSSLAAAGLPVVVVNPRQIRDFAKSIGQLAKTDVIDAGVIARFASAVRPELRPMKDSPSQELTGLVTRRRQIVDMIVAETNRLQAATRRNRRDIQTHIGWLQKRLKQIDDEIKRDIKNGPLWRTTDQILQSTPGVGPATSAMLISCVPELGQLTHKKIACLIGVAPLNRDSGRYKGRRTIWGGRAQVRAVLYMSALSAIQYNPVIRQFYQRLREAGKCFKVAIVACMRKLLIILNAMVRNQTKWRHGEINP

SEQ ID NO: 349305 - protein, 341 aa, unidentified
MGTDIIIGVDLAKSVFQVHGANRTGAVLFRKKLSRPQFLKFMTAQPACLVAMEACSTSYYWARTLSDAGHDVRLIPPIYVKPFVKRHKNDAADAEAIVEAALRPNMSFVEHKSAEKQALSMLMRTRDQLIDHRTATVNALRGHMAEFGLVVPVGIKNIERLQGLVDADNTLPVLATEMATIHFEQIVELTRQIDILTEKIKVYGTSSPKLKRLRTMPGIGPIGAMIIETFAPDMATFKTGRDFAAWLGLIPLQNSTGGKSRLGKITKMGQKDIRRALVIGAMSRIAGYARQKTRAEPWLQDKLDRKPKMVAAIALANKMARQIWAMITKGETYKPQEVVAT

SEQ ID NO: 349306 - protein, 411 aa, unidentified
MDLLYARCAGLDVHKATVVACVRRPGPQPDARHAETQTFATTLRGLAALAAWLTAHGVTHVAMESTGVYWRPVFAVLEGTVQVQLVNARHVKMLPGRKTDVRDCEWLAQLLECGLLRGSFIPPAAVRDLRDLTRLRKTLIRERGHHVNRIEKTLELAQIKIGCVVTDLMGKTGRAILEALSAGLDDPDQLAEYAQGLLRKKRAALREALVGRLTPHYAFLLQQHLSLIDALDAHLATLQARIETAMVPFADTAALVQTMPGVAARAAQAILAETGVDMSCFPTPAHFASWARLCPGNHESAGKRQNTTTGKGATWLRATLQETAWAAVRSKKSYYRALYHRLKARRGAKKAIVAVQHAMIVALWHMLKHRVAHHDLGADYFERRNTARIRRHHIRRLERLGYDVVITERAA

SEQ ID NO: 349307 - protein, 448 aa, unidentified
MNPVVGLDVSKGESQVQAFLDKGKPYRKSFSIKHTLDGLDRLLEFLREIEKLADGKQPSVILESTGQYHMPVIQFLEEQQYVYIIVNPLISHRARSTNLRKVKTDAIDAYQLCELYYKEELEPYKKRGIHLLNLRNLTRQQETVSSTAVQTKLQLQSILDQIFPEYRGVFGDLYSKISLQILSIFPTSKEVLSVSESDLTNKIAELCTTRSEKWAKEKAIKLREAALRNPFQNNLYQSHIFNLRMFINIVLQYQEHLSKLAAEIDALAKEIEEYEIIQSIPGVGEKIAATIISEIGEIERFNHPKKLVAFAGIDPSVYSSGRFTASINRITKRGSSRLRQALFMAVQCGIRDARKQKTSEEIIPRNKKLRKFYDKKREEGKPFRVAIIACANKLLHWIYALKRSLPKCGLKITFKYIRKNLPILKRKAYLLYPFLVYHASFKFFIEKS

SEQ ID NO: 349308 - protein, 354 aa, unidentified
MIFVGVDWAEAHHEVCVLDQAGAVLGRRRVPDGVAGIAQLHALVGDHGTEPSTVVVGVELDRGLLVGALAAAGYQVVAVNPLAASRYRERHGTSGAKSDRGDAKVLADLVRTDRHNHRPIAGDSELAEAIRVLARAHQSAIWSRQRQLNSLRSALRAFYPAALEAFGTDLACGDALAVLRLAPTPELGRQLSRAKIASALGRGGRQRNLRQRAAQIQAALRSPQLAAPPPISHAYGVVAHAAVGLLTSLNQQIATLEEALDEGFNTHPDAKTIRSLPGLGMVLGARVLGEFGDDPTRFATAQCRKNYAGSAPITKASGRSLVVLARHARNRRLADALEQWAFCSLTRSPGARRY

SEQ ID NO: 349309 - protein, 414 aa, unidentified
MESGYRLIVGIDWATETHQVCVLNGQRRLLEQGRVEHRAEAIAAMIDRLIGLAGGDPASIAVGIEVPRGAVVEALVERGLHVFAINPKQLDRFRDRHTVAGAKDDRRDAFVLADSLRTDLSAFRRVHLDDAWTIQIRELTRIEENLNTEITRLANQLRDLLLRFYPQPLRLCPAADQPWLWALLKLAPTPAKAQKLRRSTIQRLLHQYRIRKWTADQVRTELRTAPLSVAPGVTEATSAHIALLLPRMELLMAQYKLCSKAVQTALNERVSAEEQRREHRDAEIILSLPGVGRVVAATMLAEASQLLAQRNYHALRTLGGVAPVTRQSGKRWAVRRRYGCNRRLSNAFYHWARVSSQCDPRAKHHYQSLRQIGHSHGRALRGVADRLLALLVAMLRDQTLYDTTRAHAPKPIAA

SEQ ID NO: 349310 - protein, 367 aa, unidentified
MSNYVTAIGLDVHARSISACAFDPMTGEVSRARFGYDPASVAEWALGFESPKAVYESGPTGFHLCRALRAPGVDCAVGAVSKMHRPAADRGRKNDRRDAEWLARLLACRNVVEVWVPDERTEAARDLSRALEDARDDLQRARQRMSKFLLRHGLVFDETTPTGRRRSNWTEAYWRWARSIEFDEADDAAAYERYTGAADRCGEAKRELERRVVEAASRPERAPTVDALRPVKGVDVAAAFLLAAEAGDFSRFPSAPSFAAWCGLAPSERSSGETESRGGITRAGNSHVRRALVEASWHVPMSTRRPKKPRPGHGVAPAASRHAAKCDRRLRDRRDAMSQAGKRPCVANCATAREMACWVWAIAPMVR

SEQ ID NO: 349311 - protein, 421 aa, unidentified
MEDERNWFVGVDWASETHHVRVSDARGRKLGARAFAHSGEGLAAMAAWILEVTGAPPEAVFVAIEVPYGPVGESLMERGFRVHAINPKQLDRFRDRFSPAGAKDDTRDAEVLGDALRTDPRCFRALQPLDPVVVELREASRMAEDLKQERNRLGNRVRELLWRFYPQMLGLTDDVAAPWFLDLWRLIPIPEKATRVREVTVDRLLKRHRIRRLSAADVLEALRRPAILLAPGTVSAAVSHREAIAKRLDLVNRQMLAVDERLDRLTQSLAGAQERAGGQRPEPCDVTILRSLPGVGRIVLATLLAEAVEALRRDDRALRCLAGVAPVTKRSGKSRIVLMRQAAHVRLRNAVYHWARVAVQHDPRSQAKYAALRARGHGHGRALRSVADRLIGVACAMLKAKTIFDPNLASQRAPNLGKPTC

SEQ ID NO: 349312 - protein, 374 aa, unidentified
MKYYSTLYVGMDVHRDSFTLAHYALDMKQPTGIVKTDNDYRRIVAYVQRLREKYGQETRIVCGYEAGCLGYTLYHQLTKMNLECVILAPTTLPSPRGGKRVKTDGRDAANIAQCLAYGTYSPVHVPSAEDEQVKEFIRMRNDHCQMLKKLKQQILSFCLRHGYQYSGTRSNWTQAHMKWLDALQPEGLLGDTLEEYLTSFRYHQNKLERLDRRIEEISREETYREPVGKLCCLIGVKSLTALSVISEVGDMHRFATAEKFAAYLGLVPGEHSSGNSVRRGGITKAGNVHVRTLLTEAAQSYTRGKVGYKSSALKKRQSGQSETVIAYADRANERLRRRYYQMTLQNGKRGNVAKTAIARELACFMWGLLTDHVA

SEQ ID NO: 349313 - protein, 401 aa, unidentified
MKTVLSVDVAKNKSMIMLMNSDGEIFIDTKEINHNLEDFEKVKEEIKEINPQNLTVFMESTGTYHLPVERYFKENGFNTLVINSLTTKNNYDTIRKTKTDKKDCYRLAKLFFVNEVEYHDLSKKDLYANLKAMTRQYFYLLQNNVSCKNRYKRLINICFPELEKIFKSTRIYDDTALNFIKEFPHAEIVKEKRIDALYNNLYKTNGRNLNFYKKLATTIKIASINSYPGVDKEHEDVKNLSYMAKIVQNNNNIINELREKMIETAKQSPYYKIINSFYGIGDTLTAEILGELGDITRFDSPKEIIAFCGLDPTIKQSGKSINVKGAISKRGNKYARYILFNCSQMVVKLGASNYPEHPVYIYYQNKKAEGKHYYESLTACSTKILRMLYSMCKNNKQFLEN

SEQ ID NO: 349314 - protein, 355 aa, unidentified
MDSTKYIGMDVHKESISIAVMNGAGKMVMECAIETKASMILQFIDGLHGDLHVTFEEGTSAAWLYDLLKPHVTKVVVCDPRKNVSMKEGNKSDKIDARRLAELLRLNHLNPVYHGEHGLRTLKELVRSYLTITKDQGRVMSRVKAIYRSWAIACTGKQVYAPRHRAEWLGKIGELGVRRRAEFYYQQLDALRALRQQVRRDLLAESKKHQTWKRLCQIPSIGPIRAAALLGILQTPHRFRTKRQLWTYSGFGIETHSSADHRSVDGQLQRAKKQISIRGLNRNCNHDLKNLFKGAAIVASSKPGPFQEFYTALLNKGIRPEMARLTLARKIATIVLIVWKRGACFDAQHLKPQTA

SEQ ID NO: 349315 - protein, 357 aa, unidentified
MPQLDAHLARKQRRPARQHVAIDLGSRESQICIRDSAGAILSERKVPTIGLPKFLSKQPCSRVVVETSAEAFFVADAALEHGHEVRVVPATLVRSLGVGERGIKTDRRDARKLSEVSTRIDLPAVHVPSARSRERKVICNSRARLLAVRTKLINYVRGYLRATATVLPRRSPETFPALARATLLSTPDGIGAHIERVLVVLETLNEQIKQADRELLAIAEEDPVCSRLMTVPGVGPVIAIRFVAVIDQPGRFHSSHHLMSYLGLTPGENSSSERSHRTGITQAGASDLRFALVQGAWSLMRSRPNEPMAAWALEIAARRNKQVAVVALARKLVGLLWAMWRHERDYQSSYQPNVTAT

SEQ ID NO: 349316 - protein, 353 aa, unidentified
MTNVEGSVTGGVDTHGQTHHAAVIDQVGRQFADAQFPTTSAGYRALLTWLRSHGQVDGVGVEGTGAYGAALCRYLREQGVVIVEVDRPDRKTRRTKGKSDPIDAYAAARAALSGQASGTPKTRDGKVEATRALRLVRSSAVKARTQAINQLKSLLVTGPADLREQLRPLDPAALVEACARLRPGADLTDPAVAVTTALRRLATRIQALNTEIAEADRELAPLVAAAAPRLVALMGVGPEVAGQLLVTAGDNPDRLRSEAAFAHLCGVAPLPASSGRTDRHRLNRGGDRAANCALYRIVLCRLRHDPATQAYAERRTKQGLSKPEIIRCLKRYVAREVYHTLVPRPTIDLSPAA

SEQ ID NO: 349317 - protein, 342 aa, unidentified
MKEILPLQPLSLGIDVSKNTLDVSCLWQGGDHTYQQFENNKAGLKNLNRWLLQQQGFSYRTALICMEHTGIYTRQLVEFLLLQNARVWLESALHLKRSIGMIRGKNDKVDSYRIARYAMVNADRAKLVSPSNKTLQLLKDLLASRTRINKSIQSIKVSLRELVRVDKGAGGELARLNKAALEGLQKSKTAIEKRMQQLISSDGEVKEIYALATSVKGVGPVLATELLIYTHMFTRMTNVKQLACYCGVAPFTHSSGTSIRGKTRTSHFANMDLKKTLHLAAMSSSQYVPDLQQYFQRRVAEGKSKMCVINAIRNKLLHRILAVVKRGTPYKLDYAEINLENS

SEQ ID NO: 349318 - protein, 343 aa, unidentified
MVTIGIDAHKRSHTVVAIDEQGRRLAERVAGTTSVEHLALVAWAARFTERRWAVEDCRHLSRRLERDLLAAGERIVRVPPKLMANARDAARSFGKSDPIDALAVARAAMREPDLPVAQLDGPEREVRLLVDHREDLVGERTRMISRLRWHLHELDPGNEPALRTLNHLRNLDRLAERLAGVEGTVARIARELVDRCRALTTEINRLEGEISALVEQLAPTLLAICGCGALTAAKILGETAGIERFKSPDAYARHNGSAPLPVWSSNRARHRLSRSGNRQLNAALHRIALTQARLHPDARALLARRRANGDGGLEALRVLKRRLSDVVYRALKTDATLQLPLAA

SEQ ID NO: 349319 - protein, 370 aa, unidentified
MPKVRSWVGLDVHAVRVVACVVDAESGEMTVRRLPGQACEVVAFCAGLPGPVRVAYEAGPTGFALARALSAAGIECVVAAPGKIERPAQDRVKTDQRDAERLVRLLMIGGLPAVRVPTPEEEALRDLVRAREDVREDLMRARHRLSKLLLRHDVRYRDTVSRWGERHRRWLAQVELREPAAELTMSDYIGAIDQLEIRRETIERAIDGLIPTSPWAQTIARLRCLRGVDTLTAVGLCAEIGDFARFEHPRQLMSYLGLVPSEHSSGETRRQGQLTKTGSRHARRLLIEAAWHYRRAPRLGTALERRQHGQPQAITAIAWKAQQRLHHVWRRLDTKRGKRKTLVAAAVARQLAGYICAIATADPDHSTPTT

SEQ ID NO: 349320 - protein, 349 aa, unidentified
MLFSRRLPWTSPPIYPRVIGLDVHQAKISACAIAELADGGVTVEHREFGTFKRELRALAEWARAFGPNVVVMESTGVYWKSPYAALERAGILAWVVNARHVKTVPGRKTDIADAQWLAILARAGLLRGSFIPPVELRNLRLVARQRQKLGGMLAAEQNRLHQVLSDAGMRLTVLIADLHGQAGRAMVKAIIADQPMAEILKHTGRLRTSREDLFEALPTEDLTDTHRFVLAEILSHIETLEAQMQRFEAQLLQGLAPWQPLLVLLQTLPGIDQIGAAMLLVEIGTAMRVFGSAERLASWVGICPGNHESAGKRNSGKTRKGNAWVRRLLCEFAQPPPAVTVPCAISSWP

SEQ ID NO: 349321 - protein, 369 aa, unidentified
MVEYSEAFVGIDAAKSRNAIAIAEAGRAGEIRYLGEVEATPQSMRKVVARLAAKYQRLYFCYEAGPTGYGLYRQLTALGHDCIVVAPSLIPRKPGVRVKTNRRDAIALARLLRAGELTPVWVPDEAHEALRDLVRARDAAVEDLRRKRQSVTSLMLRHGRIFPGKTSWGARHARWLQEQRFEHPAHQIVLQELVLAIQHAQERLERIEAAIAEFVPGWSLAPAVEALQALRGVNLISAVTFLVEVGDLRRFETPRQLMGYLGLVPGERSTGDTVRKDGITKAGNSRARRTLVESAWTYRYPPRIGKVKLYHLQRVTPAIRDIAWKAQSRLCARFRALAARGKKSTVAVTAVARELAAFMWAIVRAVPAT

SEQ ID NO: 349322 - protein, 344 aa, unidentified
MYIASIGIDLGKTTFHLVAMGERSKVLLRKKFSRAQLLAYTANLPACLIGLEACAGSHFLGAALRQQGHQVRLIPGQFVKPYRKSNKNDFLDAEAIAEAVTKQNMRFVPIKTEDQLDLQAMHRVRDRLVQRRTALINEIRGFLLERGITFAAGPIHLRQHLPTVLEDAEQNLSPRLRWLLDRLGQEWKQIEIDITAITEAIERISNEDARCRRLRQIPGFGPLVSTATVAAIGNGAAFRRGRDFAAWLGVVPRQCSSGGKQKLLGISKRGNIYLRRMLIHGARAVLLRVKYDTGGFGQWVHRLAQRAPRNKVVVAIANKLARIAWAVLSSGQDYRHQPLQAAAA

SEQ ID NO: 349323 - protein, 340 aa, unidentified
MGEQYVGIDLHRRRSVIVRLTPEGEVLEIVRVDNDPVALSLELAKAGPDPEVVLEATYGWYWAADLLQACGARVHLAHPLGVKMFGYQRVKTDARDSTNLAELLRMQRLPEAWLAPPAVRELRELVRYRAKLVALRSGLKAQVHAVLAKQGVQVPMSDLFGVAGTRLLDELQLGRAYALRIASLRRVLVAYDQEITMLGREISTALAGDVGYLAIQTIPGVGPVLAAVFVAEIGDIHRFAGAPQLCSWAGLTPRHRESDTTVRRGPITKQGPRLVRWAAVEATQRLPATSKQATDFHRIADRRGTGIGRVAAARKLLTLVYYGLRDGQVRCLAAAPRETG

SEQ ID NO: 349324 - protein, 465 aa, unidentified
MTKRGQRQARAQRSSKVSRNLTMLNPNAAGIDVGASEHYVAVPAERDEQPVRCFGAFTEDLQRLAQWLRQCGVRTVAMESTGVYWIPLYQILEDYGFAVKLVNARHVKHVPGRKSDVQDCQWLQQLESFGLLSGSFRPEAKICILRSYMRQRQMLISNASRHIQQMQKALTQMNLKLHQVLSDLSGQTGMRIVRAILQGERDRLKLAALKDPHIKSSLSTIAKSLEGDYRAEHLFALRQAVELYDYHQQKIAECDQEILKEMQSLESRAAPGSVPPPPLKRKGRSRHNLIPYDSRAELYRIMGVDLTRIDGLNEGTVQLILSELGLDVCKKWPTEGQFSSWLGLSPNNEISGGKVLRRGTRKVVNRVANALRICAESLLNSKSALGAYARRMRAKRGSQIAIGATANKLARLIYRTLTYGQEYTDIGQEKYETKYRENLIKSLQKRARHLGFQLVDLHPVSVRVP

SEQ ID NO: 349325 - protein, 314 aa, unidentified
MQFIGIDAAKATFDIALPLSHGKYRTKAKLPNTPKGFDELLAWRAKHAPNAAVGMEATGIYHEALAQALVEAGVVVHLANPARVKAFGQAEGMRTKTDRSDAKLIARFFEAQRSEKLYPYVPPTPSEVKLRALVRRRDDLQEMLQMEHNRLDVADISVQQGIKDVIRTLEEQIKQVQKAIEDHIDNDPDLRRRHQLLTSIPGVGNTSSAQLLAMLGDLSKYSDVRQVVAHAGLNPAQRQIRKLRRQMPDITRRRRQFPQKAVHAGADREDPQPHTEVLCRPAQRERQALQGRHVCSDAQAHPSDLGRTEKWPTL

SEQ ID NO: 349326 - protein, 444 aa, unidentified
MHYQKALKMLESIPYLSVGLDVGADFTWMSIMLPNGILTGKPFKIIHSDPQSRELAVTKIKEAQEMYSLESRCFLESTGIYHIPLLYFLRDKGFDCSVINPIITKNSTNMNVRKLHNDKFDSKKAAKVGLDVSLKTSIVPDDTIIDLRNLVRDYYYFKDLQSAVVLKLNAELKVSFPAYLKVFSKITTQTSLKLLEAYPLAADMLAAPKDELVKIIRSTARFGEKYALAKYDSICTAAKDAAVFGRALPSNALRIRLYIKTYREYQEHLDSVLEELHKAVNNLEGTPVYDRILLLQSLWGVGFLSAVVLIAEMGSFDLFSSPKKLYAYFGLDPAVKQSGKFNGDKVHMSKRGSSLARRILHMVALNNLKVDKGTKTPVNPVIHSYYANKCKSKKKNVAVGAVMHKICNIIFAMLRDNKLFQIITPQEHCKQYLAAHPDKARNAA

SEQ ID NO: 349327 - protein, 273 aa, unidentified
MSISKTFIGVDVSKERLDCFCRPTGTTFSCDNTLPGIAALVQWVEAQQPQLIVLEATGGLERPLVAALVVAQLPVVVVNPRQVRDFARAIGQLAKTDRIDAAVIAHFGEAVNPEVRPLPDHLTQQMDALMTRRRQLVQMLATERNHLVSTPGQVQNYVKEHIVHLEELIKQLDQDIDQMITTSPIWKTKENLLRSVKGVGPVLSRTLLAELPELGRLSRQEISKLVGVAPLNNDSGKYKGKRSCWGGRASVRGPLYMATLSATRCNPVIKEFY

SEQ ID NO: 349328 - protein, 344 aa, unidentified
MTSIDYIGLDIHKKTISFCAKAQDGTILDQGTIVARRDTLLAWAKARPRPWIGAMEATLFTGWIYDLLKPLAQELKVAHPAMLKAITAAKKKNDQVDARTIADLLRCNLLPECYMAPSAIRDLRRVLRYRNLVVRQATRMKNRIAGLLMETGTPYNKERLHGRAYFSELLGSLREVPRSVVALLQMSRGQLEFFATIQRRLLKGLCQNPDLSERVARLQTIPGVGEIMALSWALEVGEVKRLPSIAQAASYCGLTSAQHNSAGKEQRGPISKQRNKHLQTILIEAAKLAPRHNPQLAVVHERELKRGDRNQATLAVARKLVAYLMAVDKSGKPFAMRASGEEAA

SEQ ID NO: 349329 - protein, 390 aa, unidentified
MTTLMKYSVGVDVSKDTLHACICEIDSQQQVKIKTSHRFLNSKKDYTALMQWFTKHRKQDVPLVICMEATGIYYEKVALELYQKGYSVSVLLPSKAKRYMQSLGLKTKNDKIDASGLAQMGAEQSLALWQPLGDYFYKLRQLTRHHEQLQQSRTVFLSQLHAIQHSMIEVKEVVKHQKKVLELIEKQLQETLKAIAGHIKANVDVNRKVKQICQIKGVGLLSAATVIAETNGFALFNSIGQLVSYAGYDVIENQSGNQHGKTRISKKGNSHIRRIMHMPAFVAIQHHQQPFKSLYNCVYDRTQIKMKGYVAVQKKLLALMYTLWKNDCAFDPEYKGKSGNDEPKPHFLLGSEGATAEQDEIKIVPIKTGTTQDELPYNESPEALFLLDQK

SEQ ID NO: 349330 - protein, 411 aa, unidentified
MEVLFSRCAGLDVHRDSVVACARIVADGAITQDVRTFGATTKELLALSEWLTGHGVTHVAMEATGVYWRPVWHVLEGSFDLVLANAAHIKNVPGRKTDVNDAMWIADLLAHGLIRGSFVPPAPVQDLRALTRTRKQLVRERASHVQRIDKILQDANLKLSSVVADIMGQSGRAILGAIVAGETDSAELVQLVGKRVKASRQAIADALHGKVTANHRFLLKLHLRQADGLQAAIDEIDREVGERLDSFRTSAERLIQIPGVSDVVAAAIVSEIGVDMSRFPTSAHLISWAGLCPKSDESAGKRRSTRLRKGAPWLKTLLVQSAWCATRAKDTYLQAQFLRLRARRGPKKAIMAVAASILTAVYHMLKDQLDYRDLGPNHFNGADKVKSVNRLLRRIETLGFEVTGIREKQAA

SEQ ID NO: 349331 - protein, 351 aa, unidentified
MKTEQTAQPKLYIGIDIHKRSWKIHCATDLFSGKSFTMPPKPEVLKIYVDKHFSDYEVTTAYEAGCCGYYAHRSFERYGWCSLVVNPADIHRKGKERFTKTDKIDAQLIARELKDGRLDSIHVPEVEREQLRSLFRRRNDLVKGFRRIKSIIKMQLLYFGVSVPEEFDNDHWSHNFRHWLDSLVFSHPTARETLDSRMRSFRFVDKELRDVSTKLRAYCRKHYKKDYYLLRSIPGIGGIVACGIICELGDLRRFNSIKHLAGYVGLAPGVHQSGDNQRQTGITMRAHRLMRSYFIEASWQAIRTDPIMQAYYRKHIGKNVKSIIVKVARKLLSRTLAVIKTEIPYSIGVIE

SEQ ID NO: 349332 - protein, 367 aa, unidentified
MSSVASPAGLIHLGMDTSKNTIMVATLLPGEQSPVTDRIVNEEAAIRRLIGAFADRSVLRCWYEAGPGGYELYRLLASMGVACQVVAPSLIPKGSSDKVKTDKRDSRRLARLGRAGELTPVRVPSPAEEAVRDLVRARDALLADRKRAQQRLTAVLMRHGRIWRGATYWTAAHRAWIAAQRYGEPALASAVGYYRATLAVREAELASLEAELIPWAAREPLAGPAARLGCYRGIAELGALTLAAEVVDWRRFPAARAFMGYTGLVPAEYSSGERTRRGHITKAGSEPVRTALTEAAWAYRFTPAIGAGLRRRQAGADPDTLARSWKAQRRLHDRYVHLVHHGGKAVPEAVVAVARELAGFVWAEMTA

SEQ ID NO: 349333 - protein, 378 aa, unidentified
MKKILRYEGMDVHAESIAVAVVEEDGKERNLGMVPNRPEAIRKCLKKLGRAEELRCCYEAGPTGYVLYWQLVRMGIECAVVAPTLIPTKAGDRVKTDRRDARKLARYLRSGDLTAVWVPDEAHEALRDLVRARQVAKGDEKRARHRLQKFLLRHGRRPPQGVKAWSAAHRAWLQGLKLELVTLQVVLSEYLHEVVHSEQRVDRLDTAIEQAVEEAPESIRAVVAALQGLRGVRKVTAVGVVAEIGQFSRFPHPHQLMGYSGAVPSEFSTGGPGNHRRGAITKTGNAHLRRLLGEAAWCYRFQPAVRYPLKKRQQGLSAEVIETSWKAQVRLCNRYRRMVARGKIKQKVVIAIARELLGFMWAIGVEVEKQHEQTRAAA

SEQ ID NO: 349334 - protein, 421 aa, unidentified
MLAETQDHEEIIARVAALDIGKAELVCCVRVPREDRPGRLQEVETYSTMTRSLLGMADHLRGLGVTRVVMEATSDYWKPAFYLLEAAGFETWLVNARDVKHLPGRPKTGKLDAIWLCKVAGRQMIRPGFVPPPEIRRLRDVTRYRADLVAVRTAEKQRAEKLLEDAQIKLSVVASDIFGVSGGQMMAALIAGERDPKVLAQMTRAAMRGKITALQEAFTGHFTGHHAFLLEKMLARVDATDADIAALDARIEEMITPFAAAAQRLDEIPGINAIAACVVLAETGIDMSRFPTAGHLVSRAKFAPGVQESAGKKKGRNSTGHGNSYLARVLGNAAVSAGRTGTFPGERYRRIARRRGRKKAVVAVGRSILVISWHLLADPGARCTDLGSSFYETRINPERRKHGHIRQLEALGYKVTLQPAA

SEQ ID NO: 349335 - protein, 311 aa, unidentified
MEQFIGIDVAKRTLDAHCLPDNQCLQVANNPEGWAELTSWVKELQPVRIVLEATGGYETAVTVELHVAGLPVVVINPRQVRDFAKATGQLAKTDALDAEIIARFAEVIRPPLRPVPTAKARAIKALVTRRRQVLNMRVAESNRNEHASQQAIVRSLGRIRKALDAELESIDRQLERAIQGSPIYRHKADLLRSVPGVGPKATPVLLAQLPELGHLNRREIASLVGLAPRNRDSGQFRGKRMIGGGRADVRHALYMPTLTAIRYNPAIRRYYEHLLQRGKAKMVALTACMRKLLIILNAMLRENRPWNVQET

SEQ ID NO: 349336 - protein, 392 aa, unidentified
MVISVGIDVSKDKHDCFIVNSESEILADVFTIPNNMDGFHYLLQRIQNCTNTQDKIKVGLEATGHYSYNLLGFLLDNGLSTYVLNPLRTNLYRKSLSLRKTKTDRVDARTIASMLLSDAGLKPYTDTAYHNEELKSLTRYRFDKVKERAKLKSSISRLVCILFPELEKLVPSLHLASVYALLEEFPGAKQVAAAHLTRLKALLEIASKGHYKRDMALEIRDAARNSIGSQMPAKSLELQHTIRLIRELDNEITEIEEQIQSIMDELHSPITSIPGMGFRMAAMILAEVGDFTRFDSPDKLLAYAGMSPSIYQSGQIKNCYPHMEKRGSRYLRYALYNATKYVCQWDPTFSHYLAKKRAEGKHYNVALSHAAKKLVRLIFAMEKSRTIYRLAA

SEQ ID NO: 349337 - protein, 412 aa, unidentified
MDRLVERCAGLDVHKDSVAATVRVPGKDGQRLQETRTFATTTRGLLTLADWLASYGVTLVGMESTGCYWKPVYYLLEERFECWLLNAQHLRNVPGRKTDVADSAWICQLLEHGLVRPSFVPPKPIRELRDLTRYRKAQIEERVREVQRLDKVLQDAGIKVSSVASETLGVSVRRMLDALVAGTHDPEVLAELARGRLRQKLPALQEALTGRFRSEHHGLLVSQILAHIDYLDETIATLSARIEHVIAPFSRERELLQTIPGVARLGAEVLIAEIGVDMNVFPSDAHLASWAGQCPGNHESAGKRRSGKPRNGSKWLHKTLTESAKAAARSKGTYLSAQYGRLRGRRGPGKATGALRHSILIAAYHILEQKVPYQELGADYFDRRRSTEQRTRRLVRQLEQLGHTVTLQPLAA

SEQ ID NO: 349338 - protein, 400 aa, unidentified
MLSIGIDVSKGKSTVCGMKPGGEIVYAPFEVQHTREGMSELVSLLHNSGEEVRAVLESTGSYHCPVVAALLENGIFVSVVNSLRMKRFCSQSIRKVKTDRIDAMQIALYGLAYWQELQPARLPEDTYRELQLLARQYYQMTSMLIKAKVDFNAICDQVLPGMQELMNDHAGRHKLSDFVLRYHHTTHILEMGETRFQKDYCKWAEKKGYRNCERMAVLIFATAQNGIPVLPNAPSTQIVITEAIRVLHTVEASRDAILTQMQALAKTLLEYSLVREMPCIGDTLAPRLIAEIGDVRRFHSKRALIAYAGIDAPPYQSGKFCANNRHISKRGNRYLRKTGYEVMQSYVMHKPANDPIFTFIEKKRGEGKSGKLAMVAGLNKFLRVYYGKVTELYRSSSAIE

SEQ ID NO: 349339 - protein, 343 aa, unidentified
MRTITTIGLDIAKSVFQVHGVDAAGQVVIRRQLKRRYVLAFFQKLAPCLVGIEACASSHFWSRELRALGHTVRLMPPAYVKPYVKRQKNDMADAEAICEAVTRTNMRFVPTKTPEQQSCLMLHRTRHLFIRQQTAVINSIRAHLAEFGIVAPVGRKGVTELLHVVADPRDKRVPEVARACLAALGTQLLRLKEQILEFDRMIMAWHRSSQASKRLHYIPGVGPMLATALVASVADPGTFRSGRNFSAWIGLVPKQHSSGGRDRLGSISKQGDRYLRSLFVAGALAVIRYAKIHGTKHRPWLTALLARRPTKVAAIALANKIARIAWAMMARGERYKEPIALAR

SEQ ID NO: 349340 - protein, 341 aa, unidentified
MNQVITFGVDLAKHVFQAHGVDAQGAVVVRRQLRRREVRPYFAKLPRCVVGIEACSTSHYWAREIAAAGHDVKLIPPVYVKPYVKRQKNDQTDAAAICEAVTRPSMTFVPVKTVAAQASLCLMRVRETLVRQRTLLANCLRSHMAEFGFSANLGHARLMERLDELEPHDLPEPARLALDVLRSEILSIDQRVRTLDTEIRAVHKTNEASQRLTTIPGIGIISASMIAATVSCPEQFRSGRHFAAWIGLVPKQHSSGGKERLGRISKMGNRDLRRLLVMGAVSRMRHVAKAPSRDDIWFQQLKARKSGKLAVVALANKMARIVWAVLKYGTTYNPNFLEGRT

SEQ ID NO: 349341 - protein, 325 aa, unidentified
MREQQNNKRDRATIGVDLGDRWHRFCVLGGSGRVVEEGSVANNRVALSELSSRYPGALVVMEAGCHSPWVSRYLEQAGCEVIVSNPRKTRAIYQHERKSDRRDALMLARIARMEPALLYPVRHGSEEAQQDLLRIKLRDSLVRARVGLINSLRFMLKSLGYTIANPSTERFHKVVQSALPESVAQMIAPSTALYFVLKIGDPVRFERVRDVGAFIGLCPRRDQSGENDPQLRISKRGDAYLRRLLVSSAQYILGPFAPPSALRQYGLALAAGATARAKKRAVVAVARKLAVLLLTLWKNKSPYQAFLQQRKKMRTHDLERLRCIA

SEQ ID NO: 349342 - protein, 343 aa, unidentified
MGEVSTIGLDIAKSVFQIHGVNAAGAVVMRKRITRAKLLEFFAALSPCLVGIEACPTAHHWSRQLQALGHTVRLLPPSYVKAYLKRSKNDANDAAAICEAVTRPSMRFVATKSEQQQSGLMLHRSRQLLVCQRTMLSNAMRGHMAELGIISAKGRNGTAELLEIIADEQDDRIPAAARFSLDVLARQYAVVRAEIATIEKRINAWHRSCEESRRLEEIPGVGPIVATALLAEVGDWRTFSSGRSLAAWIGLVPRQHSTGGKERLGRISKQGNRHLRWLLVDGAMAVIRYARQHGTKRPWLARLMDRRPIKVAAVALANKIARMAWAIMVRGERFKEPKLLPAT

SEQ ID NO: 349343 - protein, 397 aa, unidentified
MSVITPESDRLLRCREVTRMGWTGRAPAPDDPQGLFGAFNEHEEHTMPHKTDVTVVRTIGIDTGKSTLHMVGLDERGAIVLREKVSRHRIAARLVNVQPCLVGIEAGMATHYVARALSALGHDVKQVPPAYAKPFRQGHKNDFRDAYAVAEAVQRPSTRCVPIKTDDQLDLQALHRVRSRLIGDRTAVINQLRGFLLEHGITVRQGHRFLRQQLPQILTTRTDVLSPRMVRIAADLVGDWGYLDERIERVTDEIEGLAQTDVGCGQLMTAPGIGPIVASATVAAIGNGAAFAKGRDFAAWLGLVPKQMSTGDRTILGRITKRGNRYLRMLFIQGARAILLHPTSWAKHSFGPWLTAAAKRLHHNVLTVALANKLARIALTVLVEGRNYETRITPAAA

SEQ ID NO: 349344 - protein, 310 aa, unidentified
MDAIYVGIDVSKDRLDVHVRPGGEAFAVERNGKGLEKLVDRLRGLSPSLVAVEATGGFETIVAAAVAGAGVPLAVVNPAQVRHFAQAIGKRAKTDPVDAGVIAHFAEAVKPEPRPMPEETAVLLAELVGRRRQIIEMLVAERQRERHASNIRVRKSLARHIAVLEKELLSIDQDIDGLVRGAPIWRAKEDLLVSVPGIKNTLARIFLAEAPELGSLDRRRIASLAGVAPYTRQSGRWHGKAMIGGGRTALRSALFIAALTASRHNPALKIFYQRLLATGKPKKVALIAVARKLLTILNAMLRDNKRWQNA

SEQ ID NO: 349345 - protein, 382 aa, unidentified
MKENSIARLQVTKGQIRRMAAKQRLTVGLDLGDRSSRYCILDEAGNKASEEVLPTTKAGLESMFAKMAPCRIAVEVGTHSPWVSRHLAGMGHEVIVANPRKVRLITHSVKKNDRMDAEQLARLARVDPKLLSPIRHRGPEAQADLAVIRARAGLVDVRTELINTARGLTKPMGERLKKCDAAAVKESLADGLGEATQKVIRPLLKSVEGISQQIAVYDKQIQEIEKRYPETKLLKQVYGVGTLIALTYILTLEDGERFLHSREVGPYLGLTRKLRDSGESQPELGISKAGDELLRRLLVQAAHCILRQGAPDSDLRVWGLTKAQAAGGGKKSSKKRKKKAAVAVARKLAVLLHKLWVTGEVYDPHYNRKAVETAKEKAKVAA

SEQ ID NO: 349346 - protein, 337 aa, unidentified
MDTSKHFFQLHGVNAAEKVVLRKKLRRKEMVAFFKALAPTVIGIEACGASHHWARILRSFGHEVKLIAPQLVKPYVKRGKNDTADAEALCEAMSRPTMRFVPVKTAEQQAALMMVSLRDRLIRNRTQLSNAIRGYAAEFGLTAARGMAHIDPLLDRIQADESVPVLARELFAAQAEEYAQLQAQIDEVDAKLMAWHKADECSRRLAKIPGVGPIGAALLMMKTPAPEMFRSGRQFAAWIGLTPKDHSTAGKVRLGVITRAGDEALRSVLVVGATAVVQHVRRGGRGLPWIVDLLKRKPPKLAAVALANKMARIAWNLMVTGNSYAAKSAPAVLMGAA

SEQ ID NO: 349347 - protein, 412 aa, unidentified
MFKIFRKNCCGLDVHKTWIYACIGITNTNGLTEYKQARFSSFSKGLKELADWLAKYSCTEVCMESSARYWIPVFNILEKTCFVTLAHPKYTKPQKGNKTDRKDAKWICDLFMCDMIKPSFIPSPEIRQLRDLIRYRIKLTNMMTGEKNRAQNCLTVSNLKLDDVFSDVFGKSSRSITNYILDHPDQTFDVAPFVDGRCKTPVEEIQAAVDGAISPEQAVKLRQCLAHIDELEAHRKEIEQEILLIAEPFSAVLDLLYTLPGLDKNPMTAISILSEIGPDMSVFPSSKHLVSWAGCCPRNDQSNQKVKSRRISRAGSYLKPLLVQVANALIKSKKHPELKERYHRIKSHRGHKKAIIAVCKMLLTAIWNMLSKLEPYNPDGFLEHRPVNEKKVLTTSQALELLRLRGYTITND

SEQ ID NO: 349348 - protein, 420 aa, unidentified
MEVLYLHCAGLDVHKGTVVACVRHMVNGAVTRDVRTFGTTTKDLLALSEWLASQGCTHVAMEATGVYWKPVWHILSDGDVTLVLANAAHVKNVPGRKTDVNDATWLADLLAHGLIRGSFVPDAQTQELRGLLRTRKQFVRERSSHVQRLQKTLEDANIKLDGAISDIIGLSGRRMIEALIPTGQARGLKAHGESDPEALAGLAHRRIKAPPAALREALRGRVTDHHRFLLQLHLQHIDALDAAITAIDREVNVQVEPFHTQVLLLTTIPGVSDLSAYVIRAEIGGDMGRFPSVGHLISWAGFCPRNDESAGKRRSNRMRKGAPWLKTTLIQCAWAAARKNGSYLQAQFPRLRARRGAKKAIGAVAASILTAAYHMLKNGTLYHDLGPDHFDRRAKTVQTKRLLTRLQRLGYAVQITPLAA

SEQ ID NO: 349349 - protein, 367 aa, unidentified
MKNVSTAAAKQIRNFSEQKLTIGLDLGDRSSWYCVLNEAGELLLEQKLGTTPKAMKEAFGGMPRSRIALETGMHSPWVSRLLSELRHEVIVAHARNVRLIGESRKKDDRRDAQTLARLARIDPQLLCPVKHRSARAQADLTVIRARAGLVRARTALVNTARGLAKSYGERLRGCNVGNMNPEKAEGLSPELQTALEPLLAGIESLSERIRECNERIEQLAQESYPQVALLKQVKGVGTLIGLTFLLTLEDAHRFRKSRDVGCYLGLQPGRRNSGQSEPQMHISKEGDPYLRTLLVQGAHHILGPFGADSDLRRWGLKLAERGGRNGKKRAIIATARKLAVLLHRLWVSGEVYEPLRNSNQRAMPAAA

SEQ ID NO: 349350 - protein, 420 aa, unidentified
MNREVRAWIGIDWADEKHDVSVYEVATGRQERLEVKQSPEALAEWIGQLRTRYGNAGQVAVVLEQGRGALLNVLMGCEFLLLYVINPKSLSCYREAFYGSGAKSDPVDAELMREMVRQNPERFRAWHPDDVLTRSLRLMTEGRRDLVNQATAVTNQLTALLKGYYPQALRWIGALDTHWACDFLDQWPTLQALQSSSRRQILRFYEKHPRHHLDLEQQIQQFHQTLPLTGDEAVLEYSTLMVQALIPQLRALLDSIDEFDRKIAEVFRKHPDRPIFESFPGAGAALAPRLTAAFGADRDRYAAASEMQQFSGIAPVTEKSGKQHWVHWRMACPKFIRQTFHEFADHSRRWSAWAKAYYQLQIERGKKHNAAIRALAYKWIRILFRCWKQRVPYNEQVYLASLLKHQSALLLKSAPAVKKL

SEQ ID NO: 349351 - protein, 401 aa, unidentified
MSKKNTRNALDTSLSYAVIGLDLAKADCAVAAVPCADDELGLIDRMDYESLFEQAEKLKPTLFAMEPCCGYSQISLRLQNMGHEVKVISGHAVKNWIATHKSNQKTDLNDATALAKLALYDHDLQPIRVKNVEECRIASVQAIRIQLRTQATKSLVCFKSLCQCWGIVIRRGSLNTKKMAEAVAAVEKLLGAEVASSLMILRDAYKFTMKQINALDKLLDALVEANEQARTMKTVLGIGTQTAARLAVTTGDIKRFPMPRSYVAYFGLAPRNIITGHSGTPSPSKRGALKPVSSRGQGKVSRRGDRVARSFIIQGAATIYMLYCKDMLPECQLRRWLHEQIKRGKPYGKIIVSLAAKLLRIVWALLTYGEKFDSHKAGVPRSVLAAMEKPLKHDAAAESAA

SEQ ID NO: 349352 - protein, 347 aa, unidentified
MRFYNAPHKHYCGVDLHARTLYLCIINREGVVLLHRSLPCDPQRFLLAIAPYREDLVVAVECVYSWYWLGDLCAKEGIAFVLGHALYMKLIHGAKAKNDRIDSNKVAVLLRGGLMPQAYVYPADMRATRDLMRRRLHFVRQRGSLLAHIQITHHQYSLDAPGKRITYRSNREGLGEGFEDPSVRHSIAADLGLADHFEVVIGELELAVLRQARVHDPSALHLLTSVPGIGKILALTILYEIHDISRFPSVRDFASYSRLVKCERSSAGKSLGTSGNKIGNAYLKWAFSEAAVLFVAKSAQGRTVLARLERKYGKPKALSVLAHKLGRAVYFMLARKQPFDPQRFAES

SEQ ID NO: 349353 - protein, 343 aa, unidentified
MANHTLVAVDLAKAVFEVAVSHHPGQVARQKRYSREQFQLALAQLPQATVVMEACGSAHFWARRMLVLGHRPVLLPPHAVRPYVRRNKTDRTDTKGMLEAYRNEEIRPVPIKSVAQQTLASLHRLRSGWLAERTARINTLRGLLREFGILIPLGAHHAVPSAWASLEDAESEIPDPLRPALADLCSEIRDLERRIKMIEHQLTALAAQTPAVAQLMTIPGIGLLIATALVAFVGDIQRFPSARHFASYLGLTPKENSSGLRRRLGAISKRGDVYLRTLLIHGARSVLNAAKRKTPDRLRAWALAREAARGHNKAATALANKLARIAWAVWKHDRPFHSTPRAA

SEQ ID NO: 349354 - protein, 304 aa, unidentified
MPRMPQVLEPSQTARPHADSGEVVLGVDTHKDLHVAAVISPLGGLLGSRGFPTTSAGYRQLLCWARGFGTLGRAGVEGTGSYGAGLARYLRAERVRVIEINQPDRASRRRRGKTDTLDAEAAARAVLSGRATTTPKAGDGPVEMLGLYKLAKASATKSRTQAINQLKAVLIRADPPLRESLSGLSNRVLIRRCAQLTDNAPSNPPHRDIATAASYTLALLAHRILALSSEIDDLTHQITTVLHTHAPQLLDVHGVGPDTAAALLITAGDNPDRLHTEASFAAVCGVSPVEASSGKTHRRRLNRG

SEQ ID NO: 349355 - protein, 343 aa, unidentified
MQAITTIGLDIAKSVFQVHGVDADGQVVVRRQLKRRYVLAFFEKLAPCLIGIEACASSHHWSRQLQALGHTVRLMPPAYVKPYVKRQKNDATDAEAICEAVSRANMRFVPTKTPEQQSGLVLHRTRHLFVRQQTSVINAIRAHCAEFGIVAPVGRRGVEELLNVITNAKEEQVPAIARACLSALGAQLHRIKVQILEFDRMIRAWHRSCQTSKQLDEIPGVGPALATALVASVADPRTFRSGRDFSAWIGLVPKQSSSGGKPKLGSISKQGDRYLRGLFTAGALAVIRYAKIRGTGHRPWLTALLARRPTKVAAIALANKIARMAWAMMARGEGYKEPVALAA

SEQ ID NO: 349356 - protein, 277 aa, unidentified
MSNPTRWVGVDLHRRRSQIAIIDEQGELALSRRIVNDRDTFKDLLGDPEGTHVAIEATYGWEWLAELLEEAGYDVHLAHPLRTQAIAAARVKTDAVDAKTLAHLLRTGLLPEAYIAPPELRDLRELLRHRAVLTRMRTAVKNRVHALLARQGIHQEHADLFGKAGREFLPGLKLPEGSRRRLDSLMSLIGDFDREITATTREIDARAKTDERVPVLCQLPGVGRYTAMLIIAEVGDVTRFPTARHLCAWAGLAPTVRSSDGKARLGHISRQGSPALR

SEQ ID NO: 349357 - protein, 398 aa, unidentified
MLEETQDTEEIIERVAALDIGKAEVVCCTRVPRDGSPGRRMQEVVTYPTMTRSLLGMSDHLRCLGVTRVVMEATSDYWRPAFYILEAAGFEVWLVNAKDVKHLPGRPKTDKLDAVWLAKIAERQMIRPSFVPPREIRALRDLTRYRTDLVAARTSEKQRVERLLEDAQIKLSTVASDVFDSSGRDMLAALIAGERDPKILAQYARRRLRAKLTALEEAFTGKFTDHHAFLLTKMLGRIDADITALDTRIGAEVAPYADAIARLSEIPGINPLAARVIIAEIGLDMTRFPTAAHLASWAKFAPGVKESAGKKKGRGNTGHGNSYLARVLGNCATAAGKTDTFLGGGGSGAPRACLLDVWARGRNRSVQFTRRGGRCAGYRPHRLVCPFLMPSTGKPERC

SEQ ID NO: 349358 - protein, 359 aa, unidentified
MKTTLNHASKTTTLPNIETQARIQQLKLGVDWHADHFRVVRMCDGQSPQPAQRFTPASFLPFVQKQLTLADQVFVVYEAGPGGFHLHRQLTALGVTAFVVHPQKLDPQHKGVVTDKTDARELTLNLDRYLRGNVRAMSVVRVPSPAEEQRRALSRQREQLRRERQRLAAQGRSLCLTQGIRLRGSWWKNSLTLPDWLEQRLAVWRQLIVAVEGQLAALTQQVETLAPKERPKGLGPLTLGMLIAELCDWSRFRNRKQIGSYTGLCGGVSSSGQSHCDLSITKAGNARVRWLLVELAWRMVLYQPQCRAVQRWRHVLLHPQAALRQRKRALIALARQLAVDIWRWQTGKVTLQQLGWVMV

SEQ ID NO: 349359 - protein, 402 aa, unidentified
MNCVGIDVSKGKSMIAVMRPFGEVVVSPFEVLHTDSELSKLAGLLKSLDGETRVVMESTGNYHAPVAWLLHDAGLYVSVINAMLVHDYGNNSLRRAKTDKKDAVKLANYGLDHWLTLPRYVPDEDTRLMLKTCYRQYQQYSKVQTMLKNNLISLLDIAFPDANRLFTSPPRADGSEKWVDFVAAFWHCECVCGLSEKAFTAKYHKWCRKHGYNFSEDKALDIYASACGHFGVMPKTDTAKLLVEQAISQLRATSATLAALKQEMQSLAASLPEYPVVMGMFGVGPVLGPQLMAEIGDVRRFHSKKALVAFAGIDAPPYQSGQMDIRSRSISKRGSSSLRRTLFLVMSVILQRAPMNEPIYQFMNKKRSEGKPYRVYMMASANKFLRIYYASVKAYLDSLGHD

SEQ ID NO: 349360 - protein, 348 aa, unidentified
MTIVDAARPVTGGVDTHLDLNVAAALDPVGGLLEVAEFPATAAGHRRLLDWLAGFGPVTRVGVEGTGSYGAGLARYLRAAGVEVVEVDRPNRQARRRAGKSDPLDAIEAARAALSGRASGAAKTRDGNVEAIRALVVAKRSARSTKIATLNQIRHLSFTAPEQLRERLKGVSRQQLAARAAALRPSQREGADPVMTATKTAIRLLGRRVLALDEEKARIDALLSELVTQTAPDLLTLHGVGVDTAATLLVTAGDNPGRLRSGAAWAHPCGTAPIPASSGKVTRWRLNRGGDRQANCALWGIVITRLRNDPRTQACMTRRLAEGRSKPEVIRILKRYVAREIYHHLPRP

SEQ ID NO: 349361 - protein, 420 aa, unidentified
MPTDSYDVYCGIDVGKFKHHAIALRPDGSRVLNRELPQDEARIRDLLGELTGHGSVLVVVDQPRNIGALPLAVARDCGLDLAYLPGLRMRRIADLYAGSVKTDARDAYVIADAARTLPNTLVPVESRNEIVEGLRILAGFDADLAVEENRLINRIRSLLLSVHPALERAVGKQLHRPIGPGLLAKFGGPHGLSNARPAAVRKVARGYAPRVGDHVVTTITKALAEQSVIVPGSAKADFVISTLAQQLLDVRAARAELEKQFNAELERHPHGAVITSMPGVGTRTAATILVEISDIRRFDNPGRLAVYSGVAPRTRRSGTSIKGEHHQHGGNTRLKRAMYLAAFASLKRPVSRAYYDRKRSEGKSHHAALICLARRRSDVLYAMLVDETLYKEASPPTSSMPDAAPGPHSRRPRTTVHRAA

SEQ ID NO: 349362 - protein, 411 aa, unidentified
MNPVVGLDISKGESQVQAFVDKGKPFRKSFKVSHTLEGLGLLVEFLEVVQKETGMKPPVILEATGHYQTPVVQYLEERGYLLIIINPLISYKAKSSSLRKVKTDAVDAYHLCELFYKEELEPYKKRGVQLLNLRNLTRQHENITGVMIQTKLQFQAILDQVFPEYRGVFGDLYSVVSLLTLKDFPSSEDILEASDETLSNKIKELCKSRSIRWANEKALQLKKAAARNPFEKTVYQSHILSLGMYINIILQYKEHLSTLESEIDALAKEVEEYNIIKSIPGIGEKIAATIISEIGEIDRFTEPKKLVAFAGVDPSVFESGKFTATKNRITKRGSSRLRHALYMAVRCAIRDCRKSKTSDEIIPRNKKLREFYDKKREEGKPFKVAVIACVNKLLHWIFALLKNRTTFQDIV

SEQ ID NO: 349363 - protein, 374 aa, unidentified
MKEFSKYVGLDTHKETIAVAVADALGGKPRYYGEIANTPDEIRKLVKKLCPDGEMLTFCYEAGPCGYEIYRQISRLGHHCSVVAPSLIPTKPGERVKTDRRDSEKLCRLDRAGELTPVWVPDQEQEAMRDLTRAREDMKGLERISKQRLNAFLLRYARIYESGKSRWTQAHFRWLEGLKFDVAVQQIVFQEYVEAIKQAEARVAGLEKEMEKALGSWVLAPVVEALMALRGVKLITAMTIMAELGDITRFDSPRQLMSFLGLVPSESSSGQTRRQGGITKTGNGHARRVLIESGWCYRFPARKTAHLQRRAEKCSSEVQAIAWTAQKRLCGRYTHLLGRGKLKVQVCTAVARELVGFIWAIACEVMGKHVVSAR

SEQ ID NO: 349364 - protein, 410 aa, unidentified
MEAIVERSCGLDVHQATVVACLLVGAADRKPRKEVRTFGTMTVDLVRMRDWLRAEGCTHVGMESTGIYWMPVYTMLEGHFELVVGNAMHIKQVPGRKTDVKDSEWIADLIRHGLIRRSFVPPKPLRDLRDLLRYRRKLIDSQTAERNRMLKLLETANIKLATVASNVFGASGRRMLRALLDGKMTPQQMAELAKGRLRKKLSELAPALDGRVEEHHRFLLSMQLERMEDLEATIKKLDERIDEKLLPYQKHHKLLTHIPGVDRVGAAVIIAELGVDMTVFPTVRHAAAWAGVCPGNNESAGKRKGTPGRKGNPHLTTALVQAAVAASRKKGTYLKEKYWRLKARRGAMRAALAIAHKILIAAYHMLLNDTDHRDLGPNHLDNISATSTRNALVKRLERLGYRVTLQEATA

SEQ ID NO: 349365 - protein, 365 aa, unidentified
MKHVTTYVGIDAHKKDLFIAMLIGHEATPVTWTVPNEPNAVRRLVRRLEREAPGPVRACYEAGPCGYVLQRQITTPRVSCQVIAPALVPRRPGERIKTNRRDARKLAELFRANVLTEVRPPTPEEEAVRDLCRARDDAREDLQRCRHRLGKFLLRRGLHYTGRNWTRAHRQWIDSLAWTYAAERVLLEDYQLAIDHVEARLIELDRRLVEIAEAAPYREPVGWLRCFRGIDTLTAMLVLAELHDFRRFKSPRALMAYLGLVPGEDSTGEKHRRGRITRTGNALVRRLLIETAWHYQHRPSVGAALMRRRKGQPGRVIAIADRAQQRLCRRFRRLAEQHKPAPKIAVAVARELAGFLWAALQAPAA

SEQ ID NO: 349366 - protein, 391 aa, unidentified
MILVGVDVAKDKHDCYIMTSEGEVLFKSFTIANNMEGFNQLYEKILSVIDNFDNVKIGLEATGHYSYNILGYLLDKGLTPYVINPLHSNLYRKSLSLRKTKTDKVDSHIIASMLMSDVSLKPYSNTLYHNEELKSLTRYRFTKVQERAKLKISISRLVTILFPELEKLVPTLQMNSIYALLYEFPSAHAISKAHLTRLTNLLNTTSKGHYTKDKAVLIREAAKNSIGSNMPAKSLELKHTIKLIKELTSEINEIEEEIKIIMNKINSPILTIPGIGLSTGAQILAEIGDFKNFSSPDKLLAFAGLSPSTYQSGNMYSSNTKMEKRGSKYLRFALFNAAIYVSYWEPTFSQYLKKKRVEGKHYYVAISHVVKKLVRLIFHLEKTNERYSTVV

SEQ ID NO: 349367 - protein, 438 aa, unidentified
MSNKVIFNLDELFISVGIDVGADFSWMSIALPNQQFVGKPFKILHNSIDSLTTAVSKIKEAEELYSLESRIFLESTGIYHYPLFCYLRDKGFNCSVINPIITKNSTNINIRKVHNNRFDSKKATLVGLKPDLKVSLMPSDLALNCRNLCREYYDLMDNRSAYVNKLQGELRMAFPQYLGIFSKVTINTSLTLLETYTSPSAFLEADKQEIIDIIKSTARFGLTYAQNKYNAIIQAATDANQFGYIIDSNIKRIRLYISFIRKYDEEINSILESLHELVDANEDTDFVKQIHLIKTFKGAGFLSAVSIMGEIGDFSAFSKPKQLFAYFGLDPAVKQSGKFEGTKVQMSKHDSAIARRVIHTLTLQSISISRNGEAKNPVLREYYLKKCDSKPKLVAMGAVSHKVCNMIFAILRDNKPFKIIAPQEHIKQYNAAKCDMTA

SEQ ID NO: 349368 - protein, 406 aa, unidentified
MNTKDQKAAVVGMDVHRRFSTVTARNAERKIVWRRRLNHDDPLRLQATLGDWPTGTPVILESTFGWEWMCDELENAGLEPVLASSSKVAAWRRARGSAKSNRTDADLLSELNFQADRWWAVWLPPRAVRDRREWMRFRMSLVGSQTDLKNRVHAILHRHGILHDFSDLFGKAGRRMLTRLANDDHDTRLGVSGRATLKGYLPLLDQLRRQIASVTRSIRRDLTATSEGRRLQTLPGVGAVLGYTILAEVGDFARFRSGKHLASYSLLAPRSYDSGEETDEPPKGRHVGRVGRRTLKWAWIEAAHGAVRRGGRFRAIFDRYTDGGKRNRNRGYIMVAHALCITAFAMIKKEMDYSNNPPARPGSTNQRPAGKTRKRRRRTSRDSRPGTGQPDHGLGRCRLIRHQASK

SEQ ID NO: 349369 - protein, 366 aa, unidentified
MSDHTATRLPVAGLDVHAASIRLAVVRADELLDERTLPFDCQLVERELRRLGATRVCYEAGPTGFGLARHLRDAGLQCDVIAPGLVPRRGSDRVKTDKRDARKLALLYQGGMLAPIWVPSLEQEAVRDLIRAREDARQDRARARQRLGKFVLRRDRRLPGKGWSLARRQWLGQQAFEHAAQQAAFDDYLLACDLLDRRIETLERQIDEWATHESFQQLVGRLRCLRGVDTLTAIGLIAEIGDFSRFKTAPAFMAYLGLVPSECSSGERRRQGSITKTGNNHARRLLIEAAHNQRRRPARSAQLARRQAGQPADVVARAQQAQLRLHKRWQRMSARGKHSNKIAASVARELAGFVWAIATEQPLRAG

SEQ ID NO: 349370 - protein, 345 aa, unidentified
MSNNIHFSCICGIDIAKKVIQVFKVTSDGVVTNTSVSRKDFLEHFRNIPPALIGMEACATSQHWGRELQGLGHTVKLLSPKAVKPYVKGLKNDRNDAEGIYRALIMGVREVSIKSTAVRDLSLLQTMRAKRQRDKVATINHIRGILAEYGLVMGKSVRAFLSNAGTLIARLKESETTSQLVISELEKLLKEVKEIVSRIEELESSIKKIASENKNYDLFRSAPGVGPITAAMMVVLLCNPTVFKNGRDFAAYLGLAPMSFGSGGRNQVTGIPSKYRCHNEARSLLVQCAHSITRLKYKSDWVASILSRKPKKVAIIAIANKLARQLWVMAKKGDKFEKRLVLAAV

SEQ ID NO: 349371 - protein, 402 aa, unidentified
MNCVGIDVSKGKSMIAVMRPFGEVVVSPFEVRHTASELSELARLLKNLDGETRVVMESTGNYHAPVAWLLHGAGFYVSVVNAMLVHDYGNNSLRRGKTDKKDAVKLANYGLDHWLTLPRYVPEEDTRLMLKTCYRQYQQYSKVQTMLKNNLISLLDTAFPDANRLFTSPPRADGSEKWVDFVATFWHCECVCGLSKKAFTAKYQKWCRKHGYNFSQDKALDIYASACGRFGVMPKTNTAKLLVEQAISQLRATSAALAALKQEMQSLAASLPEYPVVMEMFGVGPTLGPQLIAEIGDVRRFHSKKALVAFAGIDAPPYQSGQIDVRSRSISKRGSASLRRTLFLVMGVLLQCAPMDEPVYQFMNKKRSEGKPYRVYMMASANKFLRIYYASVKAYLDSLEHD

SEQ ID NO: 349372 - protein, 452 aa, unidentified
MTQRNRSTPRPSPLTLTHPNAAGIDIGSASHFVAVPPDRDDEPVREFRSFTAELHRLADWLTACGVDTVAMESTGVYWIPLFELLDARGFTVLLVNARHVKNVTGRKSDVLDCQWLQQLLSYGLLRGAFRPGDAVCVLRALVRQRGAILRSQSRCVQHMQKALVQMNIQLATVLADVAGASGQAILRAIVAGERDGHQLAALADVRVKASAEEIAASLQGHWRAEHLFALRQALDAFDFCGQQLTECDREIEAQLQRLQVHEGKPAKGKKRSKSRNAPKTFDLRARLFQMCGVDLTRIDGVDVTTALVVVSEVGADMSKFPSDKHFSSWLNLCPGTKITGGKVMSGRTKRTANRATQALKLAAAALRTSQSALGAYYRRLCARMDKPKAVTAAAHKLARLIYAMLTKGEEYTDQGQAYYEERYRQRVIANLNRRAQQLGLQLAPIAPPPTPA

SEQ ID NO: 349373 - protein, 476 aa, unidentified
MIYSVGIDVHKGQHRVHCLDEKAQPCDAFSFQTVPEGLATLEKRIFRDGSNPIVVFEPAGLTWLMAAAYLRSSHPECRLVRAKGQKVAALRRYLRGPVKSDRIDAFTLAKMPFIDLERLDEVYLAPAQTYALQRLTRQRKRLEDQITTHKKRIGSIVDGYLPGVRQAFSHPWSIKVRVFLHSQINPFAVIRSGEEALHSFLNQAKSGNRRERAESYLVYSACQNVLALQKLCAASEMLNEEFFVDLQDEIDRELRLMETEEAESKALDQRIEELYQKIHPSDNLRTIPGVGEHTAPVFMANIGDPARFPGQSEFANWTGVVPASKQSSGVESKGLRMTKAGPATMKWALYQAGQIGRRWDPQLASVYYRQMVYHGKNHKQAMGAVMSHMAARVFAVLRENKSYKLRDTDGNSISMLAARELIMVKYLVPEDIRQARRKGKGKKANAKGKKGEMAAGSKYEAAIAPQPATSLPSPAI

SEQ ID NO: 349374 - protein, 409 aa, unidentified
MMKQNIIFGIDVSSKSSTVCVVIDRIKQGETFKITNDSFGYQDLLDRLNQYLITPLVVFEAAGVYSLSLQAFLEDYHIKYLKLNPLKAKKLMDNNLRHNKTDKVDAYRLALIQFNAPQKLRAPQPKEYHELQNASRYYEELTQALIINKNQLHRNLQSTFPQIESILSTSSGRVYWTIVSLFPHAQYVLNHNENQVFQSLLAISGIGRQRAHYLTTRLYALARQAYPYDNESSITIRAIQRNIANLLSLSAERDNVINYMEKLAMQANARSLNIYESIPGIAKTTAVRLVAELGDLRRFDTSAQIDAFVGIDPGRYQSGEKDSHLGITKHGNHLARKILYRTITQMETVKATQPCHITDYYDKKKRSSNSRGYKKIAIASVHKLIRTMFALIKHDQLYDYNVATHNQRL

SEQ ID NO: 349375 - protein, 414 aa, unidentified
MKKDRIQFEQVVKCGCGMDVHKETIVVTIRGKGIKTQTKSYSTFTNSLIKLKEWLKKHGITHIAMESTGVYWKPVFNVLGDDFQILLVNARHVKNVPGNKTDKRDSRWLAKLLLSGLLRGSFIPSRTIRELRDLTRYKTKLTNQVTAEKNRFQKILEDANIKLSSVLSDVFGATGKKIIARILEGDYDPEQLLYYVHGHVKADRKDIVEALTGYVRDHHRFMLKTILSNISRIETTLAEIEGQIEKVTEPYKEIIELLETIPGVAYDGAIGIISEIGVDMDEFPTHKHLTSWAGVSPGSNESAGKNKSGRITYGNKYLRALLVEQGWAASRTKHTYLSSKYKSLVGRKGKKRAVIAIGHKILIAAYFIIKDKAAYKEPGEDYLNNFRKDKLIEYYKKQINRLEPNYDFDKEVVA

SEQ ID NO: 349376 - protein, 372 aa, unidentified
MEKFCGLDVHKDSVFMCGLSENNEKYEEVFKTLTPDLERLRDTLVDHGVGLGAMESTSIYWYPLWNILESDFDVKLINPLFIKQVPGRKSDVKDAEWIATVLMKDLIKGSFVPPSIIQQLRLYNRKITKLNKQLRRSEQEMDEMLQRCNIRLSNYVSDIGCKSMKKVVQAIAKNHLNLDYLLSLVHARIVRKSGAETIRASLTGTFTSVDIEILRMIVEDLNFHHDQLEFCKKELLKLCYQHFNLQMELLVTIPGVKEHAAACTISEIGTDMKFFTSATALVGWTGLRPRNDQSAGKIKGRKTLHGNKYLRLMLVQCAWGASRTKGSAFMARYQRFRKRMHHNKALIANARKLLVIIWNILAKKEPYFAQAI

SEQ ID NO: 349377 - protein, 346 aa, unidentified
MLIVGCDFHPSWEQVAWLDTETGETGEEKLPHLKEEVEGFYRRLPAPALIGLEATGNCHWLVDLLEDLGHEVWIGDAAQIRARYVRQQKTDRRDAAHILKLLVEGRLPRLWQPDREQRDRRQLLIHRHKLVEIRARVKNGLQHLALNQGVQKKARLWSKAGQQVLRELPLRPWAARRREDLLGLLQVLDQQIAPLDAAVADAVQQDDQARLLMSQSGVGPITALAFVLTIGDVSRFRRSKQVASYLGLIPREHSSGGHQRLGAISKQGNRFLRMLLVEAAQQAVRYAPEFRREYQHRCHSKPKAVAKVAAARKLAVRLYWMLRTQTARPESVRIESSPRVPLVGAS

SEQ ID NO: 349378 - protein, 413 aa, unidentified
MQFDWEEGMQAVLERCCGLDVHKKSVVACVITPAGRETRSFGTMTEELWDLADWLEACGVTYVAMEATGVFWKPIYNVLEERALQLMVVNARHMKAVPGRKTDVKDAEWIADLLQHGLVRPSYIPGRAERELRELVRYRKALIRERSAEANRVQKVLEGANIKLGSVASEVLGKSGRAMVHALAGGVSDPQSLAALALGKLQEKRTELERALVGAVGAHQRLVLRTQLRHITYLDQEIVQLSEEIAERQRPFTEALGRLQTIPGVGRRTAEVILAEIGTDMTRFPTAGHLASWAGVCPGQHESAGKQRSGRTRHGDPWLREALVEAAHAAARARRTYLAAQYRRIAARRGSRRAAVAVAHTILTITYHLLSRQSDYEDLGANYFDDRDRTATIHRAVARIQRLGYEVTLTPAA

SEQ ID NO: 349379 - protein, 426 aa, unidentified
MDRTGFSSTRATTPLVISCDVGMESIHIVRPALGESAFPRVYAVENYTEPLRRELLALRDAARSAGRNQVQLVLEPTGVYDRLLVQIARESGFDVKFVNGEDVAKMRQVIFGDFGKTDQRDPRAIDAVAAHGRTIVVRNLPAVFRLMRGWGKIYQDAEDEIIEAKGRIHRCLKLLLPDFAFSTDFLYSASGDAIMRCYGWNPHRIVRDSPSRIYERLRKHSRIMRRSVERLLAQARASVTSTPAGALGELAQQQLALAWEELQRHDERRAKARVKLEELYLEARTADFRLPEPVKGVVSLIGLARLFAEVGPLDDFASWRQVLRYGGLNLCERKSGRYVGQTKISRKGRPQLRRILNELVLPLVRRGSLYGDYYHRKTGVEKMAGTKAMTAVSRKLVKMIWGWTRSKDGFDAARVFTCRAAYARAA

SEQ ID NO: 349380 - protein, 407 aa, unidentified
MDIVHERCAGLDVHQKTVVACVRVAAGTVTHEVRTFGTTTRELLALSDWLAGWGVTHVAMESTGVFWKPVWHVLEEHFELVLANAMHIRNIPGRKSDVNDATWIADLLAHGLIRGSFVPPPPIQELRDLTRTRKQLVREVGRHTLRLQRILEDANVKLAAVITDILGVSSRAILEALIAGEDDPERLADLATRQLRASRSALVDALHGRPTAHHRFLLQLHLRQIDALRAAVRDLEARMEEALRPFRAHVERLKSVPGFSDVVIRVLLGEIGIDMGRFPTAGHVRSWGGFCPRLHESAGKRLSTRSRPGAPWLKTTLVQAAWAAVRRRDTYLHAQFVRLKSRRGPKKAILAVAASMLTAAYYILRDDVLYRDLGADYFIRRDKAKLTRRLVRRLEDLGLQVEIRPAA

SEQ ID NO: 349381 - protein, 348 aa, unidentified
MLTIGIDPHKHTHSGVAVDPLGVQIAQRTVTARREGFGQLLEWARKLDSERVWVLEDVRHVSGSLERFLIDRGETVVRLPPRLMANARRGVRERGKSDPIDALAIARAALREGIDTLPTARLAGTELEIRLLALHRERLIDTRTRLINELRWQLHDLWPDWEIPKRVLVHPAWQTKIARRLGRAETGVRVQIARDMTGRIRELTRTIAQLYEQLASLVKKAAPPLLAERGLGVLIAAKLIGEIAGIDRFTSDAQLARISGCAPIPVSSGRTDRHRLDPGGNRQLNHAFHMLALCKLLHDPRTAVYMAKQRKNGKTNREAIRSLKRHLVRRVYYLLHDPDRVPTTICLT

SEQ ID NO: 349382 - protein, 394 aa, unidentified
MAFKIFRKNCCGLDVHKTWIYACMGITDTNGRTEYKQARFSSFTKGLQKLADWLAKYDCNDVCMESTGKFWIPVFNILEKTCWVTLAYPKYTKPQKGNKTDHKDAKWICDLYMCDMVNPSFIPPPDIRQLRDLMRYRSKLTNIMTSEKNRALNCLTVSNLKLDDVFSDVFGKSSRSVIRYILEHPGETFQVAPFIDRRCKHPVEEIQAVIDGTISHQQAVKLRECLQHLDELEVHKTNVEKEILCLVQQYPYQLELLQTVLGFSGNIMTAIALISEIGADMSVFPSAKHLVSWAGCCPRNDQSSKKVKSTRISRAGVYLKPLLVQVAIQPFTANADKLSAAGALEIRCQICDGRFLSMWAALFIFLGCPLPPCPKNLHVHNGRIVILASVAWIF

SEQ ID NO: 349383 - protein, 397 aa, unidentified
MYIVGIDIAKRKHEAAVIDGDGAVIIKPFSFTNNCSGYNRLLAMLAKAKLPLDEVSFAMEATGHYWLALFIRLQKEGFRVQVINPVQTNSIRSFYIRQAKTDPRDALLIAEVIRFGHFSESTLHPENIYELRELCRGRHAIVSMQADVKRKVVALLDQVFPEYETAFTNLFGDTSMAILQTCPTPKELSEMPLEELCHLIEVSSHKRFRMAKAQELQVLARNSFGFAMAGDVFSTMIRLYAKHLVFLKQQVREMDRKIAEIMETLDTPITTITGIGPTLGAYILSEIGDISRFSSAAKLAAYAGIDPTMRQSGEYNGVRNRMSKRGSPYLRHAIWLAASSAVLHDPALKLYFQKKRDEGKPYMASVGHACRKMVSIIYAVMRDNKAYTPCIPNEISA

SEQ ID NO: 349384 - protein, 326 aa, unidentified
MTLSHLTDNTFVGIDVGGAGLDVAWHRGDSAHYANRSDAIAALVERLRTGPEVTRIVLEPTGGYEKALVKALRQAQLPVEVIHTTRFNAYRALVGVKAKSDTSDAKLLASYAAAPDEVRGRKAGHVELPEDAVREELSELASRRDQLKHMIHAETCRLGTVRNDELRQMIITHLATLRAEDKQVHRMMLELVRQRDDLRRDQRLLKTIKGIGVKSALVLLASVPELGRIDNKAAAALIGVAPFVRKSGTMNAPARIHGGRAPVRSILYMAAVTASKHNPLLSPFYDRLIAKGKPPKVALIAVLRRLVVFANAVLRSGQPWKGASAT

SEQ ID NO: 349385 - protein, 435 aa, unidentified
MDEVTDEPLYRDRVCGIDIGKAGMVATIRVPSDSNPARRAAETRSFGTTRREVLALADWLRCWQVPAVVMEASGDYWKGPFYRLEAEGFDCVLADTRRVRHLPGRPKNDPSDSRWLAACFERGAITSCFVATPEFRVIRLHTRYRRDLTEERTREKNRAEKLLESAAIKLSSVVTDLHGVTGRDIMNHLIAGQRDPKVLAQLARARARRKISELEAALEGAEFFTGEHAALLAAMLGRIDRVNAEITRLSEVIETLLEPYEEQLAQAESMPGWGRRSAQDALAETGTDMSRFPDGAHLASWAGRTPLDNSSGKRQGKAKAKKGNRYLTGLLGETAVAAGKTRTREGARYRHIARRRGKAKALVAVGNTQLNVYHALLSHPGTRYRDLGPDYYERQASVRRQIAHHVGKLGALGFEVTLCRIPEPEPSSPASIPAA

SEQ ID NO: 349386 - protein, 408 aa, unidentified
MNTLYVGIDVSSKSNVVYLMLPNGDKHSNFSVTNSHEGSTQLVKRILSALTSHSLDTVLIGLEATSVYGDNLVYFLREDATLAPFNRKIHVLNPKQVKKFHDAYNDLPKNDYVDSFVIADCLRFGRINKEVYMGDYRYKALQNLTRARFFAVQNLVKEKQRFMNVLFKKYSTMTQEKVFSDTFSTTALAVYDEFESAEALANMDLHELTDFIIEKGKNRFPDPDAVAKAIQKAARSSYRLPKTVNDSVNQVLSISITSMKALESQIKEFDKAIKAQMELLPNVLISIPGIGPVYSAGIMAEIGDINRFNSQAALAKYAGLAWKQHQSGGFESEVTRLIPSGNRFLKYYLCEAAFSLVRCDKEYSDFYRLKYKEVNRCQHKRALALTARKFVRLVFRLLKDNRLYCPAK

SEQ ID NO: 349387 - protein, 383 aa, unidentified
MIFSNTQAGFLTFKAWIEEIQEKNGKTAVIPGMEPTGHYWFALGKFLQDNGMKPVHVNPHHVKKSKELDDNNPNKNDRKDPKTIAALVNEGRFSYPYIPTGIYAEMRSLSNLRFQTQEEVTRIKNRIARWFAIYFPEYKDVYRDLKAVSGRMILKAAPLPEDIGKLGVEGVNQIWRDAKLRGAGMKRAKTLVSAAEHSVGSKEAPEAARMELKNLLDDMDVYTSRLEELVQKIEGKLKEIPYIDKLLEIKGIGMVTVSGFIAEVGDIRRFDNPKQLQKLAGYAIVANDSGKHNGESRISYRGRKRLRYVLYEAAISLVGKNAEFREIHEYYRTRKENPLKKMQSVVAVACKVIRVFYTILTKGVDYDAARLLGDIKHPQMQTA

SEQ ID NO: 349388 - protein, 512 aa, unidentified
MSRSKRKTTPVRPPQQPLQPTPAAPGDNAPPEHPHPAPGPAAVDLRRAARVAERLRAEAEACARLAAQPVRHEHAAGIDVGDTSHWVCVEATPDGSDPVREFPAHTPGLRQLVAWLQQCAVTTIALEATGVYGHVLYLTLLEAGFAVLTTPPQFARQIKGRPKTDKRDCQWIQRLHKLGLLPSIFQPNEATHALRDYVRQRANLVRLSGQHIQRLQKALESMNLKLTGVLGDITGVTGLKVLRAIVAGQRDPAQLAKLRDRRCQHSAAELAQALDGRYRPEYLSELRHCLRLWDAYQAEIAALDAEIDSHLHTMRQQAELPPLPAKPRVRGRKPHDPRFDVRTALYYATGVDLTAIEGIDVLHALTLVSELGSDFTKWPTVKHFTCWLGLCPNWQKTGGKVKSSRVRRGKNRAALALRLAAWSLMRSKSYLGGYLRRQRARLGAPKAITATAHKLARIVYHLVRFGAAYVQQTEEAYAAQVRERLEKQLHRRARELGYTLTKVEAPAPAAVE

SEQ ID NO: 349389 - protein, 316 aa, unidentified
MTEALRYAGIDVAKDWLDIAIYGVGQPWRVTSDEQGVQDLIRALQEQGVAVVVVEATGGLEIPLAVALDVAGIPVALVNPRQVRDFARSLGKLAKTDRLDAQVLAHFGAATRPVPRPLPDEQARELAALVARRRQVLQMHAAELQRRQRALLVVRHRIDRVVAVLEQELRDLDTELRDRLRASPMWREQEDLLQSVPGVGPALTFSLLANLPELGTLSSKQVAALVGVAPMNRDSGHWRGKRVVWGGRANVRAALYMPTVVAVRWNPVLREFYQRLVAAGKPKKVALVASMRKLLVILNAMLKHRTPWQANHALTS

SEQ ID NO: 349390 - protein, 424 aa, unidentified
MNPTPKEQASSPTQTSISVFVGIDWADAKHDICLLLPGKEEARHAQIENTPDALHDWVLKLIEEFGARGNIYVATEKARGALLYTLMQYPQLTLFPLNSKATGKLREALRAGGAKNDRWDCRLQAELVKHFHHLLPVWRPDDVLTRKLAALCEGRRKAVNTRTRLAQEIKAQLKASFPFALQLLQDDCQSLLAADFLSKWPDLASLQCTGATTIRRFFYARNYRRMDRIELLLAKLKTTKPLTTEEAVIIPSALVLRTLAAQLRTLLPFLAQYDKVLRSTFDQHPDAELFRSVPGAGEAMAPRLLTAFGSDRARFENADALSTFSGIAPVTKSSGKSLSHHLRYACAKFLRQSFHEFAGASIPHCAWAKAFYESQRARNKAHHTAVRALAYKWIRILYACWKSRTPYNESRYLQSLKNRLAPIA

SEQ ID NO: 349391 - protein, 350 aa, unidentified
MLIIGCDYHPGFQQIALVDTQTGELGERRLAHREEAELFYRELKQQSLSVRVGMEASGHARWFERLLSELQFELWIGDAAEIRTKRVRKQKTDRQDAQLLLRLMVEDRFPRIWVADAENRDLRQLLWHRHRLVQMRTRLMNQLHVVALNEGLRRKKALWRPAGGNELASLKLAPWASRRRQDLLDLLDQLTPKIQELTRALEEEVEKRPVTRRLMTHPGVGPLTALAYELVIGTPERFHNGKQIASYVGLVPSEESSGDRRRLGHISKQGNSLLRFLLVEAAQVTVRSSAQWRSKFFHLAMRRGRKIAKVAMARKLAVHLYWMWRQGRDYGQFEKFGSHAGEPGNRHGVQ

SEQ ID NO: 349392 - protein, 399 aa, unidentified
MTRKNTLKTLPIDTEYRVVGLDLAKSDVSVAAIPIDDNTLSLVDRMNYADLLEWAEKISPTLFAMEPCNGFSLLCLQLESLGHEVKVISGATVSMWINTHLSGQKTDLNDAIALARLAISDAELTPIGHKTITEIRIQTVQAVRQQLITQRTKSLVSFKGLAQQWGIPCSAGHRNLKKLREAVEAKVDLISKPVAESLLSLLDAVKSLDYQIGQLDKTLQELVMSNQQGRLIQTVLGVGTQISARIITVVGNVNRFESPRALVAYVGLAPRNIITGHKNAPKKKSSNAPDLSHKGQGKISRRGDKLLRSLVIQGAACLYMQYCKNQLPQCQLKRWLKKQIDSGKPYGKIIVSLAAKLIRIVWAVLRYGEEFNIQKAGMSRSMWGDMAPKSPISEEVSAG

SEQ ID NO: 349393 - protein, 402 aa, unidentified
MNAVGIDVSKGKSMVAIMRPFGEIVSTPFEIKHTASDIHSLVELINSVEGESRIVMEHTGRYYEVLAHQLLEANLFVSAINPKLIKDFDNDSLRKVKSDKADAVKIARYALDKWQNLKQYNVMDELRNQLKTMNRQFGFYMKHKTAMKNNLIGILDQTYPGVNTYFDSPARSDGSQKWVDFASTYWHVDCVRKMSLNAFIDHYQNWCKRKKYNFSQSKAEEIYGKAKELVPVLPKDDITKLIIKQAVNQLNSASTTVESLRTLMNETASKLPEYPVVMAMKGVGTSLGSQLMAEIGDVSRFTHKGAITAFAGVDPGVNESGSYEQKSVPTSKRGSSDLRKTLFQVMDVLIKTHPQDDPVYQFLDKKRAQGKPYYVYMTAGANKFLRIYYGRVKEYLSSLPES

SEQ ID NO: 349394 - protein, 356 aa, unidentified
MTISTKYIGLDVHKESISIAVRNSVGKVLMDCVIETKASTILQFIDGLRGDLHVTFEEGTSAAWLYDLLKPHVTKLVVCDPRKNKSMREGNQNDKIGARRLAELLRLNHLNPVYHGEHGLRTLKELVRSYLTVTKDLARVMTRVKAIYRSWAIPCSGKQVYARCHRAEWLGKITEPGVHRRAEFYYQQLDALRVLRQEARRDLLAESKKHKAWKRLCQIPAIGPIRAAVLLGILQTPHRFRTKRQLWNYGGLAIEMHSSADHRSVDGELQRSRKNVLVRGLNRNCNHDLKNLFKGAAAVASSKPGPFEEFYAALVAKGIRPEMARLTLARKIATIVLIVWKKGVSFDPQYLKPQTV

SEQ ID NO: 349395 - protein, 343 aa, unidentified
MKVIIGIDPHKASHTAVAIGGDENELGSIKVRSTRRQVPQLLGWAEPFETRLWAIESAGGLGYLLAQQLVDAGENVVDVPATLASRVRVLASGRSNKNDPNDALSVAVAALRAPALRSVQAADHAEVLRLLAKRNLDIGNHRTRVVCRLHAALAALAPGGIAKELNASDADELLDRIQPATPVEQARHDLAVELLDDVRRLDAQLKESHRRIRVAVKASGTSLTELFGVGPIIACMLIGYTGDVRRFASRDQFAAYNGTAPIELSSGGRVVHRLSQRGNRHLNHAIHMAAISQIRQSHSEGRAYFDRKVAEGKTKKEALRSLKRQVSNAAYRQLLVDAQRARR

SEQ ID NO: 349396 - protein, 356 aa, unidentified
MNEGSCVGLDVHARSVVAGVIDVGSGELRSLRVPPGPEATVAWLKTLPAPVRVVYEAGPTGYGLARGCAEAGISCVVAAPSKIRPAADRVKTDRRDAERLARLLRLGEITPVRVPGPEEEAARDLVRAREDARGDLMRARHRLSKLLLRHGVVYEATAWTRAHDAWLRRNRFGGGPLAIVFDECYARMLDAKTRRDSLDAAIVELAASEPYVDVVERLVCLRGVSTLTAFALTVELGDWNRFRPESLGAFLGLTPSENSSGERRRQGGITKAGNSHARRLLIEAAWHQRSAPRLSVTLERRRTGKSLAVRAQADRSARRLHGRWDALEARGKPRLIVVVAVARELAGHCWALATME

SEQ ID NO: 349397 - protein, 362 aa, unidentified
MVQSTTIIAFDQHAATTIAAVLLPGHRTPALHPLTSEVRSLVRFVQRVQRQGPIRCCYEAGPCGFELQRALTAARIPCDIIAPALIPRRPGDRIKTDRRDAGHLAVLYRAGALTAIHVPSEQEEAARDLLRCREDIRADLLRARHRLSKFLLRHGRRFTATKKAWSKRHDAWLRQQAWPLPALDQTHRAYLRAVDEVLARLREVETELRALLELDPLRVRVRRLRCFRGIDDLTALTIAAELGDPRRFATAPSTMAFVGLVPSEHSSGSKRAQGGITKTGNAHLRRVLVESAWHYRHHPFVSATLRARQRGAPAAVIARAWTAQHRLHRRYQRLAARGKPKQQIVTAVARELTGFVWAALTQ

SEQ ID NO: 349398 - protein, 369 aa, unidentified
MRSYAAIDLHSNNGVLTVIDESDKVLRQRKLPNKLEAFLGELEPFRKSLQGVAVESTFNWYWLVDGLMAHGYHAMLVNTSAIQQYEGLKHSDDQYDAWWLAHMMRLGILPTGYIHPRGERAVRDLLRKRSRLVQQRTANILSVQNLEQRNRGTRISSNEVKRLTPAAVHELYDNDDLALAMTSTLHVIGALTEQIKTLEKAVLKKARLRPEFELIGTVWGIGEILSLVIMYEAGEMSRFASVGEFASYARCVDARRLSNGKKKADNNSKNGNRYLAWAFVEADTLRSGITLRPSAITTARLPGRTPSWRSKRWHTSSRAPRFTSYVGESPSSRTKYSFDSLVGAVSQHWGLEKPPGLIGGRTGQEQVAL

SEQ ID NO: 349399 - protein, 341 aa, unidentified
MKQFIRVGVDLAKNYFQVHALTSESGAAVSRKLTRSKMREFFSQIEPCRVGMEACGSAHYWARELKAMGHEALLMPPIYTKPYVKRGKNDAADAEAICEAVSRPRMRFVPVKSAEQQATLMLHTTRELLVKQRTMSVNALRSHLSEFGIIVAKGIGRVDELLELSEKDMTLPNAARAAVKVLAQTLEQVDKSLDDLEDEIANAHARSEMSRLLVEVPGIGKLIATAIVASMPDPSVFKSGRDFSAWLGLTPRQNSSGGKQTLGAITKKGNRYIRKLLVLAATSLLNVVGKRTGALRDWIVALLAKKPARLVTVALANKLARIVWAMMKTGEGFRTEIFAKA

SEQ ID NO: 349400 - protein, 405 aa, unidentified
MNAVGIDVSKGKSVIAALRPMGEVAIPPLEIPHSEVDLENLGYQIISLGEDTRVVMEATGRYHEPVAQALHEMGIFVSVLNPILIKQSGGGSVRKVKTDKADALKIAKYGLDNWIELQEYTPMDALRQQLKLFSRQYNLYMKTAVSLQNNLISLLDKTWPGANKIFTSPMRADGHQKWVDFVATFWHCHCVFRVSQQAFIERYRKWCKRKGYHFSEVKAEDVYIESAGHFPTLPKNSSTKLLISAAAAELTATSKNLATIRAEMIRLAKHLPEYETVKSMYGVGEITAAQLMAELGDVRRFSNRGSIVAFAGVDPAVNRSGSFERQSNASSKRGSPHLRKTLFQVVSTYLKHSPADEQVYQFIDKKRAEGKPYYVYMTAGANKFLRIYHARVKECFAELGEPVVD

SEQ ID NO: 349401 - protein, 343 aa, unidentified
MNYVGIDLHKKTIVLCAMDQDLRVRRRRTFACSDPEAIRAFFAALGAFRAVVEATASYEWLVALIEPLAERVVLAHPGKLRVIAESTKKTDRLDAQVLAEFLARGQIPEAFRPSNRQREHRALVRHRQYLKREVTALKNKMRRIAADSNADRKDLFTAAGWERLEAVGLRDADRFVLDQLHAQWQYLEGQLRALAGRLKAFAASAPAKEAEARAKLATIPGVGPVTVDVVVAELGDVTRFKSAKAACAYAGLVPAVRQSAGKGRDLRITKAGSPLLRWALVEAAWRVIRQSAAWRRVYEGVRKRAGGKRAVVAVARRLLVVMTAMLRAGTSYDFLKVGAPRPT

SEQ ID NO: 349402 - protein, 337 aa, unidentified
MIVMGLDQHRGQVTAEWIETDTGEVSRARVSPAHREPVRRFLGRFRGAELEVALEATTGWRFVVEELRAIGADVHLAEPAETAARRGNKKRAKSDRADARHLRELLMIARLPGSWIPPDHILDLRARVRLRHALSDQRGEWQQRIQAVLYHHGCPQRRELMTRDGRAWLAEQALPETAREQVTVAIAMVDALEVQLAPITKQLRAYARRQVGCRALMRHYGIGELTAVTILAELGDCRRFSSSRHAVRYSGLDITVHQSDQRRAPGHLSRQGPPALRWALFEAAQVARRTGSPDREYYRQAAERLGPNRACLSIARKLLKRSYHTLSELGEEALAPA

SEQ ID NO: 349403 - protein, 371 aa, unidentified
MTEYSEVFVGMDVSKSRIAVGLADGAAEARFLGEIEASEAAVTKLVRRLSAKHAKLTFCYEAGPTGYGLYRLIGDLGHECRVVAPSLIPRKPGDRVKTNRRDALNLARLLRAGELTAVWAPDERHEAMRDLVRARSAAAFDLRVKRQQAGAFLLRLGRVYPGKKSWSGAHRKWLASQAFAHLEQRIAFAEQVGAMDEAQARVARLEKAIEEAVPDWSLAPMVTALMAMRGIDLVAATAILAEVGDLGRFQSPRELMAWLGLVPSEASTGDRVRRFGITKAGNGRARKALIESAWCYRFPARIGQAKLARVEAAPPAARRIAWKAQTRLTARYRALMRRGKLKAVAVTAVARELAGFVWAIHRALETEPTVA

SEQ ID NO: 349404 - protein, 423 aa, unidentified
MPYRIAGIDVHKKTLAVVVADVEVHEEYQFERRWYGSNPEQLQKLAEWLIEKQVEEAVMESTAQYWKPAWGALERYWKPSCQKREGAGKMSGTLHLAQALSNRGRRGRKKDFRDAERLVKRLISQELVLSFVPDSEQRLWRTLTRTKYQRTRDKVRLQNQLEALLEEGHIKLSSLVSDLLGLSARRMLHALAEGETDPAALAALADQRLRATPAQLRDALGACTGLNPVYRRLVKMALKDLQLIEEQIGQLDQEMANLLREHQDAVERLAEVPGLGVDSAQQIIAEVGAKAATFASPKNLVSWVGACPGEEESDRVNRSKRSPKGNRQMRRILNQAANAAVKHKGSIFEIVYRRLVLRLGHNKTIGAIAHRLCQLIWIILHKGVRYEERGPAVSEKSKRLRTSRMIRTLRTLGYRVEPPLIPA

SEQ ID NO: 349405 - protein, 316 aa, unidentified
MVPSPLFVGIDVAKATLDIAVRPTAETWSASNDATGIDALVLRLGALAPTLIVLEATGGYQGPLVAALVAAALPVVVVNPRHIRAFAQAVGILAKTDRIDARVIAHFAEAVKPAPRPLPDAETQELRALLVRRRQLVEMVSAERARLDTAPRSIQDAIQAHIAWLTTQIAGLDDALTRASQTHPVWQAKDDVLQSIPGVGPVLARTMLGQVPELGTLGPKPLAALIGVAPFNRDSGTLRGRRTVYGGRAEVRAVLYMGALVATRHNPVIKTFYERLLAAGKAKKVALTACMHKLLTIMNAMVRDLKPWQPQEVPSA

SEQ ID NO: 349406 - protein, 354 aa, unidentified
MTNDKYVGMDVHAASTVAEIQNYNGKVVHRSMMETNAEGIKDFLRGISGTVHVTFEEGTHARWLYDAVKPVVAEVIVCNPRHNKLISSGNKSDKIDVHKLTDLLRMGGLKGVYHGDERTRRLKEATRSYSALARDCNRVMNRIKAIYRGRGIKCKGTAVYRAQLREEWVTKVVNTSAGNRLELLYQELDFLTGLRKEARAHMVKEVRRQEAFKILEQVPALGPIRIAQIIATVSSPFRFRTKRQFWPYCGLAVVTVSSSDYEVVGGKFQRSKKPIGTRGLNRNYNRDLKYVFKSAASYARTREPFKAYYDGLIANKMKPELARVTLARKIAAVTLAVWKKGEDFNAEKIGRGSK

SEQ ID NO: 349407 - protein, 380 aa, unidentified
MQPTQGNDITANEVTLCVAFELSRASWKLAFHDGKRDTPAIVTVRAETPQARLDEARAAIEAIGRKWGLCMDTPVAMVYEAGQDGFWIGRALCKQGMNVKVIDPASLPVQRHARRAKTDRLDAIRLVNSLRAWLRGERDVMHVVRVPDEQAEAQRHLVRERGELQKEITQHQDRMRKLLRTVGCWDAIGTDFALRLAQGQVRCHNGRALPAELAQRLQRECERLALAQQQLQALEETLVQQLPAPAQQKIAQLSRLKGVGQVGAMRLVLELFWRRFDNRRQVGACVGLVPQPYDSGESRVDQGISKQGNRRVRSLLIEMAWMWLRYQPGSALAAWFAQRTQGQNKRGKRVAIVAVARRLVIDLWKYLEHGLVPQGAAMKG

SEQ ID NO: 349408 - protein, 418 aa, unidentified
MTNPIWHEQTYFAGLDWARSHHDLVVLDQHGTVQDKLHFAHTAEGWQQLRALIARHPQLPVAVETSHGCVVEQLLACGARVYPVNPKAAQRYRERHAPSGVKDDERDAWSLADALRLDGAAWRELAAQDPLVHELRLLCRDEIALIEQRTAFINQLQQCLHEYYPAALQAFEDWTCPGTWAFVLAFPTPQALAAAKRRKWQNFLHAHSLWRSATAEARLAIFARATAFCGTEPTTAAKSLLAVTLARLLQALQRQLEAYRERIAAAFARHPDHDLFGSLPGAGEKLAPRLLAELGANRAEFAAAESLQCFGGTAPLTIKTGATCYQRVRHACNDTLRATVHLWADHSRAKCTWAQAYYQKHRADGQSHACALRCLGQRWLNILWKMWQSHTPYDEALHTRHQIQHGSWVLALKPAASR

SEQ ID NO: 349409 - protein, 320 aa, unidentified
MQTPSAVLNIGADVGKDEIVVACAEESFSPRKITNRRAEIMAWLKTLPPGSRLGMESTGSYHELLAETAHQLDFVVYVLNPKDTRHYAKAMGLRGKTDRVDARLIARLIGREHEQLHPWIMPTAEQRQIERMIKRRAKLSAIRASLSQSLKGLAGFAAELKALRRRLDKLIARIDARIKALIEANADRKQDYARLRKIPGVGSVVGGSLVNTLERVPFKKGDAFVAFTGLDPRPDESGHHIGRRRLSKRGPAELRRLLYLGAMAAAKTKTWKPLYERQRAKGLSTTEALVILARHIARTAWSIYTHKTDFDPQRLTPGLT

SEQ ID NO: 349410 - protein, 406 aa, unidentified
MKPCFAGLDWATGTHAVCVIDQRGAVEARFEIAHNAAGLQELLARLHKLVPDPAQLPIAIERPSGLLVDTLVEAGYPVIPIHPNIVKATRPRYRCHGGKSDASDAYLLADLLRTDGARFAPLKPQSDAIRALRALVRGRDDLVATRVQLANQLRSLLESFWPGAASIFAEIDSPIALAFVQRYPTPQAAAHVGEKRLGAFLAQHQYCGRRHPAELLARLRAAPLHRAAELELDAKGVLAQALATTLQPVVEQIRQLTSRIEHAVATLPDGPLVMSLPRAGRVCAAQILAELGDVRERFATDAQLAAEAGVAPVTYQSGKNRSVTFRWACNHRLRRAITCLADNSRHASHWAAVVYARARSRGCDHPHAIRILARAWTRVLWRVWIDRCAYDPARHRAALQLTTTGG

SEQ ID NO: 349411 - protein, 345 aa, unidentified
MTNNIQFSSVCGIDIAKSVMQVYKVTSDGVVSNKAVKRADFLNEFRNIPPALIGMEACGGSQHWARELQSLGHTVHLMPPKLVKPYVTGLKNDKNDARGIYTALVMGVREVPVKSAAIRDLALLQTMRAKRQREKVAKINHIRGILTEYGLVMGKSLNAFLAKARPLIVELKERADVSPYIVSELLALFQEVKEAMEKIKELETNIDSIAKTLKQYDLFRSAPGVGSITAATMLILLCNPAVFKNGREFAAYIGLAPKSTGSGGKNVVTHIPKKYECNNEVRALLVQCAHAICRGKHKSDWVSSILARKPKKVAVIAVANKLARQLWIMAKKGEKFERRLVLAAV

SEQ ID NO: 349412 - protein, 381 aa, unidentified
MSRSLIALDQDSTIIAVVEMSQSSWLVGGVLPGIERQPRKKLEPSAERLLGLLHSWRDEAVRAGKKITRIALAFEAGRDGFWLARWLSARGVEAHVIHPSSVAVSREHRRAKTDRLDTELLKRGFLGWLRGERGHCSMARVPTIAEEDAKRPNRERECLVGERTRIVNRTKATLARLGVRNFKPTLRKAAERLATVHTPEGMPLPPNVLAELQRDMARLGFVVSQIRQIEEARQKRLEQETETGPHAMVRLIARVVGVGIETADMLVHEVLSRPMRDRKAVARYAGLTGSPDESGAKRREQGLARAGNARVRRGMIQLAWRFLLFQKESALALWYRARTADSRLGTRKTMIVALARKLLIALWRLVTTGETMEGVILRPAG

SEQ ID NO: 349413 - protein, 316 aa, unidentified
MEEPLSTEYFVGIDVSKDTLDVCVYPTQDTFRVPNSPDGMDELIKRLKPIDPRLIVFEATGGYETLAVSSLAAAGLPVVVVNARQIRDFAKSIGQLAKTDGIDAAVIARFASAVRPELRPLKDSPCQELTGLVTRRRQIVDMIVAETNRLRAATRRNRRDIQTHIRWLQKRLEQIDDEIKRDIQNGPLWRTTDQILQSTPGVGPTTSAMLISCVPELGPLNRKKIACLIGVAPLNRDSGRFKGRRMIWGGRAQVRSVLYMSTLSAIRSNPIIRQFYQRLREAGKCFKVALVACMRKLLIILNAMVRNQTKWRYCPK

SEQ ID NO: 349414 - protein, 401 aa, unidentified
MNEVGIDVSKGKSMVCVMRPFGEVVLEPFEVLHTAQNLNDLAGKLKALDGETRVVLEAIGNYHKAVAFVLHDAGLFVSVVNPVLIHDYDNNSLRRVKTDKKDAVKIANYTLDKWTRLRQYLPEDDTRLALKNCYRQYQQAVAIRTMLKNNLISSLDLTFPDANKLFSSPAKNNGCEKWVDFIGDFWHSECVSSLSPDAFSKKYLKWCQKHGYNFTRSKSDEIFACAVNAASLPKSPTSKLLIQQQVAQLKAVSQSVAAFQQEMLRLSQQLPEFDTVMEMYGVGPSLGPQLMAEIGDVRRFSSKKSLIAFAGIEPQPNDSGKVVGNDKGISKVGSAVLRRTLFLIMTVILQTQPQDEPVFQFMNKKRSEGKPYKVYMMASANKFLRIYYARVKSVMDSECSQ

SEQ ID NO: 349415 - protein, 388 aa, unidentified
MIYVGIDIAKLNHFAAAVSSDGEILIEPFKFTNDYDGFYLLLSKLAPLDQNSIIIGLESTAHYGDNLVRFLISKDFKVCVLNPIQTSFMRKNNVRKTKTDKVDTFVIAKTLMMQDSLRFLTLEDLDYLELKELGRFRQKLVKQRTRLKIQLTSYVDQVFPELQYFFKSGLHQHSVYALLKEAPTPNAIASMHMTHLAHILEVASHGHFGKDKARDLRVLAQKSVGVNDSSLSIQITHTIEQIELLDSQLFHTELEMANLVTCLHSVIMTIPGIGFINGGMILGEIGDIHRFSEPKKLLAFAGLDPSVHQSGNFQAQRTRMSKRGSRVLRYALINAAHNVVKNNATFKAYYDAKRAEGRTHYNALGHCAGKLVRVIWKMLTDEVEFNLE

SEQ ID NO: 349416 - protein, 342 aa, unidentified
MGEVSIIGVDLAKNVFQLHGAAADGSVVFRKKLSRPQFARFMAEHVPCEVAMEACPSAHHWARELTGHGHRVRLIAPHYVKPFLKRQKNDAADAEAIAEAATRPTMRFVEPKTTEQQARAVAFRAREQLVKQRTEAINALRAYLYEFGHVAPEGIGYVPRLAQVVADPGSDLPDLAREICRIAVEQVELLTARLAAVTAIIAAASKAAAMPRQMQTMPGIGPIGALALETFAPPMNQFRRGRDFAAWLGLVPRQHSSGGKQRLGKTSKMGQRDIRRLLVTGAMSVIRWALRKGAPRNPWLERLLERKPPMVAAFALANKMARGIWAMLTRGEDYRDPMPVGA

SEQ ID NO: 349417 - protein, 340 aa, unidentified
METSIKFYLGIDVSKSWFDVSVLKVVNHEKQPMLTEQFINTKEGIGSFQKWLEQQGVPFDENTLIVIENTGVYHRPVWEFCSKHNLPLHIGNAAHIKWSLGITRGKNDQIDSKRLCNYCYKQADELKATAALNPVFMNLKDLMTSRTRLVAQLQATKSYLKELLCTNDKALLKTLEKAHKAAIDGIEKSIAQMEKAINDLIEADEKINRNYELIKSIPGIGSITAIYIICCTNNFANKPSGKQLASYAGVVPFEHSSGSSVRGRNKVHKMANKELKRLIHMCAVSSIRYSSEMKAYYERKKAEGKPGLSVVNAIKNKLLLRVVAVVNKQEKYVENYQKAA

SEQ ID NO: 349418 - protein, 355 aa, unidentified
MNQEKYIGMDVHAATISVAVKNAEGKLLMECVLETKAATILEFIQGLRGTLALTFEEGTLAAWLHDLLKPHVSRLVVCDPRKNARMRDGNQNDRVDARNLAELLRTNQVKAVYHGKHGTRALKELGRSYLTLTKDSTRVMNRIKSVYRSWAIPCAGSSVYSRRHRAEWLAKLVEPGVRIRAEHLYQQLDSLEPVRQAARRELLRESRKHAAVKLLRQIPAIGPIRSALLVALLQTPHRFRTKRQLWAYSGFAVQTYDSGEYRMVRGKLQRNRERITVRGLNRNHNHDLKNLLKGAAISAIEPPGPLQDFYAALVEKGMRPSMARLTLARKIAAITLTMWKKGVSFDPQQLQRQAA

SEQ ID NO: 349419 - protein, 341 aa, unidentified
MQISTIGLDIAKNVFQVHGIDAAEKVVVRKQLRRSQVMAFLEALSSCLIGMEACATAHYWARELTKLGHEVRLMPAKDVKAYVKRNKNDAADAEAICEAVRRPTMRFVRVKSAEQQGQLMQHRTRDLLMRQRTQVINALRAHMAELGIVAAQGREGIKALLAIIADDGDERLPVDARASLIVLAAQLQALQTLIGSMEKRIIALHRSSEASKRLATTPGIGILGASAITTIVTDPKAFRSGRDFAAWVGLVPRQDSTGGKQKLGPISKQGDRYLRRILVVGAHAVLRRARQHPEKYPWLTQLLARRPFKVVAVALANKMARIAWALLAKGESYRVPRLAAA

SEQ ID NO: 349420 - protein, 411 aa, unidentified
MHNRQNYLYVGVDLHKEHHTAVIINCWQEKLGEIQFDNKPSAFSKFLLEVETYVCDGITVVFGLEDVGGYGRALAKYLVDHERVVKEVNPALSFLERKSQVMIQKNDSWDAECVARILVNKFNQLPDAKPNDLFWSIQQLVSRRNALVKAQSALKNQLHIQLNHHYPSYKKFFSELDGKTALAFWQQYPSPSCLEGTNIKQLTTFLLDVSNNTCSLKKASDILKLVKEDGQTMKEYQETRDFLVRSIVRDIEFKKKEMKYIERELKRLVILLDNQLETMPGIELVTASALIAEIGDVRRFPNANKLARFAGIAPVYFGSGGKGKTHKSKQGNRALHALFYNLAVQQVQVAKGSKLPRNPVFHAYYQKKLKEGKTKGQALVCIMRRLVNIVYGMMKYKTAYELPVVEEKEVV

SEQ ID NO: 349421 - protein, 346 aa, unidentified
MTIVEDRRVITGGVDTHADVHVAAALDPIGGLVGVREFPATATGYASLLRWLAGFGDLALVGVEGTGSYGAGLARHLAAAGVRVVEVDRADRQDRHRQGKSDPLDAVSAARAAQSGRAAGVPKGRDGAVEAIRTLMVAKRSARNERTQAINQARALIVTGPDDLRARLARHTPAALAAELAALRPRRGDLPGYATRIALRELGRRVQFLDAQLERLDELIIPLVTNRAPGLLSLYGVGPDTAALLLTAAGDHPERLRSEAAWAHLCGVAPIPASSGKVSRHRLNRGGNREANHALWRIVITRMSSHPDTRAYVERRSKEGLSKKEIIRCLKRYVAREVYRHLRADG

SEQ ID NO: 349422 - protein, 365 aa, unidentified
MLLGSELIFPTPYMETQKMASVLNHRWCVGVDLHKDTLTACVFCGCCGEVSFQKLPCKCRKQVAAYFAALPRPHTVAIESVGFYRWLWELLEPIVEKLVLADATQARALAGRRLKTDREDSLNIAQLLAAGRLPTSYAPPLDVQILRDLTRHRNGFSRQHARILHRVKSIMNANNRPGPARLRSDGLIRYLKGQGEKLPARHVEMLWQCVDALALTERQMQQAERTIGELVRRDSFREVIEILVSFPGVAELTAATVLAEIGDFGRFPDAKAIGRYAGLNPRVFASGGKQRIGHIAKTGSADLRWILQQAAWTAIRTDEYVRRVFLRIAKRSGRKAAAVAIARKLLTWMWSAVTKGEVYRSRTAA

SEQ ID NO: 349423 - protein, 370 aa, unidentified
MTFFMGVDLHKTQFHVHVRTEEESESLDEIKVYPTTEAGYADFLKRISLYRETGAVVKLAVESTGNTKFFKNQMEKAGAEVTVVNTVKFKVINESVTKTDKHDAATLSEFLKDYKLPECYLCSKETENMRRLIKSRERLVRAQVGQKNEIHALLVSMGMQDETRSLQSKKGRQKVLDALGSNNDYVLEAQSVKLMLEIIDTFAEKIKIIEKQLEELTKDDEMVRRLMTIRGCGKITAWIIRAYTEDVTRFANSKKYAAFCGLVPKVKDSNDTVHHGSITRHGPVELRTAFVQLFMGMRRCKDTRSWRMMQRYEYMKKNKGSGKSIISGARKTAEIVWALLSYKTDFDAEKMKGTYKPLSLAEQVLSAVNI

SEQ ID NO: 349424 - protein, 437 aa, unidentified
MYLPDWKWIPIRKELLLMSNKVIFNLDDLFISVGIDVGADFSWMSIALPNQQFVGKPYKILHSSIDSLTTAVSKIKEAEELYSLESRIFLESTGIYHYPLFCYLRDKGFNCSVINPIITKNSTNINIRKVHNDRFDSKKAALVGLKPDLKVSLMPSDLALNCRNLCREYYDLMDNRSAYVNKLQGELRMAFPQYLGIFSKVTINTSLTLLETYTSPSAFLEADKQEIIDIIKSTARFGLTYAQNKYNAIIQAATDANQFGYIIDSNIKRIRLYISFIRKYDEEINNILESLHELVDANEDADFVKQIHLIETFKGAGFLSAVSIMGEIGDFSAFSKPKQLFAYFGLDPAVKQSGKFEGTKVQMSKRGSAIARRVIHTLTLQSISISRNGEAKNPVLREYYLKKCDSKPKLVAMGAVSHKVCNMIFAILRDNKPSPAE

SEQ ID NO: 349425 - protein, 379 aa, unidentified
MGDCSEVFVGIDTSKLRNAVAIADGGRDGEVRFLGEIENSEAATAKLVRKLASQYQRLTFCYEAGPTGYGLYRQITELGHECIVAAPSLIPKRPGDRVKTNRRDAVGLAKLLRAGELTAVWVADRHHEAMRDLTRARETAMLDLRRKRQQITGLLLRQGRHYQEGNQERRKPWTKIHKAWLMRQKFEHPERRLVFEEMMLAMREAEERLARLEQAIRVAVADWSLAEVCTGLMAMRGIDLISAAGFLAEMGDLSRFATPSELMANLGMVPSEKSTGETIKRGPITKAGNRRARRLLVECAWAYRHPPRVGVTKQAKVAAAPRAVREIAWKAQHRLYGRYRALIRRGKLKNVATTAVARELAGFIWAVNREITVAGAAAR

SEQ ID NO: 349426 - protein, 344 aa, unidentified
MDYFVGLDVSLRSVAVCVIDGDGRTVLERTVACEIDDISGCLASLTASEVRIGFEAGAMSQFLYFGLQGAGFDVVCMEARQVNAALSAMRNKTDKTDARGIANVLRSGWFNPVHMKSREAHAVRALLSSRKAVQRKCIDLANEIRGLFRIFGLRLPSRINQASFDQQVRPIIEVDPDLSHALLPLLDARAVLFTAYRELDRRVKRAASHDETCLRFMAIPGVGPIAALTFKAAVDDPKRFTSSRTVAAHFGLTPRRYQSGEMDNPGRISKAGDADVRSALYAAANAMMMRSVASSEIKSWGLRLMRRKGRRRAVVAVARKLAVIMHRMWADNTEFRQRPLEGAA

SEQ ID NO: 349427 - protein, 429 aa, unidentified
MNSTQNKKIEQVKETTMIVGIDVGSEKHYFRAFNWRGIELTRKPVPFSNSMEGFNSFYNTIVELMKKSELEEALVGIEPTGHYWFDLGQFMGEKNIKFVMVNPHHVHKTKELDDNSPSKNDRKDPRVIAGLVKDGRYFYSYMPTGVYAELRNASNRRFVLVEELTRVKNRLQKWIAVYFPEYKGIYTHIDAKGGLLVLKQAPTPEEIVKLGVEGIIKIWKDAKLRGNGHKKAMQILNAAMRSIGLKIGLREARMEIQDLIEDYELQTKRLERINDLIKELCQQIKYANKLLEIKGIGITTVGGFIAEVGDITRFDNTKELQKLAGLELVADSSGKHNGKTKISKRGRKRLRYVLFEAAISVVGKNEEFKEIHRYYITREKNPLKKMQSLIAVACKLIRVFHVILTKGVSYDASKMLEDIRHPGVQLKAA

SEQ ID NO: 349428 - protein, 384 aa, unidentified
MTKHNILFIGLDTHKEFIEVAYIEDNRGAQPIHFGRISSAKVAIKKLIRQFESKYPNATLHFVYEAGPCGYWIYRLIPSFGHCCYVVAPSLIPKKPGERVKTDKRDALKLAKLLKSEDLTPIYVPEPEDEAIRDLSRAREVAMKDLKDAKYQLKALLLRNNINYAGTANWSLKHLRWLTELVLPHPAQQIVLQEFIQTINERIARLERLDNELSHHVYQWRYYPLVKAIQAMRGVRLLVAAGVVAELGDLTRFDHPRKLMSYLGLVPSEHSSGGKRHIGAITKCGNGRARRLLVEGAHSYRHAANISTELQKRQEGLPKQIVDIAWKAQLRLCKRYKKLINKGKHYNLVVTAIAREMIAYIWAIAKQIVLSPINPKLRLSRVPA

SEQ ID NO: 349429 - protein, 393 aa, unidentified
MIARFFGIDTHKKYVMVAAVNIDQEIILKPTRVSMAKLPEWAAEQLTADDQVVLEVSGNTWSMVDLLSQHAGQVVAANPYKTKLIAEAQIKNDKVDATALAKLLAARFIPEVWVPDAEVREQRSLATHRATLQKQSTQVKNRLHHVLHRHNLHCPEKSLFSPAGREWLLTQSLPQTDQLQIRHLLRQLDGLQEDLDETDRLMAQQASQDPRVARLMQISGISYTIAYTALAIIGDIHRFPAPDKLPAYAGLVPRQHQSGDSDFHGSITKAGSPLLRWLMVEAARAAIRWDPHWRKIYNRIARRRGSSIAVVAVARRLLVLVWHLLSKNDIYYYLQPQTFVNKLQNWAYRIGRAHLPAASTRDFVHQQLSNLGLNHLAQSLTRNQNGKLCVQPA

SEQ ID NO: 349430 - protein, 362 aa, unidentified
MNEGSTEQIEMTAGLDLGDKYSYLYVLEADSGEFVEEGRLRTTPEDLRRRFDSEQKLKVAIEVGTHSTWVSRLLEGCGHEVLVANSRKIRLIYGDKRKTDKLDAQKLARLARADPELLYPIEHRGEESQAHLALIHSRDALVRSRTQLINHVRGTVKSFGARLPKCSAESFHRKVADALPSELAEALEDVVATIGSLTERIRDYERRIERVCEQSYPQETGLLRQVAGVGALTSLTFVLTLEDPDRFEKSRTVGAYLGLVPGKDQSGDRDPGKRISGEGDEMLRRLLVGSAHYILGPFGPDTDLRRHGEKIAGRGGKNAKKRAVVAVARKLSVLLHRLWITGEVYEPLRNARLAGTPGEEVA

SEQ ID NO: 349431 - protein, 450 aa, unidentified
MSDTWPQGPDEMPQSTSAPEFAAFASIDWAARKHVWKMARRDAPSEQGEFENTPEAVQAWATGLFHRFGGRPIAVCLEQSRGALVYMLTRYPHLVLFPVHPTTAARYRETFCPSGAKGDPGDTASLLDLLLRHRERLRPLQLDTAPTRLLQLLTQQRRELVDEKTRQKLRLIASLKQYFPQLLQWFDDVDSPLVGALLQRWPSLQQLHRTNPSQLRDFFHEHNCRGEERIQQRIQAIYAATPATEDAVVLEGEGSKACDWVAVVATLRERIAKLDQRIAELVATHPDSVLFASLPGAGPVLLPRLLVAFGTRRDRYDSAYQMQCLSGIAPVTESSGNRQCVQFRFHCPKFLRQTFHEFAFCSLQKSVWAQAYYKLQRDKKKSHQAAVRALAYKWIRIIYRCWKDGKLYDEQTHLENLQKRNSPLRGGIASATGKRWNPVGGLRKISENFS

SEQ ID NO: 349432 - protein, 382 aa, unidentified
MEIFHGCCAGLDVHKKTVVACVRRLGPDGTVSSQVRTFGTMTAQLLELSDWLEAQGVRHVAMESTGVYWKPIFNLLEGNFAVILVNAQRLKNVPGRKTDIKDAEWIAQLLQYGLLSPSFIPPPEIRQLRDLTRQRTQLIRDRATVANRIQKVLEDANIKLGDVASDVLGASGRAMIRAIIAGEDDPDHLADLAKRRLRGKIPALKQALHGRVTEHHRFLLRGLWDQIVFLEDLIARFDARIDQAMAPFAAAEERLRGIPGVGQQAAEVIVAELGTDMTQFPTAGHLASWAGLCPGNDESAGKRRSGKTTKGSQWLRTTLVQAAWAASHTKETIFSACYHLWAKRLGKKRALVAVAHKMLVVVYCLLKNHTDYRERWAPPKVA

SEQ ID NO: 349433 - protein, 326 aa, unidentified
MNKYKETFGVDISKDVFDVHGSASGHNQFKNDAMGFAAFLKILPKDSLVTMEATGYYHYRLAQFLYKNKVVVSVVNPLSVKRFIQMKLAKVKTDKSDAKAICDYALVNEVPLYNALTDVQAECLQLFRLLDSYIKKRTATKNKRHGEEVLGIPSKFVYRSLKRDLKHLDKEITGIEERLLTLVKKEQQHQLSLLKTVPGIGPKTALFLIVVTDGFSKFETAAQLCSYVGITPTIRESGSSVRGRSRISKVGNKKLRNLLFLCAFNACKHNKACRELYERIVNKGKSKKLALIAVANKLLKQCFAIAKSGLPYDEAHVSVLKLNNQY

SEQ ID NO: 349434 - protein, 324 aa, unidentified
MTKSVLGIDIAKLKFNVCLINDSGKLKHKVFANTSTGFAQLREWLAKQGVECLHACLEATGTYGEALALFLHQAQHVVSVVNPAAIKAFAGSRLSRTKTDRVDAELIARFCLAQVPLAWIPMPAEVRELQALVRRLESLVEMRVMEENRLSSGITVDPVRQSVEAHLIYLNQQIKGCEELIRQHIKGNPTLKRQSELLDTIPGIAETTAALLLAEITDITQYRSARQVAAYAGLVPRERQSGSSVRGRTRLSKVGNARLRRALYFPAITALRCSPFFQAWAEGLEKRGKSKMSVICAVMRKLVHIAYGVLKSGKAFDPEWAKSA

SEQ ID NO: 349435 - protein, 385 aa, unidentified
MGESSKTLYIGLDVHKESIAVAYALDERGADVVSLGAIGTRQCDIDKLIRKLEAKGATLVFVYEGGPCGYWLYRYLTGQGLHCHVVAPSLIPRKPGDRVKTDRRDGATLARLMRSGDLSSVYVPEIADEAIRDLSRGRADAMRDLKATKHRLKAFLLRQDIRYVGRATWNAAHLRWLSEVVCATRAQQIVFQEYVRAVTEQHERLQRLERELHEEVQHWRLYPVVEAIQALRGVELTGAIILIAELGDLTRFDTPRKLMSYLGLTPSAYSSGERRRQGGITKAGNTHARRALVEGAWAYRYPAKVSRHLQLRLEKLPAAIQAISWKAQVRLCKRYRQLSARGKHVNQVVVAIAREMAAFAWAIARTVPPDTVTEGRIEQTKVHRR

SEQ ID NO: 349436 - protein, 416 aa, unidentified
MKLFVGLDVSSEKLDACFMTDDSTCSVLKEASYGNSQLGASQIKEYILEFSQKFEIESLVIGMEATSLYSFHPAMFFKEDLELNQLNLMVSVEQPNKIKKYRDIFEENKNDQIDAFYIADYFRIQRQVNSIIKEEEYLALQHLTRTRYQLIKQLVRTKQHFIENIYYKCNTLSKELKAEGGSVLSATLVTLMTEDYTMDQLAELSLEEFANLIQKLGKYRFKNPEGIAKAISKAIRSSYRLGKVHQDSVDIVLGVLAKEIRSLEKLIKDLDKAIDDLVVVLPEYQCLTSIPGIGPVYAAGILAEIGPINRFSDESKLAKYAGLYWRQNQSGNSEYENTPMAKRGNRYLRYYLVEATNSVRRYEPEYHAYYKKKYAETPKHQHKRALVLTARKFTRLVDTLLRNHQLYMPPRSVIDK

SEQ ID NO: 349437 - protein, 331 aa, unidentified
MDEVKRFVGIDVAKAQLEVFIRPTGESFSVGNDELGIRELLRLLKPADFVILEATGGLEVAVASALAAAGIAVAIVNPRQVRDFARATGRLAKSDRLDAEVLARFGEAVRPAARPLANEQAQALEALVARRRQLVEMLTAEKNRRSGAPKVLHRSIDEHIRWLEKRLSGLDNELAELIRETPIWHDRDELLRSVPGVGRVLSSTLLAHMPELGMLNRRQIAALAGLAPFNRDSGSLRGSRCIWGGRAQVRRVLYMAVVAAVRSNPVIKDFYAQLRARGKCPKSALTACMRKLLVILNAMLHNQTPWQTPALASSSSTLSLLLGAAPEHGCC

SEQ ID NO: 349438 - protein, 357 aa, unidentified
MTQSNRISFKGQNIYVGIDVHLKSWSVTILSETSVLKRMSQGADPDALHRFLTNHYPEAEYYSVYEAGFCGFWIHDRLTELGIHNIVVNPADVPTMSSEKLRKTDAVDSKKLAVSLRAKQLKGIYTPDREALEIRSLIRLKNSITKDMTRQKNRIKSQLRYLGIAMPTEYLEPYSHWSKRFLNWLREVEMSTPSGRHTMDILIMQLEALREQKAEMTRKLRALSHTERFEETLHLLMTIPGIGQATGLALMAEIVDITRFSNAEQLAAYVGMIPMCHSSGEHEGVGDITLRKHAILRSNIIEAAWVAIRKDEAMQLCYLNNCKRMVPSKAIVKVARKLVNRIYFVLKRHQPYVNAVA

SEQ ID NO: 349439 - protein, 339 aa, unidentified
MKTTTIGLDLAKNVFQVHGVDEADRVLRKKLRRAEVLSFFGSLPPALVGIEACGGAHHWARELSKLGHDVRLMPPAYVKPYVKRGKTDALDAEAICEAVTRPTMRFVAPKSEEQQSSGVELKVRQLLVQQRTRCVNALRGHLAEFGIVAAKGMGKVSELVAVVRDMEDNRLPHAAREALLDLARQIEAADDGIRRLETRLVRRSRTDERARRLATIPGVGAITAAALQATAVDPSAFRSARHFAAWLGLTPRANSSGGKERRGGISKQGNRMLRSLLVLGATAQLRYLRTAPERAEWASRLLARRPFKVVAVALANKMARIAWALLVRGGTYRMAASAS

SEQ ID NO: 349440 - protein, 411 aa, unidentified
MQEATQHDAVDVFVGVGVGVDVDVDVDVGKGRHHAVALRRNGKRLYNKALPNDEVKLRALIAELKTHRRLLFVVDQPSTIGALPVAVARAEGVLVAYLPGLAMRRIADLHAGEAKTDARDAAIIAEAARSMPHTLRSLRLADEQLAELTMLRGFDDDLAAQLTQTSNRIRGLLTQIHPALERVLGPRLDHPAVLDLLERYPSPSALAAANEKTLANRLTKLAPRMGKNWAAEIVQALNEQAVIVPGTQAAAIVMPRLAQQLAALRKQRDEIAAEVERLVLAHPLWPVLTSMPGVGVRTAARRLTEATQKAFATAAHLAAYAGLAPVTRRSGSSIRGEHPSRRGNKVLKRALFLSAFAALRDPVSRAYYSCKIQQGKRHNQALIALARRRCDVLFAMLRDGTIYPPKSAPDA

SEQ ID NO: 349441 - protein, 414 aa, unidentified
MESSYRIAGIDVHKKMLAVVVTDLTQGAEFHFERRKFGALDSDLCALAEWLNEQQVREIVMESTAQYWKPVWRHLEPEYKLYLAQAQSNRAPRGRKRDFTDAERLVRRHVAGELILSFVPDPEQRLWRIATRTKNQLTGDRVRLQNQLEALLEDSRIKLGSCVSDLLGLSSRRMLKALAGGERDAAKLAGMAEPELRASQEQLQDALRAAGTLNDLHRQILRLFLERLELIEQQMAQLDQSIAAALHTHQSAVQRLAAVPGYGVDSAQQVIAEIGPQAATFPSPAQLASWVGVCPGREESAEVSKSNRCPKGNRQMRRILAQVAQAAARTKGSIFQGLYRRLLPRLGHGKAIWALAHRLCRLTWKILHQGVEYKELGQQMNPKLVRQRTNKLTRQLRALGYYVQLTALSPNAQA

SEQ ID NO: 349442 - protein, 453 aa, unidentified
MGKRFSLDNTLSIGIDPHRETLEAVGIRFPEEILLNGTFDNTPAGHRELLAKAKELASKHDLKLVFGLEESGNYGYKLARYLVKQGCQVKEVNPRMTNRQRDFYGQDKTDRLDALSAAAIVLRAYERLPDVTPIQEATEATRELSRYREQLVKEQTANLNRLHSLLANQYPAYKTFFSQVNGATALAFWATYPTPRHLSGVTIDELADFLYQKSNHRLGREASRNKAQHILGSCHWENVSEPDLLTKAQAQIIKDLAQRLLQLRESIQTVESRLKETISATGQQLETFHGLGTVLAGIFIGETLSTARFDHDKDKFASYSGTAPATRGSGKHTRQVANRWCNRRLKDAFNQLALSAARFEPLSEEYYQGLLEQGMDPSEAKKRLMRRLSDIIFAMMRDKTPYDPAIHRRKQERKAWQPLAGGMSLPLSPLSVGQVYHTGEALSSGLQIEHHPV

SEQ ID NO: 349443 - protein, 364 aa, unidentified
MDVHKENFTVCCYDMIQDKIFYTQKLEPDYNQILKYLTFVRKAFRKDVDFVCGYEAGCLGFTLYHQLTQHGVSCVILAPTTMMKPAGKKKIKTDKRDAALIARCLASNNFSPVHVPTTQDEEVKEFLRMRDDHRLALKKVKQQILAFCLRHGYSYTATKNHWTVAHIAWLRSLKPEGLYSEILSEYLLTFQALSDKLERLDWRIEELAAMKAYSEGVKKLSCFLGIKTHTALATMVEVGDFHRLASANQFASYIGLVPGEDSSSESVNRLGITKAGNAHIRTLLVEAAQSYTKGQVGYKSAALKKRQAGNTSEVIAYADRANERLRRKYYKMILSKSKRTNVAKTAVARELACFIWGMMTDRIA

SEQ ID NO: 349444 - protein, 416 aa, unidentified
MKIVRPICCGMDVHKNIIVATIGITNKKTRITEYIQETFSTLNHDLLNLKQWLINHKCFDACMESTGKYWIPIFNILEDEINIYLTHPKYVKAIKGKKTDKKDSKWICDLFKHDLIKFSFIPPKEIRALREISRYRYKLVGMRSSERNRYQNCMTVSNIGIGSVFSDPFGKSAQAIMKEVLESDIIEDEKILKCIHGSCKNKDKILDSIKHCNIETDQRFKMNESMTHMEELQVHINNCEIEIMKRAAPMFDQFMHITQLPGISTLSAILIISEIGVDMKQFESDKQLTCWAGLAPANNESANKKKSVRISKAGQYLKPLLVQCALGAIKDKEGYFGIKYSRIKKRRGHKKAIIAIARMMLVSIYHMILTGETFNPSDYESFRNPKPPIKQQDLTEESAIEFLKKSGFDVSKLTKP

SEQ ID NO: 349445 - protein, 343 aa, unidentified
MEQISTIGLDIAKSVFQVHGVDAAGEIGICRQLRRRQVLTFFSKLPPCLVGMEACATAHHWAREIAKFGHEVRLMPARYVKAYVKRNKNDAADAEAICEAVTRPNMRFVETKTVEQQSVLMLHRTRALFVRQRTALINAIRAHLAEFGIVAGIGRNGVEALLEFIARGDDARIPSEARDCLMTLVEQLGLVKRQILDADRRILAWHRSDELSKRLEAIPGVGPLIATALVASIPDPHAFRSGRDVSAWIGLVPKQNSTGGKDRLGPISKAGNRYLRQLLVVGALSVIRRAKQLGTTRHPWLVTLMQRRPVKVAAIALANKIARVAWAMMARNESYRTPLPTPA

SEQ ID NO: 349446 - protein, 366 aa, unidentified
MQKISTMRATGKEIFSGRQLTIGLDLGDRFSCYCVLDEAGEIILEQKLPTTPEAMRRAFEKMPRSRMALETGTHSPWVSRLLKQLGHEVIVAHARNVRLIGDSRRKDDRIDARTLARLARIDPQLLSPVRHRSAKAQIHLTVIRARAGLVSARTALVNTARGLAKSYGQRLRKCGTQQVSREMAAGLSAELREALEPLLTEVESLNERIKEYDRRMEQMAKKDYPEVQLLQQVKGVGELIALTYVLTIEDPHRFRKSRDVGCFLGLRPGRRNSGQSEPQMHISKEGDRYLRTLLVQGAHYILGPFGEDSDLRRWGLKLAERGGKNAKKRAIIAVARKLAVLLHRLWVSGEVYEPLRNSQKAVRAVA

SEQ ID NO: 349447 - protein, 341 aa, unidentified
MDHFAGLDVSVKETSVCIVDDTGRIVRELKVASEPEALVAVLSDHRFKRIGLEAGPLSQWLFSTLAEADLPAICVETRHMRALLKAQINKTDRNDARGIAQMMRAGLYRPVHVKTLRSQKLRMLLTHRKLLQSKAIAIENDLRGTLRNFGLKVGVVGKAKFEARIKELVEGLPDLAVLVEPLLIVRRVLREQLDIMHRRLLAIVRDDDVCRRLMTIPGVGPVVALTYRATIDVPARFRSSKAVGAALGLTPSKYQSGEINRTAGISRCGDEMMRAMLYEAAQVMLVRSTKWSWLKAWAMQIARRRGVKKAIVALARRLAVIMHRIWVDGTEFRWTREVAVG

SEQ ID NO: 349448 - protein, 388 aa, unidentified
MPRPQDDLSRSLVALDQHTTLIAAIELSLASWLVGGIVPGLSREPLKKLVPDQEALLKLLHRWRDEAIEAGHKIKRIVVAFEAGRDGFWLARWLRARGIEAYVIHPTSIPVSREQRRAKTDRLDIGLLKRAFVGWLRGEAKHCTMAAIPTLEEEDAKRPNREHEHLVGTRTSIINRMKAALVRLGIRGFNPKLRKAPERLETLRTPEGCPIPPKTLAELQREMAQLRFINEQIKRIEKARLEQLEQAPQEGSNAMVLQLKRITGVGIETADMLVNEVLSRNLRDRRAVARYAGLTGSPDESGRKRREKGLAKAGNARVRRGMIQLAWRFLMFQKDSALAQWYKARTEGAKGVRKTTMIVALARKLLIELWRLVTTGKIPEGVILRQAA

SEQ ID NO: 349449 - protein, 350 aa, unidentified
MQYLGIDWGTRRAAWCALTAAGELQEGMISADEDGLARLVARLGPDVYGCIEMMSGAAWVRERLTECGWQLEIADARKVKAIAPLACKTDKVDARVLADLARRDLVPVIWVPSLDDRAIRERLRRRAHLIRLRTSAINRTFGIQTQFGLRRGITALRKPGAVDELAEHGMPEVWLQSIRTLLGVIDDLDRQLAPLERELRPLARADERAKLLMTIPGVAELLALTLAAEIGDISRFPSARKLVGYAGLGPRVKQSGQSSHTGRLSKAGPATLRWAAVEASQHAWRPTNPWNRLYTDIKRRHGKANPAKSAVARKVLIASWHVLSRNEPFKPSASSATDPVPASSSIRLAA

SEQ ID NO: 349450 - protein, 314 aa, unidentified
MSACAAGIDVGKSFFDVGIAPQGRTFQVPNAPQGIIVLIRRLRRFGVRRVVLEAIGPYAAPLISALRHRGFEVGVVNPRRIKAFRDAEGHRAKTDRLDGALIARFALTMSDTLRPLPSEHQLALKALATRRRQMVEMIAMEKTRLKQAVDPLITASHRTAIEALSGQRKLIEHAIEEHIAQEAELLRRREILISIPGIGPQVATVLLTELPELGTIDRRAIASLAGLAPHPNQSGDFVGRSQVSGGRPCVRAALYLAALAACRADPPTRKSYRLMREAGKPAKVAIIAAARKIIVLANTLVKLDRPFDPNHVRA

SEQ ID NO: 349451 - protein, 351 aa, unidentified
MMIIGVDYHPSFQTIAFLMEETGECGEQELNHRDGQAEKFYRDLKQRGICVRVGMEATGYSRWFERLLAELGFEVWMGDPAEIKAKRIKKQKTDRKDAQLLLRLMRENNFPQVWVPSPENRDLRQLLWHRHRLVQMRTRIMNQLQALAMNEGYRWKKKLFSEQGRTQLEKLTLAPWASRRRQELLELLDRMNPTIEELTAAVEQEARKRPEVLRLMTHPGVGPLTALAYVLIIGTPERFHCGKQIGTYVGMIPSEDSSARKQRLGHISKQGNSLLRFLLVEAAQAAARSNPAWRRRYIHLAMRRHRSIAKVAMGRKLGVRLYWMWRNGCEYSPSLEFSSYAGQLGTGHGVK

SEQ ID NO: 349452 - protein, 429 aa, unidentified
MTRISAGVDVSKNRSTVCIMDQDGKVIMRPFLVWHSTEELDFLADTLKRLNGEVRVIMESTSIYQYPIALHLKEKGIFISIVNAYKVKKFANIDFRGGKTDKKDSRTIASYGISYWDKLVEWQIPKDTYFNLDLLNRTYMNAKKHRQIILQELQHYIDCAMPGMDKELHSLNLSTKKDFMLDFVEKFWHRDEIVNMTEAEFTEVFTAWAKKKGYRPVEGKAAKIYAIAKSCIPYYPANPTVKTILQCIVDKLSGVNRTLVTIVTQMIEEAKKLPEYQIVREMPGVGDPLAARFFGSAGDIRRFKNSKALVAYAGIDSPPDESGDFSSTHRHITKKGSKVFRDTGYEIMMALRAQKRTWEKGRKNPEVYDYMLRKEAEEKPRKVAKIAALNKFLRIVYARIKELYDNMALAERAKTKTRSKTRAKTKVTA

SEQ ID NO: 349453 - protein, 319 aa, unidentified
MSQSIMAYAGIDTGKHKLDVAVHGAKARLQVTNDEAGHAKLVTWLRRQRVRRAGIEASGGYEKAVVARLRQDGFEVVVFQPAQVRAYARYRLQRAKNDRIDATLIAACTADCEDEDIHAPPDPRLANRAEQLTLIEQITEDIARLETRRASCRDDAILRHWDLEIRRLKQELKRQLAGLVAELRQHPDLAQRLDLIESVSGIGLRTAVAILVRMPEIGSLSREKAAALAGLAPYDDDSGDHHGERHIAGGRQRLRNSLFNAALPAAFRWNPQLAALYRRLSAKGKAHKLALIACARKLLIFANAVVARGSPWVQKSAEC

SEQ ID NO: 349454 - protein, 388 aa, unidentified
MDRRPDATLYMKGRPSGVTLELFYDYKLHRKESPMKTYYVGMDVHSASIVIVVLNGAGKVVERITLQTSAPAVRSYLQRLKGRVYVVFEEGTQAQWLYDLVRVLVTEVIVCDPRQNRLLAVGNKSDKVDAEKLAQLLRNGSLKAVDHTDHGVRALKELVRNYDCLVQDSTRVMLRLKALYRGRAINCPGHDIYRQDRRTQWLKKLKEPGAKKRAEFLYKQLAALKPLRHEARLLMVREARKQAAYPWLLSVPRLGAVSVAQLLAVVGTPHRFRTKRQFWTYVGLAVVTRSTADQEVVNGVLRRSRRPVATRGLNRNHNHLLKRVFKMAATSACYSEPFQAGYEARLQQGMDPALARLTIARQLVAITLSLWKRGEKFNVERMKKQPAA

SEQ ID NO: 349455 - protein, 368 aa, unidentified
MKKETITSDGISGESLVNDVNRVLNLGLDMHYRQVTVAMQEDGGRIKAAGKMGHADFLNWVPKKLEEGWEIYSCYEAGASGYWLHRELEKLGVKNLVVVPKAMGQGGKKQKTDQRDAGELCDSLDRYLRGQKKALSEVAVPTEEQEEKRALIRYHRQIMADRGRCEARGKGLLCAQGIQVRGRWWRGDSWLELTSDPRLKDWMKEQLVGWRNKILSTDEEQSALRERIAALAPAILPKGVGAYSAAVLHYELRGFEHFKNRRQVGSITGLCPGVHLSDGRGKEGSINRCGIGIVRWTLVEMVWRLMIWQPQYPPVRRLAAGLVKSKRARKRLVVQAARRLAIDLWRLSTGQTTPEKLGLVMQSNAPGN

SEQ ID NO: 349456 - protein, 328 aa, unidentified
MMNIIIGIDVSKAKIDCAWLRDLNTGKVKTKALKNNAEGFQSLINWVEINTQQSLSTIHFVMEATGIYHEALAYALHDAGAEVYVVNPAYIHDYAKSLGTRSKTDKKDSVVIARFGATHRLELWQPEPKEIRHLKALIARHEAIEKDLQRENNRLEKAEITQVSAEVIDSINTVIKELTKEKNRIRQLIDDHIDQSPALKQDAALLKSIPGVGPVIAQRMIALVHSRKFISARQCAAFIGLNPVMRESGTSVRGRSRLSKMGDAKIRAKLYMAAVVAIQYNPDIKQQYERLLKNGKSKMAAIGAAMRKLVQICFGVLKHQTPYQPQVI

SEQ ID NO: 349457 - protein, 415 aa, unidentified
MSDPKRWHAGVDWGSQSHCVFLTDNEGRKLGQKFFKHSGEGLAEMADWLLKTSGAETAGQVFVAIEVPHGPVVEALIERGFAVHAINPKQMDRFRDRFSMAGAKDDSRDAEVMASSLRTDPRCFRRLVAGDPIVVELREWSRIADELGAERNRLANRLREQLWRYFPALLELEDDCGAEWLLDFLVVAPTPAKAARLREARVAQFLKQRRIRRFDAAAILKAGRATPPMLAPGTVEAASAHVASIIPRLKLVNRQIKEADRKIGALIDGLAASPESEPGQEKQHDAAILASLPGVGRTVLATLLAEAWEPLQRRDYPALRSLAGVAPVTKRSGKSCIVVRRQACDNRLANALYHWARVAVQHDPRCRAKYAELRKRGHSHGRALRSVADRNLNVACAMLRTGTPFDPALAAQKAP

SEQ ID NO: 349458 - protein, 521 aa, unidentified
MPRSTAARAPTARAPFQLCKPNGQLTPRVRKVGPEHFGIVAIDCAKARSKWLLADFYGQVLRPPTPLPHSRGDFQAAVDRLRQAVQQHDLRDLVVLVEMTGEYHRPVQRAFRAAGFETRLVHPFTAKQYRQPADPENKTDDTDLAAIFRAGTQGFGLLEPAWPDAYLSLQLLRRHRRDLVDKTSILRRQIREVLHAAMPGYAECFCHLWESPAPLVLARHTTSAEAVRQAGVDGLQQIAHEAQLVCRRDTFTKVLAWAEQAPPGHSRPLDLRRILTTLDDDRLAKTRQILELERSLAHGIVATPYALLLAIPGINVVSVADLAGELGPITFYRDAAAITGGAGLMPSRYQSDLVDCPNGPLRRRGNRRLRAVLMQTADNLAQSNHHFRARAEQWARLGKDPRWVRVKIAKTFSRLAFAMVAGGQLFPHPCCQKRHYILGKLLEFHADHRTPPQETRQDLEAVVQQLPAQARAEEAESLRQRLEEVDRHRRGPQPLSAIIPLVLARLGMTVVQSEGSEGAGP

SEQ ID NO: 349459 - protein, 322 aa, unidentified
MEIVSALDVHRRQITYKTVDLESGEMWRGRISPGARGAVREWLGRFDGRADVHFALEGTTGWRFVVEEIERAGHRAHLADPAETAAKRGRKRRAKTDHADCDLQLKLLLSGELPESWIPPAHLLELRTRVRMRKTLVDQRTAWQQRLQAQLFHQGAPAGLRPRTRAGRDALARVELSPAGRALVLVALRMIETIDRELAPLDRELRSFAGRQPGCRALMARLYGVGPVCATAILAELGDPRRFARSDDAVRHSGLDVTVYQSDSKRAPGHLSHEGPELLRWALFEAALSAARAGSPDHAYYRQVAGRIDHNRACLSVARKLC

SEQ ID NO: 349460 - protein, 320 aa, unidentified
MMAQNDLVVVGIDVAKDKVDACIRRFTLRQTFPNTAQGHRKLVAWLRKYQVGKAVMEASGGYEREWRNVLHNAGIEVRIVDPRRVRSFAQSAGRLAKNDPIDAEMIAWFAETFSQAPGQIPDAAREELAALAKARKALVDVKIRLQAQDEHAAPEPARKAYARVLKSLAAEIDKLEAAISAKVKATPEFAERAEIIESVPGLAQATSAILIAGMPELGQVSDEVAAALIGVAPYDDDSGKRRGERYIKGGRRWVRNAIYMPCLGAATQYNPVLKAFYQRLLAKGKEPKVALVACMRKLIIILNTMLARRQKWNPGRHAMA

SEQ ID NO: 349461 - protein, 347 aa, unidentified
MKFYTKQHKHYCGIDLHVRTMYVCILDSEGQVVMHKNMDATPQDLAKAIKPFLEDLIIAVECMFTWYWVADFCEDNNIPFILGHALYMKAIHGGKAKNDKIDSYKIASLIKGGMFPMAYVYPRAMRSTRDLLRRRNHLMRKRAELLAHIHNTNSQYNLPKIGKNLRYKSNRSLVDNRFPDTSAQRSVDMDIEFINFYDDQLSRIEWYIEKNAKINDYHSYMLLQSVPGIGTIISLVILYEIDDIKRFPRVQDFASYARLVKCKAESAGKTYGTSGSKIGNAHLKWAFSEAAVLFLRCNPKAKAYVEKLARRHGKGKALSILAHKIGRAVYFILKRKEPFNGDLFLAA

SEQ ID NO: 349462 - protein, 412 aa, unidentified
MDRFVQRCAGLDVHKDTVAATVRVPGEDGQRLQETRTFSTTTRELLTLVDWLDSYGVTLVGMESTGCYWKPVYYVLEERFECWLLNAQHLRNVPGRKTDVADSAWICQLVEHGLVRASFVPPRPIRELRDLTRYRKAQIEERSREVQRLDKVLQDAGIKLSSVASETLGVSVRRMLDALVAGTHDPKVLAELARGRLRRKLPALREALTGRFRSEHHGLLVAQILAHIDYLDETIALLSEQVEQVIAPFSTERELLMTIPGVARLGAEVLIAEIGVDMRVFPSDAHLASWAGQCPGNHESAGKRRSGKPRKGSKWLNTTLTESAKSASRSKGTYLSAQYSRLRGRRGPGKATGALRHSILVAAYHILERKVPYEELGADYFDQRRSLEQRTKRLVRQLQQLGHTVTLEPLAT

SEQ ID NO: 349463 - protein, 387 aa, unidentified
MYFVGIDISKFKHDCAIIDELCDTVMPSWSFSNDREGFSHFKALLDSLEGEKKIGLESTGHYGQNLKQFLESNGFTFMEFNPLLVSRFVRSKSLRNTKTDSIDALSIAQYVMTVEYKPYPSSFYHLDKLKSLTRFRNSLVRQRSRQLVELTNVLDKLFPEFTPFFKDKFSVTALYILAHYQTPERIANMNARSYEALRKLSRGRFTLSNFTQLKALAKNTVGTQSDYLLDQMNILLELYSQLDSKVDELDAQIKECVRGIDPPCLSIPGVGELSAAMILSEFGDFSKFQNPSKMLAFAGLEPGYFQSGQSEYTGHMVKHGSSRLRYALMNCCLPLISNEPVFAAYYAKKRSEGKPHRVALTHVAKKLLRVIYTLQTKNIRYDPTMIH

SEQ ID NO: 349464 - protein, 366 aa, unidentified
MKEISTAQVFGKEILKEQKLTIGVDLGDRWSFYCVLEEAGKIILEQKVPTTPEAMKQTFSRIPQSRIALETGTHSPWVSRLLTELGHEVIVAHAQKVQLITKSNRKDDRHDARTLARLARIDPELLGPIRHRSVQAQIHLTVIRARAELVSARTALVNAARGLVKSYGQRLPKCGTQQVGRELAAALSTELREVLEPLLKEIESLNEGIKEYDQRMEKIAKEVYPEVSLLKQVKGVGTQIALTYVLTIEDPHRFVKSREVGCFLGLKPGRRNSGESEPQKRISKEGDRYLRTMMVQGAHYILGPFGADSDLRRWGLKLAERGGKNAKKRAVVAVARKLAVLLHRLWVSGEVYEPLRNSKKTMRAVA

SEQ ID NO: 349465 - protein, 368 aa, unidentified
MKQVTTYVGVDAHKKDLFIAMLVGGQTTPMTWQLANEPNAVRRLVRKLEREAPGPVRVCYEAGPCGYALQRQVTTSRVSCQVIAPALIPRKPGERIKTNRRDARKLAELLRAGLLTEVRPPTLAEEAVRDLCRARDDAREDLQRCRHRLGKLLLRRGLHYSGRNWTQAHRQWIDSLDWAQPAERVVVDDYLLAIDHLEARLIELDARLTEMAQTAPYRELVGWLRCFRGIDTLTAILILAELHDFRRFHSPRALMAYLGLVPGEDSTGEKHRRGRITRTGNALVRRLLVETAWHYQHRAGVGVALARRRKGQPTRVIAIADKAQQRLCRRFRRLAEQHKPAPKIAVAIARELAGFLWAALQPVTMSAI

SEQ ID NO: 349466 - protein, 345 aa, unidentified
MELHTIGIDLGKTVFHLVGLNLHGEVVVRKKFSRTQLLRFTANVHVGLIGMEACGGAHFLGRALREQGHEVRLTPAQYVKPYVKTNKSDYIDAEAIAEAVARPTMRFVPIKTDDQLDLQSLHRVRERWVMRRTAVINQIRGLLLERGITLRKGRCHVGAALPGILEDADAKLSGALRMLLAQLKLELDHLDMRIDEADALIKKTARENEACQRLVAIPGIGPVTATALIAAIGNGGAFRKGREFAAWMGVVPREHSTGGKQKLLGISKRGNSYLRRLFVQGARAVLQQRTKQSSGLSAWLAQLTSRTHRNVAAVALANKLARIAWAVLAKNEQYRPSVLADVAAA

SEQ ID NO: 349467 - protein, 331 aa, unidentified
MKKVTETIGIDVSKLTLDVYVRTTKVHKQFSNDVKGFRQIISWTIKQKINLEETLFCFEHTGWYCLLLSYFLFENKHRYCCINAIEIKRSMGLKRGKSDKADAWEIANYAWLRREELIPSVPPAKKLIELQRMMSLREQLVKQLTASKNLFKGMQEIVIDELNDVSLGILKENMNQLEKQILTTEKSINELIKQDETMITNYKLSKTVKGVGMVLAVQMLLHTHNYTRFESPRQFSAYCGLVPYPYQSGTSINGRNKTHPISDRKMKSLLSMSAISAIQHDKELKLYYQKRVEEGKPKMVVLNIIRNKIVSRVFATVNRGTPYVEMSKFCT

SEQ ID NO: 349468 - protein, 355 aa, unidentified
MMLHAIDLHKTVLQLASMRADGDQVVRTARLPASPQALRAYLAQWPASRHRVVVEATGSWYWIADFCRAHQVELTLAHPWKLRAITGAKVKTDPVDTETLLTMLRLGLVPKAHQISPERRETRDLMRLRLRLVQKRVSCLNSIARLLEKFNLDSVEALPELVRLQVPFHQEQIATLQRQIRQIEKTLHRRVIPHEDVQRLLRIPGIGRINALAIHLEIDDIGRFPSERQFFSYARLVPGADNSAHSVRGKRSRAGNRYLKLAFSHAAVRAIQVYPEIREAYRKRLRKKGKPLAQAWVRKELARIVYHLLKERRDFAGEFRGRKLSRTKQPQWPQRARPSQPPATPAAAAPTRGAS

SEQ ID NO: 349469 - protein, 414 aa, unidentified
MASMRWVGRAIGLDVHRDFCVVAICEDGQVRTAGRVPSTPEGLGLLAANLVRSDRVALEVTGSCWEIARILEPHVDRVVVVSPDDTGITRARAKTDRLDARTLARLLWSGELESVWMPDERCRVLRRRLARREQLVRSRSRAKNEIHAVLQRRLQGKPPCSDLFGVKGLRWLAGLELPLEERESVDAGVRHVEFLDAEIAAVERLIARQALEWPQIRRLMTVPGVNLICAATFIAAVGDAGRFVTSRKLVAYLGLDPKVRQSGKAPARSGRISKRGSAAARWALVEAAWGVVLQPGPLHAFYDRTRARRGHAKAIVATARKLAVLFWYMLTRGQDYAHQQPSLTAQKLRRLEIAAGAPPRKGKPSGVWVTHQRMRHTEKQLAARAQASYERMIRDWQAASPKREMGASATPQRA

SEQ ID NO: 349470 - protein, 378 aa, unidentified
MPSESIVHVAIELSVSSWLIAARLPGAEKPRLHRIEGGDTAALLAFFAELRSRASAELDGNADVACCFEAGRDGFWLHRLLTAHGVATYVLEPTSILVNRRARRAKTDRLDAQGMLRVLAAWLGGDRQVCSMVRVPTPDEEDAKRTHREREHLVQDKLRIENRIHALLFTQGIRARPSLRSWALDMAELRTGDGRALPPLLRTELNRLHRRLVLILELIRELETERAEALAAAADDAMVRKITALQCIRGIGSNFAAVLVREVLYRSFANRRQLASYVGITPMPYQSGGMDRDRSISRAGNSRARTSLIQLAWLWLRYQPGSALATWFRERAGTLQGRTRRIAIVAMARRLLIALWRYVETGVLPEGVEIRAETTPIT

SEQ ID NO: 349471 - protein, 315 aa, unidentified
MSDVPCFVGLDVAKAQLDIALRPSGERWAVPNDASGVATLVDRVQTLHPTLIVLEATGGLERAATSALAAAGLPVVVVNPRQARDCARATGQLATTEALDARALAHFADVIRPLPRPLPDAQTQELRALLGRRQQLIVMRTAEQNRLAGTSARLTKAIAAHITWLNADIATLDDDLETLLRASPLWRENDDLLQSAKGIGPVCAHTLLLELPELGTLTRQQIAALVGVAPLNCDSGTLRGRRTIWGGRAHVRTVLYMGTLVATRFNPQIKVFYERLLAAGKVKKVALTACMHKFLTILNAMLKHRTPWKPQEVQN

SEQ ID NO: 349472 - protein, 350 aa, unidentified
MEKVLKKVAGVDVAQKELVVSLGRLLECLTIEIIAYKVFKNSDNGIKAMIKWVSSFCEDNEPLRYVMEATGVYHQRLAYTLDSMNIDLSVILPNKISNYARSLDIKTVTDKTASQAIAQFGLERKLDNWTRPKDIFRELKQLTRERDQIVEERAMVKNQRHAEKSEAMPNQSSLNRIEDRIKFLNGQEKEIKLDIATLLKSQPEVKKRVNNICSIPGVGELTAVIALGETNGFELIRNKKQLTSYAGFDVKEKQSGTSIKGKPRISKRGNRHLRKAMHLPSLSSVKYNQSHKDLYVRIVSKNGIKMKALIAVQRKMLELIYVIDKSQKPYENDYHEKRVQHTNVESTLAG

SEQ ID NO: 349473 - protein, 410 aa, unidentified
MERMIERCCGLDVHKKTVVACVRVPGSPGGRAQHVRTFGTTTAELLALRDWLEAYGVTHVAMESTGVYWKPIFYVLEDAFTCVLANAAQIAQVPGRKTDVKDCVWIAQLLEHGLVRGSFVPPVPIRELRDLTRYRKTLIQEHTREANRLQKVLEDAGIKLASVASDVLGVSGRAMLDALLRGTSDPDVLADLARGKLRQKLAALRQALAGRFRPHHAVLVSQLLAHLDDLDEVIETLSTHIAEVIAPFAEEVSRLDTIPGVNQRTAEVLIAEIGVDMGVFPTAAHLASWAGLCPGNNESAGKHKSGKTSKGNRWLRGALIQAALAAGTRSTKGAFAARYRRVMRHRGHQKAVVAVAHAMLVAAYHLLARKTTYHDPGADYYERRHAERVRHRAVQLLERQGYRVILEPAA

SEQ ID NO: 349474 - protein, 467 aa, unidentified
MSPRSGKAFRTSQQAEDLAVRHRHAAGIDVHAAVHFVAVAAEDVPAGFVNPDAKLPAGVRKFGANTGDLEALAAWLKDCHVTTVAMESTGVYWIPLYDLLASQGFEVILVDPRQTKHAPGRPKSDVLDCQWIRRLHSYGLLTASFRPADEIVRWRGFQRQREMLIRYAAQHVQHLQKVLEEMNVKLTEVVSDIVGQTGMKIIRDIVRGERDPWKLAKHRHDRCKATEAEIASALHGNWRTEHLFGLKQALKLYDFYQKQLRECEAQIEACLRGMKDKSNGAPLPPSQRKRKPEKNEVRFGARALLFKMAGVDLTQLEAISETTALVLLSELGTDLSKFPHEKNFVSWLGLCPQHRGSAGRIFKRRTRRGANRAARALRMAAQGCHRAKNALGAFYRRIQGRCGGPKAIVATARKIAERVYRMLRYGQAYVRQGEAAYEEAYHQRLVKAMAKKAASLGYKLVPETMSP

SEQ ID NO: 349475 - protein, 444 aa, unidentified
MHYQKVLKMPESIPYLSVGFDVGADFTWMSIMLPNGILIGKPFKIIHSDPQSRELAISKIKEAQEMYSLESRCFLESTGIYHIPLLCFLRDKGFDCAVINPIITKNSTNMNVRKLHNDKFDSKKAAKVGLDASLKASIVPDDAIIDLRNLVRDYYYFKDLQSAIVLKLHAELKVSFPAYLNVFSKVTTQTSLKLLEAYPLAADMLAAPKDELVEIIRSTARFGETYALARYDAICTAAKDAAVFGRALPSNALRIRLYIKMYREYQAHLDSILEELHQAVGKLEGTPDYDRISFIQTLHGVGFLSAVVLIAEMGVFDLFSSPKKLYAYFGLDPGVNDSGKFHGDRVHMSKRGSSLARRILHMVAINNLKVDKATKTPVNPVIYDYYTRKCASKKKSVAVGAVMHKICNIIFAMLRDNKPFELITPEEHRERYAAEHPESVNTAA

SEQ ID NO: 349476 - protein, 400 aa, unidentified
MSQVDDVPVDVFVGVDVGKSQHHAVALDAAGTVVLDRSLPQDEQRLRALIAGLKARGRVLFVVDQPATIGALPLAVARAEGVAVGYLPGLAMRRIADLHPGEAKTDARDAAVIAHAARSLPHALRAVRVDDEQTAELAMLCGFDEDLAGQINQVSNRVRGLLTQIHPALERAIGPRLDHPAVLDLLQRYPSPQAMRSAGKARLTTRLRRLAPRIAERLATEIVQALGEQTVVVTGTNAAALVLPRLVEQLSTLRRQREEIAEQVEQMVAAHPLSRVLTSMPGVGFRTAARIITEVSGKQFASAAHLAAYAGLAPVTRRSGTSIRGEHGARGGNKRLKRVLYLSAFAALRDPVSRTYYDRKRAERKSHQQALLALARRRCDVLFAMLRDGTTYDNRHRVAA

SEQ ID NO: 349477 - protein, 355 aa, unidentified
MTSTQYIGMDVHKESISIAVRNAAGKVVMECVIETKTSTILQFFDGLRGDVQVTFEEGTWAAWLYDLLKPHVTKVVVCDPRRNALLQEGNQNDRVDARKLAELLHHNQLRSVYHGDHGLRTLKELVRSYLTITQDLSRVMTRVKALYRSWAIPCTGKQVYAPRHRAEWLGKISEPGVRRRAEFYYQQLDALRTLRLEVRRDLLAESKKHQAWKRLCGIPSIGPIRAAVLLGILQTPHRFRTKRQLWTYGGVGIETSSSADHRVVDGQLERKKKQMEIRGLNRNYNHDLKNLFKGAAIVAATKPGPFAEFYAELLAKGMRPEMARLSLARKIATIVLIVWKRGVSFDAQHLKPQTA

SEQ ID NO: 349478 - protein, 413 aa, unidentified
MKKHSSFLEQRGSGKGTKSERRDSREVMAELVGQLRKRLDAESVVVPGEDKEVRDGESPNLDRLTVGVDLGDQWSNYCILGLGGETLGEGQFRTRQQEVAEFFQCLARSRVVIEVGTHSAWVREVIAGLGHEVLVANARRMEGSKRRRRKNDRIDAAKLARLGRVDPKSLYVIQHRSTEVREDLLVLRAREALVESRTKLISAVRGLVKTMGTRVSSSSSDAFSRKAAAEIPQQIRETIQPLLRLIANLSEEIKSYDRRIEQLASEKYMHTKLLRQVTGVGPVTALAYVLTLETPLRFVKSRDVGPYLGLVPRQEDSGDSQPQLGISKAGDRMLRKLLVGSAHYILGPFGPDTDLRRFGRKVCERGGKNARKRATVAVARKLAVLLHRLWISGEVYEPLGHASFAPIARATAA

SEQ ID NO: 349479 - protein, 388 aa, unidentified
MEARTVNNLPPAAPHDDAVRCLLAIELSKKSWIVAVNTPLSDKISHYTLESCDWKGLLDLCERIRTRVAREMKKPVEIISCYEAGYDGFWLHRLLEAHGIRNYVIDPASLQVDRRARRAKTDRVDVERMLRSLLAYLRGEPKVWSVVRVPSVAEEDDRRLHRERDRLINERVQHVNRIKGLLAIHGIYDYQPLRGDRVQRLEQLHAPDGQTLPPRLKAEILRELQRLELAIRMIKAIEAERDAIASAKTGHTSAKKIQHLAKIKSIGPEFATALVGEVFYRSFDNRKQLASYVGLTPAHFQSGAMSRDQGISKAGNAKARTVMIELAWLWLRHQPDSPLSVWFRERVGKLKGRIRRITIVAVARKLLIALWRYLENGMVPEGAILKVK

SEQ ID NO: 349480 - protein, 325 aa, unidentified
MDEAILGIDVSKKELSIALLFNTSYKKCKISNNIEGFTNLSKWLQAQGMTKVKACMEATGSYGEKLAEYLYEQGHQVHIVNPVCIKAFAKSKLSRHKTDEVDAHLIAEYASKNELRAYKPKDPMLKELRFLDRCLQNLKEQHTQVENFLETKACLPKSVKKVYQNLIKHIEKQINVVNVAIDQVVSSKESLSQDCKNLQSIPGIGKITAIAILAEILELSSLESARQLAAYAGLTPSHRTSGTSVKGRSYLSKIGSSSLRKALYFPAIAAKNHNPLLQPFVKKLEKKGKHTMVIIAAIMRKLLHICFGVLKYKTVFNPQILKNNP

SEQ ID NO: 349481 - protein, 333 aa, unidentified
MYSIGLDISKSSVNVYVPLGKLDLEIANTDKAFKSLYSKLKKLYKKEIEKVVFVFESTGSYSALLYRFCAQKGIMAYMPNPKQARNFAKAIAQRNKSDKIDARVLSEAIVVAKENEIKVPTIDPLVEEIKEFMVYYRLKVKQRTQLSNHLESLSTKEGSKTLCRTIKAEIKALKKSEDKIIEQVYAIIEKSKNLKEKYNAITSIDGIGKIGGIVMLHLFIKYPHANQRQIVSLAGLDPVMRESGTSIKGQTRISKAGNRLYRGTLFMAAMASTKHNEKMKAFYERLKANGKHTTQAQIAVIRKLIVVAHSLYKSGEVYNKNRYKISTGVQLKA

SEQ ID NO: 349482 - protein, 348 aa, unidentified
MEAYDGPQIVGMDLHRRRSVLVRMAPDGRKLATARIDNEPASLAAEIAKAGPAPKVVLEATYGWYWAADALEEAGAQVHLAHPLGVKGFSYRRVKNDEKDAADLGDLLRMGRLPEAWIAPPEIRELRELTRYRIKLVHLRTSCKDQVHAVLAKLGVPVTCTDIFGTWGSAWLGELRLPQPYAGKLDSLRTVATLLSAEITLLDTVIADLLEHHDAYHALQQLPGIGKVLAAVIVAEIGDITRFRHPGRLCSWAGLTPRHRESDIKVTRGHITKQGSRLLRWAMVEAIQRQPAGNPIRQRKDAIIARRGSQARNIAKVAAARQLLTCVFYAMRDGQARSLTARTAAAAA

SEQ ID NO: 349483 - protein, 357 aa, unidentified
MKKDIRIESTGQFTIGIDVSDRSSCYCILDQAGEIYGEGKLRSTPEAYRQQFGARARAVIALEAGTHSRWMSALLRECGHEVIVANPRRLRLLTTSDKKNDPQDARTLAEMAWAKPALLSPVRHRSQEAQRDLNLVRARDLLVEARTKLINGVRCLVKSVGARVPACASGQFTKQADLHLPEETRPAAGPLLETIDELSERIQEYDQRLEHEAQTRYRQTALLTQVSGVGTLTAMAFVLTIEEPHRFARSRDVGCYLGLRPKQQDSGDRSPQLRITKAGDSYLRRNLVSSAHYIIGPFGPDTDLRRWGLKLCERGGKNAKKRAVVAVARKLAVLLHRLWVTGEVYEPLRNAQAKLAA

SEQ ID NO: 349484 - protein, 437 aa, unidentified
MDQVIIGMDPHKASVTIEARDTREVLRATGRFGTDNRQYKAMLQVARQWPERLWAVEGANGIGRPVAQRLLADGERVLDVPAKLAARARVFDTGQGRKTDATDAHAIVMVALRDKGLREVGLDPALMALRLLCDRRDEISHARAQALNRLHRLFLELLPGGAPVKKSTAQYKALLATVRPRDVVGKTRRRMAAEELADVARYDAKLKAMKVELKAAVQALGSHLMDIHGIGPAGAARILADVADVARFPDRNHFASWTGTAPIDASSGEHTHHRLSRAGNRRLNHVLYMAGIVQLRNDTEGRTYYRRKCAEAKTSLEALRCLKRRLSDVVYRQLVADAKARAAFVEETGPGGHSGATLSSSATDLTPDIGSSDKPQPGPAPTTLPSQAPTRKTSGSRTAATSRRRAGGVNVERPTGRTTLTPTSVGAHSTASRTPTP

SEQ ID NO: 349485 - protein, 401 aa, unidentified
MNAVGIDVSKGKSMVCVMRPFGEVVLEPFEVLHTAQNLNDLAGKLKDLDGETRVVLEATGNYHKPVAFVLHDAGLFVSVVNPVLIHDYDNNSLRRVKTDRKDAVKIANYTLDKWTRLRQYLPEDDTRLALKNCYRQYQQAVAIRTMLKNNLISSLDLTFPDANKLFSSPAKSNGCEKWVDFIGDFWHSECVSSLSPDAFSKKYLKWCQKHGYYFTRSKSDEVYACAVSAASLPKSTTSKILIQQQVAQLKAVSQSVAAFQQEMLRLSQQLPEFDTVMEMYGVGPSLGPQLMAEIGDVRRFSSKKSLIAFAGIEPQPNDSGKVVGNDKGISKVGSAVLRRTLFLIMSVILQTQPQDEPVFQFMNKKRSEGKPYKVYMMASANKFLRIYYARVKAVMDSERSQ

SEQ ID NO: 349486 - protein, 369 aa, unidentified
MKALHRRCAGLDVHSESVVACARVTAKGKTSREVRRVSTATRDLMELADWLEAQGITHVAMEATGVYWKPVWHILESRFELVLANAAQVRNVPGRKSDVNDATWIADLLAHGLIRASFVPPQPVQELRDLTRTRKQLTREVVQHTQRIQKTLEDANIKLTTVIADIMGVSGRRILKALVAGETRADTLAELGSQRLKCPKPDLIRALEGRVTAHHRFLIGHHLGLIEELERRIAAFDARIGEVLAPFRAAVERLMTIPGVSRTSAEVILAEIGPDMSPFPTAGHLLSWAGLVPRLDESAGKRRSTRLRYGAPWLKPVLVQCAWGAARSKGTYYQAQFHRLKARRGPKKAAIAIAASILTAAYHTAPQNF

SEQ ID NO: 349487 - protein, 353 aa, unidentified
MKKIIIGIDISKEKIDASAIDVQNALQGVQKLGYETFENRPMGFRRMLVWARHLIKGVTLDDVLFCCETTGGYDRCLCDYIYAKDLDIWRESALQIKRSMGVRKGKDDKSDSLMIAEYAMRHMDKAVIYETPCDTVRELKAMLQYRHKLVQEKTEKKVRMSHLGDTAAKSKSVSFILRDARKSIRALEKSIKECERQILELIKGDEELARNYRHITSVSGMGIVNATALIAYSNNFKGITTANRMASYYGIAAFRDTSGTSVDKKAYVKCYSNSLLKAYLTQAAEWTIRENGIYHAYYLRLKDKGKPYGIIINNARNKLIHLVFSLIHNDMDYEQDHEYIRTMGRAMTEIQLN

SEQ ID NO: 349488 - protein, 403 aa, unidentified
MTGVMIGVDPHKLSATIEVVDHHGHLLGSGRFTTDKTGYTAMRAYVKAWPDHVWAIEGANGAGRPLAQRLVEAGEQVVDVPAKLAARVRLFDTGHNRKTDALDAHSIAMVALRTAGLRVVTPDGDLEALRMLTDRRDELARLRVQTLNRLQRLLTELIPGQRKKDLSALQAKAMLATVRPRDIAGRTRRRMAAEELADLVAVDKKLKKIKAELKAAVAARGSTLMEVHGIGPAGAARILADVGDIARFADRNRFASWTGTAPLDASSGEQIRHRLSRAGNRRMNHVIHIAAIVQLRHDTEGRAYYRRKLAAGKTPLEALRCLKRRLSDVIYRRLLADARTAHTQTGDTGPGGHCGATQESSAVDLPPHIDTSDQPLPGPAAPTLRPSTRVRKSTTTPPLEPTS

SEQ ID NO: 349489 - protein, 375 aa, unidentified
MKLVGIDVGKNSHHFCVMDKETGEFNVTPTSFSNNKEGFDFLINSLKPYSKKSILIGMEDTGHYHVALLKFLLNNGYTVALINPKTTDLTRKMEGGITKNDKLDTITICDVLDTPERKKQYRITKVDRFDLYEQRQLTRHHHNLKEELNVYCNRLQKSIDLVFPEFNTLFSSKYSIVYMNLLKTFGSAEAIASTDIRTIRKCFEIKGIGNRISLTPEKLKECAKNSIGISSEVETIQIKHLVSQITLIKEQIAEIDKKIEEFSITNNSPILSIPGISHFSGTSILAELGDIGNYSKPSQIIKFAGVAPYHYESSQYNAQHTGITKKGSKYLRKTLYQIILTVINNNPVFKKYYRLKISQGKGHRCAQGHCIRKLL

SEQ ID NO: 349490 - protein, 364 aa, unidentified
MKRKVYVGMDVHKETIQIAYLTSNTKEMVKEQQIKHNEVHIKKFINKLKTEWNEIHCCYEAGVTGYPLYRYLKSLGVNCILVAPGKIPRQSSDKIKTDKRDAIKLARLLRSGDLESIHVPSEEDEAVRDYLRSRDSLRLDLGRNRQRLMKFLLRKGNVYSTTKYWTVSHYKWLNNLHFENEILHETFNDYYSRVRVQKENLKAMDQKIQEIAKSEAFRERVGILRCFRGVDYLTAMFLLSEVNDFRRFKTAGSFMSFLGLVPGEYSSGSKRKQTGITKTGSPRLRRILTEAAWQHRFPGTGSKIVAARRTGQPALVVALAEKASLRLHKKFRNLQLRGKTPQVMITAVSRELSGFLWAAMNLVA

SEQ ID NO: 349491 - protein, 342 aa, unidentified
MDHFAGLDVSVKQTSICIVDDTGRIVREVKVASEPEALLAVLKNSAYHFERIGLEAGPLSQWLFSALAEVELPVVCVETRHMQAVLKAQINKTDRNDARGIAQMMRAGLYRPVHVKTLRSQKLRMLLTHRKLLQSKAIAIENDLRGTLRNFGLKVGMVGKVRFEARIEELVENFPDLAVLVEPLLIVRRALREQIVILHRRLLAIVRDDEVCRRLMTTPGVGPVVALTYRATVDVPARFRKSKSVGAVFGLTCSKYQSGEIDWSGRISRCGDEMMRVMLYEAAQSMLRSKKWSWLKAWAMQIARRRGMKKAIVALARRLAVIMHRIWVDGTEFRWTRETVAA

SEQ ID NO: 349492 - protein, 403 aa, unidentified
MIFVGIDWAEAHHDVCVLDEVGVVQAKGRVPDGVEGVARLHAMVADHAEDAAEVLVGIETDRGLLVGALVAAGYRVYAVNPFAVSRYRDRHGTSGAKSDPGDAKVLANLVRTDRHNHREVAGDSELAEAVKVLARAHQSLIWTRQRQVSALRSALREFYPAALRALPELGTVEACSILGMAPTPERGRRLTLAKVRRSLAASGRTRNLDRRAAEILEALLAPQLEAPPILSEAYGSVVGSLVVVIDGLLHQIARLETELAERFERHPDAEILRSLPGLGLVLGARVLAEFGDDPARYADPKARKNYAGTSPITRASGKRMVVLARVAHNRRLADACYLWAFASLNASPGARRYYDARRTAGKTQHQALRALANRLVGIFHGCLQHRQLHREEVAWPTGLDAVA

SEQ ID NO: 349493 - protein, 338 aa, unidentified
METYAGIDLHSSNNFVGVINDKDKILYGKRHANRLDDVLRALDPFKDSLQGVVVESTFNWYWLVDGLQEHGFPVHLANPSAIQQYEGLKHTDDQWDSFWLAHMHRLGILPEGYIYPKEHRAVRDLLRRRLLFVQHSTSHILSLQSMISRNLGFKMSNNEIKKLKPTDIESLFDCSNLVFMANNSLAAIEFLKKITKGIEKKVKSQVKMRKEFEMLLTIPGIGNILGLTINLEVGDIGRFAKVGDYSSYCRCVESKRISNGKKKGENNKKNGNKYLAWAYVEAAQFARRYCVKAQSFYQSKEAKTKPVVAIKALSNKLSKASYYIMRDQVAFDEDKLFS

SEQ ID NO: 349494 - protein, 355 aa, unidentified
MNSRKYIGMDVHQESISIAVRDANGKLVMESVIETKAATILECIRGIRGNLWVAFEEGTSAAWLYDLLKPHVAQVIVCDPRKNALLKTGNKNDRVDARKLSDLLRAGLLTPVYHGESGVRTLRELSRSYLTVTKDLTRVMNRLKALYRSWAIPCAGEKVYSPRHRSAWLEKLSEVGVRRRAEQLYQQLDMLLQIRREARRELLRESRKHPAQELLRQIPRLGPIRVALVIALLQTPHRFRTKRQLWAYCGLALQTRSSGEYRFTGGQLQHSQKLPALRGLNSNHNHDLKNLFKSLATNVGTSPGPLGDFYRSLLAKGMKPAMARLTLARKMAAIVLTIWKKGERFDPEQLKRQAA

SEQ ID NO: 349495 - protein, 448 aa, unidentified
MICAAVERCAGIDVGKKFLAVCLMTGPLDGEARVQRRRVGTTTTELEGLRDWLKAEGVTHVVMESTGSYWKPVFNVLETSVKVYLANPQEVKNRKGHKTDDKDGWWLAHLLRHAMIHPSFIPPRPIRELRDLTRRRKRLLGDATAEKNRIQKILEDANVKLGSVLSDVFGVSGQLMLDALLKGKATPEEIALLAKHRAQRKAPQIIRALEGHRLSEHHRQMIRYCLKHLEFLEEQINDIDRAIADKIRDAGYEQEWTLLQTLPGIQDRSAASILAETGADMQQFPTAKDLSSWAGVCPGNNRSAGKNKSSRTTGGNPWLRSALTECAWAAAAKKNCFLKDKFWRITSKSGGEKAPAIIAVAHLLLILVYQVLSTHQAFQDRMAPPLDERQKERMIRHHIRRLGKLGVALRRYAPVGSVPGKCRPFAEVKPPKPTQPPKSRSAPKSLKT

SEQ ID NO: 349496 - protein, 305 aa, unidentified
MTTYIGIDVSKLLLDIHHNGQAAQIPNTEKAIRAYLKSLPDDTMLVCESSGGYEATLITQAHSQRRPIARINARQVRDFAKAKGRLAKTDTLDARIITEFAQTFHPTPLCPADPLQIELSALVKLRSHILNQITQNNNLQETLSDKNILRILASTVAALKKQEVKIRSLIVATIKRSPSLTSNVSRLQEVQGIGLVTAFSLLSFMPELGTLSDTQAASLAGVAPFNHDSGQFRGQRHIRGGRSHLRSALYMAALVASRHNPILKPLYQRLLAAGKPKKLALTVLMRKLILLANRLLKNPSFSLAN

SEQ ID NO: 349497 - protein, 342 aa, unidentified
MYYIGLDVHKKTISYCVKDASGRVHQEGKLGATRRELDIWMRTLPQPWTVAMEATIFPGWIYDHLHPHATQIKVAHPLMLRAIAAAKKKNDRVDASKIADCLRCDFLPECYMAPTEIRDRRRTLRYLYLLVRQMVQTKNRISGLLMETGVTHNKQRLHKVGYFRELLASNEEVSESIRPLLRLSRDTIARLQKTERALVSSLQRDPLLTERIKHLRTVPGVGPITALTWALEMGEISRFRSIRQAISYCGLCGDESSSAEKSLRTPISKQRNKNIQFVLIEAAKLAPRQDLDLALLYEREKQKGNANRATLAVARKMVAYLLAVDRGQRDFVPAEDCRGAAA

SEQ ID NO: 349498 - protein, 319 aa, unidentified
MTQNDLVVVGIDVAKDKVDACIRTVTERRTFPTTASGRRSLIAWLRKHQVGKAVMEASGGYERVWAKALRQTALEVRIVDPKRVRSFAESAGRLAKNDKIDAEMIAWFAETFSEAPSQVEDPAHEEIKALVKGRKSLIDLRARLEMQKEHEVPALVGKAHARLLKKLAREITAIETAIGAKIKATPAFAVRAEIIQSVPGFAEATALTLLAGLPELGQVSNEVAAALVGVAPYDDDSGKRHGQRCIKGGRRWVRNALYMPCVGAATLNNPVFKAFYQRLIAKGKEPKAALIACMRKLIVILNTMIARGEKWDPKRYQVA

SEQ ID NO: 349499 - protein, 365 aa, unidentified
MLHRLNSAATLIQRTPTEAPRLHMYYIGLDVHKKTISYCVKDVSGRIQQEGKVGSSRRELDVWMKTLPQPWSVGMEATIFSGWIYDHLLPHAAQIKVAHPLMLRAIAAAKKKNDQIDASKIADCLRCDFLPESHMMPQEIRDRRRTLRYRHLLVRQMVQMKNRVSGLLMETGVEYNKQRLHKVSYFRELLSTNTEVHPSIRPLLKLSRETIERCQKTEYALVSSLQRDPVLADRIKRLRTVPGVGPITALTWALEIGDVSRFRTIKNAISYCGLCGDERSSADKVMRMPLSKQRNKHIQRALVEAAKLAPRQSHELAVIYDKEKQKGNGNRATLAVARKMVSYLLAVDRQQRDFISGEERRTGAA

SEQ ID NO: 349500 - protein, 403 aa, unidentified
MNNVVGIDVSKGKSMVSVLRPFGEVVAKPFSIGHTGSELKELADYLKSLDGETRVVMEHTGRYYEPVARFLHDEGVFVSAVNPKLIKDYGNNTLRKVKTDKADSRKIARYGLDNWVELRQHTPMDTIRMQLKTLNRQQSLYSKTKTMMKNNLIALLDQTYPGVNTLFDSPVREDGSQKWVDFATAFWHVDCVRNMSLTAFAERYRKWCKRHGYNFSQSKAVEVHAGAQDLIAMLPRDALTKTMVRQAIDALNAISASLERLKAEMQALAAQLPEYPVVMAMHGVGDSLGPQLMAELGDVTRFTHRNAITAFAGVDPGADQSGTHEAKSTRVSKSGPPELRRALFLVMDCLLKTMPQDDPVYRFMDKKRAEGKPYLVYMTAGANKFLRIYYGRVKEYLASLEGN

SEQ ID NO: 349501 - protein, 353 aa, unidentified
MRKMQEFIVQGKRIFVGLEDSKRTWRLCVRCEGMVVHITSIPTLYEGLRTYLLRKYPECVITVMYEAGFQGFWLHDLLEKDGIRCEVTPPNKVNCPKDERVKTDKRDAYRLALNLELEYYTACNVPDKERREDRQISRTLSQIQKDIRAEKNRIRRFLDYHGLNGGLSTGAWTDKDYLLLKNIDLPHSLKASMYGYLTVLETLFAVEKKLEAELKALCEKERYRESVRIKRSVPGVGWLSAIRFTLEWGNLDRFPTGKRFAAFTGLTCREYSTGETIRRGHITGQSSEYIRSWLIECAWRAIRIDPALLDKFRRVWRNSGSKKKAIVAVARKLALRIRAVELSGQPYCISVIE

SEQ ID NO: 349502 - protein, 286 aa, unidentified
MKLYGAMDLHSTNSVTVLINEHDEVVYRKRLANDLKLILEQLSPYQSSIEGLVVESTYNWYWLVDGLMEQGYKVHRANTAAIQQYEGLKYTDDDSDARWLAHIFRLGVLPEGYIYPKQERAVRDLLRKRGQLVRQKTANLLSIQNIYSRNTGASISANRIKQLTAQEVEQMLTAGDVALAVKANLSVMRCLETEIKTLERIVKERVQLRAGFRYLLTVNGIGKTLALTIMLETGAIRRFASVGNFASYCRCVGSQKLSNGKRKGKGNTKNGNKYLSCPVVGSNLYL

SEQ ID NO: 349503 - protein, 345 aa, unidentified
MPIAEVDTFAGIDVSAHELSVALRRGKGDDKPVMGKFPNHPSGHKALVAHLLRSGGRVRVCLEASGNYSLDLALTLQAHRQVEVSVINPRRARRFAESLGERSKTDPVDARVLCEYAARMPWVPWQPPSPVALHLRALTRAIADLGVIHTQQNNRAHAAAASQALPVLVVKEMQRHQKYLEQRMTRLRREALRLIAPDPELDRRFRLMLTTTGIAETSALQILGELAVLPDMLDARQWVAFSGLDPRLFKSGKSVEKRPRISRAGSRHLRRALYMPALVALRRDPYLRAFYLNLLARGKARLQAVVAVMRKLLHALFAMFRTNQPYDGSKLCAVDVAVHAIAACA

SEQ ID NO: 349504 - protein, 330 aa, unidentified
MPEQLGSLHKAGSTKMTKTSIVTAGIDTSKAKLDIAVHNRTERWQVANALPGWRALASRLAEAGVRRVGIEATGGYERGVVEHLRAAGFIVLMLQPLQVKAFGRVHLRRAKNDALDAVLIAACAAALDPPEIAPDPRLTELADYLTFLEQIEEDIRRFKTRLEHIDEPALRRIVDSDIDRLKVRKAAQIRDIAKRLRAYDDLAKRLKLVLSIPGIGERTALAIVIRMPELGRVSREEAAALAGLAPFDADSGQHRGQRKIAGGRSRLRRSLFAAALPAAFRWNKALIALYARLMAKGKVHNTALIACARKLLIYANTVVQRGTPWTEKVA

SEQ ID NO: 349505 - protein, 449 aa, unidentified
MSKVSPPINGLPVIHERAAGIDIGSRFHVVAVPSTLSDEPVQTFQAFTADIQRMADWLKSIGVETVVMESTGVYWVPVFEVLESAGINVMVANARETRSVPGRKSDINDAQWLQRLHACGLLRASFRPGRDIAALRAYLRHRERLLDYAAAHIQHMQKALTFMNLQLHHVVQDITGVTGMKIIRAIVGGERNPQALAEFRDVRCKSSIETIQAALVGNYQPEHVFALTQSLALYDFYQARIDDCDVQIEQALAVLNADKPEPEQPIPKARHRTKQPNAVNFDVRTTLYQLIGVDLTQIHGIGPFLALRLIAECGTDLSKWPTAKHFTSWLTLSPGCKISGGKVLSAHSRKSNNRLTAHLRLAAVTVGRTNTALGAFYRRLAARIGKAKAVTATARKIAVLFYNAMRFGMHYSDPGADQYEQKYRERVIKQLYRRAAEFGFVLQEVECVS

SEQ ID NO: 349506 - protein, 416 aa, unidentified
MNYVGIDIAKNFHVVTIIDENEVKVFKKAFRVENDSDGYSNFITKLDTVSQDKSNFLIGIEATGIYGENFLEFLKTQGYNVKLLNPFQTSRYREQTTMKKVKNDNIDSLMIALFLKDGKYSSGYVTDDEYQSLRTLYRNRTTIQNDMKDVKKRILTNLAVTFPELEYIMNPFTNIGLALLDKYPTAHHYKHSSVDRIVKVFRHIKGNNFNNEKAIQILNASKNSVYSGKAKDARAIAIRSSIRLLQMYLTEIDILEQEIFLLLEKQNISTQEFEENMKADKKTTTLIDNLKSIPGVAEKTIAAIISECGDLTRFPTTAKFIGYLGLFPTENSSGNSKHIGHLSKRGSSIAKHALYMSSVSCMLHNSQLKQLYDTKKSQGKSKKEALIAVSRKLATIIYAIFKYNTPYNPNRVFSKS

SEQ ID NO: 349507 - protein, 366 aa, unidentified
MTEPQLERKLQRHMEQFIGCDAHKKFSVFASINEKGEYGWTSRVGHNLEVFRGFLKDLPSRSKIALETSGCYYWIVDEMERAGHVPLLAHALTAKRRMEGRHKTNERDAQGLAMLLRNGTLPEVWIPPAELRDQREMLRWRMCLSRMRARVKNRIHGVLQRYNIDIAVSDLFGDGGRVKLLARVGELPPYSGQSLLDQLQMVDTIETEISECEQVLQQMLYPSLDRDLLDSLPCVGKILSSVMALEIGDVRRFRGSDHLASYAGLVPAARESADWKRKDRCPRACNVYLKWAYVEAANLISIHRGRWSERHVVQLYERVKQSTKMHGKATMAVARHLAEASYWMLKKQEVYQEPNSKRHVLSSTHG

SEQ ID NO: 349508 - protein, 370 aa, unidentified
MAQPTPLFVGLDVHKDSIAVAHAQGQSADPPVFVGAIGPRQADLDKLIRRLQGKTPDLVFACEAGPCGYGLHRYLTGQGFRCQVVAPSLIPKKPGDKVKTDRRDAIDLARLLRSGDLTRVYVPTIDDEALRDLCRARDAARLTLKNAKLRLKAFLLRLGLHYVGRADWTEAHRRYLAKVVCPTPTQQIVFQESVRAVDEQVDRLRRLEAELLERTPTWRLYPVVRALQALRGVQFLVAITVVAELGDLTRFDSPRQLGAFVGLVPSEDSTGPRRRLGAITKTGNGRARRALIEGAWAYRYPAKVSEHIQRRIDALPKPIQDLGWKAQVRLCKRFRRLTARGTHPNVAVTAIARELIAFMWAIAKEVPIPT

SEQ ID NO: 349509 - protein, 332 aa, unidentified
MSVYVGIDVHRKRSQVAVVNEVGEVLANRNVNNGVTPILGVIGGLPPGTPAAFEAAFGWGWLVQLLEDYGFEPHLVHPLQCKAIASARLKNDKVDAAILAQLLRADLLPEAWIAPPAVRQLRAMLRHRAQLVRLRTLLRNRIHAVLADHGYGRPEGCWSGPGREWLAGLELPAVSREVVEDGLALIDALQVPIDRLDGEVHQRARSEPAVKVLTQLPGVGVFTALVLLAEIGDITRFASARKLASWAGLTPTVRGSDRVVRHGHISKQGSAWVRWILCEAAQTAKRHPDFAASYQDIARRRGKKIATTAVARKLLTRAYHLLTDAASGGAPH

SEQ ID NO: 349510 - protein, 392 aa, unidentified
MQVAADRAEAPAAIQTDLRAIFVSLELSRSTWLITSLSPGGGEKMSKHSVQAGDIAGLLRRFAQLKEKARARTGRDFPIIVIQEAGLDGFWIHRVLQSEGIESHVVDAASILTSRRRRRAKTDRVDGETLVRTLMAFKRGEPRVCSMARAPTPQEEDRRRVCRERRTLVGERVTHVNRIKGLLFAQGVFGYEPLRKGRRERLENLQTGDGRPLPVHLKAQIIRELDRLEILLEQVKAVEAERDGLLKPASDEAASPAAMLARLKGIGPETAAVLWSEGLFRQFDNRRQVAAYAGLAPTPWQSGSIDHEQGVSKAGNPRLRTTMVELAWLWLQNQPTSALSLWFHERVRRLGGRVRKTIIVALARKLLIALWRYTTAGVVIEGAVMKPTPATI

SEQ ID NO: 349511 - protein, 312 aa, unidentified
MTSEWVVGIDVGKDHFDGNRYGSAEVRHFDNNATGQKALVKWLNQAGSGRVVMEATGGYERSLKKTLWTAGIEVAIVNPMRVRDFAKSQGILAKTDQIDACVIAHFGHVTHPMATPLQTEAEEYLSACVERRRQLVVMTTTEKNRLSTCPERVRGEIQEHIAYLEEKIDKLEEEIHSAIKQDSRQLDNCQKIESVPGLDPVTASTLVADLSELGKLNRKEIAALVGVAPFNKDSGRKRGKRKTKGGRAGIRRVLYMASLSACKHNPVIQAYYQKLIKRGKEKKVAIVACMRKILTIINALIRKGETWRTTVT

SEQ ID NO: 349512 - protein, 303 aa, unidentified
MDPPPSLRPCVAGGQDEFGETSSDEKDGPVNEIKTLAIDLAKHVFQLLGVDWQGHLVLQRRVRRAQLPAVLAQLPGCAVVMEACAGAHYWARQIRSYGHEVRLIPPQYVKPFSRRQKNDRNDAEAIACAASQPRMPQVPIKSEEQQAVMALHRFRARRMKERSGLVNQLHGFAGQFGVLLPLGLHPMRRELTRIVDEGPLPAILQVALCDQLEHLKQVAQRLNTLTEQIQHLAQQRPACQQLMRHRGVGPGITTAFAAEICDPAAFKNGRQVAAWLGLVPRQHSSRERTQLLGSPHSWCNNWR

SEQ ID NO: 349513 - protein, 318 aa, unidentified
MSEKDETVYIGIDVSKDHLDVAWSNHASVVQVPNTPQGHRQLVDRMAGEKIHGIIIEATGGYQRVIVAELAVAGLPVIVVNPCQVRNFARATGRLAKTDAIDAKVLAQFGKALRPMVRPLPDEKTLVFQEKLSRRRQLVDMRTAETNRLAQASSADVCRSIKTVLAVLKQQMDELERDLDQTIRTCPMWQVKEDLLRSVPGIGPQTARTLIAELPELGQCSRQQIAMLVGVAPLNRDSGHFRGRRTTWGGRATVRKALYMATLTATQRNPIIRHHYQRLQTAGKQKKVALVACMRKLLCMLNAMLRDQESWQNRYCPT

SEQ ID NO: 349514 - protein, 340 aa, unidentified
MVHVGVDLHKRLSQIAVLTEDGELTQHRLENEGSRIEQFFAQLPAPAPVAIEASGTWWWLVDLLEGLGHQPVLSHPKQTKAIAAARLKNDRVDAERLVLLLRGDLLPKVWIPPRELREARELLRHRVSLVWLRTEIKNRVLALLARRNLQPPGGTSWFTARGQRALQALALSPVPSTIREDSVALLHLLEEQIRRLDQELVRRWGEDLRVRRLMTLPGIGPFTAILLVLELGDVHRFPSAKHLASYVGLTPRVRASADRIRLGHISKEGNRLVRWALVVAATQAARRPGPLRAWFRLVQQRKGKKVARVALARRLAEIVYHVWRDNIDYFEVLRRGGVRG

SEQ ID NO: 349515 - protein, 343 aa, unidentified
MKIIGCDFHPSFQQIAMVDTESGETTERRLLHGDGEAQQFYESLSGPVLVGIETSGNTLWFERLLEKLGHQLLIGDATAIRAAAPRHQRCDPRDARNVLQLLLEKRFPTIWVPTLAERDLRQLLKHRHTLVQMRTRAKNQLQHIAMNQGLQKKRQLWSKAGLEQLKSLALEPWTKRRRDDLLKILEQMDSHIAELSKAVAAEAQHWPQAVLLMSHPGVGPIVALATVLTLGEVSRFARGKHVASYLGLIPREDSSGEHRRLGSITKQGNSFMRFLLVQAGMSAARGDAELGRVYKRLAQRKHHGVAKVAVARRLVLRLYWMLRTNRRYPEVVRMQGSSSHSVA

SEQ ID NO: 349516 - protein, 414 aa, unidentified
MFAVGVDVSNGRSMVAVLGARRSVVVQPHEVPHTADGFAELAARLHALDGEVRIVMEHTGRYYESFAMSMYRAGFFVSAVNPLAIKGYQEGISVRKVKTDKADALKIAQFAIDKWEILPHYTPMDTIRYDLKTLHRQFQLSSKTKTALNNNLIALLEQSYPGANRYFDSPVRPDGSQKWVDFVDTFWHVDCVARVSRKAFVERYQKWRKRHGYNFSEAKAVEIHEDARQRFPLVPKSDTCKLMVREAVAQLNAVSRTVETYRAEMDRLASQLPEYETVMAMTGVGKSMGPQLIAEIGDLRRFAHQKSLVGFAGTDPIKDDSGDKVSDSKPSSKRGSPYLRRTLFVIMTILLQLQPPDDPVYQFLDKKRSEGKPYYVYMTAGMTKFLRIYYGKVRDCLKEKGLWEQPNVDEVNPV

SEQ ID NO: 349517 - protein, 372 aa, unidentified
MQQDSAVFVGLDTSKMKISVAVAEEGRQGEVRFLGDVDHTPEAVRRLITKLAGKYGRLLFCYEAGPTGYGLQRQICALGHDCAVIAPSLIPKRPGERVKTNRRDAVTLARLHRAGELTRIWVPDPGHEAVRELVRAREAAMADLRTKRQHLQSFLLRHGRIYSGSRPWTQVHARWLSNLSFEHPAQYLVLREYRQAIDDAETRLERLTQHVAEVVSSWSMAPVVEAYQALRGVAFLTAVTFVAEIGDVRRFETPRQLMAYLGLTPSEHSTGDRVRRGSITKAGNPRARRVLIEGAWTYRYPARLSRTLQVRQESLPTVVRAIAWKAQLRLCARYRRLMAAGKRQTVVTTAIAREMAAFLWAIGHAVEPRPAA

SEQ ID NO: 349518 - protein, 391 aa, unidentified
MVCIGIDVAKDKHDCFIISSEGEILAEVFTIANNMEGFNRLLEKITACTTAQDKIKVGLEATGHYSYNILGFLLDSGLDTYVLNPLHTNLYRKSLSLRKTKTDRVDARTIAAMLMSDVGLKPYTDTAYHNEELKSLTRYRFDKVKERAKLKQSIARLVCILFPELEKLVPTLHMVSVYALLDEFPGAQQIAGAHLTHLKAVLHDASKGRYSRDKAIEIREAARSSIGSKMPAKSLELRHTIRLIRELDAEIEEIEAAIQSIMGELHSPITTIPGIGTRMGAMILAEVGDFSRFESPDKVLAYAGLSPSTYQSGQLTNCYAHMEKRGSRYLRFALFNAAKFVCLWDPSFAAYLAKKRAEGKHYNVAISHAAKKLVRLIFALERSGQSYHLAA

SEQ ID NO: 349519 - protein, 348 aa, unidentified
MQSTANLPVIGLDLAKSVFQLHIVDVETGEIQRRQIKRAKLTEFFAKCPPSLVAMEACGTAHHWARAIGALGHRVKLLPGQHVKAFLLRDKTDAMDAQAIWVAAQQPHIKPVPVKTERQQTCMALHGMRRQLMKIRIMQTNALRGILAEFGITLPVGHVQLLKTIQGELAKAQQADLLSTDLVVSVQEQLKRIDALQEDIDHLGQRLRAMIREDRQMQAIQQIPGVGDLTASALVGSVGDFTTFRSGRQFASWVGLVPRQVGTGGKTQQLGISKRGDTYLRTLLIAGARSVIARTERSSWISRLLERCHYNVVVVALANKMARTAWAVLAKGATFDHVKWNSTESVNA

SEQ ID NO: 349520 - protein, 322 aa, unidentified
MFVFVLGIDIAKQKFDAALLVDRKTKHKSCKNSAEGFETLMLWLAKQGVQKVHACLEATGSYGDDLAVYLHEAGHIVSIVNPARIKGFAQSELIRTKTDKVDAALIARFCLTMKPDAWTPPPPEIRSLRALVRRVDSLIDMRSQEKNRISTAHESVLFLIKEHIAYLDREIEKIRRQIADLIGRNPHLKERAELLNSIPSLGKATIPRLLAELDELEKFDHVRKMVAFIGLAPKETLSGSSIKGKSRLCKIGNARLRKALYMPALVSIQCNPVMISFYNRLKDKGKNGKVIVCAIMRKLVHVIFGVLKSGKKYDPNFKPICA

SEQ ID NO: 349521 - protein, 357 aa, unidentified
MTTTATAARTILALDLGKYKSVACLYTGDPATATFLTFVTDCDRLHKLVAKHRPDAVVIEACLLAGWVHDLCHEVGLPCHVANTASEAWKFKHQKRKTDRDDALRLAQLFALGQLPTVTVPPPATRQWRALIAGRQRLVGRRVAVQNRVRAILVGQGLAAPRGAKAWTELGLEGIGQFAKPLADCGPDELWRGLLDLALTELRQVRQLADQAEARLDELAQASGAVQLLETVPGVGPRTAEAIVAHLHEPGRFDSGKQVSAYVGLVPRQYQSGESDRRGRITRRGPALLRKLLVECAWVMLRYNPWARAVYQRLSRGKARKKQAIVALARKLLVRCGAMLRDQTPWRDSPAAEAAPA

SEQ ID NO: 349522 - protein, 324 aa, unidentified
MKEVSIVGLDLAKRVFQVHAAGSDGAVVLRRKLSRGQILAFFTELPKCIVAMEACATAHYWAREIGKLGHEIRLLPPAYVKPFVKRHKNDAADAEAIVEAALRPSMRFVIPKTEDQQACSMLFRTRDLFVRQRTQLINALRAHLAEHGVVARQGIANLALLSEIIEEDDRGLELIVVETARLYLEQIKVLSSRIASLEKTLRSEAKRSETSTLLMSMPGMGPITAMAIEAFAPTMTTFRKGRDFAAWLGLVPKQHSSGGKQVLGRTSKMGQRDIRRLLIIGAMTVIRWACRKNLPENSWLARMLSRKPRMLVAIALANKMARSI

SEQ ID NO: 349523 - protein, 341 aa, unidentified
MIIIGCDFHPRFQQIAFVDQETGEYGERRLNHPAEAEAFYRSMAGKQVRIGLEATGNFRWFRRLVQELGFAFVLGDPQEIRARDPRRQKHDKRDARHILKLLLEQQFPVVWQPPAENEHLRELLFHRCRMVRLRVRIKNQLDGMAKNEGLLDTRGWSNKRRKQLEALPLSGWDAQRRSDLLDLHDQLDEQIEPLERAVQEAAENHPQCCLLMTHPGVGPVVSLAYVLIIGDWGRFERSGKLASYLGLIPAEDSSGDKRRLGHISKQGNTMLRWLLVQAAVKAQAKEASWRRQYVRLSLNKHHGVAKVAIARKLAIRLYWMLRSGHNYTQMMERGWHAGQSV

SEQ ID NO: 349524 - protein, 335 aa, unidentified
MKHYAGLDLSMESTQVCIVDDNGRKVVSEKVESSPEAIAMMLERYGPIERAAIETGRMSPAICLGLRELGVPVVCIDARQAHQSLKAMKANKTDPHDAAGLAQLARTGFYKEVHVKSPAAHGVRSVITARSHLVEARVRLDNTIRGLCATFGYRPGAGQGKAFLERIMQAAHIPGLGDAIASLLSVRAELVEQIKEMDRRLRVIASQSQACEILMTIPGVGVQTSAAFAAAVDEAGRFRQSRNASAYFGLVPRRHQSGELDWTGRITKQGDGTVRKLLYEAANSILTRSRETFALKTWAMKIAKRRGLKKARVALARRLAVIMHAMLRDGTLFQA

SEQ ID NO: 349525 - protein, 462 aa, unidentified
MTGKHEIESSEGKRRQLQGLPVIRRNVAGIDLGSERHWVCAPTGDESGREIASFGATTAELIRMAEWLKARRVESVAMESTGVYWIAPHEVLEAQGLQVLLVDTRQLARVPGRDKKTDPRDCEWIQRLHSCGLLQGSFRPEEAVCMLRTLVRDKANLVAERGDWLRRMQKSLDQMNVRVHRAVSDLDGVTGMAILRAIAGGERDAQKLAKLRDPRCSKSEQEIAEQLRGHWREDHLFSLQQALQMYDAVEERIAAYEKEILRKLGDMEREEQRGQTAPPLQNANKAKAIKKRGQEPIRQALYRMSGVDATHIDAIGVETLEVVLSEYGPDLSRFPTEKQFVSHVTLAPHVPTSGGKPLRKRKRNSTSTRVAAALRMAALSLRHSQTALGAYYRKMAQRLGGDIAVFATARKLATLIYRLLRWGQPYVDEGAKAYEARYRQQRIGRLAATAKQLGYQLAPINA

SEQ ID NO: 349526 - protein, 358 aa, unidentified
MAVIEGVCRIVGGVDTHKDLHVAAIVDEQDRIIGTRSFATTRQGYRQMLAWMRSFGELQRIGIESTGSYGAGLLRFMQQAKVTVLEVTTPDKQDRRRRGKNDDLDAQNAAHAAFAGQRTVTPRSRDGMIESLRVLMACRKTAVSARRVALQMIHNTIVCAPDGLRDQLRNLTRMQLVRTLASWRPDLTAYRDLDSAYRIGLKSLARRYLELHDEIADLDAMIAAIVDELAPNLVARNSIGHTGAAQLLLTAGDNPERLRSEASFASLCGASPVPASSGRTVRHRLNRGGDRAANSALHIIAIGRLRTDQRTKDYVARRLAEGHSKLDAIRALKRYLAREVFTLITQRRKEINATQIAA

SEQ ID NO: 349527 - protein, 342 aa, unidentified
MQITTIGLDIAKNVFQVHGIDAAEKVVVRKQLRRGQVLKFFAVLAPCLVGMEACASAHYWARELRKLGHEVRLMPAKDVKAYVKRNKNDAADAEAICEAVRRPTMRFVQVKSAEQQGGLMLHRTRDLLMRQRTQVINALRAHLAELGITAAQGREGLKELLKIIASAADERLPADAHASLVVLAAELQAMQALIGSIEKRITAQHRGNEASKRLESIPGIGVIGATAIAATVTDPTVFRSGRDFAAWIGLVPRQDSTGGKQKLGPISKQGDRYLRRILVVGAIAVLRYAKQNPEKYPWLTQLLARRPFKVVAVALANKMARMAWALLAKGGTYRAPALAAAA

SEQ ID NO: 349528 - protein, 366 aa, unidentified
MKKTSTVRVNGNMIFKGHKLTIGLDLGDRWSNYCVLDEAGEVLLEQKLATTPEAMKQTFERIPRSLIALETGTHSPWVSRLLKELGHAVLVAHAQKVELITKSKRKDDRHDARTLARLARIDPELLGPVRHRSAKAQIHLTVIRARAELVSARTALVNAARGLTKSYGERLPKCGTEQVSRELAAKLSVELREVLEPLLKEIESLNERIKEYDARMEKIARESYPQVALLKQVKGVGTQISLTYVLTLDDPHRFAKSREVGCFLGLKPGRRDSGESQPQMHISKEGDRYLRTMLVQGAHYILGPFGEDSDLRRWGLRLAERGGKNAKKRAVVAVARKLAVLLHRLWVSGEVYEPLRNSHKAMRAVA

SEQ ID NO: 349529 - protein, 371 aa, unidentified
MEVLVFTERTAVGLDVHARSVRAAALDTVTGEVVEARLAADTALVVGWVLGVQERFGVAAAAYEAGPTGFGLARAIDDVGVRCTVAAPSKILRPAGDRIKTDTRDAILLARLLRMDELTPVRVPTLAEEAARDLVRAREDARLDLMAARHRLSKLLLRHGLVYDKGAWTGIHDVWLRQVRREGLRGAGLGTLNAFDAAYDAAAGIQARRKRLEDAIEEMAETSQFSAVTTRLCCLRGVSTLTGFALAVEIGDWDRFTGATIAAYLGLVPSEHSSGGSRSLGPITKTGNSHARRLLVEAAWHHKGSYRPGKTMLARWAKAPAPVAARGDAGNRRLHHRWQVLAAKNKKHTVANTAIAREMAGWCWSLATMDT

SEQ ID NO: 349530 - protein, 378 aa, unidentified
MDAGVSRHSPADLQPDRNLTFLRSKEYAVTSLAERVDLVIGVDTHKHTHTAAIVDAITGGKVAELTVPTDTGGYTKLLTWADTTGPGRRTWALEGGGGYGAGLARFLGAAGEQVAELDRPQRTARRHGAKSDSLDAVRAAREALGREHLAEMKHDGPRAELAVLMTARRSAVEAASLAQRQLHALVIAAPEDLRGLLRGTTTTAMTQSAARLRTRQAWDTQTRTTARVLRALARRVLSLQAEARDHETAIGQVVRAWRPDLLTQPGIGVIVAAQVLICWSHPGRIRSEAAFAMLAGTAPIPASSGMTTRHRLNRSGDRQLNRALHVIALSRTRYDQRTREYIDRRRAQGKTDREIRRCLKRYIARDLFRQLEHTPLPA

SEQ ID NO: 349531 - protein, 360 aa, unidentified
MGPRKEPAVKKDSTKRAEVVGMDVGDKDNQACGLNAAGKIVWERRIANTVAGLGGVFKSLPPCRVVIEAGGHARWITELIEGFGHEVKVVNPRKMRRIYENENKSDVVDARELADAGLCRWDRLPLACLRKKEDQEKLSVLKSRDLMVRSRTGMVNLVRSLLKHEGVRVPKCGPEAFPKRAAGLVPEGLQVAIEPLLKEIAALTERVRELDKWIEATAKNDPGVQSLLQVQGVGPVTSAAYVWTMSDPERFQKSRRVGSYLGLRPKRDQSGETDKQLPITKAGNAYIRRLLVSCAQYIVGRHGKDCDLRRWGLKLAERGGKRAKRKAVVAVARKLAVLLHHLWITGEEYEPFHSRDRAAA

SEQ ID NO: 349532 - protein, 401 aa, unidentified
MRFAGIDVGSERHMLAMVGEEGKVLCRSSPFGEDASGYARLFELLGPPEGCLLALEATGHYWRNLFVALLAKGYAVAVLNPLRTRRFAEEELQRTKTDAIDALGIARFAAQKRPSAAQLPDVATEELRELARLRARLQEDFASRLRQLHRAVDLGFPEFTRHVHTLESQLAAAILSRYPTAASFHGVSVKKLARIVYDGSHKIGEELAHALIDEAANSVGSHHSEPYRLRIGYLCEDLDVLRRRLKDLARDIERKLDDHEVGKLLTTIDGVGPLTAACLIAELGDPARFRSAGAIASYVGVVPRLRQSGKKRFSGSPTIPFGNARLRQALWMVVLNAVRCNPWLRQYYERLRAAGKPGKVAVIAAMRKLLTAVWSVATHRKPFVPHLPRVPAPLGAVTNKA

SEQ ID NO: 349533 - protein, 389 aa, unidentified
MLFCGIDIAKRQHAIALLDGKGQLVQPILSIPNDRAGFDQLIQALPDPDAVAVGLEATGHYWVALYDALTRQGFSVVVLNPLQVAAYRRSGVRKVKSDRSDAVWIADFLRIANPSPTRQDLPVLLQLRELSRFRFRLTDQIGDIKRKLLTILDRVFPEYEQLFSSVFLRTSRALLEQAVSAQEVAEMDLQELAALLQEASRGRFGREKAQQIQAHARRSVGVGFLADAAQIEMRCLLAQIELLEQQRDQIDDALAILMDQIPQHLTSIPGIGPVTGAAIVAEIGDVSRFDSVEKLVAYAGIDPSVYQTGQFRASEAHMSKRGSPYLRHALWLAASVAIKHDPQLQAYYQRKRQEGKHYGTALGAVCRKLLARVYIVLKEQRPYVVKPPC

SEQ ID NO: 349534 - protein, 318 aa, unidentified
MGSMERVKSTTKVAGVDVGKHRLDVAVHGQAEQLEVTNDADGLARLVAWLKEHAVTRVGLEATGGYERAVRSSLEVAGLEVVIHQPLEVRLFARLKRLRAKTDRLDAALIAAATAQVEAVRAAQDPRLMELAERLTAYEQISDQAAELKIFMEHVTLPDLALALREQIQSLVRLKARLAAEILARIKAQSDLLDRYRLLLSLPGVGPVVAASLLVRMPELGDMSMGQPASLLGVAPFARDSGQWKGLRMIGGGRARPRRMLYIAALSAKRCDPDLKAFAQRLIAAGKPAKVAIVAVMRKLIEAANLVLKRQRPWVRHA

SEQ ID NO: 349535 - protein, 346 aa, unidentified
MHAGLDLSRKKLDVCLLSDRGEHLDQLAVPPDVDSLRRLACRIEEVHCQQVCAVIESMTGARIVHDTLEQQGWSVEIADAQKVKGLAPLACKTDKIDSKVLAVLSHRDLVPAIWLPDPSVREERELARFRLHLVKHKSALKNRIHSTLINFGKPCPVTDLFGLEGRRLLKRLQVPEPWRGNITASIELIDDLERQIAEINRRLKEGHAEHPYVPLLLTVPGIGWVLAFTIAAEIGEIERFSTPEKLTGYTGLCPRVNQSGEKDRRGPLTKHGPTYLRWALLEATMHALRHPAYSERYQRTKRRLGKQRGAKVAQVDLARRLAHAIWHMLSRKEKFAPRGAAFRLAA

SEQ ID NO: 349536 - protein, 390 aa, unidentified
MFYAGIDVAMDKHDCVVLDSGGNIVFEVFTFENSRDGFKTLKKVLQACSKNPKKIKVGLEATGHYSDNILAFLNNSGYDPVLFNPLHTNLFRKGLSLRKTKTDHVDAHTIATMLRTEDLKSYSQQSYHLAELKSLTRYRSALVSDCSRHKISLVRLCQILFPEIKNLVPTLHMSSVYTLLSECPSADKIANCNLTHLTSLLSSASKGRYGRDKAIEIRDAARKSIGIKSTVKELELKQTIDLIQIYLQQIETVEEEINKHMDEIESPITSIPGIANRMAAVILAETNNFQDFERAEQVLAFAGLDPSVYQSGQLTSTHSKMVKRGSKYLRYAIFNAAKYVCHWDPTFRTYLHKKRAEGKPYNVAVSHAAKKLTRVMFHLVKTNKELISQA

SEQ ID NO: 349537 - protein, 359 aa, unidentified
MPTKFGVVALFPGRPIVDQYVALDVSLQKTAVCVLNASGSVVIEAELPSEPAALTAFIQTHAPRAARVGLESGPTSPWLWHSLKAAGLPVVCMDARHAHAALSVRPSKSDRNDARGLAEMVRMGWYREVQVKSLAAHERMALLGVRRRLVDMRVEIDGQIRGILKTFGMVVGSGNKGAFAQRARMLVQDHPVLSALVDKLIEVRAVAVAKVAALDKEIRRFVRDDPTLRRFMTVPGVGPVTALAFRSTIDEPDRFKRARDVGPYLGLTPRRYQSGETDRQGRISKCGDRFTRTCLYEAANVLLTKVQRWSPLKAWGTRLARRIGSKKARVAIARKIAVILQCIWTDGTEFWWTKEPATA

SEQ ID NO: 349538 - protein, 458 aa, unidentified
MQTCPPGTVAGFASVSGSSAHEVVERRDEVPTKPAMWQGPGCQGAPLVPLNPSTLASEVFAGIDWGGSFHQVCLINAHGEVIVQQRVQHDLAGLAELDRLLLVHRNAASRLRVAIERADGLLVEHLHTIEVEVFCVSPKISARARERYRLAAAKSDAFDAFVLADTLRHEHRHWRALSPASPALAELRAISRDRDRVVIAQQATENRLRAVLEAYHPAPLHLFSSLDRDITLDFVTDYPTPEQAARVGEARMQQFCRRHGYSGRTDPTVLVERLRPHLLSAAKGTEAGKAFSATMFTEELRLLNAHLRAYDKRLVELLDQHPDAPIFTSFPGIGPVVAAALISEMGEDRGRFPAPEALLAEAGLSPVTRASGRTRQVRFRYAANRRMRHMIDWWAFVAAREDAWSRRIYDDARARRQGKYRALRGLGSRWTRILWRCWTDHTTYDPAIHHKQQEPAQA

SEQ ID NO: 349539 - protein, 416 aa, unidentified
MSELKGWFVGVDWASENHRVRITDCYGKRLGERDFAHGGAGLAEMATWLMSIAGAEASAIHVAIEVPHGPIVETLLERGFNVYAINPKQLDRFRDRFSPAGAKDDSRDAEVLADALRTDMRAFRKLALAEPLLVELREWSRMTDDLNAERNRLCNRLREQLWRYFPAMLELEQDLGAEWFLDLWELVPTPDKAMRIRETSIARILKNRRIRRLAAAEVLAVLRKPAVTVAPGTIEAASAHIRVVAERLRVVNRQLKDAHRQLDRLCGLLAEPTQSEPGQVNEQRDAAILASLPGNGRIVLATLLAEGWEPLQRRDYHALRTLCGAAPVTKRSGKSCIVTRRLACNPRLRNALYHWARVAVQHEARSHAKYAALRQRGHSHARALRSVGDRLLNVACAMLRSGTQFNPSLESQKSAC

SEQ ID NO: 349540 - protein, 368 aa, unidentified
MDNPITGFVGLDVHATSIAISFAATGRSKPRFVGTVGVKPAQLTKALAQLGEPTSLQVVYEAGPCGYTLARELAEQGYHCEVIAPAKVPRGPGDRVKTDRRDALQLANLARAAALVPVVIPDARDEAIRDLSRAREDAVRARLKARQQMKALMLRHGRRYSGKTSWTAAHERYLAAVTFDHPAQDIAFVEYRQAVAACQARVERLTQALAEQVEGWRMRPVVHALMTLRGLDLVAATTLVAELGDLRRFARPRDLMGYLGLVPSEHSSGTKRRLGSITKSGNGHARRVLVEAAWNYRFPARISRALQVRQEGQPVAVRDIAWRAQLRLCHRYRRLSARGLQHNKVCVAIARELLGFVWDIGQQVSPEA

SEQ ID NO: 349541 - protein, 318 aa, unidentified
MDKDKNYFGIDVSKSTFDVYNPDKGHLQFENSTKGFKQFFKVLSFNSHCIMEATGYYHHLLSVFLFDNNIKVSVENPLKIKRFIQSKLTKIKTDKADAKWIYQYALKNDLSDFQPPNMEVRQMLSLLDMYQKQSTQLKNKIHGEQALGVPSKLVLKSLKTSLKNLKKEIDLLEDKLEEIIKKEQGDLLARLQTIPSLGRKTALFLIVLTEGFRNFETASQLCCFAGLTPVIRQSGTSVKGKERISKIGNTKLRNLLFMCSFNACKCNKACRELYERIVAKGKSKKLALIAVCNKLIKQAFAIAKSGLCYDENFISDLN

SEQ ID NO: 349542 - protein, 400 aa, unidentified
MDGPVISFDVSKGSSHMRAFISLDKPLGKVIVIKHDFDGYQQVRDLYQKLREKTGREPVVIYEYTGVYAFPLLTFFVSEGYTIYQIAPLESAKKRKSEIRSTKNDSMDTRTIASIYYGDRRKPLVPFRIQDQKYEDLKEMSRRYQFEVSIAVTEKNRYHRCLDAVWPCFDEVIDYESDISLDVIIEFGHPANIKTAKGVFSAMKKNHPGRSGKREKTAERIVEYTKNHNSGVSMNSYMVRELQEFARRVKEGKRRIDAVLDDLIALALTTDEFRLLQTIPSVKARSAVSIVAEIGDISRFTTVKGLIAFAGLDPTVNESGKKDSKHLQITKKGNKYLRTSLYLSVTNICQWHPESFISKFVDSKIKDGLPKKAAKVAGCAKLLRLIYSMFNNGTCYSEKE

SEQ ID NO: 349543 - protein, 410 aa, unidentified
MEVLHRRCAGLDVHKKTVVACVRLAEENKVVTEVRTFATTTAGLLALSAWLSENGCTHVAMEATGVYWKPVWHVLSDGEFELVLANAAHVKNVPGRKTDVSDAAWLAELLAHGLIRGSFVPDGQTQELRTLLRTRKQLVREKTRHTQRIHKTLEDANIKLESELSDVLGKSGRAMLEAMVAGETDPVRLAALAHSGVKASQATLQEALRGRVTQHHRFLLRLHLGQVDAIDTAIVTIDGEIEAHLAPFRIGVELVSTIPGVSGLSAEVIVSEIGLDMSRFPTDGHLLSWACLSPRNDESAGKRRSTRMRKGSPWLKTTLIQCAWAAKRKKGSYLQAQFLRLKSRRGPQKAICAVAASILTAAYHMLKDGTLYQDLGADHFKRRSKTTQTQRLVKRLQHLGYAVDIKPLAA

SEQ ID NO: 349544 - protein, 480 aa, unidentified
MNIKAKKAKVQALSKKSVINVLSQDEIKKKVQVIEQELKASTWRELETKGKFEKNDKLSFISEEMLIVGCDIGSETHYIRAIDTRGRELSKGAFEFSNSSEGFASAKAWVLKLAAKNDKKQIVLGLEPTGHYWFAIAACMVSNGISVVQVNPYAVKQSKEIEDNSQLKDDRKDPKIIANLVKDGNYGMPYLPEDIYADMRRLSMFRDQLTEDRIRNINRLHREMKIYFPEYMDAFGKIDGAFTLEILKVAPIPSDIVELDEEGLKSLWHEAKLRGRGYSRARVIVDYAKKSVGLTGGTDAGRESIKWFVEQIIQLDEQLAEIENVLHQKCMEIPHAENILEINGVGENILAGILAEMGDISRFDDVKEIQKLSGMGLVACSSGKHKGQTKISHRGRKRLRYWLFQAAKSAVAHAVEFKQLHAYYTTRSMNPLKKMQSLVVIACKILRVIYTILNTGMKYDPERMLRDIRYPQGNTVQAAA

SEQ ID NO: 349545 - protein, 408 aa, unidentified
MWFVGDDWAEDHHDVEVQDGTGRRLARARLPEGVAGIARLHELIAGVVAEEAEPGQVSIGIETDRGPWVAALVAAGYRVFAINPRQVARYRERHGTSGAKSDAADAHTLADMVRTDAHQLRPVAGDSALAEGVKVLTRAHQNLIWDRHRQMLRLRAALREFFPAALEAFPDLTAPDALELLAAAPDPDRAARLSRSKIAAALRRARRRDVEAKAVEVQAALRSAQLTQPAELAGAYAATVRASVALIAAINTQITALGKQVEAHFGRHPDAEIYRSQPGLGDLLGARVLGEFGDDPDRYAGARARKNYAGQAPITRASGKKRVVLARYVRNRRLADALHQQAFCALRASPGARAYYDCLRARGAGHHAALRQLANRLVGILHGCLKTRTLYDETTAWAHHTKDQRAAA

SEQ ID NO: 349546 - protein, 414 aa, unidentified
MFAVGVDVSNGRSTVAVLQSKSIVTLRPFEVSHTPEALGKLVEKLNSLGGETRVIMEHTGRYYEPIAMFLNSSGFFVSALNPILLNRYQENPSLHNVKTDKADAVKIAKFGLDNWEQLRQYEPMDTIRYNLKTMHRQFQLASKSETAFTNNLIALLEQTYPGIRKLLSSPARPDGSQKWVDYVGTFWHADCVRKLSLNAFTERYLKFCQRHKYNFSEEKAAELYRHAQNVVTLIPKSDASKLMVKEAVTQLNAVSRTVETYRAEMNRLASQLPEYDTVMGMYGAGPSTGPQLMAEIGDIRRFPKKNSIIAYAGIDPGKDDSGDVTKKSNKSSKRGSPYLRKTLFVIMDVIIRNKPVDDPVYQFIDKKRSEGKPYYVYMTAGGTKFLRHYYGKVRDCLKEKGLWDNSVDDSRDSE

SEQ ID NO: 349547 - protein, 373 aa, unidentified
MPKYSTAFGMDVHLRSTTVCALDADTGEAVTRRFPGNPWGEIAGWMGGFPGPSLAAYESGYPGFAPQRELAGLGVECVVAAVSKIPRSAADSASKNDRNDAARMAKAILAHDISPVWVPSPEVEGIRDLAGAYDGATARLATAKQRLLAFLAKRGFAYGGTTPAGNPRKYWTYDFLRWLDKVRPEDDGGVRTLAALRSEVEAAAEARADLLSEYRAAVDASPIAAEVAALQSIKGCAFALAAAFSAEVGDFTRFRSGRQVTAYFGLAPSQRSSGDSVRLGGISGAGNALVRKLAVEGSWCYAAARHQPKLMPRDTGVPLEIRMHGRKGSERLLRRREEMLARGMPQAKANAATAAELVRWLWALGAMCREGAE

SEQ ID NO: 349548 - protein, 368 aa, unidentified
MSKSSKLYVGMDVHKDSIDVATGDDAAGEVRHYGAIGGEMAAVSRLARKLESTGKVLVFVYEAGPCGFGIYRMLRARGHECWVVSPGMTPRSNADRVKTDRRDCLKLARLARAGELTPIHVPDEIDEAMRDLVRAREDAVVMQRQARQRLGALLLRNDIRYNGTTLWSPAHRRFIAELKLPHPTQHIAFEEYAQGVDEAGQRIERLQAAIGDELTRWRWRPVVQALQALRGIRTIHAVRLVAELGDLTRFAHPRHLMGFLGLVPSENSTGNRRRQGAITKTGNSSARRALVEAAWAYRYGARVSVGIARRQSGLPKPVTDLAWKAQLRLCSRYRRLSARGLNRNKIIVAVARELSGFVWALGQQVKPL

SEQ ID NO: 349549 - protein, 428 aa, unidentified
MNYNQNRKISQITENTLIVGVDIAKHKHVARAQDFRGIDLANRLVFTSDLKGFQTLTQWIDHLKGRHQKNTVIVGMEPTGHYWMTLAYYLKTHDIKCVVVNPLHVKRSKELDDNSPTKNDAKDAKVIAQLVKDGRYSEPTLPESIYADLRQGMKLYDQMVQDRNAIKAKVHNVLDRYFPEFLTVFKNWEGNAALQILRAGLFPQDIVKMPEETILFEIKKAARRAVGMKRVQKLKEAAAKSVGLSVGVRFAKKELRYLMEQYDDLTARIDELAKELSEMVLTIPGAKEISAIKGIGVMTVVGFFAEVGDLSQYHHPRQILKLAGLNLRKNESGEHKGRTTITKRGRKRLRALLFRVAMPLAATNPAFKRLHEYYRHRPENPLTGKQALIALCGKLIRVMFVIGRRQCAFSEERMIQDMPHLQNQKQVA

SEQ ID NO: 349550 - protein, 310 aa, unidentified
MIIAPGFVGIDVSKHHLDIFDAAVGTSVRLANTELAIAELTHDWLRRDAFVLFEATGRYDLDLRHGLAAAGVRFARVNPARARDFARAAGFLAKTDAVDAQMLAAMAQCLQPPLAEAGIAARERLAALNKRRDQLVANRQQERTRQRECSDPISQQSLTAHLAWLDAAIEALQAQIAAAIAAEPELEHDRRLLASVPGVGPVTAAILLALMPELGRRSPKQLAALTGLAPFNNDSGTRRGQRSIRGGRKRVRDALYVAAFIAARHAPRFKTFFKTLIDAGKPRKLALIAVARKLLTVLNAILRDRQPFHA

SEQ ID NO: 349551 - protein, 358 aa, unidentified
MVTTTNIRKLNDRILASKCETVKIGADVHARDIVACVQLDGALPERPVKLTAEQLIGLVAGLIKAGRTVHVCQEAGPCGYVLHRRLLAAGAKSLVVVPTALADGRQQKTDGLDATALVDKLDRYLRGNTKAFTVVTVPTPEQEQVRGEVRLREQLKHDRHAWEARGRSLLLAQGHHVTGPWWRAGNWAPLAATLPAWLVERLEVIRKMVLALDAEERALHTQLEACAPAQLPKAVGALTWVMLAREICDWTRFKNRRQVASYTGLCPGGYQSGGTQRAGHINRHGNPVVRHLLIELTWRLVRWQPDYPPIRRLLESGAKGAARRKLAVATARKLAVDLWRLATKQTTPETLHLLVPTA

SEQ ID NO: 349552 - protein, 331 aa, unidentified
MNQWHHMGIDVSAKTLDVALTGKDIPITSATFPNTSSGHRQLIKWATKRGRSARVCLEATGIYSAAIALVIHQHPRLEIMVVNPKAMRNYGQARMQRAKTDRIDAQLILDYGQRMPFVSWHPPSEAVLKLQAITRRITPLKNEIQREKNRLHADSYRVTSTDLIEQDIRVHIRHMERRIQYLTDKGMVLVQEASRLHRLFQRLLSIPGIGQTSGLRILAELASLPRGMKPAQWVAHAGLDPRPYESGSSVHRPQKIAKIGNKFLRTALYMPALVAIRHQPQVNAFYNKLIAAGKNPRLAITAVMRKLLHSVWGIWKYDQDFDGQKFYRTVA

SEQ ID NO: 349553 - protein, 421 aa, unidentified
MNKSEQDSGGWLEQRGFGGLDWASQKHSVVVVDPRGKVLEDFEIEHSALGWKKFRERMQPYGSIPFAVETSQGAAVEQLLEAGMQVYPLNPKSAQSYRQRKAPSGVKDDRLDAWSFADALRVDGHGWKPLRPEDSLIKELRLLCRDEVGLIEQRTAFINQLQHALAEYYPTALEAFEDWGAVSAWMFLQRFPTPQLMEKAGKRQWEKFLHSCRLWRTESGPRRMELFAKATEFCGSEPTAKAKSILALSLVKMLFALEDRLSEYRKRIEELFNSHPDHDLFGSLRGAGPKLAPRLLAEIGDDRERFEGDAQNLQCLAGTAPVTRRSGKHRECHQRWACNKYLRHAVHLFSEQSLTRCAWAETYYKAHRAKDHSHAKSLRCLGQRWLKIIHKMWMNRTPYNPELHHRNQVKHGSWVFRFQAA

SEQ ID NO: 349554 - protein, 443 aa, unidentified
MVCKEMAAVMEPQEIEDEEHEQILERVAAVDVAKSAGMVCTRVPHEMRPGKRRTRVWQVDAATNAILELADHLRCQGIEKVTLESTSDYWRIWFYLLEAAGVDVQLVRARDVKQAPGRPKTDKLDAVWLAKLTERGMLRPSFVPPVEIRQLRDYTRLRTDLTRERTRHYSRLEKLLEDALIKVSAVASKLDTLPVRDMLEALIAGERDPQALARLARGKMRAKHDRLVQALTGKFDDHHAELARMLLDQIDALSAQIGKLTTRIEELIAAIPAAQGIDPGGTTGPAAGQGAGAPVLPAVDRLDEVSGIGREAAQALIAEVGLNMAQFPTPAHLVSWTKISPQTIQSGARNRAGHTGKGNPYLKGILGEAAAAAGKTDTFLGERYRRLARRRGKLKALVAIARSILVIVWHLLACATRRCCFRMEVRDRPSPRRRSGGVKLEAA

SEQ ID NO: 349555 - protein, 367 aa, unidentified
MKKISTAGVKQTKNFSDQKLTIGLDLGDRSSWYCVLDEAGEVLLEQKLGTTPKAMKEVFGKVPRSRIALETGMHSPWVSRVLSELGHEVIVAHARNVRLIGESRRKDDRFDARTLARLARIDPQLLAPVQHRSAQAQSHLMVIRARAGLVRARTSLINTARGLTKSYGERLRGCNPRNMNGEKAQGLSPELQAALEPLLAAIESLSERIYEYNQKIEKIAKESYPRVARLKQVKGVGTLIALTYMLTLEDAQRFRKSRDVGCYVGLQPGRRNSGQSEPQLHISKEGDTYLRTLLVQGAHHILGPFGADSDLRRWGLKLAERGGKNGKKRAVIATARKLAVLLHRLWVSGEAYEPLRNSRPMRLPAAA

SEQ ID NO: 349556 - protein, 388 aa, unidentified
MVGITAYKRRPLMLRIIKIGMDVHSKKYALCALEPKIGEEDRLLAATEIPADYKYILAFIADLQRKLGLDNDYDIVCGYEAGCLGYSLYNQLISSGVKCVILAPTTMLTPQGKRIKTDARDARMIAQCLGHGGYHAVYIPDKEDTSVKEYIRMRDDHKSDLKKMKQRIGAFCLHNGYYYEKEKWSLVHLDWLRKLSLSPLLRETLDEYLATYDSLCAAIKRYDERIEEIAKEARYAEKAKKLTCFLGIKTHTALSLIVETGDFTRFAKGNVYGAYLGLAPGENSSGDKVRRGSISKAGNTHLRKLLVEAAHSICKGKVGHKSKALRARQRGNTTDVIAYADRANIRMRSKYYRMIRHGKKANVVVTAIARELACYVWGMMTDNITISV

SEQ ID NO: 349557 - protein, 323 aa, unidentified
MAKPITICAGIDTSKYTLDVALAGRREPLQVANTPDGHAQLLAWLRQHRVKRIGIEASGGYEQPVVAELRRKRFVVVMFQPAQVCAYGQFQQQRVKNDKSDAALIAACTAAVRKIHAAPDPRLAPFAEHLTLIDQLGEDSARLKNRLETCRNPRFRQRWKQEIARLQKCQKEELKALAAAIRQHPDLAQRLDLISSVDGIGLPTAIAILVRMPEIGQITREQAAALAGLAPYDDDSGERAGARHIAGGRERLRRALYTAALPASFRWNRQLIALYQRLIAAGKGHRRALVACARKLLIFANTIVARGTPWQDGPPDKIALTTA

SEQ ID NO: 349558 - protein, 320 aa, unidentified
MTISNSQVVVGVDVAKDEIVVYRADQQKSQVVTNERSALKQWLKKLPAHSAIALEATNTYHLDTTEMAHEMGHDVYVIDGSRLNRYRDGIGIRAKTDALDAELLARYLSKESDRLRIWNPPPKAYTQLKSVLRRRAELVQHRVALKQSWKDEPLLKEALANYLANIEQTEKAIQALLRNIVIEAGMDAQVKRCQAVEGVGVLTATAAVTAFMRGEFSDSDGYIAFLGMDPRVRQSGKKDQRRYLSKRGDSEFRRLFHNSAMAASRSATWKPYYQRYLARGLKGTEALVILARKLARVLFALMKNQSEYKPNSMFGGSTQT

SEQ ID NO: 349559 - protein, 366 aa, unidentified
MKKNSTVANSGKQIFKGKKLTIGLDQGDRWSFYCVMDEAGQVILEQKLPTTSEAMKQAFGKMPRSLIALETGTHSPWVSRLLTELGHQVIVAHAQKVQWITKSSRKDDRHDARTLARLARVDPELLGPVRHRSVKAQLHLTVIRARAELVSARTALVNAARGLVKSYGQRLPKCGTYQVSRELATVLSTELRDVLEPLLQEIESLNERIKEYDGRMEKIAKEVYPEVFLLKQVKGVGTQIALTYVLTIEDPYRFAKSREVGCFLGLRPGRRNSGESEPQKGISKEGDRYLRTMMVQGAHYILGPFGEDSDLRRWGRKLAERGGKNAKKRAVVAVARKLAVLLHRLWVGGEVYEPLRNSQKAMGEVA

SEQ ID NO: 349560 - protein, 338 aa, unidentified
MKLYGGIDLHSNNSVLVLIDEEDRVVVEKRLKNDLGLMLGELAPYRKKLTGLVVESTYNWYWLVDGLMESGYRVHLANTAAIKQYEGLKHTDDRHDARWLAHLLRLDILPEGYIYPREARAVRDLLRRRQRLVRERVSNLLSIQNQFARLGMSGFSAERLKRLQDADLEGLIIDVNVRSALAANLALVRCLNLQIERLEREVLAQVKLAAQFAPLMSVTGIGKILALTIMLETGEIGRFAKVGHFASYARCVDAKRLSNEKKKGSNNAKCGNPYLAWAFVEAANFAIRYSPRVKRFFQRKCAKTNKIVAFKACAHKLARAAFHVMRDRVAFDEVRACA

SEQ ID NO: 349561 - protein, 419 aa, unidentified
MKVEYGNVAEDAVWAGVDTHAATNWLSVVDARGSELFSGEFATDPEGYRKLCDEIRRLGSPVAAGVECTGTYGAGLVRAMAAYGIACYEVITPGRPRRGPGCDKDDAADALRAAKQALSGENLAVPKSQDGWVEEVRNMTVAREELVKQCTSLANLALATVRKGPDEIRARLERLGTAKMMGVLAGWDEAEADPICDAVMFSLAALGRVWAEARRSARLLEERIERTLKAGNPALASMYGCGPISAAMLAIAAGDNPERMGSEASFAALCGVSPIRASSGKVERHRLNRGGNRNANKALHIIAMHRMRTDPRTTEYVERRRAEGLSDREIRRCVKRYIAREAYRLIMHPYDVPIEGKGPEMRAERIASGVSQKDAAIALGVTASTLCDLELGHHQFRELALRYRKWIDDGFPLEAGIAS

SEQ ID NO: 349562 - protein, 370 aa, unidentified
MESIVYVGMDVHKATYSLCALDKATGALLAETQCASEPKLVEKFINGLAEELDPDTKFVTGYEAGILGYSLYRSLKNLGIDCIILAPTTMYSSAKNKMVKNDSMDARMIAKNLAANTYCAVYVPDEADNEVKEFIRLRKMMKKDLIRVKQQIGMFLLRQGLKCSASKWTLAYMDWLKKVPLSPVLRSVLDEMTLQKSELEEKIARYDQTIETFANSERYTKPIHALTSMKGFKTTTAMTIHIEIADFKRFKTAKAFMSYVGLNPSEHSSGDHTIKGGISKQGNSIVRTTIIEATQGLVKGSIGYKSRALKARQAGQESAVISYADKAGAHLHRKFTRMLTQGKSYNVAIAAVARELAGFIWGMETGNINY

SEQ ID NO: 349563 - protein, 428 aa, unidentified
MNYNTQNAKIASITEKTLIVGIDVGSETHFARAFDWRNYEYTKKPLEFSNTEAGFMMFKAWVEDIAEKQGKTAVIPGMEPTGHYWFALGKFLQDSGMKPVHVNPHHVKKSKELDDNNPNKNDRKDPKTIAALVNEGRFSYPYIPTGIYAEIRSLSNLRFQTQEELTRIKNRIARWFAIYFPEYKDVYGDLMAVSGRMILKEAPLPEDIRILGVNGVNQIWRNAKLRGTGMKRAKILVSAAEHSIGSKEAPEAARIELKNLLNDMDVYVSRMEELLQTIEEKLKTIPYVDKLMEIKGIGLITVSGFIAEVGDIGRFDNPKQLQKLAGYAIVANDSGKHNGESRISYRGRKRLRYVLYEAAISLVGKNAEFKEIHEYYRTRKENPLKKMQSVVAVACKIIRVFYTILTKGVDYDPMKLMSDIRRPQLQAA

SEQ ID NO: 349564 - protein, 340 aa, unidentified
MRQLYVASDLHGNNNLLGIIDGEGKRIFKKKLPNDPLLINDTLKLFKEEIVGIVVESTYNWYWLVDALMEEGYKVHLANPAAIQQYSGLKHADDKHDAFWLAEMLRLGILPEGYIYPKEERPVRDLLRKRGHLVKLRTSLILSLENIISRNFGRKLPVNDVKGLRKDHVTPLFEGKEDLALAGRVSKETIDFLTHQIRQIEAVVEKRIQLKEAYRYLLTIHGVGKILGLTIMLETGPIGRFETVGDYTSYCRKVPSQWISNGKRKGSGNRKNGNKYLSWAYAEASDFARRFHPESRAYYNRKMQQSNPAVAHSALSHKLARAAYYIMRDQVTFRPEKLFG

SEQ ID NO: 349565 - protein, 371 aa, unidentified
MFERTSIGLDVHARSVVGCAIDGDTGEVFRRRLTPDFGEILAWILSMPGPVKSVYEAGPTGFGLARFLLASGVDCVVAAPSKLQRPSGDRIKTDANDALHLARLLRLGEVTAVAIPTVEQEAARDLVRAREDARGDLMSTRHRISKLLLRQGIIYTGGKAWTVQHGLWLDRQKFDSAPLQLAYDSCLGAMTAVLDRRDRLDRAITELAYNSQYTPVVRNLECLRGISTLTAFGLAVEIGDWERFTGRSIGAYLGLVPSEHSSGQSRSQGSITKTGNGHARRLLVEAAWHHRQPYPRPSSLMRQRWALASPTAQARGHSGNRRLHERWLVYLEHKKRPVIANVAIARELAGWCWSLATMPADPGQSHPVLAG

SEQ ID NO: 349566 - protein, 310 aa, unidentified
MDAIFVGIDVSKDRLDVHALPSGEAFEVARNGQGLEELVERLRALSPTLVAVEATGGFETIVAAAIAGARLPLAVVNPAQVRHFAQAVGKRAKSDPIDAFVIARFAEAVKPEPRGIPDEAARLLAELVGRRRQILEMLVAERQREKRAANPRVTKSLARTIKMLKKELVDVDRDIDTAVRGSPVWREKEDLMVTFPGVSNILARTFLAEVPELGSLDRRRIASLAGLAPYTRQSGRWKGKSMIGGGRAAVRTALYMAALSASRYNPALKLFYQRLLASGKPKMVALIAVARKTLTILNAMLRDQKPWQHA

SEQ ID NO: 349567 - protein, 340 aa, unidentified
MGEQYVGIDLHRRRSVIVRLTPGGEVLETIRIDNDPVALSLELAKAGPDPEVVLEATYGWYWAADLLQACGARVHLAHPLGVKMFGYQRVKTDARDSTNLAELLRMGRLPEAWLAPPAVRELRELVRYRAKLVALRSGLKGQVHAVLAKEGVRVPMSDLFGVAGARLLDELHLGGAYALRIASLRRLLAAYDQEITLLGREIATALAGDLGYLALQTIPGVGPVLAAVFVAEIGDVHRFAGAPQLCSWAGLTPRHRESDTTVRRGPITKQGPRLVRWAAVEATQRLPAASKQAADFHRIADRRGTGIGRVAAARRLLTLVYYGLRDGQVRCLSPASTEAM

SEQ ID NO: 349568 - protein, 406 aa, unidentified
MGPTASNNLMEVIPVIIVAVDVAKDKHDCFITNTDGEVLFDPFVIRNNQDGFDALYQKICSVTDSLQNVKVGLEATGHYHLNLLGYLLDKGLSTCLINPLQTSLFRKSLSFRKTKTDPVDARAIARLLMSDRTLQPYSLTSYQNEELKSLTRYRADKVRERARLKSSLARLVVILFPELEKLVSILHMATVYDLLREFPGASYVASAHLTRLCHLISDSSKGHYGKEKALEIREAARHSIGSVFPAKSLELRHTIDHIRFLDDEIDEIEAQIFALLDKDPPKMLDIPGIGPRMAAVIVAEVGDFMRFSSPDKLLAYAGLSPSTYQSGQLTSTYAKMEKRGSRYLRYALFNATKYVCIWDPVFKDYLAKKLAEGKHYNVAISHAAKKLVRLIYHLETTGETYCSKAA

SEQ ID NO: 349569 - protein, 391 aa, unidentified
MVCVGIDVAKDKHDCCILDSDGMVRADCFTIPNNMDGFKQLLQTIRNCTKKSDKIKVGLEATGHYSYNILGFLLDNGLPTYVINPLHTNLYRKSLSLRKTKTDRVDARTIATMLLSDVDLKSYTDTAYHNEELKSLTRYRFDKVQECAKLKQSVSRLATILFPELEGLVSSIHGTSIYALLGEYPGAKQISEVHLTKLTNLLTTASKGRYGKEKAIQIREAARASIGSVMPAKSLELKHTIKLIQELASEINEIEDSIQKIIDELNPPILSIPGMGVNSAAVILAEIGDFSNFSSPDKILAYAGCSPSTYQSGKLTNCYAHMEKRGSRYLRHALYNATKYVCYWNPVFAEYLAKKRAEGKHYNVALSHAMKKLVRLIYALQKSGKAYLAAA

SEQ ID NO: 349570 - protein, 350 aa, unidentified
MEAYDGPQIVGMDLHRRRSVLVRMAEDGHKLSTVRIANSPARLAAEIKRAGLHPKVVLEACYGWYWAADTLTAAGAEVHLAHPAGVKAFSHRRVKNDELDARDLADLLRMGRLAEAWIAPAEIRELREITRYRGKLVQLRTSCKDQVHGVLAKLGIEVTCSDIFGAWGTQWLDELPLPQPYSWKVASLRQLIGWLSAEITVLEQVTAELLAGHDAYRAVQRLRGSRRVLAAVIVAEIGDITRFRHPARLCSWAGLTPRHYESDTTVVRGRITKQGSRPLRWALIEAVQRTPAGTPVRQAEDAIIARRGPQARNIAKVAAARKLLTCVFYAMRDGHVRALDTPGAAAPETA

SEQ ID NO: 349571 - protein, 412 aa, unidentified
MQVLYARGSDLDVHMKTVVACVMITQANGRVDKSIRTFATTTAALLALAEWREGLQVSHVAMESTGVFWRPIYTVLEDQFELLLANAHEIKALPGRKTDVRDCEWIADLMRHGLIRPSFIPPKPVRVLRDLMRYCKSFVYQHTQDINRLHKVLETATSKLTSVVSDVWGRSGQNMIKAIMLGESDAEILSELARGTLRGKLPQLQAALEGRIQPHHRLLLQHLFAHLRFLESAMQQLLQEIAVQMEPYQAVVDLLQTHPGVQAVAAMGFVSEVGSDLSRFKSAKHFASWIGVCPGNNTSAGKHKHGKTTKGNVYLRALLAEIVWGMSHTKDNYLSAQYHRLARRIGKTKAIVAVSHTVAVNFYHMITKQVPYQELGANYFDTFDRERLTKHTVKRLEALGYEVTLTPKEVNA

SEQ ID NO: 349572 - protein, 434 aa, unidentified
MQVTRGMRRRSEKQARRRERLPADALIAGVDLAKKEAVVVYVRASDRARVGKLRVGSDPAGRARLIARGRELVAAHGTGPLVVAMEPTSHFWKPLARAAEAAGVGYVLVQGFVVAHARELDDLTRDKTDTRDATLIADLAAELRFTETRLPEGPWAELEILVAARDARRVERSGALQEMRALLELVWPDLLEACPDLIGTHLQALLRTGLTPQAVATLPRHRFTALLRRHHPRRFLRSMAARLHAAAHDVPELPETPAAALRWRLAAERVALADTAIAELDARMIELLGQTGYGWLRGRIRGLGDATLAALLALTGDPARYDDARCLVKLAGTNPTERSSGEYEAAGGIHRRGRPILRSMAYQAAVCLVRHEPEFRRRYHELTDERRAHRLTPKQAYVALANKLLRTLWSMATSGRGYEPAIARGEVRPLPIAA

SEQ ID NO: 349573 - protein, 323 aa, unidentified
MLIRAKGAGMKKEVEIFVGIDVSKGWLDVAVHEQKETDRCSNDEIGIGSLVKKLRKLKPQLIVVEPSGGFEMLVVAELSQAGLAVAVVNAKRVRDFAKSTGQLAKTDKLDARVLAHFAAVIRPAVRSLRTEEEEQLTALLTRRRQVLDMLTVEKNRLVTVRAKMRPDLETHIHWLSTNLKELDQEIEEFVKGSPIWKEKDTLLQSVPGVGPVTSATMLGMLPELGLLNRQEIAALVGVAPVNKDSGRKKGKRRIYGGRGDVRSVLYMAALSAKKHNPFIRKFYERLIRHGKEKKVALTACMRKLLVILNAMVRSNQPWRSQAA

SEQ ID NO: 349574 - protein, 392 aa, unidentified
MYIVGIDIGKNHHEASIVSPEGKQIGRSLRFATTHKGADSLMRFIFKNIGNSPCVFGMEATGHYWYPIYSFLKAKGYTIYVINPIQSDSLRKMYIRQTKNDSIDSFLIAEVIRFGQFGTTSMADENILAMRQLCRYRDSVISSRTEIKLRIGTIMEQIFPEYEKQFSSLWVSTSMGILEKYLTPENIENAPIDELFEIIKDKSHNRLTRAKAISIKEAAADTFGIKIAQDAFSFQLKQLIDRMNFLDKQIEALDCQILEYYEKFDCYLHTIPGIGIIGAATILAEIGDISRFKNSSALVAFAGIDPTVRQSGEFNSTHNHMSKRGSPYLRHAIFLAATTCSFHNSPLNAYYKKKRDQGKHHLTATGAVARKLTTVIYAVLRDSKPYEPKKFC

SEQ ID NO: 349575 - protein, 469 aa, unidentified
MPDARRRPPRARRSSAVLDHLNPNAAGIDCGSASHFVAVPVDRDPTPVRSFPTFTADLHRLADWLTTCGVTSVAMEATGVYWLYAYAVLEAAGLEVIVVNGRYVRNLPGRKTDMSDCQWLATLHVHGLLRGGFVPPAEIRRLQDYQRLRGDHISEAASQVQKMQQALERMNIKFHDVISDLTGVSGMKVIQAILAGERQPARLLELCDKQIQKKKSERVLESLHGVWAPEHLFALGQALSVWEFYQKLLTECDRQIEAVLKDLAGPPPSPPPSSPENGEAKGKAPKPPGKNAPQIEDLHALLVRICGGRDATNLPGVADYLWLQLVAETGIDLSAWNTEKHFMSWCGLAPGTRQSGKRKGSVKRQRNRAGRLFCAGARSLVQSVDKGLGGFVRRISHRKGGLVATKALARKLAGLYYRVLRYGLEYAERGLREYEQKYEESQRRLLGKLAAKHGFKLVSEPALATQSSG

SEQ ID NO: 349576 - protein, 405 aa, unidentified
MVTVGVDWAEAHHDVAIHDPQGRSLRTGRIDTGPAGFSELLAMIADCGAAPETTAVAVETDKNLLVVALQGAGFEVFAINPRAVARYRERVGQAGAKSDARDAAILADILRTDRHLHRVLPHPSEQARAVKALARQHQEAIWALHQTLSRLRSLLLEFYPAAVTTFPQLKHHTALAVLAAAPTPAQGRRLTRRQVVTILHRVGRRNDAGLAEQITTGLRGPALAQPQPVEDALGVSVAALVTVAQTMTAGIDALEAQLAIVFAAHPWAPVLRSAPGLGPVLAARVLAEIGDDPTRFATTANLRSFAGTAPVTRASGKARWVQARRVRNKRLADACHWWAFAALTRSPGARAHYDRRRAAGDHHNAALRHLANTLLSKVWHCLQHQQAWNEQQAWPTRADQPAAAA

SEQ ID NO: 349577 - protein, 343 aa, unidentified
MQSISTIGLDIAKSVFQVHGVDAAGQVVIRRQLKRRFVLSFFEKLSPCLVGIEACASSHYWSRELQALGHTVRLMPPAYVKPYVKRQKNDTTDAEAICEAVTRPNMRFVPTKTVEQQSGLMLHRARHLFVRQQTAVINSIRAYLAEFGIVAPVGRRGVEQLLEVVADTADRRLPEVARACLAALGSQLRALKAQILEFDRRIIVWHRSSATSKRLDAIPGVGPALATALVASVADAKAFRSGRDFSAWVGLVPKQNSSGGKDKLGSISKQGDRYLRSLFTAGALAVIRYAKIHGARHRPWLTALLARRPTKVAAIALANKLARMAWAMMARNERYREPAALTA

SEQ ID NO: 349578 - protein, 310 aa, unidentified
MDARFVGIDVSKDRLDVHVLPTNETFTVARNGEGLVALNERLAGLGVTTVAVEATGGFETVVAASLAGAGLPVVVVNPAQVRAFAQALGKRAKSDPIDAGLIARFVEATRPEIRPLPDEQTQALGDLVARRRQIIQMIVAEQNREERATIKRVKRSIQRLVLALEKELAELNQDIDDMVRGSPAWRRNEDLLRSVPGVGPIIARTLLSEMPELGTLDRREVAALAGLAPWTRQSGKWKGKSFIGGGRSSVRTVLFTGALAAARFNPPLRIFYEKLRDAGKPKMVATIAVARKLLTILNAIIRNQKPWKPA

SEQ ID NO: 349579 - protein, 424 aa, unidentified
MSKKNSSPAGLQALYARVCGLDLHKKLIVACVRILNAKDGTVQSTQRKFGTMTADVRELREWLTEQQVTHVAMESTGIYWQPVYNLLEGHFKLLVINAQHLKKVPGRKTDMKDAQWIAQLLQCGLLRSSFIPDRQQRELRDLTRQQTKLVQQRNAVDNRIQKVLESANIKLGSVASDVMGVSGRKMIEGLIAGQTDVAALAEMAQRRLRDKIPQLQRALEGDLTEHHRFLLRELLEQYDYFEKKIASISERLTTVMPQPFRAAVKEIDPIAGIAERGAQALLAETGIDMSRFPTHKHFTSWAGQCPGSHESAGKRRSGKTPAANRHIDAALTEIAHAAVHTKNSYFKAQYHRLAGRRGKKRAIGAVKHSLLVTVYYILRDHKPYKDLGVDYFDKLNPQQRIRYHVRRLQELGQEVELSPIADAA

SEQ ID NO: 349580 - protein, 347 aa, unidentified
MRFYTQQHKHYCGIDLHAKAMYVCILDQHGTKLVHKNLPTTPAAFLRVIAPYRDDLVVGVECIFTWYWLADLCTKEELVFVLGHALYMKAIHGGKAKNDKIDAHKIAVLLRGGMFPLAYVYPAEMRATRDLLRRRCHLVRKRAELLAHIQNTNSQYNLPEIGKKLAYKANRAGVEEHFPDPSVWKTSAVDVSLIDHYDKLLDEVELYITRTAKAHDVQTFARLQSVPGIGQILALVLLYEIHDIARFPRVQGFVSYCRLVKCAKESNGKRLGTSGKKIGNVHLRWAFAEAAVLFLRHNQPGKEYFAKLERKHGKAKALTVLAHKLGRAVYYMLTREQAFDLTRFVTA

SEQ ID NO: 349581 - protein, 428 aa, unidentified
MDELDRNRLEEFRQLRQEVRHSEEYLIVGIDVAKERHHAFFGTATGGTLLKRLVFSNDYEGFTKLLDQAEVLRVRHDLKKVVYGMEPTANYHKPLGEYLIHLGRSVVLVSGVTVARNRESLDGRWDKHDVKDSANVADLISQGKCLYYEYPSAQLRGLRGLLSLKRRLKKQEHGYRVRIRNNLIAQYFPEMDRDYDRLGAEGLSVMRWCFPPSQMTVLDVEPFIERVTSGRIRVEKRQRLEGIWEKAGESIGCDGVPGVEHEAKVMVEGVRQIREMIKETEDKIQELCKEFSEYPYVLTIPGFGPDLSARVLGAIGEADRFQNGKQVLKLAGLDLSADRSGKDSDKAIPEISKRGKADLRYALYQAALIASTKNQDFMRYYARKLEGRQKEKGIQTKMRVKLSAKMLLIAWTLMKKKEAFDPAYLNMG

SEQ ID NO: 349582 - protein, 356 aa, unidentified
MSEKLNSAIAVIGIDIGKNSFHLVGQDRRGALVLRQKWSRGQVEARLANLPQCLIGMEACVGAHHLSRKLQALGHDARLMPAKYVRPYSKGEKNDYRDAEAIAEAVQRPTMKFVATKTADQLDLQALHRVRARLVGQRTGIINQIRAFLLERGIAVRQGLHFLRAELPTILAKRTDVLSPRMLRVIEDLAGDWRRLDERVDSLSDEIATLARQDKACERLMTVPGIGPIISSAMVAAIGTGDAFSKGRDFGAWLGLVPKQMSTGDRTILGSISRRGNRYLRWLFVQAAWVVLVKITPEGWERYGLRSWIEAAKQRLHRNVLAIALANKLARIAWAVLHKGRAFECVKTNATASQAA

SEQ ID NO: 349583 - protein, 371 aa, unidentified
MKNNTTPSVVSNSPTPAAVVSCGFTLGLDLEDRSHHVCVLDAAGQRVREGALVNTRPALARLLAEYPRATVAVEAGTHSPWISRYLTELGATVLVANPRKLHAISRNERKSDRRDAQMLARLARVDPALLHPIQHGSAQAQHDLLGLKLRDALVRTRVNLINAVRFTLKSLGHCVRNPASESFHKTALADVPADCRSVVQPLLTVLAQVTEQIKGLERDLVQRSKKDYPATQRLQQIAGVGPLTALCFVLKIGDPQRFGRGRDVGAYLGLCPRRDQSGGTDKQLRISKCGDGLLRRLLVSAAHYILGPFGPACALREHGQRLTGAGSAREKKRAVVAVARKLAVLLLSLWKYGTDYEPRATARPVLVLVPA

SEQ ID NO: 349584 - protein, 405 aa, unidentified
MDIQPIYRCAVGIDVHLALLCVCIIIAEPGAEPVVHRREFGGFQRDRRAMADWIASFKPDMVVMESTGIYWKSPYAALEKVGIRAQVVNARQVKKVPGRKTDTSDAEWLAMLARAGLLRGSFIPPERLHTLRQVSRHHQKITAMRAMEKNRLVKVLSDAGIRITAVVSDPHGVAATAIIDCLLDGGTPEQALALAGRLKAPREDLLAALQGELSADHRFVAHTIRHHLRALDTQLADLERYLVEALQPHEAALQLLMTMPGIDRLAAAKLLVEIGVDMAAFGNAGRLCKWAGVCPGNDESAGKRRRGDTAPGNRYVRALLCQIAWAAVRTTSQFKSRFQNLVSRRGTKRAIVAIGHKVLKTVFVLLSRQVPYHDSTVDYEALAVKRNAPRWIKQLRKFGYLPKMA

SEQ ID NO: 349585 - protein, 342 aa, unidentified
MENVSIIGLDIAKSVFQAHGADANGAVVFRKKISRAKLLEFFASQPACKVAMEACGGAHYWAREIARFGHEVKLIAPKYVKPFVKRQKNDAADAEAICEAATRPTMRFVAAKSETAQANGLVFRTRDILVRQRTQITNAVRGHLAEYGLVAPQGAGHFLRLATQLEDPATSLPQEVRSILSLLTQTAQALNEKIAQLDKEIARRTREDEVARRLMTVPGVGAITATAIAALAPPATTFRKGRDFAAWVGLTPLQKSTGGKQKLGATSKMGERTIRRLLVIGAASAIHHATRAGLAPTSWLARLLARKPRMLVTVALANKMARIVWALLIKGEDYRAPVSAAA

SEQ ID NO: 349586 - protein, 325 aa, unidentified
MFYLGIDVSKAKLDTLLLDPTNGKRKSKVVPNSEAGVRSLLKVMAAHGIAPEDLHVIMEPTGSYHEVAAWALVEAKCVVSLVNPLHARRYAESLGLRSKTDRADAAVLARYGAAEKPPAWVPPNAAARVLRALLARRDAVAEDLQREKNRAEKSGVHTPDAVAASIQQGIEFLQKQLDSLQRQIEDHIDRDPGLREKRDLLLTIPGVGDRVAQHMSALLATHPFASAEQLAAYLGLVPIERQSGSSLKGRPRLSKTGPAYLRRLLYLPAVVATHHNPHVRALHLRLLARGKSKMSAVGAAMRKLVHLCFGVVHSRKPYSPGYPIT

SEQ ID NO: 349587 - protein, 307 aa, unidentified
MYVGIDVAKDRLDVHVRPSAEAFAVARDGEGLAQLTARLDTLAPRLVVLEATGGFEVTVAAALAAARLPLAVVNPRQIRDFARATGKLAKTDALDAAAIAHFAEAVRPEPRPVADRQAWALGELVARRRQVVEMIIAENHRRRQLTQRRLLRRLDRHLTVLQQELTEIERDLDDSIRGTPAWRESDDLLKSVPGIGNATARTLLAELPELGTLDRKRIAALVGVAPLNRDSGTMRGRRSTWGGRANVRTALYMATLVASRHNPVIARFYARLRQAGKPAKVALIACMRKLLVILNAILRDRRPWQNA

SEQ ID NO: 349588 - protein, 413 aa, unidentified
MDVLHPRCCGLDVHKSSISACVLLREAGRVQKHQRRFGAMTQELQELAEWLRQFGVTQVAMESSGVYWKPVWNILEGQFTVVLANAQHIKNVPGRKTDQKDAEWIAQLLQYGLLRASYIPCEIIRDLRDLTRMRASLSQEASRISSRIQKVLEDANVKLASVATNVLGKSGRAMLEDIITGEDDPEHLASLALGHLRVKIPQLRLALQGKIRSHHRFLLRRLLDQIQFLEHEIALLDERLEDIGRQRPDLAQAVARWDTIPGIDQVAAWALLAEIGNNMAQFPTADHLASWAALCPGNHESAGKRLRGTTRQGSTWLCRMACQCAWAAARTKNTYLSSQFRRLAARRGKKRAIIAVAHTLIVIGYHLQKNQSNYEDLGGDYFDRIHSDGLKRYLVKRLQQLGHKVTLEPMEAA

SEQ ID NO: 349589 - protein, 433 aa, unidentified
MIPNRLQVGIDFSLKRADLCLLSADGQALLSHQAFANSWSGYQKVRQVLLDHLQAHPFDGLDVSGEATSYYWFPYFWQMAHDPQLQARDLSLFLLNPRQVYWFKKSLPPDDKADDTDPFYIAERTRTRRPKAAWDPQDDWLPLRFYTRLRFHLAQTLTREKNYYLVHLFLLHNTYAPHRPFSNLFGATSQKVLNGEKSLAELVQAPIEELAEQLDTWSAGKLEDPLETAQLLQQVAKDSFPLEEPLLTPIQHILEATSEHIRLIEAQMAQVEGWIAAEAQARHPEVAFLATTPGVGLVLAAGIAAEIGDLARFFRTPKWDKQHKRYRRKTQREVEDAVAKLAGLWWPRADSGEFVAEDRHLAKTGNRYLRYYFIQAANGMRRHIPTYSQFYGLKFREALHHKHKRALVLTARKSIGLFVALLHRKEAYRSEEG

SEQ ID NO: 349590 - protein, 371 aa, unidentified
MKSIIYLGMDVHTTNYTLCCYTLEDDRMCHLQQIAPDYRLILKYMDQVRRLYNNDVEFLCGYEAGCLGYSLYHQLTAHQVRCVILAPTTMGAVLGVRKVKTDKRDAMLIAKCLAFHTYHPVHIPTPEEEQVKEFIRMRDDHKLALKRIKQQISAFCLRHGFHYTATKSKWTQAHWKWLKSLKPDGLHQETLNEYLLTCSSLSDKLERLDRRIEELAAQEPFQERVRQLTCLVGVKTHTALSIIVEVGDFNRFPTAGKFASFLGLTPGEASSSDKQNRFGITKAGNTHVRRLLVEAAQSYARGQTGRKSKDLKARQAGNKEQVIAYADKGSERLRRRFRQLLYKGKQHNVIKTAIARELSCFIWGMMTDRIA

SEQ ID NO: 349591 - protein, 336 aa, unidentified
MSHYCGIDLHSNNHVVVVIDEKDKRVFEKRLNNDLSLTLDALSPFQESLQGIAVESTFNWYWLVDGLQAQGYNLQLVNTAAVKQYDGLKYSDDRYDAFHLAHLMRLGILPTGYIYPKEQRAVRDLLRRRLFLVRTASAQLISVQSQIWRSTGQRIKSADLRKTDFVAQEVEGYTLQAVNAGLSVYQAVQREIDTLEQSAHQAVKLSDAFQILQTVTGIGKILGLTIMLETGTIGRFAGPGNYASYCRCVDSKRTSNGKKKGEGNAKAGNKYLSWAFSEAAHFAVRFEPLAQRFYERKKAKTNGIIAIRAVARKLARATWMMLKHQVPYDARRMFPG

SEQ ID NO: 349592 - protein, 359 aa, unidentified
MDIQGTSVGLDVHALSVVAHAVDEETGKVSKARLCPDHGEVLGWLHQLRAPVRVTYEAGPTGFGLARAINEAGMECVVAAPSKLQRPAGDRVKTDARDAAHLARLLRLGEITAVTVPEREIEAVRDLVRAREDARVDLMRVRHRLSNCFCGRGSSIFGGTPCTCAHEKWLRRQRFDDAHLKAAFDHGFDAVLAATAARDRLDEQITEVAASPRFADPVNRLGCLRGIAALTGLALTVEIGDWSRFTGSSIGAYVGLVPCEYSTGTSRVQGSITKVGNTHVRRLLIEAAWHHRKSYRTSGPTLRARWAVVEPALRARGHAGNRRLYKRWRHFTERGKNPLVANLAIARELAGWCWSLATM

SEQ ID NO: 349593 - protein, 371 aa, unidentified
MKNHITFIGLDVHKDSIDVALADAGREGEVRFYGTIGGDLESLFKVVRKLQSAGAELRFAYEAGPCGYDIYRALTSKGFDCIVVAPSKIPKKSGDRIKNDRRDALNLARLHRCGDLTAVYVPAAEDEAMRDLTRSREDAVKALRVARQELLAFLLRHGHRYSGKSYWSMAHKNWIAAIRMPHRAQQIALQEYVHAVQERLERVHRLTQQIRELIPQWQLAPLVTGLQALRGVSLIVAATTVAELGDLTRFDSAKQLMAYLGLVPSEHSSGGTTRRGGITKTGNGHVRRALTEAAHTYSHPARESRILLARLEGLPQQVKQISWKAQVRLCGRFKALLARGKNKKTVITATARELAAFMWAIACAMLPAAQE

SEQ ID NO: 349594 - protein, 360 aa, unidentified
MREYIAFDCHKRYTLVEREGVESLKARQYRVDHFPGAIRDCLKGCEEGTPVAVEATANWYWIIDEIEQAGLEPKLVHPRKAKLMRGLIDKTDKLDVHGLNLLQRTGTLPTVWIPPREVRDMRELTRTRMFLSAQRTRLKNRIQATLAKYAWSGSRWSDPYGGKGRVEMIGWMNRLPPHTLCVTEALLKQLDFVQGQITELEQRLRGVIRETPDMKLLMSLPGVGWVLTAVIVLEVGDITRFGSAERLASYSGTTPRVHSSGGKTRYGPLRPDVNHYLKWAFVEAAQSVCLGARAHPYRHVTRLYRRTRERKGHPKAIGVVARHLAEATYYVLSTGKPYQEPVLKKLKKGSIQGGVSASLS

SEQ ID NO: 349595 - protein, 408 aa, unidentified
MESQIIFGIDVSSKSSTVCVVNDRIKQGESFRISNDSFGYQKLYEQLNQYLITPLVVFEATGVYSLSLQAFLEDYHIKYLKLNPLKAKKLMDNNLRHNKTDKVDAYRLALIQFNAPQKLRDPQPREYHELQNASRYYEELTRSIVTTKNQLHRNLQSTFPQIEEILSHPSGRIYWALVSLFPHAGYVLEKNETQVTQMLNSISGIRQQRARYLTTRLYAFAREAYPYDSKDSIIVRAIQRNISNLFSLQQERDYVINYMEKLAKAVNARALSIYLSIPGVARITAVRLVAELGDLRRFSTSAQIDAFVGIDPGRYQSGEKDSSLGITKHGNHIARKILYRVITQMETVKATRPCHITDYYDKKKRSSNSQGYKKIAIASVHKLIRTMFALIKHDQLYDYNVATENKRL

SEQ ID NO: 349596 - protein, 412 aa, unidentified
MQILVERGCGLDVHQATVVACLLLVGKDGRVQKQMRTFGTTTRELVGLREWLLGHGCTHLAMESTGVYWKPVYTILEGAMEIVVANAQHVKKVPGRKTDVKDAEWLADLLCHGLLRSSFVPPKPIRELRDLTRYRRKLVQSQAAERNRLLKLLESANIKLASVASDVFGVSGRLMLRALIEGKANPKEMAELAKKQLRKKIPELELALEGRVEEHHRFLLKVQLDRLESVEKDLDVLEQRMQQKLEPYTAQLALLDEIPGVDWTLAAVIIAELGVDMSVFDNVSQLASWAGVCPGNNESAGKRKSSRIPKGNVYLKSALVEAANSAAKAKGTYLRDKFYRLKARRGYKRAAVAIAHKILIAIYHMLSQQVSYNDLGDLYLDKLNKHHLTRNLIHRLERLGYTVTLTLQEKAA

SEQ ID NO: 349597 - protein, 406 aa, unidentified
MNYTYVGIDNHSKTHTAVVLNCFFEKIGVIRFDNNIAKFPAFLEAVTKLKLDGTTLMFGLEDVSLYGWILLTFLKNNHQQVKHTNPSLVFSERKTRNITRKSDAVDAECAARVLITNFGELPDAIPNDSIWTLRTLVVRRKQIIRGNMGIKSNLHSLLLNHYPNYRDFFGNIDCKSSLEFYSKYPSPNRLKGTTVEELAIFLWETGHFYGEEKAAEIISSIDDTTVQFQEYRDISVQSLIRQLKFNLDELVRLEVSIARAMENINTPLTSMAGIDTTSAAQLLSCIGDIKRFPTSGKLAQYAGVAPITFASGDVDKQYASRCGNRELNSLIYNLAIRVSTTSGCRRKVLNTFFHDYYNRKISEGKTKRQALKCVERRLIHVIWTMLTNNEEYINPPTYNLENSIGG

SEQ ID NO: 349598 - protein, 426 aa, unidentified
MVGIVLQDSRDDAQVVERIAALGIGKAEVVCCVRVPSSSGSGRRAQEVMTYSTMTRSLQLLADRLADRGVTRVVMEATSDYWKPPFYLLEAAGFEVWLVNARDVKHLPGRPKTDKIDAVWLCKVAERGMLRPSFVPPAPIRALRDLTRYRIDLVGERGREKNRVEKLLADAGIQLSVVASDIFGVSGRAMLDALVAGQRDPNTLADLARTRMRSKLVDLREAFVGRFSDHHAFLLARMLAHIDAINTDIAAVQTRIEELIAPFAQTVTRLDAIPGIGVTTAHVLLAEIGVDMTRFPTAGHLASWAKFSPITSESAGKKKGKNTTGKGNPYLARALGEAAAGLSRTDTFLGERYRRLARRRGKNKAIVAVGRSLLTIIWHLLADPQASYNDLGSDHYDNRAGTRRAIRNHIRALQTLGYQVTLHPAA

SEQ ID NO: 349599 - protein, 344 aa, unidentified
MDHFAGLDVSVKETSVCIVDDTGKIVREVKVASEPEALLAVLKNSAYHFKRIGLEAGPLSQWLFSALAEADLPVICVETRHMQAVLKAQINKTDRNDARGIGQMMRVGLYRPVHVKTPRSQKLRMLLTHRKLLQSKAIAIENDLRATLRNFGLKVGMVGKVKFEARIKELVENLPDLAALVEPLLIVRRVLREQIVILHRRLLAIVRDDEVCRRLMTVPGVGPVVSLTYRATVDVPARFHKSKAVGAVFGLTCSKYQSGEIDRSGRISRCGDEMMRVMLYEAAQSMLRSKKWSWLKAWAMQIVRRRGMKKAIVALARRLAVIMHRIWVDGTEFRWTREQATAAA

SEQ ID NO: 349600 - protein, 403 aa, unidentified
MTTDQLWAGVDVGREHHWVCVVDAAGAAVLSRKLVNDEQSIRELIAEVDELGPQVSWTVDLTMTYATLLLTVLTDLGKSVRYLAGRAVWQASTVYRGGESKTDAKDARVIADQSRMRGEDLPVLHPDDDLVTELRMLTAHRADLVADRTRTINRLRQQLIAVCPALERVAELSSDRGWAVLLSRYQRPKAIRQSGISRLTKFLADAGVRNASAIAVAAVSAAKAQTVKMPGEEVAATLVAELAQGVIALDDRIKTTDADIEGRFRRHPLAEVITSMPGIGFRLGAEFLAAVGDPALIGSADQLAAWAGLAPVSRDSGTRTGNLHTPKRYSRRLRRVMYMSALTSIRCDDHSRAYYQRKREEGKRPIPATICLARRRTNVLYALIRDNRTWQPDSPPVTTTTAA

SEQ ID NO: 349601 - protein, 359 aa, unidentified
MTGIIGHEGNRLDVQVIIGVDTHQDQHVAVAIDRQGIRLGECHLPATTHGYAEMEWWARSLGQIRAFGIEGTGSYGAGVARFLTSRNYTVIEVNRPDRSVRYRKGKSDPTDAEMAARSVLAGVADATPKSGEGEVEMIRMLKSAKDSAVKARTQAVNQIKALVVTAPSELRETLDGLTTTALITRCKSFRPGRLDDPRAAAKYTLRSLACRYSQLSKEIQDLRKELGRLIRTAAPVLVSAFGVGPDSAAAILVAAGSNADRLRSEASFASLCGVNPIPASSGKTNRHRLNRGGDRQANAALYRIVVVRLRYEQRTQAYMQRRTEEGMTKTEVIRCLKRYVVREVYSAIQRPNRLLEKAA

SEQ ID NO: 349602 - protein, 336 aa, unidentified
MKGQYAAVDLHLHRSLVVRDNHAGKEVGVERIDNSPMALAQALADAGPNSEVAIEATYGWYWAVDVLQDIGANVHLVNPSGLHWEERRVKNDYLDCRELVDRLRLGKLPEAWIAPPEVRELRELVRYRAKLVNVRTGLKAQVKAVLAKHCLQPPVNDLWVGHRGPTFLDELQLPDAYVIRIESLRDLVAAVDREVAMLERCIYLRLKDDRGYQAIQGLDGVGRVIAAVFCAEIGDANRFSGPKALCSWVGLTPKHRESDTKAWRGRATKQGSRLVRWAAVEAISKMRGGPKLRVDYHRISDRRGRNIARVAVARKLLTLVYFGLRDGELRCLAHAA

SEQ ID NO: 349603 - protein, 352 aa, unidentified
MARSKLINKLDSTQPIFVGLDVHKNKWSVCIIHQDEVIESHTIPGDYQPLKSLLSKYEKFKIYSAYEAGFLGFYLHRYLEQDNINNIVVSPNKIPTEVGNYVKTDKRDAKKIAFSLSKNLITGIYIPSIELSDFRNILRLRSKVTKARVQTVNRIKMLLLKQEIKMTQVGLTKRKIEELRNLNLPEHTKFALDQYIDQLELFNKQRTQLQSRAHCAVMNSQYVNTYKIINTIPGLGEVTASMLCFEIGDFNRFSSGKKLAAYIGLTPREFSSGDNVYKGRITGQGNKLLRSYLVESSWFLIGKDPVMKEFYNRIKSNTGSGKKAIIAVARKLINRIHSIVVNNQCYAIGEIE

SEQ ID NO: 349604 - protein, 355 aa, unidentified
MNTTQVFEKRKIAVAIGIDLAKDHCDVVAYNADNKICFTKSNWAYPQLMEWLANAQPAVVLMESCKGSMVRARDIADLGHDSRLVKGADVKALRNVTQKNDIRDADYIARLFYVPGTKYVFVKNQRQQSLSQFLQNEYKSLQELRIRVGNQIHAGLEEFGCPGSKSKKFIQSRMMAHLEKNAELIPDEVMASFLRRRDMWLNLFEQEEQAKTRMEEIAMTDDDAKRIMTVPGVGAQTAVGMLVHIGGDIGRFKNSGQFAASIGLVPKQNSTGGNITLNGITKCGPKRLRANLVQCGQVILMYADKLKGNFGDWVRKLRDSGKKRGVIACAIAAKIAKIIYRLMKDKVDYTPVPSR

SEQ ID NO: 349605 - protein, 406 aa, unidentified
MEMVHPRCSGLDVHKKSVVACVMVPGRKQVRTFGTVTAELLRLGDWLQQEGVTHIAMESTGVYWKPVFNVLETTGLELLVVNAQHIKAVPGRKTDVKDAEWIADLLRHGLVRASFIPSRPQRELRELVRYRKTVVEQRSHLVQRIQKLLEGANIKLSDVASDIVGVSGTAMLRALANGESDLDRLVELAKTSLRNKRDELRLALAGSFGSHQRFLLGKQLDQLEFLDGQISDLNLEVEQRLRPFEALLARLDAIPGIGQRNAEQILVEVGTDMSRFPSASHFASWAKLCPGSDESAGKRRSGRTGMGSRWLRSTMVEAAWSASRVRNSYFSAQYHRLAPRRGKRRAAVAVAHSMLIAIYHLIKDGTVYQDLGPNHFDELDRRRITHRAVRRLQALGYRVTLDDVPA

SEQ ID NO: 349606 - protein, 350 aa, unidentified
MIIIGCDYHPGFQQIAFVDTETGDCGEQRLEHCEGAQKFYRDLATQGKKVRVGMEASGHARWFEQLLGGLNIELWMGDAAVIRAKRGRKSKTDRQDALHILNLLLTGDFPQIWVASWENRDLRQLLWHRHRMVQARTRVMNQLQAVALNEGLRCKKKLWRKHGREQLEAFRLAPWASRRREDLLELLDRLNPTIAELTQAIEQEAEKCPQAQRLMTHPGVGALTALAFVLIIGKAERFQCGKQVGCYLGLVPLEDSSGDKRRLGHITKQGNSLLRFLLVEAAQVTSRTIPEWRSKYLHLTMRRGRKIAKVAMARKLAIRLFWRMRQGWNYQQVMKFGSHVGQPGNRHGVQ

SEQ ID NO: 349607 - protein, 412 aa, unidentified
MKRIRDRVAGLDVHRDTVVACCRFVEPDGSVEVTKQSFATTRKGLTELATFLSDRAVQTVAMEATGVYWKSPYYALEGLFPELWLCNAQHVKNVPGRKSDLADAEWLADVAAHGMVRPSFVPPPEIRELRELTRYRATQVDARAKEIQRLEKVLQDAGMKITSVASAVWSMSSREIIEALIAGERRPGALAQMAKGRMRAKIAQLEEALSGHFGPHHAIVCRQVIDHIDFLDQTIATLTVAITERLVPFEAAVAVVVSLPGISRRTAEVIVAETGADMSRFGAPGQLCAWAGVAPASYESAGKRRPAGTRHGSQWLRHALIEAARAAVHTKNSYYAAQYARIARRRGPNKAAVAVANSMLSTIWHLLSNGTFFEDPGGDYFERRHDPAVEAKRLARRIEALGFDVRLTEKAA

SEQ ID NO: 349608 - protein, 415 aa, unidentified
MYYVGIDIAKSFHVVSVIDDNETKVINKPFKINNDAKGFEKLLTILDSISLDKSEFTVGLEATGIYGENLQEFLKSSAYLVKLLNPFQTTRYREQITLKKVKNDEIDSLVIALLLKSGKFSSGYITDDEYQSLRTLYRNRATIQADMKDVKKRILTQITVTFPELEGFMKPFSVTGLVLLDKYPTAHHYKHSSVDRIMKLFRHIQGNNFTQSKALQLLELSKESIYSGKAKDARAIAIRSSIRLLQMYLSELDIIEAEILSLLKNSSVETTVDEAGIEIQKTDTLLTNLKTIPGVAEKTIAALISECGDLTRFPTIPKFIGYLGLFPNENSSGNSKYVGHLSKRGSPLAKHALYMSAVSCLIHNTQLKQLYDTKRSQGKSKKEALIAVSRKIATIIYSIFKYNVPYNPNRVFAKS

SEQ ID NO: 349609 - protein, 410 aa, unidentified
MQTLVERGCGMDVHQATVVACLLVVLKDGKVQKQIRTFGTTTRELLTLREWLLSEGCTHVAMESTGVYWKPIYAILEGAFQIVVANAQHVKKVPGRKTDVKDAEWIADLLCHGLLRSSFVPPQPIRELRELTRYRRKLVESRSAERNRLLKLLETANIKLASVATDVFGVSGRLMLQALVQATTTPQEMAELAKGLLRKKIPELKLALEGKFEEHHRFLLGVQLRRLQAVEEDLRLLEQRIQEKLKPYSMQLALLQEIPGVDWTLAAVIISELGVDMSVFGNVSQLASWAGICPGNNESAGKRKSSRIPKGNVYLKTALVEAANAAAKAKGTYLRDKFYRLKARRGYKRAAVAVAHKILVAIYHMFSHQVCYHELGDLYLDKLNQHHVTRNLVRRLQHLGYSVTLEKKAA

SEQ ID NO: 349610 - protein, 306 aa, unidentified
MKITTIGLDIAKRFFHVVCCNEQGRLIKKRMLKRTQVLAYFQNQPKCLVALEACATSHYWAREIIKCGHKVKLIPPQHVKAFLIGNKNDYNDALAIVVAAKQPHIKSVGIKTIEQQDNQAQHKARELAVRQRTALCNQIRGLIAEYGIILSKGVNNVRKNIPLMLDDETTQLSNAFKVVLAQLREQLKSLDNCIDTFGKTITESAKSNPLCQRLLTIPGVGPMISSAYFNEIGNGSNYRRGRDVSASLGIVPRQHSSGGKDTLLGISKRGNSYLRCLLIQGAKSVVSRASTKRGLKSTGTIMLCTT

SEQ ID NO: 349611 - protein, 290 aa, unidentified
MECTINARSDAACFVGNDLHKDTLTVCTIDVKDRAVSCRKISCVAREKVCEFLAGLPRPSVVAIETGGLYRGLWTDAEPIVDQVLVAAARGARALAGRRIKTDREDAFNVTDLLMTGRLPLTRAPPGQVQRLRDWTRHRNGLSRDHAKTLHRVKSNMNRLKRPGPARMDATGLQRYPLSGVERIEAEDLTMLWQHQRRLVEIEQDISASERRIVDLMKAPDFRPLRAILESIPGVGLITAATAIAEIGDFSRFAESKAIGRYAGLTPIGYSSADKNRPGRICKTGSPDPR

SEQ ID NO: 349612 - protein, 368 aa, unidentified
MKKRITFVGLDTHKNSIEVALADDGRNTEVRLYGSIGGDLASLDKMIRKLQATGTELRFVYEAGPCGYQIYRHLRAQGLQCDVVAPSMVPKRSGDRIKTDRRDACNLARLYRAGELTAIYVPQEDDEAMRDLVRGRQDAVNAQRKVRQQLGGFLLRHGFRYPGKCAWTLAHRRWLAGVRMAHPAQQIMMQEYIHSVEECTQRVHRLTEQILQLMPDWRMRPLVGALQALRGVAPVVAATAVAEIGPMGRFERPRQLMAYLGLVPSESSSGGSVRRGAITKTGNGHARRALIEAAQAYSHPARISRVMLKRQEAVPEPIRQIAWKAQLRLCARFRKLTARGKSRNRVVTAIARELSGFMWAIAKQIPVP

SEQ ID NO: 349613 - protein, 467 aa, unidentified
MLSGAMQTLAGRDADMTAEATGATSQRRVASCPVRERPRISWMRGDAPPRISFGRLRSRALGQVPPHRRREPGMIYAGVDIAKTDHVIGAVDERGAEMCRPMPFKNTEAGLERAVAWLEGLAGSPSDVVVGMEATGHYWMACYSFLVARGYSVAVINPMQVKAVRKLKGLDKVKNDRVDAGLIAEALRIGQYDETRLATDEVASLRSLSRYLQSLRGMVAELKTQCVCLMDAHFPEYAGIFSDMFGAGSRAVLSKSPLPFELARRRADSLARDVAEASRRGGKSAGYAARIKAAARSSIGVRLGQEAASFQVKSLIRQIEFADSECAKVEARVRALLDEVEPLVLTIPGVSYATGAQIVSEIGDVSRFRNASALVSYAGLNSSVSQSGQFDSGGGPITKHGSPYLRRALWLAANRARQYDPGLRAFYDKKRAEGKPHRVAVTAVARKLCHIVFAVMRDQVPYDPGRE

SEQ ID NO: 349614 - protein, 344 aa, unidentified
MDHFAGLDVSVKETSICIVDDTGKIVREVKVASEPEDLLQILSNPTYHFKRIGLEAGPLSQWLFSALAEAGLPVICVETRHMRAVLKAQINKTDRNDARGMAQMMRAGLYRPVHVKTLRSQKLRMLLTHRKLLQSKAIAIDNDLRGTLRNFGLKVGVVRTVKFEARIRELVANFPDIAAMVEPLLIVRRTVREQFCVLHRKLLAIVREDEVCRRLMTAPGVGPVVSLTYRATVDVPARFHKSKSVGAVFGLTCAKYQSGEVDWSGRISRCGDEMMRVMLYEAAQAMMRSKKWSWLKAWAMQIARRRGKKKAIVALARRLAVIMHRIWVDGTEFRWTREQAAVAA

SEQ ID NO: 349615 - protein, 469 aa, unidentified
MGNSKNRKRKNKKHRKVDISNLEQLNLNAAGIDIGAEFHYVAVPNGRDPEGQDVRHFSTFTADLHKLADWLSQCKIDTVAMESTGVYWIPVFEILDSQGFDVRLVNPRNIKNAPGRKTDVLDCQWIQQLHTYGLLQSSFRPENQICELRAYLRQRAMLVSYASHHIQHMQKALEQMNIKLNQVISDITGVTGMKIIRAIISGERNPVKLASMRNARCNNSESIIAKALEGNWRSEHIFALQQAVELYDFYKKQIIACESHIQRHLESFDDRSNGTPLEKSPRNSRGSSNKFNFDARLYLHRITGVDVTRIEGIEAPTALNIIGEIGIDMSSWPTEKHFASWLGLCPGSKISGGKVLSSKTKPSANRAAHAFRLAAYSLQRSKSAIGAFLRRKKAQIGAPKAITATAHKIARIFYNMLKYGTEYVDLGQEYYEQRYQDRVVANLKRKAKQFGFELVNIKEHELLTELPAS

SEQ ID NO: 349616 - protein, 392 aa, unidentified
MNTLRVAVDVGSRFHQVAIGDDSGKLLDEFQIDHGRVGFEQFFARVSHHAATDVRVAMEGYNGWARPLDQQVLARGWRLYNVNNLKLARYKEIFPAPAKSDAIDSRRMLELFGFDEQRPLGRDVLQEVTTSTTTQRELKYLTRRRRQQVADRTTRLIRLQGDLLAVCPDLLALTRSVNNLWFLRLLTCRDRLTALPRLHAKTVTSIRGIGAKTSPRILAWQKTATFGGSIDLVDTDIVADAAAIVALNEQIKAIEMRIEATALECPMASRLRTMPGFGVIGTAELSGEIGSLYRFDTEASLALYLGMAPLDHSSGLRHRGKRPKCVNARCQAALMTSTVRHIACVPESRAYYDRKCAQGKRHNQAVRALGRHLVRVIWRMLTDGRDYQARGE

SEQ ID NO: 349617 - protein, 430 aa, unidentified
MKFNTQNAKIEAITEKTLVLGIDVGSEMHYARAFDYRGIEYTKKPFKFSNTEAGFMSLQAWILDLKEKHEKDKVVPGMEPTGHYWFNLGKFLQDNEMKPVLVNPHHVKKSKELDDNNPTKNDRKDPKVIAGLVREGRYMIPYLPEGVYADLRTASNIRFQLQAELTRIQNRISRWFNIYFPEYKTVYGKPDAKSGMLILKAAPLPEDILTLGIDGVNQIWRDAKLRAVGKARAKTLIEAAEHSVGSKEGAVSARMEIRMLLEDYESRNIRLQEVMALIEELVAQIPMAEKLLEIKGVGIRTVSGFLAEVGDISRFNNPKELQKLAGLALVENSSGKHKGETTISRRGRKRLRYLLFEVAMSLVAKNPEFRELHNYYTTRRLNPLKKMQSLMAIAAKLIRVFYAMLTKGVDYDPKKMVSDIKRPAVYIQAA

SEQ ID NO: 349618 - protein, 338 aa, unidentified
MTIVMGLDQHRAQITADWIDTDTGEISRARVTPAHRAGVRRFLDRFSEQKLEVALEATTGWRFVVEELHRVGAVARLAEPAETSARRGPKKRAKSDRADARHLRELAMTGRVPESWIPPAHILDLRARVRLRHTLVDQRGEWQQRMQATLFHHGVPQRHGLITAEGRAWLEGLDLPSTAREQIVVGLAMVDALEAELGPLDRDLRAFARRQPGCRALMGHYGIGHLTSATILAELGDAGRFSSSREAVRYAGMDITVHQSDSRRAPGRLSRQGPPALRWALFEAAQCARRPGSPDHGYYREAAERLGGNRACLAVARKLLKRSFHTLRELGEEALQPA

SEQ ID NO: 349619 - protein, 423 aa, unidentified
MLTPAQDEEQVVERIAALDIGKAELVCCVRVPDVQAAGRRLQEVTTYPTMTRALLGMCDRLRAANVTRVIMEATGDYWKAPFYLLEAGGFDPWLVNARDVKHLPGRPKTDKIDAVWLCKVAERGMVRASFVPPPPIRVLRDYTRYRTDLITVRTAEKQRVEKLLEDAQVKLSVVASDIFGVSGREMMAALIGGQRDPQVLAQMARARMRVKIADLEEAFYGCRFSDHHAFLLATMLARVDAVDADIAEVEARIEDAISPFAEAVERLDAIPGVGRATACVIVAEVGVDMTRFPTAAHLASWAKFSPVISESAGKRKGKNATGHGNRYLARVLGEAAVSAGRTDTFLGERYRRIARRCGKKKAIVAVGRSILIIVWHLLSDPSADFIDLGPDHYDTRGGTQRAIRNHVNRLHALGYDVTLNPVA

SEQ ID NO: 349620 - protein, 330 aa, unidentified
MNAYIGIDVSKDTLDVWVLKESSKSAYKQFKNDPAGWARILRWVSSQGVSTAHYCMEATGAYSNGIAMFLAEQDLLVSVENPARIKHFGEAMGYLNKTDKADAKTIATYCSKISPGPWRMSLPEVKQLIAYMRRYEDLQGLLTQEKNRLSEPFLPKEIQSSLKKSIRFLQKQLSEIKDRIEKHIDNHPGLKQDKELLESIKGVGEITALWLLAELPDVSQFDKASDVASYAGLAPREKRSGTSIHGHTRISKAGNRYLRKALYMPALSAKRYNEPVKDLYERLIAKGKHPKSAIVACMRKLLLIAYGVLKNRQPFDVNYAPQRERATACA

SEQ ID NO: 349621 - protein, 385 aa, unidentified
MAPPRMPEAVIGLDVGKSSHWACVATRDGEILLSAPVANREDDLDSLFGRFPDALVVVDQSRNIGALALARAKAAGMSAAYLPGLAAHGAARLFAGDAKTDERDAMVIAKTALGIPDALLPVGDPGPTVAAARALAAQRNFLTCENTRSKNRLRSILLESCPAFEALVDLSDGPQLRLMASLGGAWSVADAGPRRAAALTRGAARGKIEALVRSTASSTRPDAAAIAAEDRAVRLLARRISENSAEIDAITAEISALLEGDDTYRCLLTVPGIGPKTASELAISIDIEDFPSHDRLASYCGLAPRNRQSGTSISSVTASRQGNKRLKNLLIFSCNCLTRTEGRWGDYYARCRERGMPHGKALKALARKRLKVIYAIMRDRVPYAA

SEQ ID NO: 349622 - protein, 378 aa, unidentified
MNRIIKIGMDVHTTNYTLCIFEPSFENKGIVHFVTQVKPNVKNIVRVIDTFKRKNENDELRITCGYEAGCLGYSLYRELKDKGIDCVILAPTTMKTEKGGRKIKNDYRDARMIAECLAYGGYSAVHIPNELDNSVKEYIRMRDDIHENLKKIKQQIISLMTRNGKQFDGKSYWTKKHLDWIKATAFQEEFLNETLDEYMIEYHHLIDRVETLDKRIEEISTKEEYVEKVQQLQCLIGIKTHTALSLIVETSDFTRFTKGNVFAAYLGLIPGEDSSGEKENRLGITKAGNRHLRKLVVESAQGYTRGQIGFKSKDLKARQSKCSNEVIAYADRCNERLRRKYYRMIARGKSYNVAKVAVARELACFVWGIMTDRMELSK

SEQ ID NO: 349623 - protein, 326 aa, unidentified
MPLPLGADQATQRVETFAADTAGYQALLAWLEDFGQVTNVGVEGTGSYGVGLARFLRRRGIEVVEVNRPNRQARRNQGKSDPLDAVEAARAAISGRAAGACKSRDGGVEAIRVLVVAKRSARQARVKAIVQMRHLVFTAPELLRSRLKGLTVTALVAECADLRARRAPDPVTAATKAALCSLAHRVQVLDAELGDLDDKITTLLLATAPELMARFGVGPDTAAALLVAAGDNPGRLHSEAAWAHLCGVAPIPAGSGKTAGHLRRNAGGDRQANSALWRIAMVRIAHDPETTHYFDRRVKEGRTKRDVIRILQRHIAREVYRYLPRG

SEQ ID NO: 349624 - protein, 393 aa, unidentified
MVCVGIDVAKDKHDCFIISSEGEILADVFTIPNNAEGFDTLLQAIRRSTRPEDKIKVGLEATGHYSYNILGFLLDKGLPTYVINPLHTNLYRKSLSLRKTKTDRVDARTIAAMLMSDVDLKSYTDTVYHNEELKSLTRYRFDKVRERAKLKQSVSRLVTILFPGLEKLVSSLHSASVYALLSEFPGAKQISSTHMTHLKAVLKNASQGRYGQEMAETIRNAARSSVGSVMPAKSLELQHTIRLIRELDAEIEDIETAIQAIVDEMQSPITTIPGMGVRMGAVILAEIGDFSRFDSPDKILAYAGMSPSTYQSGQLSLSGAYSHMEKRGSRYLRYALYNATKHVCHWDPTFAAYLAKKRAEGKHYNVALSHAAKKLVRLIFAMEKSQRPYCAAA

SEQ ID NO: 349625 - protein, 389 aa, unidentified
MLQTNDMSRSLAALNQDSTLVVVIEMGQSSWLVRGMIPGVTRQPLKKVTPDEAGLLKLLHRWRSEAVRMSREIERIVVAYEAGRDGFWLARWLRARDIEVYVIHPSSVAVSREHRRAKTDRLDTELLMRAFVGWLRGEKRHCSMAAIPTIEEEDAKRPNRERQKLVGDRTRIVNRIKATLARLGICSFKPTLRNAVNRLTGLRARDGTPLPENTQAELRRDMVRLRLVSAQIKEIEEERLRKLAASASPQNSSHAMVCLIARVLGIGIETADMLVNEILSRHLRDSKAIARYAGLTGSPDESGRRRREKGLTRAGNTRVRRGMIQLAWRFLRFQKQSALAQWFQARTADGRSGTRKTMIVALARKLLIALWRLATTGEIPQGVSLRPAV

SEQ ID NO: 349626 - protein, 410 aa, unidentified
MNPLYVGIDVASHSNVAYLMKPDGSKHSVFPITNSKAGCQQLVKRIVSAMTGNGLSEMKIGMEATSIYGSHLVYTLKEDFSLSAYTKEIHVLNPKQVAKFKESYNDLPKNDYVDAYVIADCLRFGRINNEVYLGDYRHEALKKLTRARYTAVVNLSREKQRFLNTLFLKYSTFAQEKVFSDTFSTTALAVYEEFESADQLALMDLHELTEFIKEKGKNRFPDPDAVAKAIQKAARSSYRLPKTVNDSVNQVLSISISSMRALEASIKQYDKAIAEQMNAISNPLISIKGIGPVYSAGIIAEIGDIHRFKNQASLAKYAGLAWKQHQSGGFEAENTPLIHTGNRYLKYYLCEAVMSLVRCDTEYNSYYHLKYKEVNRAQHKRALVLTARKFVRLVYCLLSENRMYIAPEER

SEQ ID NO: 349627 - protein, 413 aa, unidentified
MKQLTTHFAAQIGLDWSDQKHDFCLIPSNSDAYEYGTIHHSPESIEAWALTLQKRFNNQPVAICLELKAGPVVYALLKYNFIVLFPISPKALAKYREAFTQSGAKDDPSDAYLQLDYLLKHKSALKPLTPDTKETRILQRLVEDRRALVDDKVRLTNRITAALKSYYPQALQWFDDIDTKIFCDFIAQWPTLKQAKRARPSTLTKYFKAHRCVRPAVIEMRIKAIKSAVPLTEDDGVIIPFERLARAMTAQLSQLLITIQQYDLDIAQRFRQHTDYEIFASLPGAGPVFGPRLLVAFGTNRKRFDSADEVNRLSGVAPVLKRSGKSAWIHWRYSCPTFLRQTFVEWANQSIRYSFWAKEFYDEKRAMGKSHQATLRALAFKWIRIIFSCWKNRTPYDESAYLFALKKRKTVIN

SEQ ID NO: 349628 - protein, 395 aa, unidentified
MNKIVHYIGLDVHKETIAVSIAPQNSTEVRRYGVIGGTLDAVDKLVKKLAQENVELHLVYEAGPCGFVLCRHLRSRGLHCEVIAPSLIPRKASDRVKTDRRDADQLARLYRAGELTAIHVPDQEDEAIRDLVRARTSAMTDQRQARNRLKGFLLRLGFRYTGKSSWNDAHKRYLSRLVMPQGPQQIAFQEYIHAINDATERLERLAKAVEDALPGWKWAPVVRALMSLRGVQVLTAMTLVAEVGDFSRFDDPRSLMHFFGLTPSEHSSSDKRVQGGITRCGNAHCRRVLTEAAWHYRLQPKVSETIQKRQEGQSKQVRLIAWKAQERLHKRFHQLATKKKSVVAATAVARELAGFVWAIACQVKPAEQPAAPEIIRTCRGKVYRLDPEKKFQKNQ

SEQ ID NO: 349629 - protein, 359 aa, unidentified
MRIIGVDLHTRQQSVAMLETETGELVEKILEHEGEKVREFYSALPGPVLVGIEATGSMPWFLKLMEELKIECRVGHPAKIRAAEPRKQKHDRRDARLLLNLLAENRFPSIWMPSTEQRDLRTLLRHRHQFVRMRTRVQHTLQSMALANGLRRGVTLWSQAGQHALQALPLAPHASERRATLLTLYPALQKPIDDLDHQVSEQALLRPQARRLMTHPGVGPVTALATEVFLGDPLRFTDGKAVASYIGIIPREHSSGGRRQRLGALSKQGNALVRYLWGEAAIHAVRRDPELKRFYGRKLIQKGLGKARVAAARKLGIRLWIMLRDQIDYEEFCRRGRMRQKSGDARAGMPGPINGPAVQ

SEQ ID NO: 349630 - protein, 344 aa, unidentified
MQEIKQYVGMDVHKEYVYGVIMDKEGSILFERKFNTEPHETDMFMLNVMKDSSIVAIEACSCWQYMYDYLSDAGYKVVLAHPLGVKALKKLRHHTDPDDANLLADLLRTNMLPMSYAAPWDIRVKRQITRHNHALTEIQNEIMNMSHALLLRHGIHNLPYQDAFCKKGIQFLQGLDLPGCDRFELDNFLELIQMFEKKKEDTQEAINKIAEDDPAIRIVMTMPGMGYYNATTFVGEVGDIRRFESGDKLASFAGLVPRVYQSGKTLKLGHITKQGNTSLRHTMVQAANVAVQHDKTLGKIYNRLALKKGHQKAIVAVARRMVTLLYAMLKNNIQYHALQIHKAS

SEQ ID NO: 349631 - protein, 370 aa, unidentified
MQTRSFIGLDVHKDTISVSIAEDGRDGAVRFIGVIANTPDEVAKMAKRLSRHGELDFCYEAGGCGYGIYRQLTALGHKCTVAATSMIPRKPGERIKTDRRDSQKLAILHRSGDLTAVWVPDPTHEALRDLVRARVDASMHLMRARQQLLAFLFRHGRIYATAGKYWTQRHRSWLAGQTFELPAHQIVFQDYVEAVWACQERRDALIEKITEMTASWSLGPLVEALRGLRGIDLLSAATFVATTGDLSRFESPRLLMGYLGLVPSEHSSGGKIRRGGITKNGNREARRMLIEAAWSYRYPARVAKEKAEILVRLPKNVRDIAWKAQLRLCARYRTMTARGKKSTVVVAALARELAGFVWAIGREIKPTMTS

SEQ ID NO: 349632 - protein, 343 aa, unidentified
MKLHVLGIDLGKTVFHLVGLDSTGRVVIRKRCSRRQLLAFTANLEVQLIGMEACSGAHFLGRALREQGHEVRLMPAQYVKPYVQTNKSDFLDAEAIAEAVQRPRMRFVPIKTEEQLDLQALHRVRERWVMRRTAVVNQIRSLLLERGLTLPKGRSHLDEQLPRILEDAELNLSDSFRVLLAQLKLELEQLAARIEPIDRVIQKTAKENEACQRLTEIPGVGPVTATALIAAVGNGSAFGKGRNLSAWMGIVPGEYSTGGKQKLLGISKRGNKYLRRLFVQGARSVLQQRHKQVPGLSSWLAQLLGRTHQNVVVVALANKLVRMAWAVLYKNERYRPPVFAATT

SEQ ID NO: 349633 - protein, 429 aa, unidentified
MNCTQNKKIEQVKETTMIVGIDVGSEKHYFRAFNWRGIELTRKPIAFSNSMEGFNSFYNTIVELMQKSELEEALVGIEPTGHYWFALGQFMGEKDIKFVMVNPHHVHKTKELDDNSPSKNDRKDPRVIAGLVRDGRYFYSYMPTGVYAELRNASNRRFVLVEEQTRAKNRLQKWIAVYFPEYKGIYTHIDAKGGLLVLKQAPTPEEIVKLGEEGIIKIWKDAKLRGNGNKRALKILNAAMRSIGLRTGLTEARMEIQDLIEDYEFQTKRLERVNDLIKELCQQIRYADKLLEIKDIGITTVAGFIAEVGDITRFDSTKELQKLAGLELVADSSGKHNGKTKISKRGRKRLRYLLFEAAISVVGKNEEFKEIHRYYTTREKNPLKKMQSLIAVACKLIRVFHVILTKGVSYDASKMLEDIRHPGEQLKAA

SEQ ID NO: 349634 - protein, 370 aa, unidentified
MKDTIKYVGLDVSKEKIAVAIAEEGREAPRYWGMIPHTPEAVKKLMKKLGSPESLRVCYEAGPTGYPLYRLLITMDIHCSVIAPSLIPKRPGERIKTDRRDAVRLAQLYRAGELTSVYVPSPEDEALRDLVRCREDAVEDLLRGKHRLSKFLLRNDIKPPSGVRKWTTKYFRWLDTLKFENPSLRVTFQEYYHQLKELKQRILRLEEEIRTQTSEGVHAEKIQALQSLRGVALITATSIVAEIGSFKRFTTARQFMAYVGLIPSEYSSGESRRQGQITKTGNRHVRRLLIESAWSYRYQPSVKGELQRRQNGQSPTIQAISWKAQNRLNKKYYRLLSRGKEKSKAITAVARELAGFIWAVMQKVDDVPQS

SEQ ID NO: 349635 - protein, 411 aa, unidentified
MHNRQNYLYVGVDLHKEHHTAVIINCWQEKLGEIQFENKPSAFSKFLLEVETYVSAGVSVVFGLEDVGGYGRALAKYLVDHEQVVKEVNPALSFLERKSHVTTQKSDSWDAECVVRILINKLNQLPDAKPNDLFWSIQQLVSRRNALVKAQSALKNQLHIQLNHHYPSYKKFFSELDGKIALAFWQQYPSPSCLEGANIKQLTAFLLDVSNNTCSVKKASEILKLVKEDGQTMKEYQETRDFLVRSIVRDIEFKKKEMKYIERELNQLVKLLDYQLETMPGIELVTASALIAEIGDVRRFPNANKLARFAGIAPVYFGSGGKGKTHKSKQGNRALHALFYNLAVQQVQVAKGSKLPRNPVFHAYYQKKLKEGKTKGQALVCIMRRLVNIVYGMMKYKTAYELPIVEEKEVV

SEQ ID NO: 349636 - protein, 313 aa, unidentified
MAHHEAKTHSGIDVSKAFLDAEILSPRQAKRFTNDREGWAELIRWLKPYPIEAIGLEASGGYERGLFNALRDAGLPARRVNPLRVRQFAKALGILAKNDRLDANVIARFVASVPQHAVDRNPAAEALAELVTARRQLCEDLTRTRNQAEHSTQPVVRRISNQRIKRLKAEIALLDDAIAEAVAHDQHLARKNQLLRSVPGVGPVFAHTLLALMPELGSLTNRQAASLLGVAPFDCDSGTFRGQRRIFGGRQHVRDVAYMAALVAGRRNPVLATFRSRLRDAGKPPKVVIVAIMRKLITTLNAILRDGLQWATA

SEQ ID NO: 349637 - protein, 316 aa, unidentified
MQTVHDWGADVDSRTFVVACATHSVAPQRIANERRAILAWLRTVPAGSRLGLEATGAYHELLADLAHRVGLQVFVLNARDVRRYAQGLGRRGKTDRVDAEVIARYVAHEHTELHAYLPPSKEQRALARLIKRRAKLVTIKGMLTQSLRGVPGTHTELQQVITRLERLIGHLERLMQRALEQLPAAHQTARHCRTIPGVGPLGSTCLGYTLTRLPYATSDAVIAHTGFDPRPADSGQKHGRRRLCKRGPGELRRVLFNCGMAAAKTPLWRPYYQAQRAKGLSSTAAIVILSRKLVRVAFALYKHNQPFDPARVRVQT

SEQ ID NO: 349638 - protein, 415 aa, unidentified
MLNHPKMRYTYIGIDSHKETHTAVFIDCFFEKLGEITFNNLPSEYGAFLSDANKLKMEGTELLFGLEDTSSFGRTLTVFLTENGQQVKHVNALLVARERRNQNITQKTDSVDAECAARVLLSKFGELPTADPQDRYWILRTLVVRRDHVVDSNTRAKMLLHSLLTQHYPNYRNYFKTIGGKTSLAFFKTYPSPSALRGVTEDELTELISEKSSDYYGRDKAIEILTSLEDTTAAFQEIRDETVRSTIRQIEFNMEEIARLECEMAKYLESFNCTLMTMTGIDVVTACQLMSCIGDVKRFPTAAKLARYAGIAPVTYASGQKSLQYANQRGNRELNSLFYNLAVRVSTPCSMHEKIINGFFYDYYHRKQTEGKTKRQALKCVQRRLVNIIWTMLTNGEEYVNPPVLDKPQEAEPQE

SEQ ID NO: 349639 - protein, 367 aa, unidentified
MTIVAHAHPFVVGVDTHAKNHALSILATPAGVQVDDGEFPTTAAGMARAIDWVARRTGGDLAVLWVIECAASFGSQLAHAVTAAGYQVVEAARMSAKANRGVGKSDPLDARRIAAAVLPLELDRLRHLRKDDGVRVGLRVLIAARDHMTGERTATVNALIALLRVLDLGIDARKPLTAAQIIEVSKWRTRTEDIGAAIARAEAVRLAKRVIVLEAELAENTKTTTDLLRRSPARVLLDKPGIGPVTAAVAMAAWSHDGRLRSEAAFASLAGVNPIPASSGNTVRRRLNRGGDRRLNQALHMAVVVRMRMDPATKAYVERRLTEGHTKKEIRRCLKRYLARQIYRTLTAVTRADEALAAVTSATPIPA

SEQ ID NO: 349640 - protein, 422 aa, unidentified
MLEETNDSEELVQRVAALDIGKAELTCCVRVPGEGKRGRRLQEVTAYKTMTRSLLVLADRLAALGVTRVVMEATSDYWKPVFYLLEAAGLEVWLVNAHDVKHLPGRPKTDKLDAVWLCKVAERQMLRPSFVPPPPIRRLRDLTRYRVDLVAARTAEKQRVEKLLEDAQIKLSVVASDVFGVSGRDMMAALIAGERDPKVLAQLARRRLRAKLSLLEEAFVGRFSDHHAFLLATMLGRIDQATADIVAVEARIDEQVAPFAAAVDRLDEITGVGRAAAQAIIAEIGVDMGRFPTAGHLVSWARFAPGVKESAGKRKGKHATGHGNPYLARALGEAAVVAGRTDTFLGERYRRIARRRGAKRAIVAVGRSILVIIWHLLSDPDARYRDLGAGFYDTRIDAERRKRNHVRQLEALGYKVSLQPAA

SEQ ID NO: 349641 - protein, 336 aa, unidentified
MTYITSIGLDVHARSVSACALDPFTGEVAQRRFGTDAGEIAEWIPGFESPKAVYESGPTGFALCRELRAPGVDCVVGAVSKMQRPSAEKRRKNDRRGAAFLARLLATRNITEAWVPPVEAEAARDLSRALDDAREDLQRARRRLSKFPLRRGPVFDETDALGRRRGARTRAFWRWAESCRPSDPAAAAAFDRYVACVRCAESDKRALEKRVLAEARADRWRGAVEALPCIKGVDAVTAFCLATEAGRFSRFPTAGAYASWLGLAPSEHSSGEKEAKGGITKTGNSASRRALVFGQVKVSEMVKGAFRFGKRKFSEMVRPTGRAPTPAPPTVRTSYR

SEQ ID NO: 349642 - protein, 466 aa, unidentified
MPINGRKAAQPDNEAEVEGFPVVRRNVAGIDLGSTEHWVCAPNRDRSDRDVERFGATTPELEKMSEWLKDRKVESVAMESTGVYWIPPHEVLEKQGLEVVLVNTRELARVPGRKKTDRVDCKWIQRLHSCGLLTGSFRPCEQVCMLRTLVRDRGNLVAESGDWLRRMQKSLDQMNVRVHRAVSDIDGVTGLAIMRAIVAGERDAQKLAQLRDRRCRKSEDEIARQLSGHWREDHVFSLRQALKMYDAIQERIGDYEKEILRKLAEMEREECRGQQAPKLKNPEKAKAIRKRGQDPMRQALYRMSGVDLTAIDAIGVETVQAVLSEYGPDLSRFPTEKQFVQHITLAPHRPTSAGKPVKKKKRGSGSTRVAGALRMAALALRHSNTALGAYYRQIARRAGPDAAVFASARKLATLIYRLLRWGQPYVDEGADAYEKRYQEVRIRSLTAAAKNFGLQLLPRTSDPAPA

SEQ ID NO: 349643 - protein, 478 aa, unidentified
MIKSVGIDLAGVGEHKVRCLDEEAQVCDGFGFETTLEGLAKLEEHVFRDGSNPVIIFEPTGLAWLVIAVYIRARHPDCRLVRTQARNVVALRKYLRRSSKSDRIDALTLAKMPFVDIERLNDVYLPPAKINAILRLARQRQRLESDIAGRKKRILSIVDGYLPGVRQPFSNLWSPQGREFLRTQLNPLAVVRAGEKALNRFLTRARVRGKKEANESHWVYRACQNIATIYEMSRSSGVVDDDFFADLQDEIARELRLMEVEEAESDTIAQRIEILYRELHPSDNLRTIPGVGELTAPVFLAVVGDPARFQSQSAFANYNGVVPDSRQSSNTEAKGLRMTKAGPSIMRWALYQASQIGRRYDPQLASIYYREMVHNGKNHKQAMGAVMSHIGARILAVLQENKPYELRDIQGKPITWEEARKQILTNYQVPEEIKQARRRRRTVGNSAKSQRKRREMVAHRAHEATGAPQPVVTTASPG

SEQ ID NO: 349644 - protein, 364 aa, unidentified
MNEILKQCVGIDISKDTFTVCVCRRDLSGKEYLSETVDFKNLKTGFNQLVKWSRKITDPSIETLFVMEATGIYYENLAHHLHRLNLPVSVLLPNKVKHFAKSLNVKTKTDQVDARIIARLGAERKLLLWKPPPEIFKLLKDLTREYAELIRERTAFKNRLHAMSSGYKPHPAIIRSNKAIIKKLTENAEKIKEEIEKLIYSEEWLGSKVNKVLTAKGVGLMTVATILAEMQGFEFVSNIRQLCSYAGYDVVQRESGTSVMGKTRISKKGNGRIRAALHFPALQSARHSPRMKSIYDKINQNKPSKMVGATAIQRKMLVLIYTLWKKDEEYVEDYENKAGRGLSNLPAQDELPTSSQKLSFVCEI

SEQ ID NO: 349645 - protein, 347 aa, unidentified
MSSPDTPAVFIGIDVAQQHLDWAQDGGRPRRERNTPAGIAALVAALAPLAPRKIVVEATGGYEQALVLALAAAELPVLLINPRQVRRYAQSEGILAKTDQLDARVLAAFAATTRLEPRPLPAPERRTLAALVTRRQQIQAQLVAERNRLPLADPAVAAGLTAAVAFYTGQLRALEAQIRAFIRDCPSLQAQAALLQSVPGVGPVVAATLLGALPELGTLSGKQLAALVGVAPFNRDSGQQRGRRTIWGGRAPVRQTLYMAALVASRHNPVIRTFYQRLLAAGKPKKLALVACMRKLLVILTALLRTTTPWRPNENKTSQATPALVLSPLSHRHHSTQAPRQEEVAMH

SEQ ID NO: 349646 - protein, 348 aa, unidentified
MRFYTQQHRYTCGIDLHARSLYVCILDDTGQKLVHKNIKASPEPLLKLVADYQDGLIIGVECMFSWYWIADFCEDHGIEFVLGHALYMKAIHGGKAKNDKIDSEKIARLLKGGMFPYAYVYPRGLRSTRDLMRRRIKLARERGDLMAHIKNTLSQYNLPAHPENLRYQKQREPMRNAFPDPSVQRSIDLDLARIDFYDGQLAKLEWYLKRTAKSFDPKTVILLKSVHGIGDILSLVILYEIHDITRFPRVQDFVSYCRLVKCQRESAGKIYGTAGAKIGNPYLRWAFGEAAALFLRGNPEAQRWLEKKTRKHNKAKALTILAHKLGRAVYFMLRRENLFDQDRFLASR

SEQ ID NO: 349647 - protein, 342 aa, unidentified
MTVLYAGLDVSLELTNVCIVDEHGRLVRESRVGSDPELIAAELQRIGDSFVRVGFEAGPLSQWMFFGLKEAGLPAVCIEARHAKAAMVSMNRNKNDRNDARSIAHLIRSGWFKAVHVKSVVSQELRSLLVAREFFVNKLRDHENEIRGLLRPFGLKVGRVSASGFDARVRDLVDGNPQLGLCIGALLDGRAAMMARLSVLHRELLRVTANDELCRRFMTIPGVGPVTALAFKTAIDDPARFRRSSDVGAHLGLTPRQYQSGETDVRGRISRSGDAFTRTALFTAAHVMLTRSCQWTSIKAWGVRIAKRSSLKKAKIAVARKLAVVMHRMWRDATPFRWGAPA

SEQ ID NO: 349648 - protein, 341 aa, unidentified
MNPLFVGIDVSSRSNVAYLMNPDGSKYSSFSVQNNLGGAKLLSERIVSALSSMRLSDVVIGLEATSIYGDSLVYALREDGSLGRFQRKIHVLNPKQVRKFKEAYPDLPKNDFVDAFVIADHLRFGRIAKEVYMDDYRYQALRTLTRARFDVIQNLTREKQRFANYLFLKCSGMAQDKDIQNTSATTIALMERFETVDDLANADLDELTAFIAETGRGRFADPNAVAKVIQTAAKGSYRLPKTVNDTVNQAMSVSIASMRALKEQVKVLDKAIEQQFEIIPNTLTSIPGIGKVYSAGIIAEIGDIHRFSSQASVAKFAGLVWHKSQSCARFLYPYKRRNEFE

SEQ ID NO: 349649 - protein, 442 aa, unidentified
MAGRSQFVSVGVRRRNARLTSLREAVRVDAAIVGIDLADDKQALVVTDHDARVLDRRMIRGNVWRAIAALPWAEQVAREAGFERIVLACEPTGSRWKPLLQHARDSGLELLCVNPMLVARGREGEDYTREREDYRDGAIIARLTSERRCFRPYQPEGAWARLRHLGIQRDQQLERASAARQGLRDLLTCYWPTALATAAHPMDSRTFRAIMCVSADPEYLTSLERDELAQQAKEALTAWGGRRLHHAILQRLHASASAPGGVRAERAAASERATLTARAWLDASSRQHDAETRMTSILEELDIARITRTLPGLSLVGAATILAETGDPSRFTHARAWVKHAGLCPRANESGAFQGRTRISGRGRPRLRTAAWRVIWGLLPHNHVYAARYTHLRARARNPLNDGQARSALAAALLRQLFVMIRTHSAWNPALAAGREDLLDAA

SEQ ID NO: 349650 - protein, 315 aa, unidentified
MANLNKSKSVVNVGVDVGKQFLDICIHEKALYWQEENSPEGIKKLLKRLSHYQVKRLAMEATGRYEFELAQAAHGKGLPVCILKPLLVRRYAGAVDQLAKTDRIDAAIIAQFAAVLKPKVTPQKSKNLIAIKNLITRRRQLVNLRTQEMNRIKIMGKELAVSCRRIIRSLDAEIQRIEKRLASHVEQQAEWTEKQSILKSAPGVGDALVYTLLAELPELGELNNREISSLVGVAPINRDSGRLRGKRRIQGGRAVVRTVLYMATLSATRCNPVISAFYKKLVTQGKHKKVALTACMRKFITILNAMVRDKVEWAF

SEQ ID NO: 349651 - protein, 412 aa, unidentified
MFKIFRNNCCGLDVHKTWIYACIGITDPNGRTEYKQARFSSFSNGLRDLAAWLAKYSCTEVCMESTGKYWIPVFNILEKSCFVTLAHPKYTKPQKGNKTDRKDAKWICDLFMCDMIKPSFIPSPEIRQLRDLIRYRVKLTNMLTGEKNRAQNCLTVSNLKLDDVFSDVFGKSARSITNYILDHPGKTFDVSPFVDPRCKTPVSEIQAAVDGAISSEQAVKLRQCLAHIDELEAHRKEIESEIFQIAEPFSAVLDLLYTLPGLDKNPMTAIAILSEIGPDMSVFPSSKHLVSWAGCCPRNDQSNQKVKSRRISRAGSYLKPLLVQVANALIKSKKHPEFKERYHRIKSRRGHKKAIIAVCKMLLTAIWNMLSKLEPYNPEGFLEHRPVKQEKTLTVSQALEFLRLRGYTITNQ

SEQ ID NO: 349652 - protein, 360 aa, unidentified
MIRNKPRATIYGIDLGKNLFHVVGTDPAGNVVQRVKLRRETVLVFFELAQPSLIGMEACPGSQWLARMLQTFGHTVRIIPAQFVKPYVKSNKNDTIDAAAIAEAVTRPTMRFVEVKQPEQADIQALHRIRDQMVAHRTKLICQMRAFCLEYGIAIRQGVGAFKASLPAILADSSNDLTPTMRRVLADLSDDLKGLEARIAEISRELESAAASNERARRLMSIPGIGPLGATALIAAAGDGQQFKKARDLAAWLGLVPQQYSTGGKSRLLGISKRGNRYLRRLLIHGARSCVFNLDRSRDRLGAWIDQLQQRMHVNKVVVALAAKIARIAWVILTSQESFTTSTEKQSHRVLAIRLRGSRR

SEQ ID NO: 349653 - protein, 410 aa, unidentified
MAQNEMTAMRGMPLCVPSMEYEGTSHLSSTVPKRQDWSANFNLQSEKGKSMSEVTRGMIVRVGVDLAKRVIQVYAVDANGRVVTCRVLARDRFMTWCARLPRGCLVAMEACSGAHHWARKLIALGLDARLIAASFVTPYRMEGRGGKNDANDAAAVCEAASRPKMRFVPVKSIDQQSVMSVHRLREGIKEERTACICRIRGLLGEFGLVFPQSPKALRQMLPDVLEDASNEMGGMARLALQRAQQQWEELDKHMAWCDERVGAHVKNDTQAKSAAKLHGIGPLTASASVASVGDFKQFSSGSQFGAWLGIVPKQNSSGGKVSLGRITKRGDEYLRTLFIQGAKSAVMTAHKRDDPISKWAVQLRERVGWQKAAVALANKNARILWAVMTKGERFDAHHVSVKPPVPTPAG

SEQ ID NO: 349654 - protein, 461 aa, unidentified
MSNSSRRLSRGDRRRNDRLDRLRGVVTRESAVLAFDLAADKQVCALTDQDSRVLARRCVKAKAWQLQEAVEWGLVKAAAAGFSSVVVACEPTGHRWRVLDQIAEQAGVRLVCVQPLLVHRARESEDFTHNKSDETDAMIIARLVTELRCYLPERADPAWARLRHLGARRAALVTDATAAKQQIIDLLECSWPAALVAAGKPLKSKSWLAAMTVLLDRVGASGDLAVIRRWGWTRFAAAVRRELPRHGATRWYSTIVRAVFDAAADPARATAGVADQRAGALERTRFALADLAHARAETAVIEARMVEVLDELDLTALATSIPGLSAVGAAAILAETGDPTRFTSARALVKHAGLCPRDNASGNYQGKTGISGRGRPQLRLAAWRAVWAALHNNPVLAARYAHLTGRAENKLTKTQARVAVAGSLLRQLHAVLATGNPWDPAIASGLHPQSAATARGAAAAA

SEQ ID NO: 349655 - protein, 353 aa, unidentified
MNDSHSIAWLGLDAHSKNCVLGQLDDHGTEIKWWGFPTKPEQLVQHVKAIPATEKHLMLEESNLARWLSQLLKPHVQQLVVCDARRNRLISQDHHKHDKRDAFALARLLRLNEFKPVWQPADPQRVLFKRVAKSYENAVQRQTRLKLQLKSLFQHWGLFPTGATIYSKPGRVAWLKQLPYDTLRAQALLLYELLDQALAGQTQFRRLMCQTGRQFPEIQRLSTTPGVGLVGSHLFVAYVQDPKRFPKFGRLTRYCRLGIRDRTSDDKPLGYQQLDREGIGTLKAISYRAYLQAAKRRTGPVWEFYQLSLRHTGSTTHARLNTQRKILLTLWTLWLTGREFDPDQFSRAQPLDV

SEQ ID NO: 349656 - protein, 313 aa, unidentified
MTITTAAGVDVGRDWLDVAFVRSPEAGVAGKHFRVPNTPAGIAAILSRLRRAGVVRVVIEAIGSLSARLVRALAAAGFEVGVVDPRRIAALRLAEGGRAKTDKLDAGLIARFALLMSDAIRPVPSAGALELRALSTRRRQLVEMIAMEKTRLKQAIDPVLMASSRAMITMLGEERTRIEAMLETRTRAAPEDRRKGDILRTIPGFGPAVVTTLMADLPELGASDSKGIASLAGVAPHIQQSGADPGRAHIQGGRSCVRAALYMAALSSIRSNTGFKAEYQAMRAAGKPAKVALIAIARKLLVAANAMIKQDRP

SEQ ID NO: 349657 - protein, 418 aa, unidentified
MEVLHERCAGLDVHKKTVVACVRLARDGGVEKEVRTFKTTTADLLALGEWLDGHDVNHVVMEATGVYWKPVWHILDDGDRELVLANAAHVKNLPGHKSDVSDCDWLSDLEAHGLIRGSFVPNRQTQELRGLLRTRKQKVRERSSNTLRLQKTLEEANIKLDSVISNVIGVSGRRMIEAMIGGETDPVALAALADRRIKAPPEVLCEALRGRVTGHHRFLLGLQLEHIDALDRMIDKIDQQIDASVEPFRAAAGLLTTISGVNELAGRAIVSEIGIDMSRFETAGHLISWAGLCPRNDESAGKRRSTRIRKGAPWLKDILVQCAWAATRTKATYLHAQFVRIRSRRGPKKAIIAVAASILTAAYHMLKNGVPYRDLGPQHFHSRNKQAQAKRLLARLRDLGFTAEFDSLKPIPDAVVSY

SEQ ID NO: 349658 - protein, 494 aa, unidentified
MESPIVSIDVSNGNSHYMCFIKNNKRFGKVKKIDHDIEGFKRLLEDIQKLEAETNEKVCAVFEATGVYTKPLERFLSKNSIKTYIINSLESARKRKEEIHNKKTDKLDPISISKVYYDKEEMMELTKKDETHNWLRKKNRLYEDQLNHLRKYKVTFQNQLSICFPGYLDLFKDGYSDIPMTILKKYPHPDLLKNKKAETVARYLEKNTCHTHKVSLEYALKIIEFAKKTYPGCEKDDVEVEIFKILLDKVIETQRECEKTLNEMITVASTLEEYRYILSIDGIGTNLAARIIAEIGDIEEFKSREALVAYAGLDPHIYQSGDQDGKHLKISKKGNKYLRCLLFLAVGCSIRGAKDNPVNRFYQKKKQQSNPLNSKAAKTACTAKLLKIRLCHNKQLINSHFYRGVSELPYKLLFAVIYTHLEFRYEVSHTITSHHVHHFHQTRIPDGTLLDYMVQYRKPLFPQFFLYPKKFLPENNPHHKEFHLRPYIQNNANQ

SEQ ID NO: 349659 - protein, 430 aa, unidentified
MKSNTQNAKIEAITEKTLVLGIDVGSETHYARAFDYRGIEYSKKPFKFSNTEAGFVTFKEWILDLKERHEKDKVVPGMEPTGHYWFNLGKFLQDNEMKPVLVNPHHVKKSKELDDNNPTKNDRKDPKVIAGLVREGRYMIPYLPDGVYADLRTASNIRFQLQAELTRIQNRISRWFNIYFPEYKTVYGKPDAKSGMLILKAAPLPEDILTLGIDGVNQIWRDAKLRAVGKARAKTLIEAAEHSVGSKEGAVAARMEIRMLLEDYESRNMRLQEVMVLIEELVKGIPMAEKLLEIKGVGIRTVSGFLAEVGDISRFNNPKELQKLAGLALVENSSGKHKGGTTISRRGRKRLRYLLFEAAMSLVAKNPEFRELHNYYTTRRLNPLKKMQSLMAIAAKLIRVFYVMLTKGVNYDPKKMVNDIKRPAVYLQTA

SEQ ID NO: 349660 - protein, 406 aa, unidentified
MKQIVSVGIDVSKGKSTVCAMIHPNTIIKESFEVLHIVEEMSMLADYIGSLDGEIRIVMESTGHYHLPVAQFLYQKGFFVCVENAYIIRQFSRIMLHGAKTDPLDAKKLAKYGLAYWSELKPYKFHPSCYTELSLLSKQYQTYIKLLIAAKQNVIHLMDEMLPGFKEALDTASGVQFSKVKYVDFAKEFYHVDMIKSMGKEIFRENYKQWCKEKGYRFQSEKADELFHLAEDGIPTLPTEFPSTRLCMEVATEQVSQLGYALEQILSQMQNLAKTLPEYQTIRQMGGMGEKLCVRFIADIGDVRRFHNGKALVAYAGIDAPPYQSGQYTGTKRRISKRGNSALRKTGYEVMKSLKSHPPKTDTRVYDFIIKKENEGKSKKQAKIAGLNKFLQIYYARVIEIYKNIV

SEQ ID NO: 349661 - protein, 346 aa, unidentified
MTIVEDTRAITGGVDTHADMHVAAALDPIGGLLGAGEFPATTAGYARLLGWLGGFGTVALAGIEGTGSYGAGLARHVTTAGIRVVEVDRSDRQDRRRQGKSDPLDAVSAARAAQSGRARGAPKGRDGAVEAIRALMADGRSARSERTQTINQARALIMTGPDDLRARFARHTAAGLVTELASLRPRPGDTVGYATRIALRELGRRAEFPGGQLGRLDELIVPLVTARAPGLLALYGVGPDTAALLLVAAGDHPHRLRSEAAWAHLCAAAPIPASSGKRTRHRLNPGGDRQANHALWRIVITRMSSHAPTRAYVERRTAEGMPKKEIIRCLKRYVAREVYRHLRAAG

SEQ ID NO: 349662 - protein, 381 aa, unidentified
MITLGMDVHVRNSYLHVKDEAGDVMRHGRCRNTTMDLAKFLDPLEQVARQRGEPIYAVLESTTNSRAIQRLLTQYGEAAGIDLTAEVLDARKIRIIAESVCKCDRLDAKVLCELARSNLKLPVCYMPDDEEFALREHLRARNDLVRMRTMLKNRMHAVLHRRGILAPVATLFTKAGRAYLAQLSLETAGREILDRFLAMMDEIDRTITASTVSMRELMRSPRWAKPAALLQTMPGIGLITAMTILAELGNLDRFRSRAAVANYAGLVPICRSSNDKRYSGGITHRGSKHLRAALGEAAWSAMPRVPAYRAMFERIAQKKNKLVAITAVARRMLEDAFTMLRQDEAFRYVGLSVADTPQQVGTVTPAPAPSSDRKVASSVAG

SEQ ID NO: 349663 - protein, 341 aa, unidentified
MQYVGLDVHKSFTTMGLFDPATGELKDLGNVPTREGELTEALARIGGPKTVVLEAGRKSHWVAAMVEPVSQEVWMVDPLEVRRLQGRKPKTDRRDAAALARWAGQGALSPLWRPDAQTMNLRELTRGRAGLVRMETKVRNMIRSLCARHGLEAPKGDLLSEKLQAWLEEAPLGGYGGKMLEVLRALLPVLRAAAQSLTQPLEQEARAHAQARRLMTIPGIGPVLGLTMAAEIGDISRFPGPAHLRSYSGLCPRVSASGGRTHTGPLTKSGNRWLRWGAVLGTQQIANKTKVDPRLKRLLRRVAFRWGANPAKVACARALLDLIWHLLTKEEDWQPPLAQAA

SEQ ID NO: 349664 - protein, 347 aa, unidentified
MKFYTTFHKYYCGIDLHARILYVCILDERGNKVVHQKIKADKHELLKLILPYLEDIVIGVECMHCWYWVSDLCAEHDIDFVLGHALYMKAIHGGKAKNDKIDSYKIASLLRGGNFPLAYNYPANMRSTRDLLRRRTRLVQHGAQLKAHIVNTNSQYNYPPLELHMKNKCVRQEFQTRFDDQAVQLNVNFDLAILDAYAEELKKLEYYLESKAKKHQPNYYAQLRTIPGIGLILAMTILYEIGDINRFESVQTFASYCRLVKCKAESAGKTYGTSGNKIGNGHLKWAFSEAAVLYLRGNDKARNYLNKLQKRMSKAKALSVLAHKLGRCVYFMLKNKTVFDDERFLKS

SEQ ID NO: 349665 - protein, 420 aa, unidentified
METIETAYKVAGIDVHKSMLAVVIADVAREGEFQFERRKFGATESELRQLAMWLAERRVREAVMESTAQYWKPVWQQLEGQCELYLAQAHSNRAPRGRKRDFADAERLLRRHVAGELILSFVPGPEQRLWRTMTRSKLQLTRDRVRIHNQLESLLEDARIKLSSCVSDLLGLSSRRMLKALAEGETSAARLAAMADPKLRATPERLQDALHAAATVSVLHRQILGLFLARLELIEDQMEILDKSIGEALHGYHDAVLRLAEVPGYGIDSAQQVIAEIGPAAATFPSAAQLSSWVGTCPGREESAEVSRNNRSPKGNRMMRRVLNQVANAAVKTKGSVFQAVYRRLLTRLGHNKAIWAIAHRLCRLTWKILHQGVRYIEQGNRPNPKAVKTRMNKLIRELRSLGYQVQVAPLATPKNDAIE

SEQ ID NO: 349666 - protein, 373 aa, unidentified
MTDYDAYIGLDVHKDSISVAIADAGRSGEVRLFGTIPNEPDAISKLVKKLSSRHPRIEFVYEAGPCGYNVFRQIEALGFVCRVVAPSHTPVRPGNRQKNDTRDALMLARLLRAGELTFVWVPDVVHEAMRDLVRARSVASHDARKARTLIQLFLLKHDLRYSSKSWTSRHRTWLRNRHFQHHAQQIAFQSYLNRLEQAEARKKELEEQIAVISQTWSLAQTVINLQAFKGVGLVIAATLVAEVGIFSRFDSPRKLMAYLGLVPGEHSSGGSVRPRGITKTGNSALRALIFEAAWSYRVQAKVGNWMHKRRPDIPQAIVDIAWKAQVRLSSRYRKLVGAGKKSNVAITAVARELVGFLWDVARISERETTSPAA

SEQ ID NO: 349667 - protein, 392 aa, unidentified
MYIIGIDIGKNHHEASIVSPEGKQIGRSLRFATTHKGADSLMRFIFKNIGNSPCVFGMEATGHYWYPIYSFLKAKRYTIYVINPIQSDSLRKMYIRQTKNDSIDSFLIAEVIRFGQFGTTSMADENILAMRQLCRYRDSVISSRTEIKLRIGTIMEQIFPEYEKQFSSLWVSTSMGILEKYLTPENIENTPIDELFEIIKDKSHNRLTKAKAISIKEAAADTFGIKIAQDAFSFQLKQLIDRMNFLDKQIEALDIEIMKYYEQFDCYLHTIPGIGIIGAATILAEIGDISRFKNSSALVAFAGIDPTVRQSGEFNSTHNHMSKRGSPYLRHAIFLAATTCSFHNSPLNAYYKKKRDQGKHHLTATGAVARKLTTIIYAVLRDSKPYEPKKFC

SEQ ID NO: 349668 - protein, 408 aa, unidentified
MERVYECCCGLDVHKETVVACLRMPGERGQRRIEVRTFGTTTPELLAFGDWLTEHRCTHVAMESTGVYWKPVFNLLESVCEVLLVNARHIKMVPGRKTDVCDAEWLATLARAGLLKPSFVPPERLRRLRLVSRQRQKLAGMLAAEKNRLGKVLADAGVRLGVVVSDLNGKSARAMIAALIAGATPEEALRHADRRLKAPREEIAAALDGEISAEHTFVLSTILAHIDFLEQSIRAFDAHLVAGLNLPEEKNALALLQTIPGIDRIGAAMLLVEIGTNMALFAGSDHLASWAGMCPGNNKSAGKRKRERQRKGNSYVRRLLCEFAQAARKTQSLFQAKHRAVAIRRGFKRAIMACAHKMLRIIWAMLLRKQPYRDATVDYEALSVRRNAPRWIRALKRFGYLPASAATR

SEQ ID NO: 349669 - protein, 350 aa, unidentified
MRIIGCDYHPGFQQIAFVDTETGELQERRLQHPQEAEKFYRELAAEGLKARVGMEASGHARWFERLLAELHFELWIGDAAEIRSKRVRKQKTDRQDAQLILRLMLKDDFPQIWVPDWENRDLRQLLWHRHRMVQARTRVMNQLQAVALNEGLRCKKRLWREAGREQLEAFPLAPWASRRRRDLLELLDRLSPTIAELTQTIEQEAEKCPAARRLRTHPGVGSLTALAFVLIIGKAERFQCGKQIASYLGLVPSEDSSGDRRRLGHISKQGNTLLRFLLVEAAQVTVRSLPEWRSKYFHLAMRRGRKIAKVAMARKLAIQLYWMMRKEWDYEQVKGFGPHAGQPEHRRGVQ

SEQ ID NO: 349670 - protein, 386 aa, unidentified
MTKKVTRSTTPKHYIGLDVHKSTISIAYAAADGSDPVLYGKTTGSNLAVERALSKLRKKLGASKEDMRICYEAGPTGFVLARRLLQLGYDCSVIAPSKIPQKSGDKVKTDKKDAKKLARLLRAGELEPIHVPSAIDEAIRDLCRARTDAVQARRRAKKQLLGFMLRNGMAYTGKTHWTQAHLNYIRKIAMPDPVQQIVLEEYIMEIDAAEERVARLYAHMEKQLETWDRKPMVDALMALRGFQVVTAMTLIAELGDLDRFATPRQLMGYLGLVPGEDSSGAKRRQGAITKTGNTHARWMLVESANAYEKKEMVSPALSKRQEGQIREVKVLSWRAQTRLCYRRRRLSARKLARNKVTIALARELCGFLWELDAIMRDKGLISKHPA

SEQ ID NO: 349671 - protein, 436 aa, unidentified
MGLEGGWQIAFMAWRASFSVSKNVEVKYMSDVACGVDVHRDMLVATVVGDSLKETGRFINDVDGINRLKEWLKANECKRVVMESSGVYWASLYLALEDAGFDVSLANPGQVKAIPGRKTDQSDSEWLAHLLRSGLVKRSYVPEKRLRDLRDLSRLKVKLVGSRTAFKNRCHKVLNRVNIRLGSRLSDVFGKAGLEVLGGLMGGRTVDEILEHTENRWLKKRGDEIREVVKGSLSETDVFVLKQCVDMVKHLDEKILEVDGRIEMLVNERDVDVVASVPGVGRKSAAAITAEIGDAKRFEDGKKLASAAGLAPSVYQSAGKNLTGRITKQGSKWLRRVMVEVAHSAVKTRDSKLRMFYLRVKARKGEKTAIVAVARKMLTIIHHLLVNGEEYVEDGFEKKLRSRRAIHFRGVPLEEMATVLRDAGYMVSGPFGGSFR

SEQ ID NO: 349672 - protein, 348 aa, unidentified
MQGRGTRGLAYHEGERGLKKCNRVGVDVSAKDLVVAIEASGRREAPIVLANDAGGHRKLAKLATKRGASARVVLESTGTYGLDLALALHRAKRVEVMVANPRAIAHFARASLQRSKTDRLDAGTILEFARRMPFEPWSPPAPQILELRALSRRIEAMSKTVVQEKNRLHANDQSEELSEFVKHDIREFVDHLEGRIARLRKQALLVIEQSEDLATAFAHITSIKGIAEASGIAILAELAVLPADMTTRQWVAHAGLDPRQFQSGTSVHKPARISKTGNAHIRRALFMPALVATQWEPHIKAFYDPLLERGKTKMQANVAVMRKLLHAIHGMLEHDQDFVGEKFFAMRG

SEQ ID NO: 349673 - protein, 439 aa, unidentified
MSCPTGVVSTDPLGRCRGGLGSCPKLVSIEVKEVVALIFVGNDWAEDHHDIHVMNEAGKKLAARRLPEGVGGVSDFHALIAAHAQDPQEVAVGIETDHGLWVASLVAAGYRVYAVNPKAVSRYRDRHHVGGGKSDAGDAKVLADLVRTDAHNHRVVAGDSDQVQGIKVLARAQQSMVWLRTRETNRLRNSLRDFYPAALAAFEDLHDRDALAVLSRAPDPDTAARLTRSQITAALKAGGRQRNLAASTERIQTVLRTEQLHAPASVAAAYAAVVTAQVGVITAINTQLAQLEAQLERSFEQHPDADILLSLPGLSDVLGARVLGEFGDDPERFTDAKSRRNYAGTSPITIASGKKRAVLARHARNKRLYDAVDQWAFCSLQPSPGARAYYDQRRAAGDTHHQALRALGNRWVGILHGCLTHRTPYDEHTAWAHRQPVAA

SEQ ID NO: 349674 - protein, 429 aa, unidentified
MKKIRAYRATPVKNICLDPVLADREGQEVHVGLDVGKEHLFVVLRWGESDFERPWKVKNPFEIRNLMELLVELNRGRRMTVALEPTGTYGDAARQAFSDAGLRVHRVSPKAAHDYAEIFDGVPSKHDGKDAAIVAELTAFGKSSGWPFEVSVFDEELAYFIDGLETQRRMLTMWYGRLEGQLARHWPEATNTLRLTSGVLLRSLATYGGPGGLAAEETALEQLVKWGRSRLSQEKGEKLLADARDSVGVRQSAINVRRLQEYASEALACRRAVSVITKQLQELTAKHPVIQAQALAVGLVTASVLWVYLGDPRNYDSGFAYQKAMGLNLKVRSSGKYKGRLKITKRGHSQVRRWLYFAALRMIQQDGVKQWYEAKKAKNPAERHEAKRGLIGVMRKLALALYQVGACDKQFEVSLLFPGSVGSSQTKAA

SEQ ID NO: 349675 - protein, 367 aa, unidentified
MKKISTVVAKQGRNNSQQELTIGLDLGDHNSWYCVLDEAGRIQLEQRVRTTAKALQEVFGTMPRSRVALEIGTHSPWISRLLKQLGHEVIVANARKVRLIGESRKKDDRLDAQTLARLARIDPELLYPVKHRSAQAQADLMMIRARAGLVRARTSLVNTARGLAKSYGERLRGCNVRDMDPEKAENLSPELQRALEPLLATIEELSERIVEYNDRIEALAQTSYPQVDLLKQIKGVGTLIALTFLLTLEDPHRFGKSRDVGGYLGLQPGRRNSGESEPQLHISKEGDPYLRTLLVQGAQHILGPFGIDCDLRRWGLKLAERGGRNAKKRAIIATARKLAVLLHHLWVSGEVYEPLHNSRRLTVAAAA

SEQ ID NO: 349676 - protein, 345 aa, unidentified
MSMVRMIVGGVDTHADQHVAAAVDANGGVLGIESFPADRGGFEALLGWLMSHGEIQLVGVEGTGSWGVGLARFFHDQEISVVEVDRPNRQSRRRVGKSDSTDAVAAARAALSGSARVVPKTRNGPVEQMRILMVARRSARSQRIETLNQLRHLVFTGPEQIRAKFKDRPKTGLVTEVAKLRPRKGSDPVLYTTQMTMRGLARRIEHLNVEIKGLDSMLTELVTNTAPSLVGLYGVGTDTAATLLVAAGDNPDRLHSERSWAHLCGVCPIPAGSGKTDGRHRLNRGGDRQANAAFYRIVLTRMSGDPTTKAYVARRRGEGKNTAEIMRCLKRFVARETFKHIQHVA

SEQ ID NO: 349677 - protein, 431 aa, unidentified
MKNRTNQRLEEITPNTLVVGVDVAKSVHWARFVDYRGLEIGKAISFKNNRQGLEKIVTRITDICKLKTLRYPIENIIIGMEPTGHYWKAAANYFINKGYRVVGVNPYHTKKAKELDDNSPTANDKKDAITIARLVKDGRYFDPYLPQDLYSELRILTNARVSVIKRNNAVKNHITAILDEYFPEIWTVFKHPLKGKASRQVLRSCPFPNLILKLGEEGVLVEIKKAVKKTVGLKKVRQLIKAAEESIGVGYGLEASHMKLCWLLDELDLIEKQLVEVEQEMEKALYQTGYAEQILAIKGIGVVTAASFLGEVGDPLRFQNARQIANYAGYNLVEDSSGKSKSGTCISKRGRKQLRSILYLMAFTMVGNNAEMKALYHHLTKRKTNPLKKKQALVVISKKIITIIYSLLKKQDTYKPELVLGATRKDLMKAA

SEQ ID NO: 349678 - protein, 370 aa, unidentified
MRQSSTLYIGMDVHKASIAVAYVTQDHDAEVTSLGTLGPRRCAIDQLIRKRQSKAKYLVFVYEAGPCGYWLYRYLTTQGHVCSVVAPSLIPNKAGDRVQTDRRDAVHLARLMRSGALTPVYVPQGADEALRDLSRAREDALQDLKAAKFRRKAFLLRQDIRYTGSANWGPAHLRWLSEVVGPTPAQPIVFQAYVRAVNEHTERLQRLDQALHEPVQSWRLHPVVEALQARRGVQFTVAVTTVAARGDLARFDNPRHLMKFLGLIPSEYSSAERRRQGSITKAGNTHARRALAEGAWAYRYPANVSRHLQLRLETQPKALQDISWKAQVRLCKRYRRLMARGKHANQVVVAIARELVGFMWAIAKQVTVTP

SEQ ID NO: 349679 - protein, 464 aa, unidentified
MMTGKKLWRNRKERKEWARRLQSEDPGLEVVHPHAAGVDVGNSAHYVAVRPDRDPEPVRRFECFTADLHRLADWLKSCGVKTVAMQSTGVYWIPLYEILEERGLEVYLVNARHTKNLPGRKSDVQESQWLLKLHTYGLLNNSFQPVSEIRVLRTYWRQRGEHVREAATCIQRMQKALTQMNVQLANVISDISGLTGQAIIRAIVAGERNPLKLAALSDPRVHASREEIAKSLEGNWRPELLFVLQQEVDMYDIYQKRIAECDQRLQKQLASLTHPLTLQPPTQKPKTKKPAAKNAPRFDLSSELQRVTGVDLTRIDGIDVMVAQTILSEVGLDMSRWKTESHFASWLGLCPDNRISGDKVLGRGTRRVVNRAATALRQSANTLMRSRSYLGAQYRRLRTKLGAPKAITAMAHRLARLVYRMLKYGQAYVDKGTEYYEERFRQQQIQLLRKRAAKLGLQIAEIQA

SEQ ID NO: 349680 - protein, 338 aa, unidentified
MGYDHYIAVDWSSKNMAIARMTEKSNKVGVIDVPSDVKELQIYLENLRGTKVMTIEETTTSQWLYTELVNRVDRMIVCDPVRNHLLSEGAKNDTIDATKLVQLLRAGLLKEVYHSAERFIELRRLVSGYDDLVKAGVRLKNQRYALLRATGKTGDERVGSGLPSETDQHVMEGIERQMACCAKEKTDYEGAFRLWAKKYSAIRHQMSLPGIGLIGAVKIVSRVVSPERFVDSGHYLSYTGLVKLERKSGGVTYGRKSSRYSRELKSVYKIGVVTAIRGKNPIRDYYDYLISEKGYPDYQARHKSARRLATLSLGVFKSGERYQPRNRRGNVVGTDQRE

SEQ ID NO: 349681 - protein, 423 aa, unidentified
MDMNDDSRLQMFRQMKQEIRGSQEYLLVGVDIAKDRHDAFFGSAGGKTFLKKLVFDTTREGFEKLRLHADSIRVQHGLKKIAFGMEPTADYHKPLGEYLIQQGHRVVLVAGSAVKKNRELLDGRWDKHDAKDAANVADLVGQGKCLFYEFPSSDLRELRSLLSLKRKLKKTEQGYRVRIRNHLIAQYFPELDSYFTCGEGPAVVKWCLDPKKLATLSFEEFARMVSSRNGGEKQQRRLREIYEKAASSIGCEVHPAVAFEAQTLLETMGRLHATIIETDKKIAEVCTRFPEYAFLLTIPGFGPDISAKVLGAIGNPHRFQNHRQVLKTAGLDLSADRSGKRSDVTPVISKRGKADLRYGLYQAALVAPVKNPCFMRYFSHKLEGRQKEKGIGTKMRVKLAAKMLVIAWTLMKKKEVFDPGCVK

SEQ ID NO: 349682 - protein, 346 aa, unidentified
MECTTVAVDLAKDVIEVAVAGPGGRITERHRLGRRDFSQFLATRPRCSMVMEACGGAHHWARTAKTCGHDVRLIPAQYVRPYCRRNKTDRADCSAILEASKNHEILSVAVKSVDQQVIQGLHRLRSQWQATRTARINAARGLLRELGIVIPQGATTALKRIPDALADEAVPPILRDGVHEVLAEIHQREERIAGIERQLECLSRNDPAITRLRQVSGIGLLTATALSASAVDATHFRSGRHLASWLGLTPSEHSSGNVRHLGSISKRGDIYVRTLLTHGARAVLARAKQMNTAGPSLNHLQRWAVGLELRRGHNKATSALANKLARIAWATGRYERAFDPNHAVAG

SEQ ID NO: 349683 - protein, 356 aa, unidentified
MDRSELQVAVDVGARRHRVAVGDATGRLIEEFDLEHTATGLNGFFDRLERLAAKRKMSVAVAMEGFNGWARPLDRQVLEHGWKLYNVNNLKLARYKEIFPAPAKTDAIDARRILELFRLRIHLPVAREVLQEVVAVTQEAERLKRLTRRRRQLVNEKVRVLNRMQADLQAVCPGLLAITAEADNLWFLSLLGAREDIRKLTGLRQSSLLTLDGVGRAYCAKIQAWQCEALFSHDAEWAGPMVVADARRVQALKREIAALDQLIEPLTECCETARRLRTIPGFGPTCSGELAGEIGTIERFATEASFALYLGMATLDHSSGTHTGTRRPRQVNTRAKAAMMIAVARHMEQVPASRAY

SEQ ID NO: 349684 - protein, 347 aa, unidentified
MLIIGCDFHPGFQQVAIFDNTTGEIQERRLGHRAEAEQFYRGLAGQPVLVGMEACGHYPWFERLLAELGFELWLGDAGRIRAQEVRQQKTDRRDAAHLLQLLLEHRFPRIWVPSLEERDVRQLLMHRHKQVQTRTQVKNQLHALALSQGVQRKRKLWTQAGRAELEQLELLPYAAERRKQLLQALDRLEQEIAALNQRVESEVAQRPAAVKLQTHPGVGPVTALAMVLTLGPAERFASGKQVGSYFGLIPSEHSSGGRQKLGRISKQGNAFLRFLLVEAGQSAVRKDVELGRFYRRLAARKHRALAKVAVARKLATRLYLMLREDWTYAQLCRAMVSVSPSHSVVES

SEQ ID NO: 349685 - protein, 355 aa, unidentified
MRTDYHEKRFLAKGQEVFIGMDVHKESWQVTARAAGEEVFHGRLPSQYQALGKLIERLPGCTVKVAYEAGPCGFSLYDKLTADGIETIVVPPTLIPLESGNKVKTDRRDSRKLAHLLERGMLKKVYVLSEEDRADRELVRTRRQINEHRSDTMRQIKSKLLFYGIKPPCTAEQRWSKAYVKWLKEYTFDSDLLRVSLDYLIGIYEYLTSQLVKITKEVVLLARSKKYSKRVKLLKSVPGIGTLTAIEILVELQDVKRFKSSDKLAAYIGLTPSEFSSGQYVRQGRITHCGNTRVRACLVESSWILIGKDPFMRKRYQELKNRKGGKKAIVAIARMLIIRVRRILIDNKPYLLKAA

SEQ ID NO: 349686 - protein, 341 aa, unidentified
MDKVISVIGIDLAKNVFQVCAANNSGKRLFNRSVSRAKLLPMLANIPKCIVGMEACSSSHYWAREIELLGHEVKLMPPQYVKPYVKTNKNDATDADAICEAVVRPSMRFVSIKSVEQQAIMLLHRDRRGLIRDRTSLVNRLRAMMSEFGVIAPSGLHKFRSWLKEEYGAVESKLPELLQRHIQVMVSRLWETDEHIKLLELEIHGNSTSAADCKRLSEVPGIGPLTASALVASLGDIKSFNNGRAFAAWLGLVPKQHSSGGKNKLQGISKRGDSYLRSMLIHGARAVIRHLNPKRKVSRWLKDLLCRRHKNVVIVALANKLARIVWALLSKGTNYQESYSC

SEQ ID NO: 349687 - protein, 313 aa, unidentified
MGLYVGIDVAKDRLEVATSSGESFSASNDAVGRAQLIERLLKLSPALVVLEASGGYEQALLVELVAAKIDCARVNPTDVRYFARMQRQFAKTDRLDAKVLVAFAEHRATDLIPARLDPERDELKLLVNRRTQLLQMLTAERNRLAQAPKWLRKSIGRTLRALECELGAIDHEIAQRVNASARLKPLQQQLTSVPGVGPGLSNMLLARLPELGQLNRREIAALVGVAPFSQKSGRWQGHESIFGGRASVRTVLYMATLSAVRCNPTVRVFYRRLRQSGKPAKVALTAAMRKLLTVLNVMLKTQTSWRPPCIIAL

SEQ ID NO: 349688 - protein, 419 aa, unidentified
MNDQIAWNAITHYAGFDWAKDHHDVVVVDARGKIVQDLTFEHSAAGWAQWQAMVAAYPRLAVAIETNQGAAIEQLLASGVAVYPVNPKSAERYRDRKAPSGTKTDYLDAWSLGDALRVDGHGWRALKPLDPLIQELRLLCRDEVELISNRTELVNQLQAALQEYYPAALAAFDDWTAPSAWSFVQQFSTPELLQKAGRRQWEKFLHAHRLYRPELNEKRRQIFERAQAFCGRPAVTRSKSRLALALIKLLQTLESQLQAYRQEIQRLFNEHPDHDLFGSLPGAGGKLAPRLLSELGSDRSLFANAQALQCYVGTAPVSFQSGQTHQVYVRFMCNKSFRHAVHLWADLSRRSCAWAQVYYQQLRDRGQSHAAALRCLGQRWLKILWKMWQTNTCYDAELHTANQLKHGSWVLAIKSAATK

SEQ ID NO: 349689 - protein, 415 aa, unidentified
MTAGHVGCGPRLVDEDQALGIEIELTIEPALALSQDVGTVQLDSMASLYGMARPFSPASVMMSVLEKERSGPMSVVILGIDLGKNVCSVVGVDAAGAVIVRRSMRRQTLIDYVAKLPACVVAMEACCGAHYLGRLFAAQGHEIRLMSPEYVRPYVKAQKNDDRDAEGIAEAASRPTMRFVELKSEEQLDIQTLHRVRSRLVNERKNLINQMRAILLERGTTFPVGRRKFEQGIDAMLAGEDTTLSPRLRQLMEQLRAEWRELDARIEALNGEFVELARNDAAARRLTSIPGVGVLNATALIAAVGNASSFAKARDLGAWLGLVPRQHTTGGKPRLLGISKRGNTYLRTLLIHGARAALPSLARSETPLGRWLTGMIERGVHRNAIVVALANKLARIAWAALRKEATFERGYPVAA

SEQ ID NO: 349690 - protein, 440 aa, unidentified
MAVTKRIIDVVSFLLMKTTSANTNTHRTSGTLERVSPAAADYFIGIDYHKRYSICAVLDAAGQERELCRIDHAVPEGFGHLLQRWPRARVAFECSMNWHWLYELLEEHIAATAISLANPHKTRIIAEAQVKTDKVDARILAHLLRADLLCLVHIPEKQTRQRKEVLRQRCFFVRQRTAVRNRIHRLLGGQHDLAVPQCSDLFGKRGMKFLEELELAAPEDLLLKQQLEMLRGLQQRIKEDEAWLAGHMPAARGYAHVLSLPGMGPILSSLVVSEIDDISRFASAQKLSGYCGLCPSTSSSGGKTYQGRLLRACNKWLRWAFVEASWLAIGLDGYFGNLYRCKRALGKKPNTAIVCVARRMARITWQLLTQKRPYDKVHCKPKTSEQAGAPLPKTRSALPVSQKPAAPEPAPPTVPRKPATNKPAPKSEKRRQKRFPQPLR

SEQ ID NO: 349691 - protein, 344 aa, unidentified
MVIIGIDAHKRSHTIVVVDEQGRQLAETTTGTGSSDHLQLLGWAARHGADRLWAVEDCRHLSRRLERDLLAAGERILRVPPKLMANARDGARSFGKSDPIDALAVARAALREPNLPVAKLDGRDREVRLLVDHREDLVQERTRMISRLRWHLHELDPENEPPARSLNHLRNLDKLALRLDGGDGLVARLARELTDRCRQLTIEIKELEKEITTLVATLAPSLVAICGCGPLTAAKILGETAGIDRFKSNDAYARHNGTAPLPVWSSNKQRHRLSRTGNRQLNAAIHRIALTQAHWHPDAKAMIARRRANGDGGLEALRILKRRLSDVVYRTLKADAAAELLLAA

SEQ ID NO: 349692 - protein, 313 aa, unidentified
MLYVGIDIAKNKHDVTALNVPGKTVLKPLTFSNNKAGFELLDLSLRQLNQDCLIALENTGHYAFNLLNFLHEQGYKVYTYNPLLIKEFAKSLSLRKTKTDKKDAHGIALKLLSNPNREQFQHDNRQVELKILARHIHRLKKKQSDWKVQYTRCLDIIFPELDKIVGKHSEYTYQLLTRYPNPQKRIEAGFDKLIEIKRLTASKIQDILSVAPRSIGTTSPAREFEIIKHYKRLIDKAETCVNDLMAEFNSVITTVTGIGNRLGAVILAEIRNIHAFDNPAQLQAFAGLDSSIYQSGQIDLAGRMVKRGSPHLR

SEQ ID NO: 349693 - protein, 425 aa, unidentified
MKVTYKTCCGVDVHKSFLVATIIATTGGIEPSYQKKRYSTFNNSILEFKQWLLDNDCHDLCMESTGKYWIPVFNLLEDEINVTIANPKWVKAVKGNKDDTKDSKWIGDLFRLGLVKGSYIPCKKIRILREFTRYRYKLVSCRSSEKNRYQNALTVCNVALDSVVSDIFGKSSTSIIDYLLEQSGNSINHEEIASKLLKSLKSKEDAVIESIEGYQMTDSQKYRMHLVRAHMDYITAEINDVDREIEKLISSDPDFENAIQFLMTIPGVKRDSAITVISEIGIDMTQFSSSKRLCCWAGLTPGSNESGGKKKSVRVTRAGVYLKPALVQCAHAAVKSEKSPYYKKKYESLMKRRGKKRAIVAIARMILTAIYQMLSTGESWNPSDLYKIDIPEALLEKQKAKAIKQAMKLLQREGLYPPPQESKAS

SEQ ID NO: 349694 - protein, 339 aa, unidentified
MKKVFIGIDFSKLKFDAAIYSVETKAIVSTEVFENDKVGYDAFIHWVKQNTRCQKSGLLFCGEHTGYYSGNLSVFLYESGYDMWLVSGLEMKLTQGIKRNKTDRVDACKIAEYAFRYQDKVVLFQPVSKALDEIRELLSYRERLVETRKVLTNSAQEMKRVKDNSSCDYIYQDSLEYIKSLNASVRNCEKRIETLLKQDISLNTNYKLVSSVVGIGLVNAALILVATANFTLFDSPRKFGCYCGVVPFEHSSGSSVRGKNRVSKMANRELKTKLTLAAQNAVRFDPELREYYQRKRSEGKNNWLVLNNVKNKLIHRIFAVVRNGKMYEKQYIHPLKQVA

SEQ ID NO: 349695 - protein, 351 aa, unidentified
MSEYIAFDSHKHYTWVDRQDHSGGKNRCHRLEHAPGAVREYLSGSEPGTAVAVEATGNWYWIIDEIEQAGLQPRLVHPRKAKLMMGLTNKTDKLDAQGLNRLQRNGTLPTVWIPPGPLRDLRELTRTRLVLVAQRTRLKNRLSATLAKYGTPASEYSDPYGKRGRAELEKHLERLPEQTRWVSGQLLAQLDFVSAQVKQLEQRLEELVEVTPEMQWLLTLPGVGVILAATIALEIGEVERFPSAMHLASYSGTTPRVHASGGKVRYGPLRVDVNRYLKWAFAEAANAVALHHRSHPQRHVSRLYQRIRQRKGHPKAIGAVARHLAEAAFHVLRRKQIYRDPELDRGCTNPG

SEQ ID NO: 349696 - protein, 341 aa, unidentified
MNKFNTISIDLAKSVFQVAVFNCHGKRKLNQAMSKKKMLTVISQHPGATICIEACSASHYWGRTFQSRGHTVKMIPPQKVKPYRCGNKNDANDAIAIYEASLRSDIHAVPVKTPEQQDIAMLLSLRQSYIKQRTAVSLRIRGYTAECGITFPQGANKLRELLPFVIEDAENELTPTTRFVLRELHAQLLNLDEPIERVESQLIDFAKQIPACQLLITLRGVRWVIASAIFSRLGDASAYRNGRGASASLGLVPAHTGSGGKNKNHGISKSGDKTLRSLVVHGARAVVANIRDKEDRLSCWIRNLLERKSFNQVVVALANKTIRMACAMLKSNQSYNETLIA

SEQ ID NO: 349697 - protein, 347 aa, unidentified
MNFYTTPHKHYCGVDLHARTMYVCVLSQQGVVLLHRNMRCDAQMFLLAIQPFREDLVVAVECIYSWYWLADLCAKEGISFVLGHALYMRAIHGAKAKNDRIDSHKTAALLRGGLMPRAYVYPAEMRATRDLMRRRLHFVRQRSSLLAHIQMTHHQYNLDSPGKRISYRSNRDGLGAGFEDVSVRDSIAADLALINHYEVVIAELELAVLRQARVHDPNAFRLLTTLPGIGKVLGLTLLYEIHDVRRFPSVQDFASYSRLVKCQKSSAGKSLGTSGAKIGNAHLKWAFSEAAVLFVAKCAQGKTLLSRLERKYAKPKALSILAHKLGRAVYFMLARNQAFDLERFAQS

SEQ ID NO: 349698 - protein, 344 aa, unidentified
MEYFAGLDVAMKETAICVVDAEGKTVIEGKALSEPGAIADFLRPFRDKLRRVGHEAGALSPWLQRGLIERDVKVVCLETIHVRSVLKAQRNKTDKNDARGLAQMMRTGWFREVRVKSDESYRLRLLLTHRRNLKRKFLDLENAIRHSLKVFGIKLHLTGRAHFEDAVREQVAYDPLLAGLCDAMLRARAALWVEYLKLHKLLVQFASRDPVCLRFMGIPGVGPVTALAFKTAIDDPTRFKRARIVGAHFGLTPKRYQSGDSIDRPGAISKRGDKEVRSVLYEAAKSMLTRYKGWCSLKAWGMRIAQRSGHKKAVAAVARKLAVIMYAMWRDDTSYQFSTSAATA

SEQ ID NO: 349699 - protein, 343 aa, unidentified
MEHFAGLDVSVKQTSVCIVDGTGRLVREVRVASEPEALLPVLTNPLWRFKRIGLEAGPLSQWLFSALAEADLPVICVETRHMRAVLQAQINKTDRNDARGIAQMMRAGLYRPVHVKTLRSQKLRMLLTHRKLLQSKAIAIDNDLRGTLRNFGLKVGVVGTVKFEARIRELVETLPDLAELVEPLLIVRRTLREQIGILHGRLLAIVRHDDVCRRLMTVPGVGPVVALTYRATVDVPARFRNSKAVGAVFGLTPSRYQSGEVNRTGAISRCGDEMMRVMLYEAAHTMLLRLAKWSWLKAWAMKIARQRGIKKAVVALARRLAVILHRIWVDGTEFRWTRETAAA

SEQ ID NO: 349700 - protein, 367 aa, unidentified
MKKVSTAVTKQRRNFSQPKRTIGLDLGDRNSWYCVLDEGGQIRLEQRVRTNAKALREVFGEMPRSRIALETGTHSPWISRLLNDLGHEVIVANARKVRLIGESRKKDDRLDAQTLARLARIDSVLLCPVKHRSAQAQADLTVIRARAALVRARTGLVNSARSLAKSYGERLRGCNVRNMNPEKAESLSPELQVALEPLLHAIESLSERIVEYNDRIGALAEQRYPQVELLKQIKGVGTLIALTFLLTLEDPHRFRKSRDVGCYLGLQPGRRNSGQSEPQMHISKEGDPYLRTLLVQGAQHILGPFGVDCDLRRWGLKLAERGGKSGKKRAIVATARKLAVLLHHLWVSGEVYEPLHNSSRATVAAAA

SEQ ID NO: 349701 - protein, 340 aa, unidentified
MFYVGLDIHNTRITICALNKTGQVVHRSQVRGIQETLAALKGLPDRFEVCYEASCGYGHSHDLLRPLAARVLVAHPGQLRLIFRSKNKNDRNDAERLAKLLYLGETPTVHVPSADVRAWRELINCRGQLVAKRTRAKNGVRGLLRSAGVTPPKKPGLWTKAGLTWLRQLELPTASQQLRRDLLHEEIETLTRQVRRIEQELDRQARKTPAVALLRTIPGVGARTAEAIAAFIDDPHRFRHAKAVGRYFGLVPCQDQSGDRNRLGHITREGAPAVRQLLAEAAWQAIRRSPTVRAFYERTQRDDPQRQKVALVATAHYLVRVMWAMLRRGTVWQESPALAA

SEQ ID NO: 349702 - protein, 319 aa, unidentified
MKTHFAPTTAFIGVDVASKELVINLYGQDKTLALPNTRASISRWLATLPDNAVIAVEATGSYHELLLTLAHARGLGCYLLNPKDVRHYAHGVGQRSKTDHVDAQLIARYLAKEHEHLHQWKPASEASRLLARLLGRRAKLVSYKSAMKKSLGDLPELRAQLKTVLEKIDRLIREIERRIPTALAALPEGKAQSERLRQIPGVGPLTAAMLTNVFSRVPFTRVDAVVAFAGMDPRANDSGAKRGRRRLSKRGPSELRRLLYNAAMAASKSALWKPFYERERQKGLPTTAALNVLARRLLHLAFTLFRTQSDPNVVKNTCA

SEQ ID NO: 349703 - protein, 323 aa, unidentified
MNKDIKYFGIDISHLVFDVTDSDGNYYQFKNSLIGFKKLMKLLDFNSHCVMEATGYYHYQLAYYLQENSVLLSVENPLSVKRFIQMKLSKIKTDKSDSKLICEYAKQVDLKLWQGNSKHQLECLQMTRLLSVYTKQSTMLKNKLHGEAVLGQPSKLVVTSLKRSLRQLKKEIDTIEEKLLLLVNEVHKDVLTRLKSIPGIGKKTSLMLVVLTDGFDRFKSGSELCSYAGLTPIIRQSGSSVNGRARISKIGNQKLRNLLFMCSFNACKYNKACKAIYDRIVAKGKSKKLALIAVCNKLLKQAFAIAKSGLIYDDTYRSTLVKN

SEQ ID NO: 349704 - protein, 351 aa, unidentified
MKMNAEQDRVATIGIDTGKNTLHLIGLNSQGKIVLKQKISRVQAAKRFANLRPCLVGIEACVGAHHLSRELMALGHEVKLVPAVYAIPFRKSHKNDFRDAEAIAEAVCRPTMRFVPTKTPEQLDLQALHRIRARLVSQRTAVINQIRCFVLERGIAVRKGVRFLRQSLPDILAKRTDVLSPRMIHMLEDLSGDWRRLDSRIDDVTSEIEALAKADAACQRLMTVPGIGPIIASAMVAAIGDGAAFRRGRDYAAWLGLVPKQISTGDRTILGRISKRGNSYLRMLFMQGARVLLLRPANWPKHSFGPWLIAAAQRLHRNVLATALANKLARIAWSVLSRDDDYAPMLQARAG

SEQ ID NO: 349705 - protein, 430 aa, unidentified
MKDTTSKRIEAITATTLIVGIDAAKEVHWARITDYRGIDLSKPVKINNNTNGFESLLQRVEKLKIKYSCDKVIIGMEPSGHYWRAMGWYLMLHESKPVMVGVNPYHTKQTRELDDNSPTKSDPKDALIVAHLIREGRYFDMYLPEGEYAELRILNGERKRLMKQVSRANNAAVAVMDEFFPEYGTIWGRVTCPTSCGIMKQLAFPDEILTADKDKLIELIKKASGGTEGEKLANELISVATESVGVKEGRKSAKTKLVRLIEELEFYEARVAALEAELETVMDTLELGEILQSMKGIGPVISAAFSGEVGDTSRFDNWKQVRKLAGLNLVEQSSGQHIGKTKVSKRGRPYLRHMMFLAGEVCVRHNPEMRQYYQYLRQRRNNPLGGYEAITAVGLKVMRILFYMAKNKEKYDPEKALGEVRRQQIASLAA

SEQ ID NO: 349706 - protein, 400 aa, unidentified
MRAVFGIDVSKASSEVAILVNGEKVHGYTMSNDALGFARLLGDLRTVHKPEIIFEATGVYSRRLQAFLDEHGYAYTRLNPLEAKKQLDSLRVRKTDQIDAEKLAQSQFVLNRKPTYVQEEVYQELRDLSRFYQNLTEDIVRAKNRLHKVLQVTFPELETILSTPTGQQYWNLVIDFPCKDFVLELSKDKLSESIRQSTSKRISDKRVAYLAEKLIALANQSYYAVKKTSPMLEEVRYYTKELLRLSGQRQTVLDQMVELAQPLPEYDILLSIPGIAETTATSIIGELGDIRRFQSANQINAFIGIDLRHYESGNFLAKEHITKRGNPYARKILFKCIHNIASASHTNPCHIADFYEKRKRQSQTTSTKPHTIASIHRLIRTMYYLITHNKLYDYTSTQNR

SEQ ID NO: 349707 - protein, 343 aa, unidentified
MKYVGLDLHKRRIFATVLDGDGAIIARNTIGTSSNDIYYYLNKIKKEDDMSVAMEASYNWQYAYRIVESVTDNIVLAHPLKTRIIGEAKIKTDKIDSYVLAYMLKSDMLPKAYVPTKLAMENKILLRSRISLVRLRTSIKNRIHAIIDKNKDCYSGLDSVTDIFGKIGTAILKNTTIASIDYRVLCQYLALIEDINSKISVLEKIISDRIAKDPDIEILKTIPGMGTITAFILKSEIDSIDRFASKEKLCSYAGLIPSTHQSGDKSYNGRITKQGNKFIRWALTEAAQIAIRHSGYFSYYYNKVKPKSGANSATVSVARRMLEIIYVLLKEKREYIERPVNFI

SEQ ID NO: 349708 - protein, 344 aa, unidentified
MKYFAGLDVSVKETSICNVDETGKICRELKVASHPEDLLRALQDPALNLVRVGLEAGPLSQWLFSALAEAGLPVVCIETRHARAYLKAQINKTDRNDARGIAHMMRVNLFRPVHVKTLASQKQRALLTARKLLQGKAIAIENDIRGLLRNFGLKVGLAGAAKFEQRIQELVEGLPDLSEVMEVLLEARRKLREQFTKLHRKLLAIVRDDTVCRRLMTIPGVGAVTALAYRATIDVPARFRNSKAVGAVLGLAPAQHQSGEMSRIGRISLCGDGMLRALLYEGAHTVLTRSVKWSWLKAWAMNIAKNRGLKRAIVALARRLAVIMHRIWVDGTEFRWTKEKAASA

SEQ ID NO: 349709 - protein, 341 aa, unidentified
MQIAVLGIDLGKNSCSIVGLDVGGAVVLRRRMRREGIIKLAAKLKRCVVAMEACCGAHHLGRVLRAQGHEVRLMSPEYVRPYVKSQKNDDRDAEAIAEAATRPTMRFVELKNEEQLDMQTLHRARDRLVGERTALINQLRAVLLERGIIVAQGRRKLERQLTEMGTQVEALSQRMRMLIQDMRSQWHELDRRIAEFDKELADWARDDEAARRLRTIPGIGVLNATALVAAIGHGESFARGRDLAAWLGLVPRQVTTGGKPRLVGITKRGNKYLRKLLIHGARAALPTLLESPTPLGGWLRGLMARMHKNAAVVALANKLARIAWAVLRHGESFSIELSTTA

SEQ ID NO: 349710 - protein, 387 aa, unidentified
MYFVGIDISKFKHDCAIIDELCDTVMPSWSFSNDREGFSHFKALLDSLEGEKKIGLESTGHYGQNLKQFLESNGFAFMEFNPLLVSRFIRSKSLRNTKTDSIDALSIAQYVMAVEYKPYPSSFYHLDKLKSLTRFRNSLVRQRSRQLVELTNVLDKLFPEFKPFFKDKFSVTALYILAHYQTPERIANMNARSYEALRKLSRGRFTLSNFTQLKALAKNTVGTQSDYLLDQMNILLELYSQLDSKVDEFDAQIKECVRGIDPPCLSIPGVGELSAAMILSEFGDFSKFQNPSKMLAFAGLEPGYFQSGQSEYTGHMVKHGSSRLRYALMNCCLPLISNEPVFAAYYTKKRSEGKPHRVALTHVAKKLLRVIYTLQTKNIRYDPTMIH

SEQ ID NO: 349711 - protein, 367 aa, unidentified
MHAQGREPVNSVLPFKLYLKMMMTNRSLNTPAESIPRLFAGVDVGADELVLVIRKNGKPFDPQKFANTRADRARLVNKLIKLPGIKVCLEATGIYHFDLAIAVHDAGIPVMVVNPKASHNFAKVLMKNSKTDAVDANTLAEYVERMDFVAWTRPSNQALALRGYARRIDALTGQKAAAKNHLHALSATEETPKALLRDAKLAISQLEKRIDTLAGEALALIDQHPELQRIFDLLTGIKGIAQTSAIALMGELLLLPPNLSHREWVKFAGLDPKAFESGKSVHKKMRLSKAGNRHIRSALYMPALSAKQHDPHVRAYFQHLIDNGKKPLQAVCSVMRKLLHAIHGMLKHDQPFDNTRFYAIPESIIAE

SEQ ID NO: 349712 - protein, 427 aa, unidentified
MKKIKIDYLSTLFVGIDIGSRTNVISALNFDQDFLIKMLPVPNAQGGAEQMEEMVAEVLSQHHEFKAVIIGLESTGFYGVHIANYLSTSEKLAPFSTKVYCLNPNEVKQYKKSFNSLDKNDGIDSFVIADFARVGRIHTEPWRGAQYLALQRLTRHRLHITECIAREKTYMLNNIFLKFSEFAMLNKNEHPFSDKYGATAEAVLTDYLSTEDIVDASVDELVAFISSKSRGRIADPEQTTYLLQKAAQDSYRLDQCLYEPLTVSIGCSFNCISAFEKELKAINAAIQRAVRGLNPTEYQILTSVPGIGPVYASGILAELGTIKCFKSNDALAKYCGIVWRENQSGEFEAEDTPMNKAGNRYLRYYMIEAAGSVMQHCPEYKAFYDKKFAEVRTHQHKRALALTSRKLIRMLFGLLANGKLYSVEKSR

SEQ ID NO: 349713 - protein, 387 aa, unidentified
MPQPNDLSRSLVALDQDSTLIAVIEMGQASWLVAGIVPGVNRHPLKKIATDQDQLMQVLRRWKNEAETAGRVIKRIAVAYEAGRDGFWLARWLRARGIEAYVIHPSSVPVSREHRRAKTDRLDTELLKRAFLGWLRGEPDHCSMAAIPTLTEEDAKRPGRERESLVRERTRITNRIKGALARLGIRNFKPMLRNAPKLLETLRTPEGATLPPNTLAELRRDMARLSFVKQQIKEVETGRIERLQRAPGERGNAMVHLLTRVVGVGVETADMLVREVFSRDLRDRRAVARYAGLTGAPDESGKKRRERGLAKSGNARVRRGMLQLAWGFLVHQPDSMLAEWYRARTADARGATRKTMIVALARKLLIALWRLATTGEVPEGLGLRAAA

SEQ ID NO: 349714 - protein, 342 aa, unidentified
MRVVAGVDCHKKTHSLVFIDAVGTVLSKLTIQVNDEGYAQAIEHGNRYGEVEWGLEGTGLYGHGFAEALLKTGALVYEVPGAFTKRHRKHASRLGKSDVLDAQAIAEAVLREYERLPKYQQFDEQEAMRLMYDRRDRLVRQRTETINRVRAIAIRLALGHLPARLNSDLAAARVLSRVKALRGSSHTVDALVDEIEEALSDVQRLNATVSRLERQLRPFVGRLAPELCAVRGVSTIVAAGLIGHSGNLLTCRNAAAFAMRAGAAPVPCSSGRNFDTVRLNLGGDRQLNRALHVVALTQIRTVDHAGRNYYERKRGEGKTHRGAVRALKRQLATVVFCRLRLV

SEQ ID NO: 349715 - protein, 366 aa, unidentified
MSSKQVKATIYVGVDFHKRSFVCSFLNDSTGELVQKSYETSDSGYELFIEHLSSYRRTGNTVKVGLEMLTGSYYFYDRIQSECDELIIINSNQFKVIAKSSKKTDKIDSETIAIYYRKDLLPTIYIADRAIRQLRDLVSLRYNLVRDRSRYKNRIHSLLLKHNHKISKRSLGSKQRLIDLHHLGLTAISQRQLNLLLDQVEQLTVSISETEKMMDDLISSQCSDRTKEDIELLKSIPGVGALSAKILVSCIANIERFPSEKHLASYIGLVPRVRDSGEVIKHGRITRQGNKIARTTLVQDALAMLKQKNGTLKGFYNSVKYRSGTGKAIIALARKICTIMFVLLKRRIEFDALVFERKEAELQKAS

SEQ ID NO: 349716 - protein, 404 aa, unidentified
MNNVAGVDVSKGKSMVSVLRPFGEVVAKPFAVRHTGSELKELADFLKSLDGETRVVMEHTGRYYEPVAQFLCGEGIFVSAVNPKLIKDYGNNSLRKVKTDAADSRKIARYGLDNWVELRQHTPMDTIRYQLKTLNRQQGLYSKTKTMMKNNLIALLDQTYPGVNALFDSPAREDGSQKWVDFAASFWHVDSVRSMSLSAFTERYRKWCQRHGYNFRESKAVEIHAGAQDLIAMLPKDALTKLLVKQAIDSLNAISKSVEQLKSEMRMLAMQLPEYPVVMEMRGVGDSLGPQLMAEIGDVTRFIHRGSITSFAGVDPGSNQSGTFEAKSVRTSKSGPPELRKALFLVMDCLLKTMPQDDPVYLFMDKKRAEGKPYLVYMTAGANKFLRIYYGRVKEHLASLENVD

SEQ ID NO: 349717 - protein, 413 aa, unidentified
MSSLTSTPTRYIGLDLHKHYLIAIAVTPSGVQTGGPWRVTLDHLDAWAHQHLTPLDALAVEITTNTYAVYDALVPIVHSVTVVHPPHLALITRVPVKTDNRAALVLAQFLAKGLLSALWIPPQVVREQRATVAQRVKFTRLSTQAQNRLHAVLHRHHLPLPESGSPFTPANRAWWQQLPVSASEQARLQADLATMDFAEQQIARLTQALASDNAQDERVPLLVQLPGFSLVIALTVLAAIGDIGRFEDAKHLVGYSGLGARVHDSGMLHRTGGITKAGRRDLRTALVQAAQTAANTHPHWQAELARLEPRLGRNKAIVAIARKLLVAVWHVLTYQRADRFAEPALVARKLLKYAYKTGRAQHRPGQATAYVRKQLDRLQLGAELDHIARGKRSVRLPPSQLASSAVAGDTGIA

SEQ ID NO: 349718 - protein, 355 aa, unidentified
MEKMAILAELVDHVIGVDPDRDRVTAAVVCAKTQGELASKTFPATRRGYGQTLRWAQTQTVDDRRAWAIESTGSYGAGLAIVLAEKGEFVIEFDHPGTLASKDGAKSDSLDAVRAARETLGRKTWATPRARGLREGLRTLVVARDSAKLARVAAINVLKAFVVTAPVELREELRGLTRGQLVDRCMRLRPDTAVDPEHAATKLSLRSTASRVKQLTIECRELEDAMVPIVREMCPALLTEPGVGTLVAAQILISWSHPGRCRDESAFARLAGVAPLEATSGQTQTRHRLSRGGDRQLNRALHTVILARAKGHAPTQAYLVRRVSEGKTKREAMRCLKRYYARHLFRLLESTTMPT

SEQ ID NO: 349719 - protein, 359 aa, unidentified
MQRQKTGLDFKGQNIFVGIDVHLKSWAVTILTDNLFHKTFTQPACADTLSNYLNRNFPGGNYHTVYEAGFSGFWTHYKLRGMGINNIIINPADVPTTQKEKLQKDDPTDSRKLARSLRSGELKAIYVPEPSTLEDRSLIRMRATLIKDMVRFKQRIKSFLHFYGIAIPLEFKKSGTHWSRRFMKWLDQVSLEHESGTQTLKILIQEVEQQRKLLLEVSQKIRALSRSEKYATNMELIRSIPGVGFITAITFLTEIENIERFKNTDHFAGFVGLVPNRHSTGGKENNGNMTFRGQTALRKSLIESSWFAARLDPALTMSFNGYVRRMEPNKAIIRIARKVLNRMYYVLKNKNKYVSGVVK

SEQ ID NO: 349720 - protein, 338 aa, unidentified
MLHVGLDLHKKYSTVAVMDDDGNIQLEDTLYHDDRPRLIEFFSKLAGKAVVTVEATRDWYWLYELLEELGVTVKLAHARKVRLIAESWLKSDKVDPKSLAQLERTGFLPEAYISPRPVRDNREYLRYRLTLVRLRTGLKNKVHALLDKLGIKHPFADLFCPAGRRFLCQLALRPAYQEELTNYLALIEDLERRIVAATKEIKRQLKPDRKAQLLMTLPAVGHLTAYLLLNEIGDVKRFPAPGKLCAYGGIVPIVRQSADHRWQGHITKEGNRYIRWALTEVACLAPSKDYALGCFYRRVAARRGPLKARVAVARKLLVAVWHVLTYEEPYKPTPFPTV

SEQ ID NO: 349721 - protein, 388 aa, unidentified
MQIVTDRSQAPTAIRTDLGAIFVSLELSRSTWLVTSLSPGGGEKMSKHMIRSGDVAGLWSRFSQLKDKALDRTGQGVPIIVIQEAGLDGFWIHRLLQSERIESHVVDPASIATSRRRRRAKTDKIDGEALVRALLAYKRGEPRVCTMVRAPTPQEEDRRRICRERKTLTAERVEHVNRIKGLLFAQGISDYEPLLRKRRERLEELRTGDGRPLPEHLKAQIRRELDRLELTLQQIKAVETERNAMLSPSDDGTPAPGAMLKNLKGIGPEFAGVLWSEGLFRSFSNRRQVAAYAGLAPTPWRSGSVAHEQGVSKAGNPRLRTTMIQLAWLWVRHQPRSILTLWFHQRTQLNGGRVRKVLIVALARKLLIAFWKYVTAGVVLEGAETTSA

SEQ ID NO: 349722 - protein, 405 aa, unidentified
MNAVGIDVSKGKSMVAVLRPLGEVVTLPYSVSHTASELSELANSLKSLYGEVRVVMEYTGRYYEPIAHALHEVGIFVSVVNPLLINQYGNNSVRKVKTDKADAVKIARYALDNWAELREYSPMETIRQNLLLVCRQYNLYMKNKTALKNNLIALLDQTFPKIHTLFKSPVRDDGSQKWVDFATTFWHCECIHGVSEKAFTERYRKWCKRHGYNFSPHKASEIYATASEQFPTLLKNRHIKLLVTEAIAQLNAVSRTVEALRSEMQSLAQSLPEYPAVAAMFGAGDTTSAQLIAEIGDVRRFRNKQSLSAFAGVDPSPNQSGTREAKSTSITKRGCAPLRKTLFQIMDCHLRTKPYDEPVFQFLDKKRAEGKPYFVYMTAGANKFLRIYYGRVRDYLNTLDDGGEL

SEQ ID NO: 349723 - protein, 377 aa, unidentified
MKRIKFVGLDVHAETVSIAVAEQDGEIRSLGVIPNREESIRKLVKKLGPVEELRFCYEAGPTGYALYWQLTRMGAKCEVVAPTLVPVKAGDRVKTDRRDSLKLARNYRAGELTAVWVPDAAHEALRDLVRAREAAKQDELRARHRLSKLLLRHGRRSPMGVKAWSMKYLEWVKREVHFEQMAQEATLLDYLHEVEHEATRIARLESAITEAVKSAPPQMRAVIEALQALRGIAHVSAVTVVAELGELSRFTRARQLMAYGGIVPSEDSSGERTRRGNITKTGNAHLRRVVVEAAWAYRHRPSVGAKLRKRQAHVSEEVKEISWKAQHRLHERYRKLLGKGKNKGVVMTAVGRELLGFIWAIGIQAETAYKEPLPRAA

SEQ ID NO: 349724 - protein, 462 aa, unidentified
MADSREEASRSERVRQIEGLPVVREKVAGIDLGSQRHWVCAPGLTGSGREVADFGATTAELMRMVRWLKARKVESVAMESTGVYWIAPQEVLEAAGLEVLLVDTRQLARVPGRNKKTDPTDCEWIQRLHSCGLLTGSFRPPEQVCMLRTLVRDKANLVAEAGDWVRRMQKSLDQMNVRVHRAVSDLDGVTGLAIVRAIVAGERDARKLAQLRDRRCQKSEEEIAEQLSGHWREDHLFSLRQSLKMYEATQERIAAYEQEILRKLGEMAPEERGGESAPPLHNPHKARAIRRRGEEPRRQAWYRMSGVDVTQIDALGVETVEVILSEYGPDLSRFPTEKQFTSHVTLAPHVARSGGRAVKKKKRYSASTRVAAALRMAALSLRHSPTALGAYYRSMARRIGADVAVFATARKLAILIYRLLRWGRPYLDEGAQAFEKRYQQQRIRSLMARAKELGYKILPATT

SEQ ID NO: 349725 - protein, 315 aa, unidentified
MDTPFVGIDVSKETLDVAVLPSGSRKTFRNDDAGCEQLTAWLLDVEPVIVVLEATGGFEMLAASILSSAGLPVAVVNPRQVRNFAKALGKLAKTDAIDALVIAHFAQAVKPESRPLPDDQALALKALVTRRRQLIEMLVAEQNRLGGAHPRVKPAIRTSIAWLRAQIEEVDRTIATSITDSPLWREKEELLTSVKGVGPVVASSLICLLPELGILNRKQISALVGVCPYNRDSGAYRGTRSIRGGRADIRSILYMAALSATRHNPVIKAFYQRLKQAGKVSKVALVACMRKLLTILNALLRTNQKWNPERGLSLI

SEQ ID NO: 349726 - protein, 399 aa, unidentified
MKSPCVAVDVSKGKSYYQGFIEFDKPASKATPIQHDLEGFKSVYELGQTLKETYSDVVYVFESTGIYHKALETFLMKHEEKCVILNPLEASKIRKTDLRSTKTDARDCKSIAKAYFMKDFRLYNQKDELYEKLRSMNGHYNFLIQQLREMKVHFRNALDIVFPRFDEIYPDPYLDIPMSILKRYTHPDELKNKRVETIVKYLMKDTKHRESKAVDETKKLKGYIDNVSSGCRISSYEVTILKSMVQKIGDQEVEIELCLDEMRDLATEIPLYHQLMSIPGIGDNLAIRLIGELGDLDRFERSEQLVAYAGIDPRVYQSGQMTGEHLHITKKGNKHLRTLLFLAVSSNVRIGKTNSILDFYNKKRQQTNPLVYKAALIACANKLLRIIFGMYKSGMNFHK

SEQ ID NO: 349727 - protein, 385 aa, unidentified
MAPPARPEIVIGLDVGKSSHWACVVTREGELLASKPVLNRENAIDGLYAQYPGALVVVDQVRNIGSLALSRARLAGMPRAYLPGLAAHGASRLFAGDAKTDERDAMVIAKTALGIPDALLPVADRPPEIEAARSLAAQRDFLACENTRSKNRLRSILLESCPEFEAQADLSDPATLKLMAAVGGPWSISEASPQAVGALTRGCRRAKVAALVESVESSSRPHPAAVACEDRAVRLLARRISENAAEIESLASEISALLAADETYRCLLTVPGIGPRTASELVISIDIADFADHDRLASYCGLAPRNRQSGTSISSVSASRQGNKRLKNLLIFSCNCLARSRNRWGEYYARCRDRGMPHGKALKAVARKRLKVIYAIMRDKVPYAA

SEQ ID NO: 349728 - protein, 356 aa, unidentified
MNRTSDSVVSSSHLQDRVKTISITPVITSTPVTTSVAPVTPPVFVGIDIAKDKFDVHVRPFSKTWTLTNDLKGFEQLVVHLKQFPTLQLLVVEASGGYERTLVSQLIEANIPVAVVNPRQARDFAKGLGHRAKTDPIDASDLAQFAELVKPKLTHKTPENQQQLQDLVTRRRQIIHLQTIEKNRQHTTHGVIPNKTIKETLALFDKQLATLEKAIAELFDASDDWTAKTAILTSVPGVGKITAQQLLAEISELGTVKRTQIAALGGLAPYNHDSGKLKGRRCISGGRQSVRTALYMAALTARRFNPVFIAFAKRLKQAGKPYLVIQVACMRKLLVTLNAMLKSRTDWNHTLVQESS

SEQ ID NO: 349729 - protein, 330 aa, unidentified
MSNSHWTAAQAASILGIDVSQATLDCFRLSDQRHWQVPNTPQGWQTLVTTLTHEPPALVVLEATGKLEAGVVVALDAGGFTPAVENPLHVKHFRRSLGRRAKTDRSDAEVLALYGERVQPVPRAVAPEIERELRALLARREQLTKQRTQEKNRATRTDGAAGASVARMLVVLTAERKTIDALLAGLVATEPRIQSRVTRLQSVPGIGVYLATVLAVELRELGQLPKRALAALVGVAPYNQESGTHVGARSIGGGRPRVRRGLFQAVQTTVRLDPALQAHYQQLRARGKCHKQAIVASINRLLGILNVMERDDLVWAQTKVGQGVFLPSAA

SEQ ID NO: 349730 - protein, 346 aa, unidentified
MEHYAGIDVSLERSSVCVVDALGKIVKEAKISSEPVALVAFFEALGFAVKRIGLEAGPLSQWLHAGLKRAGFEAVLLETRHVKAALSAMTVKTDRKDARGLAQLIRMGWFRPVHAKSIRSQEVRALLVARKQLLGRLIDVELSIRGILRGFGLKVGPVTRKGFDGRIRELVRGQATLERIAGAMLSARVALKAEYEKLHKAVLAIVRDDAVCRRLMTVPSVGPLVAITYKSAMDDPNRITKSKAAGALFGLTPRKYQSGEKDVTSGITRAGDEMVRTALYEAANVLLARITRFSKLKRWAMDVAKRRGSKRAKVALARKIAVILHRMWVDGSTYRWTETQPIAAQA

SEQ ID NO: 349731 - protein, 424 aa, unidentified
MSNSINDPYRYCAFIGIDWADKNHDICIQEKDSNKFERLTVEHSPEKLTKWILELADRYNHQPIAIAIETSKGPLINFLKPYSFVTLFQVNPLSLSRYRKTFRVSSAKDDIYDSELLCELVKTRLHRLRAIQNDDQQTTELGLLCEQRRHIVGERKRTCNQLTTHLKQYYPLALEVAGEEIHSKLACEFLLRFPILEDLQAASDETIIQFYKEHKCYRKDVIDKRIKLIQKAQPLTTDKVITSTSIMTTKLYVRLLLTLREAIIEHDEKIAGKLSQHPDCHLFTSLPGAGDVLAPRLLSMFGIDRNKFSSSDDVQKWSGVAPITMQSGQMKVTLFRYACPKYIRQSFVEFAGCSIDYSMWAKAFYQIQREKGKSYQSAVRALAFRWIRIIYKCWKENKPYDELTYLKSLQKRRSPIIKQLATAA

SEQ ID NO: 349732 - protein, 395 aa, unidentified
MFAEKEVAAPAPSINTDPIFVAIEMSRSKWVVGTHIPTSSKVGIHTVEWGDAAALLALVERLRSRAADVVGIADVPVLCCYEAGYEGFWLYRRLAAAGLRVLVIDPSSLLVNRRAKRAKTDRIDAKAMIRALMAYNRGEDQVLSAVNVPSVEQEDHRRLVRERQSLVYDCTAHTNRIRGLLLTQGIVGFDPRASGAERQLDELVTGDGRSLGPRLKDEMRREIGRLRVVLEQLKDVSAERNAIALGKTIETPHRDQGSADADAAMIASLARIKGVGPNDASVLVREAFWRKFNNRRELAAWSGLAPMPWASGTVSRDQGIAKTGPAIFRSHMLQIAWRWLHHQPQSRLSQWFNERTNSAAGRVRRVMIVALARKLLVALWRYATTGLVPTGALIA

SEQ ID NO: 349733 - protein, 392 aa, unidentified
MVISVGINVSKDKHDCFIVSSEGEILANVFSVPNTMDGFHCLLQRIQDCNIPEAKIKVGLEATGHYSYNLLGFLLDNGLTTYVLNPLQTNLYRKSLTLRKTKTDRVDARMIASMLLSDVGLKPYTDTAYHNEELKSLTRYRFDKIRERAKLKSSVSRLVCILFPEMEKLVPSLHIASVYTLLEEFPGAKQIADAHLTRLKSVLEAASRGRYKRDVAVRIRDAARNSVGSRMPAKSLELQHTIRLIWELDSEIAEIEAEIKTIMDEIESPITTIPGISCRMGAMILAEAGDLFRFDSPDKLLAYAGMSPSIYQSGQLKNSYPHMEKRGSRYLRYALFNATKYVCLWNPTFASYLAKKRAEGKHYYVAISHAAKKLVRLIFALERSRQPYCPAT

SEQ ID NO: 349734 - protein, 339 aa, unidentified
MTNYIGMDAHPSICVFSVVDGDGKEISAFQSPTNGAALVEYIRSIPDPKQLVFEECELSVWLFEILDREVDKLIVCNPARNVQYKRAKTDKLDAKNLALLLRGGFLTPIYHDGSKTEQLRALMSGYQDIVDTGVSLKNRYKSLFRKSGLPARGDGIYADESLLKNLPRPDQRFVGHGLYRLIESTEAEREKYCAAIKTLGRKFKEIKLLVDIPGIGEIQAAKILSQVITAERFKDKHKFWSYCGLVRYRQESAGKIRGNKRAWGNRVLKCVFKMAAKSALSGGNEFRKMYDELRAKGTNDRAARNAVSRKIAAIVLSMLKHKMRYEAALVAKQDEEAPV

SEQ ID NO: 349735 - protein, 320 aa, unidentified
MPKILNVLHKSCCGIDVHKKTVVVCILKADEFGEYTDEIKTFSTMTWDLENLRDWLKERNCEKIAMESTGIYWIPVFNVLEGHFDIVLSNARQIKNVPGKKTDPNDSRWIAKLLAFGLVNGSFIPPRDIRELREMTRYRAKLISMRTSEKDRAHNILEACNIKLSCVATDIFGASGMAMMKALIDKAEDAEPEELAQLAKGALRKKIPDLVKALDGKMDKHHSMMLQMVLEHLVFINEQLDELDHMIEEKCKPYQQEIELLDTIPGVDVTSAQAIVAEVGVDMTVFETPERLASWSGLSPGNNESAGKKKVLEPAQATSI

SEQ ID NO: 349736 - protein, 377 aa, unidentified
MEKDSRFVGLDVHAATIVAAVAEPGGEVRALGTIPNTPEAIRRLVKKLGAAPRLRVCYEAGPTGYVLYRQLTQLGVHCDVVAPTLVPTTAGDRVKTDRRDALKLARSYRSGDLTAVWVPDEAHEALRDLVRAREAATKDLLHARHRLGKFLLRHGRRPPGGIKAWTGKHHAWLKTLRFGHLAQDATVLDYRSEVEHARERVARLEAAIEPALAGTSEQMRAVIAALQALRGLAQLAATTIVTEVGPLSRFARPRQLMGYSGAVPREWSSGPKTRRGGITKTGNSHLRRIVIEAAWSYRHRPAVGPTLRRRRAGLSEEIKAIAWKAQHRLHTRYRRLVAKDKPKPQVITAVARELLGFIWAIGVHVERDGRDATRRAA

SEQ ID NO: 349737 - protein, 337 aa, unidentified
MNAVGIDVSKGKSTVAVLRPFGEIVVSPFDVSHSPKELSKLVTLLKTLNGDTKVVMEYTGNYYLPIALFLRNNGFFVSVVNPILVKDYSTKSLTVRKVKTDKKDALKIASFALDRWNELSPFSAQSEARLLLKSYNRQYNQYNKLKIILKNNLIALLDQTFPGANTLFSTPTRKSDGHEKWVDFVLKFSHSECISKKSFSFFLKSYLSWCKKFGYKFSKSKAQAVYDFACNCSPSLSFSDSSALLVSNAIIQLNSINETLASLASEMNKIAATLPEYDSVMSMFGVGSVLGSQLIAEIGDVSRFPNKKALVGFAGLDASPFQSGNFNPQSRSISKSG

SEQ ID NO: 349738 - protein, 347 aa, unidentified
MVYVGLDLHKYFSFITVMDGEGKIVKRAKVENHPDLLLSFFGQLQDEFVVAVEATWNWYWLQELFEDHGIPMKLVHPLRAKAIASARIKTDKIDSEILAHLLRTNLLPEAYICSREDRLLRERLRYRASLVRLLVQIRHKLHAIVAKKGLVLPNQNILSKKSLSYLKEVSVADAFRGAIDGYLRVAGLLCEEIELVNATIVSHAGQDPRAQRLTELYGVGSYLALLIVAEIGDITRFPRAKSLCAYAGIVSSVHNSGQTSYTGSITKQGSKWLRWALVEAAQHACRRPPFDLFYQRIKARRGPKIAKVAVARKLCATIYHMLVEDKDTIPMSVKGSEFVGQTVGVMV

SEQ ID NO: 349739 - protein, 336 aa, unidentified
MIKYIGLDAHSSTCTFNVTDERGREVDNTTIETNGRLLVKYLREIEGIKKLTFEECELSSWLYEILRPEVEELIVCNPVANSDYKKIKTDKMDARKLAKLLRGGFLVSVYHDGSKRERFRSLMSGYQDLVEEGVRLKNRYKSLFRKGGKKVKGESLYRDESFLEGLSRPDFKFIGTQIYQLLEKMEESRQEYLKEIIRYSKGFKEMKYLKSIPGIGRIQAAKIVSQVIDPDRFASKYKYYSYCGLVRHKRISDGKGYGSEKIWGNRILKCVYKMAGHSVLKGNSGLRKYYDYLRSKGISHDNAYNAVCRKIAAISLSVWRKSEKYNDRLITGNLIK

SEQ ID NO: 349740 - protein, 441 aa, unidentified
MSDYFLGIDVSKGYADFILLDSNKNIVEKNFQFDDTFEGHNELYSFLTSFFLKNPNAHITVAVESTGGYENNWVSFLVKLKEELPVSVARLNPFGVSHSSKADLKRIVTDEISALSIAEYLINHRSKISFIEEDYFAPLRKQWIFIKLLVKQKVQLYNQLESLLYSANPEVLVFCKHGTPKWVLQLLKKYPSANYLSRASISSLTKIPYVTEQKAKTLINNAKHSVASQTDTVTSCLLKSIVGQILSLDNSIDQQEKLLQKNCPLPEIQLLKSFTGIGTYSAVGLMLEIKAIEKFSSSRKLASFFGLHPVYKISGDGIGGIHMSKKGRKEPRLILFNIARTAITFNPLIKEIYLRHLQRGMTGLAALGVVMHKILRIIFGMLKHNTIFNPDIDRHNTEKTIKATLKPVQLKHRRYQQFDSTAPISRKQNKKREEQMKSQKG

SEQ ID NO: 349741 - protein, 298 aa, unidentified
MKDNIFIGLDVHKATISVAVADGERGGEVRDWGKLPNRPDRVRKLAEQLGAKGHQLYFCYEAGPCGYGLYRQLVELGHDCLVVAPSLIPVKAGDRVKTDRRDARMLAKLHRANELTAVWVPDVEHEAMRDLVRARATAVRVANQARQHLQSFLLRHGRQYPGKKSWTKAYRRWLSTNRFEHSAQQIVFQDYIHAVTDAEARVARLEAQIAELLPDWSLAPVVQAIQAMRGVAFIVAVTVVAEVGDFRRFATPRQLMAYLGLTPTEHSSGNTVRRGGITKVGSSLARRVLIEGAWSYEL

SEQ ID NO: 349742 - protein, 428 aa, unidentified
MDEVNRNRLEEFRQLRQEVRHSEEYLIVGIDIAKGRHHVFFGTATGKTLLRRLVFSNDHEGFRKLLDQAEALRVRHGLKKVVYGMEPTANYHKPLGEYWVTLGRTVVLVSGVTVKRNRESLDGRWDKHDAKDSANVADLISQGKCLYYEHPSAELRGLRGLLSLKKRLKKQEHGYKVRIRNHLIAQYFPEMDGDYERLGAAGLSIVRWCLPASQITELDVEPFIERVTSRRIRMETRRRLEGVWEKPGETIGCEGVPGVDHGAKVMVEGLRQIREMIKETEEKIQELCKQFPEYPYILTIPGFGPDLSAKVLGAIGDPYRFQNGKQVLKLAGLDLSADRSGKDSDKAIPEISKRGKADLRYALYQAALIASTKNQDFMRYYTRKLEGRQKEKGIQTKMWVKLSAKMLLISWTLMKKKEAFDPVYLKVE

SEQ ID NO: 349743 - protein, 525 aa, unidentified
MVTKSKKQKQSSKSKPGKRYVGKPGGVIQQRVQQVGPEKFGIVAVDCAKKRSRWFLCDYYGRVIIEPTTVEHSAGSLKTMTQQIQQTCQAEGITDTIAAVEMTGVYHRPVQAALRKAGFDTRTVHPFASSHYRKPLHPDLKTDDNDLEAIFHAAINGYGLALLEVDPVYRSLQRLARHRRNLVKQKARLQVQIRALMHQSMPGYADLFDDDKLFNKSIAMPIAKHFSSAESIKRAASDGIAKYLRSQKIRFQIRTIDRVTAWASIAADPDPLAPLLTDQWKQLAQLHALMKTQVEQTERETASFLVKTPYVLLLSVTGINVVSAGELAGEAGPIEHYASATALNGRAGLYPSRYQSDEVDRNSGMAKSCNRRLRAACILVTKNLIKCHSYYRGLAALWKTRKIATADQQCRIANRSNRMVFQVVSGRQLWRGKGIDREYLLLKLREFHRAHHSTLEQTVRDMDEAFAWLPKSAYAAEARPLEELAKKKGRGAKSIGDLLLPLLIRLGVGGSSGVESNSSEARSPH

SEQ ID NO: 349744 - protein, 483 aa, unidentified
MSTRSREVVGLWREGSPRTSVTGTPYGTADCRLRFGGEAREGEYSSSGVRLRVAQRRTSMRIVYPRCCGLDVHKRSISDCLLIPNKDGGTQQEIRRFGTVTRDLLELCDWLASNEVTHVAMESTGVYWKPVWNILEANFTILLVNAQHVKAVPGRKTDAKDCQWIADLLQHGLLKGSFIPPSPIRELRDLTRTRASLRQDHTSVANRMQKILEDANVKLASVATDWLGVSGRGIVSRLLDGEQNAEKLADLCRGRLRDKIPEMQLALEGRMSEHHRWVLRLQREQLEFLEAQIAKLDAQIQEKTKAYQEAVDLCTTIPGIEAVAAANLIAEMGVNMDQFPSAAHLASWAGLCPGNNESAGKRLSGKARNGNVWLRRNLCQAAWAASQSKNTYLSSQFRLWFANIRSARNGLTGTWMAGKNGRHASPFSVGVSIRPIAPQRTSSRCDRERSTTNTTSRVSAKTEAPPADDLRPGILDHAPQPVV

SEQ ID NO: 349745 - protein, 427 aa, unidentified
MPYRIAGIDVHKRMLTVVVCDVEVRGEYEFERRPCGSTPSHLRSLAAWLVEQEVEEVVMESTAQYWKPVWAILERYWKPLQQGREGARPMSGMLHLAQAQSNRGPRGRKNDFADPERLVKRLVAGELILSFVPSAEQRVWRTVMRTKYQLRCNQVQLQNRLEALLEEAHLKLSSLVSDLLGLSGRRMLTAIAEGETDPAAVAARADYRLRATPEELCDALGACGELHPVYRRLLQRALEEWQRAEAQITQLSQEMATLLAAHQEQVQRLAEVPGLGVDSGQQILAEVGASAATFPSAKALSSWVGACPGEEESAGVNHNRRSPKGNRHLRRILNQAAHAAVKLKGSVFAILYRRYVARLGHNQTIAVIAHRLCRLIWKILHQGVRYEERGPAVSQKSKQKRTARMIRQLPDLGYRVELLKLAAGVPA

SEQ ID NO: 349746 - protein, 417 aa, unidentified
MNSPPETIPIQRYIGIDIHKYYVMIGGQNRHQEWILRPRQVQMAHFRSWAEKNLKPGDEVVVEATSNVWDIYDIVVPLVSRTVVANAYKVRQIAEARVKTDKEDIRRLITLLIADIVPEVWVPPQHVRELRSLISFRWRLTKQITMSKNRLHSVVQRFNLNAPEGGLLTDKNKSWWEVQEFTDLTGFQVERDLEIVENLESQKAAIDQKLAELSNIEPWASDMVYMMQIPGFGLIFSMVILSAIGDIKRFSHPKKLVGYAGLGAGVHASGEKYQEKSITKAGRKELRWALVEAAWVAVRFDPYWKAQFIRLKKRMHVNKAIVAIARRMLVSIWYILTRRESYRHFDEETIAYKMLIWAQAIGEEGRQGLTRQQFAKYGLLRLGIGHDLERIVKGGGPRRIAPTEEVLALKPELAPPR

SEQ ID NO: 349747 - protein, 421 aa, unidentified
MRAVFGIDVSKTSSEVAILVNGEKVHGYTILNDAIGFNRLLGDLKTVHNPEIIFEATGVYSRRLQAFLEEYSYAYTRLNPLEAKKQLDSLRVRKTDKIDAEKLAKSQLVHNRKPTYVQEEVYQHLRDLSRFYQNMTEDLVRTKNRLHKVLQVTFPELETLLSTPTGEQYWNLVMAFPCKEFVLSLSQSNLCEIIRQSTSKRISEKRIAYLTDKLIKLAKQSFCAVKNTSPMLEEVRYYAQELLRLSERRQVVLNDMVALAQPLPEYDILRSIPGIAETTATSIIGELGDIRRFQSSNQINAFIGIDLRHYESGNFLAKEHITKRGNPYARKILFKCIHNIASASHTNPCHIADFYEKRKRQSTIASTKPHTIASIHRLIRTIYYLFLIFTKKIYFLLYIVYFKFPNTFFIVLSLSKRSKET

SEQ ID NO: 349748 - protein, 332 aa, unidentified
MADAILGIDIGKTKCQATLLIGKKRVRRSFRNHVDDFASLSKWLAKHGVTHCHACLEAAGSDWEEIALFVHGNGFVVSVVNPARIRAYAESKLSRNKTDKLDADLIADYCATQQPETWTPPPAEVQTLQALVRRLEDLIAMRTQETNRLKSGSPGPLSGASAQTVRRQLERHIAYLTEQIEECEAQIHDHIDRHPRLCEDKELLVTIPGISHITAVKLLAANIQAFRSTRALSAFAGLNPQAHQSGSSVRHRPRLSKIGPPALRHALYFPAISASTHNPLVRALCERLAQRNKPRMVQIGAAMRKLLCLALGILKSRQPFDPNYAASARTPA

SEQ ID NO: 349749 - protein, 340 aa, unidentified
MKKQYVAIDLHRSRSLVVRDDHRGKELAVTKIENDPLTLAGVVAEAGEAPEVAIEATNGWYWAVDVLQELGANVHLVHTKGLNWEDRRVKNDYRDCRELLDRLHLGKLPEAWIAPTEIRELRELVRYRSKLVNMRTSGKAQVKAILIKHGLQPPVKDLWGVAGPKYLDEIGPTLAGPYVLRLQSLRGLVEHFDAEIARLERHIARALKGHRGYRAIQVIPGVGPVLGAVFVAEIGDVTRFASPKQLCSWAGLTPKHHESDTTVWRGKMTKQGSVLVRWAAIEAVSKLRGGPKLQADFHRITDRRGKNIGRSAVARRLLTLVYYGLRDGQLRCFEQAQAAG

SEQ ID NO: 349750 - protein, 372 aa, unidentified
MKNRYDYTGKTIFVGLDVHKATYSVAVIYEGSVVKRDSMEACPKKLITYLKKFFSGAVMKSAYEAGFSGYSLHRALISAGIENIIVHAASIEVGANDKVKTDKRDAKKIAIQLAAGRLNGIFVPSMEQEDCRELTRYRQTLVRDRTRVAARLKQKAHFSGLIGAKDTSRVSKKWIENLLNRPLGVNLSIVLNDMKKQWEELNSRIKDLDELLAKQAEEDHELEVVYRSVKGVGPTAARVFANELGDMSQFKSERALASYVGFTPSEYSSGEHVRKGRITKQGKPVLRSLLIQCAWMVIRYDKSLKATYDRIAKNTGSLKKAIVAVARRLIIRIRACFMKGEQWQDQAETQELHTDPKACEDREQSTNSRKLA

SEQ ID NO: 349751 - protein, 343 aa, unidentified
MEHFAGLDVSVKLTSLCIVDDAGGIIREAKIESDPDALLQVLKNGAYHFKRIGLEAGPLSQWLFSALAEAGLPVICVETRHMRAALKAQINKTDRNDARGMAQMMRAGLYRPVHVKTVRSQKLRMLLTHRKLLQSKAIAIENDLRATLRNFGLKVGMAGAVKFEARIKELVENIPDLAILVEPLLIVRRTLREQFGIVHRRLLAVVRQDEVCRRLMTVPGVGPVVALTYRSTVDVPARFRNSKAVGAVFGLTPSKYQSGEIDRTGAISRCGDEMMRVMLYEAAQSMLYSRKWSWLKAWAMQIARRRGIKKAIVALARRLAVVMHRIWVDGTEFRWTKQEVAAA

SEQ ID NO: 349752 - protein, 417 aa, unidentified
MKKNSKSPTKKEQTSKRTRSQRPVQRETKEVLAELVEKLRGKLELKATPASLGEAGQGPELRPNLDRLTVGVDLGDQWSHYCILGLVGETLSEGQLRTTQADVAEFFQAITPARVVIEVGTHSAWVQEIIAGCGHDVLVANPRLMEGSKRRKRKNDRIDANKLARLGRVDPQSLHPMQHRSREVRQDLVLLRARDALVAARTELINTTRGLVKSLGTRLPKCSSRSFAHKVGEAIPEEVRDALLPLVQLAEGLSACIQGYDRRIEELAGEKYGHTKLLRQVKGVGPLTALAYVLTLEKPERFAKSRDVGPYLGLVPKQEDSGEIQPQLGISKAGDTMLRKLLVGSAQYILGPFGPDTDLRRYGLRLCERGGKNAKKRAAVAVARKLAVLLHRLWVSGEVYEPLGYRVSGTMVQPAAA

SEQ ID NO: 349753 - protein, 411 aa, unidentified
MSASEYQFFVGVDWGSETHVVCVLDCDRRPIAERSVPHTGMGLNDLADELMSLAPSEPGRVAVAIEVPRGAIVDTLLARGIHVFSINPKQLDRFRDRHTVAGAKDDRRDAFVLADSLRTDRPAFRRVQPDHPRVVELRELSRIDDDLGQELRRLSNRLREQLHRFFPQALTLCPAADEPWFWALLDRVPTPAHAQRLPVKTVAAVLKVYRVRRVTAETIRDTLQTSALHVAPGTVEAASAHIALLLPRLRLLQEQRTAVAGRIEALLEELGKEEVPGEHRDVTILRSLPGVGRVVAATVLAEAARPLAERDYQTLRAHGGIAPVTRQSGKRVSISMRYGCNPRLRNAFYHWARTSVQNDPHCRAHYDRLRQHGHGHARALRGVADRSLGVLVAMLTSRTLYDSERRREIAS

SEQ ID NO: 349754 - protein, 321 aa, unidentified
MGAIWVGIDVSKRCLDVAIRPAGETLSIDNDDAGIKKLVKTLTKWSPQLIVLEATGGHEYAAAYALMKGGLPVAVVNPRQVRDFARAVGKLAKTDPIDARILAHFGEAVQPPVRPVPDQQLEEIGHLVTRHRQLIEMIVAERNRRMSCMGAARRDIDTTIRFLQGRLDKIDEQMKTLIAKHPEWNAKAELLDSVPGVGPVLISSIVAELPELGTLNRKQIAALVGVAPFNNDSGQSRGRRRIWGGRAHLRSLLYMSVVAGIRFNVTIREFYKHLTAGGKAPKVALVACMRKLLVILNAMLKSRQPWRATSGSVELASEVPA

SEQ ID NO: 349755 - protein, 412 aa, unidentified
MKDLLEISCGLDIHKEKIVACILTGPLGKPTHSEIREFTTLIPDMLALRDWIISENCHHVAMESTGIYWIPIYEILEDAFSGDITLLVVNARHMKNVPGKKTDMRDSEWISTLLRAGLLNASFIPEKRIREFRDLNRYRKSIIRDITSQKNRVEKFLQSSGFRLSSFISDIFGASGRNIILHLMEHGRIDKISLDSYLKTKTKKRIDEILMSVNGTLSEHQKSFLKILMCHYDSMKEHLIEIETHLQEDMLPFALQIEQLNTIYGISTTASCAIIAEIGTDMKPFKTAEHICSWAGLCPGNNESAGKRKNTSITKGNPYIKSMLCEIAWVIAGKRNTYLSAWYWRIKQKKGARKAIVALARKLLVIIYTMLKQGTNFDENCFEVRRKNCEQKQLSRYIRELEKHGYTVEAQV

SEQ ID NO: 349756 - protein, 342 aa, unidentified
MQELFYVGLDLGSSLCYQSVIDADGTLCCSRSIPTSEQYLRSAFVNLSGDVRVHLEAGEISDWVAGVIAPLVQSVIISHPRSLAWIGKDSQKDDKIDARKLAELLRLNRVHQVFRQTDDLRRTFKYLVTHYEQLSREQARYKSKIKARLRTLGIIRKDSRLFSASGQSALLDEIESVAVKLMLTQSFAVLNQMLASLEQAKRAMIEAAKQFREVKLLQTAPGVGIITACRFVAYLQTPKRFSNKHKLWRYCRLGVTRRESNGKRLAHPKLDSAGVGSLKDVSRKVFEAARRTKTDNSFKQFYEQSLANTKNAVHARLSTQRKILAALRAMWIANQPFRNDLG

SEQ ID NO: 349757 - protein, 344 aa, unidentified
MEKHTVVAVDIAKAVFEIAVSNEPGRIGSKRRLSRGAFLGFFAQLPAATVVMEACSSAHYWGRRIKELGHEVILLPPHQVRPYVTRNKTDRTDAKGILEAYRNADIRPAPVKSVSQHVLCSLHRFRSGWVSSRTAQINTIRGLLRELGFVIPVGAEKVLPQARFLIEDADSGLPDGLRAVLAKACDEIQALEEGIRMTERQLEELAKQTPVVDRLQSIPGIGLMTSTALFAFVGDIQRFPSGRHFASFLGLTPREYSSGMKRRLGRISKRGDSYIRMLLIHGSRSALCHAHNAKEHDRLRTWALDVEKRAGNNKAATALANKLARIAFSVWKHDRIFESLPHAV

SEQ ID NO: 349758 - protein, 312 aa, unidentified
MDAIFVGIDVSKDRLDVAMQPSGEDFFVSRTGAGIDELVGRLKAVSPKLVAIEATGGFETVVAAGLAGAGLPVVVVNPAQVRAFANALGKRAKTDPIDAMVIARFAEATKPQVRPLPDATTRMLADLVARRRQIVEMIAAESQRARRLTSARLKKSIARLRKALEKELSDLDGEIGDHVRGTPAWAEKEDLLASVPGIGPTIARSLIAELPELGSLDRRQIAALAGLAPWTRQSGQWRGKSFIGGGRASVRRVLFMGAMVAARFNPTLKLFRDKLVAAGKPKLVAIVAVARKLLTILNAILRDKSPWQPKNA

SEQ ID NO: 349759 - protein, 448 aa, unidentified
MAMRKREESPEVFPNAAGIDVGGSSHWVAVPRSTAEEPVREFGTMTDDLNAMADWLLACGIDTVALESTGVYWIPVYEVLEQRGLTVWLVDARQMKYVPGRKSDVQDCQWLQKLMSLGLLRAAWRPGNEVCVVRAVTRQREVLLIEQASWVQRMQKALVQMNLQLAEVLSDITGTTGQAIIRAIVAGERDPKVLASHRNSRVKRSTDEIAKALTGNWREEHLFVLKQALAMYDDIARHLDECDARLQALLDERSQHQVDLGALPRPGSKRRGDFDVRQRLANWAGVDLTRINGLGVGTVMTLLSEIGPDLSRFASVKHFCSWLGLCPGTKISGGKVLSSGTKRSANRARQALKMAAMALSHSDSALGAFYRRLCARMDKPRANTAVAHKLARMVYFMLTRGEAFVDQGQQRYEEQQQQRSVAALKRRAATLGFRLEPATEASASQFVS

SEQ ID NO: 349760 - protein, 398 aa, unidentified
MFIVGIDVANRSQQGCEVCMITSDGQTVQRPFSIRNNCTGYNLMLEKIRKHTNIKSQIVFAMESTAHYWLALFTRLRKDGYHVILLNPIQTSAMRDMFIRKIKTDAKDSFIIAELIRFGRYAESNVAQDRLLALKELCRNRFYLVDMAGDLKRKLIALIDRVFPEYEAQFDTIFCKSSVAVLKKYPTPQKLSNAHLDKLTELLWNSSNGHFGEWKARELKELARNSFGVEDCDGAYSTLILLMLDQIQSLSGKADALEKEISRLFQSFDTTVTTIPGVGPIIGAVILSEVGDISRFSSADKLAAYIGVDPSVNQSGEFQAAHAHMSKRGSPYLRRCIWMASQVAVQRDPMFRAYYEKKAAEGLKYMTIIGHVTRKMTAVIFAILRDHKVYEPVLPTAA

SEQ ID NO: 349761 - protein, 379 aa, unidentified
MGKDSRHLGFDVDSDKIVVALAEAGGEVRSLGTIPYCFDAVRRLVKKLGPASGLRVCYEAGPHGYVLYWWLSKLGVHCDVVAPTLVPVKAGDRVKTNRRDALKLARSYRSGDLTAVWVPDAEHEALRDLVRGREAAKKDQLRARHRLGKFLLRRGLRAAAGVKSWTVKHLLWVKTLRFEHPAQEATFLDYLHEVEHAAERVVRLEHAIDQAIEAAPAEMQAVIAGLQALRGIKKVSAATIVAEVGPLSRFARPKQLMGYSGMVSSEDSTGNRVRRGAITKTGNAHVRRIAGEAAWAYQHRPAMSPLLKKRQQGLSEEVKEIAWKAQHRLCSRYRRLMAKGKLRQKVATAIGRELLGFIWAIGVQVEKEQRSQKKASRAA

SEQ ID NO: 349762 - protein, 342 aa, unidentified
MYYIGLDVHKKTISYCVKDASGQVHQEGKVGATRWELDDWIKTLPQPWTVAMEATIFTGWIYDHLLPHAQQVKVAHPLMLRAIAAAKKKNDRIDAGKIADCLRCDFLPECHMASTAIRDRRQTLRYRHLLVRQMVQMKNRISGLLMETGVSHNKRRLHKVGYFRELLASNEEVNESIRPLLRVSRDSIVRLQKTEYALVSSLQRDPLLAERIKRLRTVPGVGPITALTWALEMGEVSRFPSIRQATSYCGLCGDEKSSADKVTRTPLSKQRNKHIQRVLVEAAKLAPRQDHNLALVYEREKQKGNANRATLAVARKMVAYLLAVDRGQRDFVPFADSQSAAA

SEQ ID NO: 349763 - protein, 346 aa, unidentified
MIIVGCDFHPTWQQVVWVDTETGETAERKLEHSSGEARGFYASLAAPALIGVEATGNCQWFLDLMVELGHQVWVGDAAQIRASYVRKQKTDKRDAAHVLKLLLEDRFPRIWVPNRDERDLRQLLLHRSKLVEMGTRVKNELQHLALNQGVQRKRKLWSGAGQQLLRSLPLQPWASRRREDLFSLLALLDRHIGELDEAVEKASQLDKMAQLLKTQPGVGPITSLAFVLTIGDVSRFHNGKQIASYLGLIPREHSSAGKQRLGGITKQGNRMMRMLLVEAAQIAVRCDPGFRKQYLHRCHSKPKAVAKVAAARKLAVRLYWMLRTQTPYPEIVRIESSPRVPLVGAS

SEQ ID NO: 349764 - protein, 345 aa, unidentified
MVHVGLDLSRPRLDVCALDDAGALVTRTTASPDAEGLRVLANRLAPLGEVSAVVESMTGARFVRDELVACGWEVLIADAVKVKGLAPLACKTDKIDALVLAELSRRDLVPQIWLPSPTVRQTRELSRFRIHLVKHATMLRNRIHSALITYGIPCRTSDLFGVGGRHQLAQLELPEPWAGNVLSMLAVIDHLDTETAGLERQLRKLSAKDPAVPLLMTAPGIGPILGFTIAAEIGDITRFPSPRQLVSYTGLVPRVYQSGNTDRRGPLAKNGPRYLRWALIEAAMHAAAHPVYRDHYQRTKTRLGKQRGAKIARVEVARKLTEAIWHMLTKGEPFAPQVPRRSLVA

SEQ ID NO: 349765 - protein, 390 aa, unidentified
MIYVGIDVSKFKHDCVIVNSDGEILVDVFQVSNNLEGFTKLKNIILENIPNNDLQKIKVGLESTGHYSNNIINFIHQNSFPLTIFNPLSTNLFRKAQTLRKTKTDKIDAIFIATMLFSDDSKPYSPKSYHMTEIKSLARHRFRLIDYRAKLKISYTRLLDIVFPELASAVWSIHQNSVYSLLLELPTTKDISLCHLKKLSNLLSKASKGKYGKDRATEIKELAKNSIGTCSFGISFELQQTIRLIKNVDDEIKLLDKKVKILMDELKSPIMSIPGISYVLASIILSEIGDINCFTTPAKLLAFSGLEPSTHQSGKYTASHSKMVKRGSKYLRWALLQAALLTTNKTQTFKSYFQKKKSEGKHHIVCLSHVAKKLLRVIYHLESTNTVFID

SEQ ID NO: 349766 - protein, 358 aa, unidentified
MAGKVTETAVVGGVDTHKDLHVAAVVDQNNKVLGTQFFSTTRQGYRQMLAWMTSFGALKRIGVECTGTYGSGLLRYLQNAGLEVLEVTAPDRMERRKRGKSDTIDAECAAHAAFSGIRTVTPKTRNGMIESLRVLKTCRKTAISARRVALQIIHSNIISAPDELREQLRNMTRMQLIRTLGAWRPDASEYRNVTNVYRISLKSLARRYLELHDEIADLDVMIAAIVDELAPELIKRNAVGYESASQLLITAGDNPQRLRSESGFAALCGVSPVPVSSGKTNRYRLNRGGDRAANSALHIIAIGRLRTDDKTKEYVARRVAEGHTKMEAIRCLKRYISREVYTLLRNQNRQINSIPITA

SEQ ID NO: 349767 - protein, 371 aa, unidentified
MKKNNTCGQSRKGVAQGRSGTLTIGLDLGDKSSRYCVLDNNGEVQREGSVGSSKKAMKQVFGPRKRCRIALEVGTHSPWVSRLLKELGHEVIVANARQVKLISASSRKDDRLDAQTLARLARVDPQLLRPIQHRSEKAQGQLLQIRVRAALVDTRSGLVNTARGLVKAMGERLPCCDTDQMGVERMAGLPAEIQEALRPLLEEVESLTEKIKQCNEKIEQIARQEYPETALLQQVSGVGTLIALTFVLTLEDKQRFQRSRDVGCYVGLRPKRSSSGESQPELRITKEGDVYLRKLLVQGAHCILNRRGPDTDLKRWGLILANKGRKNAKKRAVVAVARKLAILLHHLWVSGEVYEPLRNSNSRARQQKAVA

SEQ ID NO: 349768 - protein, 329 aa, unidentified
MKNKWFIGIDISKKTLDIVIYDQENKKAKKYFKVSNDNKGFKEIVKTFRIEKIKLTEAFICLEYCGVYGLSIGFFLNNKIDFCFCSPLHIKRCLGLTRGKNDKLDAFKIARFCYLYRNELTPSSMPTEIMLKLKNLIGERNRVVKSSIIEKQVIKELSGNLERKTINRAKKRLKNLLIDIKIIEQEIIELIKADNLINENYKLLQSIVGIGLINAVMMILCTNNFNGITNARSFACYCGVAPFEYSSGTSIRGKTRVSNLANKKMKADLTNAARSAVVHDPELRIYYKRKRDEGKAHGTVLNAVKFKIIARAFAVINRQTPYVKLRQAG

SEQ ID NO: 349769 - protein, 463 aa, unidentified
MHTQMLSLEDLAIRNASFSGESEKRTEEMKDQEQIAAWIGVDWADEGHQVWEYNLGTGSKETYVVQHNAESLQEWLSQLRSRYRGSGVAVVLEQARGGLIYALMGTDFIVMYPVNPQSLSKYRKALYPSGAKSDPSDAELLGEMVRQNPQRFRAWIPGDAQTRSLQLLTEDRRKLVEDMTARTNQLTSVLKTYYPQALEWAGHLGSEQACAFLEKWPTLVELQRSRPFRVREFYQKYGRPTREVLNQRVDQILKAQPLTSDRAVVKASVMMVQALVAQIRPLRLAIENYDQEIERVFRQHPDRVVFESFPGAGKVLAPRLLAAFGADRDRFQTALEVQEFSGTAPVTERSGKAIWVHRRLACPKFMLQTFHEFANCAWRFCAWSKLYYQQQRARGKDHHAAVRSLAYKWIRIMFRCWKDRAPYDDSIYVKSLIKRGSHLAKGLNQTRPDSVVEISSNVCESRA

SEQ ID NO: 349770 - protein, 465 aa, unidentified
MKRHARRPSPKPRTSPAVLDRLHPHAAGIDCGSAEHFVAVPPDRDPTPIRAFPTFTGDLYRLADWLTACRVTHVAMEATGVYWIPIFEILDARGFAVILVNARHVKNLPGRKSDVSDCEWLRDLHTLGLLRGSFRPADGISALRGYVRHRATLIESTSTLVQRMQKALVQMNVQLPLVVSDITGVTGLRILRDIVAGRRDPQQLAQHRDPRCRASIAELVAALTGNYRPEHVFVLQQNLELYDVYQQQLAACDTAIEAHLAHLTASMAPAPTPLPPARRRHTPHENQPRFDLRTPLHQLTGADLSQVDGLGPYNGLRLVAEIGTDMARWPTEHHFTSWLTLAPHNKISGGRLLGSRTPRSANRAAAILRLAATTVGRTQTALGAFYRRLAFRIGAPKAITATARKLAILVYRTLKEHLVYKDPGADAYDAQHRTHVVRRLRQRATNLGFGLVNLSTGELVEGAVS

SEQ ID NO: 349771 - protein, 420 aa, unidentified
MAKTVEIVYPVCCGMDVHKSFIVACIAVTDERSHTEHHIKRFSTFTGDLRRLADWLASYDCRDVCMESAGKYWIPVFNVLEKTCNVCLTHPKYVKAIKGKKTDKKDAKWISELFKCDLVRSSFIPPPDVRQLRDLCRYYVKLTNFVSSEKNRAQNCLTMCNFKLDDVFSDVFGKSATRVLDALLEHGNGNFELDGLLHGKCKSSPEQIRAAMDGELNPSQTEKLSLIRQHMSDINALQTTLETLIYSLAAKYQPQIDLLLTVPGISTKLTAIRILAEIGADMSVFETAKQLVSWAGLTPQNQESAGKKKTTRIGRAGAYLKPLLVQIALACGKSDQYPELKNKFLFLKMRRGGKKAVIAIARKLLTAIWHMLSKNEAYNVELYCKADKPPFTHELTTAQALALLRSKGYLIVDEDTGEVA

SEQ ID NO: 349772 - protein, 317 aa, unidentified
MAQKGTIVGIDVAKGKIDAAIRFGAEASFANSAEGRRELLAWLKEHGVCKAVMEASGGYEKSWATLLRGAAVEVVIADPNRVRHFAKSAGQLAKNDPIDARMIAWFGEVFGHASGQPHDEERQELDQIVTARLGIVRLKEQIENWGEHEQPKAVQKAQQALLKAVAIQLAKLETIIVAKIDKTERFAQRAEIIQSVPGLAGTAAAGLIAFLPELGLVDRQAAAALLGVAPFDADSGQRRGQRHIQGGRHKLRKLLFMPVLSAATQHNPVLKACYQRLIAKGKKAKVALIACMRKLIGILNTMLARGEKWDPAKHAIA

SEQ ID NO: 349773 - protein, 311 aa, unidentified
MADCTIGVDISKATLDAHRLADGAWARFDNDRRGFRALLAWIGTAPSRVIFEPTGAYHRAFERALAAAGIPMAKVNPRQARRFAEATGRLAKTDRLDAALLARMGALLELPARPPRTEMLGELKDLHVARGALVKDRTAAMNRDKSRTLPLLRRQGADRLRQIRRQIAELDAEILRRLQADPQLSRRFDILVSIPGVAKLTAFAPLIDMPELGELDPGEAGALAGLAPVARQSGRWTGRAFIRGGRASVRSALFMPALVMVRFNPDLKACHDRLKDAGKPAKVALTAVMRKLIILANALLKADRTWTPAKP

SEQ ID NO: 349774 - protein, 407 aa, unidentified
MLFVGDDWAEDHHDVCLMDEAGAQLGGRRLPEGLAGVAALHALIAAHAGDPGEVVVGIEKDHGLWVGALVAAGYQVYAVNPMAVARYRDRHRVSGAKSDSADAKVLADLVRTDRHNHRQLVGDSDQVDAIKVLARAHQNLIWLRSRQVSTLRAGLLEYYPAAVRAFPNLGDRDRDRDALAVLGRAPTPEQGARLSLSRIAAALRAGGRTRSVEERARDIQAQLRSEHLHASAPVNTAYGAATSAIVSIIIELTIQISAVETELAQHFRKHPDADIYLSQPGIGVILGARVLGEFGDDPNRFTTAKCRKNYAGTSPVTVASGRKRAVKARHVRNDRLYDALDRWAFATLKCSPGARYFYDEPRAAGDTHHQALRALANRLVGILHGCLRHHTHYNEHTAWAHRTPIAA

SEQ ID NO: 349775 - protein, 360 aa, unidentified
MHATTVAVDLAKSVFQIAVADEHWRVVETQRLTRTQFERWFLNREVGVVVMEACGSAHHWARWLNSLGIEVRLLPAQYVRAYVRRNKTDATDAAALLEACRCADLRPVRVKSVEQQALQGLHRIRSLWMGTRTSRINALRGFCREFGLAIPQGARTGLEVLGRVLADPNTAVPGLIRDSAKLLLEEVRLLEARIAQVERELANAARHSPACTLLLSVPGIGLLTATAMVAATSGDVTHFQDARHFASWFGLTPREFSSGSTRHLGRISKKGDRYLRMLLTHGARSVLRAATVAVEKGKVLSGVRQWALQVQARSNHNKATCALANKLARICYATLRDHETFDEKAALARKAQRQSFAMPA

SEQ ID NO: 349776 - protein, 457 aa, unidentified
MSQPLSADEPDFAAFIAIDWADHEHAWALQVAGSRQRESGKLEHTPEAIEAWALQWATRFAGRPVAVALEQARGALLYALSKYQHLVLYPIHPSTSHNYRTAMFPSGSKDDPKDADLLLDLLTLHRDRLRVLKPDTEQTRKLQALVEKRRQLVQERTAQTNRITDQLKLYFPQVLSWFDELHAPLVAAFLERWPTLPQLQKEHPEEVRKFFYQHHARSQSRIEERLRQIPPAQAPIHDAAVIEPGVLLVQALLAMVAALSQGIRSLERAIEQVATTHPDYFIFSSFPAAGPTLAPRLIAAFGSRRERYRSANEMQSFSGIAPVETASGSQHWVHFRWACPKFLRQTFHEYAAVSIPCCAWARAFYQQQRAKGSDHQAAVRSLAFKWIRILFRCWQSRQPYQEDLYLAARERRAVPLSRRPASSPVAPALASPPVRGKTQDMVLKQVGDVLKSLMAEA

SEQ ID NO: 349777 - protein, 355 aa, unidentified
MKLHQSVTQFNCGIDLHAKNMYLCVMDKEGNKLLHKNIKTHDQKCFLELVAPYRHDLTVACESTFNWYVVSDMCEDAGIPFVLGHAFYMKAIHKSKVKNDRADSETIASLLRGNLLPVGYVCRRKTRSIRDLFRRRTYLVRQRAALETHLTAMGYLYDFAATSKDFKRRAGRLDTYVRQLPDDFGVQMSAAADIRLIEALRVEILSIEKAVMRHAKDFDRELLGLLQTIPGLGAIISLGILYEADDFSRFADSGHFISYCRLMTPPQESGGKVVGAGHRKNGNPYLKWMFSELNAAARRHSSELNAFAQRLVSRHGPRKAACMFSHKLGRAVFHIATEKIPFNLEKFLGGPMKKQ

SEQ ID NO: 349778 - protein, 338 aa, unidentified
MKITTVGVDLAKIVFTVYGVDEHGKPALRKTVRRGKLLELFAQLPACVVGMEACSGAQHWARELRKLGHTPRIMAAEFVEPYRRGGKNDTNDAAAICEAVARPQMRFVPIKSVEQQAVLAVHRLRQGLVEERTALANRIRGLLTEYGLVIGVGLDRLRKALPAILEDAENGVPGIAREVFADATRQLIELDARIGDYDRRITALARASEPVQRLMKMEGVGPVTATAIVASVGDAKVFRNGRQFAAWLGLTPRQHSTGGKQRLGAMTKHGDVYLRTLLIHGARAVLRVTPTHSDAKSRWAESLRHRRPDNVAAVALAAKHARIIWALLARGQHYRPAV

SEQ ID NO: 349779 - protein, 338 aa, unidentified
MKVYAGIDLHSSNNYIGIINEKDQRLYQKRLPNQLEHILEALEPFKESMEGVVVESTYNWYWLVDGLQAHGYKLHLANPSAVKQYEGLKHTDDKWDSFWLAHMRRLNILPEGYIYPKEERPVRDLLRRRLLFVRHRTSHILSLQSAITRNLSYKMSAGDIKKLKSCDADKLFDNPFLALAAGNSISAIRFLGERIAEIEKAVKSHIQLKPEFKYLLTIPGIGNILGLTIMLEVGDISRFLKVGNYSSYCRCVKAERISNSKKKGQGNRKNGNKYLSWAYVEAANFAIRSYPKFQSFYQRKKAKTNGVVAIKALSNKLARASYYIMRDKVAYDANKMFR

SEQ ID NO: 349780 - protein, 313 aa, unidentified
MNTQPMNVTYLGLDVAKATLDIAGPSIKTTQVPNSAEGHRRLLSMLKALPGSVHVVCEATGGYERGVVAALMAEGIGVCRLNPCRVRLFAKGIGQLAKTDRLDASLLAEFGRQNQPRPLVLHDQAFEELRVLYDRRRQLVAWHTVEKNRLETALKNMVPLINKTLRFLDRQIEEVERLIDAHVAAHQEIQTKVARMEQVKGVGRVTATVLLAHMPQIGAVTDHQAAALAGVAPYNNDSGHSQGKRSIRGGRHQIRSVLYMAAVTAARYNPILRAFYLRLRQKGKPAKVALTAVMRKLIVLLNRLVKNPDFVLA

SEQ ID NO: 349781 - protein, 308 aa, unidentified
MDIYAGIDVSKDWLDVSVEPSGQAVRFRRDADGLDELAGFLRPQGRCLAVVEATGGLEAVVTASLAAAGLDVVTVNPAQVRAFAFSLGQRAKTDKVDARVIALFAQAVRPPVRALPDAQARELADLVSRRRQIIAMIVAERQREHRASPRMKKSIARLVRALEKELSSVDGGIDEAVRNSPVWAQTLDLLTSVPGIGDQIARTLIAELPELGSLDRRQIAPLAGLAPYTRQSGQWRGQSFISGGRASVRSALFMGAMVAARYNPTLKTFRDDLIARGKPKKLALIAVARKLLTILNAIIRDKKSWQTA

SEQ ID NO: 349782 - protein, 400 aa, unidentified
MISVGIDISKGKSTVCLLKPYGEIVCKPFEVQHTEKDLEELANLLQKLDGEIKIVMEATGIYHLPILTFLLEKGFFVSVINPLMMKRFSKDNSLRGAKNDRLDSVMIASYGIEKWYKLKKYEVNDRIYTELRLLGRQYYRFMQTHVKHVQELTHLLDYTAPGLKAMFNSWNEHSNRDKLSDFVERFWHFDLITSLSREEFVEQYLLWAKEKKYHQSRSKAEKVYDLASNGIPTLSSHTPSTQMMIQGAINVLRIVNNSLYYILSRMKELAKSLPEYATVRSMGGVGDSLAPRLIAEIGNVKRLRNGHALVALAGIDPPPYESGQFVGTHRRISKRGSPILRKIGFEVMRVLKSHKEPEDNAVYNYILKKEAEGKNKKLSKIAGLNKFLRIYYVRVMEVYQ

SEQ ID NO: 349783 - protein, 495 aa, unidentified
MEPRARLEDSLNASDTGRERARVLSPFAYGIGIDCHSRFIQVCVRFALSSEGEHEREFPTSWSGLVDARRWAISQLVEHCPGFQENEQLRYTIESTGCYHLPVLRAWAGVPSVVNPLLAAPTRRKTDVLDARLLAYHAITGLWPASFMATEALQTLRVLWNERIEGRRVAVRCSNRLNNVMLRFGHTYGASCKLMDSHGRAIAEDLISGRKPRVPGVCPDGLGDEVKSVIAGLITNFDKAVEHADSFQREAIKFIKSKSWPSHMGECEGAKLLEFLQSVPGVGEITAVVWLCEVGDPRRFAHSKQVGAYCGSDPSLKISAGKVTDSIRRRGNKRLHVAFAQAGLRLVARHNEAFGNWGYAMARRQPKGGMKKAASAVARRLCCAMWHVHRTLTPFSYEKYKLSRSFDVPCVTLRKMGLNLAERTALGLAGIKTSVDVAAAWNGEINVMKGVGPACLRKLQSWLEAHSRQPKDCSSVERSSDGPGGKSSTGKKRRT

SEQ ID NO: 349784 - protein, 347 aa, unidentified
MVYVGIDLHRKRSQIAVLDRDGAEILSRRIVNEPEIFLDLLQELGDDAQVALEATYGWEWLADLLEEAGYELHLAHPLRTKAIAAARVKTDAVDARTLAHLLRADLLPEAYIAPRELRDVRDLLHHRVALTRMRSALKHRVGAILAKNGVARPYSNLFGPGGSRFLAELALREGPRRRLDSLLALITAFDREIDTTTEEIEQRASEDAHVDVLCQIRGVGRYIAMLVIAEVGDVTRFPSARHLCAWAGLTPTVRSSDGKARLGHISGQGSPALRWALVEAAQHAATGGGPLRAAYERIAKRRGKQVAKVAVARKILALCFYGLRDGEIRCLAPRAPARTIRTTAVTR

SEQ ID NO: 349785 - protein, 416 aa, unidentified
MNTLFVGIDVSTKNNQVCAVNFNQDVFFNLSFPNNPDGCDLLITSVLAFVDKEKFDSIIIVTESTSIYDYHICAYLSSQLSIVGTSVIIYSVNAKSIANYKKSYIEMEKTDLGDAFLIADFARVGRCKKLRPFKAAQHIALKRLTRERYHLAEQLIREKNYVLNNIYLKVSGLMTLPHKDLPFSDNFSASNTKFLTDYASPLDEIIEYFKSASQNRCDDYGKIASLFDKAIRSSYRLDKTAYDPITISITASINLIQCIESQIKMVDKAIEKEMKGLYPNGYQSLMSITGIGPVFAAGILSEIGDISYFKSDASLAKYAGFHWKKNDSGNFIADEKHSANSCNKYLKYYITQSTQMSVMHGFDYTTSFYRKKYNEASTHKHRRALVLTSRKLVRLIYVLLRDSKLYVSVSHDTVIE

SEQ ID NO: 349786 - protein, 444 aa, unidentified
MLIPARLLSGHDAWDPAAIFIIPLRKRGDSVKTLFVGIDVSMKDFKAQFMDNFGETVSKRQRFSNDNPGLEAFINLVLEICHSDSFERVVIGLESTSVYSWHLQMSLASNHQLASYHCQVYSFNPKVVANFKKAYVDLSKNDWTDAWVIADRLRFGRLPENSQVDFRYLPLQRLTRFRFHLTQTLTREKNYFLTNLFLKFNTLQQNEVFSNLFGATSEAVLTEFLSPDEIAARPLDDLIDFLVEKGNKHFADPKATAEKLKIAAHNAHRLRGNLLEPVNLILTTSLETIRTLEKQIKTIDKAIAKEIAHFKHTLDSVPGLGPVICAGIIAEIGDIHRFPNDSALAKFAGLTWREHQSGEFEADTTPLTKTGNAYLRYYLIQAANSVRQYEPEYREFYSRKFRESKTHHHRRALVLTARKLVRMVDALLRSNQLYLPKEQRRNLV

SEQ ID NO: 349787 - protein, 499 aa, unidentified
MEWDWRASEVGARRKTKQKPAMVEPVEIPDAEHELVVDRGAAIDVAKAAGKVCVRLPGKSGRRFSRVWDVPARTGAITELAEQLVELGIEKVTVESTSDYWRIWYYLLEDAGLDVQLVNSRDVRNVPGRPKTDKLDAVWLAKLTEKGLLRPSFVPPAPIRVLRDYTRLREDLIRERTRYWQRLEKLLEDAAIKVSAVASKLDTLSTRDMVEALIGGERDSRRLADLARGRMKTKRSELITALDGRFDDHHAELARLLLGQIDALSAQIGALSARIERLIDAMDESDHPTGDRGRSGGGGPQVTGAPSTGGQATAPARRTTTAIGVDSDTATVVEPQRLTAVERLDEITGVGQCAAQTIIAEIGLDMARFPTPEHLVSWAKLCPRTIQSGPVIRGGKTGKGNPYLKGALGEAAAAAARTDTFLGERYRRLVKRRGRLKALVAVARSILVIVWQLLSDPTARFHDLGPDYHTSRVVTERKIRNHIAHLTAMGFHVTLQPAA

SEQ ID NO: 349788 - protein, 424 aa, unidentified
MKKEHPSKIDQEASIYERCAGIDVHKKVITVCLRIGRKTQVREFETLTCELREMAAWLKENDVQMAAMESTGSYWKPLYNVFEQEGIPAMVVNAGHMKAVPGRKTDVKDAEWIAKLLSQGLLKASFIPDREQRELRELTRFRKSQIEERARTLNRLQKMLEGANIKLSSWVSDIDGKSATQLLELIIGKEEFTAQEVEKLRHFNMKASSEELFKSLEGIVTPIQRELFTHIMNVIKEQTAQIEKTEELILGYMTKAYQEAADAIDAIPGIGRISAQQILAEIGIDMSRFPSAAHLSNWAGICPGNNESAGVRKSGKTNYANKTLKSTLTQCAQAVKKNKNSFFYAQYQRLVVRRGKNRATMAVAHSLLIAIYHVLSGKSFCDLGADYYNRFNKEKKINSYVKQLSKLGVSVPDDAVRVALVKTA

SEQ ID NO: 349789 - protein, 345 aa, unidentified
MELHLIGVDLGKTVFHLVGLNLRGEVVMRKQFSRKQLLRFTANLKVDRIGMEACGGSHFLGRALREQGHDVRLMPAQYVKPYVKTNKSDFIDAEAIAEAVGRPNMRFVPIKTDEQLDLQSLHRVRERWVMRRTAIVNQIRGLLLERGITLRKGRRHLDHALPGILEDAETKLSGALRFLLAQLKLELDQLAERMDQADAAIAQGVRQSEACRRLMAIPGVGPVTATAMIASIGNGSAFRKGREFAAWLGLVPREHSTGGKQTLLSISRRGNAYLRRLFIQGARAVLQQKMKQSSALSAWLIQLTARSHPNVVAVALANKLSRMAWAVLARGEAYRTPAAMGVAAV

SEQ ID NO: 349790 - protein, 375 aa, unidentified
MSDHSEAFVGLDTSKLRNAVAIAEGVRGGEVRFLGEFENSAAAIAKLVKNLAAKYQRLTFCYEAGPTGYGLYRQIKTLGPECIVVAPSLIPKKPGDRVKTNRRDALNLAKLLRAGELTAVWVPDRGHEAMRDLTRARETAMMDLRSKRQQVSAFLLRQGLHYSERKKTWTKTHMNWLASQKLEHAEQRLVLEEMMLAVRQAQERLERLEQAIRVAVPDWSLAEVVIALMAMRGIDRISAATFLAEIGDLSRFQHPSELMGYLGLVPSEDSTGDKIKRGPITKAGNRRARRMLVECAWSYQHPPRVGQDKQEKVAAAPRAVREIAWKAQCRLHGRYRALVRRGKLKTVAVTAVARELAGFIWAVSRAITTARVVAK

SEQ ID NO: 349791 - protein, 316 aa, unidentified
MSDTLYVGIDVAKDSFDVASDPAGLAWSLPNDPTGRQRLLDGLQAHRVALIVLEATGGYERSLVADLIGAGHKVVVANPRQVRDFARGIGQLAKTDRIDARVLARFASMVKPEPRQKASEQAVNLAELVTRRRQLCDLMTQESNRLPHARHPDVRRSLKKSLRALEGQIDHLDKLIRQNIDSDDGLRRKDEIVQSFKGVGPGTSAMLLSHLPELGRINRQEIAALAGLAPWDFKSGQWAGQSRIWGGRMPVRNMLYMAALSAIRFNPIIRKFYQRLESHGKLFKVCITACMRKILVILNTLVRNDCLWSPPLPKNA

SEQ ID NO: 349792 - protein, 455 aa, unidentified
MSIRIIGIDLAVNAKHKAMILDPAGNKFIGKPITFRSRHDDLERLLKRARAGAPEEVQLVAIMEATGMAWYPVGVYLHRQGVVVYRVNGQKTKDLRKVLWKHAGSDLIDSQILAHLYQLAPSRLERWWPADGDQLALQRACRAYARWRELDVAEQNRLQSYDQWAWGGLHKLVPAVARDWMRLHWYNPWRVFEAGVDRLSDAWQAAAPKAAGSDWIAPWVDRARQMTLLYGSEEMVGYDDLQAITREGLRLRNHYAQEQACLTNQLIRPLYRQLYPDCFLESIRGIGLQSAATYMAFIQDIARFPTIEKFRLWCGIVPASKQSGGAEAKGLRITQAGPNLVKATLFLNAEVARQWDAQIAAIYHQQMVNYGKHHNQAVCACASHLASRIYAILKQQRPYQLRDLQGNPVSAAQSRALCKKLRVPDEVRKRNTKRFRRAQAVVQKEAGFNSQRLLK

SEQ ID NO: 349793 - protein, 360 aa, unidentified
MKRHHFIGIDVHCQFCEIAVVDAVGKVVCRDRCATTISTLLAVLEKVPRPRSLVIEEGSLAGWLWRGLATAVERMVVSEPRRNRLIAKGGDKDDDLDAEKLAQLLRGGYVKEVHQVKSLERAVFKQQVAMYHFRVRQRVRESLRLTWLFRQHGVMIREKDYANVKDRPALLARLPENAALRHMVTILCTGYDTLVEQEETWRKCLLQLAPQEKVVRRFQALPGLGWIRAATLYAYLDTPWRFRSKSALWKYLGIGLERHRSGNGPEQLQVPKLAHRLLKSTILGAALSAVLQGDNPFAELYRRWISKGLSSKLARRNVARALATTLWGLWKNGSAYHPKWVGVPAAAKAAARSRLGAAGC

SEQ ID NO: 349794 - protein, 310 aa, unidentified
MDRIGVGIDVSKDRLDIAVRPSNESFSVGRNAAGLEQLIARLRQLSPRVVALEATGGFETVVAAALSAAGLPVAIVNPAQIRAFARAIGQRAKTDPIDARVIAHFAEATNLEPRPLPDEQTRLLADLVGRRRQIIEMMGAERQREQRLSAPRLKKSIARLVKALEKELASLDTDIGDAVRGSPAWRAKEELLASVPGVGPVISHTLIADLPELGQIGGKQITALVGLAPFTRQSGKWRGKSFIGGGRTDVRAVLFMGALVAKQHNPVLKAFFDRLIAAGKPKMVALIAVARKLLTILNAILRDNRPWQIA

SEQ ID NO: 349795 - protein, 408 aa, unidentified
MKRYYIGVDWGDRLHQVYVGEEQGNKVREMKVPETVEGLVEIGRWFDEQRAEGFELWAAIEKPAGRIVDFLLDHGVEVYPVNPKAVDRVRDRYRMSGSKSDAFDAYVLAEFLRTDHAHLKALRPSSEKAQELKMLCRDQRRVVRHKARFLNQLTTTLKEYYPRPLEVFDNIETEVALDFLTRYPTPDHLDALKLKDFNRFATKQHHLSKQRCEQLWEELHKPQLGVPEHVVRAKAQLVEVLVDQLRASIKAVKTYQHKVESFFASSPAAELARTLPGGKSGTLVAAIWAELGDATGRWQSAGHLQAEAGAVPVTKASGKSHVVHFRFACNKHLRYSLYWFSFVSLNNSEWAKLYYRSQRDKGHNHPQALRALGAKWLKIIFVMWRDHKPYDEKLHLANIAIQKMRQAA

SEQ ID NO: 349796 - protein, 309 aa, unidentified
MTQTIMTTAGIDTSKAKLDIAVHGRAERWQVENTRRGWRRLAADLAKANVARVGIEATGGYERGVVSHLREQGFTVLILQPIQVRAYARVHLRRAKNDRLDAVLIAACAAAIDQPKIEPDPRLAELAQHLTFVEQIEEDIARLTVQLEHIDEPRLKRIVMADIDRLKARRSTELLRMVEDLRTHGDLARRLDLVRSVPGIGERTALALIIRMPELGRISREEAVALAGLAPFDDDSGTHKGQRHIAGGRSRLRRSLFAAALPAAFRWNKALIDLYARLTARGKAHNAALIACARKLLIYANTVVARGTP

SEQ ID NO: 349797 - protein, 332 aa, unidentified
MVAGTHGSLNKAGSTKMTQISTTAGIDTSKAKLDVAVHGAAGRWQVENALVGWRRLAVELRKAEITRVGIEASGGYERGVVGYLREQGFTVLVLQPIQVKAYARMHLRRAKNDKLDAVLIAACAATIDRPRIEPDQRLDKLAQHLTFVEQVEEDIARFKVRLEHIEEPRLRRLIMTDIARLKARRSAELQCIVIALRAHDDLACRLDLVLSIPGLGERTAIALIVRMPELGRISREEAAALAGLAPYDDDSGTYKGQRHIAGGRGRLRRSLFAAALPAAFRWNKALIELYTRLTRRGKAHNAALIACARKLLIYANTVVQRGTPWTERPLRI

SEQ ID NO: 349798 - protein, 299 aa, unidentified
MQVVTTVGLDIAKSVFQVHGVDAAGQVVIRRQLKRRYVLAFFEKLPACLVGIEACASSHHWSRELKTLGHTVRLMPPAYVRPYVKRQKNDTADAEAICEAVTRANMRFVATKTPVQQSCLTLHRTRHLFIRQQTAVINVIRAHLAEFGIVAPVGRKGIETLLDVVANPTDKRVPVIARACLAALGAQLRRLKEQILEFDRMIMAWHRSNEASKRLDAIPGVGPVLATALVASIADPKAFRSGRNFSAWIGLVPKQHSSGGRDRLGSISKQGDRYLRSLFMAGALAVIRYARIHGATHRP

SEQ ID NO: 349799 - protein, 317 aa, unidentified
MTKIICGVDVSSTSLDAFVGPSGPAHSFRNTAEGIAELAAFCRQQSVDLVAMEASGGYEKQAFALLWAGGVPVALLNPRAVRDFAKGMGLLEKTDCIDARVIAWFAAVKGSMSNAPASAEQQRLKALVTRLRQLTELQAAQRNQRLLVSEATVLELIAELLKVVASQMRMLEAEIAALLASDPLWQKLDQALRSIKGVADRTVARVMAEMPEIGTLSNKAVSKLAGLAPLADDSGKREGKRLVRGGRRNVRAILFVVAGVVRRHDPDFAAFHQRLSAAGKPRKVIRIALAHKLLVRLNARARDARKAFAGASVCQSA

SEQ ID NO: 349800 - protein, 391 aa, unidentified
MIFVGIDVAKDTHYAAVSDDSGAVLVKPFAFQNNAEGFCLLLKKLSEFDRSKLLIGLESTGIYSENLICFLYESGFRLAVINPIQTATLRKTAIRKTKTDKVDTMLIIKSLMVNSYRLYSQRDADSLKLRTLCRFRQNLKKSKARLKIQLAGYVNLVFPEFGKFFKSGIHIAASYALLKKYSSPKEIAALRTSTLCILLSKASHGRFGKDTAEALKSLALSSVGVKNPYISIQIAQTIAQIELLEQQIKDLNSAIEEAMESINSVLMTVPGIGAVNAACILGEIGDIKRFSKPCKLLAYAGLDPTVRQSGQFTAKSTRMSKRGSALLRFALINSAWQLTLNDTTFKAYYDLKRSQGLNHYGALGHVAHKLTRVIFKLLTSDTPFIPAKLVA

SEQ ID NO: 349801 - protein, 345 aa, unidentified
MKKVMAGIDLHSNNLVVGIMDQDGKRVGQQKLPCELPAVVKFLAPFKERLEQVAVESTYNWYWLVDGLQALGYPVVLANPAAMEQYSGIKNAGDTNDAFFLAEQSRLKILPTGYIYDVELRPVRDLLRRRMLLVRQRTALMLSFKSLYTRTTGTEMELRALKALAIKEAQALYDHPANQVIAGLQIKHIEQLGESIEKIEKAVLASARELPFYSKLTSLPGVGKILGMTITMEVGDIKRFADAGHFASYCRTVEAKRTSNTRKKGENNSKCGNKYLAWAFVEAANCARRADEQCRKWHDRKAAKTLKVVATKALACKLAKAAWYLMAEGVDYNPQRMFGQPAPTK

SEQ ID NO: 349802 - protein, 425 aa, unidentified
MNRNMNEKINQVNEDTLVIGIDIAKRKHYACAMDDRGRVFQKSFPFHQSSDGFMHFLQRIGTLQTTHAKSNILVGFEPTGHYWMNLADFLMVNDIPFVMVNPMHVSRTKELDDNLQTKNDAKDARVIAQLIRDGRYSFPRILQGVEAELRNGSSFRLKWQEDIAALKNRIIRWTDRYFPEFQWVFKEIGKNALAVLEQTPFPTDMQDKSLEELLQLYRQVEGLKYPSSPKIKQLQQYAHTSIGLSEGHEMARFEIHCLLEQYRQLQAQYEVLAERLTQLAKEMTDYEYLLSIPGVGENTVVELLAETGPLTNYKHPRQLLKLAGLTLRENSSGQHKGQKKISKRGRRKLRGLLFRAILPMIRYNVAFQALYEYYITRPNNPLRKKEAMVVLCGKLLKIAHALCQKKVYFDAQTMMKDLTCLEPLA

SEQ ID NO: 349803 - protein, 405 aa, unidentified
MLISAHHSQAPSAVRVDLSAIFVSLELSQSKWLITSLSPGNGEKLSRFTIAGGDVAGMLARFDEVQRKTQSRTGQRFPLIVIQEAGLDGFWIHRVLKAERIESHVVDPASIAVSRRRRRVKTDRIDGEMLVRTLLAYKRGEPRVCAMVRAPTPEEEDRRRVARERKTLINERIRHVNRIKGLLFGQGIRSYEPLRRDRRKRLDTLTTGDGRPLPAHLKAQISRELDRLELVMEQIQVCEQARDALLTATQPATAAEPANPVQAGEPGLTTPSVPAMLLALKGIGPETASVLWLEGLSRHFDNRRQVAAYAGLAPSHWQSGQIDHDQGVSKAGNPRLRTALIQLAWLWVRHQPDSALTLWFKARVAQNGGRLKKTTIVALARKLLVALWKYVNAGVVIEGAAVQPA

SEQ ID NO: 349804 - protein, 317 aa, unidentified
MAQKSRLVGIDVAKGKIDAAIRAGAEAAFANSVEGHRELLAWLQEHGVGKAVMEASGGYERKWMGLLRQAGIEVVIVEPKRVRHFAKSAGRQAKNDAIDARMIAWFGEVFDDLESQAGDAEREELDHLVTTRLAVMQLRDQVENWTEHERPKAVQKIHQALLKTIQAQLDTLQQLIAGRIARTERFARRAEIIRSMPGVGEASTAGVIAFLPELGRVDRQVAAALLGVAPFDDDSGTRRGERHIQGGRRKLRTLLFMPILAAATRHNPVLKAYYQRLIARGKKAKVALTACMRKMIGILNTMLARGEKWDPTKHAIA

SEQ ID NO: 349805 - protein, 399 aa, unidentified
MTPDDIDVWVGLDMGKSAHHAHALDHDGNTLYDKPLKQDEKAIRTMLGKLSKHGRVLLVVDQPNTIGSLPLTVARNMGIAVAYLPGTAMRRTAQLLPGDAKTDRRDAHVIAWAALKLPETLRDAGPDDETLAALKLLAGHDEDLAHESTRHVNRLRSLLLQTHPAFERALKGERITRDATLALLERYGGPMGVKRAGIEDVKDWAKSNGLRAGRIIDDMFKAIGEQTVTVPGTLMAETIIPSIAHDIKTIRDRRREVGRQVEKLLEDHPLLTVLTSMPGIGVRTASNILLGIGGDIANFKSSAHLAAYAGISPVTGQSGTSIKGERPSRRGNKRLKNALWQTAFVASTKHPPSVAYYKRKREQGKHHNAAIICLARRRCDVIYSMLKNGTLYQEPALVA

SEQ ID NO: 349806 - protein, 394 aa, unidentified
MGKMYVGIDIAKDRFSACGIEEGGRSFFELTFTMDGAGFAALLKTIEANGGTPGNVIAAMESTACYHINLYSFLSAKGIEAVIINPLLIANYAKLSLRRTKTDKKDAKTIAQFILAHRDSVTQLAISQDMQDMRDMARERESLCHQISAAKVEIQRVLQTTFPELAAMTNPITKVMLHFIQRFPSARLVSIAKPSAIEKTLKEKPCSCRLRFTSKELIEAARTSIATVSPAKELILSGKIETLVHLQKRRDELTKALTKYCESTIVEDLRIVTSISGINNIMATALLAEIGQISNYLSHKHLIAFAGIDPTVYQSGKYEGASRISKRGNRHLRRVIWLMTISVIHHNSVFKNYFLKRRNEGQPFKKAVFATAHKLMRVIFAMLSKKTSFVAECV

SEQ ID NO: 349807 - protein, 415 aa, unidentified
MLRIVYPICCGLDVHKSFVFACIAATDENGVTTYQSKKFSTFTNELRELAEWLARNNCKDVCMESSGKYWIPVWNVLEPTCNLTIAHPKYVKAIRGKKTDKKDAKWIADIFKHDLVSGSFIPPTDIRQLRDLTRYYRKLVGFNTGEKNRAQNCLTVSNIKLDDVFSNVFGKSATAITDRLLEHPGETFDVEPYVHYKCKTPIPKIQAAIDGAICEEQAEKLKVIRSHMDNLELCKLNLESIVLGIAQKYLPQLELILTVPGIADMFTAISIIAEIGVDMSVFPTSKQLCSWAGLTPQNNESAGKKKTTRISHAGAYLKPLLVQCSVAVSKSEKHPEIRNRYLSLRKRRGHKKAVIAISRMLLTAIYNILKKSEPYNAELYKSSDKPPEHRQVSVDEAIFILQRQGYSILAPQAEV

SEQ ID NO: 349808 - protein, 442 aa, unidentified
MRLTPNKNNKKEVPNMKYTENEKILQITEKTLIVGIDVGSEKHYARAFNFRGVEYGKLLIFDNSAEGFTKLVGWVQKLTNENGFSDVMLGMEPTGHYWFNLAENMKRHGMRVVLVNPHHVKKSKELDDNNPSKTDRKDPKTIAMLVKDGRYIEPYIPEGIYKELRTAMDIRWRLMEDLTAIRNRINRWINIYFPEYKEVFVDWEGKASLQILHECPTPVKVMEKGIDGIIAIWKGKGIRTVGKKRAIRLVEAAKVSIGSKEGLVAAESELKILLEDYERKREQYERVMMLIEELARQIPGFDRLLEIKGIGIVTAAGFVAEVGDISRFAHPKQIQKLAGLSLKENSSGKHKGKTTISKRGRKRLRYYLTFGIMPLLSKNEEFRLLHEYYTTRAERPLKKMQSLVALSNKLIRIFYVLLKKDVAYDPQKMLGDIKRPVEKMAA

SEQ ID NO: 349809 - protein, 340 aa, unidentified
MNATTYGLDIAKRVFQLYWVDAQTGEIANRRFGRDDLIAFLARRPAGRVALEACGSAHWWARKIRALGHEVVLLHAQFIRPFVQTNKTDAADARAIWTAVQQPGMRTVAAKTEDQQAMLSLHRMRSQLVKFRTMQVNQLRGFLYEFGVTFRAGRLAGLAEVRERMVELEDTLPRSIILNLQDQLRRINAFEDDIDQLEKRIGAWQKQEAACRAISEVPGIGRLTATALVATIGDARTFKSGREFAAFLGLVPRQNGTGGKIRLGSISKRGDPYLRTLLIHGARSVLCHTKVPTAWQKGIQERRPGNVVAVALANKMARIAWAILAHASSYEKNHVSVRPA

SEQ ID NO: 349810 - protein, 361 aa, unidentified
MNTVIRVGIDLANYLIQVHAVDASGKVVTNRALKRGKFLLWCADLPAGCVIAMEACSGAHHWSRKLIDRGFDARIIPGSSVAPYRIQGRTGKNDANDAAAVCEAASRPHMNFVPPKTLAQQGMLCVHRLREGLKEERTACINRIRGLLAEFGVVLPQSPEILRRHLIDIVEDASNDIAGVARLVLQRAHEHWRELNAHIKWCDQRITDHQKLDEQVQRAAELMGVGSITASALVATVGDFRQFRNGAQFAAWLGLTPKQHSSGGKTSLGSITKRGSVYLRTLLIQGAKAIVLTRQYDNPIFLWAHKLRERIGWQRAVVALANKNARILWAVMTREKRYDAHHVSCIPLLAAVTAPALVSVA

SEQ ID NO: 349811 - protein, 386 aa, unidentified
MATPVRTRSEQAIPSQPTLFLAFELGKNTWKLGFTIGMAQQPRERTIPAGDVARLQQEVTQAKQRFGLPEDARVVSCYEAGRDGFWLHRSLVAQGVQNSVIDSASIEVNRRQRRAKTDRLDVRKLLTMLLRHSAGEQKVWSVVRVPSVDEEDRRQLHRELTTAKQDRTRVINRIQGLLAGHGVQLILQGDVDAQLDQVQQWDGSPLPSALRTRLKRAWQQVGFLTAHIQTLEAERRALIRRREDPVIDQVRQLFTLRGIGVNSAWLYVMEFFAWRDFQTPKQVGALAGLTPTPYQSGQARRELGIAKAGNRHIRAMAIEIAWAWRRFQPASALSQWYERRFGAGSARVRKLGIVALARKLLIALWRFLKTGVLPEGAVLKTAALGR

SEQ ID NO: 349812 - protein, 406 aa, unidentified
MKHVLAFDVSMGKSTMVIYNHYRQCEFEGEIAHTKSSFNWLKEKLLKITKLDGQAPEIVFEASGVYSSPLEHFFQTEGYSYHRISPLEANLQTASMRRHKTDQSDAHELAKSHFRVEREKTFQEESYYKQMRSLTRYYDELDGEITHLFSRMHAILQLSFPELERLFSKRSALFLNIVQLYPHPDEVLACSKTVIRNRLKANTRKNLSLARAEEKGIALLEAAKDSYPAITKEDVRCEQVRDYAKRISDLKEKKQQLVKQMVALSEGRIEYQVLLSFPGIGETTAVRLIGEIGDLRRFKNHKQLNAYVGIDIMRYQSGKTFYKDKINKRGNKKLRKILYYVIQTMITLRKKTNNHIVDYYDKLKTQPQGKPHKVASIACVNKFLKVAFHLITHNITYDYETASTCS

SEQ ID NO: 349813 - protein, 327 aa, unidentified
MEREYIGIDLHKAFFQACAISATAERRWEQRWPTTPLGITAFLTRCSASSHVAVEASSPTWAFVDRIVEQVGAVHVVDTRKTRIKAGYAAKTDRLDAQRLADALRRDSIVGIYYPPPAIRDLRELGRYRCHLARLQASLKQRIHALLLRQGVSTPKALFTQRGTRWLDALQLPGWAGSELRGLRHVLTDVRGQLVPILAAIRTVAATDPIARVLDQAPGFGPVFSVTLRAEIGTITRFPDGRHLASYAGLVPRVAQSGRRQWSGRITKVGSPWLRWTLVEAAIHQFRRPDAFGRWARRLAVKIGMLKARVAVARALCDEVFAAWPRA

SEQ ID NO: 349814 - protein, 395 aa, unidentified
MLYLGIDIGKNNHEAGLVDEDGAHRGKSLRFSNDQKGFSSLLRFLEQKVGENEDLCVGMEATGHYWLSLYSFLHGQGFRLHVINPLQSDSFRNFHIRQVKTDSVDCFLIADVIRFGKFSETRLADEDVLVLRNLARFRESLKDSCSDYKRQVVTVLDQVFPEYDSLFSDVFGEGSKAFLKTCGTPEQALDLDTKSLAALLRKASRGRHGAEKADEIKSLAGRSVGMTLCKDAFAFQLKILIEQIEFTERQICEIDKKLAAQLKKLNPVILSIPGVGPATGAIILGEIGDINRFENPKKLVAFAGIDPTVSQSGNFSGTHNRFSKRGSPHLRRALWMSAVVAARFDPVFKAFYEKKRSEGKAYGTAIGAVARKLTYAVFAILKTNSPYEVRMNPEA

SEQ ID NO: 349815 - protein, 338 aa, unidentified
MNIVFLGIDLAKNVFQLCGLNQAGKPVYTKRTGRKELLQTLANIPACLIGIEASTGAFYWQREFEKLGHKVKVISPQYVKPFVRGQKNDGNDAQAIAVALMQPTMQFVPPKSPEQQDIQALHRARQRIVNHRTATVCQIRGLLLDRGIPIGSAVSRARRAIPLIPEDAENGLSSRMRRTIAELYDLFNDLGRRIHFFDKEIETVFRQSEACQRIAKVKGIGPKTATAVVAAIGKGTEFKNGRHFAAWLGLVPRQHSSGDRQVLMNMTKKGDKHLRTLFIHGARAVVRVATNNNDGHMNQWVNQLKERRGFNKTTVAVANKNARIIWSMLRNDTGYQVV

SEQ ID NO: 349816 - protein, 460 aa, unidentified
MPTSQKPKKRQLDELACVYPNAAGLDIGSAEIVVAVPADRDAEPVRVFPTFTPDLHALVTWLQACGVDTVAMESTGVFWIPIYELLEAAGITPFLVNARHVKTVPGRKTDWNDAQWLQRLHALGLLQASFRPDGEIRTLRTLVRYRAELVERRAPHINHMIQALKHMNIQLNLVLTDITGVSGLAMLRAIVAGEREPEQLARFRHSSCKHSEVEIVKALTGTWDDAQLFVLTQAVEIFDYYTEKIAVCDVKLEQQYQAMESRAEKDAPLPDLPAAKKDSKSKNAPSFNARAQIARVVGVDLVAVMGLSAVTVQTIISEVGTDMERFPTVKHFCSWLGLAPHNDISGGRVLRSRTMKVRNRANQAFRQAAQSVAQSNSSLGGYYRAMRARLGPKQAIVATAHKIARTVYHLLKTREPYQEESAAEYDRQRREREVKQLARRAQKLGFTLSSVPTQTTGSPP

SEQ ID NO: 349817 - protein, 348 aa, unidentified
MIIIGVDFHPEFQQIASVDSETGEFQERRLAHPAEAEKFYRALVGQKVRVGMEASGHARWFERLVAELQFELRIGDAAEIRTKRVRKQKTDRQDAQLILRLLLEDRFPQIWVPSWENRDLRQLLWHRHRLVQARTRIMNQLQAVALNEGLRCKKRLWREHGRQQLESFRLAPWATRRRRDLLDLLDRLTPTIAELSQAIEQEVEKCPAAQRLRTHPGVGSLTALAFVLIIGEVNRFRSGKQVASYLGLVPLEESSGNRRRLGHITKQGSSMMRFLLVEAAQVTVRSLPEWRSKYLHLVLRRGRKIAKVAMARRLAVQLFWMMRKEWNYQQLKKFGSHAGEPGNRHGVQ

SEQ ID NO: 349818 - protein, 448 aa, unidentified
MSAKQKQRLDVVNPYACGIDIGSRSHFVAIGQGKEDVYEFGVYTEDHRQLITFLTTHQIKTIAMESTGNYWQTLFTSLQVAGFDVILVCGNQTKNVKGRKTDVQDCQWIQKLHSLGLLSNSFLPSEFVAQLRIYSRQRQKYIRVQSRLINQMQRDLRLMNIRLEIALRDITGKSGMAIIEAILKGERDAKQLASLVDYRVKKSHEEIAKSLEGNWDEGYLFVLSQHYREYAANLLLVQECEVAIEQILKEKMTTNEIDVSEFKGHLKAKKKNKNTPSIDFQKYSYQYFGGIDLFAIEGINQNTVLTLISEVGNDIDKFPTAKSFASWLHLSPNQKVSGGRVLSNKTKRGANPLSQALKSSANVIGNMKSGFLNNFFKRINYKKGRKEAIASTARKLAVIIWNMLRNYQPYKPQNTEVVEEKVRIKKIKEIRKLISKYEIQQNEVVLFN

SEQ ID NO: 349819 - protein, 335 aa, unidentified
MNYRLFAGIDVSKLKIDVVFFLAENPDKQFHECFENSDEGCSKMVYWINQISGLLISDMFFCAEDTGLYTLPVCTFFDEQGGNLWIENALRLKRSLGLKRGKSDRADAAEIANYGFLHRRKAILFKLPSKTIIKLKHLLSCRKQLVKQQTALKNATGELEVFDKESADFTLDIRKSLITEYDSKINMLEEKLLACVKEDEILEKQYNLVKTVHGIGAQTAMFIVVLTQGFTLFENPRKFACYCGLAPFGNTSGTSLKGKPKVSHLANKRIKTLLTMCALNTIKKDNEFKRYYDRKIKEGKHHSSVLNVLRNKLISRAFAAVLKDRPYEKEVNLAA

SEQ ID NO: 349820 - protein, 326 aa, unidentified
MEHELHYIGIDTAKEKLDVDVLRPDGRHRTKKFANTTKGHDELVSWLKGHKIDHAHICIEATGTYMEPVAECLYDAGYIVSVINPALGKAFAQSEGLRNKTDTVDARMLAEFCRQKRPAAWEAPHPLERALRALVVRHQALTDMHTQELNRTETAREVQRPSIDAHLLWLEAELKRLEKQIKDLTDDDPDMKHRRKLLESIPGIGEKTSAVLLAYIGLKDRFAHARQFAAFAGLTPRRYESGSSVRGANRMSKAGHVSLRRALYMPAMVATSKTEWGRAFRDRLAANGKKGKVILGAMMRKLAQVAYGVLKSGVPFDASRHNPVAA

SEQ ID NO: 349821 - protein, 428 aa, unidentified
MNVEEITRIKEFRQIREEIRGSEKYLIVGIDVAKEKHHAFYGTSNGKTLKRKLIFDNSFSGIEMLMDIAYVLKTEHSLEKVVYGLEPTASYHKPLAEYLIKSGCNVVMVSGLAITKNRELLDGRWDKNDDKDAANVADLISQGKCQYYDYPSLEVRDLRGLLSLKRMLKKQEHRMKTRIRNNLIAQYFPEFDSNFAKGRFESLAVVKWCARPKEINYMEFDEFEELIAPSRRTRTQIARLKEIWEDANESIGCEAGDAIQFGAKIMVEELQNIRESINAVDEQIEKICSGFSEYQYLLSIPGFGPDVSSKVLGAIGNPLRFDNGKQVLKLAGYDLSASRSGKPSDFAIPRISKRGNAYLRYALYQAALIASTRNKYFMRYYASQLTGRQRERGIGTKMKVKLAAKMLIIAWTLMKNKEPFDPAYLNIE

SEQ ID NO: 349822 - protein, 315 aa, unidentified
MTQPPIFVGIDVSKAQLDVAQRPAGRFTVPNTEAGLTQLLAHLAAEPPTLIVLEATGGVELPLTGALAAAGLPVVVVNPRQIRDFAKATGQLAKTDALDAQVLAHFADVVRPEPRPLPDAQTQELAALVTRRRQLIDMLTAEKNRLASARLVVRKQLRAHITWLERALDQADRDLAEVLRQSPIWREKDELLRSVPGIGPVLATTLLANLPELGTLTHKQIAALVGVAPLNRESGTLRGTRTVWGGRAQVRAALYMAAIVAARFNPVIRAFYQRLCAAGKAKKVALVACMRKLLIIVNAMLKHRRSWNPTLVQHA

SEQ ID NO: 349823 - protein, 371 aa, unidentified
MKQTIRSFVGMDVHKATISISVAEDGRGGTVRFIGVIPNTPEAVNKIAKQLARHGELDFCYEASGCGYGIHRQLTGLGHKCTVAAPSLIPRKPGERIKTDRRDSEKLAILHRSGDLTPVWVPDTTHEALRDLVRARVDASMHLMRARQQLLAFLLRHGRSYTTGNHWTQRHRCWLAGQTFQEQAHGIVFQDYLETVWTAQDRRDALVQRISTMVATWSLGPLVEALRGLRGIDLVSAATFIASTGDLSRFESPRLLMGYLGLVPSEHSSGGTIRRGGITKTGNREARRMLIEAAWSYQYPARIAKEKAEILVRLPKNIRDIAWKAQTRLCTRYRSLIAKGKKSTVVVAAIARELAGFIWAIGREMRVPMTA

SEQ ID NO: 349824 - protein, 312 aa, unidentified
MSEATIGIDISKDHLDAHRLPDGATRQFANTRSGLTQLIRWIGSSGVARVVFEPTGRYHLELERRLGDAGLPLAKVNPRQAKRFAQALGVRAKTDRADAAMLARMGAALALEPQPVRPEILQDLSDLMAARHALIKDRTAAKNRAKGLRLPLLARLNRLRLARIEAELAAIDKAILEIIEANPDLRSRHEILVSIAGISEVTAAAILTMMPELGQLDRKQVASLAGLAPVTRQSGRWTGKAFIQGGRAALRQALYMPAVVACRFNPDLKAKYDQLIAAGKPPKLAITAIMRKLIVLANALIRDNRHWQASRA

SEQ ID NO: 349825 - protein, 313 aa, unidentified
MKKTICGVDVSKAKLDVCIEPGHRFVSFDNDTAGIAKLAAFCREHAVELVVMEASGGYERRAFVELWEKGISCALTNPRNVRRYAEAMGILEKTDRIDSSVIARFADAKNLAPTPLPSKAQQRLKALVARLRQVTGDLTVQKQRRASLLDNPEVLASLDEVIALLKRQSRKLEGEIASMIDDDPLWAKLAETWREVKGVAGRTVARLHAEVPEIGTLSNKAIAKLVGLAPIADDSGKRKGKRPTRGGRAGVRSILFLVAATAARYDKSLKHFRDRMVAAGKEKMVIRIALARKLLVRLNAKARDARTAYTNAT

SEQ ID NO: 349826 - protein, 337 aa, unidentified
MLTIGLDAHQRLYVICILDQNGVRVKEAKIRGYWPKLLEELGKLREPFQICFEASCGYGHLYDQLRAVSERVVVAHPGLLRLIFRSKRKNDRVDAAKLAKLLFLDEVPPVYVPSMDVRGWRQLIEFRHRTVSKRTRVKNSIRTLLRSHGVEMPPRHRLWTNKGVTWMSELDLPTSHSTLQRDLLVDELESCNRRLTRIERELATIADGHPAVTLLRTIPGVGIRTAEAVTAYLDDPRRFSHNRAVGSYVGLVPSQDQSAGVNRLGRITRQGPATVRKLLVEAAWQGVRRSPRLKQRFEAYQRQDPKRKKIALVATAHHLVRCMHAMMLTGEAWREAA

SEQ ID NO: 349827 - protein, 342 aa, unidentified
MRFDTNHPPFYGGIDLHARSLYVCIVNHEGDMLLHRNMKAAPEPFLKAVVPYRDRLVVAVECIFTWYWLADLCAAEGIACVLGHALYMKAIHGGKAKNDKIDSQKIAALLRGGLLPQAYGYPVAMRAPRDLLRRRANLMRKRAELLAHVHHTNRNSQYNLPAIGKKIAYKANRAGIAERFDDAAVQKTIEVDLALSTYEDELLRDLELSILTTATHHDANTLYLWQTVPGIGKILSLVLLYESHDIDCFPRVQDFASYCRLIKCAQESAGTHLGTSGKQIGNAHRKWAFSEAAGLCLRNNPPGQKYLARVEKKHDKGKALTLLAHKLARAVSYMLKRKTAFD

SEQ ID NO: 349828 - protein, 450 aa, unidentified
MNSIRYIGLDVHRESVRACIRSSEDQVVFERTMDCTREALESFGHEHLEKQDVLALETTFHSWAIADVLEPFVSRVVVSNPQATKAIAHSKVKTDKVDARVISELLRIDYLPEVWRPDPASRELRSLCARRATLVSDSVRLKNRIHGVLARNLVPKPKGEIFDAKGMRRLAALDMPESSKRQIQSDLRLLTLTQAELAEHDRILVQSAWSDPRVKLLITMPGVDVTVALAILAALGNIDRFQDGDRLAAYLGLVPSTRQSGEHCYHGPITKRGNGKARWLLIQAAQHLSKHPGPLGVFFRRLLHRKNRNVAVVATARKLAVIAWHMLTRNETYRYAQPEPTQNKLARLRVRATGAKKKTGPAKGGAKPVNYGTGRRTRTVPALPELYSSEHLPLAADPKKLKHAEIRVLEQMRVLDYVNSIQSACVQERRRGSKKTSEESQSASYEDGTI

SEQ ID NO: 349829 - protein, 326 aa, unidentified
MKKINENKFVGIDVSKKTFDVYCLDAKGQAVQRQLPQSSKGYCTLADYIGPGAVCVMEATSTYHLPLAQWLYDHGVRVVVENPLKIKRFSQMHLQRHKTDKADAKMIYEYGTIIVAKSIVLWRPQSARIQELQQCDSLSQRLNKELTAITNTHEALAQLSVVNAEVTRIVSSTIKQLKEALKQLDKQMQALIKEHYYENYKLLMSIPGVGSKTSVMLICQTDNFTKFENVKKFLSYIGMSPRTYESGTSVKGKGHITKVGNGRLRSLLYMCSWTAKRTNPQCVAVYEKMHTKGKPEKVIKVAIAHKLLRQVFGVIKHQQPFSMQLA

SEQ ID NO: 349830 - protein, 413 aa, unidentified
MSYRIAGIDVHKKMLAVVVADVSREGEWQFERRKFGTMPAELDRLHEWLTALEVKEVVMESTAQYWKPVWARLEREFHLELAQAQSNRGPRGRKSDFADAERLVRRYAADELTLSFVPGPEQRLWRRLSRGKQELAGEKVRLQNRLEALLEEMHIKLSSLVSDLLGVSGRKMLKAVAEGETDAVKLAALADVNLRATPDELRDAFRAAATLDGRYRMVLQQYLDRLALIERHMEELEKELAHSLKEHEGAVTRLAQVPGLGVDSAQQIIAEVGPKAERFPSAGQLSSWVGTCPGREESAEQSKSNRSPKGNRPMRRILNQAANAAVKSQGTVFEALYKRIKGRDPKQHNKAVWAVANHQSRVVWKILHDGVNYEERGNRTNIRAMKHRARRLARELRQLGYVVQPPPPQRAPA

SEQ ID NO: 349831 - protein, 356 aa, unidentified
MKRYAGQYEGQQYVGIDLHRRRSVVVRTTEAGELLEAVQITNSPLALAEVMTRAGERPEVVLEATYGWYWATDTLAECDAITHLAHPLGVKAFEYRRVKNDLRDACDLVDLLRMERLPEAWIAPPATRELRELVRHRAKLVSVRSRCKAQVHAVLAKCGVGVPMSDLFGVAGTDLLDRLELPAAYAARIASLRRVMDLLDFEIDVFAGLVHGRLARDPGYTAVQTIPGIGPVLGAVLVAEIGDIRRFPTPQKLTCWAGMTPTHRESDTTVHRGRITKQGSRLVRWAAVESVQRLPASTRLGAFRDMIAARRGHNIAVVAAARRQLEYVFYALRDHHVSTDLRTPATAGTASTALAS

SEQ ID NO: 349832 - protein, 436 aa, unidentified
MQALPVLDPKAAGIDVGSETLHVSIAGDTPKVFGTTTGQLHALRDWLTDQGVHSVAMEATGVYWLCAYEVLETAGLEVLVVNGKHVKNLPGRKTDLKDCQWIATLHAHGLLRSGFVPPEHIRRLQDYLRLRADHITMAASHVQHLQKALERMNVKLHDVISSVVGVSGLKVIRAILAGQRDPLTLLSLCDPQIQKKKAVAVKEALRGTWKAEHLFALKQALELWEFYQQKIGECDEQIERVLRELAGPEPQEGTPKAGGKPGGPNTPQIQNLHQMLVRLCGDKDATVLPGLADHTLLSLVGEVGTDLSRWKSEKHFTAWCGLPPGSKQSGKRRGNTARQRNRAGRLFCVMARSVGRSVDKALGGFYRRLKGRRGGLVANQALARKLAALFWRLMVHGQDYVEEGLKKYESKVAETEARWLRKLAKKHGLVLLPTPA

SEQ ID NO: 349833 - protein, 448 aa, unidentified
MVPPDAAAIDVGATMHMAAVRADRAPEPVRSFGTFTADLHRLVDWFTECGVETVVMESTSVYWIPIFELLDARGFNVFLVNARDAKPVPGRKTDVSDAQWLQRLHSFGLLRASFRPKGQIAELRAYVRQRERLLEYAASHIQHMQKALTEMNLQLHHVVTDITDITGATGLRIIRAILAGERDPEALACLRHYSCHSSAETIAKALTGSYRAEHLFALEQALALYDAYHEKASACDARIEAVLKELSFHRGHRHGSAPRVSRRRNRTDQANAPAFDVREALFALLGKDLTAIDGLGPYLSLKLIAECGDELSSWPSAKHFTSWLGLALSNKVSGGKMLSSRTRRSDGRAAALLRLAAVTVGRTDTALGAFYRRLSARIGKAKAVTATAPKIAVLFYNALRYGMDYVDPGASSYETRYRTRVVNNLHRRAKAFGFVLQPLEPKVDAAVS

SEQ ID NO: 349834 - protein, 412 aa, unidentified
MEVIHARCCGLDVHKNSVVACVLITELDGQVERHVRTFKTMTADLLALGDWLNGLGVTQVALESTGVYWRPVDFNVLEDDARTLLLVNPQHMRAVPGKKTDVRDSEWIADLLRHGLLRPSFIPPAPVRAIRELTRYRKTLVQQRSDEANRLQKTLEGANVKLASVASDVLGVSGRAMLAALVDGERDPDVLADLARGLLRAKLPQLRQALLGRVQPHHVALIRRILAHITFLEESIASVQMEIEECMPSFDEPLQLLLTIPGIGPVAAAAILGEIGTDMSRFPSAGHLASWAGLCPSNKESAGKRMKGPMNRGKVWLRAIMGEVAWASVKRRATYFGAQFHRLARRRGRNKAIVAVAHSLLVVIYHVLRTRQPYSELGIDYFNQLDAARIQRHHVRRLEQLGYTVTLTPLVA

SEQ ID NO: 349835 - protein, 316 aa, unidentified
MEKNIIGIDVSKKYFDSVINGKVLRFDNDSKGISKFVKSIPLGSHCAMESTSTYGYKLVYAVQKASSFAYVINPLKIKYFAKMGLSKTKTDALDASLITRYATLAIKDLVPYEFPSESLQEAKQILTSLDQLKKQRTALRNNLEALSCYPLASIDAIKSIKIVIAEMNNQIKTLEDKVSKLVCTDYADMVDNIKSIKGVGEATATLLVAKTNGFKGFESSSQVSSFFGCCPRVTESGSSVRGHRGISKIGHKELRTRLYLCALSAKKCNGPCKELYDRLVLEKGKPKKLALMAVANKLLRQIFAIAKSGQLYYNFS

SEQ ID NO: 349836 - protein, 409 aa, unidentified
MGKLFVGHDWAEDHHDVFIEDETGRKLAGGRLPEGVDGIARFHALLAGHVDDPGDVLIATETDRGLFVNTLVAAGYAVIAVNPMSTSRYRERHSTSGAKSDPGDAKVLADLARTDGHNHRRIAGDSELGEAIKVLARAHQSLIWTRQRQTNQLRSTLREFYPAALDAFDQLAGSDALAVLAIASTPTAGRHLSLSKIQSALRRGGRQRRVEQRAVEIQTALRSEQLVAPDLIADAMGATVAALVAVIGELNTQIDGLEAKLADRFEQHPDAKIIRSLPGLGMILGARVLGEFGDDPNRYVDAKSRKNYSGMSPITKASGKHLVVLARYARNKRLSDACYLWAFATLTASPGARAFYDEHRARGDTHNRALRALANRLVGILHGCLRSGTQYDEDLAWQHRQKEPKSIAA

SEQ ID NO: 349837 - protein, 357 aa, unidentified
MTIIAGIDMHVKNLVCEIGYGKEFPYKKTFSNDLSGHKLLFSYIDTFKKALNINDVLIGYEASGLGYVLYDRSIEMGYRCSVLAPTELLRSATGFKKKTDKKDASYIYETLRGHVLAGNKLCNIWIPDKEFREDRDLVRTWFDISEKITRVKIQIQTLLKKYGLKRPDGIESWSKNFIQWIACEKHHLGKSFQISMDSLFRQLDFLNDESKHIENEVKLLSQKDKYKRMCEALLDIKGVGLKTAMTFIMEMGEMKRFQNRRQVGAYIGLAPSSFESGDSSDRKGRITRNGPYRLRSILNQAVWVHLRYNGEEKEYYDRIVSKNPKRKKKAVVACMRRLAIKMWHIASVADNESIKAA

SEQ ID NO: 349838 - protein, 333 aa, unidentified
MNKFKHFLGVDVSKEYFDAVVILDRNKEKSIHSQFVNDYKGIKSLCKWLKEQGSTFENTLVCLEHTGMYGKLIIKYLMIEKFSLWVEMSLKIIRSIGVQRGKTDKVDAQRIAFYAMKNVEEAVIYNAPRMEISKMRNLLSLREKLVATKASLLRNVKELKAFDLEVARLSGKLQKSTIKGIDLDLKNIEKQLDKTINDDENISRIFTLVTSVIGIGKVTALFLICFTNEFTMYTTPRQLACYAGVVPFEHTSGKSIRSKPKVHYVANKKLKKQLHMCALSAITSDPELKNYFNRKVEEGKNKMLVINNVRNKLVHRICACVRENKMFEKRQVA

SEQ ID NO: 349839 - protein, 341 aa, unidentified
MQLAVLGIDLGKNKCSIVGLNSAGAVVLRRRLRREGVIEFTTKLKSCVVAMEACCGSHHLGRVLRAQGHEVRLMSPEYVRAYVKSQKNDDRDAEAIAEAATRPTMRFVELKNEEQLDMQTLHRARDRLVGERTALINQLRAVLFERGIIVAQGRRKLERQLTEMGTQVEALSQRMRMLIQDMRSQWHELDRRIAEFDKELADWARDDEAARRLRTIPGIGVLNATALVAAIGHGESFARGRDLAAWLGLVPRQVTTGGKPRLVGITKRGNKYLRKLLIHGARAALPTLLESPTPLGGWLRGLMARMHKNAAVVALANKLARIAWAVLRHGESFSIELSTTA

SEQ ID NO: 349840 - protein, 350 aa, unidentified
MENIFPCCAGLDVHKESVEACVRRIEPNGRWHQQTRHWGTMTRDLLAMADWMAAQGVTQVAMESTGVFWKPIYNILESRFTMLLVNARHLKQVPGRKSDVRDCQWIAQLLQYGLLKGSFIPPRSQRELRDLTRHRTQLVEEKTRTANRIHKVLQDTNIKLSSVATDVLGVSGRAMLEALITGEEDPVKLAHLAQRKLRSKIPELEKALEGHLTEHHRFMLQLLWKQLAQQEELIAELDRKIEEQTRPFAAEIDRLDAVPGVDRRVAEVVLAEVGADMKPFSAHENLASWAGMCPGNEESAGKRRRRRITPGNPWLSQPWRKPLGRRATPRIVTWPRSTAAWRVTAGGNAL

SEQ ID NO: 349841 - protein, 400 aa, unidentified
MRDDNPPLEIRVGIDVGCYNHSVAIGLSSGELVDQFDIAHRPEGFQQFFDHIEAHRQAQGCPVAVAMEGFNGHARPLDSLILAQGYRLFNINNLKLARFKEIFPAAAKTDEIDARKALELLQLRDYFPTAKGVLQQVVMCPEESAILKRLTRRRRRLVNERVRLLNGLQDDLHAVCPGLLEITSNVGNLWFLRFLTRVDSLPKLARLRRSTLLKIQRIGIKYAGIIQGWQKRAQFSPEVEWTSEMILEDAIRILDLHAKIKDLESKMETVATRSQIATLLSSLPGFGSICSAELAGEIGTIERFTTENGLAVYLGMAPLDKSSGKHKGSKSPKHVNSRAKAGMMAAVDRHRTQVSQSQSYYLKKRAEGKGHNQTIRALGRHLCRVIFRMLKLGRPYEIRS

SEQ ID NO: 349842 - protein, 586 aa, unidentified
MSTTTGLDRIGVGIDTARYGHRVSFLRPDRQPAAKSLTVLENCAGYQALKERLVQLHENYPHAHFHVRIDAAGQYAVNLEQFLRGLDLPMTLSIGEPKRNKDYQKAHFPKRTTDDTESQAMARYAVVEQPHATPAPSAAMILLREVAGRLEAQVKQTTQATNRLHNLLARTFPELATLTDDIASGWVLHLLDKYPTADRIAQAHLASLEKIPHLSGDQARALHQAAGQSVASLRDSVAESLVSALVAQVRHCQNAEKAMRKLLTKAFADLPASPHVQVLTIPGIGEATAAALVAKIVDIKRFATPDQLVGYFGVFPEENTSGVDRHGNPLPPGTLSMSRKGNDLVRGYLWNAARAAIRHNPAIRVLYRRLRAKGTRGDVAMGHCMGKLLHLVFAVWKTNRPFDAKHFAWEEPGANPLPTTTAGDRDARATPAAHKDAVGHKRDVPAEKVVTTAGSHGEPAPAPVKLATPPNSVARPRVDFAFLRQQVTMKQVLEHLGLLGQLRGPGDQRRGPCPVHSHPADRDRTFSVHLGKNAFQCFQADCGVKGNVLDLWAAIHRLPLYDAALHLAETFQVPRNREEEPGKGTR

SEQ ID NO: 349843 - protein, 408 aa, unidentified
MSDAVQQRFIPRDYDIFMGLDVDKTSIAITWTDHQHLGASLRMPYAMENLLHYTRRHFPDQRVAFAYEAGPTGYGLYDHLTAQGYRCLVVAPSMVPTPPGQRVKTNRLDSQKLSTSLRGGQLRSIHVPSLSYRHLRHLTQLRDTYVHQATAFKYRIKALLLFEGLVFPAAPTASQWSRRVLAQLQTLPCAPAVRFKLDQLLASLRFAHDQVRQTTREIRRFCTADPELQRCIDYLMTVPGIGWIVGSQLLARIGDWRQLRHVRQLAAFLGVVASERSTGERVQRGAITRTGDARLRNKLIQSAWWAIRHDPELQAFYRRIYGRHPREQAARKAIVAVARKLTTRIYAVLHEQRAYEVRTTCLTQAATPRPRARLDAPQNLGPSGGPAGSLLETESPGRGDPTQDGGRI

SEQ ID NO: 349844 - protein, 351 aa, unidentified
MSHKTAATVAHTIGIDTGKNTLHLIGLDDKGTIVLREKIARGRIAARLANVPRCLIGIEAGMATHYVARELIALGHDVRQVPPAYAKPFRQGHKNDFRDAYAVAEAVQRPSTRCVPVKTDNQLDLQALHRVRSRLISDRTAVINQIRSFLLERGIPVRQGLRFLRHQLPNILATRTDVLSPRMVRIVENLVGDWSHLDERIENVTDEIEALARGDASCQQLMTVPGIGPIIASAMVAAIGNGIAFARGRDFAAWLGLVPKQMSTGDRTILGRITKRGNRYLRTLFMQGARVILLRPVNWVKHSFGLWLKAAAQRLHHNVLATALANKLARIAWTVLAQGRSYEARVEPKVA

SEQ ID NO: 349845 - protein, 355 aa, unidentified
MNQEKYIGMDVHQATISVAVMDASGKLIMECLLETKAATIVEFIQGLQGTLSLTFEEGTLAAWLHDLLKPHVNRLVVCDPRKAALLKEGNKSDRIDARKLAEMLRTNQLKPVYHQEHGIRTLKELGRSYLTITKDVTRSMNRIKALYRSWAIPCAGTGVYAPRHRAEWLAKLVEPGVRVRGEHLYQQLDSLQPLRLQARGELLRESSQHPAVKLLRQIPSIGPIRAALLVALLQTPHRFRTKRQLWAYSGFAVETHDSGEYRVVRGKLQRNRERITVRGLNGNHNKDVKSLFKSAAISASTRPGPLQDFYVALVGKGIRPTMARLTLARKIAAITLTMWKKGVSFDPKQLHRQEA

SEQ ID NO: 349846 - protein, 377 aa, unidentified
MKRIKFVGLDVHAETIAVAVAEQDGEVRSLGVIPNREESVRKLVKKLGPVEQLRFCYEAGPTGYALYWQVVKLGASCEVVAPTLVPVKAGDRVKTDRRDSLKLARNYRSNELTAVWVPDAEHEALRDLVRAREAAKKDQLRARHRLGKFLLRHGRRAPLGVRSWTIKYLEWVKRDVHFAARAQEVTLLDYLHEVEHAAARVARLEGAIEEAVKLAPPAMRAVIQGLQALRGVARISAVTIVAELGEITRFGNARQLMAYGGIVASEDSSGERTRRGGITKTGNAHVRRVVVEAAWAYRHRPGIGVTLRKRQEGVSEEVKEIAWKAQHRLHAKYGKLMAKGKNKGVVVTAVARELLGFLWAIGVHVEKQQKNSLQEVA

SEQ ID NO: 349847 - protein, 405 aa, unidentified
MTVMIGVDPHKGSHTAVVIGPGEEPLGELRVESSPGQAEDLLTWAAQWPERTWAVEGAAGLGRLLAQQLVAAGELVLDVQPKLAARVRLLQAGDTGKSDPHDAQSVAVAALRSRACRPVAAEGHTVVLKIWARRHRDLARARNQVACRLHAVLCELVPGGVRKQITAGQAASVLERVTLSGPIGAARRELAAQFLEDLRRIDGQLREANKKLAAAVRASGTTVTEVFGVGPVNAGTIIGDVTDVNRFPTRDHFAAYNGTAPTEVSSGGRKVYRLSLRGNRRINHAIHMAAVTQIRHSHSDGRAYYEKKIAGGKTHKEALRCLKRKISDAIYARLRADARMAARPVGEGPGGQTGNGSDSSAAGSHPEHRLFGQATPGPATTLRPPARPARQQTRTRRLKDLEKAR

SEQ ID NO: 349848 - protein, 401 aa, unidentified
MQETQQHDAVDVFIGVDVGKGQHHAVALDRNGKRLYNKALPNDEVKLRALITELKTHGRLLFVVDQPSTIGALPVAVARAEGIFVAYLPGLAMRRIADLHAGEAKTDARDAAIIAEAARSMPHTLRSLRLADEQLAELTMLCGFDDDLAAQVTQTSNRIRGLLTQIHPALERVLGPRLDHPAVLDLLERYPSPAALAATSEKTLANRLTKLAPRMGKGLAAEIVQALSEQAVTVPGTQAATIVMPRLAQQLAALRKQRDEIAAEVERLVLAHPLWPVLTSMPGVGVRTAARLLTEVAHKAFASAAHLAAYAGLAPVTRRSGSSIRGEHPPRRGNKVLKRALFLSAFAALRDPISRAYYARKIQQGKRHNKALIALARRRCAVLFAMLRDGTIYQPKSAPNA

SEQ ID NO: 349849 - protein, 339 aa, unidentified
MELYAGIDLHSNNNFLGISDKDGRHHYGKRLPNDGEVVLSALEPYRDDLVGIVIESTFNWYWLVDLLMDNGYLVHLANPAGIQKDKGIKHSDDKHDAFWLAQLLRFGILAEGYIYPKELRPVRDLLRKRGHLMRLRTSLINSLQGIISRNCGCHLTGQKIKQVRTNHIAPLLESQKDLAMSGAVSKDCIDFFSKKIREIELSVEGRVELLKPYAGLQTVPGIGRIIALTVMLETGDIGRFDQVGNYSSYCRKVPTAWTSNGKKKGHGNSKNGNKYLAWAFSEAAEFFRRHDQSARSFYNRKAAKTNFMVAHAALAHKLCRAAYFIIRDGVDYDPEKPFS

SEQ ID NO: 349850 - protein, 407 aa, unidentified
MNTHKAVLGLDTAQAGVSYQFNDTNNNPLARGKAAASQAGIDRLNAERKLLKLEWSELLVCVEATGIWHLHWSEKLHRLGARVYVLNPLIAKRTSSLPNAIRDNKSDPVDAVSLAELLVREHQRLERFRYQGMEKRFTLQRQQSARQALRANLTNLKKSLGTQRSLVFPELHELGFSDKTERAVMMAAPTPARVLALSEAELKGLAGKNAARLRESAAQSFADPALSEAAAGALQMLAQTVGQLEKDLEAFDESIEQEAQKCFGSAMLEAARQVPGFGQRTTVMILASISPGLLEAPMSRRKKANKIQAQCGCEPRLRQSGKNAGTLRLSKRGSSYGRTALYQAAICAIKNDPGLKCDYKAKRMRGKPHKVAIYDIGRRLIRRMVAHLSMLPQTQPPSNLSQPACSP

SEQ ID NO: 349851 - protein, 461 aa, unidentified
MRAKKPTGPQKGSVQKKVDWKALEIVHPDAAGIDVGGSEHWVAVSPDRDPEPVRRFGCFTADLREMGQWLVQKGVRSVALQSTGVYWMPVFEVLEQHGLEVYLVNAQHTKNVPGRKSDVQECQWLLKLHAFGLLNNSFQPTDEIRIARTLWRQRGNLVAEASSVIQRMQKVLTEMNVQLSNVLSDLSGVSGMKIIGAILHGERDPWTLAALVEPGVKATPEDIAKSLEGNWREELLFVLRQHVELYRIYQEKISDCDLQLRKHVESLSSKRDLKTQPIGPKPKGKKGSRNAPQFDLRTELYRITGIDWTQINGIDVLTAQTVIAEAGADLSAFPSEKQFASWLGLCPTNEQSGGKILNRRTRKVVNRATVAFRNAALTLLRSQSYLGAQYRRLRTRLGAPKAITAMARKLACLFYRLIKHGQPYVDKGTEYYEGRYREQQIRSLTKRAQKLGLQLVIPTTA

SEQ ID NO: 349852 - protein, 310 aa, unidentified
MENIVVGIDISKDQLDIHALPSQASFCVARDAIGLEELVQRLLVLKPKLVVMEATGGFETIVASTLAAAGFPLAVVNPRWIRAYAQALGRLAKTDRIDSALIAAYGRDAKIEAQKVPDEAAQMLGELVARRRQIVETMGVERNRRRSLTRSKLIKGLDRILAALQKELSDLEQDIDQAIRGTTAWREKDELLQSVPSVGPRISSMLIAELPELGTLTRRKIAALVGVAPMSDDSGKHRGRRHIKGGRIQVRCALYMAALVASRRNPVIAAYYQRLIAAGKKPKEALTACMRKLLVILNAILRDHRPWQPT

SEQ ID NO: 349853 - protein, 453 aa, unidentified
MLDTTTFVGLDVHARSIKAVSLDVMTGEVRAATFGYDAGAVAEWVRSVDPGARCVYESGVTGFDLQKRLSGLGVDCVVGAVSKMIKPSADRRRKNDRNDAEFLARMLSVGNVVEVWVPDDECEAARDLTRALEDARDDLSRSKQRLSKFLLRHGLVFDERTPTGRRKGNWTRAHWSWIESIRFAEGADNDALAYYVDAVRRAAEEKARLEGLVGAEARKPRWRKRVDSLRCLKGVDTASAADLVFEAGEFSRFRNARSFAAWVGLTPSEHSSGESDRRGAITKAGNKHLRKTLVEAAWHYLTCSGAAEGPRQGPGPGPGRPEACRQGRAEAGREAGGAARARGPRQQGERRHGARARLLGVGGRPHGRGGVGGGPPHISQSPRKRFDPKPLRRTSGPFSASAQGATRVHRLSVRRRSLSRSNGLPSERSPRADIKLQRRASVRHAEVAADGLI

SEQ ID NO: 349854 - protein, 343 aa, unidentified
MQAVTTIGLDIAKSVFQVHGVDAQGTVIIRRQLKRRYVLSFFQKLPPCLVGIEACATSHYWSRELKALGHRVRLMPPAYVKPYVKRQKNDAADAEAICEAVGRPTMRFVETKTPEQQGCLALHRTRHLFIRQQTAIINAIRAHLAEFGIVAPVGRRGVDQLLAVVADVSDKRLPEVARACVAALGAHLQMLKAQVLEFDRMIRAWHRSNETSRRLDAIPGVGPALATALVASVADPRAFRSGRDFSAWIGLVPKQNSSGGKERLGNISKRGDRYLRGLFTAGALAVIRYAKIHGTTHRPWLTALLGRRPTKVAAIALANKIARMAWAMMARGECYREPVALAA

SEQ ID NO: 349855 - protein, 344 aa, unidentified
MDHFAGLDVSVKDTSVCIVDDTGKIVREVKVASEPEALLAVLTNPAYRFKRIGLEAGPLSQWLFSALAEAGLPVICVETRHMRAVLKAQINKTDRNDARGMAQMMRVGLYRPVHVKTLRSQKLRMLLTHRQLLLSKAIALENDLRGTLRNFGLKVGMVGKVKFEARIRELVENLPDLAVLVEPMLIVRRVLREQIVILHRRLLAIVRDDEVCQRLMTTPGVGPVVSLTYRATVDIPARFRKSKSVGAVFGLTCAKYQSGEVDWSGRISRCGDEMMRVMLYEAAQSMMRSKKWSWLKAWAVQIARRRGMKKAIVALARRLAVIMHRIWVDGTEFRWTREHAAAAA

SEQ ID NO: 349856 - protein, 422 aa, unidentified
MHLAPSLRAQRRFHEEWIAPESEARLGLQKPPNLETTMLLDHLSDGPTAIRTQFGAIFVSLELSRSTWLVTSLSPGQGEKMSRHSVEADDVAELMKLFADLRRKAEVRTGLSYPIITIQEAGLDGFWLHRVLQREGIESHVVDPASIATPRRRRRAKTDRLDGETLLRALLAYKRGEPRVCAMVVAPSVEEEDRRRPCRERRTLIAERIEHVNRIKGLLFAQGISDYAPLRRDRRARLKALRTGDGRELPSHLKAQISRELDRLELLLTQIEAVEAEQDALLAEGKQPATPDPASMLLALKGMGANFAAVLWSEAFYRQFANRRQVAAYAGLAATPWRSGRIEREQGVSKAGNPRLRTTMIQLAWLWVRHQPQSALAIWFKAHSQRGRKRTIVALARKLLVALWKHVTQGVVIEGAVMKSAA

SEQ ID NO: 349857 - protein, 438 aa, unidentified
MSNKVIFNLDELFISVGIDVGADFSWMSIALPNQQFVGKPYKILHNSIDSLTTAVSKIKEAEELYSLESRIFLESTGIYHYPLFCYLRDKGFNCSVINPIITKNSTNINIRKVHNDRFDSKKAALVGLKPDLKVSLMPSDLALNCRNLCREYYDLMDNRSAYVNKLQGELRMAFPQYLGIFSKVTINTSLTLLETYTSPSAFLEADKQEIIDLIKSTARFGLTYAQNKYNAIIQAATDANQFGYIIESNIKRIRLYISFIRKYDEEINSILESLHELVDANEDSDFVKQIHLIETFKGAGFLSAVSIMGEIGDFSAFSKPKQLFAYFGLDPAVKQSGKFEGTKVQMSKRGSAIARRVIHTLTLQSISISRNREAKNPVLREYYLKKCDSKPKLVAMGAVSHKVCNMIFAILRDNKPFKIIAPQEHIKQYNSAKCDIAA

SEQ ID NO: 349858 - protein, 421 aa, unidentified
MSVTDEPREVDPPRPTPARPTAGIDWADRDHAISVLDPDGTQIARYTLTHTSAGLRELTRRLLDHGVVEVGIERPDGPVVEHLRTAGLVVYVIPPGQLKNLRSRYQSAGNKDDRFDAYVLADTVRTDRRRLRPLITDTPATTALRHTVRARRDLVAHRVAVANQLRAHLQLCLPGVVGLFAHIDSQISLQFLHRFPTQDHADRLTPRRLGTWLASVGYSGRTDPAVLHSRLTSAPRGHTGPDATVSAAVTTAYIAVLATLNTQIAELATQISTQLEHHPDAAIFTSLPRSGRVRAARLLAEIGDARIRFPTADSLACLAGVAPSTRQSGKVKAVAFRWGADRELRDAICDFAADSRHANPWAADLYQRARARNHDHPHAVRVLARAWVGVIWACWTTHNPYQPDRHRALQRVLNQDQPTAA

SEQ ID NO: 349859 - protein, 357 aa, unidentified
MPSVTRPEALGKIIVGVDTHKHVHVAVAIDSLGVRIGDLVVPVDTGGYRQLAEWAEDLGQVDAFGIEGTGSYGAGLTSYLRRQGHRIVEVNRGDRRSRRANGKSDTVDAEAAARAVLNGTATAIPKAADGACEMIRQIKVARDTAVKARTSAIITLKALVVNAPASLRESLDGLADKALIDRCAAFRPGEINNPTSSAKHALRATARRWLDLTEEIRGHDTILDELTAATSPTLREGFGIGPDTAAEMLIVFGDNPDRIRSEAAFAKLCGACPVPASSGITNRHRLYWGGHRQANAAIYRTVIVRMRHHQPTIDYVTRRTTEGLSKRDIIRCLKRFVAREIYQRVMTDHRNRQRAAA

SEQ ID NO: 349860 - protein, 356 aa, unidentified
MKYVKGIEKFVENKTVFCGIDVHKEHWNLCFFSDGMVLERILLPVQLNRLIGHTARNYQGASSVRFVYEAGFSGFYLYRQLTKAGYDCMITPPNRVPSLSDKVKTDKRDALKLAQMYAAGLLKAVFVPPVSVESDRQLLRLRNSSQRKLSRVKTQINSHLYLNGHFWSKDMGNRWTKKYIAWLEGLQFQEPYLRFILEEYLTEYHFYRRQIAELTRHIREVSRKEAYRVHFTRLIACKGIGLITAMTFLLELWDLTRFSSAGEFSSYLGLTPSQHSSGQHVRLGHITREGNAHIRRVLVESAWTVIRHDPILKEKYDRIRAKGTNGKKAIVAVARSLAIRLRRCLLDETPYQIDVC

SEQ ID NO: 349861 - protein, 315 aa, unidentified
MNALLPYVGIDVSKTHLDGEVIPAGEMFHHANTPAGIAKIVTRLATLAPDRIVLEATGGYEAALADALWAAGLPVVVMNPRCIRQFAQSIGALAKTDGIDAHVLAQYAFCIKPTVRPLPSGEQRELQALLSRRHQLVTMRVMEVNRQQQAPKFLQASHRTLIDGIQAEIKAIDRQIEERIRQNAEWRRKAEWLDEIRGIGFTTAALLVGEMPEIGTLNRGQTAKLAGLAPLNNDSGRHKGERHIWGGRAPVRAGLYMATLSAIQWNPTIKAFYERLLSKGKLKMVALTACMRKLLLICNAVVRQRTPWVGDPQTA

SEQ ID NO: 349862 - protein, 339 aa, unidentified
MKYTPVGVDIAKHLIQIHFIDEHSGEVVDRQLRSKDFLMFFSNREPCLVGMEACGGSQHWARELEKLGHKVRLMQGRFVKAFVMGNKNDVMDARAIWMAVQQPGKTIAVKTEEQQSVLVLHRSRRQLVKFRTAQINALHGTLLEFGETIHKGRTAMDRELPAALDRLKTTLPPYLIAVLEDQYRRLSELDKLIDGLEKQLHSVAKQNEACRRLMEIPGVGPLIATAAVATMGEASAFKSGREFAAYIGLVPKQTGSGGKVRLLGISKRGDTYLRTLFIHGARAASMCTKEPGPWITELRKRRPTAVAIVAMANKLARTVWAITAHDRRYEKNHTSIRPY

SEQ ID NO: 349863 - protein, 508 aa, unidentified
MRTIGLDLATKGQHRASLGDTRGKVIRRNLKVKTRAVALDHLFNQARGDEGANQPLRLMLEPTGMSWHAVCVYARKQNVEPYLVATPKVHDLRAYYKKHYKTDQVDSIVLVKIPFVDEETIHPVRLPNADQLAGQRFFKQLDRLTGLATACKNRIREADRAFWLGQLEEIFSATDYLGPLGRAFRRRFYNPWQVQQAGAAGLQAFFNRVASGQYNLELPQKLWEAAQEVITIYSDTTGQSSPYLDFDALQEELSVELDLLEVYECQIGQAVERVRRLSTKLHPSHSLQTIPGVGFMTEAAVVFCVVDPERFSQRTFRGFHGLIPGAKQSSQAESKGVKITKAGPALMKKYLFLAASVARQWDVDLARIYYEQMVHKGNHHNQAICTCATHLGDRILTILKEDRPYQRRDVAGNPITSSQARTIIQTNYTVPEEVRRRKTRQARKEPQERAANKKKRESRPRHTRLAEPPQLGADSPSPPAKSLYLPDDPLSTVPETQSDALEKLGSDP

SEQ ID NO: 349864 - protein, 341 aa, unidentified
MEKILLVLGIDISKDDFHVCAKEKGVDSKVKIRGSRSFSNDAKGFTEFALWVSKREKEDFAVRYIMEATGTYYENLAYYLYEAGNNVSVVLANKIKHFAKSLNVKTKTDKVDSAIIAEIGIERELAAWKPMSLKYKELRDLCREMLSLKREKTRAMCQHHAMNYSHEKTASVLMIKSAQIEFYRQTILQIESEIERIVDADIELKQRIEKIKKVKGLGLITIIIVLCETNGFLLFSNIRQVVSYAGLDIEMKESGKYKGKTKISKKGNARIRQSLYMPALCAATYNEKIKELNERINERNPQIKKKGVVAGMRKLLILIFVLWKKNEEYDPHHEWQKNDIG

SEQ ID NO: 349865 - protein, 313 aa, unidentified
MKHENKGINIGIDVGKFQLDIFIWERDRHFTVENNEQGIREAIKILNRYKVQCIAMEATGRYEMAFASAAFEKDLPLAIVRPVLIRQFARAADQLAKTDKIDAKIIARFAAVMEPRITKNRSENLQLIKDLVVRRRQLIQIRTQETNRSKVMGKHMERSCNRVLKALEKEIQWVEDRLSKSVEAEPSWLERKELLESVPGVGKALIWTLLSEMPELGTLNNKQISALAGLAPINRDSGKSQGKRRIQGGRYSVRTTLYMATLSATQCNPIIGGFYRHLVKQGKHKKVALTAAMRKFLTILNAMIRDGQEWSYE

SEQ ID NO: 349866 - protein, 315 aa, unidentified
MAMAISVVKPIVGVDVAKNELVIYQAERDLLETITNDKAAIKKWLKALPTPVDLAIESTNIYHLEFADLAHEAGCTIYMVGGYELSHYRKGVKIRAKTDALDAKLLARYLKNEYEELHPWIPPSPLYRRLLSLFRRRAALVQARVGLVQSWANEPLLKTAFAEQLASMRRLETLVEKMINDHLNEAGLLAQLKRCMKVEGIGFLTGARLIAAFQRGDFRNADAFIAFLGMDLRVSKSGQKDGRRSLTKRGDPEARRLLHNAAMSASRTPAWKGFYEEQRARGFSTTQALVILARKLARVVFALLKGQSEYQAKTG

SEQ ID NO: 349867 - protein, 404 aa, unidentified
MSRDVFVGLDWATRAHEVCVIDSRGKPLDGKGFAHDREGLAQLLRWLARYGRRLRIAIERPSGLIVDALVEAGHQVFPIHPNAVKASRPRYRSHGGKSDASDAYILADLLRTDGHRFQALSPQSDSIRALRSLVRSRDDLVHTRVALGNQLTSALEAFWPGATCIFADITSPIALAFLARYPSPAAAARLNEARLQRFCRSQHYSGRRSAAELLARLHAAAEGLAGPLAVDASAQVVASMVAVLQPLVDQIGVLTRRIERFMDSLPDGQIIMSFPRAGHVCAAQILAELGDVRERFPSIERLAAEAGAVPVTYESGKARSVAFRWACNHRLRQAIMCLADNSRHANLWARGIYTAARQRGCDHPHAIRILARAWLRVIWRAWFDRKLYNPELHLGAVKLADQGG

SEQ ID NO: 349868 - protein, 425 aa, unidentified
MSSSDVLSSPLDASGFASVVGIDVGSQACVYTVLQPDKRIIVKPTEVANRDTGFVQVHASLSHLGVPPQRILIGLEATSRSSENWYQFLAAQGYVLCLLHPRQTHQFAQQRGLRAKTDRLDAATIARVLLSGEARPGSVPDELIATYRELERLHSQLTDDGARYQKQIQALLVVLFPEFVQVFADPCRPTALALLKGYPSARALVKAGVEAVAATLREVAPRRYGRKTAQQLVALATQSSASGLATDARALSLKILCDQLQHTLANLAQVEHELDQVLDRDTGATGLKSTPEFGRNTVAVLRAELGDVTRFQRVDQVVAYAGLDLEVKQSGKWKGEVKLSKRGSGRLRRVLSLAALRSICLPASAFGAYYQRLVARGLKARDALTAVMRKMLIVAYHLLRSNETYDPTKVCAVAGPPPHTPSSGS

SEQ ID NO: 349869 - protein, 344 aa, unidentified
MRIAVLGIDLGKNVCSMVGLDGSGTVVLRRRARRDLLAEFVGKLPACIVAMEACCGAHHLGRLFAAQGHDARLMSPEYVRPYVKAQKNDDRDAEGIAEAATRPTMRFVEIKTEAQLDMQTLHRSRDRLVAERTALINQLRAVLLERGIVVPQGKRKLEHYLAALMQEQECRLLSARMRILVADMQTQWQELDRRIAAFEAEFVSFAKESDDARRLMTIPGVGVMTATALIAAIGKAETFKHGRDLAAWLGLVPRQSTTGGKPRLMGISKRGSKYLRKLLIHGARAALPHVAERETALGRWVKGLLARVHPNVAVVALANKLARICWALLRHGQHFAAKGVPLAT

SEQ ID NO: 349870 - protein, 344 aa, unidentified
MSKHAVRGGDVARLLERFAQLRKKALARTGKVFPFVVIQEAGLDGFWIDRVLRKEGIESHVVDPASITTSRRRRRAKTDGIDGEALVRALLAHKRGEPRVCAMVKAPTPEEEDRRRLCRERKVLIGERVRHVNRVKGLLFSQGISGYQPLRHDRRERLDTLQTGDGRLLPDHLKAQVRRELDRLELLLEQIKAVEAERDVLLAVQQGAAPAPAAMLLNIKGIGPEFAAILWSEGLFRHFDNRRQVASYAGLAPTPWQSGSVDREQGVSKAGNPRLRTTLIQLAWLWLRNQPQSALALWFKERVNRNGGRLKKTTIVALARKLLVALWKYVTAGVVIEGAIVKSA

SEQ ID NO: 349871 - protein, 343 aa, unidentified
MQAITTVGLDIAKSIFQVHGIDAEGNVLVRRRLKRRYVLAFFQKLSPCLVGIEACASSHHWSRELQALGHRVRLMPPAYVKPYVKRQKNDATDAEAICEAVSRPNMRFVETKTPEQQSCLMLHRTRHLFIRQQTAVINSIRAHLAEFGIVAPVGRHGVDQLLAVVADTSDKRLPEVTRSCVAALGAHLQMLKAQILQFDRLIRVWHRSSEVSKRLDAIPGVGPVLATALVASVTDPKAFRSGRDLSAWIGLVPKQNSSGGKDKLGNISKRGDRYLRSLFTTGALAVIRYAKIHGTTHRPWLTALLARRPTKVAAIALVNKLARMAWAMMARGERYREPAALAA

SEQ ID NO: 349872 - protein, 411 aa, unidentified
MDKVYDKCCGIDVHKKLIVACFRRGNRQDKREFGATTREIFEMADWLKDNDCEMIAMESTGSYWKPIYNILESCELKAMVVNARHMKAVPGRKTDVKDSEWIADLLQHGLLTASYIPDKAQRELRELVSYRKSLVGERNRELNRLQKMLEGANIKISGTIADMNGKSARNILEHLLLGQKIDSAEYDILYQKQIIAHNLKATKEQIIDDLNGVMSDLQKKMMRILLNHLDELNAHIKELDDDIDNFMNSEEKTAAKVIQDIPGIGNTSAQAIISVIGTDMSRFPTHAHIASWTGLCPGNNESAHKRKTGKTRKGNTLLKSTMIVCAHTAVKNKSSYFSAQFARISAHRGKKRAYVAVAHSMIIAIYHILKDGVKFKDLGADYYNQFNKERKINAYLKKLKALGWEAPVVAV

SEQ ID NO: 349873 - protein, 338 aa, unidentified
MIVIGVDVHKQSLTAVAVDEAGRMLAETTVAAANEQLSEWAAGLAAERLWAIEDCRQLTRALERELILAGEQLVRVPPKLMAPERRAGRQRGKSDPIDALAVARAALREPRLSRPRSDEQPFRELKLLVDHRDDLVDERRRAQQRLRWHLHQLDPALLVPAKALDRPLHLDRVGRWLARRPPEVQVRVARELVVRCRQLTRTIVELDRELERRTAETAPALLELPGCGALTAAKLLAEIGPIDRFQTDAQLARHGGVAPLEASSGRVQRHRLDRGGNRQLNCALYRIAITQARYHPAARAYVERKQAEGKSRREAIRCLKRTLARVVFNTLKPSPALT

SEQ ID NO: 349874 - protein, 338 aa, unidentified
MTILMGLDQHRAQITAEWMDTSTGEISRGRVRPADRTGVRRFVERFRGQQLEVALEATTGWRFVVEELRAIDARVHLAEPAETAARRGTKKRPKSDRADAAHLRELLMIGRLPESWIPPEHILDLRARVRLRHTLSEQRGEWQQRIQSVLYHHGCPQRGDLMNKDGLAWLHAQPLPACAREQVTIALGMVDALDTQIAPLDSWLRAYARRQPGCKALLAHYGVGPLTSVTILAELGDPSRFSSSREAVRYAGLDITVHQSDQRRAPGHLSRQGPPALRWALFEAAQCARRRTSPDHQYYLEAAARLGGNRACLAVARKLLKRSYHTLRDLGEDALQPA

SEQ ID NO: 349875 - protein, 411 aa, unidentified
MDIVHPRCCGLDVHKKTVVACVLLSQPDGSVDRQVRTFTTMTEDLLALSDWLSSLRVSHVALESTGVYWRPVFNVLEDDERTLLLVNPQHMRAVPGKKTDVRDSEWLADLLRHGLLRASFIPPAPIRAVRELTRYRKTLVQMRADQANRLQKTLEGANIKLAAVAADVLGASGRAMLAALLAGERDPDVLADLARGRMRTKLPQLRQALVGRVQPHHLVLIAQILAHIDYLQEAIIQIQTEIERCLPSFEEALELLQTIPGIRAIAAAAILAEIGADMNRFPTAGHLASWAGLCPTNKESAGKRMQGPMNRGNVWLRSIMGEVAWASVKTRATYFYAQFHRVARRRGRNKAAMAVAHSLLVVVYHVLSTRKPYAELGVDYLDQLDAARMERHHVRRLEQLGYIVTLTPSAA

SEQ ID NO: 349876 - protein, 399 aa, unidentified
MMVLGADTHKRSHTIAAVSAATGEMRGEKTVAVGARGFAALLIWARGLDGGRVWALEDCRHVAGSFERFLIARGERVLRVPTKLMADSRRAARTRGKSDSIDAIAVARAALREGIDTLPAAQLDGPELDLRLLVDHRERLVRQRVGLNNTLQWHLHDLWPELELPGGALFSTKWSAKIGRRLARAEQTMRVRIARDELRRLRELTQSIRALEAEIAQLVARVAPQLLSEPGFGPLTAAKLVGEIAGAARFATDAKLARAAGLAPDPGQLGQDQPPPAGPRRQPPDQRRGPSHRHHPRPLPSRNPRLHRPQALRRQDEPRRRPLAQAPPRPPHLAPPATAHPHPEPDDHTHFFDIGAARAALTRPAPSDAEGPAFAFRRKDAGGLLATGVRSGPHVVAGP

SEQ ID NO: 349877 - protein, 358 aa, unidentified
MAKVSKLSTWCKMNPLTDREALYVGLDVHKKSIHAAWWLNGQLARTWVMPARVSKVLTMLEKVRVALKHVVYEAGPTGFGLARALQGAGLPVGVVAPGQTPRPAAADNKSDRLDSRKLAEYAAKGMLKFIGLPTEQEEADRQVLRTRDQLSSKRRRVQQQIKSFLLQHGLEEPAGLCRWSREAIAGLKAMTLGPELRGCLDLLLEELEHLTILQGKLKPALDRLAKSDRHQAAVAILTSHPGVGPVTALAFRMELYQPKRFDHSAQVAKLVGLAPRVRQSGDKRWEGPLLKMGRPELRRLLVEAAWAWVRSDPGGRTIYGRLLANTGRAQKAIVGVARRLAIHLWRMLVTGELYRPAT

SEQ ID NO: 349878 - protein, 330 aa, unidentified
MKFTHVIGMDMAKENYVLSIHNFKFTKEFENTPKAIRKMLKTLSKLLGVALTECLFCFEHTGIYSMAMMEALEKQGLHFSVISGLAIKKSLGITRGKSDRIDAEKIAEYAFLRQDKLRLFKFPSKALIQLEHLLSLRSVHVRNRASYQARMKEQFSVLKKTHYPELFQSQKRMIKHLTKEIEKVEFWIKQHTETDQEIRKCYKLLTTIIGVGSVTAWQMIVKTQCFKRFSDWRKFACYCGTAPFPNESGKMKKRAQISRIGDGDMKSLLTLAARSAMQHDNELKLFRERKLKQGKSKKNVTNAVRNKLLARMFSVVRRGTPYVELQKFAS

SEQ ID NO: 349879 - protein, 401 aa, unidentified
MNYVLVLDVAKGKSMFMLSSDIGEVLLEPTEYIHNKSYFEKIDSYINKLNIKDNLTVVMEATSIYHKSPERFFKENDYHVIVFNPLIGKEITNTIRKTKTDKQDCIKLTNLFWKGSIPDRNYTENEIYTKLNELSRQYYHLDEGLTRHKNRYKELLHLCFPEFELCFKDGKTYDLTALNFIKEFPHAYIIKDKRVDALAYNMANTNNRHLNYYKRKANIIKEYAFTSYPGVNKNSKDVDNLKQLANIIINLTEQKDEVKNQMIELAKETKNFECINSLFGIGELSASLIIAELKDITRFNNIKQINASCGLDPTIVQSGKSINYHGPISKRGNRYARKILFNCSRNIITLSAKCDKENSIYVYYQKKKQEGKHFYACLTACSTKLIRIIYALCMNNSQQQN

SEQ ID NO: 349880 - protein, 316 aa, unidentified
MEEFRCVGIDVSKDTFDVAMEPDSERETIEHDGAGIERAVKVLAAARADLIVLEATGGLEIGLASALAQAGLPVVVVNPRQVRDFAKSLGILAKTDRIDAKVIARFGAATRPEVRALPEEATRDLAELMRRRQAVLKMIVSEQNRLERSRSREVRRRITRHVRFLEKEIEDIDQELRKQIERSPIWMATTDLLQSVPGIGTTTAIVLLSLLPELGSLTRKQVAKLVGVAPLNNDSGKHHGSRHIRGGRACVRHKLYMATLAAIRWNPVIKAHYRHLVDQGKNKKVAIIACMRKLIVILNAMARDGHRWNPERAAEA

SEQ ID NO: 349881 - protein, 397 aa, unidentified
MSMLFVGIDVSKDYSSAQGLDPEGKKLFYLEFGMNGEGFSEFLKVLKTHGEDLSGVTVGMESTGCYHINLFAFLCSEGIACVVINPLLISNFARLSLRKTKTDKKDALTIAQFLLAHRSKLSQVSYCQNSQDLKDLARERESLAVMIAGLKNDVRRLLQMSFPELEHRCKLFTETMLRFLMKFPSARAITVAKTKEIVKALIHEEGKRKRVWIGAEEIMALAKRSVAPESVAKEWILSEKIETLLYLEQKKKRMTEVLIEACRSMRVDEFDIITSVDGISAITGATFLAELGDIHAFNSSKHIIAFAGLDPSIHQSGQYEGISRISKRGNRHLRRIVFLMTLCVVRSQNVFREYFLRRKEEGLPPKKAILATAHKLLRVLFAMLSQQTYFRKGVVEV

SEQ ID NO: 349882 - protein, 424 aa, unidentified
MDEIRFEQIVKVGCGIDVHKNLIVASISKGNDKVKTREFTAYTSSLTSLRDWCKQEGVTHIVIESTGVYWKPVFNILEEDFEIMLVNARHVKNVPGHKTDKKDSVWLSKLLLSGLLKGSFIPPRNIRDLRDLVRYRKKVIAQIAAEKNRIIKILEDANIKLSSVLTKVSGASGTNIVDKLIDGVTDIDELMKFYHGKIKVSRDEFRLALEGRMTAHHSLMLQIHKDSIADKNAQIARLDAEIDKATAGYQIEIDLLQTIPGVGKDSAIAIISETGVDMDRFPDEHHLSSLSGMSPGNNESGGKKKNAKTVKGNAHVQSTLVECAWGATRKKDGFLKRKYESLVGRRGKKKALVAVGHKIIVAVYHVIKKKEAYKEPKLHENPKKQNKRIRNYINRLKELGVEVGVLEDKIQEGRFFTELQKVRE

SEQ ID NO: 349883 - protein, 360 aa, unidentified
MNNQSLSNHQTIVGGVDTHKDLHFVAIVDAYDRVLSSNSFPTTRQGYKSMLDWMQSFGEVKRIGIECTGTYGVGLLRYLQQFDIEILEVTAPDKTIRRKRGKDDTIDAENAAHAAFAGIRTVTPKTRDGMVESLRVLKMCRKTAIAARRIALQMIQMNIISAPEAIRESLRTMTRMQLIRTLAAWRPDLSGYRDISTAYKIALKSLARRYLELHDEIADLDVMISVIVDELAPELITGKAIGYESAAQLLITIGDNPERIKSEASFAALCGVNPIPASSGKVNRHRLNRGGDRAANSALHIIAIGRLRIDARTKEYVEKRLTQGHTKLEALRCLKRYIAREVYYTLRKRNNLINSAQIAA

SEQ ID NO: 349884 - protein, 326 aa, unidentified
MTASQASDNSFIGIDVGGASFDVAWHRGDCAHYANRPDGVAALLAKLKAGPAISRIVVEPTGGYEKPLVKTLRRAGLPVEIVHTSRFSAYRVMVGARAKSDSSDARLLAAYAAAPDDVRGRKPHHVEVPEDAIREELAELASRRDQLKHMIHGETCRLTTVRSAKLRQAITAHLDVLKAEDAQTHQTMLALVRARVDLKKAQGLLKTIKGLGDKSALACIALVPELGHVGNRAASALVGVAPFTRQSGTITAPARIHGGRAAVRNILYMAAVSASRHNPVLRPFYQRLLAQGKKVKVALIAVLRRLVVFANAVLRSGQPWKGATAS

SEQ ID NO: 349885 - protein, 400 aa, unidentified
MYVGWDWGGKTHDVSVLDEQGRVVEHLAIGHHEAGFKHALERLRRHGRPEELPVAIERPSGLVVERLLSAGHPVIPIHPNAFNAARSRWGASRAKSDPGDSYRLADYLRTDGHRLRRLQPMDEATRKLQALVRMRDDHLEARIAASNQLEALLNAHWPGAVRIFETVASDIALYFLDRYPTPDAAARLGQARLAAFLKRYSYSGRRSPAQLLDRLRQAPTAPSGLDPEVLAELVRHQVGVLRTLLHTCKELEHAIEAVLPDHAKARILAHLPRIGDGVNLAQVLSEVGPILDASLDVDHAAAQCGASPVTRASGQSRGVHFRWAANNHARQALQIFADNSRHASPWAARLYAKHLAAGKRHPHAIRILMRSWLRVIWRCWHSDIPYDPARHGNERRLAGA

SEQ ID NO: 349886 - protein, 316 aa, unidentified
MSTTQVFVGIDVAQATLELAVRPTGEAWQVANDELAFGDLVERIRQLKPSLIVLEATGGIHLPVVAALAAAKLPVVAVNPRQARDFAKATGKLAKTDRIDARVLAHFAEAVRPEVRPLPDAATQELAILVARRRQLMEMRVAEQNRSRGTPARIRAQIREHVEWLNRQIGELDREIGQRLRSSPAWRERDDLYRSAPGVGPVLSATLLADLPELGTVAHKQIAALVGLAPLNQDSGKKRGQRVIWGGRAAVRAALYMATLVATRRNPVIRTFYQRLLAMHKPKKVALTACMHKLLRILNAMVRHQTSWSAPVPVGA

SEQ ID NO: 349887 - protein, 424 aa, unidentified
MRFFGVDVHLDFCEVAVAEGGRVSRVGRIASTPEAIREFAAGLDGGDQVVLEASCGAMMIARLLEEGPVGRVVVCNAAETRAISHARVKSDRFDAAMLAKLLSAGMLKAVWVPDEATSALRRRVARRAGLVRARTSVKNEVHAVLARCLLGRPPVSDLFGKQGRVWLAEQPLPEEEAETVRSCLRHIDFLTGEITGLDREIARQALAFPGFGRLLTIPGVDVGTAAAVIAAVGDITRFPTAGQLVAYLGLDPKVRQSGSEPARYGHISKRGDPQARSMLVEAAWISIRSPGPLKAFGERVRARRGAQIAAVAVARKLVVLCWHLLTKDQDYAFARPSLTRQKTRRLELLAGAPPLARRHGGLPVTPTSSQRAAERELQQQAELAYRRLIEDWRTTAPKGGAGATPGRASQKPSKGKAARQATSP

SEQ ID NO: 349888 - protein, 347 aa, unidentified
MSNIAFEQVIKVGCGADVHKETIVATIRRSDSDFETRTFSCYTSSLIELREWCQSCGVTHFAMESTGIYWKPVFNILEESDMKIILVNARHVKNVPGHKTDKKDSIWLSKLLLSGLLKGSFIPPEDIRELRDLVRYKKKVTEQRSSEKNRIIKTLEDCNIKLSSVLTNVDGAVGDRLIRDIIDGESDPEKLIKYYHGRIQKSRAEFKLALQGRLTPHHRLMLKMVKRSIEDKDKLIADLEKEIDQKVEKYNDQIIRLQTIDGVGRDSAITIISEVGVDMSQFPNEKHFSSWAGMSPGSNESGGKKKCQNNQRKHPLKVVFGRMWLGSDTEERREAEVEISKTDATAW

SEQ ID NO: 349889 - protein, 354 aa, unidentified
MKRTTKYVAFDVHQATTVASVREESGRVIARTVLPTDRGALTEFVRGMRGARHVTFEEGTQAQWLYDLLAPLVDRVVVCNRRGAPHQGNKGDQIDADQLSELLRRGALRAVYHGSADRATLKELTRTYRNLVEDATRVMLRLKALFRARGIPTAGTAVYHPRHRARWLAQLLEDGARFRAAALYAELDVLRQLRPKAKAVMVTEARRDPAWRVLRTIPFLGPVRVALLLATMQTPWRFRTKRHLWAYAGLAVVTRSSADYTLLAGAPVRRRRAPMTRGLNRNHNRVLKDVFKGAATAATARAGPLQAFYRSVVARGTREELARLTLTRKLAALTLRLWKKGERYDPTKLTMSAR

SEQ ID NO: 349890 - protein, 343 aa, unidentified
MEHFAGLDVSVNETSICIVDDTGKIVREVKVASEPEALLAVLKNNAYHFRRIGLEAGPLSQWLYSAFAEANLPVICVETRHMRAVLKAQINKTDRNDARGIAQMMRAGLYRPVHVKTLRSQKLRTLLTYRKLLQSKAIAIENDLRGTLRNFGLRVGMVGKLKFEARIQELVANLPDLAVLVEPLLVVRRVLREQLGILHRRLLVIVRDDEVCRRLMTVPGVGPVVALTYRVTVDVPARFRNSKAVGAVLGLTPSKYQSGEINRTGAISKCGDEMMRVMLYEAAQSMLVRSTKWSWLKAWAMQIARRRGMKKAIVALARRLAVIMHRIWVDGAEFRWSKNPVAA

SEQ ID NO: 349891 - protein, 471 aa, unidentified
MSCFRGAIQNRLRKEDFMKKQDSYDYYVGIDCAQNKHDFAMKNNQDKFLIKRGHFSNTLQGYEKFLNTVLSKCLNKDKILFGMEVTGIYGTNLYERLKSDGYHVVMISPDSVKNYRDYKRLNKTDKIDSGCIAELLLNGDAQIVHVAKNGYTDLKAYIRRRNALKVTCTQETNRFLAKVCLYFPDLLKVFPSGRATLKAIFSIYPTPYSIIEADFDELVSVLQKASKNKFGVDKANELIHAARNSIVVRKSISDGELYNIHSLIDSIDSLESEIRNLEKIIDSKAEEFPAYHVLLTLTGCGKITAATIVAEIGDISRFHKASQIVSLAGLYGDNSKSGSSVNKRGKISKKGSRYLRHAIYMVAEFARRNNPIFKAYFTRKKNGDRTKHTLAVNAVANKLCKVIYSLMKNQSTYIIQYRDLVKLSESTQNEFFQNAETDFSAKTRRKKYLYEDEYGELHEFVFKSIKTALIE

SEQ ID NO: 349892 - protein, 340 aa, unidentified
MPLYGGIDLHANNSVVVLLNEQDQVVYQKRLPNDLPTILEVLAPHHAEIKGLVVESTYNWYWLVDGLMEAGYRVHLANPAAMQQYSGLKYSDDHSDARWLAHMLRLGVLPEGYIYPKAARAVRDLLRKRAHWVRQHTANVLSVQNIMVRNTGARLSVKRIRELPKQELKRLLPEADQVLAITSSLAILDCLSQQIKALEKIVDQRLHHTPSYEQLLTVKGIGTILAQTIALETGDINRFPTVGNSASYCRCVDSTKISNGKRKGQGNVKNGNPYLGWAYMEAAQYAIRFNPSAQRFYQRKLAKSNNNTTLARKAVAHKLSRACYYVMRDLVPFETTKAFG

SEQ ID NO: 349893 - protein, 432 aa, unidentified
MSRFFYNPTVGIDVSADFSMVAILAPNGDIYRKAFKIYHNVDGFNHLVKEIKKVEKEFNMKTGIFMESTGVYHLSLFHFLKTKNLEAYVINPLVTNSNKNKDIRKVKNDKKDALAIAKIGKFENTKASSYFDVSIFTLKSLCRDYYKLVDTRSIFKKKLSADLRVVFPGYNSVFSNITGTTSIAILKCYQTPQSILDAPREDIVKILRESSKKNLIWCNNTYDKLIKAASNAKDIAISSIGLSTKIIINIGTIENFNKQIELILKEIENVLYSNDVSSKFKQNILLLMSIPGVGFISAVTILTEIGDFQGFLKPKQLVAYFGVDPSVNESGKFKSDKDKISKRGTRFGRRALYAIALASIRTKRTGEAINKILLDYYKNNLNGKKKKVALVAIMHKLVNYIFAVLRDQKEYEQRLPKIHHKMYLENSNNPAA

SEQ ID NO: 349894 - protein, 312 aa, unidentified
MESISVPVGADVSERKIDVSVAGGKPMSFSNRRTGLEALLRRLPEHAAVYMECTGAYGRLLVRLLRQAGVPVFQLDPLQVRRYAQATGRQGKTDALDARVLAWAGPLLRPVRSKSEEHEGLADVSRRIGSLKASRAADKRRLGQPGLHPCAAASLRRGIQSLDREIARLEREFASLVRSSSLARRYALLLSVPGVGPALARTLACELPGDLEGLDSGNVASYAGLAPMDRQSGNSRKPSRIRKGNRRLKAALYMPALACVRFQDWAKTLYRRLKGSGKTHAQAIAAVMRRLLVRAFAVLRHDRPWQNCQPGD

SEQ ID NO: 349895 - protein, 457 aa, unidentified
MTKRKSKAKRKSFQVPKLPAQLQHMNLNAAGIDIGSERHLVAVPEGRDPVSVREFGTFTTDLEALVAWLKQCGVTTVAMESTGVYWIPLFELLERRGFEVKLVDARHVKNVSGRKSDVLDCQWLQQLHTYGLLAGAFRPPDEVCVLRSYLRQREMLTQSASMHIQHMQKALQQMNLLLHNVVSDITGVTGMKIIKAILAGERNPRVLARNRDERCQHTAVTIAKSLVGNYREEHLFALRQAVDLYETYQAKIADCNQAIIKQVEQQPDISDEGPPTPEKPIQARDRLRGGVDVRDLLFKKSGVDLFAIPGLAADTLLTLASEVGFDLTPWKTEKHFASWLNLCPGTRISGGKLLKNKTKRHPNRATQAFRMAAASLHHSQTALGAFYRRIKSRAGGQYAVTATAHKIARIYYAMLTRGTNYVELGQQAYEQRYKKRRLDHLKVQAKSLGFQLVPCAP

SEQ ID NO: 349896 - protein, 465 aa, unidentified
MGAGKMNRKQRKELGRRLQSANPGLEVVHPCAAGIDVGNGAHYVAVRPEQDAEPVRRFECFTADLHRMADWLEACEVKTVAMQSTGVYWIPLYEILEQRGFEVYLVNARHTKNLPGRKSDVQESQWLLKLHTHGLLNNSFQPTAEIRVVRTYWRQRGEHVRGASTCIQRIQKVLTQMNVQLANVISDLSGLTGQAIVRAILAGERDPRKLAELSHPRIRAGREQIAKSLEGNWRSELLFVLKQEMEMYDTYQHKIAECDRELEATLKKFGVPERASTEQPKIPNTKKTKRIQRNAPGFNLTSELHRITGVDLSRIDGVNAIVAQTIISEVGLDMTRWKTEAHFASWLGLCPDNRISGDKVLARGTRHVINRAATALRMAATTLIKSQSYLGAQYRRLRTKLGAPKAITAMAHRLARLVFRMLKYGQEYVDKGTQYYEQKHHEQQLHLLKKKAATLGFQVVEIGVA

SEQ ID NO: 349897 - protein, 412 aa, unidentified
MKDLLEISCGLDVHKEKIVACILTGPLGKPTRSEIREFSTLIPDMIALRNWIVSKNCHHVAMESTGIYWMPIYEILEDAFYGDITLLVVNARHMKNVPGKKTDMRDSEWISTLLRAGLLNGSFIPEKRIREFRDLNRYRKSVIRDITSQKNRIEKFLQSSGFRLSSFISDIFGASGRNIILHLVEHGQIDKTALDSCLKTKTRNRIDEILMSVNGTLSEHQKAFLRILMTHYDSLKKHLAEIETSLEEDMAPFALQVEQLNSIYGISTTASCAIIAEIGIDMKPFKTAEHICSWAGLCPGNNESAGKRKSTSVTKGNPYIKSMLCEIAWVIAGKRITYLSAWYWRIKQKKGAKKAIVALARKLLVIIYTMLKQGTLFDESCFETRRKHCEQKQLSRYIRELEKHGYHVEAQS

SEQ ID NO: 349898 - protein, 343 aa, unidentified
MTKSITVAGKQTRIFTQKKFTVGLDLGDRWSWYCVLDEQGEVVVEHKLSTTQKAVREAFGAMPQSRVALETGTHSPWVSRLVKELGHEVIVAQARRVRLIGESRKKDDRLDARTLARLARIDPELLGPIQHRSAEAQADLIMIRARAGLVRARTGLVNAARGLTKSYGERLRGCNPRNMDAEKSKELSAELQIALEPLLPAIASLSQQILDYNERIEQMARDGYPEVARLKQVKGVGTLIALAYVLTLEDPQRFRKSRDAGCYVGLQPGRRNSGSSTPQLHISKEGDPYLRTLLVQGAQHILGPFGADSDLRRWGLKLAERGGKNGKKCDLALSVVRLLPSAL

SEQ ID NO: 349899 - protein, 503 aa, unidentified
MILRPRDDSANRLSPKSRRKAAEKALGKTGQKRTKAKKSQPGEPRADGKGPRRGGLPITAPSALEQLSRVNLNAAGIDVGATLHVVAVPSGRDPDSDVQSFGTFTADLESLADWLTACGIETVAMESTGVYWIPLYELLERRGFEVLLINPSDFKKFRRKTDVLDSQWLQTLHTYGLLAGSFRPEDKIVELRSYLRQRDTLVQCAADLVRRMQKALEQMNIKLTEVLSDITGVTGMAILRAILSGQRDPQQLAPLRDGRCKNDEATIALALQGNWRQEHLFALQQSVELYDVHRQKLTEVDQRIEAYLKTFEDRSVGQSLAPLPRKKALEPAFNVRDLMHRITGLDLTEVDGIGGYAALKLVSEIGTDMSRWETEKHFVSWLSLCPELHLSGGSRKSHGSRTRPSTNRAAAVLRMCAQSLLRADCALGAFGRRLRAKKGGPQAVTAVARKLAIIIYHMLKEGRPYRDSGAAYYDEQYRQRVINNLRRRAAELGLDLVPAAPAA

SEQ ID NO: 349900 - protein, 346 aa, unidentified
MLAGIDTHKDTLAVAVIDLAGRSVLVTELANTEAGFDALEELVKEHSVARVGIEGSGNYGRGAAIRLVLVGGLEVVEVPPSLTARERSGRPGAGKTDPGDAVAIARLTARETGLPPVRLAVGQAADLRALADYRAQLVAERTALASRTHAELHGLLPGYQDRVPRLTAPTFIAAATDLLAGDTSVRATLTRRRLVRLAELTAEIQEVHGLITDAVQQVKTGLTDLYGLGPVSAATILGEVADIRRYRSRHAFAAANGTAPIPASSGRTSRHRLNRSGNRQLNRVLYTMAITQIRADTEGRAYYLRKRAEGKTGREALRCLKRRLSDVVYRTLHEDLATTAPPVMTG

SEQ ID NO: 349901 - protein, 327 aa, unidentified
MNYLGIDVSKAKIDCCLIVGERYFHRVFSNNVAGFEKLCEWLLKYGADVHVCMEATGVYSENVAEYLHDKQFIVSIVNPLSIKKFIEMELIAVKTDKQDAKNIAIYCKRNEPKPHIFPTLSERKLKALTRQLDHLKEMHTAQKNRLLVAHEATQAFIQDTIQHLEQQIVDVKAAIEQHINAEPSLKEKSQLLKTIRGIGSATVPHLLTLFAERSFQNAKKVVSYLGLNPIVKQSGQKKTKYIAISKQGDKHIRTALYMPAMVCAFRLPEYRDFVQRLKAKGKTNKQIICAIMRKLVVYCYIVLKTGEPFKQICDVARSCKAVKGEVL

SEQ ID NO: 349902 - protein, 343 aa, unidentified
MYYVGIDVHGRSFAMCILDHHGKTVKETTIRGSLKDLLEAVVTIKRPFAVCYEASCGYGYLHDQLARRAQRVVVAHPGQLRLIFRSKRKNDRIDAKRLATLLFLDQVPPVYVPSLDVRSWRQFIGFRHRVIAKRVRVKNSLRSLLRTHGVTVVTGKRLWTRQGRALLATAELPTDRAVLQRDLLLDELAHLDAQLRRVEQELNQTARAHPGVELLRTIPGVGPRTAEAVVAFIDDPARFRANKRVGSYFGLVPCQDQSGDANRLGHITREGPAMVRKLLTEAAWQGIRHSPTIRAYFERVQHGDPQRRKIALIATAHYLVRVMQAMLRTGEFWREATSRRRVA

SEQ ID NO: 349903 - protein, 352 aa, unidentified
MEEYIGCDAHKRYSVFRSWGKRGRLEQPVRVDHDTEVMRGYLGTLPPGSQIAVETVGNWYWLISMMEEAGHRPKLAHAAKAKKMMGQINKGDSLDAGGLAGLLRAGTLPTVWIPPAELRDQRELPRGRMVLTGMRTKLKNRLHATLAKYNLQIEEASNIFVGKGRRMLLERLRQLPPETRHSAELELGLLDEIELRIAEAEKRIRTVVKETEEMQLLTTAPGIGPLLGIVVALEVGDVSRFPSPANLASYAGTVPRVISSGGKTYHGRVRPDVNRYLKWALVEAANVVVLNQATWADRHTVQLYRRVRERKGHAKAVVAVARHLAEATYWILKKREPYREPAAQKPVSSTQG

SEQ ID NO: 349904 - protein, 386 aa, unidentified
MQTVADRPEAPNAIRTDLGAIFISLELSRSTWLITSLSPDGGEKMSKHAVRGGDVAGLLERFAQLRKKARARTGKVFPFVVIQEAGLDGFWIDRVLRKEGIESHVVDPASITTSRRRRRAKTDRIDGEALVRALLAYKRGEPRVCAMVKAPTPEEEDRRRLCRERKVLIVERVRHVNRVKGLLFSQGISGYEPLRRDRRGRLDTLQTGDRRLLPDHLKAQVLRELDRLELLLEQIKAVEAERDVLLAAQQAPAPAAMLLDIKGIGPEFAAILWSEGLFRHFDNRRQVASYAGLAPTPWQSGSVDREQGVSKAGNPRLRTTLIQLAWLWLRHQPQSALALWFEERVRRNGGRLKKPTIVALARKLLVALWKYVTAGVVIEGAVMKAA

SEQ ID NO: 349905 - protein, 358 aa, unidentified
MHTQIKDLDFTGQNIYAGIDTHKKSWKVSIYTDVIYHKTFNQPPKPEVLFHYLTKHFPNGTFYSVYEAGFCGFWIHERLQSLGIHNIVVNPADVPTTDKEKKQKTDRIDSNKLARQLRNKDLEAIYIHKRDILEDRSLIRMRRTLVTDLTRYKNRIKSKLYFFGIEFPEQFTRDRFSWSNRFMDWLSQLELNRESGTESLRILVEHAKFLRTDLLAVNRKVRKLSQNEYYRERINLLMSIRGIGLTTAMIFLTEIEDIHRFGNQEKLASYVGLTPTSHSSGDKDIHGEMVNRGNKFLKSAIIESAWIAARVDPVLHMDFINYSKRMKKNKAIVRIARKLLNRISFVLKNKVPYNEGII

SEQ ID NO: 349906 - protein, 323 aa, unidentified
MSSLFQLGIDVAKAKLDCALRLPEGKLRHKVVENSPSGFQALNVWLAKQGAGTVHVCMEATGTYWEPVAEYLAALPGISVSVINPAQIKAFGASQMVRTKTDKVDAKLIAQFCFERRPEPWQAPTPAEQTLRALVLRLDALQAMRTQESNRLDVARSALKDSIATHIAWIDGEIARIIRSIRDHIDNDPALRDKQRLLDSVPGLGERTIAALLAFYAAPERFGNARQAVAFAGLDPRQHESGSSVRGKPRMSKIGHTFLRKALYMPAMVTLYRTDWGKQFRRRLATAGKPPMLIIGAMMRKLVHVAFGVLKSGKPFDPALHGA

SEQ ID NO: 349907 - protein, 369 aa, unidentified
MADRITYVGLDVHKESIVVAVAAGGLRGEVREYGRIANTAAALDRLMRKLSGEGVGLRFCYEAGPCGYGIQRHLSAHGHECMVVAPSLIPKRAGDRVKTDRRDAASLARRHRAGELTAVWVPDAGHEAMRDLVRARLDAVHALRRARQQLSGFLLRQGCHYRRPAWTKLHRRWLAGLKFEQAVHHIVIEDYIAAVEAAATRRDRLTAQIEAMLPDWTLAPVVAALQTMRGMALVNAATLIAELGDLSRFANPRQLMAYLGLVPSEHSSGASIKRGRLTKAGNSAARRLLIEAAWTYRFPARVSRELLLRQESQPKLIRDIAWKGQLRLCARYRRLARTGKPANIVTTAIARELAGFVWAIARQVTVTTD

SEQ ID NO: 349908 - protein, 356 aa, unidentified
MTNTTKYIGMDVHKESISIAVRNAAGKIVMECVIETKANVILQFIEGLRGDVHVTFEEGTWAAWLYDLLRPHVTKLLVCDPRRNALLQEGNQNDRVDARKLAELLQNNQLRSVYHGDHGLRTLKELVRSYLTITQDLTRVMTRVKAIYRSWAIPCSGKQVYGTRHRGEWLGKIVEVGVRQRAEFYYRQLDELRLLRQQVRRDLLAESKKHKAWKQLCEIPSIGPIRAAVLLGILQTPHRFRTKRQLWTYSGLGIEVHSSADHQVVKGQLQRKKKHVEVRGLNENCNHDLKNLFKGAAVVASTKSGPFEKFYAALLTKGMRPEMARLTLARKIATIVLIVWKRGVCFDANHLKPQTA

SEQ ID NO: 349909 - protein, 387 aa, unidentified
MIYCGIDIAKHKHAVSLLDEQGEQVKPVFMIENTRAGFDRLNQELGGVADPITVGLEATGHYWLTLYDELSKQGHTLIVLNPLQVAAYRRSGVRKVKNDRHDALWIADFIRIAHLPASSRDVPTILQMRELSRFRFWLSEQVGDCKRKMLTILDRVFPEYERLFSNVFIKSSRQVLKTAVSAQEFADYDLSELALLLHSASRGRFGDQQAERVQTVASQSVGIGFLANAARVEMGCLLDQIDLLEDQRSRVDQAIELLMQQIPQFITSIPGIGPVTGAAILSEIGDIQRFDAPEKLVAYAGLDASVYQTGQFEASVAHISKRGSPYLRHALWQAAIVAARHDPDLLAFYQAKRKEGKHHNVVIGAVSRKLVARVFIVLKEQRPYVIR

SEQ ID NO: 349910 - protein, 344 aa, unidentified
MDIVVVGIDLGKNSCSLAGLDATGRVILRRRMRRSSLESFVNRLGRCTVAMEACCGAHHLGRVFAAQGHEVRLMSPEYVRPYVKAQKNDELDAEAIAEAATRPTMRFVVVKSQAQSDIQALHRARERLVSERTALINHLRALLLERGIVAPQGRRKLEEELSVFADEDGVEALSPRIRLLIEDLRREWRALDERIAAFDAEFVRMARDDEAVRRLMTIPGIGTINATALAAAVGNARTFGRGRDMAAWLGLTPRQMTTGGKPRLLGISKRGNRYLRKNLIHGARAVLPYLVARETPLGRWARGLLARAHKNVVVVALANKLARIAWAVLTHGCTYDAGCEAAAT

SEQ ID NO: 349911 - protein, 390 aa, unidentified
MFAGIDVASERHVLARLDGTGQPLGRPIGIDEDAGGYRMLLEALGPPPALVVMEATGHYWKNLFASLVAAGHDVVLLNPIVARRFQQARLERTKTDAIDAAALARFAFEKRPAPSYVHDAAAESLRELVRHRDRLQQDFEDRVLQLHRLVDLGFPEFTRYVKGMHTMLATALLSECPTAAAFARTPPRRLAKLRYDGRHRVGEDLAGRLVEAAKRSVGQHHGPVYDLQVRHICQDLDLWRRRLKELESDIGGLLDAHEVGRLLTSIDGIGPNSAARIIAIVGDPARFRSAGAFAAYVGVVPALRQSGKRTGTRAATGFGNAKLRSALWMTTLAAVRLNDWLRPFYERLRAAGKPPKLALIAAMRKLLHAVYSVARNRRPFVPITEQARAA

SEQ ID NO: 349912 - protein, 307 aa, unidentified
MRCAGVDVSAAWLDVAADSEIWRAANSPDGISELVDRLQTLQIERVVLEPTGGYELPLLRALMRAGVPVAPVNPRQVRDFARSTGRLAKTDRIDALILAQFGEAVRPPVRSIATADDEKLKSRETRRRQLVEMVTAEKNRLRTASPDVTAEIRKHIKWLEQRIKELDKQLSELLRSSSEWSAKVKLLRTAPGVGPVLTTNLLANLPELGALNRRQIAALVGVAPFNRDSGTFRGRRVVWGGRSQVRAVLYMGALVASRVNPVIRGFYQRLLQAGKPKKLALTACMRKLLTILNSMLRHGKVWRFEGA

SEQ ID NO: 349913 - protein, 378 aa, unidentified
MSNVRFVGLDVHKDSIVIAIADAGDAPAEVFSRILWDEHQLLKTLRKLGPLTSLRVCYEAGPTGYGLQRFLAAAGVDCIVVAPSLIPETNSRVKTDRRDACKLARFLRSGDLTSIWIPDEQTEALRDLERARDDARLAERRIKQQLLKFLLRHSRVFTAGKTLWTKTHWAWIRRQKFEHEAQSRVLADAIQTATQAADRIARLNQDIHECVQEWALAPLVQNLQSLHGVRELTATVIAAEIGDFQRFSSAGKLMAFVGLIPSKHSSGASRRQGGITKSGNRHVRRLLIEAAWQYYHAPAQASAALMTRREGLPENIVVIAENALRRLRKKSRMMQRNRKSAKKIVAALARELTGFIWAIGQATNLTQQHQRCLPTQTT

SEQ ID NO: 349914 - protein, 353 aa, unidentified
MNNNKNLSFKDQDFFIGLDVHQKNWKVTINNNKLQLKTFSMDPRPEQLLSYMNKNYPEGNYFSVYEAGFSGYWAHRKLIKSGFNNIIVNPADIPTTHKEKDQKSDPIDSRKLARELENASLKGIYIPTQQQQARRSLCRLYYNAVKDRTRIKNTIKSFLQFQGIDIPGVDEISHWSARFIHWLRSISFNQVEDAYYLNKQIDNLLHKRKETLDILRFMRKLSKDNHIIKCLKTISGIGFLTAFTLYAELIDINRFKNLDQLASYIGLIPSIQSSDEYKINRGLSCRQNKRLRSQLIESAWVAVRYDPALTYSYNRYLQRMSKQKAIVRIAKKLLNRIRYVWLNEKKYVTGVVS

SEQ ID NO: 349915 - protein, 389 aa, unidentified
MSMNFVGIDISKYKHDCCIISAADQQIVSKFTVKNDKDGFEHLLTTLNSLSNPEDIKIGFESTAHYALNLELFLENAHHSFMEVNPVLIKEYKKSTTLRQTDSVDCESIARWLMTVEYKPHSKGFYHSYSLKSLTRLRDRLIRQRSFYLVKITNVLDHTFPEFKPFFNERLSKTAIYLLENYGSAEKMAHMNSASYDKLRCASRGKFSIQQFLHLKELAANTVGVNNSIFDIELNSLLTLYNSLCKEIKTLEAEITKLIEEVHPHYMSIPGIGPISAAVIYAEYGDISNFSNPGQMLAFAGIEPGINDSGTESHGGRMVKHGSSQLRYVLLNACLPLIRFDITFATYYAKKRAEGKKHRVAITHVAKKLIRVIYALERQGTDFNAQKIR

SEQ ID NO: 349916 - protein, 349 aa, unidentified
MNDSILTISRTNNNRPIQYDYYIAVDWSQINMAIATSTRKSEQIRTLDLRSNLRDLKDYLHNLKGSKIITIEECAAAQWLYVELADYVDHVLICDPYRNRLLSDGPKDDLHDAKNLCLLLKNGLLKEVFHTHNSLFELRKYVSGYEDIIKAGVRIKNQRSSIFRSEGKNFRKESIESEVNNFIVGILDKNIEAYEENKKQYQALFSKIARHNTLLKNLRKIPGIEIVSAVKILANVIDATRFPKKGNYLAYCGLVKHKRISGQKVYGLRKPRCNRTLKSVYKTAAIVAIKVNNNPIKDYYEYLLDKGVEVHNARNAVARHIAIITYGMLKSGEKYQPYKWKRELNTTIN

SEQ ID NO: 349917 - protein, 362 aa, unidentified
MNKHIFVGIDLGDKNSVARIGVDLEKSERFGFVNTNAGRARLILEVKRRSEQMGAAVVVMAYEASSCGFVLRDQAQAAGIDCKVLAPTKMEKSVEHKRNKNDDRDADDVLEKLRGHVLAGNRLPTVWVPELETRDDREVLRTRLTLSERQTQIKTQIQMLLKRHGLEKPSDLGSARSKQYRHWLESLSQWESLGWGTRQSLASLLRQLSGIEAEMENLEKLIRQLGSQPRHKPIVEALMKEKGVGLLAALVYRTEIGQARRFHRGRHVGKFVGLTPTSHESGQQKDRKGHISRQGPPRLRKVLCQASWVHVRHDPHSREAYQRLVAKNPKKKKIALVAMMRRLAVRLWHRMREAESLQQTSS

SEQ ID NO: 349918 - protein, 333 aa, unidentified
MHKDDGREAAVEETAMATLGIDVAKAQYQVSLRRADGTRRQKRLPNTAAGHAQLIGWLHRHTTEPVHACLEATGTYGEAVATALVEAGHVVSVINPAAAKAFAQSQLRRTKTDGVDADVLADFCAAHRPAAWTPWPVEVRELQGLIRRREALLDMLTQEKNRQAAGGLVPAVAASLVRHITMLETELADLDDQISRHVTTHPRLREQRDLLVTIPGIGATTAARLLAECRAITDFANARAYAAFAGLVPREQQSGPRRGRARLSKLGSSRLRLALYFPAVTAIRHNPLLAAFAARLTAAGKPKMVIVAAVMRKLLHIAFGVLKHQRAFDPTVA

SEQ ID NO: 349919 - protein, 451 aa, unidentified
MATPKTERTLKKRTPSTPGRTNPDAAGIDLGATVHYVAVPADRDEKPVQHYGTLTEDLIALADWLKQCRITTVAMEATGVYWIPLFQILEERGFEVCLVNARHVKNVPGRKSDVQDCQWLQYLHSVGLLNASFRPPAAICAVRSLMRHRESVMRAGCQHLLRVQKALDQMNVQLHHAVTDITGQTGLAILDAIVAGERDPEALARLRHYRCKKSEAEIAKALRGDWREEHLFTLRQSLEAWRFHQQLMFDCDQQIASRMDALEDRGAGLAPVTRKKGNKPHDEPMREQLCEKFGVDLTAVEGVSIQTCLAFLSEVGTDVDKFASAEHFASWMGLCPDNRITGGRTHAAHTRKVNNRLANALRMAAQSLHRSKAELGDWFRRLKAKLGTKAAVTAAAHKLARILWAMVRHRRPYDPKRLGNPELARARKERYLRRQAEQLGFALTPVNGEVS

SEQ ID NO: 349920 - protein, 398 aa, unidentified
MLSIGIDVSKGKSTVCGMKPGGEIVYTPFEIQHTREGMSELVSLLRGSGEEVRAVLESTGSYHCPVVAALLENGIFVSVVNSLRMKRFCSQSIRRVKTDQIDAMQIALYGLAYWQELQPTRLPENTYRELQLLARQYYQMTSLLIKAKVDFNALCNQVLPGMQELMNDHAGRHKLSDFVLRYHHTAHILKMGETRFRKDYCKWAEKKGYRNHERMAALIFATAQNGIPVLPNAPSTQIVITEAIRVLHTVEASRDAILTQMQALAKTLPEYSLVREMPCIGDTLAPRLIAEIGDVRRFHSKRALIAYVGIEAPPYQSGKFCANNRHISKRGNRYLRKTGYEVMQSYVMHKPANDPIFTFIEKKRGEGKSGKLAMVAGLNKFLRVYYGKVTELYRSLPQ

SEQ ID NO: 349921 - protein, 340 aa, unidentified
MNATTYGLDIAKRVFQMYWVDAQTGEIANRKFGRDDLIEFLAQRPAGRVALEACGSAHWWARKIRALGHEVVLLHAQFIRPFVQTNKTDAADARAIWTAVQQPGMRTVAAKTEDQQAMLSLHRMRSLLIKFRTMQVNQLRGFLYEFGVAFRTGRAAGLAEVRQRMAELQDALPASIMLNLQDQLRRINAFEDDIDQLEKRISAWQKQELACRAISEVPGIGRLTATALVATIGDARTFRSGREFAAFLGLVPRQTGTGGKVRLGSISKRGDPYLRTLLIHGARSVLCHTKVPTAWQKGIQERRPANVAAVALANKIARTAWAILAHDSSYEANHVSVRPA

SEQ ID NO: 349922 - protein, 347 aa, unidentified
MTTVTIGMDLGDKKHQICVLDPTGGKVAEEMVDNTTTALSKYFRRYDGAVVAMETGTHSPWISRLLTSLGCRVLVGNARKLRAIWQSSNKSDVRDAEMLARIARFDPELLYPVHHRSEQAHADLERIKARDVLVRSRRSLINHVRGAAKAFGVRLPACSAESFARRAKEPLPAAIREAVTPLLETIGHLTDQIHEYDRQVAAVSRQRYPASERLQQVGGVGPLTALAYLLTLEEPERFDKSRSVGAYVGLTPRRDQSGQTDKQLRITKCGDGYLRQLLVTSSHYILGPFGPDSDLRRYGLRIAERGGKNAKKRAVVAVARKLAVLLHHLWKTGVDYEPLRTAGSPVG

SEQ ID NO: 349923 - protein, 395 aa, unidentified
MMKGLVSRSRGRRKSGLKVKPRRTRRQRRPAVNHLAIDLGSRESQICVRNSEGVILEEERRPTTGLGKYLAGKEKCRVVLESCAEAFAVADAARKAGHEVAVVPTSLVRALGVGSRGIKNDARDAQNLSKASCRMEDLPSVHVPGEVSRARKAMSAMREALVETRTKLVNTARSWLRTQGVGVLAGGTLPTFPARYRRHVEKRGRTLPIYVERMLQAIEELNPTIAEADKELEATAEQDPTCKLLMTAPGVGPVTAVRYVAAIDEVSRFHDAHGVESYLGLIPGESSSGDAKKKHMKGITKAGPPRVRWALTQAAWTALRCRKHDPMVEWARQIEARRGKKVAVIALVRKLAGVLFAMWRDGKAYDPKHEGKRAALAEKTDKATGCGVTAAQILP

SEQ ID NO: 349924 - protein, 366 aa, unidentified
MASNTSSNKKAKNSESSVNKSYEGKTVYVGIDVHKKTYSVVTIVDNLVVKKWRTEANPQQLAQQLLRYYGGAFIHTAYEAGFSGFVLHRVLKEAGINNMVVNPASIEIAANSRVKTDKRDAHKLATMLASRRLTGIRIPPVEQEQRRLLTRTRQQLVEERSAIKCKIWMKFHQMGLVDPQETREISHNLMAELIKLSPSTEFTLVMDALWQVWKTIDAQIKKIESELKKQGTVDPNEEVYRSTPGIGPIAARILSNELGNLNQFNNERQLFSYTGLTPSEFSSGEKIRRGHITRQGNVRVRHILTEAAWRAIRKDITLKNFFERLYPRTGKKKAIVAVARKLIGRIRAAFRFGTTYKMVPISPENS

SEQ ID NO: 349925 - protein, 367 aa, unidentified
MEQDTTTYVGLDDSKRKLVVAILRPEEREPEQREMPKEPHLIQRLFRRLTREGAVAVCYEAGVSGYDLYRQITACGAAGQVIAPALTPRRPGQRIKTDRRDAVKLVRLFRAGELTAIHVPDEAEEAVRDLTRCREDVRRDVLRWRHRLLKFLDRHGRLYVTGKNWSQRHWIWIRAQRFELAPLQRTFDATLFALEQALAHQAELDKEIEALATQAPYAEPVGWLRCFRGIDTLSAMILLAEIVDFQRFPHPRELMAYLGLVPSEYSSGDAQRRGAITKAGNTHARRVLVEAAWHYRHRPTLGRALAIRAEGQPAACRTQAWRAQQRLHRRYRHLVGHGKRRPVAVTAIARELVGFIWAAMTQRAPAA

SEQ ID NO: 349926 - protein, 402 aa, unidentified
MKKSSRMSVIHPHAAGVDIGAEFHVVAVPPDADAAPVRTFQRFTGDLHRMSGWLKTCHITTIAMESTGVYWLPAFEIPEAAGFNVILVNARDAKKCSRRKTDVNDAQWLQKLHSFGLLRASFRPEHDISVLRSYLRQRERLTEYRAAHIQHMQKALMQMNVQLHHAVSDITGVTGLSIVRAIVSGERDPSVLIQYRDVRCKKTPEVLQQALTGNWQPEHLFAPEQSVAFFDFYQEKIRECDDQIETSLLQLSTGTEEPEGVLPSARHRTKQPNQLSFDVRPLLWKITGADLTQIHGFGPYLALKFVAECGTDMNRWPDASHFTSWLCLSPGNKISGGKVLSPKTRRSSSRIAAALRLAATTIGRSDTALGAFYRRLSSRIGKAKAVTATARKLAILFYNALK

SEQ ID NO: 349927 - protein, 341 aa, unidentified
MIEIVKKSCGLDIHKRFFIATILSTSSEKQQQRFNRDDDGILALKNWVISEKCDVVACESTSDFWVPIYDSLIKHLPVIIGNARDMKAFTHKKTDKIDSEVIAQLALNNMIQPSRVFPKYHREFRSYVRLRHKLVQKRTDIKNEAHAILALEMFNLNDVLTDIFGKNGRAILSGISSGKNVDEIIESLSPNVRKKSAQIKEILDREISQGAALRLQICLKLIKHLDDEIEALENEIFNYAYGKHKREMEILMSVPGIGELGAATLIAEIENIKDFSSGDKLASWLGVVPNVYQSADKFYNGRITKRGSKEARWILTQIAQAAARKKNSKLKEFFNRKKKSI

SEQ ID NO: 349928 - protein, 342 aa, unidentified
MENITTIGLDIAKSLFQVHGVNCSGEAVLRRRLKRARMLPFFTKLPPCLIRIEPINNSHYWARELTALGHDVKLMPAQYVKPYVKRGKNDVADAEAICEAVTRPTMRFVAVKSPEQQSLMMLHRVRLMLNRQRTQLSNAIRAHISEFGVVAPVGRLGVDRLLKIVEDKSDDRIPDDARLCLQMLATQLAVVKQQILENDRRVLASARRTELGRRLMEIPGVGPLLASAFVASVADPKVFKTGRDLAAWIGFAPKQNSSGGKERLGGTSRAGNRYLRQMLVVGAMAVICYAQRHGTTRHWLVKLLERRPAKVAAVALANKNARMVWALMTSGERYREPLPLAA

SEQ ID NO: 349929 - protein, 429 aa, unidentified
MKIIYPRVCGIDVHKKFIVAVICISESVEPIYLKKRFSTFHNDLIRFRNWLIQNDCQNVCMESTGKYYIPVYNILESHISNIVVANPKWVRAVKGEKDDDKDAKWIADLFKFDIVRSSFIPQKDFRILRELTRYKYKLVNMRSSEKNRFQNALTSGNCKLDMVFTDVFGKSASNIIDLILSDNPYTDEDILSKVHKNCKASPDMILNSINGTDLTPVQKSRIELVNNHIKQLSSNIQRLDKLIDLMIEPYEDYISFLCQIPGVSRNSAIIILYEIGVDMNQFTSTRRLTSWAGLTPSSNQSAGKKKSVRISRAGVYLKPCLVEVAHAAVKDKNHPYYANKFNKISKRRGKKRAFIAIARKILVAAYHMLLTGEIWNPADLAEVETPVEQRIKYVKNNLKSDIKQLLDIGLTVEELTLMIQQNANIIATQ

SEQ ID NO: 349930 - protein, 365 aa, unidentified
MAEITRAPVARVGVDLSKRVYQVHAVDRAGRVLLARAMSRDRFFVWCAELPAECLVAMEACGGAHHVARRLRLLGLDARLIAGHFVAPYRMAGKRGKNDANDAGAICEAAGRPHMRFVPVKTAEQQGQLAVHRLREGYKEERTALINRIRGLLAEFGLVFPRSPEALRAVLAEVIEDAGNELPGVARLALQRAHLHWIEIELQMAWCDQRIASHVRSDERAKKASTLLGVGPTTASAVVASVGEFKQFANARQFGAWLGLVPSQNSTGGKARLGRITKRGDDYLRTLLIQGAKSAVMSAGKRSDRISQWLVQLKDRVGWQKAVVALANKNARILWAVLTRDVAFDPNHVPQPPAARGGPKLQPAV

SEQ ID NO: 349931 - protein, 451 aa, unidentified
MKKRNKGLEQLALVHPNAAGLDIGAREIWACVSPESEENNARPFGTFTPDLYHLADWLEQQGVDTVAMESTGVYWIPVFEILEARGFEVYLVNARHIKNVPGRKSDYADCQWIQKLHSLGLLTGSFRPDGEMCRLRSYLRHRAQLIQHRAPHILHMQKALQQMNLQLHHALTDITGTTGMTILRALVAGERDAVVLAQWRDAHCKASEETIVKALTGDWKEEHLFVLKQSLELYDFYTAQVAACDAQLKQQFSVMKPRWDSTAQPPVTLSAKRRTTSKNAPAFDVRAEIIRLVGVDLGAMKGLSDSSIQTILSEIGMDMTKWPTVKHFASWLGLAPHNDISGGKVLRSRTLRTRNRAGQAFRQAATTLASSPSALGAYYRRKRAQGGPQFAQVATAHKMARTVYFLLKYHVSFIEIGAEAYEQKQRDREVASLRKKAARLGFNLSTSPVAT

SEQ ID NO: 349932 - protein, 340 aa, unidentified
MPLYGGIDLHANNSVVVLLNEQDQVIYQKRLPNHLPAILEPLSLHHGEIEGLVVESTYNWYWLVDGLMEAGYRVHLANPAAMQQYNGLKYTDDHSDARWLAHLLRLGVLPEGYIYPKAERAVRDLLRKRAHLVRQHTANVLSVQNIMARHTGARFSVKRIQELTKQELTTLLAEETQVLAVTSSLMVLDCLRQQIKMLEQTVHKCLHHTPSYEQLLTVQGIGMILAQTITLETGAIKRFPSVGHYASYCRCVDSTKISNGKRKGTGNVKNGHPYLGWAYMEAAQFALRFQPEAQRFYQRKLAKSRNNMVLVRKAVAHKLSRACYYMMRDLVPYEATKAFG

SEQ ID NO: 349933 - protein, 447 aa, unidentified
MTHRIGPSRGDRRRNARKARLRGLIPREFAIVGVDLADRKQVFAVCDHDGGVHGRRSVNKRAWQLDETLRWAKAAAVEAGFAGVVVACEPTGHRWRVMLDQCDELGLTMVCAPPMLVHREREREDLTPDRSDAKDAVLIAGLAAQLRCYEPERPTAQWARMRHLGARRSELTTACGVVRQRMRSLLECVWPAALATAADPLASMTWRATMAVICARSVDGDPAAIRRMGWPRFQAAVRRELPRWGGHRVTWTIARELWDATTDPTGVIVHRHGALERVADALTDWQRLRVQRGAVEARMVHLLDELNLTSLVTTIPGLSAVGAAAILAETGDPHRFDSGRAVVKHAGLAPRDNESGTFKGTSRVSGRGRPELRLAVWRAVWGALPHNAVLSARHHHLRTREHNRLTDHQARVAVAGSLLRQLHAVIVRGVPWDARTAAGRQEVIAAA

SEQ ID NO: 349934 - protein, 322 aa, unidentified
MNATAALPVVGVDLAKSVFQLAVADGSWRVVESHRLTRTQFERWFANRAVGLVVMEACGSAHHWARWLNGLGIAVRLLPAAYVRACVKRNKTDVADACALLEAAHCAEIVPVRVKSVEQQAPQAMHRTRSLWMGTRTSRINALRGFCRAFGIAIAQGSRLGVEQIGRVLADPHAAVPLLLRRAMSLLVEEIRLLEVRITQVERELTALACQSPACTTLLSIPGVGLLTATAMVAATSGEVSHFCDARHFASWFGLTPKEHSSGGTRPLRRISKRGDRYLRMLLAHGARSVLRAATAALRDHEPCGAARPNKKVARTAFALPA

SEQ ID NO: 349935 - protein, 336 aa, unidentified
MKTDFIKQNVGVDISKDDFKVSFCGMTSTIDVVKLGSKTFDNSPKGFISLLEWVLRKNKAQAELLPAFTLEATGVYYEGLAYFLVENGYTVHVVLPNQSKKYGQSLGSRSKTDKIDAQILSQMGLERKLKQWKPISANFLNLKQLTRERDAIICERTCVSNQLHAYKHRAKSNEASIRRSEERIDFLKQQITEIEKEIETLVKLDKTLSERLDYVLSIPGVGLITAVTVVAETNGFETITGIKQLTSFAGLDVKIAESGNWKGKSKISKQGNRYIRKVLMFPAFSFIKGDEKTKKYYERLAEKKGVKMVAAVAVQRKLLGLIYTLWKKQEIFSEQT

SEQ ID NO: 349936 - protein, 340 aa, unidentified
MKKVYAGIDLHGNNNYLGIMDKTGKRIFKKKLPNNPQVIMEVLKPFGKGIQGIVVESTFNWYWLVDRLMDEGYGVHLANPAAIQKYAGKKHADDQDDAFWLAEMLRLGILPEGYIYPKEDRPIRDLLRKRGHLVRLRTSLILSLQNIITRNCGVHLNGNEMKRLKINHVAPLLAGQEDLALTGKVSKECIDFLTGQINQVEKVVQNKVQLKDQYRYLETLCGVGKILSLTVMLETGPIERFAKVGHYVSYCRKVPTKWTSNDKTKGKGNKKNGNKYLAWAFSEAAELARRYDNPARAYYNKKSAKTNFMTAHTALAHKLARAAYFVMRDQVPFDPAKVFG

SEQ ID NO: 349937 - protein, 359 aa, unidentified
MNTPDPSTARPAAWSGIDVAKATFEAALYLPQAHASPPRTVASLPSHSFQRSPQGVAQWLAWCERKLAEHARQQGLDQPPPLRACMEATGRYSLELAAWIVQAGPALEPAIIDPLAAHHYAKSLRMRNKTDRVDAAVLARMGYERRFAPTPPLPPAYATLRQQTRQRDFLMGQLQAARLRAQEMQACPPLLEIQQVLIGELEKAVRKVDRLINKHVASQAQLSEAVRRLRTIPGVGRLTAVVILAELGELSRFATARQVSSFAGLNPKLFESGTSVHYETHLSKQGPARARKVLYMSALSVLRTSGPLRCYYEHLLHEGKCKMAALGALMRKQLILMRAVLVGHCDYDPQFVKTPPLGS

SEQ ID NO: 349938 - protein, 389 aa, unidentified
MPTVADRPDAPTAIQSNLAAIFVSLELSRSIWLITSLSPGSGEKMSKHSVRAGDVAGLLARFSELKQKAFARTRKSFPIVVIQEAGLDGFWLHRALEQEGVESHVVDPASIATSRRRRRAKTDRIDGEALLRTLLAYKRGEPRVCTMVRAPTPEDEDRRRLCRERKVLIAERVEHVNRVKGLLFSQGISSYEPLRRDRRQRLEDLTTGDGRTLPTHLKIQISRELDRLELLLAQIKLAEAERDGLLAEGQAAAPESPARMLLEFKGIGAESAATLWLEALFRHFDNRRQLASYAGLAPTPWQSGSVDREQGVSKAGNPRLRAILIELAWLWLRHQPQSALALWFKERVKRNGGRMKKTTIVALARKLLVALWKYVTAGIVIEGAVMKPA

SEQ ID NO: 349939 - protein, 408 aa, unidentified
MNAVGIDVSKGKSMVAALRPMGEVAFLPQEFLHTEVGLEQMACAIIALGEDTRVIMESTGRYHEPVAAALHEYGIYVCVLNPLLIKQSGGGSIRKVKTDKADAMKIAKYGLDNWADLREYTPMDTIRQQLKLCSRQYNLYMKTVVSLQNNLISLTDKTFPGVNELFSSPERADGHQKWVDFVMTFWHCDCICRVSEKAFTERYQKWCKRKGYHFSAEKASDLYASSCGHFTTLPKNENTKLLIVTAAQQMLAGKATLAALRTEMTWLASQLPEYETVRAMYGVGEITAAQLMAEIGDVRRFQRRSSIVGFAGVDPGVDESGKHSAKSVPTTKRGSPHLRKTLYQIVCTYLKKSPADEPVYQFLDKKRAEGKPYFVYMTAAQNKFLRIYYARVKECLEAFDERQDTVQN

SEQ ID NO: 349940 - protein, 346 aa, unidentified
MKITTIGIDLAKEVFQIHGVDEHGKTVFRKQLRRNKMTNFFANLEPCLIGMEACGSSHHWARKLGEFGHTVKLMSPQFVKPYVKTNKHDMADAEAICEAVSRPNMRFVPIKNIEQQAILSVHRARQGLVKARTAQANQIRGLLSEFGIVIPQGIHSIARRVPDILEDAENGLPGTMRHLLRRLNDHLKELGRQAEELELQIKLWHKENESSQKLEAIPGIGPITASAIVATVGNATEYKNGRQLAAWLGLVPKQCSSGGKQLLLGISKRGDTYLRTLLIHGARAVIRFAENKAEPESWLRKLITRRSKNIAAVALANKNARIIWALLAKGTTFHPDHASAAYAAAA

SEQ ID NO: 349941 - protein, 359 aa, unidentified
MKYYTSTTEYNCGIDLHARQMYVCLMDRQGKILVHTNIKNNDFNFFLSRIEPYRHSLTVCCECMFGWYWLADACQEANLPFVLAHALYLKAIHGGKNKNDRIDSEKLAHLLRSNLIPPAYVYPAGQRPLRALLRQRLCYVWRRTELLNRVQSHQLAHNRPSIRCTTRYNRDPWEQLILARESHPLRQLALQNDMALIRHYDERIQSLEAKLLSLAKEHSARDFTLLLSVPGIGENLGLTILHEVGDIQRFPTVKDFLSYCRLVKGTVASAGKIKGLRGAKLGNPYLRWAFGEAAVIAKRDHKVVGPLCQSLEARLGGNKFKANTVVAIKLARAVYYMLKNHTVFDSQRLVGALTHEPLS

SEQ ID NO: 349942 - protein, 350 aa, unidentified
MVNSNKNESMKNLFIGIDYSKKKFDVSLLEREKIEEIKHECFENTPEGCNAMLKWILFQTNVPSEEWLFCGEHTGLYGVLLTELLLKKKFFVWIENPMQIKLSAGLKREKNDKVDSQEIARYAYRFQDKARCFQIQDKSLKSLQLLLSFRDRLMRNKHSILVAAQEIRAVLKRDTTARYIYEQTKRDVERLNKEIKDVESRMKEIIQASEELKVNYLLVTSIKGIALINAVALMIHTDNFTRFQNCRQLACYAGVVPFEKTSGSSIKSGSHISHLANIQIKTLLTQAARSAVLYNPELRQYYERKIKEGKLEQVVINNVRNKLLHRIFAVVQKKQPYQINYINSLNKNAA

SEQ ID NO: 349943 - protein, 348 aa, unidentified
MTVYIGVDFHARQQTISYLTTEDGEIQRLQLDHGQPEEVRRFYQQFAGQRVVVGFESSGRAAWFEELLEELGCEIWIGHATAIRLFARRRQKNDRRDADLILDLLVRGDFPRIHRYSAESRTVLQQLRYRQRLVKMRTMLLNSLVFMAASRGVVLRSQLKTKRGLERLRQLSLPPALREQRDELCQLLLDLKPKIDKVERELAAKAESDIRVRRLRTQYGIGPLTGLCLAHTLERPERFANPRKVTAYVGFDPVEDSSGERRRIGSISKQGSRLLRFLLVEAGQIAVRRDQELARVYQRVLVRRGHAKAKVAIGRRLLVRAFIMLRDEIDYAEFQRRGVAARSSREIA

SEQ ID NO: 349944 - protein, 341 aa, unidentified
MKLYGGIDLHSNNCAINIIDEDSNVILKKRVTNDLVKIKTLLNPYAEKLTGLVVESTYNWYWLVDSLMESGFKLHLANTAAIQQYSGLKHADDDSDANWLANMLRLKILPEGYIYPKAERMIRDLLRKRNQLMQQRTKNLISIQGLYDRHINGRIKGNLVKILTAEQLNKHFCDPNVRLAVESNLIVLRCLSQQIKVIEKSLHQQAKLRGEFISLTSIDGIGFILALTIMLETGDISRFNKAGNYASYCRCVNGARYSNGKKKGKTNTRNGNRYLSWAFAEAANFAIRYNDTVKKYYQRKLAKSHLMVAKNAVAHKLARACFYVLRDGVEFDVNRAFGYSK

SEQ ID NO: 349945 - protein, 348 aa, unidentified
MALTIVETRAVTGGVDTHADVHVAAALDPLGGLLGVQEFPATPAGYARLLGWLGGFGTVCLVGIEGTGSYGAGLARHIITAGVRVVEVDRCDRQDRRRQGKSDPLDAVSAARAAQSGRAAGASKGRDGAVEAIRALMVAKRSAAAERTQTINQARALVLTGPDDLRARFTGYTTDALVAGLASLRPRPGSTIGYATRIALRELGRRAEFLDAQLERLDALIGPLVVARAPGLLALYGIGPNTAALLLIAAGDRPGRLRSEAAWAHLCGAAPIPASSGKTIRHRLNPGGDRQANHALWRIVFTRLGSHPATRAYVERRTAEGKSKKEIIRCLKRYVAREVYPHLRAPAG

SEQ ID NO: 349946 - protein, 387 aa, unidentified
MQSVTSATAVATTAHANKITLFASLELSKSKWVVTINSPDSEKFSKHVVEGGDGVGLLDLLSRSRAKAEQRYGVQIKAIVIQEAGLDGFWIHRLLLANGIESHVVDAASIAVDRRHRRAKTDAIDGETLLRTLMAWARGERRVCSMVRAPSPEDEDRRRLTRERGTLVKERIQHTNRIRGLLGGQGVRDYNPLRRDRFERLEAVRTGDGRELPAMLKAEIRRELDRIALVTTQLAAVERARDALIRTDAEERNNPAALLLKLKGLGPEFASLLWLESLFRSFGNRRQVAAYGGLAPSPWQSGNVERDQGISKSGNRRLRKTMIELAWFWLRHQPDSALSRWFQARVGAAKGRIRRIAIVALARKLLVALWRYATQGVVPEGAVFKAA

SEQ ID NO: 349947 - protein, 355 aa, unidentified
MDNLRYIGLDVHRDTISAAVLDHDGKLIMQSVVPTRASAILDFLHGIRGTLHVTFEEGIHSAWLYDLLQPRVARVLVCDPRKTRLLKSGNKGDLIDARKLAELLRNDALSPVYHGELSSLEVQRRTRSYTMLTEDTTRIMSRVKAVFRGQAVPYHGKSIYRPDRRESYLAQLPTEGLRQRVELLYQELDAVHRLRLRAKREMLAECRKHPAMKWLQSVPFLGKVRTAVLIGRVQTPHRFRTKRQFWSYCGLALETHDSAQYHVLHGQVERKPRFVQVRGLNWNHNHDLKGVFKSAATMAAVREGVFRDYYCGLLAKGIRPEMARLTLARKIAAITLKIWKEGGMFNAEQVKPQAA

SEQ ID NO: 349948 - protein, 397 aa, unidentified
MKGFCISLDVSKGSSFYQGFKDLEEPITKSKKIEHNLEGFKELINLREKIRKEYDEECIVIFESTGIYHKALQTFLDEHDFKYTIISPLLSAKVRKSDIRGTKTDSKDCASIASVFYLKKLRAYTKTDEIYDDLREKSRYYDFLMDEMKRWKIEFRRLLDIIYPGFDRLYDDLYGDFTQSLLLEYSHPEIIRKRRLDTIAKFLEKHTCHHEAYCLRQAKVLKEYAENCASGCSSKSYLVSQFDVVIHNLNAQIKHLNYVLEEIIDIAKTLPNYEYIRSIPGIGDNLSSRILAELGDISRFNNASQVVAYCGIDPQIYQSGQISGLHLKISKKGNKKLRCLLYLAVTCMIKTSRNTVIVDFYKKKKADGLAPRSALVASMNKLVRIIYSLCKSGSLFK

SEQ ID NO: 349949 - protein, 372 aa, unidentified
MDAPFLKRHLDAKVEMSLNHIPKGAPEMKIKTIGADLAKNVIQIHGTDLHGNTVLRKQLKRDQVIAFFAKLEPCLIGMEACGSAHHWARKLQQLGHTVKLMAPQFVKPYVKTNKNDMADAEAICEAVTRKNMRFVPVKNVEQQAILSVHRARQGFVKARTAQSNQIRGLLAEYGIAIPVGISHITKDVPIIMEDGGHDLPGSFKQLIGRLIEHFKELDKQVDELEAQIKQWHRENEASCRLAKIPGIGPISASALAASVGDGKSFKNGRQLAAWLGLVPRQHSTGGKSTLLGISKRGDSYLRTLLIHGARSVVRVATTKNELTGSWLQGLLGRRNANIATVALANKNARIAWALLVNERKFRPDHVPAGAGA

SEQ ID NO: 349950 - protein, 401 aa, unidentified
MNTTTMFYVGIDVSKDKSDICIKDVNGNDLIQRFKITNSKADLGHLYETIKRIKSKTPGKSDVVFGMEATGIYSLPLYSALKRDGYKVKLYNPIQTNGFRKINIRKTKTDPIDSAIIADMLRHSEPPQVSDIQDLNLYQLRELVRIRHRLIEKQTICKVQIVRNIDTIWPDYNSVMKRVLGKTSLAILKKYSVPSKVRAISFEQFYELIKKMSRSKISRKQAEEIYAHAGNVLTIPELDSVITFEIKTLISQLELYDEQIQSVEIRIDQMMKLIDSKIMSIPGIGDTLGPMILGEIGSVDRFSNVKKLIAFAGLDPVVSQSGRFENRSGPISKRGSPLLRQALFLAANVARQNDENLKRFYDKKRSEGKHHFSALNAVAAKLLRITYWVLKNNKEYQTQLN

SEQ ID NO: 349951 - protein, 412 aa, unidentified
MEVLYRCCCGLDVHAQTVVACLIKDGKKQTRTFATMTDELLVLLDWLSSEGCTHVAIESTGVYWKPVFNLLEGVLEVVLVNARHVKAVPGRKTDVRDCEWLADLLRHGLLKASFIPPLEIRELRELTRYRQTLVREQASVANRVQRIIESGNIKLGQVASNALGVSGRLMLRALCEGETDGAKLAALARGQLKKKESELQRALTGRLSPAQRFVLRELLDRYDELEAAFSRASEQLKREVAKCDDPFVSEAVELLQTIPGVGLRVAEVIVSEIGVDMRRFPSDGHLASWAGVCPGSNESGGKRRSGRTTKGSIYLRNALVQAAWAATHTKETYLAAQYKRLVKHKGKNRALVAVGHSILVIIYHVLLRKESYGELGGDYFDKRNVEVQRNRLVRQLERLGMKVTLEALPVAA

SEQ ID NO: 349952 - protein, 387 aa, unidentified
MAKQNDLSRSLITLEQDATVIAVIEMGQSSWLVAGIVPGLERNPLKKLSPDPDALLQLLHRWRKEAVQAGRTIKRIAVAYEAGRDGFWLARWLRAREIEAYVIHPSSVPVSREHRRAKTDRLDTELLKRAFLGWLRGEPKHCSMAAIPTLADEDAKRPGRERQSLVGERTRIINRLKANLARLGIRSFRPNLAQASDRLEALRTPEGSAVPANTLAEMQRDMNHLRFIKQQIKEIETTRAKRLAAAPSGQRHTMVRLLARVVGVGIETADMLVQEVFSRNIRDRKALARYAGLTGAPDESGKKRRERGLAKAGNARVRRGMIELAWGHLVHQKASALTAWYRKRTSDARGGTRKTMIVALARKLLIALWRLATTGETPAGLLLRPAA

SEQ ID NO: 349953 - protein, 322 aa, unidentified
MITLGIDVSKAKIDCCIFPSALTGKRKTKRFDNAQSGFVKLVKWLTELDVNLSDTRAVMEATSVYHENLAHFLYDMELTICIANPARVRAFAKGLSMLNKTDKADSEALVYYANTVKLATWQPEKENVRILKALINRYAVLEEDLQREKNRLEKAQSTQTFPQVLLSINIRIQQLEQEIIRLDETISSHVNGDSELKNDLALLTTIPAVGRKTGLLMLGLLRSHHFEKASQVAAYVGLVPIHFQSGSSVNKRSRLSKAGDSKIRSSLFMPSIVALQYNPHIKALYQRLREKGKPKMLIVSAAMRKLVHLCYGVLKHQTAYQI

SEQ ID NO: 349954 - protein, 345 aa, unidentified
MNITTVGIDLAKSVFQVHGVDARGKAVLRRQLRREQVAAFFVNLPPCLIGMEACASAHYWGRTLERFGHTVRLMAPQFVKPYVKTNKNDAADAEAICEAVSRPSMRFVPIKSIEQQAVLSVHRVRQGFVKARTAQANQIRGLLGEFGLVIPQGIRHIAQRVPALLEDASNELPLEFRQLIDRLTCHLKELDQQVRELERQIVAWHRSSELSRKLEKIPGIGPLAATALVASIADARSFNNGRQVSAWLGLVPRQNSSGGKSTLLGISKRGDVYLRTLLIHGARSAILAAKRQGECKNVWLANLLNRRHANIAAVALANKNVRTVWALLAHGRDFKADYMPARAAA

SEQ ID NO: 349955 - protein, 355 aa, unidentified
MTMLADDYEYVIGGDPDRDTIDLAVLDTATGSPRAHIEASADGPGYARMLQWAERYAPGRRVWALEGTGSFAAGLAAALSQAGEDVVEVGGFRRARGAKNDRLDAIRAARNAMARQLQAGPRARGLRDGIRALSVTRQAVLVSRTKAINELKSLVVVAPEHLRADLRGCSLAKQLDRIEAMTAPDGAAVEHRITIVTLQSITARIRFLSGQLAALDPVLDQLIRQHPAGPALLAEPGVGPIVAAQMLVSWSHPGRVRSEAAFASLAGVAPLEASSGLRTRHRLNRGGDRALNRALHTVAITRMRCHPETRAYEAKRTAQGKTHRDIRRCLKRSIARRLYRVMESAARANTAPAAA

SEQ ID NO: 349956 - protein, 361 aa, unidentified
MTTTTPTAASTILAIDLGKYKSVACLYSGSPDSARFDSFTTDRARLAQLLQRCQPSVVVIEACLLAGWVHDLCAALGFTCLVANTASEAWKFKHLKRKTDKDDALRLAQLHALGQLPTVALPPPATRQWRSLIAYRQTLVGRRVAVQNRIRALFVAQGLPAPRGAKAWTATGLEGLALQAKPLGECGPDDLWRGLLHLALAEYRQLRALLDDAEGRLDALAKSDRNVQLLESTPGVGPRTAEAIVAHLHQPERFPSGKQVSAYVGLAPKQFQSGETDRRGRITRRGPALLRKLLVECAWVMLRYNGWARAVYLRLTHGGKTHKKQAIVALARKLLVRCWAMLRDGTPWRDKTPAPAVAAST

SEQ ID NO: 349957 - protein, 343 aa, unidentified
MSIVRVTGGVDTHADTHVAAAIDHNGGLLGIESFPADLAGYESVLGWLVGFGSLEQVGVEGTGSWGVGLTRFLHSQDVVVVEVDRPNRQKRRKVGKSDPTDALAAARAALSGEASVTPKRRNGPVEQIRVFMVVRRSARQQRIQTLNQLRHLVFTAPEEIRVRFKDRYKAGLVTEAANMRPNKGSDPVTFTTYLMIRNLARRVKALNTEIREIDVMLAGLIEQVAPSLLELHGVGTDTAASLLVTAGNNPERLGSEGSWAHLCGVTPIPASSGKVTRYRLNRGGDRQANAALYRIVLTRMSSHQETRRYVTRRRAQGLNTAEIMRCLKRYVARQTFKHLPQAA

SEQ ID NO: 349958 - protein, 391 aa, unidentified
MSLYFVGIDISKYKHDCCILSAATQTVVAKFTIKNDKSGFEQLITTLQSLSIPEDIRIGFESTAHYALNLELFLENAHHSFMEINPVLIKEYKKSTSLRRTKTDSIDCESIARWLMTVEYKPHSKGFYHAYSLKSLTRLRDRLVRQRSFYLVKITNVLDHTFPEFKPFFHERLSKTALYLLENYGSAEKMARMNSVSYEKLRSLSKGKFSPQQFLRLKELAANTVGVNNSIFDVELNSLLTLYKSLVKEIDTLEAEINKLIEEVHPHYMSVPGIGPISAAVIYSEYGDISNFSTPAQMLAFAGIEPGINESGTESHGERMVKHGSSQLRYVLINCCLPLIRFDMTFASYYAKKRAEGKPHRVAITHVAKKLVRVIYALERQGTDFNAQKIR

SEQ ID NO: 349959 - protein, 406 aa, unidentified
MAIFCGIDWSERHHDVALVDGEGRVLARRRISDDAAGLTVLAGLLAEHAGGPGCAPVDIALETDRGLLVAALRAAGHRVYAINPMAVDRYRDRHRSSRAKSDPADALVLADLLRTDRDRHRPLPDDSEHVAAIAVLARAHHDAVATSVHESARLRSLLREFFPAALEAFPTLHTRTAVTVLAAASTPPAAAALTQAQLRDLMHTARRNTPRDYPAKLQAIFATSQLHQPAQIEAAMGVAVTAIVRTLAAALDAIKELETALDAIFAHHPDAEILRSLPGLGLILGARVLGEFGDDPTRFADAASRRAYAGSAPVTRASGKTTLVRLRRGCNRRLADACRWWAFSATQYSPGAKTFYLHRRATGDGHEAALRRLANKLLGQLHHCLTHRVTYDEQAAWPDPPKAPAA

SEQ ID NO: 349960 - protein, 428 aa, unidentified
MNTNETPVGTADQYAAFIAIDWADQQHVFSLQVAGQTKKETGTLEQKPEVIGPWIAQLRARFGGRAIAIGVEQSRGALLHALLGYDFLVLYPIHSTTVAKFREAFKSSGAKSDPLDTDQILLILTKHLALLKPLRPDTVETRLLARLTQDRRKVVDLRTTHIQALLAGLKEYFPQAIELFNGNVTSRLAADFLKKWPDLPAFQAAKPAVLKKFYYGHNVRTPEVIEKMLQLAATAQPLTTDPAIVESGRQLSRLHSQVIQTLNASIAEYDERIAAVFASHPEAKIFTGLPGAGAALAPRLLAFFGTDRTRFATASNVQCFSGIAPVTKSSGRSKVVHFRLACPKFARQTFHEFARLSVAQCQWAANFVEYHTGRGKKYQAVIRALAFKWIRILTQCWKNRTPYDEQKYLADLKKRGSIFATLHLEKKS

SEQ ID NO: 349961 - protein, 426 aa, unidentified
MEEPTRFIGMDVHKDTIVVAVTAAGEVGKAVLYGTFPNTAATVEKLVRRLRQAGSGPLKFCYEAGPCGYGIHRALTKMNEDCMVVAPSMIPRKSGDRQKTDKRDAASLAVLHRGGLLTAVWVPDAAHEAMRDLIRARLAAVRAVRAARQQLSAFLLRHERIYPAGRTAWTKAHRGWLADQSFAQPAQQIVLEESIEAVRLGEQRRDRVDGYLREQIPTWSLFPLVQNLSALRGLDTIASAGLAAAIGDPSRFASAPDLMAYLGLVPSEHSTGPKRRIGAITKAGDVHARSLLIEAAHSYRFPARVARHKLTAVDAVPDAVREIAWKAQTRLCQRYRHMMAKGKLKQVVVTAIARELAGFVWSIACIITDPPTKNSAVTTPSEKICRTGSTTCSSVPRRQPIKETARRAERGGQIRTASADGKRPDR

SEQ ID NO: 349962 - protein, 450 aa, unidentified
MWRKGKIKKTGTPTFQCMNPNAAGVDVGAMEIYIAVPADRDPQPVRCFSTFTEDLHAAADSLKASKIETVAMESTGVYWIPLFQILEDRGFTVLLVNARHVKNVPGRKSDVSDCQWLQYLYSVGLLRGSFRPDQEVCTVRSILRHRDSLVQMAATHVQHMQKALDQMNLQLHHVIADITGFTGLAIIEAILAGERDPHALAALRDGRIKASADTIAKSLVGDYRREHLFTLGQSLKAFRHYQELIGGCDREIEKSLQTFESKVDPESPLPKSLTDVKRFKGDPRFELRTHLYRVFGVDLTQIPGVNVLTAQTLLAEIGPDLSRFASAPTFTSWLGLCPDNRVSGGKVLSVKTRKVKNRAATALRIAATGLYRSQSYLGHYFRRMRAKLGAPKAITTAAHKIARIVYHMLTTRRPYEDTIWVKNEAANRVRVEARIRKQARDLGFQLVAAS

SEQ ID NO: 349963 - protein, 411 aa, unidentified
MTVFMGDDWAEGHHDVHLMNDDGKKLASRRLPEGLDGIRVFHELVADHVVDPAEVVVGIETDRGLWVTALVAAGYQVCAINPLAASRYRDRHNVGGAKSDAGDAKMLADLVRTDRHNHRQVAGDTPGAEAIRIMARGHQNLIWTRNRQTNALRSALREYYPAALEAFPDLADRDTLAVLAKAPAPAAGASLTIGQIQAALRRGGRQRNIERRAGEIQTALRTGQLAAPAAVADAFAATTRAAVGIIAELNRQISQLEATLTASFEQHPDSDIYHSLPGFGVVLGARALGEFGDDPNRYATSKSRRNYAGTSPLTIASGRKKAVLARHVRNRRLYDALDQAAFCALTQSPGCRLFYDQHRAKGDLHHQALRALGNRLVSILHGCLEHRSHYDENIAWAHRQTTTPKEIQQAA

SEQ ID NO: 349964 - protein, 346 aa, unidentified
MTIVQTARAVTGGIDTHGEVHVAAALDEVGGLLGTESFGADPGGYSALLDWLTGFGPVTKVGVEGTGAYGAGLARFLARAGIEVIEIDRQNRQDRRRQGKSDPLDAVQAARAALSGRADGRAKSRDGAVEAIRVLVVAKRSARQARVKAIVQMRQLTFTAPDQLQSRIKGLPIPKLVAVAQGLRPTRATDPVTAATKASLSSLAHRVADLEEEITRLDAMITPLLQSTAPELLRVYGVGIDTAATLLVTAGDNPERLRSEAAWAHLCGVSPLQASSGKVSRHRLNRGGDRQANRALWHIVITRLASDPDTQAYMERRVKEGRSKREVVRILKRYVAREVYRYLPRV

SEQ ID NO: 349965 - protein, 395 aa, unidentified
MKMNGKITGIGLDSHRTFSSVTARDVEGKIVWRKRLEHADRGPLREELRTWPEGTPVVLEGTFGWGWLSDELSAAGLEPHLASSKKVAAWRDARGLAKSNRTDADLLSELWTQQPRWWEVWLAPPEVRSQREWLRYRMTLVRLQTGLKNRIHAILHRHGMVHGETDLFGTSGRRFLNLLIGPGDETLPESARAMLKGYLQLLDQLRRQIANVTREVRGQITRTPAGECLRTLPGIDYILSYTILAEVGRIERFRSAKHLAAYSLLAPRAYDSGDDDGEAPKGRHVGHAGRRTLKWAWIEAAHGAVRKGGRFREIFDRRTNGGKRDRNRGYIAVGHELCRIAYILWKKEIDYTETPPPRPGRGKRPGGLRRAAKGTPGRSRPGTGQPEDPMVAVLT

SEQ ID NO: 349966 - protein, 391 aa, unidentified
MIYVGIDVAKDKHDCFITNSDGEVLFKAFTITNNLDGFNELHQKITSVMDDVTKVKVGLEATGHYSYNLLGYLIDKGLPTYVINPLHTNLYRKSLSLRQTKTDKVDARTIASMLMSDVNLKSYSDISYHNEDLKSLTRYRFDKVKERAKLKTSVSRLVCILFPELEKLVPTLHITSVYALLSEFPGAKHIATAHLTRLTNLLSEASKGRYGKDTAITFRDAARASIGSNMPAKSLELKHTIKLIQELDSEIDEIENEIKIIMDEINSPILSIPGINYRMGAMIIAEIGDFNRFDSPDKILAYAGFSPSTYQSGQQDSAYAHMEKRGSRYLRYALYNATKYVCHWDPTFAAYLAKKRAESKHYNVAISHAVKKLVRVIYHLEKTKQQYIKAA

SEQ ID NO: 349967 - protein, 462 aa, unidentified
MTKRRKKAKSRSFQITKLPAQLQHINLNAAGIDIGSERHLVAVPEGRDEVSVREFGSFTVDLEALAAWLKTCGVTSVAMESTGVYWIPLFELLERRGFEVKLVDARHVKNVSGRKSDVLDCQWLQQLHTYGLLAGAFRPPDEVCVLRSYLRQREMLRQVASQHIQHMQKALQQMNLLLHNVVSDITGVTGMKIIKAILAGERDPRVLASNRDDRCKQSRATIAKSLVGNYRAEHLFALRQALDLYAVYQAKIADCDEAIIKQLEKKPDLSDDQPPSGDRYVQARDRVRGGIDVRELLFKKSGVDLFAIPGLAADHLLTLASEVGFDMSPWKTEKHFSSWLGVCPGTKRSGGKTLASKTKRNPNRAAQAFRMAAASLSRSRTALGAFYRRLKARRSGAQAVTATAHKLARIYYAMLTKGANYIELGQQAYEQRYKERRIAHLKIQAKSLGFQLVACTADESSF

SEQ ID NO: 349968 - protein, 372 aa, unidentified
MESIIYVGMDVHKDTYSVCCYKSSEDRNYYEKKMKATSSNIIKYLKSAEKEFGESTVFVCGYEAGPTGFGLYRDLQKAGYICVVMAPTSLKKAPGNRVKNDTVDARYLAKTLFTKDYSEVHVTTKHEEAIKEYCRMRLSIKKELKTAKQLLQAFLLRQDKKYSDGTTYWTWNHRMWLKTVTFEDGYLQEAFNEYMITINTLEDRLKNIENRIEEIAKDSAIKEKVEKLVCFCGIETLTAVTIAAEIGDFNRFKKAYHFANYIGFGWAEYSSGKKEKVLGMSKCGNINIRRLLTESAKSIKKTNSRGKKSKRLIDRQKGKDPQVIAYADRCRYRLKNKMIHLECRGKHSNVSSTAAARELACFIWGMMTNNIA

SEQ ID NO: 349969 - protein, 578 aa, unidentified
MNPNDVAPSLTPIGVGFDTARYGHHVTFLREDLQPATTPCEVTESREGYQLLEQKFQLLARRIPNVLFCIRIDAAGQYATNLETFLRQLPFPKTISVGEPARNQKYRQAIFPKCKSDPAESHCAGRFALREDPKPAPEVPAELIALREIASRLEAQTRQSTRLANQLHNLMARVFPELATIASDLQTHWVLRLLDQYPTPVQLARARESSLTAIPHLTKDKAQKFQTAARASVGSFRGPVAEELVRMLVGQLRRCGREKDDMRNLLIKVHQSLPHSNQIDTIPGIGAGTAAVLTAKVISIDRFETPDQLVGYFGIFPEKDASGLDKDGKPKPGCHSHMSKKGSDLARKYLWNAAKVACQHNPAVRALYRRLRARGRRGDVALGHCMRKLLHLVWAVWKSGKAFDPDHYPWEPATAPLGNAEAAGHNQGTSPERKVVTAADSTVSSESPAVNAPNPIAPDNTVDSAVANNGWIDFDLLREQVTMEQVLVHLNWLGCLRGSGPQRRGPCPVHGASGDRLRSFSVHLQKNAFQCFHPPCASQGNVIDLWAAVHRLPLREAAHHLASTFNLRTTRGTEKRNP

SEQ ID NO: 349970 - protein, 337 aa, unidentified
MKFSGIDLHSNNSVVVVSDEEDRIVYQKRLPNNLEQIRAALAPYRDELAGVVVESTYNWYFLVDGLMDAGYRVHLANTTAIKKYEGLKYSGDFADAAYLAQLLRLGLLPEGYIYPREERAGRDLGRKRMQLVRCQTMQILAIENILARQTGGRMSSNQVKRLTAEQIEELGLVLDVALALEANRAVSETLQRQIEVLEKRLKQRVKLRPEYRLLKTVPGIGETLATTIMLETGTITRFASVGNFSSYCRCVDSRRESNGKKKGEGNAKNGNKYLAWAFVEAANFALRYCPEAKRFYERKKRKTNGIVAIKAIAHKLARACYHMLREQKPFDVQRCFV

SEQ ID NO: 349971 - protein, 312 aa, unidentified
MAILSFCGIDVSKDRLDVVVLPEGRFCSVSNDAAGWAELVARLHPLAVSAIGLEPSGGYERGIIRALLAAGLSVRRINPNKLRQFARARGVLAKNDRLDARLIAEYVAIMPTRVVQRDDAVERLAEIVTMRRQLRDEHVAVENQAAHLEDAMLRRLSKRRLTRLEADIRLLDRRLAEMVATNAAFARLYDLLTSMPGVGAVLAFTLIALLPELGKMSRKQIAALVGLAPYDFDSGKLRGHRSIFGGRMPVRNVLYMAALSASRYNPALKAFSNRLAGADKKSKVIIVAVMRKMITTLNAMLRDNAAWQLKPT

SEQ ID NO: 349972 - protein, 349 aa, unidentified
MANLTIGVDLGDRYSELYVVDAAGACVETGRIRTTVAGLEQWFGGRPPARVVLEAGTHSPWASRVLPRLGHEVLVANPRKLRGLYENDSKDDRVDAEYLARVGRLDPALLKPITHRGEAAQADLAVLSSRDVLVRARTLLINHTRGVVKALGGRLPRCSAEAFARRVGPHVPPAVRPALAPVLEQLQQLTTTIRGFDRAVEHRCAQSYPETARLRQVTGVGPVTALAYVVVLDDPTRFRRSRAVGAYLGLRPRRSQSGEQDPQLRITKAGNPFLRRLVVQAAHYILGPHGPDCDLRRHGERIAARGGKNAKKRAVIAVARKLAVLLHHLWISGEVYEPLRHRPALAQAS

SEQ ID NO: 349973 - protein, 341 aa, unidentified
MSEVSTIGLDLAKHVFQAHGADASGTVVFRKRLRREKVLEFFASKPACLVAMEACSSAHHWARELARLGHIVRLIPPAYVKPFVKRQKNDAADAEAICEAAQRPTMRFVAVKSEMAQANAVVFRARDLLVRQRTQAINALRGHLGEYGLVAAKGPSHVIKLVAYVEDPGSDVPDAARLVLRTLVEALRFLSERIDLLDREIARRAREDDEVRQLTSIPGVGPITAVALAALAPPAGAFRKGRDFAAWVGLTPLQHSTGGKQKLGATSKMGERTLRRLLIIGASSVVRKAIRQGTAAGSWLGRMLARKPRMLVIVALANKMARIAWAVQARGEVYRAPAVVA

SEQ ID NO: 349974 - protein, 347 aa, unidentified
MRRVHMSLIKAAGIDLAKLVFSIHGVDAHDKCKLRKTVKRNKLLAEVAKLPPCIIAMEACSGAHYWAREFTKLGHDVRIMASKFVIPYRQNEKNDANDAEAICEAATRPKTRFVSIKSEEQQAVLCLHRIRQGAIKDRTARINRLRGLLSEFGIIIPKGRYPLQNAMSGILEDAENGLPFLARELLNELWQSIKGLSEEILKYDRKLYALANQMKDAKRLMSIPGIGEITATAVVATVNDAKHFETSRSFAAWIGLVPRQYSTGGVVRLGRISKRGEKHIRTSLIHGARAVIANCKHKTDRTSLWIKDLVERRGFKRATVALAAKNARLIWALLHSCLLYTSDAADE

SEQ ID NO: 349975 - protein, 310 aa, unidentified
MKDNIGIDVSKTHLDVYRTSIDAHARFENTPAGFRALNRWIGTDLPDLVVYEPTGPYHADFERAFAGRLPLVKVNPLQARRFAQARGTRAKTDAVDARMLACMGAALDLMPDRPAEQYQRELKELQIARMALVKDRTRLLNRLKTQSLAFTRRQTKARISQVERQLTVLEEELRTCLRSCPRRARAFDILHSIPGVGKVTAAAILIECPEIGTLTRKQAASLAGLAPMARQSGQWRGKAFIQGGRKFLRDTLYMPALVAARFNPDLAQKYQGMIAAGKPGKVALTAIMRKLIELANALIKDDRKWSPKPP

SEQ ID NO: 349976 - protein, 394 aa, unidentified
MRFVGIDIGGESHAVAVVNDGGALLVKSTLFGEDAVGYQRLRELLGNHDDCLVAMEATGHYWRNLFAFLVSHGFEVALLNPLRTRRFAEEELERTKTDSVDALGIARFAAQKRPAPTPIADEVTAELRELVRLRTRYVDELSDRMRQLHRAVDLGFPEFTRHVRIKTLLATAILARYPTARSFARVSIHKLARLAYDGRHHVGEALARALVESAKISVGTHHSEAYQLQVSYTCSDIELLRGRVKQLEQDIERKLQDHEVGKLLTTIDGIGARTAACLIAELGDPSRFRDAGALASYVGVVPRLRQSGKRAFSGARGLPLGNARLRHRLWMPTLVAVRRNPWLRAHYDRLLAAGKRPKVALVACMRKLLTAVYSVARNRRPFVPVLATGRSTLK

SEQ ID NO: 349977 - protein, 312 aa, unidentified
MNDKKTSVYAGLDIAKASLQLHLQSKAYDLPNTTAGQAQLIKRLAVLPGVHVICEATGGYERAGVAALHAAAIPVSVLNPARVRQFARASGKLAKTDPIDAAMLTAFGQTFTPAPTPPRTATELKIAALVTRRAQLLELRVAEVQRADTCTDLDLRKLFTSWLAQMGKQIAKVEALIEALLQTHAPLASQVQRLDEISGVGRLTAVMVLATMPELGTLNRRQAAALAGLCPYNRDSGQWIGKRCISGGRAEVRRALYMAALSASRNNHLLKPFYDRLIAAGKPAKVALTAVMRKLIILMNYLLKNPNFTLAH

SEQ ID NO: 349978 - protein, 353 aa, unidentified
MLIIGCDFHPPFQRVAIFDKQTGEVITLRLKHTQEALEFYGKVPAGARIGLESTGYSGWFERAMEKMGHELWVGDATQIRASMTRKQKTDKRDAEHIVKLLLEDRFPKIWVPSNADRDARQLLMHRDKLVRMRTLVKNQLQFLAMNQGLQLKWKLWTEVGQQQFAELEMNPYTSERRASLLRLLEQLEAEVKELDAAVEREAEARPEAVRLMSHPGVGPVTSLAFVLTLGPPERFPGARQVASYFGLIPSEHSSGGKQRLGHISKQGNSLLRFLLVEAGHTACRKDPELARVYGHLKHTRQHTGVAKVAVARKLAVRMYWMLRDRLDYSALIQARTQASLSHPVVGSSDRPLE

SEQ ID NO: 349979 - protein, 344 aa, unidentified
MDTIGLDLHKRESQLCIGHEDGRIEELRIATSRERFSAVLGGRAPAQVLLEASTESEWVARHLESLGHTVIVADPNFAPMYATRSRRTKTDRRDARTLMEACRLGAYRPAYRVSDARRHVRAELAVREALVRTRTRYIALAKALVRRDGLRVPASESHLVARRIAALELSGALAAELQPLFTLLAPLNEQIAAADRRIAALTSTDPMVALLTTAPAIGPITAAAVVATVDDIARFASAHHFEAFLGIVPGERSSGEKRRVGRITKAGNTRVRYLLIEAGWRILRSKDAETAALRAWGLGIAARRGNRIAVVAVARRLAGILYAMWRDQRAYDATQLRMPRAQAA

SEQ ID NO: 349980 - protein, 371 aa, unidentified
MKSIIYIGMDVHKKTYSLCALLKETGEIIGETKIPADVSLIIKFIENAKKSVDSDDVQIKTGYEAGCLGYSLYWQLAEKGIECDILAPSTMHRSAKNKVVKNDRRDAKNIAANLANGTYKSVYVPTDEDVEIKEYIRMMHDFKIELKKVKQHINAFLLRFGHQYPGKSKWVPAHIKWFKELELSDMHREILDEYLSQLEILSEKIERFKHRLEELSQKETYNEKIGQLRCIKGIDTTAAMTMHAETSDFDRFPTANAFASYCGLTPGEDSSGESYHRPSITKQGNSMIRTTLIEAAQVLVRGTIGKKGKKVKSKQKNQDVKVIDYADKAVIRLQKKYHRMIFRGVKRNIAITAVARELACFVWGIETGHIS

SEQ ID NO: 349981 - protein, 402 aa, unidentified
MDGIGRSAGIDWAKERHAVCIIDGQGSAISRFEVEHTDAGLRELVRRLTGVAGVAIERPDGPVIDALLEADIPVVVIASRHVKALRTRYGLAGNKDDRSDAFILADALRTDGQRLRPLHPDTPETVALRALVRARKDLVQARVRLVQQLTAHLELVFPGAVDLFDDLASPIARAFLLRFPSVERAAWLSPKRMAAWLAAQGYCGRSTGAQLHARLEAASRGMVGDAAGTMAAVTLALVHAIEAIREQTGTLEGRIAEQLLAHPDGRIFTSLPRAGRVRAAALLAEIGDCRERFPTPESLACLAGASPSTRQSGQHRAVTFRFACDKKLRDALIDFAGDSRLGNDWAADIYGRARARGKRHPHAVRILARAWIYVIWRCWQDGVPYDPGRHQALQRVLLAPAA

SEQ ID NO: 349982 - protein, 348 aa, unidentified
MRFYTKKHRYYCGIDLHARSMYICILGDEEKPLVHRNCKASPEAFLKAIEACRDDVVVGVECMFVWYWLADVCAKEKIPFVLGHALYMKAIHGGKSKNDRIDSQKIAALLRGGTFPVAYVYPRKMRSTRDLLRRRNHLMRKRSELLAHIQNTNSQYNLPELEKKIAYKANREGVTDHFPDPSVRKSIEVDLQLLDFYDQLLTNLELYIVKKVKAHDVRSWYLVRSIPGVGKILSLVLLYEIHDIRRFPRVQDFVSYCRLVKCPRESGGKKFGAKNSKIGNVHLKWAFSEAACLFLRGNEQAQHYHSRLVSKHGKGKALSILAHKIGRAVYFMLKRKEPFNMETFFVRA

SEQ ID NO: 349983 - protein, 410 aa, unidentified
MRIIALDVHRSFAQTAILESGKLRDAGKIDLEYSRLLRFARKLKPDDEIVIEATGNTSAIVRVLLPFVGRVVIANPILVRAIAWAKVKTDKIDAAVLAKLHASGFLPEVWMPDEETEARRRVVAERTQLVSQMTRLKNRIQSVLHANLIPPYKGVLFSQRGRAWLEAQPLAEDQRRVIVRHAGELDRLGAELAEVDKSLAQKALDEPQVKRLMTITGVNSTVAMSVLAAIGDIHRFSSPEKLVSYFGLNPRVRQSGDKPAYHGRITKQGRAHARSMLVEAAWVISSAPGPLRAFFIRIRDKRGKHVAAVATARKLAVIVWHILTKDEDYTWDRPALLQWKLRKLELKAGHPSRRGGKQKGSAAAYSNKSVRDSEREAISNAEEQYRRFVATWKQQSPKERSGATNEVRRS

SEQ ID NO: 349984 - protein, 357 aa, unidentified
MKQTKYIGLDVHQASISIAVRDSSGKLVMESVIETKATTILEFMRGLSGSLWVAFEEGTSATWLHDLLKPHVVKVVVCDPRKNALLKAGNKNDRVDARKLSELLRAGLLTRVYHGGPGVRTLRELGRSCLTITKDLTRVMNRLKGLYRSWAISCAGRKVYSPRHRASWLEQLPESGVRRRAEWLYQQFDTLAQLRREARKELLAESEKHPASQLLREIPRLGPIRAALLIALLQTPHRFRTKRQLWAYCGLALQTRASGEYRFTDGQLSRARQPTVRGLNVNHNHDLKNLFKGAATPAGAGTDPLSDVYRGLLARGMKPAMARLTLARKVAAIALKIWKKGEHFDPEHLKQQSSLSV

SEQ ID NO: 349985 - protein, 408 aa, unidentified
MLFVGDDWAEDHHDVEIQDDQGRRLSSRRLSEGVAGVAALHAIIAEHLGDSDTAADVVVGIETDRGPWVQALLGAGYQVFAINPLSASRYRDRHVTSRAKSDAGDAKVLADLVRTDRHNHRTVAGDSDLSEAIKVLARTHQNLIWLRQQQTNVLRSTLREYYPAALLAFDDLAHRDALAVLAKAPHPATGRLLRPSQIEAALRAAGRQRNICSRAGQISGDLRTQHLNAPPLVSIAFGDVTRSLVAIIQELVRQIAAVEDALSSAFDQHPDAGVLRSLPGLGPVLAARVLAEFGDDPHRYIDAKARKNYAGTSPITRASGKSRVVLARIARNRRLGDALYQWAFSALTSSPGARAHYDAQRARGATHHQALRSLANRLTGILHGCLRHHTNFDEATAWPDQGQADAAA

SEQ ID NO: 349986 - protein, 348 aa, unidentified
MQSTVQLPVIGLDIAKNVFQLHSVDAATGEIQRRQLKRPKVAEFFANRQPSLVAIEACGGAHHWARTLLAMGHKVKLLPAKHVRAFVLRDKTDALDAQAIWISAQQPHIKDVSVKSEQQQACLTLHSMRQQLMKMRIMQTNALRGLLYEFGIVLPVGHVKLLGSIQSEMTQAQLNNRLSDIVVVSVQEQLKRIDAMQEDIDGLSKRLIALLKQNQQMLAVQAIPGVGPLTATALVASVGDVLPFKSGRHFASWLGLTPRQVGTGGKTQQLGISKRGDTYLRTLLIAGARSIVSRSAHNGWIERLLQRRHFNVVVAAVANKMARTVWAVLAKGAAFDQVKWSPAEPVAV

SEQ ID NO: 349987 - protein, 353 aa, unidentified
MAQTITYRVGFDVAKSVFQVHGVKNEPGEAVAITRRLRRAQVEPFFAKLPPSLIGIEACGSAHYWGRLARKHGHEVRLMPPAYVKAYVKRNKTDAHDAAAICEAVARPTMRFVAVKSEADQATLMLHRLRASFVEKRTAAANQLRAAFAEFGITAAVGAGGFKELLGLIESKVERFTLLPQALRLVLCELAWQWQGCEAAVRRMDVEIAAGVKRSERAKRLTEVPTIGPVGASAIDALLPDPQLFRSGRDFAAWVGLTPREDSTGKTIKRGPITKKGDGYLRRLLVLGATSHLARVRRGQTKGASAWVLKMAAHPKRKLAAVALANKTARVAWAMLAKGEDYHAPAAAALQAA

SEQ ID NO: 349988 - protein, 371 aa, unidentified
MQISTIGIDIAKNVFQVHGVDAAGKPVLKKQLGRGQMLEFFGKLPPCLIGMEACATSHHWARELRKLGHDVRLMPPSYVKAYVKRGKNDAADAEAICEAVTRPSMRFVPIKSAEQQGALMLHRTRDLLIRQRTQLINAMRAHLAELGLVAQTGREGVQQLMRTVAEADNERLPSDARVACQAIIAQLQAVQMQIAGLEKRIHQAHRANPASKRLDAIPGFGVIVSTAVAATMTDPRAFKTGREFAAWIGLVPRQNSTGGKERLGSISKQGDRYLRRLLVVGALAVIRSARARPDKYPWVMKLLGRRPAKVVAVALANKMARMAWAILPRARPIERRRAPAAQRSRLAHKGLGDGNVGSRRERTRTLRVMMA

SEQ ID NO: 349989 - protein, 355 aa, unidentified
MSQNLDVSPAAIGIDIGKTSFHIVGQNKGGAIVLRQKWSRGQVEARLANLPPCRIGMEACVGAHHLSRTLKALGHDARLMPAKYVRPYSKGQKNDYRDAEAIAEAVQRPTMKFVATKTADQLDLQALHRVRERFVGQRTGIINQIRAFMLERGIAVRQGLRFLRAELPNILATRTDALSPRMLRILEDLSADWRRLDARIEDLSSEIEALARQDKGCERLMTVPGIGPIISSAMVAAIGTGDAFSKGRDFGAWLGLVPKQLSTGDRTILGSISRRGNRYLRTLFVQAAWVVLVKVGPKHWDRYGLKSWIEAAKKRLHHNVLAIALANKLARIAWAVLHKGRAFECAKTNEAYRPA

SEQ ID NO: 349990 - protein, 341 aa, unidentified
MTLYIGVDIHARQQTVSYLDTEDGTTGQQELQHERDDIRAFYSQFSGEVIVGIEACGYTNWFEELMEELGHKLLVGDAAEIRRLARRRQKNDRRDADLLLELLVHDEFPALFRYPRESRELLRQLRYRHKLVKLRTAVANSLHALAINCGLSLRAQLLTSGGRARLQELRLSPIAQQQRNELLSLADELSRRVVAVERWLKEQARNDDRVMRLQTHPGVGLLTSLCLVHTLGDLARFSSTRKVAAYVGFDPVEHSSAERKVYGWISKAGSRLLRYLLVEAGQTACKHDEQLKQFYRRLGPRRGKARAKVAVARKLLIRCFIMGRAEIDYAEFLRRGKKVAE

SEQ ID NO: 349991 - protein, 372 aa, unidentified
MIVIGADTHKDSHTVAAVDVATGGVIADLTVRAKRRAFDDLLVWARDLRGERVWAIEDCRHVSGALERFLLARGEQVVRVPPKLMADARRCARERGKSDVIDAVQIARAALREGLQTLPIARLAGPELDVRLLVDHRERLVGQRTALINDLRWQCHDLWPEFDIPTRSLISACWQERVAGRLARAEQTARVRVARDELRRVRELTRSVNALERELAELVAGLAPQLLAEQGCGVLTAAKLLGEIAGIGRFATDAKLARMAGSAPIPASSGRTQRHRLDRGGNRQINCALHRLAICKARRDPETAAYLARKQAEGKSRREALRCLKRHLARRVWRLLQPPREHHAPAPSPPPASPTRTVTIHCNTPSSRFSLT

SEQ ID NO: 349992 - protein, 405 aa, unidentified
MQETTQHDAVDVFVGVDVGVDVGRGQHHAVALDRNGKRLYNKALPNDEVKLRALIAELKTHRRLLFVVDQPSTIGALPVAVARAEGVLVAYLPGLAMRRIADLHAGEAKTDARDAAIIAEAARSMPHTLRSLRLADEQLAELTMLRGFDDDLAAQVTQTSNRIRGLLTQIHPALERVLGPRLDHPAVLDLLERYPSPSALAAANEKTLANRLTKLAPRLGKNLAAEIVQVLNEQAVIVPGTQAAAIVMPRLAQQLAALRKQRDEIAAEVERLVLAHPLWPVLTSMPGVGVRTAARRLTEAAPKALATAAHLAAYAGLAPVTRRSGSSIRGEHPSRRGNKVLKRALFLSAFAALRDPVSRAYYSRKIQQGKRHNQALIALARRRCDVLFAMLRDGTIYPPKSAPNA

SEQ ID NO: 349993 - protein, 343 aa, unidentified
MPAAITTVYRRFVGIDIAAATVTASWASDGDPPGRPRSFANNREGFAALQQWLQADGGTPATTLVVMEATGSYWVAVAVALHEAGDAVAVLNPAQVHHYAKSDLRRAKTDALDARLLARFAAERRPAPWSPPPAVYHHLRQRLVARDALLEMRTAAHNHRHVLLQWPVVVESVRQQLDEVVASLDGRVATLEEEIEEVLRDGAWASSATLLLGIPGIGLLTAAWLLVATVNFSLCPTPEAATAYAGLAPLPHESGSSIRSRPSIGRGGNGRLRTALYMATLSATQHNPVIRPFYQRLRDAGKPMKVARCAAARKLLHLAWAVVTKARPFEVPKPTAEVLALAS

SEQ ID NO: 349994 - protein, 353 aa, unidentified
MDSLTDLRAEVDVVIGVDTHVHTHSAAVLDTATGGVLDEVTVEATTEGYAELVEFANNHATLRAWAIEGTSGHGAGLSRHLLESSEIVIEVDRPKRAARRNGAKSDPLDAIRAAREAMARPRVGSPRGGGDRQALSVLLAARRSAINASTEAQLQVFSLVIAAPEPIRARFRGQKLAAMLNTAAKLRVHPKWDVETTSTVVALRTLARRAHTMLQEARELEKAILAIIRSWRPDLLEEFGVGPIVAATVLCAWSHPGRIHSEAAFAMLAGVAPIPANSGQVTTRHRLNRYGDRHLNQALHTVVRVRIQYQAATRDYVARRTAEGKTSREIKRCLARYVARDLYRLLENGAAAA

SEQ ID NO: 349995 - protein, 452 aa, unidentified
MEQELISMEIVNPHAAGIDVGSRSHWVAVGQQEQDVREFGVFNEDLFTMAEWLKEKQVKTIAMESTGTYWQNLYAVLIAKGFHVILCNGKFTKNIQGKKTDVKDCQWIQKLHSLGLLISSFLPDEQTDQLRTYCRHRANLLHMTASTSKKMQKYLMLLNLRLDVVVNDICGLTGLSIVRAICHGETNPEVLASLRHGNCRTSKEEIAKALQSNGRKDFLFGLKQELETYDHLQRKIEQCDKEIAIKLNEIIENDENKNQHFIEPKSYKKINKNTPKDIDINLKSYQMFEGTDLLAIEGMSYSSVLSLMSEIGLKGIHKFPTAKHFTSWLRLAPNNKVSGGKILSSKVPKGSNRLKIALRNAANAIGNLKDSTPLRDFFQRINFRKGRISAISATARKLAVIIWNMVVKKVPYLNPEGYLFLDQKRKLGLVKRIKKQIAKFALTNEDLGIVTA

SEQ ID NO: 349996 - protein, 430 aa, unidentified
MEQVDGIRLQRFRQLKNEIRGSDEYLIVGIDVAKERHNAFFGTAAGRTLHKGLFFNNTIEGFRKLLTMTEALKVQQDLTKVVFGLEPTANYHKPLGEHLIQCGHLVVLVAGAAVKHNRPLLDGRWDKHDTKDSANVADLICQGKFLYYEYPDPEIQDLRNLLALKRRLKKEEHGLQVRIRNQLLAQYFPEMDQHYGTALSLAVVGRCLDPSIIAGMEFDEFRRSVVPGRMNMAQQKRLQAIWQIAPESIGCHVGDEVPFEAKVMVSKLHQVRETIKEVKDKIEDICMQFPEYLCLLSIPGFGPDVSSKVLGAIGNPFRFISYKQVIKMAGFDLCAERSGKTSNGATPVISKQGKADLRYALYQAGFVASHHNKAFMTYYTNKLRGRQREKGISTKMHVKLAAKLLVIAWTLMKKKELFDSKYFNKGDTTV

SEQ ID NO: 349997 - protein, 367 aa, unidentified
MKQQTSATTETGIKGSNTVDFTGKAIFVGIDVHQKDWQVAKVIDGICLGNHRMKASYKELIEHLRSRYPGAVFKCVYESCAWGFTLQRQLQQADIDCIVVHAADVSTTDKEKRRKSDKVDALKLARDHESKQLKAIHIPDEDTQKDRNLIRLRKKLTGDLNRSKNRLKSLLKYQGIDIPERFGKACWSYNFMNWVEQQAARDLLLKDTLLLMLEEVRLLRQLLLKAERKIRELMQHKYSQQATLLISTPGIGQTTAMLFILETGDIRRFGSFDQLNDFVGFCPDTDSSGDMTRDTGITIRRHKQLRTALLEAAWRAIRIDPALLETYQQLTKRMKVHQAIIRIARKLLRRMRAVLLSGIPYQKGRVA

SEQ ID NO: 349998 - protein, 401 aa, unidentified
MNAVGIDVSKGKSMVCVMRPFGEVVLEPFEVLHTAQNLRDLAGKLKALDGETRVVLEATGNYHKPVAFVLHDAGLFVSVVNPVLIHDYDNNSLRRVKTDRKDAVKIANYTLDKWTRLRQYLPEDDARLALKNCYRQYQQAVAIRTMLKNNLISSLDLTFPDANKLFTSPAKNNGCEKWVDFIGDFWHSECVSSLSPDAFSKKYLKWCQKHGYYFTRSKSDEVYACAVSAASLPKSTTSKILIQQQVAQLKAVSQSVAAFQQEMLRLSQQLPEFDTVMEMYGVGPSLGPQLMAEIGDVRRFSSKKSLIAFAGIEPQPNDSGKVVGNDKGISKVGSAVLRRTLFLIMSVILQTQPQDEPVFQFMNKKRSEGKPYKVYMMASANKFLRIYYARVKAVMDSERSQ

SEQ ID NO: 349999 - protein, 409 aa, unidentified
MIYCGIDWAERTHDVALVDDSGQLLAKRHITDDAAGYKILLDLFVEYGDTEENPIPVAIETSRGLLVAVLRTGKRQIFAINPMAAARYRDRHSVSRKKSDPGDALVLANILRTDMHAHRPLPNDSDLGRAIAVLARAQQDSLWNRQQLSNQLRSLLREYHPSALAAFEPWRNGLCRPEAREILKAAPTPTRAARLTRPQLEAALKRAGRKRGIEAEAERLRDVFRSEWAHQPPLVEDALGKQMLALLIQLEAACTAADDLAEAVEEAFPQHPDAEIILSFPGLGVQLGARVLAEIGDDKTRFADARGLKAYAGASPITRASGKKSTITRRWVKNDRLNHAGYLWAFASITASPGAKTHYRRRRDDHGDWHAAAQRNLFNRMLGQLYYCLQHHEMFDEQTAFPTELAAAA

SEQ ID NO: 350000 - protein, 408 aa, unidentified
MKTLHKRCAGLDVHKAEVVACLRLISKRKVEREVRRFPTTTQGLLALAEWLESAGCTHVAMEATGVYWKPVWHILEGRLALILANAAHVKNVPGRKSDVNDATWLADLLAHGLIRSSFVPPPAIQELRDLTRTRRQLTREIVQHVQRIQAVLEEANIKLCSVITDIMGASGRRMLKAMIAGETDAEKLAALGHERLGCTRAELVEVLTGRVREHHGFLLGQHLRTIEQLEDSVAAFDARIEAALSPFHDIVERLKEVPGLAAIATETVIAEIGTDMSPFPTVGHLLSWAGFAPRLDESAGKHRSTRIRKGAPWLKPILVQAAWGAARKKNSYFQAQFLRLKARHGAKKAAIAVAASILTTVYHMLRDGTCYQDLGPEYFTRRNPAQAAARLANRIRNLGYHVEIRAAA

SEQ ID NO: 350001 - protein, 411 aa, unidentified
MNPVVGLDISKGESQVQAFLDKGKPYRKSFKITHTLEGLKDLVIFLEDVKNEAGMKPTIILEATGHYGAPVIHHLEERGYLLIIINPLISYKARGSSLRKVKTDAIDAYLLCELFFKEELEPNKKRGVQLLNLRNLTRQHENITGVMIQTKLQFQAVLEQVFPEYKGVFGDLYSNVSLLTLSEFPSSEDILKASEESITDKIYELCKSRSIKWANEKALQLKVAAARNPFEKTVYQSHILSLNMYIKILLQYKEHLSKLESEIDALAKEIEEYSIIKSIPGIGEKIAATIISEIGEIDRFNNPKKLVAFAGVDPSVFESGKFSATKNRITKRGSSRLRHALFMAVRCAIRDCRKTRTDDKIIPRNKKLREFYDKKRDEGKPFKVAMIACINKLLHWIFALLKNRTTYQDLA

SEQ ID NO: 350002 - protein, 299 aa, unidentified
MNYIGIDCHISSLDFAVVNERGTVTQKAKVNTGVKEFMAFVKSIPKPRKIFIEEGELAGWMLETSLKFGEQLIITDPKINKWIGKAGQKNVRIDAEKLAQLARGKYIKEIYHPVNNRRKFKDLVFAYHDTVKSQTRIKNKIKANFRRNGIRCSGDTVYSDKYRDKWREKLSKNKITHLIIEELWVQLDQLRESKEKLKRNIRIQSKQYPEIKKFKEVPGIGLIHASTISAIIETPHRFANKKKVWMYAGIGLMERSSGETVYSRKLTREYNRPLKNAIKKAAEAAISAKDNQFRRQYLD

SEQ ID NO: 350003 - protein, 328 aa, unidentified
MDTEEEFESFQLSMDDVKRFCLSLDAEDSLAVEATSNSAGVCDQVRSCVGRLVVVNARRFELIRKSVNKTDRNDARARAYFLSKDMFPETRLRTHAETELGALVQTRDVLVKQRTMLLNKIHAIFTRHGIKLKKESLSSKRSLTDLGISQFTPVEQIELGVLRDQALRLTDTLKRLDKAIEKTAEQIDGYEEISSIKGIGARSAAILLAGIGNVDDFASADKLAAYFGSVPRVSQSDETDNRGKITKRGDRLLRTTLVQYTLIAIKYSGCLNAFYQRIKARRGAGKASIATPQKFLSIIYDTLKNRWIFEDFTKVKIKENQCPAGHPS

SEQ ID NO: 350004 - protein, 480 aa, unidentified
MPIAGLDVHKRVVQAFVLEDDGSVRLRARFDCDRESLEYFALNHLGPRCRVALEATTNTWAIVGVLEPLVADVIVSNPLRTRAIAEAKIKTDKVDAEVLARLLAADFLPTVWKPDADTKTLRSLCSRRSSLVSDRTTVKNRIQSVLHQRMIAVSFKDLFGKKGRAWLEKLDLDPLGRAAIDSELRLLDRIAEEITAMDHTLAMTAAPDARVPLLMTLPGVSVTVAQTLLAALGKIERFRDGDHAASYIGLVPSTRQSADHTYHGRITKQGNGHARWMLVQAAQHVASHPGPLGNFFRKLSKKKNRNVAVVATARKLVVIAWHMLTKNEPYRYAIPRSTENKLAKLRVLTSGGKRRTGPRKGVPRPATYGSGVGTRAVPSIEQVYEREGLPAPKALSEGEKRTVKAAGAERFVREIHSERRETRNKGVRAVAAAAKVTAQAEKAARGIVVFQAEPPAHDATRSMADRARAATHQKDGNHSL

SEQ ID NO: 350005 - protein, 412 aa, unidentified
MEVVYPRCSGLDVHKRFVVGCLSLIHNGERHKEIRQFSTMTSDLHVLKEWLKAAGCTHIAMESTGVYWKPLFHVLEGEFEICLVNAQHMKAVPGRKTDVKDAEWIADLLQHGLLKASFIPSSEQQAVRDLTRTRMRLIQERHRLVNRIQKVLEDANIKLASVVSDIMGMTGHLILSALLAGQEDPERLAHLAQGKLIRKQDQLKAALQGQLASQHRVLLEELLELIARLDRSIARLDREIAERLGPHDDLIERIDEVTGLSRRSIEVLLGELGWDMSHFPDAAHAASWVGICPGNHETGGKRLSGRIRPGNRWAKTVLIQAAHAAAQTQTYLGEQYRRIRARRGAKRAAVAVGHSILVIFYHMVKTGESYQEKGADYFLTAEKQKLQQRLVRQLERLGNTVILQPKAETASA

SEQ ID NO: 350006 - protein, 414 aa, unidentified
MERTYKIAGIDVHKSMLAVVIADAAKEGAFQFQRRKFTTLASGLEQLAAWLLQEDVQEAVMESTAQYWKPVWQQLEGQCKLSLAQAQSNRAPKGRKGDYKDAERLLRRHVAGELILSFVPSPEQRLWRTMTRSKHQLTRDRVRMQSQIESLLEDAHIKLATQVSDLLGVSSRRMLQALAEGEGDPARLAAMADPALRATPEQLQDALRAAPTMGFLHRQILGLFLSRLELVESHMQILEKSIGQGLQEHQDAVQRLAEVPGFGVDSATQVIAEVGPTAGTFASAPELCSWVGVCPGREESAEVSRSNRSPKGNRMMRRVLTQVANAAVKSKGSVFDATYRKLVVRLGHKKAIWAIAHRLCRLTWKILHEGASYIEYGMRLNAKAVQKRARRLLRDLQALGYQVRITPSPSLATT

SEQ ID NO: 350007 - protein, 318 aa, unidentified
MTSKRTKTNIGIDVSKQQLEVAVHESDYHCRCPNKPAAFAELIAELIALRPVRIVLEATGGLEIPVMTALHTAGLPVIVLNPRQVRDFAKALGQLAKTDRLDARVLAHFAAAIKPPLRPIKSADELELDALMGRRGQLVEILASEKNRLASAATTTVREEIEEHIDWLEERIATLEQQLKKFLKRSAHWQRRDVIYQSVPGIGSVVSLSLLAELPELGTLNRQQISKLVGVAPLNRDSGNQRASRHIAGGRARVRCMLYMAAFNAIHRNPVIKAFYERLRARGKLYKVAITACIRKLLTIINVMVRDNTTWKLNEVSP

SEQ ID NO: 350008 - protein, 302 aa, unidentified
MIIIGVDFHPEFQQIASVDTETGEFQEKRLAHREDAETFYRALAGQKVRVGMEASGHARWFERLLAELQFELWIGDAAEIQSKRVRKQKTDRQDAQLILRLMLKDDFPQIWVPSWENRDLRQLLWHRHRMVQVRTRIMNQLQALALNEGLRCKKRLWREHGRRQLESFRLAPWASRRRRDLLELLDRLNPTIAELSQAIEQEAEKCPEAQRLMTHPGVGPLTALAFVLIIGKAERFQCGKQIASYLGLVPLEKSSGNRRRLGHITKQGSSMVRFLLVEAAQVTVRSLPEWRRKYVQLMMRRG

SEQ ID NO: 350009 - protein, 408 aa, unidentified
MLFVGDDWAEDHHDVELMDASGRTLAKARLPEGVAGIARLHAMIGERLGEGAEDTAGLVKIGIETDRGPWVQALIAAGYTVFAVNPLQAARYRERLGVSGAKRDAADAHMLADMVRTDAHQLRPVAGDTAGAEAVKVVTRAHKTLIWERTRAGQRLRHALREYFPAALEAFEDLDAADALELLAKAPDPASAARLSTAQISAALKRARRRDIAVKTAKIQAVLRGEHLGQPAVVASADAVSVRALVAVLGTLNEQVKILQEQVEAHFGRHPDAEIILSQPGLGAILGARVLAEFGDEHDRYASAKARKNYAGTSPITRASGKKKVVAARFVHNDRLIDALMTQAFASLRVSPGARAYYDRQRARGADDNAALRQLANRLVGILHGCLKTDTPYSEATAWSHHLTESAA

SEQ ID NO: 350010 - protein, 410 aa, unidentified
MEALLERCAGLDVHQASVVCCVLIGAPGRRPQKLLRSFGTTTRELQALRAWLAEHDVTHVGMESTGVYWKPVYAVLEGHFDLIVGNAHHIKNVPGRKTDVKDAEWIAQLVRHGLITKSFVPPPAIRDLRELVRCRRTLIETRTAMRNRVLKLLEGANIKLSGVASDVFGVSGLAMLEALAAGSTSASEMARLARGRMRRKHAALEAALEGHMREHQRFLLAMQLRQLGAVERDLEALDARIDAQLEPFRARHQLLLQIPGVDRVTAAAILAEIGTDMGVFATARRLAAWAGLAPGNYESAGKPKGAAVRRGNVFLKSALFAAASAAVRTKGSYYRDKYNRLRARRGPVRALMAVAHKLLIAAYHMLATGETFRDLGESYLDQVTRKRSTARLVQRLSNLGYDVTLVPKAA

SEQ ID NO: 350011 - protein, 410 aa, unidentified
MSILDVALDPATVVVAVDPGKVTNRVWVSDGTGLLEQPVSLPVARVGVEGLEAMLAAHAGGEPVIAIEATGSLHRAWAAELERLHPGSIRLFAPSETKAARTQLGSGRFKTDDRDCAALTYLARQGAGRRHVDESGVDTLRGAVRHRRGLVADRKKAQQRLHDQLNALCPGLSAPAGHGRSLAIERSTGQAVLSCAVAFAGRAPTRRSLIARAPGRLTKRNADHWVDRWRGCLAPPPDAEQRAQRLGRDLDRHRSLQADIALLEGEIAVLLAGTEGQVLTSLPGVAVNRAAAFAVHSLPITNFPDAEHLYSATGLAPAMYESASLRRRGRISRQGLAEHRDALMGIAWGLSLFSPSFAQRDAELRARGMAPIQARVALARNACRLAYRLLVTQQPFDEEAYRRGRLSRGR

SEQ ID NO: 350012 - protein, 455 aa, unidentified
MRIFIGIDIGKEYNYASFLNNEGIEIDKRFKFKNNHLGFLSLKDNIDKLTYDCNFNYDDVLIGFESTGHYWINTDWFITEKLNIKTVMVRNDAVRHTRALNSQGKGKNDSLDSRTIAECLKNGYYFDVQGRKEDYIVLRRLTRERTELEKEIARYKNRFRAWLDVNNQIFLENFSNVFSAGALALLKVYPSSLDIVQDSYLEVREKLKEVGYKRTNNTFKIYYEEARTYKNIINGITYADRLEINEYIEALEMYMKKKESLDEKIEALMNYLEGKVYNSLSQVKGMPKAQVASLLAEIGNVNNFKSARHLISYAGLNVQGEGSGKNKGYSWISKTGNRRIRKEIYVITFTLVKHNDYFRGLYCYYKSYKRPNEKSNKEMLIALACKILRVIYGMLKYNVEFNLNEMLKNYDFRNINKEKFIDEFLGNSEKKQKIISKEIENIFLSNRKSNEKSDD

SEQ ID NO: 350013 - protein, 310 aa, unidentified
MAQPLFAGIDVSKARLQVALGNDSFSMEYTEENISVLVEKFKAASPQLIVIEATGGLEGPLVAYLAEAQLPVVVINPRQARDFARATGELAKTDKVDAQILSRFAEAIKPPQRPIKDAERRQLSDQVTRRRQIVGMISQERNRLCRASAQVRKDIELHIAYLKERLDQSNKDIEKIIKASSLYQETAELLGTVPGIGPVTIASFIAFCPELGNLNRRQIAKLVGTAPLNRDSGPKTGPRCIWGGRKTLRNQLYMATVSAISCNYKIREFYLRLSAAGKKPKVAITACMRKLLTIVNVILKEQKPWQLSAV

SEQ ID NO: 350014 - protein, 355 aa, unidentified
MSQEKYIGMDVHQATISAAVRNAQGKLLMESVLETKADTILEFIQGLRGTLALTFEEGTSATWLHDLLKPHVSRLVVCDPRKNALLKDGNKNDRVDARKLAELLRTNQVRPVYHEKHGTRALKEVGRSYLTVPKDVTRVMNRIKSVYRSWAIPCAGTSVYTRRHRAEWLAKLVEPGVRTRAECLYQQLDSLEPLRQAARRELLLESRKHAAVKLLRQIPAIGPIRAALLVALLQTPHRFRTKRQLWAYSGFAVEVHDSGEYRWVRGKLHRNRERITVRGLNDNHNKDVKNLFKGAAISASTRPGPLHDFYVARVESGMRPTMARLTLARKIAAITLTMWKKGVSFDPQQLPRQAA

SEQ ID NO: 350015 - protein, 392 aa, unidentified
MFFLGIDIGKNTHVASLIDDNGKTVFKAFSFPNSTIGATSLLDKLTPFSNEIEIGMEATGHYWLALYSFLVEHGFVIHVINPIQTDGWRNATEIRKHKTDIIDSLIIADFIRYGEFLETSLANEDILSLRNLTRFRNYLVSSIGDLKRKTICILDQIFPEYESVFSNIFGKTSKEILLHFSSPAEFESITSEQLETALEQVSFKKFASKKISYISNIAKTSFGITFGLQSLTLQLKLLIQQINFIEQQVHDVEIQIKQLLHKINTPITTIPGIGDIIGATILGEIGDIERFSNPSKLVAYAGIDASVHQSGDYISTNNKMSKRGSPYLRTALFRAALIASVHDPVFKAYYQKKRSEGKHHLTCLGAVARKLCYTIHAILKNNCEYKVQLPTE

SEQ ID NO: 350016 - protein, 405 aa, unidentified
MEPSTTPDIIIGLDVGKTGHHACALTTTGERIYDKPLPQDEAALREILASMQAHGSVLMVVDQPNTIGALPIAVARDCGCTVGYLPGLAMRKAADLYPGRSKTDRRDAFIIADTARTMPHTLRAVDRDDETLAALKMLAGFDDDIAKDATRTKNRLRSVLTQIHPALERVFAGEILSRTLVLDLLIHYGGPTKLAAAGRGRVLKWMRNRAKKDPAALVDAIFAALAEQTVTVPGTAAAELVIPQLAANIKALQAQRDTIAEQVEEMLESFPLAEVLMSMPGVGIKTASNILLSIGDCQDFADAAHLAAYAGIAPITRRSGTSIRGEFPARAGNKRLKNAMFRSAWIASNCHPASRDYYLRKRAEGKKHNAAVMCLARRRCNVIYALLTRREFFREIPARTIATAA

SEQ ID NO: 350017 - protein, 411 aa, unidentified
MRLFVGDDWAEDHHDIEVMDEAGKVLAKRRVPEGVAGMTQLHALTGRFLPEDAEDAEVVTGIETDRGPWVAALIAAGYTVFPVNPLQASRYRERHGVSGAKSDGGDAHMLADMVRTDSHQLRPAAGDTPEAEAIKVVARTHKTLIWDRTRAAQRLRHQLREYFPAALAAFEDLDAPDVLELLGKAPDPARAAKLTRAQVAAALKRARRRDIAGKTDAILAALRSEHLGQPAALTAAYAATARSLIAVLTTLNAQVKILEEQVREHFGRHPDAEIYQSQPGLAAILGARVLGEFGDDPRRYVTAKNRKNYGGTSPITRASGKKKVVAARFIHNDRLVDALMSWAFSSLKASPGARAFYDEQRAKGHDHSDALRRLANRLVGILHGCLKTRTLYDEATAWGHRENLPQSSVAA

SEQ ID NO: 350018 - protein, 375 aa, unidentified
MKEKVRFLGLDVHAETIAVAVAEQDGEVRSLGTIANREESIRKLVKKLGPVEQLRACYEAGPTGYVLYWQLTQLGVECAVVAPTLVPVKVGDRVKTDRRDAAKLARSHRSDDLTAVWVPDEGSEALRDLVRAREAAKQDQLRARHRLSKFLLRTGRRPAMGLKAWTERYLAWVQQIQFSQPAQEFTLLDYLHEVQHMDERVQRLEQAITEAVKLASPQVQEVIRGLQALRGVAHLSAVTIAAELGNISRFESARKLMGYSGAVPSEDSSGKRQRRGNITKTGNAHLRRIAVESAWSYRFRPAIGPRLRQRQEGVPEEIKEIAWKAQIRLHKRYLKLMAAGKDKQKIITAVGRELLGFVWAIGIKAETAGKLQMAA

SEQ ID NO: 350019 - protein, 345 aa, unidentified
MVVLGADLHKRSHTIVVIDATGRQLAEKTIPATDTGHLELRRWAAQWPERMWGLEDCRHLSRRLDAELVRAGESVVRVSPKLMAGARRSGREPGKSDPIDALAVARAVLREPDLPVATLDGPDRQVRLLVDHREDLVGERTRHEQRLRWFLVELAVAEPAPRSLGRAVVQATLSAALAGRTEPVARFARDLLARIVELSAAIRALEREIEGLVRTSAPTLLALPGCGALTAAKIIGEAAGISRFRSKEAFARHNGSAPVPVWSGNIVRHRLNRGGNRQLNAALHRIAITQIRLAGPGKAYLDHRLASGDSRTEAIRALRRRLSDEVFRRLRADEAAGTTGLAAAA

SEQ ID NO: 350020 - protein, 248 aa, unidentified
MNKNKHFIGIDISKNVFDAWSPKLGYKQFKNNPEGFEKFLLLLDSDCWCIMEYTASYYQQLACFLYENQVPVSVINPLVIKRFIQMKLQHNKTDKSDAKMIVQYAQEQPVSLWTPLPEYIEECKDLQTTTSLYHKQKTALNNKLISLLDKGVKGRVITSLKRQIRQLEAEIKLLEKEQEQRVKEHEQVLLSNISSIPGIGKKTAILLIICTNGFRSFENAKQLSAFFGLSPVQVYVAKHVYRKKEILW

SEQ ID NO: 350021 - protein, 309 aa, unidentified
MKEQLVYLGIDIAKSYLDGAIENEKRRFSNDAIGHRQLIQWIKQMPAKVQVICEPSGGYERALVRALVGTQLKISLVPANRVRQFARAKGILAKTDRIDAKLLCSFGEAMQPGTISASQLEQEQLREVESQRRHLTHLLVMEQNRAARMSDLRVCKMNRRLINQIKKQIEQLDLLIQEQIKASPELCTKAEKLTAISGVGTRTAALLLAQMPELGQLNRRQVAALVGVAPFNRDSGRMRGKRAIYGGRRPVRHGLYMAALVAARHNPILRAFYLRLRAAGKPAKVALTATMRKLLIVLNSALKPDPIYA

SEQ ID NO: 350022 - protein, 420 aa, unidentified
MAIVELPTPVFCGIDWAEDHHDIALVDAGGNQLARTRISDDAAGFTQLTDLLTEHGDSDVAPIPVAIETSRGLLVACLRATGRPVFAINPMAVARYRDRHSVARKKSDAVDAAVLANILRTDMAAHRPLPADSELVQAIAVLARAQQDAVWARGQAHNKLRSQLREFYPAILDAFAQHKHGLCSREARAILAAAPTPTMAAKLTRRRLQTLLKQAGRVRGIQADAERLHEVFKRDYLHQLPQVEAALGQQTSALLRQLNTACDNADQLEEAVTQAFEEHPDAPIICSFPGLAALTGARILAEIGDDRARFADAGSLKAYAGSAPVTRASGKSCKVMSRKVKNQRLAAVGYVWAFVSLTRSPGARAHYDRRRAAGDRHVAAQRNLFNRFMGMLFHCLQNGHTYDEAIAFPQPSAGQTAAAA

SEQ ID NO: 350023 - protein, 346 aa, unidentified
MNITQVGIDLAKLVFQVHGVDGRGKVALRKQLKRSQVAAFFAQLAPCLIGMEACGGAHFWARKLMEFGHTVRLIAPQFVKPYVKSNKNDAADAEAICEAVGRPNMRFVPIKNTEQQALLGLHRARQGFVTERTAQANQIRGLLAEFGLVIPVGIRCIERKLPEFLQDAENGLSGASRALFARLLEHFRTLDRQVEELEREINAWHREDAASQRLQAIPGIGPLTASALVASVGDAKVFHNGRQFAAWLGLVPRQSSTGGKTNLLSISKRGDTYLRTLLIHGARSVLLALKRSPDRADGWLARLTNRRNKNIAAVALANKNARTVWALLAHDRAYQPDFRSASPMAV

SEQ ID NO: 350024 - protein, 319 aa, unidentified
MQGQEMTEAAPVYLGIDVSKARLDFCTTDGESGGVANDRAGIAALVRRVRALGEAQVVVEATGRLHHALWRALDRAGVAVTVVNPARARDFARAEGRLAKTDAIDAAALACFGAATAPPPSPWPGDKFMEIKELEAARRALVTERVRQKARLGEASLALIQRQLSARIAQADRQIAAIEVELDARIEAVAELARRRSILVSIPGLGATTARAIIAGLGEIGTTGHKQLAALVGVAPMNWDSGVMRGKRRIKGGRAALRATLYMAALAASRCNPDLRAFYQRLIAAGKPPKVALTAVMRKLLILANTLIRENREWTPSRP

SEQ ID NO: 350025 - protein, 418 aa, unidentified
MNEPNAIELVACIGLDWADRRHVICLQATGCPEAESLQLEQKPDALHEWIAQQRVRFQGGKVGIAIEQTRGAVIHALMMYDFLELYPINPKALARFREAFRVSGAKDDPSDAELLMDMLRLHRNRLRAWLPDTVETRRLQILAEYRRKFVNNRIRHTNRITSLLKMYFPQALDWAGELGTMQSCDFLQKWPTLTAIQQTRPAQLRKFYLDHHSRNLALIEERLAQIRTARSLTDDPAIVETLSLAVQAEAAQLRPVIEWIPRYDHIIAQQFALHPEHELFESFPGAGPVYAPRLLIALGTDRSRWASAADLQSHSGIAPVTEQSGNSCWVHRRLACSNFIRQTFHEFAAQSIQWSSWARAYYDQMRDRGLRHPAAVRALAFKWIRIIYRCWKDRQPYQEEIHLKALRDKRSPLAGKLD

SEQ ID NO: 350026 - protein, 353 aa, unidentified
MEHFIGCDAHKKFSIFASINEKGEYGPTFRVRHDLEVFRKFLKELPAGSKIALETSGCYYWMVDEMERAEHIPLLAHALTAKRRMEGRHKTNERDARGLAMLLRNGTLPVVWIPPAELRDQREMLRWRMCLSRMRTRVKNRIHGVLQRYNVDIAVSDLFGDAGRVELLARLHELPPYSRHSLLDQLQMVDTVETQISECEQVLEEMLYPSADRDRLDSLPCVGKILSAVMALEIGDVQRFGGPDRLVSYARLVPVARESADWKRKDRCPRDCNMYLKWAYVEAANLISIHRGHWPERHVAQLYERVKQSTKMHGKATMAVARHLAEASYWMLRKQKVYQEPNSKRKVLSSTHG

SEQ ID NO: 350027 - protein, 330 aa, unidentified
MNYSHFVGLDVGKKSFDACLVSLDKELSHHTFPNTPGGIEELLHRVKQHGVEVETALFCAENMGSHVIDLCLSSYQFHFPLALGCPLTIKRSIGLQRGKNDRIDARRIARYACLHYRKLRLYQLPDKDLVRLRNWMVIRDNLVKQKVSSRKLLELPRETSGLADLVTAMTFLEKQLSLVKEKISYVEQEMEKIISSNIALLTNYQLLTSIKGIGPINAIVLLCVTGNFHRFSDPRKFACYCGVAPFEHSSGTSIRGKTKTSNLANREVKVYLTRAAITAISWDPQIKAYYKRKTGEGKHKASVINAVSAKIIARCFAVIKRKTPFVTLRA

SEQ ID NO: 350028 - protein, 397 aa, unidentified
MYIVGIDIAKRKHEAAVIDGDGAVIIKPFSFTNNCSGYNRLLAMLTKAKLPLDEVSFAMEATGHYWLALFTRLQKEGFRVQVINPVQTNSIRSFYIRQAKTDPRDALLIAEVIRFGHFSESTLHPENIYELRELCRGRHAIVSMQADVKRKVIALLDQVFPEYETAFTNMFGDTSMAILQTCPTPKELSEMPLEELCHLIEVSSHKRFRMAKAQELQALARNSFGFAMAGDVFSTMIRLYAKHLDFLKQQVREMDRKIAEIMETLDTPITTITGIGPTLGAYILSEIGDISRFSSAAKLAAYAGIDPTMRQSGEYNGVRNRMSKRGSPYLRHAIWLAASSAVLHDPALKLYFQKKRDEGKPYMASVGHACRKMVSIIYAVMRDNKAYTPCIPNEISA

SEQ ID NO: 350029 - protein, 410 aa, unidentified
MEVLHPRCCGLDVHKETVVACLRLVSDGKVTTEVRTFQTTTADLLRLSAWLAENECTHVAMEATGIYWKPVWHVLDDGEFELVLANAAHVKNVPGRKTDVNDAMWLAELLAHGLIRGSFVPDTQTQEMRTLLRTRKQLVRENSRHILRVQKTLEDANIKLDPVLTDVMGKSGRAIIEALIAGETNPAKLASLADRRVKASQEELREALRGRVRKQHRFLLRLHLNQIDSLAAAIATIDAQVEENLGPFRTAVEQVVSIPGIKDLGAQAIVSEIGIDMTRFPSAGHLLSWAGMCPRNDESAGKRRSNRLRKGAPWLKTTLVQCAWAAVKKKDSYLQAQFYRIRARRGPKKAIMAVAASILTAVYHMLKDGTMYRDLGGGHFDRQSKDQQKSRLVKRLRDLGYAVEIQPLTV

SEQ ID NO: 350030 - protein, 325 aa, unidentified
MSRDPTFVGIDVSKATLEVCEWPDGDVKTFDNHAEGVDDLLAWLAPRNVAVVAFEHTGWTTRTLADRLRDAEIPSVILDAKKVRRFATIIGREAKTDRLDARLIAQFAATLRPNVSAMPTQEERDLQDLARRVRQLGIIAAGEKGKLKQAYRGMTLESVGSHLAWLEAESGRLVAEIDRRIGQRPDWRRRSEIIQSMPCCGPILARTLITELPELGQIGPKRLASLVGIAPMPFESGPTSKRRRLRGGRHWVRRTLYMCSVVGTRNNPVLTRYYRRLVAAGKPPMSARAATMRKILIVLNAMVRDDRTWQPPPHGVPSNDGTEGS

SEQ ID NO: 350031 - protein, 321 aa, unidentified
MTYVGIDVSKATFVVAYSSAKNGKIRTFKNTVKGVHEFIQTVSVTEHHCVLEATGNYSALLVYLLTKAGITVSLENPLKIKNFARVMLTVTKTDEIDARLIALYGERMQPAPYKLRSDSILVLKQKRTVLRQLKKQLVATRNLKGSMETLPFFDPKCKKTIEKTIDFLEKQIKSMEEEIASLAQGEYKKQMDLLTSIKGIGVTLAAALIVATGGFTYFDNAKQLTRYLGLSPTYQQSGTSVNVKGHINRNGDSSLRSQLYVAAFSSLRCNTECKACFDRLRSNGKPGKVAVVAVANKLVRQAFAVVTQGKPYIDGFNSERL

SEQ ID NO: 350032 - protein, 343 aa, unidentified
MQIRSVGIDLGKTTFHLVALGDKGKVLLKKKFTQRQLITFTANLQTTLIGLEACAGAHFLGRALREQGHDVKLIPAQFVKPFVKSNKNDFLDAEAIAEAVDRQNMRFVPIKTDDQLDLQALHRVRDRLITRRTSVINQLRAFLLERGLVFAKSPAKLRERMPEILENAEEGLTPRVRNLLALLWNEWKDLEQQVVDLNHEVELIASSDAACLRLRQIPGIGPLVATAIVASIGNGAAFHKGREFAAWMGLVPKQYSTGGKAKLSGISKRGNRYLRKILIHGARAMVLRCKRERIPMGAWMTALETRAARNVLIVAAANKLARIAWAVLSSGQAYRAVQEPVAA

SEQ ID NO: 350033 - protein, 361 aa, unidentified
MDNVTRWVGLDEHLRQSAAAVIDTGTGEVTEHRIEGGAAQVAAWLEGLPRPWRGVYEAGPTGYTLARRAAAAGLELEVCAPGHVRRRPGDRVKTDARDARRLARLHAAGGLTLVAVPRVEDEQVRDLVRAREDVRADLMRARHRLGTFLMRRELLYPGPGKAWTAAHRDWLSALRLGDRASELTLADYLHAHDLLLARRAGLDAALAEIAEQCRFAPLIGRLRCLRGIQTLAALGLCAEVGDFGRFAHPDRLASYLGLVPSEASSGERRRQGAITKAGSTHARRLLVEAAWHYRRPPRASAALERRQRGQEAWAGAGAWRAQRRLHRRWQRLGAERGKQGGIVAVAVARELSHFCWELAQR

SEQ ID NO: 350034 - protein, 357 aa, unidentified
MTKQLMAGIDLHSNNLMIGIVDQSGKRLKHQKVACDLREVIAVLAPYKARLKSIAVESTYNWYWLVDGLRASSYPVVLANPAGIEQYSGIKCADDKNDAFFLADLQRLNILPTGYIYDAKLRDLLRRRMNLVRYRSALMISFKSLYTRTTGGEMKLGELKTLESAKAAELYEHPANQLIAKTQKEHIEQFDQSIGRIEKAVLKCARELPYYDKLNTLPGIGKILGMTITMEVGEIERFKSAGNFASYCRAVESKRTSNEKGKGQNNRKCGNKYLGWAFVEAANFARRYDESCRRWYDRKAARTNTIVATKALACKLAKAAWHVMAHKTDYDRKRMLPEEFGRAAVSQGNGLVKNLRD

SEQ ID NO: 350035 - protein, 429 aa, unidentified
MSLGTTVPHAGRSHLKPHTSEACAAFVGLDWADAKHDICLQASGSAHREFLHLDHRPEAIDAWVQSLRTRFHGQPLAVCLELNKGPIVSALRQYEFLVLFPVNPLTVAKYREAFTPSRAKDDPTDAELQVEILLKHRDKLTPLVPQSPTMRALAQLVEHRRRLGGDTVRLTNRLTSALKNYFPHVLQWFQDKDTAIFCDFLSRWPTLKAVQLARRATLERFFRAHHVHAADVITTRIEAIKNAVALTTDAGGIAPHTLLVQALVAQLRVTLQALADFDTAMAQRAQAHPDFPLFDALPGAGAVFAPRLLVAFGEQRERFTSAEELQQYAGIAPVTERSGKKSWVHWRWQCPTFLRQTFVEWAAESLRHSFWAQVYYQQQRDKGKSHQAAVRALAFKWIRSLFRCWQDRTPDDESTSLQALHRRGSSLIH

SEQ ID NO: 350036 - protein, 386 aa, unidentified
MKSIFVGIDVSKHSFTACALDTTANKLFFFSASMDNRGLSKLLSALNPYPQNAILIAMESSGLYHIPLFASLSARNFKTLLLNPLLISNYSKLSLRKTKTDKKDAFAIASFLLNYHKLWYKKLRSQPLQQLKELTRERENITSQIAKLKNDIEKLLAVTFPELPQHINPFSKSILNLLCSYPSSHAIKNCPIETINSFLNPTKGRKPLISAQKIVSLAKNSIAPQNKAKEFILSQKISTLIFFSKKLNEIDTIIYELAQRLIADELKILTSVKGIGKVTAIQFLAEIGSISYFESPKKLIAFMGIDPTVYESGQFKGKSRLSKRGNKHLRRIIWLMAHKIVRFNSVFKKYFQKRLSQGLPFKKAIFAVAHKLVRVLYTLLTKKNAF

SEQ ID NO: 350037 - protein, 427 aa, unidentified
MSEVESVRREPQFAAFVGIDWADQKHVWGLQAVGSEKRESGELEHTPEAVEAWVGQLCQRFGNRPIAVALEQLRGALVYMLAKYEPLHLFPVPPTMSASMRKALYPSGSKDDPRDADLLLDLLLQHRDKLHRWSPDTEATRRVQNLVEERRKLVDEKTAQTNRLTNHLKIYFPQILDWFEHLDSELVCALLERWPTLEELQKVPPAKLRSFFRKYHCRDEALTERRILAIGQAIPAIRDRAVIEAKSTVVKVMVQLVRSLVEGIADLDEKIEEAAAAHPDFFIFESLPGAGAVMAPRLLAAFGSQRERYGSANEVQAYTGIAPVTEKSGKKKWVHFRWACPKFLRQSFHEWAGHSIPHSVWARAYYQQQRNKGRDHHAAVRALAFKWIRVAFRCWKDGVAYDEKKYLASLARRGSPLATVAATAKPL

SEQ ID NO: 350038 - protein, 403 aa, unidentified
MNSVGIDISKGRSTIAVMRPFGEVVISPFEVRHTGSELSKLAKQLKSLDGETRVVMEATGNYHASVAKLLHDAGLYVSVVNAKLVHDYGNNDLRRVKTDKKDAVKLANYGLDRWLTLPRYIPEEDTRLLLKNCYRQYRQYSKVQTVLKDNLISLLDTVCPNANRLFSSPIRGDGSEKWVDFVAEFWHCRCVSEKSERAFTSKYLRWCRKHGYNFREAKAHTIYAEVSGHIGVMPKSETTKLFVEQAVSQLRATSTALAALKHEMQALASQLPEYPVVMDMFGVGPTLGPQLIAEIGDVRRFYFKKALVAYAGLDAPPNDSGDVTGRHKSMSKIGASSLRRTLFLVMSVYLQTAPLDEPVYQFMDRKRAEGKPYRVYMMASANKFLRIYYATVKAYLESLEHTA

SEQ ID NO: 350039 - protein, 373 aa, unidentified
MPKYSTAFGMDVHLRSTTVCALDADTGEAVTRRFPGNPWGEIAGWMDRFPGPSLAAYESGYLGFAPQRELAGLGVECVVAAVSKIPRSAADSASKNDRNDAARMAKAILAHDISPVWVPSPEVEGIRDLAGAYDGATARLATAKQRLLAFLARRGFVYGGTTPAGNPRKYWTYDFLRWLDKVRPEDDGGVRALAALRNEVEAAAEARADLLSEYRAAVDASPIAAEVAALQSIKGCAFALAAAFSAEVGDFTRFRSGRQVTAYFGLAPSQRSSGDSVRLGGISGAGNALVRKLAVEGSWCYAAARHQPKLMPRDTGVPLEIRMHGRKGSERLLRRREEMLARGMPAAKANAATAAELVRWLWALGMMCREGAE

SEQ ID NO: 350040 - protein, 380 aa, unidentified
MWAPEPHRREPVVKNVITYVGIDAHKKDLFVAMLVGNQATPVTWTIPNEPRAVRRLVKKLEREAPGPVRIFYEAGPCGYALQRQVTTSRVSCDVVAPALIPRKPGDRVKTNRRDARKLAELGRAGLLTAVQPPTPEDEAVRDLARARDDAREDLQRCRHRLGKLLLRRGLHYAGRNWTRGHRQWIDSLTWVHAAERTVVDDYLLAIDHTAARLLELDAGLAEIAERDPYREPVGWLRCFRGIDTLTAMLILAELHDFRRFASAPALMAYLGLVPGEDSSGEKHRRGGITRTGNALVRRLLVETAWHYQHRPSVGVALTRRRKGQPGRVIAIADKAQQRLCRRFRKLVAEHKPAPKIAVAIARELAGFVWAALQPAPVPAK

SEQ ID NO: 350041 - protein, 409 aa, unidentified
MRYYVGVDWADQTHAVWVVDERGTKITARTVPHTAAGFSEWGRELDEWRAQGIERWAAIERPDGRVVDFLLDHGVAVYPVNPKALDRARDRFRQSGAKSDPFDARVLADFLRTEYLHLRALQPSSDAAQELKLLTEDCQRHIRQQTRLVNQLTATLKAYYPRALEVAELTTALAREFLQAYPTPEALTALTQRQWQRWARGRRLSEARIGALWAVLQQPQLPVPAHVVRAKARLMQSLVEQLTPVVAAIAQYRTVIDDFFARMPAAQWARTLPIGKRGITAPTLWARLGDAPGRWESFRHLQAQAGAVPVTKRSGKQRVVHFRFACDKSLRHVVDQVAFLSLLSSDWARAYYDQQRARGHSHYQALRALGAKWLKIIFVMWHRQVPYDEQYHLATMTRQQLRQRQKQIA

SEQ ID NO: 350042 - protein, 414 aa, unidentified
MEPNTIEFEQVIEKGCGIDVHKETAVATVRGKGIKTETRTFSTFTSSLKEMKEWLSSIGITHIAMESTGVYWKPIFNILEDAFEILLVNARHLKNVPGRKTDKADSRWICKLLISGLLNGSFVPPENIRELRDLSRYRSKLTGQIASEKNRMQRILEDANIKLSSVVSDTSGVVSTKLIDGLIAGRKDLNVLINECYHGKLSASKEELKEALTGRLTAHHAFMLKQMKAHIVYLESQIALIDEEMDKKLAEYNEQLELLQTIPGVGKEGAKGILSEIGANMEVFPSEQHLSSWAGICPGNNESAGKKKSSRSRHGNKYLKSLLVELAWGATRTKGTYFRAKYESMVGRRGKKKALLAIGHKILCASYYIIKDKVPYQELGANYLLERKKKNKIDYLKRQLKELGYNVEKIEKAA

SEQ ID NO: 350043 - protein, 425 aa, unidentified
MNSTQNKKLAQVTENSLIVGVDIGEGKHYARAFDWRGVEFSRKAIPFSNTREGFITFQKWVENVQKKTGKKDLLVGCEPTGCYWLTFQMYLHQRKIRLVTVNPYHVHTVKELDDNSPEKDDMKDPKTIAGLVREGRFTDAYVPEGIYADIREAYICRDQIMKQHVRLANQIQGWLQKYFPEYLDCFKKFDTAGGLMVLQRAPLPEDIIKLGADGINQIWRDAKLRAVGMKKAKTLIEAARDSVGIPGGEAARYELQCLIEDYLIKDRQKDRAEELLKSYLVQVPNIEKLLAIPGVGFETAAGFVAEVGDIGRFTDPKQIQKLAGLEIVKAQSGKKKGCPRISKRGRCKLRRIMYVATKPLVTWNEGFAAVYSRLRYREVHPLGRMQAKIAVACKAIRVFYTILKHGYDYDPNLLIQSDTAPVATQ

SEQ ID NO: 350044 - protein, 397 aa, unidentified
MSTRSVYDMVSAGGMDVHYKFSQVTMRDEQGQVVRRERLDHPDRQALRDRLAQWPKGVPFVMEASFGWGWVADLMNELELTPVLSNCLKVERMRKARGLAKTNKKDADLLSLLPSEKDDWWKVWMAPPEVRDQREWMRYRSGLVKIGTQTQNRIHAIFHRHGIFHEFSDLFGAKGRVFLAELCKDGRAPDVQLAPGALTGLRGQIRLLGHVRGQLAEVAKKLRGQLNRSPLAKRLDGIPGFGLILAHTLMSEIGEIVRFRNHRKVASYSLLSPIADDTGEDDPGRPPTGRRIGKRGNVTLKWAFIEAAHGAVRSGGKWRKIFDRYTDGGKKDRNRGYIKVARELVKVVDVVWRKGVDYTDNPPARPRASRRNKARRYFGSTRSGTGQPCRAMTAAQS

SEQ ID NO: 350045 - protein, 342 aa, unidentified
MEISTIGFDIAKNVFQVHGIDAAEKVVVRKRLRRRQVLEFFKALPPCLIGMEACATAHYWARELTKLGHRLRLMPAKDVKAYVKRNKNDAADAEAICEAVRRPTMRFVRIKSAEQQGQLMQHRTRDVLIRQRTQIINALRAHLAELGLVAAQGNAGVNELRAIVTDEQDTRLPIDARASVIVLAAQLEALESVIGAIEKRIKMQHRSSEASQRVEAIPGIGVIGATAIVATVTDPTIFRSGRDFAAWIGLVPRQDSTGGKQKLGPISKQGDRYLRRILVVGAIAVLRRAQENPGKYPWLTQLLARRPFKVVAVALANKMARMAWALLAHGGTYRAPELAETA

SEQ ID NO: 350046 - protein, 317 aa, unidentified
MAQKGTIVGIDVAKGKIDAAIRFGAEASFANSAEGRRELLAWLKEHGVCKAVMEASGGYEKSWATLLRGAAVEVLITDPNRVRHFAKSAGQLAKNDPIDARMIAWFGEVFGHASRQPHDDERQELDQIVTARLGIGRLKEQIENWGEHEQPKAVQKAQQALLKVVATQLAKLETIIAAKIDKTERFAQRAEIIQSVPGLAGTAAAGLIAFLPELGLVDRQAAAALLGVAPFDADSGKRRGERHIQGGRHKLRKLLFMPVLSAATQHNPVLKACYQRLIAKGKKAKVALIACMRKLIGILNTMLARGEKWDPARHAIA

SEQ ID NO: 350047 - protein, 367 aa, unidentified
MPMLTGKVDTVIGVDTHRDKHTIAVVDAGGGVVATTELATDAFGYTRMLDFAVQHSGQRRVWAIEGTGSFGAGLSTFLLEKGEWVTELDRPTRSRTGAKTDELDAIRAGREALTREHLAQPRQRGDREAMRVLLTTRAGTVTARTKAICQLKALIVGAPQGLREQLRRGTTDQQLDRCARLRTSPQHSVEHRCTVRALRTCARQALFLEAQAADLETELEGLVKAAAPQLLELPGVGVITAAQILISWSHAGRLRTEAAFAALAGVAPLPASSGQTVRHRLNRSGVRQLNRALHTIVLSRLTHHPETKAYAAKRTTEGKTPREIKRCLKRAVARQVYRLLETAAGKQRSTDHRAAATLTAPPAADRA

SEQ ID NO: 350048 - protein, 339 aa, unidentified
MKKYSGIDLHSNNCVVAVIDEADQVLYRKRLPNELSVIVAALGVYRGELHSVVVESTYNWYWLVDGLMEAGFEVRLANTAAIKQYEGLKYSDDAHDARWLAHLLRLSILPTGYIYPKGARAVRDLARRRMRLVQQRSLNLLAVQTTLERELGRRVSANAIKRTGSEVALLHGVEEPNVGSSLTANLAVMRCLDAQIERLEREIVSQVKLAAQFEPLKSVAGVGQILALTIMLETGEIGRFAKVGNFASYARCVQAKRISNGKKKGEGNAKCGNAYLAWAFVEAAHFAVRYYPKVKRFYERKRAKSNAIVAIKACAHKLARAAYHVMRTQQPFDIDRAFA

SEQ ID NO: 350049 - protein, 397 aa, unidentified
MYIVGIDIAKRKHEAAVIDGEGTVIIKPFSFTNNCSGYNRLLAMLAKAKLPLDEVSFAMEATGHYWLALFTRLQKEGFRVQVINPVQTNSIRSFYIRQAKTDPRDALLIAEVIRFGHFSESTLHPENIYELRELCRGRHAIVSMQADVKRKVVALLDQVFPEYETAFTNLFGDTSMAILQTCPTPKELSEMPLEELCHLIEVSSHKRFRMAKAQELQALARNSFGFAMAGDVFSTMIRLYAKHLDFLKQQVREMDRKIAEIMETLDTPITTITGIGPTLGAYILSEIGDISRFSSAAKLAAYAGIDPTMRQSGEYNGVRNRMSKRGSPYLRHAIWLAASSAVLHDPALKLYFQKKRDEGKPYMASVGHACRKMVSIIYAVMRDNKTYTPYIPNEISA

SEQ ID NO: 350050 - protein, 337 aa, unidentified
MAKRSVKSQYVGIDVSAKTLQVAIGGPDGVRDLEFSNDAEGHKKLCKVLTKKGVSVRVCLEATGNYSLDVAIALTATEGVEVMIVNPRSARHFADAQFRRAKTDRVDARALLDYAQRMDFIVWQRPSQERMHLRQYARRIAALIEDTTAEKNRLVASEATGETPRLVLSDIKRGIQQLESRVGELEAAALELIDSAPDLKRLMGFATSIKGIAERSAIRILGELLLLPTDMSPRELVAHAGLDPRPRQSGAKDAKRQISRLGNTRLRAALFLPAMVAARYEPAVREVYERLVARNKLKMVATVAIMRRLLVALWVMILREQPFDPAKFGPKAVLVTE

SEQ ID NO: 350051 - protein, 362 aa, unidentified
MQAAGSRWSRPETDQKEVSMSTYYYIGLDIHKRTISYCIKAIDGSLIGQGKIEADRKSLGEWVQGLPGPWVGAMEATIFTGWVYDFLKPHAVALKVAHPEMLKAITAAKKKNDRADAEKIADLLRVNLLPECHMLSEEIRDLRRVLRYRNHIVRTAVKMQNKISGLLMEVGVSYSKRRIHGRKYFHEILERVEEIPPSVKELLKLSRSGYELFRTFQKRLVETLRTNTLIHDRVQRLMTIPGVGEITALTWVLEIGDPGRFASIRQAVSYCGLCSAQRESAGKEQRGPISKKRNKHLQTMLIEAAKLAPHWNEQLAIVHERELKKGNRNRATLAVARRLVAYMLAVDKKQADFKLPAEMQAA

SEQ ID NO: 350052 - protein, 342 aa, unidentified
MYFIGVDHHKQVSVMTVVDQEGRELKTGRLPNRKKWVERFLEEFHPFTAVVEAGRSSYVMADLLRELGGEVKMANALQVKAIAHARIKTDKRDSRTLAHLLRTDLIPEIYQREEGNRCGQRVIRARAFWVRKKTEVANKIHALLSQQGEAVRLEVEKKKDGLFSQRGLGFLEALSLPGGDKVVLDDLVEGYRQIQGHIKKTDGAVEALYGEEAARIDTVPGFGKTLSVLMAVEIADISRFRRVEELHSYAGVVPSTYSSGERTFHGRITKQGNAWVRWAAIEAVTPACQKDLGLRILYTRLARRKGSNVAKIAVARRLLTIIFRILTEKRDYLPGIKEYSAA

SEQ ID NO: 350053 - protein, 350 aa, unidentified
MKQHSENREVKVMGIDLAKNSVQVYGVDAHGDKAVGKKFSRQKLKEYLVTLPVCTIAMEACASAHYWARLLKSYGHEVKLIAPQFVKPYVKSNKNDAADAEAICEAAQRPNMRFVPIKEIGQQDIQSIHRMRSLTVERRTAQINQIRGLLLEYGIAVPKGRSKLLKRLPEILEDAENGLTDLFREELFGLYEELHHLDERIAHYDEKIKLIARTDERTKRLQTIPGVGPKIATALLAAIGDVHAFKNGRELAAWLGLVPRQHSTGGKPTLLGISKRGDVYLRQLIIHGARSIMFTVDRKTDRTSRWAATLKGRRHTNIATVAMANKMVRVAFALLRNGETYCADSTPTTA

SEQ ID NO: 350054 - protein, 377 aa, unidentified
MNEFNQVYVGLDVHKETIAVAVARPGRSEPEYHGNIVNSDAAVRKLLQQLSRSGKALSFCYEAGPCGYGLYRDLMALGHDCTVVAPSLIPRKAGERMKTDRRDALMLARLHRAGELTAVWVPDQEQEAIRDLTRAREDMKAIELKARQQLGAFLLRHGRIYQDGKSRWTQAHFRWLETVKFDSPVQQIVLQEYLDTVKAAQRRVAGLEAQMQEALAQWSLRPVVEGLMALRGVSLITAMTTLAELGDITRFDSPQELMAYLGLVPSEHSSGGSRRQGRITRTGNGHVRRVLVEAAWNYRFSARKTRCIEKRAEKCPAAIQAIAWQAQKRLCGRYRTLMEAGKAKQQVTTAVARELAGFIWAIACESMGKAHGSKALA

SEQ ID NO: 350055 - protein, 414 aa, unidentified
MELLHERCAALDIGKKDLKACVRTPSPKGKRSRRQEIRTFATTTNALLELRDWLVAEQVSLVVVEATGDYWRGAFYLLEDQLNVILVNAAHAKGLPGRKTDVCDAAWLCQLGECGLLRASFVPPEPIRQLRDLTRYRTTLTAERSREAQRLEKELEDAGIKLSSVATDITGVSGRAMLAALIDGERDPQVLAEMAKARMRPKIPHLVQALTGNFGEHHAFLCRLHLQRIDELTAAIAELSARIAEQMRPFARQLEHLMTIPGVGQTVAEVIVAETGTDMGRFRTGANLASWAGVCPGHHESAGKRKSGKTRHGDRWLTGALGTAAMAAARTKDTTYLGARYRRLAPRLGTKKALVAIEHSILVAVWHMLTNNVDYHDLGGDYFARLDPERAMRRIIRQANSLGFTVRFDPIQAA

SEQ ID NO: 350056 - protein, 335 aa, unidentified
MTKKAQSELANFAGIDVGAQQLHLVRRSNGVSSKPQAFANTPRERRELAKKLAKVPNLIVCLEATGVYHQDLALALHDAGVRVMVLNPKVAHNFAKVLRRDSKTDSVDADTLAQYPERMPFEPWARPSTAALQLRAFSRRIEAVKDKKRAAKNQLHALRFSPETPKSVLQDALKEIEQLEQRLVTLTKEARTVIASNPTLHGCYELLLSVKGIAQTSAIALLGELAMLPAGLTHKQWVKFAGLYPRHNDSGTSVHKQPRLSKAGNLHLRKGLFMPALSARTHDPHVQAYFEHLVAAGKKPLQAICAVMRKLLHAIHGMFKNNQPFDNTRFYALPA

SEQ ID NO: 350057 - protein, 406 aa, unidentified
MLEAMIPCCAGLDVHRRQVVCTVIREGSKETREFATFYRELKELGCWLQREQVELAVMESTGIFWKAVYASLEEAGIEGRVVNARHVKQVPGRKTDVCDSEWLAELGRCGLLRASFIPPRDLRELRLLTRYRRKLSGILAGEKNRLHKVLDDAGIRLGCVVSDIDGVSARAMVEALIKGGSTPEQIAEQALGRLQKKKDALELALEGKISDRHRLVLQKILGHIKWLQRQMALIDGQIVAAMKPYQEEWKLLQTIPGLDALSAAMLLAEIGVDMSRFGSKDRLCSWAGMCPGNQESAGKRKSGRARKANAYVRSLLCEAANSARKTQSQFQALYKGLVIRRGHKRAIVAVGHKILQVVYILISRKEPYKDPEIDYEALVVRRNAPRWLDALDKYGYLQRLRTPAEP

SEQ ID NO: 350058 - protein, 360 aa, unidentified
MVPTMTYAGLDVHARSTHAAAVEVRTGELRRARFAGGVTEPLAWLAGLPGPVHACYEAGPTGFGLYRAAVEAGLRVDVVAPSKTPRAPGDRVKTDRKDAELLARLLLAGQLRPIVVPSCEVEAARHLCRAREQVRGDLMRCRHRVSKLLLLHGRVYGEPTTWNRPHRQWLARQRFDQPATELAYLDTLAAVDGLVARKTVLDERLSHLALDGEWGPTVARLRCFRGIDTLTALVLSLEIGDFARFARPGQLASWLGLVPTLDQSGESRTSGAITKCGSSFARRLLVEAAWQYLRQPRIGATLQNRQLGQPAHVLQIAWRAQYRLHDQLMRLRSRGKPGNVATVAVARELACFLWAAALAE

SEQ ID NO: 350059 - protein, 346 aa, unidentified
MMIIGCDFHPSWQQVCWLDTETGETGERKLVHAEGDAERFYRQVPAPALIGMEATGNSHWFVDLLAEIGHELWVGDAAQIRASYVRQQKTDKRDAAHIMKLLAEGRFPRIWMPSSEVRDLRQLLLHRYKLVIIRTRVKNELQHLCLNQGVQRKRKLWNQAGQKLLRELPMRPWAARRRDDLLRLMAMLEQQIDPLDAAVKAEALRDKMALLLQSQPGVGAITALAYVLTMGDVSRFPRGKHVASYLGLIPREHSSGGRQKLGAITKQGNRMMRMLLVEAAQIAVRCDPGFRKQYLHRCHQKPKGVAKVAAARKLAVRLYWMLRTQTGYPEIVRIESSPRVPLVGAS

SEQ ID NO: 350060 - protein, 354 aa, unidentified
MSEIATIGLDIAKNVFQLHAVDRSGKIVLRKALRRSQVQGFFSRLPPCLIGMEACATAHHWARTLMAFGHDVRLIPPAYVKPYLRRQKNDAADAAAICEAVTRPSMRFVPVKSPQPQSTLMLHRARDLLIGQRTALINALRGHFAELGIVVAQGARNTRQLLAFLHEEANLDFPTAARIALQPLATMLLGIETQIARLDKAILAAHRSDPISVRLAAIPGIGPIVASCLSASIPDASLFQGSREFAAYLGLVPRQHSTGGKARLGSISKMGNRHLRKLLVVGAHAALYSMKSGKTRTDLADWARSLLAKKPFKVVAVALANKIARIAWAVMARNTAYEPGNKGAAAPTASYTAA

SEQ ID NO: 350061 - protein, 323 aa, unidentified
MSSFVGVDVAKNTFDIATHLPNGKHKTKAKLANDSKGFKEFEAWLQKQVEPSALIVMEATSVYHLELAEFVYNKGYRVCVVNPATTHAYAGSELRRIKTDKSDAKLIADFAREKDEKLQLWAPEPLKYRQLKALVRRLDDLQEMERMELNRLEVSDEKVKGSINSVLRHIEKEIAETHKAIKKHIDDDPDMREMRDLIVTIDGIGQKTLERLLAELGDLRKYDDPRKLVAAAGLNPKLQDSGLLKGRTVISKIGSARVRAGLYMPGLVALQHNKAIMAMKDRLKANGKAPKQIICAAMRKLLHFVYGVLKSGQPYDSKLALAR

SEQ ID NO: 350062 - protein, 456 aa, unidentified
MPEKERRTRARSSGRLSTINEHAAGLDVGSTFHVVAVRGDQDDKPVRTFRSFSGDLHQMADWLTSVGIKTVAMESTGVYWIPVFEILEARGFEVLLVNARDVKNVPGRKTDVNDAQWLQQLHQHGLLRGSFHPRADVAQLRTYLRLRERMVEYAAAHVQHMQKALMQMNVQLHHVVSDITGATGLRIVRAIVAGTHAPEQLATYRDVRCGASEETIREALTGNYRAEHVFGLKQALELWDFHQVKVAECDVEIEAVLKSLNETHVEPENPIPAVRHAKARNEPKFDVRSALYTLLGADLSQIHGFGPYTVLRLVAECGDDMKKWPTAKHFTSWLTLAPGNKISGGRVLSSKTRRSSNRAAALLRIAAVNIGKTQTALGAFYRRLSARAGKAKAVTATARKLAVLFYRALRFGLAYADPGAGYYEERYKRRAIENLQRRARGLGFTLVEVPESGGVS

SEQ ID NO: 350063 - protein, 358 aa, unidentified
MKAQVKKIDFTDQNIYAGFDAHLKSWKVTVMAEGTVYKTFTQPPKPEVLFNYLQENFPGGTYHTAYEAGFCGYWIHDKLVSFGINSIVVNPADIPTTDKERVQKEDKRDSRKIARSLSSGNLTPIYVPSIKTQQDRTLLRTRTMLVRDLARYKNRIKSFLYFYGIDFDDSFINPQSHWSNRFMSWLESIDTGETSGKEALNVLISECKNLRSSILRITKQVRQLSQTGPYQEHVILLRSIPGIGLLTSMIILTELETINRFKNIDKMCGYIGLVPSTKSSGEKEKTGDITPRGHSVLRTAIIESSWTAIRNDPSLMRSYLSYRQRMDENKAIVKIARKLLSRIRYVLINKKPYKCSVV

SEQ ID NO: 350064 - protein, 528 aa, unidentified
MKTTPKITFAGTRVRSRSRTRKTLRQAQGTPEATAPPLEEIPIVLPDSTQVVRYGIGFDVHKGSITVCIKAQLDTAEIVTIHTQGFSADPTGLQALIKFLGKYTPVAHYLMECTGIYHLPLYFALQAAFPDKIQQIVAMNPLLIQRHGTMLGSKTDPINARDMATLALYDGFIQPSYVGTTQFHELRDMIRSYHNMRGQLTRIKNHLHRTLDANNQKFKFNFALEWMIGVLDEYLAKDCTLQEAFTAYIANQQAKGKKCVVAEKNAAQLGSYGDIRLDQSTRFLLQMDLCRFLHEDLVGGVILTRAEQLVQSDLELNAKYTRLLGIPGFGSVTALTVLLELGDYTRFRGWKQMAKFCGVVPLEEDTGKHIGKRHINRFSNPNLRYALTQAVTVLLVHHRQQTEGKTPPPLSDLEIFADMVRLRKPFKSAMVKVAQKMTRILYFILIKGGEYDAYHETQRKMAKKQQVAAQAQKSALEPVRVKGLRREISHFLVYNSELLDSKVKFHLVQGFNRVLKKAKKTSDTTKEK

SEQ ID NO: 350065 - protein, 372 aa, unidentified
MQERSKIHVGLDVHKDSISVAVAELGRTPGRLIGKVPHDVHKLLKVLAKVGTAEQLHIVYEAGPTGFGLQRALQAKGYSCEIIAPSQIPRRPGDRIKTDSRDSVQLAECSRAGQLSAVWIPDPDDEAIRDLSRAREDAVNSRTQARHQLKGFLLRHDVRYTGKTSWCGAYYRWLGTLNFGAGAAQTAFTEYWQAVTAADDRVDRLTKALQASITGWRFEPVVGALQALRGVAAITAIGLVAEIGDLERFAHPRKLMGYLGLVPSEHSSGERTSRGSITKTGNAHARRLLTEAAWNYRFKARICKQAQIRQQDLSEPIRRMAWTAQLRLTQRFAALNARGLQTNKACIAVARELAGFVWAIGMQAQREKAEAT

SEQ ID NO: 350066 - protein, 369 aa, unidentified
MRNNSKKVSNVVTGKRTTGLDLGDQYSYYYTLDAAGENVESGRVKTTREGVEKRFGGQEAARVVIEAGTHSPWVSRLLAGLGHEVIVANARKVRLISDNDGKDDPVDAELLARLGRAEVKLLSPIQHRGEEAQADLAVIRARDALVGARTQLVNHVRGAVKSLGSRLEKSSTRSFADKMGDQVPEALRAALEPVLEVIAEITNQIGGFDPQIRDRCQQKYPETKLLTAVPGVGALTALGYVLTLEDPHRFASSRAVGSFLGLRPSRDKSGQQDPELPITKAGDQLLRRLLVGSAQYILGPFGPDTDLRRWGLKRAGRGRKNAKKRAVVAVARKLGVLLHRLWVNGEVYQPLYQTERSVGVIAAAAGSVS

SEQ ID NO: 350067 - protein, 342 aa, unidentified
MYYIGLDVHKKKISYCVKDASGQVHREGTIGATRNELDCWVRTLPQPRIMAMEATIFTGWIYDHLLPHAEQVKVAHPLMLRAIAAAKKKNDRIDAGKIADCLRCDFLPECHMASTEIRDRRRTLRYRHLLVRQMVQMKNRISGLLLETGVSHNKQRLHKVGYFRELISHNQEVHENIRPLLRLSRETIVRCQKTDYALVSSLQRDPLLAERIKRLRTVPGVGPITALTWALEIGDVSRFRSVKQAISYCGLCGDEKSSADKVLRTPLSKQRNKHIQSVLVEAAKLAPRQNHELALVHEREKQKGNANRATLAVARKMVAYLLAVDRREREFIPAEGHRTTAA

SEQ ID NO: 350068 - protein, 347 aa, unidentified
MRFYTKQHKNYCGIDLHTTKMYVCIINQDGETVFHRNMKARPETFLRAIQPFRDDLVVSAECMFTWYWLADLCAQENIPFVLGHALYMRAIHGGKSKNDRIDSLKIAALLKGGLVPMAYTYPRKMRATRDLMRRRNHFMRKRAELFAHIQNTANQYNLQEPLGRVAKPQNREGVIERFDLPCVRKSMEANLAMIKTYDTVIADLESNIIQSAQNHDPVSHALLKTIPGVGRIITLNLLYEIESINRFPRVQDFVSYCRLVKCAKESNGRRYGSSGKKIGNAHLRWAFSQAAQLFLKSNEPGKKYLEKMTNKHGKGKALSILAHKLGRAVYYVLKNKEAFDQNRFLSA

SEQ ID NO: 350069 - protein, 369 aa, unidentified
MKQVTTYVGVDAHKKDLFVAMLVGDGQTPVTWQLPNEPNAVRRLVRKLERDAPGPVRVCYEAGPCGYALQRQVATARVSCQVIAPALIPRKPGERIKTNRRDARKLAELFRAGLLTEVRPPTPEEEAVRDLCRARDDAREDLQRSRHRLGKLLLRRGLHYSAGRNWTQGHRRWIDSLEWAQPAERVVVDDYLLAIDHLEARLLELDARLIEVADTEPYRERVGWLRCFRGIDTLTAILMLAELHDFQRFPSAPALMAYVGLVPGEDSSGEKHRRGRITRTGNALVRRLLVETAWHYQHRPSIGVALRRRRKGQPGRVIAIADKAQQRLCRRFRRLMEQHKPAPKVAVAIARELAGFLWAALQPAPVPAT

SEQ ID NO: 350070 - protein, 459 aa, unidentified
MSNRSGRSRRLSRGDRRRNEKLARLRAVITRESAVLAFDLAADKQVCALTDQDSQVLARRTVTTKAWQLSEAVAWGLARAAEAGFASVVVACEPTGHRWRVLDQIAAEQGVRLVCVQPLLVHRAREAEDFTRNKNDDSDAMIIARLVTELRCYLPERAEPDWARLRHLGARRTRLVVEVGAGRQQTRDLLECAWPAALAAAADPLESKSWLAALTVVLDRVGASGDLSVIGRWGWARFAAAVRRELPAHGTSRWYSTIVRAVFDAATDPAAAGTGVLGQRAGALERVRFALADLAHARAEVTVVEERMVELLDDLGLTGLVTSMPGLSAVGAATILAETGDPTRFSSARALVKHAGLCPRDNASGAYQGKTGISGRGRPELRLAAWRAVFAALRHNAVVAARHAHLTGRPERRLTDAQARVAVAGSLLRQLHAVLTTGVPWNPAIAAGLTRPEQEVAAA

SEQ ID NO: 350071 - protein, 380 aa, unidentified
MRLRLRSASRRNPIQFPTNIGRPNPGDANKIQGCDFHPGFQQVAIFDKRTGEIEEKRLQHREEAEPFYQSLSEQQVRVGLEACGHYPWFEQWLAEVGIELWFGDAAKVRAAVVRRQKTDRRDAEHVLQLLLENRFPKIWVPSLEVREVRQLLVHRHKQVQARTRTKNQLQAMALSQGVQKKWKLWTKAGREELEQLPLLPYTAQRRQQLLRALDGLEAEIGELDRRVAEEARQRPEAVRWRTHPGVGPVTALAMVLTLGPAERFGSAKQVGSYFGLIPSEESSGGKQRLGRISQQGSSFLRFLLVEAGQTAARLDPQLKRFYKRLAMRKNRSIAKVAVARKLATRLYLTLREDWTYAQLSQAVMQVSPSHPVVEQNKPTV

SEQ ID NO: 350072 - protein, 344 aa, unidentified
MIWVGLDVHKRFSRMGIFDPATGDLQDLGEVSNDREALQMRLEQVASPRTVVLEAGRSSYHMAGLLESLADEVWIIDPKELRRLQHRMAKTDRRDAAALAWWAAKGALRPLWRPDRQVLELRELTRGRTALTRRATQLRNLIRSLLARHGYECPHRDLLSARGRAWLDTVTLEGYAGEMFATFRALLSLIQEKADGFEQQVEAAAADLPAAQRLRTIPGIGPGLGLSLAVEIGDISRFPSPGHLRGYSGLTPAVFQSREKEARGPITKHGNKWLRHTAVLAAQRMSQMHQADPGIKRTFLSVAFRHGRNPGKVAAARRLLDLSYHLLRKEVDYQAPRARTALKA

SEQ ID NO: 350073 - protein, 338 aa, unidentified
MKITTIGLDIAKSVFHLCGVNKMGRLLKKKQLKRKQVLPYLARLEPCLVVMEACGGVNYWAREIKALGHEVKLIAPQYVKPYVKGNKNDYNDAEGIAEAAQRANMRFVPIKSIEQQDIQNLHRQRERIKKARTALVNQVRGLLAEYGIVINKGVAAVRKGLPDILEDAENDLTTLSRELFADLLEELHVLDERFKQGEKQIEASNRGNEVCQRLDEILGVGPITASAAYAAAGDGKDFVNGRHFSAWIGLVPGQHSTGGKTTLLGISKRGNAYLRTLFIHGARAVLQHSANKTDRFSLWAQALLERRGYNKACVAVANKMARMAWVIMAKGETYRVAT

SEQ ID NO: 350074 - protein, 355 aa, unidentified
MTFVGLDLHKRYITACALDAGGAVLAEAKRLPATLDALGAFLAALRGPATVAMEATLYWAWLTERLEAAGFTVQVAHAYQAKLIWQARSKTDPIDARKLAELLRTNLLPTIWVADAATRARRQLLRGRAFLVRQRTQLKNRIHGHLTAENQVCSTTDLYGKAGRTWLTSVALSPALREQVDILLRLVDNLSQEIHALDQLVKRAARGNVVATQLQSLPGVGPFGALMLEAEIGPIARFRSSHELAAYAGLVPSTHSSGGRTTHGGVGPAGNRWLKWILIEIVQTLKLAPGPVGAYYQRLLRAKGKAKATVAAARKLCCYLYWMLKEGWSYAEWLRQHDGSPSSEVRPVQRMGAVA

SEQ ID NO: 350075 - protein, 337 aa, unidentified
MLIIGCDFHAGFQQVAIFDNQTGQYQERRLRHRGEAEQFYRELGGQEVLVGMEACGHYPWFERLLGDCGHQLWLGDAARIRACEVRQQKTDRRDAALLLRLLREERFPRIWVPSLEERDVRQLLVHRHKQVQARTRVKNQLQALARSQGLQKKRQLWSEAGRAELQSLELLPYASLRRERLLAMLDQLQLEIDRLNQQLEAEVKRRPEALRLMTHPGVGPVTALAMVLTLGPPERFASARQVASYFGLIPSEHSSGGRQQLGRISKQGSSFVRFLLVEAGQSAVRGDAELGRCYRRLAMRKHRALAKVAVARKLAMRLYVMLREHWTYAQLCKAVCR

SEQ ID NO: 350076 - protein, 509 aa, unidentified
MIGWCWAGWKVHCCAGVPPAVTVCAWTVRGRDLDRCWSPFPGNPRCRCVRVCQSPVLARGSGGRYRCSHPVGGAAQEVAARMKVLHERVAGIDVHKDMVKVAIRSPGDKPWTRKTEILEYRTFYGVLQHMAAELARRGVTHVVMEASGVYTEPVYYALCEQDFTEVAVINPAHAKALKGHKTDARDCARLAELFECGLLRGSYIPAAELKEVRDLTRYRMKTVQARTSEIQRLAKALESAGIKVGSVASEITGKSATAMIEALIDGERRGPVLADLAKGRMRTAGKLADLSMALAGRFTAHHALLCRLHRDRIAVFDTAVAGLDERIAGKAARWQREAGLLKTVPGFGDIVAQAWLGEIGPAPHLYFPHHGKLASWVSLCPGNNISARKRKHGRTGDAGTYIKPMLVQAAWAAIRVRGRLQARYNRLVRRFGGEKNPGAKKKAITAIAHTLLKIAYRVLKTGTPYQDLGADFYTRRESPAQRQAYLERQLQKLHPGATITITISPPEPA

SEQ ID NO: 350077 - protein, 344 aa, unidentified
MIYLGMDISSKNFVVHGIDEKKRVLVKGEIEPTRGGLKGLIKGLGSQKKLVIFEAGNQLKWIAKTLKEMEGVEIHVVHPNEIKWINQSSGKTDKIDARKLAHLGRGDMLPRKVHIVEGKVRELRELISARQRLQSKRVALINSIRGQMKQEGHSLPAKFFQSTQWREKLKGIKIGEIQKLIIESFMDSIDSLLRAEEKLTKKIGAIRDKRIELLESIPSLGTLSSRVIMSALDDVGRFDSKKCVAKYGALTPRIYQSGGITHLGRINRDGRQEVRRVLLQCAHVIARMSSYGARPLREFFERIMKRRGKKIAIVAVARKLLTIAYGVLKTKTAYDPSRLTGVSA

SEQ ID NO: 350078 - protein, 344 aa, unidentified
MDSIGIDVAKSQSQVAILCESGELIERRITTGAAHFTDLLGERPHARILLEACTESEWVARCLESLGHEVIVADPNYAPMYGMRQRRIKTDRRDALALAEACRLGAYRPVHRVSEAQHLVRAQLTAREVLVRTRSRCICVVRALLRQEGLRVRTGKADTFGLRVSALEVPEPVNQVLGPLLATLLALNDQIDAAGDHLEDMTRTDPRVRRLCTLPGVGPITAAAFVAALDTAGRFEGPHQVQSYLGLVPREYSSGERHQRGRLTKSGNGRGRWLLVEAAWRILRLRRPETRVLWSWAERIAARRGRKTAAVALARRLAGILYAMLRDQKPFDPRRFAAATEVAA

SEQ ID NO: 350079 - protein, 343 aa, unidentified
MQDVTLIGIDLGKHSFHVHGQDRHGKAVLRKKFNRKQLVEFFATFHACTVVMEACAGAHHMARQLAGFGHDVKLISPQFVRPFVKSNKNDFVDAEAICEAASRPSMRFVTPKNEALQTLSALHRVRESLVRDRTKAGNQIHAFLLEFGISLPIGYAAVRHLPAILDEHDLPPRLISMLERLHAHFKYLDKQIAEIEKDLSSQLADDDLGQRLMSVPGIGPITASVLASEVGDGKQYRCGRDFAAALGLVPRQYSTGGKSNLLGISKRGDKNMRRLLVQCARAYMQRLARQTGPLAHWVSAMLTRRHSNVVACALANKLARIAWAIAAHHTTFEMKEAPMPTPA

SEQ ID NO: 350080 - protein, 386 aa, unidentified
MIVIGADTHKGEHALAAVEAGTGRVRGGRQIKADDAGHLAAVRWARELDDERVWAIEDCRSCSRRLEQALLAAGERVVRVPPHRMGASRKGEREPGKSDEIDALAVARAVVKDGVEQFPVAYLNERAMEIRLLCDHRGDLVAQRTRTVNRLRWHLLQLCPELERSVKCGAFNQPRVLDRVDRALRKLPAGARVRVAREQIAQIRSLNRQADQLEVELLELVKAHRPKLLAEQGCGALTAAILIGHTAGVKDFRKHSSFGLQTGTAPIPCSSGKRTQHRLNRGGDRQLNHALHIIAITRASRDPATKQYLARKKAEGKTTKGALRCLKRHLARRFYHLLAEPPAAQPQTARPELRTDLGLPAVPDRPKPRREVEPITAAPSPMVCIS

SEQ ID NO: 350081 - protein, 351 aa, unidentified
MQIQSKRIDFSGQNFYCGIDTHKKSWAVTIDTDDIVLKTFSQEADPELLVKHLRKNYPGGNFIAGYEAGYFGYGIQRQLESMGVNCVVLHPADIPTSDKDRDQKRDPRDSRKIAKAIKNKEVVPIWIPPVSLEQDRQLLRTREKLARDETRIKNRIKAFLQIYGINYPQTFSQSGSHWSARFIKWLETIQLNESTGTESLRSLVRCLRFQRGEILIVSKQIRTLSQSSQYNQQYLILIKKPGIGLVTAMTILTETGDIHRFKTADNYRAFFGMIPRAHDSGDKEHPGKITKRANTHLRYLLVEITWTAIRYNPYYLNIYKNYIRRMKGNKALVRTAGKLANEIYYCLKRVS

SEQ ID NO: 350082 - protein, 303 aa, unidentified
MTTPTLEVTAASHVVAGVDTHSDTHHVAVLDSAGRRLGDHEFPATPAGYEQLHAYVKAFGSIALIGIEGTSSYGAGLTRYLSIRDVPIREIIRPKRAPRRAGKSDPIDAYAAARQALSEPETLPHAKNSDGHTEQIRVLLATRRSAIKARVAAARQIKSLLVTAPDSIRTRWRAVSDKALIAGLAATRPSGAITSVGAATAITLRRLARRCAYLDQEITDVDEELRVLVATAAPAMIATKGYGVVTTATLLITAGANPQRMHSEGSFAALCGASPIPASSGKTTRYRLTQLVYAALGKRRRTS

SEQ ID NO: 350083 - protein, 339 aa, unidentified
MYPFYLGIDLHLKRTFMVLMDAKGEVIDKQRISNDDISRYLQEKVPQETYAVLEATRNWPFMYDLLNEHVQKVDLVHAKGVRAIANAAVKTDQIDASTLAHLARMNYIPKAYAASKEMRDLRQLLRHREWMVNQRTKAKNRIHAALAGYNLVSPVTDLFGVAGRTYLDEVMEKELRPAARQVVEDHLAMIDHLGERIRSLEKSISIKEEQNRIVNLLKSIPGVGKLIALIILAEIGDISRFHSPKALCSWAGLTPRVHNSDAVVQHGHITKEGSRYLRSAMVQAATTACRVSSKWYRVHEHLALHCGRRAARVAVARRLLTVIYYMWKRDQPYQENYGQ

SEQ ID NO: 350084 - protein, 458 aa, unidentified
MSVPRKVKAKSSTTKANTQLPALHPHAAGIDIGATHLQVAVPCDADPKPVRTFTTFTDDLLKLRDWLKACGVRTVAMESTGVYWIALYQILEAAGMEVCLVNARHCKNLPGRKTDVSDCQWLQYLHSVGLLRASFRPPEQICVVRSFLRQRANLVRYASQQVMQLHKALTQMNVQIHNVISDIVGVTGLAILDAVLAGERDGHKLAQLKDHRIKASGDVIARSLVGDWRAEHLFALRQALTTWRHYQILLTECDAATAQALAGFESRVDVQVNPPPPSTLRHKKPHANEPRFEARTELYRITGVELTQVPGLQVGTALVLFGELGPDFVQRFPTAKCFASWLGLCPDNRITGGRVISVKTRDVKSRSAEALRLAAQALWQSKTYLGDCFRRWKARLGTPKAITAMAHKLARILWHLLKYREAYDPKVWATAEEKLRAKKLKRLHQNATALGYKLVTAA

SEQ ID NO: 350085 - protein, 341 aa, unidentified
MGEVSTIGLDIAKSVFQVHGVDVAGSVVIRKRVSRAKLLEYFGGLPRCLVGIEACPSAHHWGRELQALGHRVRLIAPSYVKAYLKRSKNDANDAAAICEAVTRPSMRFVPIKTKEQQTVLMLHRTRQLLVRQRTMLSNALRGHLAELGIVSAKGRNGTAELLRIIADRRLSPAVCGILEVLARQYGAIGTEIASIDKNIMVLHRACEASRRLAEIPGIGPISATALVAEIGDWKAFGSGRSLAAWIGLVPKQYTTGGKDKLGRITKQGNRYLRWLLVVGAMAVIRYARNHGTEKRPWLGRLMQRRPTKVAAVALANKIARMAWAIMVRDERYKEPKPLLAA

SEQ ID NO: 350086 - protein, 429 aa, unidentified
MGAMSENEVLGQEPQFAALVGIDWADQKHAWCLQAAGTTQRESGEVEHTPEAVEAWVGQLCQRFGNRPIAVAVEQVKGALVFMLSKYGPLHLFPVPPAMSANLREALYPSGAKDDPRDADLLVDLLLQHRDKLRRLSPDSEATRRVQNLVEERRHLVEEKTAQSNRLTNHLKIYFPQMLEWFDRLDTELVCALLEQWPTLEELQKVPPARLRTFFRKQRCHYPELVERRLVGIRQAMPAIRDRAVIEAKSTVVKVSAQLIRSLIRGVADLDRKIEEAAAAHPDFFIFESLPGAGAVLAPRLLAAFGSQRERYANAAEVQAYSGIAPVTERSGKKKWIHFRWACPKFLRQSFHEWAGHSVAHSQWARSYYEQQRERGKGHHAAVRGLAFKWIRIVFRCWKERVTYDESRYLAALAKRNSPLAAVAAGTIL

SEQ ID NO: 350087 - protein, 349 aa, unidentified
MSPKLDAAIAVIGIDIGKNSFHVVGLDWRGAIVLRQKWSRGQVEGRLANLPPCLIGMEACVGAHHLSRKLTSLGHDARLMPAKYVRPYSRGQKNDFRDAEAIAEAVQRPTMKFVATKTAEQLDLQALHRVRERLVSQRTGIINQIRAFLLERGVAVRQGLRFLRAELPRILATPCDVLSPRMVQVLEGLAVDWRRLDERIERLSSEIEALARRDAGCERLMSVPGVGPIISSAMVAAIGAGEAFSKGRDFAAWLGLVPKQISTGDRTILGKISKRGNRYLRVLFVQAAWVVLIKPKSWQRHGLKPWLEAAKRRLHHNVLAIALANKLARIAWSVLAHGRTFETSKIHAA

SEQ ID NO: 350088 - protein, 310 aa, unidentified
MKIICGVDVSKATLDARIGPDGPMTSVARTPEGIAQLHQFCIRHEVELVVMEATGGLERLPFGLLWEAGLACAIANPRHVRRFAEAMGYLEKTDAIDAGVIADFAQAKRMVGQAPATPGQERLRALVTRLRQLTDLKVAQANQRRLLQDPDALASIDEMLALIRRQTRAFETEITALLGTDPLWCALDEAFREIKGVADRSVAHVMAHMPEIGTYSNKAIAKLAGLAPMARDSGKRSGKRSIRGGRTQVRSILFVVASVVGRHEPDFIAFRQRLLEAGKSKMEVRIALARKLLVRLNAKARDARKAFAAA

SEQ ID NO: 350089 - protein, 349 aa, unidentified
MNILAMDLGKYKTVFCEYSAIDGEHTFGTVKTTPQEIHDLIVEREPDRVVMEVCSIAGWIRDITEVLRIETEIANTIHEAWRWKNVKKKTDKEDALKLAKLSAMGQLPTVHMPPKPVREKRALLKHRQRLVHYRTSLKNAIRAIFARQGIAITKGAAIWSREGLQWLKGEAREFAQISDATELWRGQLQVELKLLRAVTDSLKVVESKLDKMGAVDRQIKRLQTINGVGPRLAEAVVAFLDDPKRFKSAKEVGSYAGLVPRQYQSGQMERQGRTGGHGNMMLRNLLIEVCWASLASNTWARDTYKRLLRGSPSRKKIAITGLARRLVVRCWAMLRDEQNWREPMLTSTG

SEQ ID NO: 350090 - protein, 376 aa, unidentified
MKKYSKFIGLDVHKADISVGIANAGRGEAGYYGTIENKAHSYIKVAKKLSKNGEEILFCYEAGPCGYEVYRQLIKAGYDCVVIAPSLIPKKAGDRVKTDRRDAVSLARLLRAGELTPIWVPDEEQEAMRDLTRAREDMKAMERQSRQRLGGFLLRHGKVYPGRSKWTKTYFRWLESLRFETAAQQIVFQEYIDIVKDAQRRVAAMEEEMRKALTVWTLKPVVEGLMALRGVDLIAAMTIIAEIGDITRFESPRQLMAHLGLVPSEHSSGERQKRGGITKTGNGHARRVLVEASWSYRLPARKTAHLRKKAEKASKTVQEIAWKAQKRLCSRYWYLIHKGKLPVESCTAVARELVGFIWAIACEVTGKGAATAAMNS

SEQ ID NO: 350091 - protein, 332 aa, unidentified
MNEITLLGIDLAKQVFQLHGIDVSGKAVLRRQVKRGDLLSVLRQFPPCVVAMEACGGSHHWGRQFHGFGHEVRLMAPQFVKPYVKGNKNDRNDAAAICEAAQRPGMRFVSVKTVEQQQVLALHRLRQGAVKARTALVNQVRGLLAEFGVVVPLGWAALRTQLAAQVGDEQGPLPALLRTELAHQQTRLAELDAEVKRLTSVLERLAREDARTSRLMARRGVGPLIASAFAAEVGDPSVFHNGRQVSAWLGLVPRQHSSGGKPRLLGISKRGDAYLRTLLVHGARAVVRTAARHDDPLSRWVQELAVRRGVHKATVAVANKLARQMWAELAHV

SEQ ID NO: 350092 - protein, 347 aa, unidentified
MLADEVDYVVGVDPHRDAHALAVVEVRSGVVVFEASVAANRAGYAEVVCLSERHAPGRRAFAVEGTGSFGAGLTRFLSGQGERVLEVGRLRRQRGSGGKTDALDAIRAARGALSENRPAQPRAGGEREALRALMAAREGAVNARRAGLCQLQGLLVTTPEPLRGELRPLTRARLLRRLSTIRPERRRDPELRGTLLALRAVARRVQQLTAEERELHREIESLTGTLVPQLLEQPGIGPLAAAQILLSWSHRGRFSSEAAFARLAGVAPIPASSGQTVRYRLDRNGDRRLNRALHMILVTRRRAHEPTIAYMNRRTQEGKSSREATRCLKRYLARSLYRLLENPAMPT

SEQ ID NO: 350093 - protein, 369 aa, unidentified
MEKGTTYVALDDSKRKIVAGILRPGDTEPELRELPNDPHHIRRLFERLKREGPVVACYEAGVSGYDLYRQIVGLGVACDVIAPALTPRRPGQRIKTDRRDAAKLVRFFRAGELTAIHVPAEAEEAGRDLLRCRDDIRRDVLRWRHRTLKLLTRHGRNYLGGKNWSRGHWTWLRTQHFALPPLQRAFEATLFALEQALARQAELDKEIETLALTDPYREPVGWLRCFRGLDTLSAMILVAEIIDFQRFRRPRELMAYLGLVPTEYSSGDTQRRGALTKAGNTHARRVLIEAAWHYRHRPTIGPALASRSQGQPPAILAQAWRAQQRLHRRYRHLIGHGKRPPVAVAAIARELVGFIWAAMTGRESRLQVA

SEQ ID NO: 350094 - protein, 345 aa, unidentified
MKIVGCDLHTRYQQIAMLDDETGELIERRLEHANGEAKGFYAKLTGPVRVGIEATGHTRWFERRLAELGHELWIGDAARIRAADVRKQKTDARDAALLLELLLSGRFPRLWRPSASERDLRQLLGHRQKLVWMRNAVGNQLHALAMGEGICRKKQLFTKKGRAELEALSLDRWASRRRQELLHMLDQTDASLKQFDQAVNEQASGNGLAVRLMTHPGVGPVTSLAFVLIVGPVTRFQCSKQLVSYLGLNPQEHSSGGRQKLGAISKQGNSMLRGLLVEAGHTAARLDPELRQDYQRLRLRRGGSVAKVAIARKLAVRMYWMLRRQINYAQLVRMQGSPRGTLVQK

SEQ ID NO: 350095 - protein, 334 aa, unidentified
MEQITTAGIDLAKRVFALHGVDGAGRVGMRKTVRREQLMQTVAALPPCLIGMEACSGAHEWARRFQELGHTVRLMAPVFVAPYRKSGKNDGNDAEAICEAVSRPNMRFVPVKSAEQQAILALHRVRQGWIEERTATINRIRALLTEFGVVLPNRAQHVRRGAMAAAEGLPALARRALEDLRSHLGTLDERIGAYDRELQAQARQSEAAQRLMQIRGIGPITAVAIVATVGNARDFESGRQFAAWLGLTPRQHSSGGKRRLGHISRRGDAYLRCLLVQGARSVLYTAMRHRDRLSRWVCTLRARRGDHKTLVAIAAKNARIAWALLAKNQALQTV

SEQ ID NO: 350096 - protein, 366 aa, unidentified
MFSLTSPAGAIHLGMDTSKNTIVVAILMPGEEVPVIDRMWNEEGSVRHLVGRFADRAVLRACYEAGPCGFELHRLLTSMGVACDVVAPSLIPRRAGERVKTGRRDAGRLARLHRAGELTAIRVPTQAEEAVRDLVRARAALLADRKRAQQRITAMLLRHGRVWRSGSYWTQAREQWIAAQRFSEPALGAALAHYRAALDTRQAELDAVEAELAPWAGREPLAAAVARLGCYRGIAGLTGLVLAAEVVDWRRFPSARAFMCFTGLVPAEYSSGERTRRGSITKAGSEPARTALIEAAWSYRFRPAIGVTLRRRQHGAAPQTLARSWRAQRRLHARYKTMTARGKPAAVAVTAMARELAGFVWAEMTS

SEQ ID NO: 350097 - protein, 343 aa, unidentified
MQTITIIGLDIAKSVFQVHGQDGAGQVVIRRQLKRRSVLAFFQKLPPCLVGIEACASAHHWSRELQALGHKVRLIPPAYVKPYVKRQKNDAADAEAICEAVTRANMRFVPTKTPEQQSGLVLHRTRHLFIRQQTAVINAIRAHLAEFGIVAPVGRHGVEELLNVLADPNDKRVPEIARACLSAFGAQLRRIKEQVLEFDRLIRAWHRSDEMSMRLDEAPGVGPVLATAVVATVADPKSFRSGRNFSAWIGIVPKQHSSGGKNRLGNISKQGDRYLRGLFVAGALAVIRYAKIHGTKHRPWLTALLARRPTKVAAIALANKLARMVWAMMVKGERYKEPAALAA

SEQ ID NO: 350098 - protein, 342 aa, unidentified
MTIIRIGLDTSKHVFQIHGVDENEKPVLRRQIRRSEVENVFAKLPPTRIGLEACGASHHWARVLRGLGHEVMLIPPQYIKPYVKRGKNDAIDAEAICEAMSRPTMRFVPIKTAEQQAALVLGLDPRMLGVRDLLVKQRTMLINALRGHAAEFGVTAAKGPQQVGELLRRLTTGEGVPALAREMLAMLAGQIEAVNAKLKAIEARLMAWHRRDQTSQCLATVPGIGPIGGVSFALKMPHAKAFRSGRHFAAWVGITPREDSTAGKHRPGRISRAGDEDLRRRLVLGATAVIQQAKAGRASPWLLELLARKPKKLAAVALANKMARIIWAMMVSGETYRRPTVA

SEQ ID NO: 350099 - protein, 430 aa, unidentified
MGLIVPTTIHPEREDQPLPYEWFVGIDWGSQQHQVCILDRDRRLVGERTVDHDGASLAQRAAWLWTVSAGHPQRVAVAIEVPRGAIVEGLVERGFHVFAINPKQLDRFRDRHSVAGAKDDRRDAFVLADSVRTDRPSFRRLQLDAPHLLLLRELSRVEETLLEEFRRSANRLREQLHRFYPQMLQLCSAADEPWLWDLLHLAPTPAHAMLLSEEQVQRVLKAHRLRRLKAPAVLACLQAPALPVAPGTAEAAQAHCGFLLPCLRVLAEQLQACGQQVSALLSTLAEASGEGESPSDVAIVLSLPGVGRKITAWLFAEAAQPLAERDYQVLRTHGGVAPVTKQSGKRRQVVMRHGCNPRLRHALYHMARVAMQRDAHFSSVYAALRAKGQRHGQALRNIGDRLLRILMAMLRHRTCYDASRIRCEPVVQMG

SEQ ID NO: 350100 - protein, 359 aa, unidentified
MSTITIGVDLAKSVFSECEMDGAGHVLKRQDLRREPFALWLTQLPAGTIVAMEACSGAHHWARRCLAYGLQPRIMAAQFVKPFRKSVRSKNDRNDAEAVATAARQGNMRFVPVKSIDQQVRLSWHRVREGYKVESLAIGNRLRGLLAEFGVIVAPSDLALRRLLADLDAQLGLPAELKELLRDVADHWTSLRLRLDMCDARIEAHASADERCVRLRAIIGIGPITADAAVATVGNTREFKHGREMAAWLGLVPTQYSSGGHVRLGEVSCRGDAYLRTLLIQGARSSLQRAKAVVTEKATPEQLWIRTLDRRMPFGKVLVAIANKHARQIWAMLAHDVDYDPHTCLKHPLHRHIDTMRTA

SEQ ID NO: 350101 - protein, 436 aa, unidentified
MRFLQIRSALWLIVCPQLRAFWLAARETICNDPQVCRIVDLPVYYELETNNGNRDYRIQIGGHYMNYNTVYVGMDVHKESFTLCSCRYEDEKASHYQRTPASYKNVLRYLAFLRTIYGEDTRFVCGYEAGCLGYSLYHQLENFNVECVILAPTTMLEQRSKRRIKTDKRDAEIIARSLAQHNYSPVHIPTETDNQTKEFIRMRDDHKAELKKIKQQILSFCLRQGYQYDGSGNWTAKHVKWLRSLKPAGLYKEILDEYLLTYTILTDKLNRLDQRIEELASKEEYKESVSKLTCFLGIKIHTALSVIVEVGDFQRFVSARKFAGYLGLVPGQHSSGDDRNGLGITKAGNTHVRRLLVESAQSYTRGKIGYKSRVLRSRQAGNSPQVINYADRANERLRRRYYKMVLKDGKKYNIAKTAVARELACFIWGMMTDNIY

SEQ ID NO: 350102 - protein, 372 aa, unidentified
MVYIGTDLHKDSVSVVVCTEDGQVLEKERLACKCVGKIREFFSRPEVHPCLVIVEAVGFYHWFFDLLEPVADRLVLCNPVEVKKYSWDEAKTDFRDARKLALLAAGGEFSHNRHLTCFVPDAVLRSFREITRHRQRLVSHHISFVNSARRIFLKCNLAGPAHLSAPALELFLSRFGERFSDQHRRCLYHICDNLLTLERQIRDTEATIREVLSEDRFQKTREILTSIPGVGDLTAATLIAEIGDYRRFAYPEQLSAYAGIVSRVFRSAETTRYGHITKTGSPYIRRALVQAAWVAVRAPGRPRTVFQRIARRAGTKKAIIALARRMLVWSWFLVNRQQLWHDTCDTGSLTNAAGMTLTVVLSRARDRVNSVA

SEQ ID NO: 350103 - protein, 417 aa, unidentified
MVEIIHKSCGLDIHKQFFIATILCRSGEKHQQRFERNDDGILAFKKLVISEKCDVVACESTSDFWVPIYDSLIKHIPVIVGNARDMKAFTHKKTDKIDSEFIAQLALNNMIQSSRVFTKNHRNFRSYVRLRLKLVQKRTDLKNEAHSILASEMFNLKDVLTDIFGKSGRIILSGVFSGKTVDQIIESLSPKLRKKYDQIRDILDREISQNTAFRLQTCLKLIENLDNEIKSLEIEIFNYVYENHKHEMGILMSVPGIGELSAATLIAEIENFKGFSTGDRLASWLGIVPNVYQSADKYHNGRITKRGSKVARWILTQIAQAAAKKKNSKLKEFFNRKKKSIGHAKAIIALARKITTIIWHLIINDEIYEDDTGYKKEHIQKRRIIEKVTISVDERIKIISGIFSIVEKEDKEVSSSK

SEQ ID NO: 350104 - protein, 329 aa, unidentified
MYDHYIAVDWAQSNMAIARMTKESSAVKVVNVPSSVKELQIYLSRLRGKKILTIEETSTSQWLYIELKDYVDEIVICDPYRNHLLSDGPKTDELDAIKLVKLLKEGFLKPVFHSADEFIYLRKLVSGYEDMIKAGVRLKNQRSALFRAEGKDKREKKLTQKSESFVLEGVDRGIEAYEKERTRYEAEMEKQRKKHLMIRNMDGIHGIGVIGAVKIAARTVDARRFEDKGKWLSYCGLVRQEKLSGGRSYGWKNPRYCRTLKGAFKTAALGAIGGENSFDKYYDFLLTKKHYSEHNARHAVARKIATIAWAVMKSGKPFDPKMMEKGFQK

SEQ ID NO: 350105 - protein, 395 aa, unidentified
MKDLLEISCGLDVHKEKIVACILTGPLGKPTHSEIREFSTLIPDMIALRDWIVSRNCHHVAMESTGIYWMPIYEILEDAFSGDITLLVVNARHMKNVPGKKTDMRDSEWISTLLRAGLLNGSFIPEKRIREFRDLNRYRKSIIRDITSQKNRIEKFLQSSGFRLSSFISDIFGASGKNIILHLIEHGQIDRTALDSCLKTKTRNHIDEILMSVNGTLSEHQKKFLKILMNHYDSLKEHLNEIEKDLEQDIEPFILQVQQLNSIYGISTTASCAIIAEIGVDMKPFKTAEHICSWAGLCPGNNESAGKRKSTSVTKGNPYIKSMLCEIAWVIAGKRNTYLSAWYWRIKQKKGAKKAIVALARKLLVIIYTMLKQGTLFDESCFEARRKNCEQKVST

SEQ ID NO: 350106 - protein, 376 aa, unidentified
MREKLRFLGMDVHAETIAVAIAEPDGEIRSLGTIANREDSIRKFIRKLGTPEQLRACYEAGPTGFVLYWQLTRLGVDCAVIAPTLVPKKPGDRVKTDRRDALKLARSHRSGDLTAVWVPDEDSEALRDLVRQREAAKQDQLRARHRLTKFLLRTGQRPPLGLKAWTERYMRWLAQVRYTQPAQEVTRLDCMNEVEHMSARVKRLEEAILEVVKLAPQPMQDVIRGLQALRGVAHISAVTIASELGNICSRFQSARKLMGYCGVFPSEDSSGNRVRRGGITKAGNAHLRRIVVESAWCYRHLPRVGEKLRKRHEGVPPAIIEIAWKAQNRLHKRYRKLSMAGKDKRKIMTAVARELLGFIWAIAIKAEASCRQPMAA

SEQ ID NO: 350107 - protein, 433 aa, unidentified
MNTSHPYDLIIGLDRSDQKADLHLITTTTGERRSVVIATTPEALWEWLLELRQQQPQARVGLCLEQPAVHLIAFLESYDWITLHPINPITLQKYREAFVTSRAKDDAKDAFYLAELLLHHHDQLQVWAPEDSATRAVQQGVFHRRAVVDERTGLTNRLIALLKQYFPQALVLCGEDLWRPLATRFLLKWSSLQAVQKAKPATLKAFYYLHGSRSAKLLEQRLALVQRAVPVTDETALIASFALRVQLLCRQLQLVQQTITDYEKQIASAYAAHPDHAIFASLPGAGPVLGPRLLASLGSQRERFGAAADLQQYTGVAPVTKRSGGSCYIHRRYLCPKFHRQSFHEYAKESILWSRWAAAYYLQQRTKGSPHHTAVRALAFKWQRVIWRCWQDRTVYREETYEAALRKSGSPLVALFDKVELGKSPFKNPVKKS

SEQ ID NO: 350108 - protein, 382 aa, unidentified
MQTIAPVNPTILLAIELSTSTWLVAARLPGLDKPRLSRIDGGDTAALLALISSLRARAACGLDATMGVVCCFEAGRDGFWLHRLLTAHGVVSYVLEPTSILVNRRARRAKTDRLDAEGMLRVLAAYLRGDHQACSMVRVPTPDQEDAKRTHREREHLVQERLRIENRIEALLFTQGIRKRPSLRSWERDLTVLRTGDGRKIPRHLRAELDRLRRRLVLTLELIREVEVERDQVTKTKPQDQAHHKMTALCRIRGIGENFAAVLTREVFYRSFDNRRQIASYVGITPMPYQSGGMDRDRRIGRAGNPRARTTMIQLAWLWLRYQPDSELAEWFRERVGTLAGRTRRIAIVAMARKLLIALWRYVETGVIPTGAEIRAETTVAA

SEQ ID NO: 350109 - protein, 398 aa, unidentified
MVMIGVDPHKGSHTAVAIDRDEVQLAAVTVRATRRQVNELLGWAARFEERVWAIESAGGLGYLLARQLVAAGERVLDVPATLAARVRVLGTGRSNKNDSNDALSIAVAALRAPRVAAVGRDDYSGVLRLYAKRNNDLGRARNRTACRLHALLAELVPGGISKEINARSAERLLATIDLATPVERARHRLALEHLEDLRRFDEQMRASKVRIAAAVTESGTTLTELFGVGPVVAAMVIGYTGDVTRFRNRDHFAAYTGTAPIEVSSGGRITHRLSRRGNRQLNHAIHIAAITQIRFAHSPGRAFFDRKVAEGKTKREAVRALKRRISDAIYRQLLLDTASTGPGGQPGTTLQSSVTGLAPQQPALRKNHSRTRPNARTRQPTPAKKRRSRAATSTKTRS

SEQ ID NO: 350110 - protein, 400 aa, unidentified
MISVGIDVSKEKSTVCILKPYGEVVSRPFEVCHVEKELSELTSMLLRLNDDIRVVMEATGIYHLPVLSYLKEKGLFVAVINPFEMKEYRCQGLRRVKTDKQDAITISNYGIDHWYRLKNYEAEDSVYAELKLLGRQYRHYMRMRVESVLELTHLLDYTMPGIKTLLKGWNETNGKDKLGDFAEEYWHYDNITKKSEEQFIESYLKWAKEKGYHQSQDKAVKIYALAKEGIPTVPSDTPSTKMLVQEAVRVLREVDNTLMTILTQMQALAKSLPEYPVVRAMGGVGNVLAPKLIAEIGDVRRFHSGKALIAHAGIDAPPYQSGQFIGTERKISKRGSSSLRKIGYEVMRCLKTHKEPEDAAVYRFILKKEKEGKSKRAAKIAGLNKFLRIYYARVMEVYQN

SEQ ID NO: 350111 - protein, 497 aa, unidentified
MPTKSTIYSRCNPQLLKLFETAGHPAKVLCVALDYAKAQHTALMCNGLGELLKPSFAVDNTPQGAAQLLSEVRACVKPRKIRPEHVFFGGEDYPSYAENFLRHLRQAKFLVVRVNAWEAKQQRDNFQASSDSLDLLGIARCCLNRRGEAVRDLPQAYPNLRIATRDRDKLVRMRTAVSNRIHSYVDRLFPGFLSEGQSGLPPFSKASLELMADRFSPAQLSRRPRQTLAQWLGRRGVTQPRDTADQLKRFAKNVLAPAPEQTLLLQQTLAQLVGLYQNLEQSLARIDREVAHWLARTPGAWLTSIPGFGITLSAGWTAELGPPSQWRSVRQLCSYAGVVPKSKQTGGPQKEPVVGAVQQRCNKRLKNVVLQAVQKVIRFGPEELRRTAQELEARGAHTEFALAKRLVRLAKYLALTGTVYRPKALLDPATPKATLAAHYQSLWEKLLPKWRDKADLREVFAPEQPLGQWRKMVQELYALELRLPQQKAAHKSRALAP

SEQ ID NO: 350112 - protein, 300 aa, unidentified
MSNLDYIGFDVHKKSISFCAKGQDGRILDEGKIVARRSDLNAWAQSRSRPWVGALEATLFTGWIYDQLRPMAQELKVAHPAMLKAIAASKKKNDRIDARKIADLLRCNLLPECYMASSRTRELRRLLRYRNLVVRQATRMKNRIAGLLMETGTPYNKQRLHGRRYFAELLGSLQETPDSVQGLLRISRSQVELFETIQRKLVQELRSNPELAERVERLMSIDGVGEILALTWVLEIGEVNRFSSIGRAQSYCGLTSAQNNSAGVEYGGADFQTAQQESADHAGRGGQAGAAMELGIGGPA

SEQ ID NO: 350113 - protein, 361 aa, unidentified
MSFKILKNNCCGLDVHKTWIYACIGITDSNGRTEYKQARFSSFTKGLNELCDWLAKYNCKDVCMESTGKYWIPVFNILEQHELWVTLSHPKYTKPMKGNKTDRKDAKWICDLYMCGMVKPSFIPPADIRELRDLVRYRFKLTCMITGEKNRAQNCLTVSNLKLDDVFSDVFGKSSRSITEQILQHPGEKFDVSPFVDGRCKTPIEEIQAAVDGAISKEQAVKLRQCLDHIDELQKHISEVEQETLRLSDKYEAALNLIRTVPGFDKNPMTAIQVLSEIGGDMSVFPTAKHLVSWAGCCPRNDKSDRKIKSTRISCAGSYFKPVLVQVANALIKSKKHPEFTDRYRRIKARRGHKKAVIAAV

SEQ ID NO: 350114 - protein, 406 aa, unidentified
MLFVGDDWAEDHHDVEIQDETGRRLAKARLPEGISGMARLHGLVGRFLPEDGDAAGVKIGIETDRGPWVAALVASGYQVYAINALQSARARQSQGVSGAKSDAGDAHVLADLVRTHSHQLPTVAGDSEHAGAVKVLTRMHQTLIWDRTRQVLRLRSSLREFFPAALEAYEDLAFPDVLELLTKAPEPNSAVRLTRAQITAALTRAHRRDREAKTTAIMAALAAEHLTQPPLIAAAYGATVRALAALIRTSNEQITALQGQVEACFGQHPDAEIYLSQPGLGLVLGARVLAEFGDDPTRYDGARARKNYAGTSPITRASGKKKVVLARYVRNNRLADALHQQAFSALSGSPGARTYYDALRDRDISYNAALRQLGNRLVGILHGCIKTHTPYDEATAWNQHTQQAAA

SEQ ID NO: 350115 - protein, 371 aa, unidentified
MPDVSSNAPEDVRLWIALDVHKLSIVAAILPPTGGVPEVQQIETTAVAVRRFIERLGGPEGLAVCYEAGPGGFDLLRLLTELGVACDVIAPSLIPVRAGDRIKTDRRDAKKLVRLYRAGQLSYVQPPTPETEGLRDLLRCREDLRRARTNARHRVSKQLLRHGCIYREGRSQWTKRHRAWIARQRLGDELAQAALLQMLLHLDGLDRQLDALDRDLEEIARGARWQAAVEVLVRFRGISTRTALGLIAEIGDFSRFSHPRELCAWLGIVPCEYSSGEQRHRGHITKTGNGHARRLLIEAAWAYRHHPRRPDRGPQPDARAWQAQIRLHHRYHHLIDHGKRSTVATVAVARELAGFLWAASTDQPFAAEAGS

SEQ ID NO: 350116 - protein, 479 aa, unidentified
MNSIVLTANVQPNLDVNYIGMDVHSDNVVVCVRRNTINSSGQLVGKTIKTKKVVIKNSQEPLVELLSKYADGRQHIMTAESTFNWYWLADIAEDHGWNFRLADPCTVSQANIKAANDETDAEYLADRLRTGSLKSTSVLPRQLRGVRDLMRHRLRVMQEVSDKKVRLSNLYHNHCAHPMHGKLLAALQDAYDEINIDAVLESGICNNGSELIIGDLLTGLREAETRLAKIEAAVYARIDEVDSYKAERMLLKTSMKGCGDVLSAIIVTEIGDISRFRTMGDFVSYCRLAPTSKLSNGKSKGQGNAKNGNAYLSWALTELATLMARFNEPIRRYLERKQEKTGLRVVAVRALAAKLARCVYQVLRKKESFDLGLAFGSKPTHGQMTAAAEAAQTPPEPALPPVPAVAGEHHCPAEESDAPIVVKEPVPVKSKRSTRKKAVSAASSEPAVAAEGRQTARKADRVKARCALTATPPSCAGTS

SEQ ID NO: 350117 - protein, 281 aa, unidentified
MSKDTTVFVGIDLGDKQSDLCFLDPDGHVIEESRVPTTPSSLKRRFASLPPCRVAMEVGAHSRWVSALLTQLGHEVFVADARQLRLIYKNPRKHDRADAEYLARLARLDPQLLSPIHHRSPQTQADLSVLRARDSLVRARTQLINHARGLVKTTGARLPSSSAHSFHLKAATAVPEELLPALTPILATIASLTERIRAYDRAIEQIAEARYPETSLLRHVKGVGPVTSLAYILTLEDPQRFRKSREVGACLGLVPRRDQSGSQEPQLHITPGLARQGRQDR

SEQ ID NO: 350118 - protein, 376 aa, unidentified
MCNVRFIGLDVHAETIAVAVAEPGGEVRSLGVIPNRSEAIRKLVKKLGPAEELRVCYEAGPTGYVVYWELTGLGVKCEVVAPTLVPVKAGDRVKTDRRDALKLARSYRAGDLTAVWVPDAAHEALRDLVRAREAAKKDQLRARHRLGKFLLRHGRRPATTMKAWTQKHLTWVKTVRFEHAAQDVTLLDYLNEVEHVADRLERLEGAIDDAVNAAPESMRAVIEALQALRGIAQVSAVTIVAEVGTLSRFAKPRQLMGYSGAVASEDTSGERTRRGGITKTGNADLRRIVIEAAWAYQHRPSIGRALRKRQTTVSPMVKELAWKAQHRLNARYRHLTAKGKCRQEVVTAVSRELLGFIWAIGVKVEAQGTRQPSAAA

SEQ ID NO: 350119 - protein, 373 aa, unidentified
MPRYSTAFGMDVHLRSTTVCALDAETGEAVTRRFRGNPWGEVAEWMSGFPGPSLAAYESGYLGFAPQRELSGLGVDCVVAAVSKVPRSAADLSSKNDRNDAARMAKAILSHDVTPVWVPSPEIEGLRDLAGAHDAATARLAAAKQRLLAFLARRGYAYGGTTPAGNPRRYWTYGFLRWLDGIHPADDGGIRALAALRNEVEAADETREALLAEYRAAVAAGPLSAEVEALQSIKGCGFALAAAFASEVGDFSRFRSGRQVTAYFGLAPKQRSSADSVRLGGISGAGNALVRKLAVEGSWCYVQASHQPKLMPKGSGVPLEIRMHGRKGSERLLRRREEMLERGMPQAKANAATAAELVRWLWALGAMCREAGE

SEQ ID NO: 350120 - protein, 352 aa, unidentified
MTFVGCDLHTRQQHVAVLDTETGEVQARRLVHDDQTVEHFYASLRPPVTVGVESTGYAQWFHALMQRQGHTLLVGDAARIRAMVVRKIKTDRRDAAHLLQLLSEDRFPVIWVPDPRVRDLRALVTHRMRLVRMRTMVKNGLHAIALNHRLAAGSALFTRRGRAQLETLALPPHTTQRRDESLELLSWLDLHIHPLDAQIAEAADADVQARRLMTHPGVGPLTALATVMVLGPVARFPTSKHVVSYIGLAPSVDASADKYRLGHVTKQGNALLRYVLGQAGQVAARTDPDLRRLSSAIRHRHGRAKAKVAVARKLLIRLYIMVRDQIDYDEFRTRGGSRHCAQLPVAEVAVCT

SEQ ID NO: 350121 - protein, 301 aa, unidentified
MRRTPVGVDIAKHKFDVAVLLDNQKYKTKKFANTPSGCREFAAWLSRFGDCHVCMEATGSYSTELATYLADNNYHVSLMNPACIHSFGNTELARNKTDKSDAAMIARYCALHQPAPWFPAPLSERQLTALVRHLKNLEEMRQMEENRLEVAEAVIVPSLNEHIDDNPDLKRDSELLKSIPGVGEMLSSSLLAFAGNLRRFTSSKALVAYAGLNPQRCESGMFKGKSRLSKVGHGELRSALYMPAVVAGQYNVVVKDLTERLKLRGKSGKERVCAAMRKLLQLAYGVVKSGKTFNAEIPLAG

SEQ ID NO: 350122 - protein, 353 aa, unidentified
MQPNSPNVYVGIDTHAETHYVAVIDEHGRRLTDQEFPATAGGYRKIIEFIRANGNALSIGVECTGSYGAEITRQLAGEKFEVIEVNQPSREQRRRRGKTDQLDAYSAAEAVMSCRASSAPKGRNGLVEALRSLRTVRESALRDRTATINQIKAMLVSSPENVRSPYRSLTTPRLVAALAATRPQRQPVTSEECTRYALRLLAKRYQELDEQVRDLTAQIDRLLKAHAPGLMNIFGSGPDTGSQLLITAGDNTARLRSEKQFAALTGTCPRPASSGKTERNRLNRGGDRKANSALHHIVLVRMRYDQQTKDYVARRTAEGLGKKEIMRCLKRYIARQVFPVLVQTLRFNEPGIT

SEQ ID NO: 350123 - protein, 362 aa, unidentified
MANNNKEQPKMTAGLDLGDKYSYLCVIDNESGEVIEESRLRTTPDDLRRRFVLEEQLKIAIEVGTHSSWVNRILHECGHEVLIANPRKTRLIYGDKRKTDKLDAQKLARLARVDPELLYPIEHRGEESQAHLALIHSRDVLVRARTQLINHVRGTVKSFGARLPKCSAESFHKKAADVLPSELAEALEDVVETVGSLTERIRDYERRIERVCKENYPQETELLRQVAGVGVLTSLTFVLTLEDPDRFKKSRTVGAYLGLVPGKDQSGEQDPGKRISGEGDEMLRRLLVSSAHYILGPFGPDSDLRRYGEKIAGRGGKNAKKRAVVAVARKLSVLLHRLWITGEVYEPLHNARLSGALGEEVA

SEQ ID NO: 350124 - protein, 410 aa, unidentified
MTDTTIAQSEAVLVAIDIAKSRHEVLLQIPGKKRRRRFTILNQLADFNRLIAILTEYDCPVRVAFEATGNYHRALAYQLGVAGFEVKLVSSVALARTREALNNSWDKNDPKDAQVILHMMRIGNEQFYHDPLLSGTNDLQELSKTHDIVSRCKTELWHRVLTHYLPLYFPEAERFHRSSRSDWFFAFLERYPSPHFISAMDQDAFIADAWEVVGRKVSKERLLADIYQTAKSSVGLPIALDSDAARMFRLVLCEGRCLIAQRNEIEDRAIGLLKDNSDYKLLTSIPGIGPINALTILAEAGDLRRFRHHRQFLKFCGMDLATIQSGTFRGQTKLSKYGNARLRRTLWMAGQVAIMQPTNSFRDKFERYITKDRHNAHLRRKAYTAIAAKMARTVHGIIKSGEPYRPFFQG

SEQ ID NO: 350125 - protein, 336 aa, unidentified
MDSDGSIIEETKYNNTLDHAKSFASYVKKKHGVGKSTITAVCESTGNLWLKTYHAFEKYNIDVKLANPLKTKAIAEARIKTDKLDARTLAHLLRSDLVAECYIANKKTREERSLLRLRTNLVQDRTRVINRTHSLLDKYDMNFGYSKIFGIKGLQWLRDLRVTGNDQILLQEYISQIHFLTTEIKNIESNIRIEASKNESVKILMSMTGIDYFSAMMISSEIGDINRFSSPQKLVSWAGLCPSVHQSGNSLYMGRMKDGNKKVRWILIEAANTASRTDDRLRKFYIRLVKRHGRHIAITHVANKMCTIIWHMLKYKKLYNERKPNLYKTKLKRIQN

SEQ ID NO: 350126 - protein, 345 aa, unidentified
MKVSTVGIDLAKNVFQLHAVNELGKTVFKKQLRRDQMAEFFVNQPACLIGMEACGGAHYWARKLQGFGHTVKLMAPQFVKPYVKTNKNDAADAEAICEAVARPNMRFVPIKNVEQQSVLALHTVRQGFVKARTAQANQIRGLLSEFGLIIPQGIWKIATRVPELIEDASNELPGSFRLLIQRLLDHLKELDTQVDELESQIVQWHRQSSVSSKLAQVPGIGPITASALVASLGDAKNFDNGRQVAAWLGLVPRQHSSGGKQNLLGISKRGDIYLRTLLIHGARSVIYNGKDKTDSTCRWVNAIVSRRNNNVAAVALANKNARIVWALLTHDREFRPDYTREPVGV

SEQ ID NO: 350127 - protein, 412 aa, unidentified
MLYVGIDWSDIDHKVYFTNDTGNQLDAFCIPHSPEGVDELFSRVEKFAKDVKDVLFSLEKPSGLLVGAILDRGFTLYPINPKAVDRYRDRYKVSGKKDDFFDARVLSNILRTDRHNHKPLVPDSSLCRNLKILTHQYESLSRLKVRIMNQIVSTLKDYYPVALKLFCKIGQPVTIDFLKKFPTPEKFSKITRGKIKKFLKEHHYPNQEEKTDEIFQLSKKPHFQVEEFVVESKVLYLSALLEQLENLLSSLKTFEEKIEKLLSQHPDKDIFLSLPGSGNMTAAKFISEFGDQRDRYKKVSDIQAIAGTCPITRQSGNYKNVYFRRACRKFFRNTATQFAFCSIRRSDWARDRYKKYTQSGKKKTHALRCLSNAWLEIIFPMWKNFSTYDERKHLKIVKEQYLEEFLPVSLSC

SEQ ID NO: 350128 - protein, 348 aa, unidentified
MRRPSVAEITTVGLDLAKSWFQVHGADAQGRPLLRKKLARGKLLAFFAGLPPCLIGMEACGSAHHWARELIKLGHEVRVIPPQYVKPYVKGNKHDAADAEAIGEAVTRPTMRFVPVKTIEQQTMCQLHRIRQLLVKQKTMHVNALRGHLAELGIIRARGLNKVSELMRLIEDAADDGLPAKIRGQLRHLVEPLRDLHHRLAEIDRELGELAREHPAARRLATIPGVGPVTATARATVMGDIGRFRSGRHLAAYLGLVPLQHSSGGKERLGAISRRGDAYLRTLLMHGARAVVRIMKARPASADDWIGRLRQRRPVNVAVAAQANKTARIAWAVLAKAEDYRRPATAAM

SEQ ID NO: 350129 - protein, 376 aa, unidentified
MITCFIGIDAHTTNYTLSTAIDAKDKPFNTCKYAPKLTYILKYANALCKKYNLKKEDILLGYEAGCLGFKLQRDLNENGFNCVVMVPSTIPGTAINRRKKTKNDIRDAEAIAKALRNDDYSSVATPDEEDEAIREFIRAREDVRMELKRCKQHIMAFCNRHGQHYEETGWTQKHMKWLNNLAFSQPVLKETLNSLLLEYEYLTEKLEEKDRRIEEFAQMDKYRESVHKLTCFKGIKTLTALAVIVEIGDFARFMKAKNFVAYLGLSVGEQSSGNDHNQTGITKQGNRFIRKLLTEAAQCFSRATSKKSKELKKRQEGNVEEVIAYADKANERLRKRYHHLVIHNMKSPNKAKCAITRELACFIWGMMTDNIHTVLV

SEQ ID NO: 350130 - protein, 368 aa, unidentified
MTRKRYYIGMDVHKDSVQMAVFTEKGEEPIYERRLNNDTELLVKEVKRYSQEGMTEVAYEAGCLGYVIQRAMEKAGITCYVLPANKVAKKRDDRIKTDKRDARLIGRELRSRNIRPISVPNEIDEAARDLLRCREDVNEDLRRVKQRLLKFLIRHGFIYTDGGKNNWTIKHWKWMDEIKFSQEHEKMVYEEYRSQIKSLEERLERLNLEVEKTAESKRYKAAVGRFRAFKGIDYIIALSLLCEIGDFKRFASAKAFMSYLGFVPSENSSGGKRKQGGITKAGNGHLRKLLVESAWHYTRNTRAGKRLERRRQGSPASIIEVADRALHRLHRKYTRLVLFNGKHKNVAVTAVARELAGFIWAVQVSAVV

SEQ ID NO: 350131 - protein, 408 aa, unidentified
MKRYYIGVDWGDRLHQVYVGDHKGKKVRELKVPETVEGLAEIGRWLDEQRAEGFELWAAIEKPAGRIVDFLLDHGVEVYPVNPKAVDRVRDRYRMSGSKSDAFDAYVLAEFLRTDQAHLKALRPSSENAQELKMLCRDQHRVVRLKSRLLNQLTTTLKEYYPRPLEVFENIETEVALDFLTRYPTPAHLGALKRKEFSRFATQQHSLSKQRGKELWEKLQKPQLAVPEHVVRAKAQLVEVLIDQLRASIKAVKTYHHKVESFFASSPAAELAKTLPGGKSGTLVAAIWAELGDAAGRWESSGHLQAEAGAVPVTKASGKSHVVHFRFACNKHLRYSMYWFAFVSLNNSEWAKLYYRDQRDKGHNHPQALRALGAKWLKIIFVMWRDHKSYDEKFHLANIALQKMRQAA

SEQ ID NO: 350132 - protein, 350 aa, unidentified
MDTSKSVFVLHGVDAAEKVVLRKKLRRQQVIEFFGKLKPTKIGLEACGAAHYWARELEALAHEVVLLPPQYVKPYVKRGKNDAADAEAICEAMSRPTMRFVPVKTAEQQAALMLAGTRDRLIRTRTQLTNAIRGYAAEFGLTAAKGLDKIEPLLARLAAATELPKLAKELFAAHAREYAQIKVAIQKIEAKLMAWHKHNELSRRLVEVPAIGPIGASLAVMKVPDPHAFRSGRDFSAWIGLTPKDHSTAGKTRLGVITRAGDETLRSTLILGATAVIQQVRRGKGHPSPWLIDLLKRKPPKPAAVALANKTARIVWKLMVSGESYNPMRLRDTRGPSARYGSKATAITQA

SEQ ID NO: 350133 - protein, 421 aa, unidentified
MKPWNEITHYAGFDWARAHHVVVVLDSKGQMVEDFEFDHSLEGWKRFQEKTAAWPNLAVAIETNQGIAVDQLLQRGYAVFPVNPVAAESYRKRKAPSGTKTDHVDGWGLADALRVDGHGWKQLQPVDPVTQQLRLLCKDEVALIQQRTLLVNQLQQALVEYFPAALEAFDDWTHPATWDFVLAFPTPQRLVHAGKRRWEKFLHSHKLWRPETTEKRLTIFAAADQFTASDPILNAKSQLALSLCKLLCTLEQQLEAYREKILALFNEHPDHDLFGSLPGAKQKLAPRLLAAVGVDPARYGSHNVLQCLAGTAPVRFQSGQINKVKIRWACDAFLRHTVHLWANCFRKVSSWGQVYYDKKRQTGMSHACALRCLGQRLLKILFKMITDKKPYDAEFHARNQQKHGSWVLKLISADPTPNPGQ

SEQ ID NO: 350134 - protein, 372 aa, unidentified
MNYNTVYVGMDVHKESFTLCSCKYEDEKASHYQRTPASYKNVLRYLAFLRTIYGEDTRFVCGYEAGCLGYSLYHQLENFNVECVILAPTTMLEQRSKRRIKTDKRDAEIIARSLAQHNYSPVHIPTETDNQTKEFIRMRDDHKAELKKIKQQILSFCLRQGYQYDGSGNWTAKHVKWLRSLKTEGLYKEILDEYLLTYTILTDKLNRLDQRIEELASKEEYKESVSKLTCFLGIKTHTALSVIVEVGDFQRFVSARKFAGYLGLVPGQHSSGDDRNGLGITKAGNTHVRRLLVESAQSYTRGKIGYKSRVLRSRQAGNSPQIINYADRANERLRRRYYQMVLKDGKKYNIAKIAVARELACFIWGMMTDNIY

SEQ ID NO: 350135 - protein, 317 aa, unidentified
MARKGTIVGIDVAKGKIDAAIRFGAEASFANSAEGRRELLAWLKEHGVCKAVMEASGGYERSWARLLRGAAVEVVIADPNRVRHFAKSAGQLAKNDPIDARMIAWFGEVFGHVSGQPHDEERQELDQIVTARLGIGRLKEQIENWGEHEQPKAVQKAQQALLKVVATQLAKLETIIAAKIDKTERFAQRAEIIQSVPGLAGTAAAGLIAFLPELGLVDRQAAAALLGVAPFDADSGQRRGERHIQGGRHKLRKLLFMPVLSAATQHNPVLKACYQRLIAKGKKAKVALIACMRKLIGILNTMLARGEKWDPARHAIA

SEQ ID NO: 350136 - protein, 385 aa, unidentified
MPQTPDIFSVLEYDRTLVLAIELSSKCWVVAAQVPGLPHAKAKRTVKPTVEALMAAIDGYRSRAAAAGRIVERVIATYEAGWSGFWLARWLARRGIETYVIQPSSVPVDRRARRAKSDGIDAELLLRTLLAWLRGEPRVCSMVPIPSEADEDARRSIRERTELVAERVSLVNRIGAVLATLGVQGYDPLRRDRRQRLDASCTALGNPLPINARAKIARMLDRLELLLQQIAELDRQRDAVLEDDAPDKAGEMIQQLATLRGIGVQSATVLVREAFVRDFANGKALGSYAGLSATPYSSGSVNREQGIGKAGNRRLRTAMVELAWLWQRYQPDSANVRWYRERAGTTGARMRKVMVVALARKLLISLWRFVTQGLVPDGAVMKPAS

SEQ ID NO: 350137 - protein, 348 aa, unidentified
MTVYIGVDFHARQQTISYLTTETGEIQHLVLLHQELTTVRAFYAQFAGQRVVVGFESSGYAAWFEELLEELGCEIWIGHALYIRQFAKRRQKNDRRDADLILDLLVKGDFPRIHRYSRRPREILQQLRYRQRLVKMRTMAMNMLLFMASSRGVSLRTQLTSKRGQARLAQLTLPQPLNSQRDELLQLLQALDEKIKTVEQWLQRETKADAAVQRLQTHPGIGLLTSICVRYTLEQVERFTTTRQVSAFAGFDPMEDQSDERQRRGAISKQGSRWLRFYLVEAGQIAIRKDADLARVYKRICVRGGHAKAKVAIGRRLLVRAFIMLRDEIDYDEFLRRGVAARSSRGTA

SEQ ID NO: 350138 - protein, 369 aa, unidentified
MTFFIGVDLHKSQFTVHVRTEEKVESLDQIKQYPTTTAGYAEFLSRIETYKATGAAVKIGVESTGNTRFFKNQAEKAGAEVTVINTLKFKVINESTKKTDKHDASTISEFLSKDMLPESYLCGKETENIRRLLKSRERLVRSTVGQKNEIHALLVSLGLSDELRSLQSKKGRQRILDTLESNDDYVLEAQSVRLMLEIIERIEESVKMIEKQISELTKDDEMVNRLMTIRGCGKITAWTIRAYTEDISRFATAKKYAAFCGLVPWVQDSNETIHHGKITKRGPQELRTCFVQLVMGIRRCKDTSEWRMMQRYEYMKKNKGSGKSIVAAARKMAEIVWAMLNDKQDFDSAKMIGKYKPMILADEALAAMN

SEQ ID NO: 350139 - protein, 320 aa, unidentified
MSEPYTVGIDVSMDRLDVAILPGGQRLFVANDAAGWAELVGRLQRCAIAAIGLEPSGGYERGVVRALLAAGFSVRRINPNKLRQFARARGVLAENDRLNAQLIAEYVAIMPTRPVQSDPAAERLAEIVTMRRQLCDAHVAAENQASHLEDAMLRRIAKRRLARIEADIRLLDKRLAELVAAELGLARRFRLLCSMPGVGATLAYTLLALLSELGAIGRKQIAALVGLAPYDFDSSKFRGQRHIYGGRMAVRNVLYMAALAAFRFNPALKAFHRRLLAAGKKPKVAIVAVMRKMTGVLNAMLRDKTDWVDHTTGRHIVPAT

SEQ ID NO: 350140 - protein, 472 aa, unidentified
MPQIHVDSKLINAPKPAKAIAGKSKTRRRRAGKDPTVGLPVLNPHAAAIDIGAAEHWVAVPPGRDQESVRRFGCFTAELEALVAWLKKCRVKTVVLEATGNYWVVLYDLLEAKGLTPVVVNPRYAKNMTGKKGDISDCQWMQKLHTYGLFANSFRPGEAIRQLRTYLRQREMLVNAASQAIQHLHKALVEMNVQLARVISDISGDTGLRIIDAILGGERDPHKLAGLKDPRIRASRNEIALALQGHWKEDQLFVLEQARLSLAHGQEQIAQCDQRIEQQMRSLKSRYPQDPPAKPETSATATQPVAAFNLSDELKRIVGVDLTRIDGVGSVTAQIVLSEVGPDVSKWATEKHFASWLGLCPDHKISGGKILSRSTRRVVNRTRNALRMAAYSLERSQSALGAKYRRLKSKLGAPKAIIAMAHHLARLIWRMLRYGGEYVDKGVAAYEAKYRAQRMKWLAKQAQELNLKLIAA

SEQ ID NO: 350141 - protein, 348 aa, unidentified
MEHYAGIDVSLEQSSVCIVDASGKIVREGKIASEPAALIDYFGSLGLTVARIGLEAGPLSQWLYAAMKEAGLAVELLETRHVHDAFKAMPVKSDRNDARGIAQLMRLGWFRPVHCKSIAAQELRAMLTARKLILSKLRDVENHLRGILRGFGLKVGKTTAKTYPGRIRELVAGQANLEMIAQALLAVHAVLLREFNGFEKRVRTMAREHGKARLLMTTPAVGPIVALTYAGAIDDPARFKSSKQTGAHFGLTPKKYQSGETDITGRISKIGDAAVREALYQAAHVMLTKPVKGCSELKSWAMRIARRAGMRKAKVALARKLAVVMHRMLADNQPFNPTARSTGLAAAA

SEQ ID NO: 350142 - protein, 398 aa, unidentified
MTESSDYESVQVFIGVDVGKDTHHAVAINRSGKRLFDKALPNDENKLRSLISDLKQHGQILLVVDQPATIGALPVTVARSEGVLVGYLPGLAMRRIADLHAGEAKTDARDAAIIAEAARTLPHALRTLKLADEQIAELSMLCGFDDDLAAQTTQASNRIRGLLTQIHPALERVLGPRLEHPAVLDLLQRYPSPEKLASLGEKKLAAQLCKLAPRLGKRLAADIAQALAEQTVVVPGTNAAAVVLPRLALQLITLRKQRDEVALEVEQRVLAHPLYPVLTSMPGVGVRTAARLLTEVACRAFASAAHLAAYAGLAPVTRRSGSSIRGEHPSRRGNKALKRALFLSAFAALREPLSRAYYTRKMSQGKRHNQALIALARRRCDVLFAMMRDGTFYTPQGS

SEQ ID NO: 350143 - protein, 440 aa, unidentified
MRLMYERCAALDVHKKTVTACPRRTQSKGKVTSEVRTFGTTTPELLEMLDWLTEWAVTTVAIESTGEFWKPVFNLLEGNFEVILVNSKHVKQVPGRKTDVKDAEWLAELLSYGLLKASYIPAKPQRDLRDLTRHRVKLVQERARIVNRVQKVLEHANIKLASVASDVMGVSGRQMMAALVEGETDPALMAELAKGRLRNKIAELEKALTGVVRPHHRFMLAQHLSHIDFLDEQLERVTDEIGQRVELMSRPQEPGEGGSSVNGERKTTKTLTWAESVELLDSAPGVDKRAAEIVLAETGIDMGQFPSADHLTAWAGLAPGNNQSGSKRRRAKTREGNRNLRQIMVQIAWAASRKKGSYAQSLYRRLAGRRGKKRAIIAVARTLLESFYYMLSRAEPYRELGGDYFNKRRKDVKVNVLTKQLEKLGYAVQLEPVNLQPVPG

SEQ ID NO: 350144 - protein, 454 aa, unidentified
MREPPHKKTNIMNPTHPYDLVIGLDRSDKKADLCLIDTRTGQRRAEIIDTAPEALWEWLLELRQQHPQARVGLCLEQPAVHLIPFLEAYDWITLHPINPITLQKYREAFVTSRAKDDTKDADFLADLLLTHHAKLPVWAPEDSATRAVQQLVFHRRAVVDERTGLSNRLIALLKSYFPQALILCGDDLWRPLATAFLLKWPSLQAVQKAKAATLKPFYYLHGSRSAKLVEQRLALIAKAVPVTDEKAVIGSFALRVQLVCRQLQLVQQSVSEFDRQIAAAYAAHPDRMIYASLPGAGPVLAPRLMASMGSQRERFAAAENLQHYTGIAPVTKRSGGSCHIHRRYRCPKFHRQSFHEYAKESILWSRWAAAYYLQQRSKGSPHHTAVRALAFKWQRIIWRCWQDHKPYDEPTYEAALQKNGSPLVALFDRVELGKSPFKNPANKLKKSVDGLPQR

SEQ ID NO: 350145 - protein, 334 aa, unidentified
MVLLGMDVAKASLDCAVLTSVGDKLVGRRSFPNSPEGADRVARWVAQVSGAEAADTHLIVEATAAYHTAAYHEVAAQRLAAAGLRVSIVNSARVRSFAKALGILGKTDRIDAHLLARYGLLVRPKLWSPPAKALLDLQSLIARLDDLEADLRREENRLEQARTRGCPDLVERSLLTSIAELKAQAAEIKQGIAAHIAADADLQSGLERLMTIPAVGPKTATRMLLMLRMRAFDSARQAAAFLGLVPVERTSGTSVRGRPSLSRAGNPRLRAALYMAAVVGTRKNPDIKAQYEHLLGRGKCKMAALGAAMRKLVHLCFGVLKDEGGYRPGAASKP

SEQ ID NO: 350146 - protein, 340 aa, unidentified
MNEVITIGVDLAKNVFQVHGVDADGAVPFRRQLRRRQVLAFFKKQPPCLVGMEACATAHYWAREIAALGHEVKLMPPRYVKAYVKRNKNDAADAEAICEAVTRPTMRFVAVKSAEQQSVLMVHRTRELLVRQRTMLVNAIRAHMAEFGVVARVGLPQVKTLFAVIADPDDDRIPPLARTCLEGLARQLLSLEREISAAEQRIHAWHRANEGSRRLETTPGIGPITASALVASITDPSIFRSGRSMAAWIGLVPRQTSTGGKERMGRISKQGDQYLRWLLVAGAMTVIRHARRRGTTDPWLAGLIADKPTKVAAVALANKNARIAWALLRHGGTYRRPATA

SEQ ID NO: 350147 - protein, 420 aa, unidentified
MDHFDKACFTVYIGIDWADAKHDFCLQAAGGTQREFGVFSSQAAHIDEWVVNLHRRYGGKIAIGLELTKGPLVYALQKYDFLILFPINPATLAKYRQAFKPSRAKDDPTDAELALDLLLRHPERFKPIEPQSPAMRALLSFVERRRELVGDKTRFTNRLTNTLKQYYPQALEWFDHHDTILFCDFITRWPTLEKAQGARPATLDRFFKQHNVRRASVIDARMAAIKAARPLTRDVAIIAPHLLETLVLIEQIKVALKAIERFDDAIARLAPTLPDFELFAALPGAGPTLAPRLLVAFGEQRERFASAKELQQYSGVAPVTERSGKKSWVHWRWQCPTFVRQTFVEWAGQTINKSDWAGSYYRQQRAKGSSYQAAVRALAFKWLRILFRCWQSHAPYDEARYMATLRQKGSALCNSTAPAA

SEQ ID NO: 350148 - protein, 413 aa, unidentified
MEVLYARCSGIDVHKRFLVACLSIVQANGQRHKELRQFSTMTNEILALKEWLKASGCRQVAMESTGVYWKPIFHLLENEFEIVLVNAQHMKAVPGRKTDVKDAEWIADLLQHGLLKASFIPSSEQQAVRDLTRSRMTLLQERNRLINRIQKVLEDANLKLASVVSDIMGMTGYAILKALAAGEVDPEHLAHLARGSLVKKQEQLKAALQGKLTAHHRVLLEELLQLIGTLDRSIARLDREVAERLHAHDALIERIDAVTGLSRRSIEVLLGELGWDMSRFPDAAHAASWVGICPGNHETGGKRLSGRIRQGNRWAKAVLVQAAHATARTQSYLGEQYRRISARRGAKRAAVAVGHSILVIFYHMVKTGEPYDEKGADYFTSYRKQEIQQRLVRQLERLGNTVILQPKAEMTLA

SEQ ID NO: 350149 - protein, 404 aa, unidentified
MWYAGIDWADTHHDAVVLDEKGHQRGSLRVDHTPEGLAKLNTFLETISGSLEKEQMACIIETTHGLLIAFLLEAGWPVYPVNPRTVDRRRSASGAKTDTIDAYLLAKTGRADLADLHRLTPDSELVQELKTLTRDQDALIQMQTRLVNQLTACLKAYYPVALQLFTKVQQHSTLIFLHTSPTPQAAMAASVEQITEVLKHAGHTTAEKVAPTIFETLHQPQLTANAITLRTKSRLMLALVAQLLPLVEQITAYDKEIERLFLMHEDNAVFSSLPRAGKRLAPRLLAEIGDEGTRYADAASLQALAGTSPVLFQSGNYAKAHRRLGCIKPLRNALYQFAWQSTQQEGWARDYYLRKRAEGKSHTVAVRALSNVWARIIFAMLDKHEPYDSATFVAAQHLHARRVA

SEQ ID NO: 350150 - protein, 357 aa, unidentified
MESQEVKYVGVDCGKKSIEVVRINSENSLERRQFSTTESGINNLLQWLTLNDIVGLEAGSQSFRIAKSILNKGVQVIVLKPGNLATIYQSLKKTDKEDSLKIARLIQRFPIEELPTVPIPNDEEEDNRRLCTEQENWTKQLTQGKNRLHSLFTQAGLTQITKKHLRTKANREISVALLPSRYQKEAERILKVLDLVEQNLKLIEKEIQEALKKNKAYVQTIMSMPGIGMITSLAIMSYMGDCKRFSSAKQAAYYAGLVPRVDISGDTVRYGRIINRGCHSIRRVIVQAAWSLVRCQHGGKVKEFYQRLYLKKGAKKSIIATSRKMIEVLYVMIRTGKLFDSMPENILNRKLTQYGLM

SEQ ID NO: 350151 - protein, 439 aa, unidentified
MTFAGGRAQADYMARVRGIPPEQCLVVPIDVGKHTAVSLVADHEGRVVHEPMTFPMTATGARTLMNAAGTAGRAARAGSVRFGIEAAGHYHRVLASTLHASGLDVVELNPAAVKVARSQLGQARVKTDVRDCLAMVELLVRGQGWPLHRHDDQVALQTMWVAQRRRKLDAAQALTNQVHALADLAFPGIAATFKTGFDSPTLRMLLSTITSPDELAAMDVEQLVAHAATHGRRMLRPKARHVIAAAQDSLRLPNSQQPTAQCLLAREIAVLEQLRNEITYCDEQLATILPSTPAGVLATIPGVGVATASYYGAALGDPWRFTNADAAYRYSGLSPSSYDSAGRRRAKVQISRQGAVELRRAMITLGTSMGLSHPDFVAYRRRLLAAGKKPMVVAVALAHRSHRLAFAMMRSQIPYDDCRWTTAVAKGRPAKAAGATATT

SEQ ID NO: 350152 - protein, 334 aa, unidentified
MGNVPVFVGLDYHQDSVQVCVLDRQGRRLLNRRCPNDWRAIAEAAAPLGRVERAAVEACCGAADLAEELRGKAGWRADLAHPAYVAKLKGSPDKSDFSDGHLLADLTRVGYVPVVYLPSSYERDLRQLVNHRQDLVDRRRAAKLRAGAVLREHRARPPQKLSRWTRAWERWAASAPQLSEHARWVVGELLAEVVHLDGLVDAADARLRRATKGDRLVGRLMGEPGVGEVTAWVLRAYVGDFARFRSGKGLARYCGLSPCNASSGGRQADAGLVRGCNRLLRATLIQAAHRLARTEPRWVALSKSLRARGKPGSVAAAAVANRWARGLWHRMVAA

SEQ ID NO: 350153 - protein, 441 aa, unidentified
MNNKTTVFEGYEVVNHICAGIDVHRDKVNVTIAKSEGNKVLFHYSVFWTVKSNLEEMLSWLISNGCTVVGMESTGKYWKPIVNVVEGSIPIYLYNARHIKNIPGKKTDKKDSQWIARITRYELVTHSFIPEAKTRSTRDFVRYRKSLVESRTRARQQVHDILTSCGIKIAIYMSDIFGVSGRFLLNCIANNKPLTKDILELRMHPPLNRKVDEIYEALNGFVTKPDRDLLIMHLEEEKRLCDNIDDIEAKLETMVIDSPEKEEIVNRLIEIPGFSKRSVTLLLGELGIDLSSFPDSKHFSSWCGLAPGKKESAGKNLSGRIHVREHYLRSLLVEVALASTRCKGTYFNSKFYELRKRKSTQKAVIAIARKLAIAVYMIIKEGKEFKELTAEYVPIEAQARDIRNIQRIAKKIGKEATYAFLEQVFEAQKSISHEHKSLEDD

SEQ ID NO: 350154 - protein, 348 aa, unidentified
MNVTTYGLDLAKRVFQVHWVEPDTGELKRKALARAEVAAFFARRAPGVVAMESCGSAHYWGRVLSGLGHQVRLIAAQFVRPFVKTNKTDAADAEAIWEAVQRPGMRFVALKSEEQQAVLSLHRMRAQQVKIRAMQAYQVRSLLYEFGVVAPKGFAALKAKAATVLAEPTGCPVPELARVELLSQLEGLQSLTARIEALERRTGSWQRREAECERLAAIPGVGRLTATAVVATIADARSFRSGREFAAFLGLVPRQSGTGGRVKMLGISKRGDPYLRTLLIHGARSVMFTQSRAERVMDPWLKELLARRPKNVAIVALANKMARTIWALLAHGRSFDPNWGRTALVALA

SEQ ID NO: 350155 - protein, 482 aa, unidentified
MKKSSIYPNRSQELAALFEKAGNPSKLICVPIDYAKKDHLVMFCNGNGEVLRKPFSVKNSVDGVKYLLGQVNRSCKHRHIQSDHVFFGGEDVNSYAENFANTIRSKGWLVANVNAHDAKKQRENLQASTDRLDLMGIATMLLNRRANCYPAQSGVYRNLRTIVRHRRKLVKMKTEVRNRIHTLIDRLFPGFLNEKKSGILPFSNSSLYLMQERFSAPQIRRRQRSALIRNLEKRGTKKAEQVAAKLQEYASQVLTTPDEYTATLQVSLASHVTHYRCLFDGAQQLVNEMAQLLAQTQGAFLTSIKGIGIVLAAGVAAEIGDPLVQRSTDQLASYAGIVPKVKQSGGSQGPSITSHVSKRSNHILKDLVVQSAFHIGRYGPKDLKDDFSRREAAGQHADFGIARRFVRMAMCMMRTSQVYLPPDLRSTHIKPERRADYYLAMWSYLRDKWSKSGGLNVAFAMDKPLGQWRYIVQEIYGIKLKM

SEQ ID NO: 350156 - protein, 319 aa, unidentified
MSVSSVVGIDVAKAHVDVFVLGAEFKPQRFDNAAEGHSALASALAPLGVRLVVMEATGGYETALACSLQAAGFAVAVVNPKQARDFAKAIGLLAKTDAIDARALASFADTLSRQPDLASYIRPLTDEAQRDLAALVTRRRQLLAMMLSERQRMQLAVAKVQPSIEAIMQAIKAQLDEVEGEMVGHVQEHFGKLDALLRSTKGIGPVARATLIAELPELGKLNRRQIAALVGVAPMANDSGNSKGRRSVKGGRFEIRRTLYMATLAATRYNPAIATFYARLRAAGKLPKVALVACMRKLLTTLNAMARSGQHWNPEFKPA

SEQ ID NO: 350157 - protein, 411 aa, unidentified
MRLFVGDDWAEDHHDVEVMDEAGRVLAKKRLPEGVAGMSQLHELIGRLVPEDGDDAQVVIGIETDRGPWVAALVAAGYLVFPVNPLQASRYRGRHGVSGAKSDAGDAHMLADMVRTDSHQLRAAAGDSAEGQGIKVVARAHKTLIWDRTRQVQRLRHQLREYFPAAIEAFADLDAPDALELLAKAPEPARAAKLTRAQVTAALKRARRRTIKDKTDAILAALRGEHLGQPPALSIAYAATVRSLIAVIIALNEQVTVLEEQVREHFGRHPDAEICQSQPGLGPILGARVLGEFGDDPHRYADAKSRRNYGGTSPITRASGKKKVVAARFIRNDRLTDALMAWAFASLNPSPGARAFYDQQRAEGREHNDALRRLANRLVGILHGCLKTRTLYDEATAWGHRANLPQSPVAA

SEQ ID NO: 350158 - protein, 346 aa, unidentified
MLADELDYVVRVDPHRDTHALAVVDVRSGCVVFEATTQADAEGYACVLRLAEQHAPGRRALAVEGTGSFGAGLTRFLSGEGERVLEVGRLRRERQSGKSDALDAIRAARSVLGQTRPARPRAGGEREALRALNAAREGAVTARRAGLCQLRGLLVSAPEPLRAELRSLTRAQLLRRLAAVRPERRQDPELRGTLLALRALARRVKTLTVEEGELAGEIETLTRKLAPQLLDQPGVGPLAAAQILISWSHRGRVRSEAAFARLAGCAPIPASSGQTIRYRLDRSGDRRLNRALHMILVTRRRADPPTIAYINRRIQEGKSRREASRCLKRYLARNLYRLLEHAPMPT

SEQ ID NO: 350159 - protein, 430 aa, unidentified
MKSNTQNAKIEAITEKTLVLGIDVGSETHYARAFDYRGVEYSKKPFKFSNTEAGFVTFKAWVLDIKEKHGKDKVIPGMEPTGHYWFNLGKFLQDNEMKPVLVNPHHVKKSKELDDNNPTKNDRKDPKVIAGLVREGRYMIPYLPDGVYADLRTASNIRFQLQAELTRIQNRISRWFNIYFPEYKTVYGKPDAKSGILILKTAPLPEDILTLGIDGVNQIWRDAKLRAVGKARAKTLIEAAEHSVGSKEGAVSARMEIRMLLEDYESRNIRLQEVMGLIEGLVNQIPMAEKLLEIKGVGIKTVSGFLAEVGDIRRFNDPKELQKLAGLALVENSSGKHKGKTTISRRGRKRLRYLLFEVAMSLVAKNPEFRELHNYYTTRRLNPLKKMQSLMAIAAKLLRVFYAILTKGVGYDPKKMVNDIRRPAAYAQAA

SEQ ID NO: 350160 - protein, 339 aa, unidentified
MDTVRFLAIDLAKNVFQVHGVDAAGRLVLRRRVGRAQLTELVLRLAPCTIGMEACSSAHHWARQFQQQGHTVKLISPQFVKPFVKGNKTDGNDAEAICEALQRPSMRFVPIKSVEQQDVQSLHRARSRLVSNRTGLVSQMRGILAERGIVFAQSITRARREIPAVLADTSNALTPLAREMLADLMDQLRELDKRITGFDRRIDAVFKASETCQRLAQIEGVGPKTATAIVAAVSDPKDFRNGRHFAAWLGLVPRQSSSGDRTHLLGISKRGDRHLRTLLIHGARAVLRTAPTKHDKKHAWALALQARRGANRAIVAIANKMARVIWSMLATGQSYQKAV

SEQ ID NO: 350161 - protein, 360 aa, unidentified
MEVGQTMADHGVVGGVDTHKDLHVAAVVDALDRVLESRCFATTRHGYQQMLTWMRSFGQLRRIGVEATGTYGAGLLRYMQNAGVEVLEVTTPDTHDRRKRGKNDDLDAQNAAHAAFAGRRTVTPKSRDGMVESLRVLKACRKTAVAARRVALQMIHNTIVCAPDELRETLRRMTSMQLIRTLAAWRPDLTDYRSVVSAYRITLKSLGRRYLELHDEIADLDTMIVAIVDELAPALVARNSIGHGSAAQLLVTAGDNAERLRSEASFAALCGVSPVPASSGKTTRHRLNRGGDRAANSALHIIAIGRLRTDPRTKAYIAKRVAEGHSKLEAIRCLKRYIAREVFSLISQRKREINQGRNAA

SEQ ID NO: 350162 - protein, 342 aa, unidentified
MQIASVGIDLGKTTFHLVALDERSQVVMRKKFSRKQLLAFTANLQGSLIGLEACSGAHFLGAALRRQGHDARLIPAQFVKPFRKSNKNDFLDAEAIAEAVARPNMRFVPIKTDEQLDLQALHRVRDRLVQRRTAVINQIRGFLLERGITFGRGPAQLRNRMAEVLEDAENALTPRLRTLLDRLWVEWKQLESDIEVAAEEIEQICHGDEACRRLRSIPGVGPLVATATIAAVGNGAAFRKGREFAAWLGLVPRQHSTGGKARLLGISKRGNLYLRRMFIHGARAVVFRVRHDTGGLGQWVQQLATRATPNKVIVAVANKLARIAWAVLFRGEDYRHPALAQV

SEQ ID NO: 350163 - protein, 375 aa, unidentified
MSIVMGVDQHRAQITAEWIDLDSGEIGRARVSPADRAGVRRFLGRFDGQQLEVALEATTGWRFFVEELHAVGAVVHLAEPAETAARRGNKQRAKTDRADARHHRELLMAGRLPESWIPPDHILDLRARVRLRHTLIEQHSEWQQRIQAVLYHHGCPQRRKLMQGDGRDWLSAQPLPETAREQITVALAMIDALERQIAPLDAQLRPYARRQTGCRALIDAYYGVGELVAVTILAELGDCRRFSNSRDAVRYGGMDITVYQSDRHRAPGHLSVRQGPPALRWALYEAAQHARFPNSPDREYYLQTAERLGGNRACLALARKLLKRCYHTLRELGEDALAPPTDERPSSAAARRASSAGTPKTDRPVTREPTDALAA

SEQ ID NO: 350164 - protein, 353 aa, unidentified
MRRPKDKLIAGLDLHSNNVMIGVINQDGKRVVHRKLDCDLSQVVGFLKPYKAQLQSMAVESTFNWYWLVDGLRGQGYPIDLANPAKIEQYSGMKHADDKDDAFHLADLQRLNILPKAHVYDPQLRPVRDLLRRRTNLVHQHTALVLSFSSLYARTTGQKLELGKVKQMEPKQAPQLYEHPANQLIAQVQAEHIQALAKSISRIEKAVLACAREIPLYERLVTIPGIGRILGMTITLEVGDIRRFRTDGDFASYCRLVSAKRLSNGKCKGDNNQKCGNKYLAWAFVEAANFARRYDEHCRRWYDRKAAKTSKVIATKALGCKLAKAAWHVMAGQCDYDPKRMFPELAIQAMKPS

SEQ ID NO: 350165 - protein, 453 aa, unidentified
MRRSTLESVPAVPNAAEREFDWYVGIDGGGATHQVCVLDAAGRRAGERAVAHAGADLAALAAWLHEVAGPSLARVAVGLESRHAGPVALCLEHGAAVFAINPKQLERFRERASAAGAKDDRRDAYVAASALRTDRGAFHRVTPDDARVVALRELSRTADELREDARRLSNRLRAQLERYFPQMLTLVPAADEPWLWTLLERVPTPAAAARVREAAVARVLTAHRIRRVSAAEVLTALRAPALVVAPGTVEAVSAHVALLVPHLQLVSEHHRRCLAQLEAAVAALAGPGPGADPPSRPAPNAPPDAPPDAPPDAPPDALGTAVRLVRSLPGVGGVIAGALVAEAAGALLAGDYHALRTQGGTAPVTKQSGKQRLVAMRHACNQRLRTALYHWARVSTQHDAAARQYYATLRGRGHSHPRALRSVADRWLRILTAMLATGTPYDSTRFASGVATP

SEQ ID NO: 350166 - protein, 377 aa, unidentified
MSQFIMVGCDLHDRTMLLRYAIDTAEPQQLSFENNVLGRQQMIRRLKSIAQDHGSTKIVFAYEASGLGFGLADQLIDSGIECHVLSPTLLPKTPKSAKLKTDSKDAQMLLEQLRGWALAGNRLPIVWTPPQRLRDDRELVRARIDAGDELTRVKLKILSMLKRREIPKPTSYHCKWSKAFVTWLREIITSLEIAVAPVLERLVDRYELYKREITKLNQALRELSRQPRYRVSHQELRKLPGVGLLVAMSFLTEMGDLHRFENRRQIGAYLGLCPAAHESGEATDRKGRITRQGPSRLRKLLCQAAWVSVRHCSEAAESYHRIKQGQKKRTKKATVALMRKLAVKMWHRAMSCGVSCELQGRGGPRDSIESCLAGTNA

SEQ ID NO: 350167 - protein, 407 aa, unidentified
MFELNPNNILPFGVDPSRANLAIVSISENPAFFKIRNDQRSHRGFLNKVAKMASETGRYPVFAVEGNSPFAIGFEFEAYRRGYPVYEITPHRLSEMREVLCGEDQTDYRDAKTAALIITHIPQLLRPASLDLKQFALKRLVKIRLRLVKDQTRNINLLHNHLAQIWGPSYKDFFPVLNSSQALTFFAIFPTPGYLNLETERILTYLADTGLAYYRSNWGKKRVGLIMDKVRGMNWRGDEYLSELGWEVGLLANDALKRRQKIIEVNARLIEQGKGWEAERIELVRTIPGFDWVLACSAVVLIGDLSRFERSSDFIAYCGLVLCAKDSGNTRRVKRRKRRNKMLSYVFYQAALASLHSSELSQRYYQKKLSEGKDSKQALRALAKKLAEITYAVLKNKEPYDEKRHLN

SEQ ID NO: 350168 - protein, 347 aa, unidentified
MTDMPYVALIGLDWADQKHDVCLYDCAAQTQEHCVIGARPEAIEAWAMQLRVRYGGQPIAVCLEQKRGPLIYALCKYEFLVLYPVNPQTVSKYRQVFTPSRAKDDPTDAALQVELLRKHRDKLTVWQPASPMLRKLQALVEWRRTLIEDIGRTTNRLVDVLKGYFPQAIDCFEHRDTMVFCDFLTQWSTLSAVQQVSDEQLQQFFCEHHSRYKDCNARRIECLRNGIPLTQDSAIVESSQLMVQALVSQLRSLLTSVRQFEAQIDREFNQLPDAAIFAALPHAGTNLAPRLLLAFGEDRTRYQTAQDLLQYAGIAPVTERSGKKCWIHLGVGEHRDSYAKPFIGVGE

SEQ ID NO: 350169 - protein, 339 aa, unidentified
MSKLLKNFVGIDISKTYFDAVLVKVDASSETIHQQFSQKPEGFLKMLEWLQQHGVSLNEETLFCMEYTGLYNTGLVNYLVKNKALLWVEMPLRIKKAGGFERGSDDRTAAVKIALYSLRYQDQMRLWQPIDSNIEKIKNLIAQRDRIVGVINQLKVPVDELKECGCLTEAKEIEKLQLPALKGLQKTKLSVEAQIKKTVESDEQINRKVLQIQSIKGIGPVTAVALLAYTKAFTSFHNAKELACYCGVVPFKKESGTSVRYKPSVSPFANKKLKKLLHLCALSAIKNDAELKAYFERKVTEGKNKMCVINAVRNKLIHRVFAVVRDERIFEENYVRKCA

SEQ ID NO: 350170 - protein, 405 aa, unidentified
MEVLYKRCCGIDIHKNMMVACIFTSVRKKEIRQFSTMTEDILQLVSWLKETDCEMAAMESTGSYWKPVYNIFEEEQIPIMVVNAQHIKGVPGRKTDVKDAEWIADLVRHGLVKASYIPNRDQRELREITRYRQEITEERARELNRIQAVLEGCNVKLSSVITDISGKSGMTILKAIVSGETDPVVLSELAEGRARDKIPEMQKSLQGRISEHQQKMLKHQLGHIESLTALIMDLDADIKKKTESINWAIEALDDMPGIGRKSAERILAETGVEMEHFQNESRFSSWAGLVPECKESAGKKMSTRIRKGNKYLKATLVECARAGIRNKQSYLYSRYQRIAARRGGKRALIAVAHAMLIAIYHILKEKVPYHDLGADYYSVINQEKMINRNIRTLEKLGVNVMIQPK

SEQ ID NO: 350171 - protein, 347 aa, unidentified
MKILALDLGKYKTVSCDYDGENGKHRFGASFTTPAGLERIVKEVKPDRVVIEVCNIAGWVCDLLRGMGVEVQVANTSDDAWRWRKVKKKNDRSDALKIAQLSAVNQLREVHIPAIEVRQWRALIAFRQQLVKRRGKMKNHIRDLLVSEGQMLPRGGKCWTQIGVAHLEAMARPLSEVGINELWRGQLEIELRQLHEVQREIVVAEEKLDAIAAADPRVALLRTIPGVGPRLSEAIVALLDRPERFQKAREVSAYIGMVPKQFDSGESNRAGRITRHGSRIVRSLLVEVAWAGLRYNPWVRETYQRISGGKKSRKKIAIVAVGRRLLVRCWAMLRDGTSWRSPAAQTA

SEQ ID NO: 350172 - protein, 426 aa, unidentified
MKLEEKELEKQICAWIGIDWADERHDVSLYDVGTGKQEAWIIRQSPEALQEWLGQLRSRYEGGYVAVVLEQGRGGLLNALMGCEFLVLYIINPKSLSSFRDAFYGSGATSDPVDAALMRDMVRQNPSRFRAWRPDDVMTRSLRLLTEGRRHLVNQSTALTNQLTALLKGYYPQALSWVGTLDTAWACDFLEQWPTLQSLQASSRRQILRFYEKHPRASLDLGEQLKQIQDARALTQDAAVVESSALMVHALVSQLRPLLASIAEFDRKIAMIFRKHPDRPIFESFPGAGAALAPRLIAAFGTDRDRFQAATEMQELAGIAPVTEKSGKKCFVHWRYACPKFTRQTFQEFADHSRRWCQWAKAHYELLKQRGKSHNAAVRALAYKWIRILFRCWKDRKPYQDEIYTKSLLKHGSPLSSLLAKPVENQ

SEQ ID NO: 350173 - protein, 424 aa, unidentified
MKYTQNEKILQITEKTLIVGIDVGSEKHYARAFNFRGVEFGKLLIFDNNAQGFANLMGWAEKIASTNGFTGVTLGMEPTGHYWFNLAENTMKSGARIVLVNPHHVKKSKELDDNNPSKTDRKDPKTIAMLVKDGRYMEPYIPEGIYKELRTAMDSRWHLVKEISAIKNRISRWIYVYYPEFTTVFKDWEGKAALLILNECPTPKRIIEKGIDGIIAIWKKHKIRAVGRKRAVKLLETAKNSIGTSEGLVSGENDLMILLEDYERKMQQYERTMALIESLAMQIPGFEKMLGIKGIGLITAAGFIAEIGDISRFNHPKQIQKLAGLSLKENSSGKHKGETTICKRGRKRLRYYLTFGIMPLLSKNEEFRELHKYYTTRKNRPLKKMQSLVALSNKLIRIFYAILTKNIAYDSQKMMNDIKRAEAA

SEQ ID NO: 350174 - protein, 342 aa, unidentified
MGEITIIGIDLAKNVFQVHGAAADGSVVFRKKLTRPQFARFMAEQPPCLVAMEACASAHHWAREMSRHGHKVRLIAPHYVKPFIKRQKNDAADAEAIVEAALRPTMRFVEPKTQEQQARAVAFRTREQLVKQRTEAVNALRSHLYEFGHVAPVGIGYLPRLERVIADPDADIPDLAREICQMLLDQINQLTGRIDALKARIAALSNEAEMPRQLQTMPGVGPITALAVETFAPPMEQFRRGRDFAAWLGLVPRQHSTGGKQKLGKTSKMGQRDIRRLLVIGATAVIRWASRRGAPKGSWLARMLERKPVPVVAVALANKMARGIWAMLTRGESYRGPVLIGA

SEQ ID NO: 350175 - protein, 342 aa, unidentified
MSNLDSCGIEVSAKQLVIRLRRQGELEPLRNFTNTPEGHEMVVRYLRQAGRVVRVCLESSGLYGLDLALALSAATGLEVMVANPRAVRHFAHALMKRSKSDPLDATVLEEFAARMPFQAWKPPSAAALALHALARRLRELVEIQTAEKNRQHAAGLSQTIPTVVRRDLARSLRAQQRAIQRLTAQARKLIDKEAELRERFALLDSIPGVGETSAVQLLGELAVLAPDLDARQWVTYAGLDPREYTSGSSVHKKTRISKAGNKNLRHSLFMPALVAVRHDPYLGAFYQHLLAKGKFKMQALVAVMRKLLHAIHAMFKAHQPYDGSKLYPAMRAKEVLCAPVAS

SEQ ID NO: 350176 - protein, 460 aa, unidentified
MTKRKKSMVNVPAMDVLEQINLHAAGLDIGSEEIYACVPANRDEASVRVFPTFTADLYVLADWLAVCQIETVAMESTGVYWIPVYEVLESRGFEVYLVNARHVKNVPGRKTDILDCQWIQQLHTYGLLRASFRPSEEICALRALARHRDNLIRYRSAHIQHMQKALQLMNVKLTEVVSDITGVTGVSIIRAIVAGERNPHQLARLRQSGCAKSNEEIAKALQGNYKLEHVFVLKQALAQYDFYLQQIQECDAQIEAMYAALPPSDPDGRVSPPPKSKGGKPRKNQAHFDLAAALYQVVGVDLTAIDGIDALTAQAIITEIGTDVNAWPTVKHFTSWLGLSPHNDKSGGKVLRSRTKKTQNRANLAFRIAAHSLSRSQSAVGAFYRRMKAKHGPAKATTATAHKLARMVYFMLKNRTAYVDPGVTYYEQQYRERTIRNLKRRAAALGLELVAAPFQSTAVS

SEQ ID NO: 350177 - protein, 341 aa, unidentified
MKPAMNVLGIDIAKHVFHAVGMDNTGEIVFRKRLSRHDLIPFMAKLPPVLIGMEACGGAHYWARRFREHGHNVKLMAPQFVKPYVKSNKNDSRDAEAIAEAVTRPTMRFVPIKDVDQQDIQALHRVRERLIGERTALVNEVHGLLHEYGIVIPKGVAKFRQAVIGKLESAKDKLTSLSQEMLWKLIEEFAGLEKQLAYYQEKLEALATTHPECQRLMTIPGVGPLTATALVAAVSDASAFKNGRQFAAWLGLVPRQHSTGGKDRLLGISKRGDSYLRKLLVHGARTTIRWVGRKTDRRSQWIRQLVERRGKNRTAVAVANKNARIVWALLTSHQDYQLATG

SEQ ID NO: 350178 - protein, 358 aa, unidentified
MTRCIPTDAATITLGVDTHKDAHVAVALDGLGRRQGTLSIPRTPEGYKKLVDWASEFGPLEHAGVEGTGSFGAGLARFLKSRGIKVFEVIRPKRSHQYRSGKSDPIDAESAARSVLADTAIGEPKGAHGEVEMIRTLRITRRSAVKARAQAANQIQALLLTAPEGLKSELCGLSMARVVEKASRLRPGATPSDVEEATKFALRSMARRYQHLSEEIGKLDEQLNRVVSEVAPELVVVEGIGTDTAASLLIAVGDNPERLKSEAAFAHLCGAAPIPASSGKTVRHRLNRHGNRDANRALYVIAVCRMSRDERTRTYVAKRTAEGKTKKEIIRCLKRYIAREIYRILASPSSHSTSISAP

SEQ ID NO: 350179 - protein, 405 aa, unidentified
MSELEKNLVFAGVDTHKDAHTLCLLDHMGRAVGTFRFAADAEGYDTLASKMGDPATCVGVGVEGTGSYGAGLTRRLLELGYCVYEVMVPGRARRKPGRPRSDPADAEVAARQVLARVNLSKPKDQPGWTEDLRRLMIARDRLVQATSAMINAAKSLIVTAPEDLRRSLENLSRKDLRGALSTLDPDADGIVLALGSLGRAWDLQDREANAIEEKMKRVLEANAPALLAIFGCGTVSAAALAVAGGGNPERLKSEAEFASLCRVAPLQASSGKTERHRLNRGGDRRANGALYQIAVTRMSYGQKTKDYVEKRKRDGKSKKEIIRCLKRYIVREVFRALRHPFEIKGPSWKDLRPARRALGVTLVEVRKALNVGFQRVSYAETGRLMNAQFLEEYNSWLKSQMKTVG

SEQ ID NO: 350180 - protein, 340 aa, unidentified
MSEYMRIAVDTSKHVFTLHGIDREGHVALRRNVRRAAFVEFFAKLSATLVVLEACGASHHWGRALQAVGHEVMLIPPQYVKPFVKRGKNDRNDAEAICTAAGQPGMARVPVKPAETQAAAVLLSVREMLTRQRTQLVNALRGHAAEFGLVAAKGDAGVQEVLSKAAEPGSLPAPAAAALAMLGSEIGRVECALKQADKKLMAQHKSADSVGAMSRLLAAIPGVGWLTALTFSLRIDATQFTSGRHLAAWLGLVPREHSTGGKQRLGGISRAGDERLRSLLVLGATAVIRHAKEGKSSPWLLSLLARKPRKLAAVAMANKIARVVWAMMTSGENYRQPKAA

SEQ ID NO: 350181 - protein, 341 aa, unidentified
MTSVAQRKAFVGIDYHDSVVQVCVLDAEGNVLGNAGLDNEVGAILEFVDKVAEGRLVWGAAIEACCGAANLAQRLREQDWEIELAHAGICTRMKQNPDKTDFSDAQLLADLVRVGYLPRVWLPPEEIRDLRRLVRYRQQVVERRRDIKLRIRAMLREERVMAPKETGSVWTKAWKQWLQTTTALGPHSRWIMDEHLAELERVSAKIRQVELRMEEATRDDPVVAKLREEKGVGLVTAVVMRAEIGCFHRFRTGKQLARYCAVTPKNVSSGKRQADGGLIKAGNLHLRRMIIEAAHRLARYVPKWRNLKEHLKSNGKSGSVAAAAVANRWIRQLYWQMQTAA

SEQ ID NO: 350182 - protein, 364 aa, unidentified
MQQLTHIGLDVHKETIAVAVLRPDTIECDERVIANTPEAIRKLLSRYRDPSQFATCYEAGPTGYDTHRLITSLGFSCDVIAPSLIPKRSGMRIKTDRIDARHLARMHRAGELTAIRVPTPAEEAARDLVRAREEIKADRRVARQRIRSFLMRYGKRYPKANDKWSFRFEVWMRALKFDEPYAQSAFEHLLSAYFMRDSQLAAVDRQIEELALTEPLAAGVALLRAFRGIDTLSAVTILTETCDFRRFPAASAYMAFTGLVPSEHSSGATKRQGSITKTGNQHVRRVLVEAAWAYRHAPAVRGKLRKRQEGQPQDVVAYSWAAQCRLHATYRKLSAKKNANKAAVAVARELSGFLWGAMTGNMGA

SEQ ID NO: 350183 - protein, 416 aa, unidentified
MRKRNYRAQKVNEIRWEAVGQRVEGKAMVFAVDVAKVEQYGVLMDSEREVVVTVKWAHPAETPALLERLRDLACESLTAVMESTGVYGDTLRRQLREAGIEVHQMSAKRVHDACEVYDGVPSMHDAKAAQVIGRLYFEGASRVWIEPTEQQRSHDAVGRLYRLYQKQHQQQQNRLEAALQRHWPELTHYLDLDSVTLEELLLSFGTPAELSARAEEGRERMRLVSRGKLAAEKIEAVLESARHSIGVPCVAAERDYLMALGAELRHSREQKERVALRLSALTQADPQLQSMGATLGRVTTGLLIAEGLDPRAYANSGSYCKALGLNLKERSSGQHKGQLKITKRGSGPARRDLYLATLRLINHNEIVNAWYEKKVQAQGGRYKQKIVVALMRKLSRALWYVARGQAFDARRLCAVG

SEQ ID NO: 350184 - protein, 338 aa, unidentified
MFIIGIDPHKGSHTAAVLDDQEQLVGELRVVADRRQRDELLDFAAPFEPRTWAIEAAGGLGALLDQQLVAAGETVLDVPPALSARARLLDLGRTDKTDPHDARSAAVVALRHATLQQVRLDDHTAVLRLLADRRHDLTRLRTQTVCRLHALLCLLTPGGLPIHLSAERAAKVMRTIRPADPIDVERKAMAADLLVDIRRLDHQLEAIRSRIVAAVDASGTSVTDVYGVGPIMAAVIVGHTGHVSRFPTAGHYARYNATAPIEASSGSKVRHRLNPRGNRRLNHALHIAAVTQIRNDTPGRAYFDRKVAEGKTRKEALRALKRRISDAVYRQLLADAAA

SEQ ID NO: 350185 - protein, 346 aa, unidentified
MNQIIRIGMDTSKHFFQLHGVDAAERPVLRRKLRRNQVLAFFAKLPATVVGMEACGASHYWARELRKLGHEVKLMAPQHVKAYVKRNKNDGRDAEGLCEAMSRPTMQFVPVKTEEQQAALMLMGVRQQLITRRTQLSNAIRGYAAEFGLTAAKGLDKIELLLAQIAQDETVPEIARELFAFQGKDYARLQIDLKAVEARLMAWHRANTDSRRLTQVPGIGPIGATALVMKAPDPRLFRSGRHFAAWIGLTPKDHSTAGKTRLGKITRAGDEMLRSVLVAGATAVIQQARRGRGHPSPWLLDLLKRKPPKLAAVALANKIARIAWKLMTTGESYDGARMPGALAVAA

SEQ ID NO: 350186 - protein, 482 aa, unidentified
MKAKPQEKNKRATNHPTQHHWHEMNRKQRRETMRKIQSEDLSLEVIHPDAAGIDIGNESHYAAVPPSRDSQPVRCFGCTTAELKAMAAWLQQCRICTVAMQSTGVYWVAVYDILEQAGLEVYLVNARDTKNLPGHKSDVQESQWLMKLHTYGLLRNSFRPSQKIRTMRTYWRQRNDLVQSASRHILRVQKALTQMNVQLANVLSDISGVTGQAIIKAILAGERNPHKLAEFRDPRVQASEEEIAHYLEGNWQPDLLFVLKQEQDGYEFCQQQMAECDRQLEQYLQSTEDRSHGAPLPEEKRKGRLKKKKGNKPQFDLREGLFRMSGTDLTRIDGIDVMTATTVISEAGYDMSKWKTENHFVSWLRLCPDNRISGGKVIGKGRLPTNNPVSIALKMAATTLRQSKTYLGAQFRRLRTRLGAPIAIKAMAAKLARLVYRVLRYGMKYVDQGAAFYELKHRERQVHQLKWKAAQLGYKVTLLPAA

SEQ ID NO: 350187 - protein, 425 aa, unidentified
MTAANATPVSPVLVAIDISKHRHEVLIAVPGKKRRRRLTIRNALDDFERLSRLLTNHTLPVRIGFEATGNYHRALTHHLGRAGFELKLVSSVALARTREALHNSWDKNDPKDAQVILHMLEIGAVQFFHDPLAAGVNDIQELSKTHEIVSRSKTELWHRILTHYLPLYFPEAERFHRSSRTDWFLAFLEEFPSPHMISAMSRDAFIGAAWDVVGRKVSKTRLLSDIYETAKGSVGLPVAPDSEALRMFRLVLAEGRNLVRRRDEIEARSGELLSDHRDYQLMTTIPGIGPINAMTILAEAGDLRRFRHHRQFLKFCGMDLATVQSGMFRGQSKISKYGNARLRRTLWMAGQTAVLKRTNSFRDKFERYISQDRHNAHLRRKAYTAVAAKMARTVHAVIKHGEPYRPFFEGVSPGGRTPLYRAVEA

SEQ ID NO: 350188 - protein, 368 aa, unidentified
MPNIPKQEAQTPMAIVADTYTYVVGVDTHAATHHYAIVETRSGGQIAHGKFPTHAAGLLRAVDWISRRTSVDDNPAVDQVLISMEGTGSYGAQAAELLAARGYRVVDAPSPKRARGSGKNDHIDALVAARGALPKDSERLADRRAGHTRAALQILLTARDSMRRDRTRSKNQLTALLRTHNLDIDARKGINKAHISLIAGWRKRPTDTTLARIARTEAHRLATRIHTLDADLDSNEKAINALVRELEPTLLDLPGLGPINAAIVLAVWSHPGRIHDEAGFAKIGGVCPLEISSGNSKDHRLNRTGDRQLNSALNSIANTRMRHDETTKAYVKKRKQQGQTKPRIRRCLKRYIARQIFRHLTATSLDKT

SEQ ID NO: 350189 - protein, 350 aa, unidentified
MLIIGCDYHPGFQQIACVDTDTGELTEHRLAHREEAEAFYRVLKQRNLSVRVGMESSGHSRWFERLLQELGFELWIGDPAEIRTKRVRKQKTDRQDAQLLMRLMLENRFPRIWVPDAENRDLRQLLWHRHRLVQMRTRVMNQLHVVPLNEGLRRKKALWRPAGRKELESIALAPWASRRRQDLLDLLDQLTPKIQDLTRALEEEVEKRPVTRLLMTHPGVGPLTALAYELVIGTPERFHCGKQLASYVGLVPTEESSGDRRRLGHISKQGNVLLRFLLVEAAQVTVRSHQEWRNKFFHLAMRRGRKIAKVAMARKLAVHLYWMWRQGCDYGQMHKLGSHAGEPGHRDGEQ

SEQ ID NO: 350190 - protein, 368 aa, unidentified
MIVPIMTYERSTLVNSEKYIGLDVHQATISVAVMDSKGKVVMESILETKAVTILEFFAGLRGTLFVTFEEGTWAAWLYDLLKPHVAQLVVCNPRKNALLKHGNKSDRIDARKLADLLRLNDLEPVYHGETGVRMLRELARSYLTIVKDLSRVMNRLKALYRSWAIPCAGRDVYYTRHRSEWLGKIPEAGTRRRAEQLYQQLDMLQHLRQQARRELLTESRQHAITAKLRKIPSLGPIRSALAVALIQTPHRFRTKRQLWAYSGLALETRTSGEHCYVHGQLRRSKKQISIRGLNKDHNHDLKGLFKAAATRASVQPGPFQDFYQQSLAKGIKPTMVRLTLARKIAAIALTLWKKGEDFDAEKLKSQAA

SEQ ID NO: 350191 - protein, 337 aa, unidentified
MMYSGIDLHSNNSVVAIIDDADRIVAQKRLPNDITKIVGFLARWQDDLAGVVVESTYNWYWLVDGLQDAGLHVHLANTAAIKQYDGLKHSGDETDAQHLAHLLRLGILPTGTILPREHRVVRDLARKRMQLVNCRTTHVLAVENIMARQLGERMTSNQIKQLTADTIDSLPLAADVGLAIKANVAVIATLQSQIEVLEKRLQERVKPQPQYGLLTSVPGIGQTLATVIFLETGPIDRFADVGNFASYARCVDSVHTSNRKKKGEGNVKNGNRYLAWAFVEAANFARRFCPEAKRFHERKKAKTNNIVATKALAHKLARASYHILKEGKPFDATRCFA

SEQ ID NO: 350192 - protein, 367 aa, unidentified
MKKVSTIAARASRNISQPTLIIGFDLGDRNSWYCVLDESGQIQREQRVRTNAKALREVFGEMPRSRIALETGTHSPWISRLLSELGHQVIVANARKVRLIGESRKKDDRLDAQTLARLARIDPGLLCPVKHRSAPAQADLTVIRARAGLVRSRTALVNTARSLAKSYGQRLHGCNVRNMNPEKAESLSPELQAALEPLLNAIESLSERIVEYDDRIENLAQQNYPQVALLKQIKGVGTLIALTFLLTLEDPHRFRKSRDVGCYLGLQPGRRNSGQSEPQMHISKEGDPYLRTLLVQGAQHILGPFGVDCDLRRWGLKLAERGGRNAKKRAIVATARKLAVLLHHLWVSGEVYEPLHNSRRVIVAAAA

SEQ ID NO: 350193 - protein, 356 aa, unidentified
MAKSNRLDFSGQPIYIGLDVHKKSWSVSIHSAVCEHKTFTQPPEVDILVNYLRRNFPGASYHSVYEAGYSGFWVHDQLIEKGVACTVANPADVPTKDKERRKKRDRVDCRKLARSLRAGEIEGIYVPCREKLEDRSLVRTRQSMVRKQTRCKNQIKSLLLFYGTPLPEEWAERRWSGPFVRWLESLPMERASGEVTLRIHLEELKHLRQIIARLDREIRLLAQTGEYVVQVRLLRTIPGISTLTAMILLVELQEINRFRSLDELASYVGLIPDTQSSGETEHTGNITQRRHAQLRASLVEAAWTAVRKDPALMVAFQESCKRMRKTRAIVKIARKLLNRVRYVLKNQTPYRMGVVQ

SEQ ID NO: 350194 - protein, 323 aa, unidentified
MSKHTMVCAGIDTGKHKLDVALDGRSDQLQVDNTADSHKALSAWLRRHRVNRVGIEATGGYEQDVVLQLRQDGFVVIVFQPAQVRAYAMFHLQLAKNDKIDAALIATCAAATRKIHAPPDPRLAPFAQQLTFIEQITEDIAHIKTRRASCRNVRIRDLWNAEITRLKRLQNAELKALVKAIRQHHDLAERLGLIESVDGVGLATAVAILVRMPEIGSVAREQVAALAGLAPYDNDSCEQIGARHIRGGRKRLRAKLYCAALPAAFRWNTQLTTLYQRLIAKGKSHKVALIACARKLLIFVNTVVARGTPWGAKSPAPSALATR

SEQ ID NO: 350195 - protein, 351 aa, unidentified
MQIVGALDVHRRQITFKTLEPASGESWRGRISPAAREPLRQWLERFEGFEGEFVLEGTTGWRFVVEEIERAGHGVRLADPAETAARRGRKRRAKTDNSDCDLMLGLLLAGELPEAWIPPVQILELRTRVRLRKTLIDQRTAWLQRLQAQLFHQGVPPGLKPRTASGRQELASVELSPAGREVVELYLRMLDQLDRELAPIDRALQAFARRQAGCRALIGQLYGVGAVTATAILAELGDARRFRSSDDAVRHCGLDVTVWQSDRKRAAGHLSHQGPSVLRWALFEAAQCAARHSSPDHAYYLEVAKRIDHNRACLSVARKLCRRAHHILRELGDDALAPPDPARATLVDAAA

SEQ ID NO: 350196 - protein, 424 aa, unidentified
MSSDLEIAAFIGLDWADQQHVIRLRVAGSAPVEAQLLDQKPETLRAWIGQLRQRFGGKPVALALEQSRGSLLYALMNVDFLLLYPVNPQNLAQFRKAFYPSGAKDDPQDALLLLEMLEKHRDRLRVWVPDDADTRCLRLLAENRRKLVNRRTALTNQLTSLLKESFPQALDWAGPLDSLRACDFLQHWPSLQLLQKTSTSQLRKFYRDHTRLDSEAIHQRLDQIRQAQPLTRDSAVLAAAELMIPALVRQLRCLIESIQQFDQQLKDRFQQHDDYTLFHSFPGAGPALGPRLLSAFGSNRNRFECAAEVQMLSGIAPVTERSGKSHWVHWRLACPKFLRQSFHEFAAQSILFSTWARAFYDQLRSRGTSHHAAVRTLAFKWIRILFRCWKNRTPYQEQIYLASLRRHGSPLCAALSPPTTGANL

SEQ ID NO: 350197 - protein, 350 aa, unidentified
MTTLARQITGGVDTHLDVHVAAALDERGALLGVESFETTPKGYDKLLTWLRSFGTVELLGVEGTGSYGAGLTRHLHSEGVRVVEVDRPNRQRRRRHGKSDPEDAISAARAAQGGDATGEAKTRDGNVEAMRVLRVARASARKGRTQALNQMRSLISTGPDCVRADLRHLNVYRMLERASSYRPGTKRDLVSINKLTLRMLARRAIELEEEIKEIDAVLKPMVKETAPELSALSGVGTDIGSALLVAAGDNPERLRNEASFAHLCGTSPIDASSGKNQRHRLNRSGDRQANSALWHIVITRMVSDLRTREYIARRMKEGQTKKEAIRCLKRYIAREVYNNLPMEHLALDNP

SEQ ID NO: 350198 - protein, 401 aa, unidentified
MTAVGSKAWIGVDIGKTHHWVCAVDESGHKLLSVKVLNDEAQIIEVIAAVKAVAPDRVWASDILGTPSALLVALLAKADEQVRYASGRVVAAMSAAYSGEGKTDAKDAYIIAETVRIRSDLSVIDADADLVRTLGVLTGYRADLVADRVRMINRMRDLLTSVFPALEREFDFASCKGALVLLSGYATPEAIRRMGEARLSRWLRQRRVRGYADVAARAVAAAQTQETVLPGQDVAASIVAELANSVLVQHERLKVLEQQIQDAFAQHPQADVIESIPGFGPVLGACLLVAAGDLAAYPTAGHLAAAAGLVPVPNDSGRRAGNLHKPRRYSRPLRHALYLSAQTSMMRTGPNRDYYLKKRDQGRTHSQAVIALARRRIDVLWALLRDNRTWTPTPPARTHAA

SEQ ID NO: 350199 - protein, 339 aa, unidentified
MYFSGIDQHKRDSFITTYDSNGTVVKQARVHNSPLLIQSYFAEFPGPHKAVVESTGSWYWLADLLQKHNVELTLAHAARLKAISAAKVKTDKVDSDILAMLLRADLIPEAHKISSDMRGPRDLMRTRLRLISKCAGCKNSIERLLEKFNVATITELDDLYQLQAKAHGAQIALLEQQIHTIECTLHPYLIPNADIQRLLWIPGIGKVNAFTIYTEIDDIERFPSASRFFSYCRLVPGADNSAGKNRHRSGSKAGNCYLKLAFSHAGTRAIQYYPEIKAFYKAKLRRKPVRIARTLVSLEIARIVYQVLKNQENFNRRFKNQQLSRRKRSQWPRLASPPA

SEQ ID NO: 350200 - protein, 415 aa, unidentified
MENAALVACVGLDWGDTRHAVQLQLVDGGPIEQLELEQKPDVLHAWVAQLRQRFHGRPVGIAVEQRKGAVMHALMAYDFLVLFPVNPKALARYREAFRTSGAKDDPTDAALLLDLLRKHRDQLRVWRPDTVEARTLQSLCEQRRKLVNHRVAVTNRMTSLLKQYFPQALDWVGDVASLQGCDFLMKWPALAAVQRARPRTLRTFYQQHNCRKAVVIDERIQQIASACPLTSDAAIIGPLSLSVQTYATQLRVLIAAVQAFDTRIAHVFAHHPDQALFDSFPGAGPVCAPRLSAAFGTDRSRWESASDLQSHSGIAPVTERSGKALWVHHRLACPKFVKQTFHEFADQSIRFSTWARAYYDQQRGRGNDHHAALRALAYKWIRILFRCWKDRTPYDEATYTAALRRHGSTLVEKTA

SEQ ID NO: 350201 - protein, 316 aa, unidentified
MSQSDVFVGIDVAKAQLDVALRPTGDTWTAPNDEAGLAHIVERLGPLRPALIVVEATGRLELPLLGALMAAALPVVVVNPRQVRDFARALGHLAKTDRLDAQVLALFGERVRPTPRPLPDPATQALSALVARRRQVIEMLTAEKNRCGQAPLALQPDIAVHITWLETQLQHLDDALGQQIRNSPGWRTQDELLQSAPGVGPVLSRTLLADLPELGRLSRKQIAALVGIAPLNRDSGTLRGVRTCWGGRAPVRAVLYMATVAATRCNPVIQAFYRRLCAAGKAKKVALTACMRKLLTILNAMMKHRTPWRAQVSPCA

SEQ ID NO: 350202 - protein, 364 aa, unidentified
MEAAYGNEVPRSEVRRLINSLQKGKSMAIVYVGIDLAKNVFAVHAVDEAGKPVLVRPAVPRARLHELIASLPPCTVAMEACSGAHHWARLFAARGHTVRLIAAKFVTPYRMSGVRGKNDAADAAAICEAVQRPNMRFVPLKSQQQQSQLMVHRARQGYVQARTACINRIRGLLAEFGQVLPLKANTVRRQAGALLEDLPGWANTVIGDLLSELHRLDERIAQYDRHIAQIAREDERAQRLMALPGIGSTTATAVVAMIGNGHEFNCGRQFAAWLGLTPGQYSSGGKTRLGRITKAGDSYLRSLLILGARAVLARAKASTDAIGSWALALQQRRGYWKAVVAVAAKNARLAWAVLRRGEAFKMPA

SEQ ID NO: 350203 - protein, 410 aa, unidentified
MEVLHQRCAGLDVHKKTVVAAVRLATENKLVTEVRTFATTTAGLLALSQWLAECGCTHAAMEATGVYWRPVWHVLSDGEIELILANAAHVKNVPGRKTDIADAAWLAELLAHGLIRASFVPDGQTQEMRTLLRTRKQLVRERTRHIQRIQKTLEDANIKIEAELSDLLGKSGRAMLEAMIAGENDPARLAALAHRGVKAPQAQLEQALQGRVTPHHRFLLKLHLGQINSADGAIATIDGEVEANLAPFRTGVELVSTIPGVSTLGAEGIVAETGVDMSRFPTAGHLLSWGGMCPRNDQSAGKRRSTRLRKGNPWLKTMLIQCAWAAKNKKGSYLQAQYHRLRSRRGPQKAICAVAASILTAVYHILKNGTPYQDLGAEHFNRRSQPSQAQRHVRRLQQMGYTVQLTPVTA

SEQ ID NO: 350204 - protein, 337 aa, unidentified
MIVVGVDVHKHSLTAVAVDEVGRPLAELTAGSGEELLAWSTSFAGERLWALEDCRQLTRQLERTLQVAGERLVRVPPKLMAPSRRAGRIRGKSDPIDALAVARAALREPRLDHPRPGEQRLRELKLLVDHRDDLVDERRRAQQRLRWHLHELDPHLSVPPGALDRAVWLDRVGRRLARQEQTVLVRIARELLGRCRSLTRTILALDRELQARIERTAPALLTLPGCGALSAAKLLGEIGPIERFQTDAQLARHAGVAPLEASSGSHHRHRLDRGGNRQLNCALHRIAITQARVHPPARAYLARKQAEGKSRREALRCLKRQLARTVYVTLRKEPPLT

SEQ ID NO: 350205 - protein, 482 aa, unidentified
MATRKRSTYERLQPGPLNRQQRRELGRKIAAADPGLAVVHPDAAGIDIGNASHFVAIPPDREPVPIREFGAWTAALQEMAQWLTAHGIRTVALQATGVYWIAVQDVLEQAGLEVYLVNARGTKTLPGRKSDVQECEWLRKLHTYGLLRNSFRPPAEIRAIRTLWRQRDRWVQEAARAIQHMQKALTTRTVQLANTISDLSGVTGQAILRAIVAGTRDPGALAKLRDCRIAASEAELAASLQGTWREDVLFELRQTLEAYDFYQAQLAACERELAKYTAVVATRELPPPPPPPAGAAPLSPGKAARRATSRRKPQPGFDLAAELHRTMGVDLTRIDGINVLTTQVVFSEIGPDFSAFPSENHFASWLTLAPRHDISGGKVLRHVPAAGRNRVANALRMAAQSLVRSDSYLGARYRRLRARLDGPVAVKAMARYLACLIYRLVTKGQAYVDRGAAHYERKRQERERQALERRASNFGLKLVPAA

SEQ ID NO: 350206 - protein, 389 aa, unidentified
MLCIGIDVAKRKHDCCIIDSDALKTVESFTFPNSREGFDMLLSKISELGIPKDKIRVGLEATGHYSSNLAHFISEHDLPLLTFNPLLTNRYKQGFSLRKTKTDKVDACAIAQMIVSGKGSQTYSSSLYHNEEMKSLSRYRSQTMQKCSKLKISVSRLVTILFPELEGLTSSIHLASIYALLKAYPGHEQIAHCSMKRLTHLLSDASQGRFDKSKALEIHQAACRSIGKVSLSASMELVHTITDIEVLKQHIVEIDEKLKEMVDQEESSIIDIPGIGYTLCASILGEVGDFKRFPDVDKLLAYAGMSPSKHDSGDYHSKHNKMEKRGSPYLRKTLYLAARLVAQNVPRFKEYLEKKLSEHKPYKIALSHVAKKLIRLIYRLGISGCPYLA

SEQ ID NO: 350207 - protein, 345 aa, unidentified
MNIIRAGVDIAKSVFHVHGVDRHGTTQWQGKYSRQKWLDALSRKVPAGAEIGMEACASSHHWARELQKRGYHVRLIAAQFVKPYVKSNKNDRVDAEAICEAMSRPNMRFVAPKTVAQQDIQAAHRIREELVGQRTAKANQIRGLVGEYGIVAPVGIQQLRRALPDWLEDAENGLTDSFRVLLNGLTEDLRYLDDRITALDDRITESVKRDPVAKRLMTLRGVGPLTASALSGALGDGKAFRKGRDFAASLGLTPKQHSTGGRDRLLGISKRGDSYLRKLLVHGARAVLRHVDGKDDGLSHWLKGLASRKHVNVATVALANKTARIAWALVNHEVAYDEGLAAAGV

SEQ ID NO: 350208 - protein, 343 aa, unidentified
MRIVGITGGVDTHADNHVAAAVDRNGGLLGVESFPADEVGYEDLLAWLASFGELVRVGVEGTGSWGVGLTRFLTDHEIVVVEVDRPNRQTRRKQGKSDPTDAISAARAALSGEATVTPKSRNGPVEQMRVLLVARRSGREQRIQSLNQLRHLVFTAPEPIRVRFKDRPKTGLVSEAANMRPNRGSDPIIYRTNLVIRNLARRVQSLNSEIKTIDQTLVQLINETAPSLLELYGVGVDTAASLLVTAGDNPERLHSERSWAHLCGVTPIPASSGKVTRHRLNRGGDRQANAALYRIVLTRMSSHEETRRYAARRREEGLNTAEIMRCLKRYVARQTYKHLPHMI

SEQ ID NO: 350209 - protein, 409 aa, unidentified
MMKQNIIFGIDVSSKSSTVCVVIDRIKQGETFKITNDSFGYQDLLDRLNQYLIAPLVVFEATGVYSLSLQAFLEDYHIKYLKLNPLKAKKLMDNNLRHNKTDKVDAYRLALIQFNAPQKLRAPQPKEYHELQNASRYYEELTQALIINKNQLHRNLQSTFPQIESILSTSSGRVYWTIVSLFPHAQYVLNHNENQVFQSLLAISGIGRQRAHYLTTRLYTLARQAYPYDNESSITIRAIQRNIANLLSLSAERDNVINYMEKLAMQANARSLNIYESIPGIAKTTAVRLVAELGDLRRFDTSAQIDAFVGIDPGRYQSGEKDSHLGITKHGNHLARKILYRTITQMETVKATQPCHITDYYDKKKQSSNSRGYKKIAIASVHKLIRTMFALIKHDQLYDYNVATHNQRL

SEQ ID NO: 350210 - protein, 420 aa, unidentified
MEVVHERCAGLDVHKKTVVACVLRPGPGGSVQRETRTFSTMLGALEALAAWLTEAEVTHIALEATGVYWKPLYNVLEGVGRWTILVVNPEHVKAISGRKTDRADAERLAFLVRHDLLQGSFIPERNQRELRELTRARTALVRERARVVQRLEKVLEGANIKLGAVVSDLLGVSGQRMLEAALQGVSDPDELADLAHPRLQPKRDLLVASLQGRLTRPLRFLAQQHLDHWRELDTRIAAFDDEIADQLRPFDELLARLDAIPGVGRRTAEVIATEIGTEVSAFPSDRQLAAWAGVSPGNRQSGGRRKTARTRHGNPWLKGALTEAAWAASRCRHGYLPAQYRRLAGRRGRKRALVAVAHSLVTIIYHLIAEGTQYQDLGTHYFDERERANRERRALAILHGLGYDVSLTPHPSTDPALGVA

SEQ ID NO: 350211 - protein, 482 aa, unidentified
MKKQNIYQNRSQELYALFENAGNNSKVMCIPVDYAKKHHLAMFCNGCGDIIRKPFPVKNSPEGLNYLVDQVKRSCSHRNIQLQHVFFGGEDISSYSESFTHSLRSMGWLVASVNAHEAKKQRENLQASTDRLDLMGIATMLISHRANTCPAQSGIYKNLRTIVRHRKKLVKIKTEVKNRIHALVDQLFPGFLDETRSGIMPFSKSSLYLMSDRFSTRQIKRRKCQSLTKKLNRFGTKNPDKTATKLQSYAANAFSAPKPHMHTLQLSLSCHVKHYLCLVENIKYLEKETALVLSQTQGAFLTSIKGIGIILAAGICSEIGDPFIQKSATNLSSYAGVVPRVKQSGGPDSAPRTGSVSKRNNHILKDYLVQASNHIGRHGPEDLNQDFKRRKSQGQNAEFGMARRLMRITMCMMKTWQIYLPDNLRTERADKKDRACYYLSIWPYITKKWSKLTALDKVFAKEQPLGQWRDVVQKIYKVNLDL

SEQ ID NO: 350212 - protein, 310 aa, unidentified
MKALRTKVAGVDVHKEMLAITVLIGEADSEPEAQQFECQTFTEDLMKAGLKLRELGIVEVAMESTGIYWKPIYNVWRPMGLNLTVAQAAHVKNVPGRKTDMNDSHWLATLHRFGLIRASFIPDDIFQRMRLLSRHRTNLVEDQARVKNRVEDSNIKWGVIASDVFGKSGIQILNAISDGVTDAGQLASMVTTKIKRIEETTKALTNCLNSDHVFVIKKLMDQYHYLQSQIKDLENELVEKVKPYAHLVTKLDEIPGIDKVLAIGILAEATDDMSHFADERKFAAWAGVASGNNESAGKKKDQNAVKATRT

SEQ ID NO: 350213 - protein, 326 aa, unidentified
MIPTQQAFNHIVAFEVSKEMLVVHTLPADEQCTIPNKPQTVRRLLKAEVKRNRKERLGAVLIVCEATGGYERHVLDVAIDLGVPVHRAHGTRVRFFARYRGLLAKTDPIDARLLAHYGLKTDEVRLYVPPAPETVALRALHARRSEIQEMMIAETCRLDHARHKSVVTSLKAHIAELKAAFAAIEAEIAQLLRECETLKKKIELMRTVIGIGPVSAMVLLAYLPDIGRLTKGQVARLAGLAPINDDSGKKRGTRHVEAGRTAIRRALYMAAVVAMKRNPILKAFADRLRSRGYPFKYVATAVMRKLVVILNAVLRDGQPWKGARTT

SEQ ID NO: 350214 - protein, 408 aa, unidentified
MSQVDDVPVDVFVGVDVGKSQHHAVALDAAGTVVLDRSLPQDEQRLRALIAGLKARGRVLFVVDQPATIGALPLAVARAEGVAVGYLPGLAMRRIADLHPGEAKTDARDAAVIAHAARSLPHALRAVRVDDEQTAELAMLCGFDEDLAGQINQVSNRVRGLLTQIHPALERAIGPRLDHPAVLDLLQRYPSPQAMRSAGKARLTTRLRRLAPRIAERLATEIVQALGEQTVVVTGTNAAALVLPRLVEQLSTLRRQREEIAEQVEQMVAAHPLSRVLTSMPGVGFRTAARIITEVSGKQFASAAHLAAYAGLAPVTRRSGTSIRGEHGARGGNKRLKRVLYLSAFAALRDPVSRTYYDRKRAERKSHQQGSLRWLGGAAMCCSPCSATAPPTTTDTASPLDQHHRGTK

SEQ ID NO: 350215 - protein, 458 aa, unidentified
MSKKRASRTGKKNKRVLEQINHNAAGADMGAREVWIAVGDHVSDEPVQKFGTTTSELRRSAEWMRSCGVDTVAIEATGVYWVAAFEIYEEYGLNPVLVSSRAIRNFNGMKKSDYIDCQWLHLLHTFGILQASLRAEAEMIELRAYMRQRRMLTERASEHIQHMQKALVLMNVRLDQAVSDITGVTGMNILRAILAGKRDPVELATLRDPACAKSEEQIAEALTGHYRDEQLFALDQAVKLWDFHRTLIGECDKKIQTVIEKLPIKADRTTVPAARVKRGKPRKNEVQFDARTLLYERLGLDLTQIAGLHILTILTVISECGFDLTRFPTAKHFCSWLGLSPGTNITGGRVVSSRSRRTANRASTALRVAAQALADSNTELGAFYRRKKGQIGPEKAITATAAKLARRIYDSLRTGRPYADRGQQFYDLMDRERTLASLQKRARRLNMKLVPVDQKEAA

SEQ ID NO: 350216 - protein, 411 aa, unidentified
MLWGKRRDSCKIVASINLQLTELRMQKPRDNSKASPAAFMQDNTLIAVIELSLSNWLVAGLIPGVSREPLKKLEPNPEDLLKLLHGWRDEAIKAGRPITRIAVAYETGRDSFWLARWLRERGIDAHVIHATSVAVSREHRRAKTDRLDTAMLKRGFLGWLRGERGHCTVAIVPTMEEEDAKRPHREREGLVHEQTRVVNRMKSALIQFGVRNFNPKLRKARVKLETVRTPEGKSLPPNTIAALRRDMERLKIIKEQIKAIEQARLQQFEQQPVALANRMVYLLVRIYGLGWETADLLVHELLSRTLRDRKAVARYAGLTGSPDESGSKRREKGLSRSGNARVRKIMIQLAWRMVKFQPDSALAQWFKQRTENAKGSRKPMIVALARKLIIALWRYANDGVIPEGFRLHSAA

SEQ ID NO: 350217 - protein, 412 aa, unidentified
MDVTLERCAGLDVHRATVTACIRTPGPGPDRAQVIQTFGTTTADLLALRDWLAAHQVTHVAMESTGVYWKPVYYTLEDAFTLLLVNAAHMANVPGRKTDVADCAWIAQLLECGLLRGSFVPPPPIRELRDLTRYRKALIQDRTREANRLHKLLEDAGLKLASVATDVLGASGRAMLTALVAGTTDAAVLADLARGRLRAKLPALRQALTGRFRAHHAFLLTQLLAHLDYLDEALATLSQAIEGHLAPFAAAAARLQTIPGVKQRTVEALVAEIGVDMRPFPTAGHLASWAGLCPGNNATAGKRRRGRARKGDRWLKATLVEASLAAIRVKGSRFGALYRRICRRAGHNVAIVAVAHAILAIAWHLLVHGTTYHELGADYLDRRDKERTTQHYVRLLERLGHRVLLEPAPLAA

SEQ ID NO: 350218 - protein, 414 aa, unidentified
MNAAGIDVSSRKSTIAVLRPFGEVVKVPFEVSHTAEGLASLARQLKAIDGETRVVMEHTGRYYESVANVLHESGLYVSAVNPLPIKEYGGNSLRKVKTDKADAMKIARYALDNWCDLRDYTPMDTVRYDLKTLNRQFQLASKQKTASSNNLIALLEQSFPDIRKCFEGPVRKDGTQKWVDFAHTFWHADCVRKLSLNAFAERYRKWCKRNRYQFSTEKTDEVYELAKSAVVLVSKTEVTKVLIKEAANQLTSISRSVETYRTEMNRLASQLPEYPVVMEMYGVGESFGPQLMAEIGDVRRFERKQSLVAFAGIDPMPNQSGEKNVRSNKSSKRGSPYLRKTLFNIMTVHLQRAPANEPVYQFLDTKRAGGKPYYVYMMAAANKFLRRYYAKVRDYLASLDSLPPVDMDSTGLNK

SEQ ID NO: 350219 - protein, 353 aa, unidentified
MVNSLKLNKYMENLFIGIDYSKKSFDVSAYISSEKSKEEKMKLHLLGHQNFSNDETGYIQMLSWLGTLTSLSPKHWLFCGEDSGLYSYSMSHYLYIKGFSIWLENPLHMKRSMGLVRGKSDKKDSGLIALYSYRFRDRRVDFVPKQDTIQRLQDLEAYRHRLIKAKKLLGDSSKELNLYEQTRDTAVLVYEKSMELVEQIESQLKEVEVQIQQVLKSDKEVYDNYERITSVKGISWKTAVVLLIYSHNFTRFETARQFACYAGVAPFEYSSGTSVKGGTHTSRLANMRVKSLLGMAAMSAKRFNKDIAEYYNSKKEKGKSHRVIMNNISNKLIHICFALVRHQTMYQYTYKLV

SEQ ID NO: 350220 - protein, 413 aa, unidentified
MTTHYKQKHIYVGVDLHKKTHTAVIIDCWHEKLGEITFENKPSAFDELTTYVKTFVKRVMTPVYGLEDTGGYGRALAVYLIENKQKVKEVNSALSYAERKSYPTSQKSDSWDAECVARILLNKLDILPDANPQDMYWAIGQLVTRRVALVKSVISLKNQLHMQLSYHYPSYHKFFSDLDGKCALAFWDTYPAPHLLVGVTVEELAIFLREHSNNACSTRKAEAILTLVQADGDTKRDYQAQRDFLIQSHVRDIRFKKQEMERVESELKGLMNALNYRLGTMPGIDVVTSASLVAEIGDIHRFNSANKLARFAGIAPVKIGSGGREKERKSKQGNRVLHGLFYNLAVQQVQVSKGSKVPRNPVFYEYYHRKIAEGKTKTQALVCIMRRLVNIIYGMMKNKTPYVLPPLEEKQAS

SEQ ID NO: 350221 - protein, 410 aa, unidentified
MEVLHRRCAGLDVHKKTVVACVRLAEENKVVTEVRTFATTTAGLLALSAWLSENGCTHVAMEATGVYWKPVWHVLSDGEFELVLANAAHVKNVPGRKTDVSDAAWLAELLAHGLIRGSFVPDGQTQELRTLLRTRKQLVREKTRHTQRIHKTLEDANIKLESELSDVLGKSGRAMLEAMVAGETDPVRLAALAHSGVKASQATLQEALRGRVTQHHRFLLRLHLGQVDAIDTAIVTIDGKIEAHLAPFRIGVELVSTIPGVSGLSAEVIVSEIGLDMSRFPTDGHLLSWACLSPRNDESAGKRRSTRMRKGSPWLKTTLIQCAWAAKRKKGSYLQAQFLRLKSRRGPQKAICAVAASILTAAYHMLKDGTLYQDLGADHFKRRSKTTQTQRLVKRLQHLGYAVDIKPLAA

SEQ ID NO: 350222 - protein, 305 aa, unidentified
MTTYIGIDVSKLVLDTYHGGQAAQIPNTEKAIRSLLKSLPTDAVLVCESSGGYEALLITLAHAAGRPLARVNARQVRDFAKAKGRLAKTDTLDAEAITEFAQVFHPSPLSLPDPLQQELAGLAKIRSHILIQITQNNNLKETISDKALLNILTGTIASLKKQETKIQVLIAAKIKLSPDLTSRVSRLQEVRGIGFVTAFSLVSFMPELGTLSDTQAASLAGVAPFNHDSGQFRGQRHIRGGRSQIRSVLYMAALVASRYNPILKTLYQRLLLAGKPKKLALTVLMRKLILLANRLLKNPNFSLAS

SEQ ID NO: 350223 - protein, 405 aa, unidentified
MVTSIDRYDEVDVFVGLDVGKGEHHAVALDREAKRLFDRALPNDERQLRAVIDQLASHGVVLLVVDQPATIGALPVAVAQAAGALVGYLPGLAMRCIADLHPGEAKTDARDAAIIAETARTMPHTLRSIQVADEKVAELSMLCGFDDDLAGQIVQVSNRIRGLLTQIHPALERVLGPRLDHPAILDLLQRYPSPAAMKTAGEKRLGNRLLKNAPRKGRVWAAEIMTALGEQTVVVTGTDAAALVLPRLAEQLQALRRQRDEIAIEVEKIVDAHPLQPVLTSMPGVGVRTAARLLTEVTTKTFATAGHLAAYAGLAPVTRRSGTSIRGEHPSRRGNKILKRTMFLSAFAALRDPESRAYYDRKIAQGKRHNQALIALARRRSDVLYAMLRDGTLYQPRPAQPALAA

SEQ ID NO: 350224 - protein, 371 aa, unidentified
MVKLTRTMNKCHSNTELSSHEETRCQFNGGTGAIKLGIDVHQDFYVVVEQAGGSNPKPPQRFPKAAFLHWAAKLKSQATEVYAVYEACGFGFSLQRKLSALSIKCYVVCPQKLDEQNRRVKTDGLDAKALCLKLDRFVQGNRDALAIVRVPSEEEEQARAIHRQREQLVKARKQLEAQGRSLMVNHGLEPVPNWWKPRTFTALPAPQWMKELLANSQPILVGLQQKIAALTVQLQSAASPEQPRGLGKMTSVVIDREIGDWNRFSNRRQIASYTGLCPGEYSSGNTRLQSCVTKHGNPRLRAALVELAWRLVRFQPNYHPLRKWRQILAKGALATGAARKKAIVAVARQLAVDLWRIKTGQLRSEELGLIN

SEQ ID NO: 350225 - protein, 404 aa, unidentified
MGGLFLFYCGIDIAKHNHEASIIDAEGKALLDSISFANTKAGCEKLLALLERLNITKADVIIGMEATGHYWLSTYEYLTERKFEVRVINPIQSEAFRKMYIRQTKNDSKDSFIIAQVMRFGQYSATTLSEENIVAMRQLSRYRLALVDSCGDCKRRVIALLDQVFPEYDKLFSDTFGSTSKELLLKYPTPEDMLSISTRKLTTLLTKASHGRFGESKAKEIRTVAADSFGVGFAKNAFSFQIRQLIEQLMFLENQIEELEEQISYLLHQTNEVITTIPGIGDILGAIILSEIGDIQRFDAPGKLVAFAGLDVKVSQSGEFTGTKQKMSKRGSPYLRRAIWLAASRAAFCDPILSDYYQSLKARGKHHLTAVGAVARKLCNIIFTILRENRPYEQTPPKKGSKGI

SEQ ID NO: 350226 - protein, 322 aa, unidentified
MLYVGIDVAKNKHDVTALNVPGKTVLKPLTFSNNKAGFELLDLSLRQLNQDCLIALENTGHYAFNLLNFLHEQGYKVYTYNPLLIKEFAKSLSLRKTKTDKKDAHGIALKLLSDPNREQFQHDNRQVELKILARHIHRLKRKQSDWKVQYTRCLDIIRCLDIIFPELDKIVGKHSEYTYQLLTCYPNPQKRLEAGFDKLIEIKRLTASKIQDILSVAPHSIGTTSPAREFEIIENIKHYKRLIDKAEKCVNDLMAEFNSVITTVTGIGNRLGAVILAEIRNIHAFDNPAQLQAFAGLDSSIYQSDQIDLAGRMVKRSSPHLR

SEQ ID NO: 350227 - protein, 456 aa, unidentified
MQHYYLGIDVSKGYADFVILNDKKKAIEENFQLDDTFEGHCCLYARLLRFFDDHPDSTIYAAVESTGGYENNWFNALIKFQGTLNLKTARLNPLGVNANSKADLKRNVTDKISAQSVAEYIIAHPEKISYQQQDHLASLRKQWGFIKMLTKQSTQLLNQLEALIYNANPELLLYCRDGIPEWLLKLLIHYPTASSLSKAKIVKVARIPYISTDRAKELVGNAKRSVASATDNITGKLVAATVKQISHLRQVIKAQTKLMAQECSVPEVDLLKSFIGIKDFSAIGLMLEIQSVERFLSVKKLASFFGLHPVYKVSGDGIGGFRMSKRGRREPRQIIFMVTLSAIQSNPLIRGIYLERIQKGMEKMAAIGLCMHKTLRIIYGMLKNNSAFDPEIDCRNREKMVQRNSRVHQDKNRRYQAFDSKAPISRRQHSKREERTQSHSDNNTNNGIIAPAPFST

SEQ ID NO: 350228 - protein, 356 aa, unidentified
MESMPAPESPVTVGVDTHLETHVAAVVDEAGRLLDTKAFAASTRGYVALVTWAEGFGPVERIGVEGTGTYGAGLTRFARAYGLQVLEVDRPDRSTRRRRGKSDPIDAQAAARATLAGVAATTPKTRDGQVEMIRVLRVARRGALKARVAAAEQLHGVLYSAPEELRQPLLSLKTKALVGACATMRPGPLTSTTAATKTSLRTLARRWQQLQAELDQLDTQLQALVAAVAPTLLALPGIGVDTAGQLLVTAGDNPQRLRSEAAFAHLCGTAPIPASSGRTNRHRLNRGGDRRANNALWRIALVRMHCHSPTRAYVERRTKQGLSKLDILRCLKRYIAREIYPHLTSPPTPAIPACPK

SEQ ID NO: 350229 - protein, 316 aa, unidentified
MAMPVETRLIGVDVAKAELVVCQSWSSEVVKLPNERKAIDSYLKTLVGTVCLAVEATNVFHVLLVERAHALGHAIYVIDGLRLKRYRESIGGRAKTDASDAALLLRYLTHEKNDLRPWTPPPAGYATVQRLLRRRSVLVQAQTTLRQSLQCLPELKTSTRAMLAKMAHLQRLIDQRVQKALQHQGWHADARRCEGIEGIGPITAAALTLIFHRGAFKSADAYIAFIGMDVRVRESGTFSGRRKLTKKGDPELRRLLYMAAMTACRSSTWKPFYERAMARGLSRIQALVALGRKLARVAFALLKSQSDYHPRGNLMA

SEQ ID NO: 350230 - protein, 328 aa, unidentified
MNFVGIDVSKDKLDVHLLTGSDSHSATFANDKSGWRSLANWLKKRGKTTPMQVCLEATGRYGDGVTAFLYQRGYVVSVVNPARIKGYATARLSRNKTDQVDAALIADFCRAQHHDLPVWTPPDPAQRHLQALVRQLADLDQMRQQERNRLQAGETTPSVLKRIDQHIAFLDDQIEAVKHDIDDHIDQHPDLKKQRDLIASIKGVGALTAAKLLAEIRNIADFHSPQQLVAFAGLNPRQHRSGSSIRGKTRISKVGCAAIRAALFMPAVSAKNTNPIMQPLVQRLEQRGHCKMSIVVAVMRKLLHLIYGILKSGQPFDPHFLEKEAAFA

SEQ ID NO: 350231 - protein, 346 aa, unidentified
MKVLLKQTVGIDVAQNELVVSLGRMDQQISIEVYAYKVFPNTQKGFSSLVSWVNKQTLTNVEVRYVMEATGVYHESLAYYLCTNQKQVSIVLPNKISNYVRTLDIKTITDKSASQAIARFGLERQLEVWQPPLKIFNDLRQLCREREQLVQERTMLKNQLHAERTSATSSEKSIKRTKKRIAMIDKQEKEIMEEIPALIKGDEAIAKKMKVITSIPGIGNLTAVTIIAETNGFELIKNKRQLVSYAGLDVREKTSGTSVKSKPRISKRGNRNLRKVMHFPALAAIRTDENFKCIFLRLASRHGIKMKAIVAIQRKLLELKYILWKSNTSYCPNYHNQSTTTETITM

SEQ ID NO: 350232 - protein, 322 aa, unidentified
MAMLSFGGIDVSKDRLDITVLPDEQCSSVSNDAAGWAELIEQLRGSSITAIGVEASGGYERGVVRALLAAGMSVRQINPFKLRQFAKASGTLAKNDRLDARMIASFVAIMPTRPAQRQTPMIEQLAAMLTVRRQLSDHKVATENASRLLEGAMLQRLSRRRVAGLTADINLLDQRLVEIVTADAALAHRFWLLTSMPGVGAVLACTLIALLPELGQMSRKQVAALVGLAPYDFDSGKLKGRRCIWGGRARVRHVLYMAALSASNWNPALKAFHDRLAVTGKKPKVVIVAVMRKMITTLNAMLRDGTTWVDRYSGRRSAATAR

SEQ ID NO: 350233 - protein, 431 aa, unidentified
MIETVESTQHTGLSQEASIAHQWFVGIDWGDQNHQVMVLDQQRRRVGERVVPHDGTSLAQLASWLREVSGGAPSRVAVAIEVPRGAIVETLLEQGFEVVAINPKQLDRFRDRHTVAGAKDDRRDALVLADALRTDPQSFRAVRLGAPDLLVLRELSRAEEGLLQEFRRIANRLRDQLHRFYPQMLQLCSAADESWLWDLLELAPTPRHATLLSEDQVRRILKAHRLRRFKAQDVLACLQVPALHVAPGTAEAAQAHCGFLLPCLRVLAEQLRACEQHVSTLLSTLAEDNAASDPSDVAIVQSLPGVGRKITAWLFAEAAQPLAERDYPVLRTHGGIAPVTRQSGQRRQVVMRRSCNQRLRHALYHMARVAMQRDTHFASVYEALRAKGQRHGQALRNIADRLLRILMAMLRDRTRYDSSRIHGGQKVLMER

SEQ ID NO: 350234 - protein, 383 aa, unidentified
MRIVCGLDVHKDSIYLCILSSTGEILEQIFGVLTTQLEEMRDLMLKYNVQEVGMESTSVYWIPVWRVLESHFELKLINPYFIKQLPGRKSDVKDAQWIAECMMKELVRGSFVPPERIQQLRLYDRRIYDLDDEIIRKLAKLDAVIQRCNIRLSNYVSNTDSVSYKSVIDKICEGVTSPEELVKEIHGRIINRHGKEIIIASLKGCITEVDIDIMTQLKAEIDLAELHKQKCLEKMQDICEKEYSEQLSNLQTIPGVKMRAATSLIAEIGTDMSHFETANHLSSWAGLRPRNDQSNKTIKSRRITHGNRYLRRTIIQCAWGASRAKDYFFSRFSYYQTQVRKKNRMKVIVAISRKMLVCAWHILKENVAYKDFDNKILTSDTKG

SEQ ID NO: 350235 - protein, 318 aa, unidentified
MDSAPRFVGIDVSKAYLDVASRPEGQEFRLPNTVEGIAALVERLKEVPPQLVVLEATGGLERAAAVALAEAKVPVRVVEPSRVRYFARSIGQNSKTDTLDARVIAQFAEAVKPEARALPDDATRELQALLDRRRQLVEARVAEENRRRQGPTAAVRTSLEAHIAYLKGQIEALDIAVASAIQADPEWKLRDEVLRTIPGIGRQTAAMLLGSLPELGTLNGKKVAALAGLAPRARDSGTIKGPRTIFGGRAEVRKALYMASVSAMRFNPELRTFYARLRAAGKAAKLALVAVARKLLTIANAMVRDMTPWGLKKVAVEI

SEQ ID NO: 350236 - protein, 352 aa, unidentified
MSNLYMGIDVGKKFCWTCVLNEEYECVYFDRLETLNEEAWKEMLGLFEGYEVHAAFEIGAHYEWMFDLLSEYCGKVEVVNTERFALISRSQKKTDKVDAEKLAEGMWRGDLPLVYVPEKWVRKDRRLVAHIHALTQTLTSVKARIRNMLYTARLDCPQADLLGNKAQTWLKEHALPALDKQDHLLLEQLMAQMNLLEEQHLALEKLVAERVKAYGETELAQSIPGFGKLVTLAMLSTIAKIARFATPDELSSYLGLCGRVNQSGDVLRLGPITKRGNKHARWLLGQAITHLIKRDPKARRKYLKLRRKKKAKVARVALMRWVTTVLWRMLTNKEKYRLSGVPGCCYKRKQAA

SEQ ID NO: 350237 - protein, 344 aa, unidentified
MPSNFYLGIDVSKASLSVVLMSSNSKVLWSSKKIANQPSGFKQMVEHASKIASKHADGDDYSIAAGMESTGVYGEQLSYYLADNNMSGRISLYVLNPFAVKSYRKATMQLNKNDAADARLIASYLLSMITTGQITPWQAPSLAERLLRELTRRRAELVTLREAEYNRLEKFRAGGSHPHPVIESVQELIAHLEQQIREIDEAIEKHIDDAGLRDTAELLRSIDGIGKVSSASFIGEAGDISRYRSVKQLVSRLGIAPCENQSGTSIHKKPVMSRMGSAVLRHAMYMAALVATRKNKVISAFYNRLLARGKCKKLAVIASMRKLLHIIWGVLTHRVKFDPEYAPA

SEQ ID NO: 350238 - protein, 320 aa, unidentified
MRNAVGLDISKLTFDASAMVGKTEHSAKFDNDSKGLNQFSDRLKSLGCQNLHICMEATGSYYEEVADYFAQYYSVYVVNPLKISKYAESRFKRTKTDKQDAKLIAQYCRSAKESELVKRQKPTDEQYRLLRMTAAYAQIKSECAAMKNRHHAAKDEEAAKAYAQIIKAMNEQLEVLKEKIKEQTEKPNCKEGVKRLETIPAIGRMTAAVLFHHLTSSKFETSNKFAAFAGLSPQQKESGTSVRGKGKLTKFGNRKLRAVLFMPAMVAYRIRAFPDFIKRLEEKKKPKKVIIAALMRKLAVIAYHVHKKGGDYDPSRYKSA

SEQ ID NO: 350239 - protein, 350 aa, unidentified
MDATTIGVDLAKTVFELALANAAWRVVGRKRLTRPQFERFLAMQPATHVVMEACGTAHFWARIARAHGHRVTLLPAQYVRPYVRRNKTDRTDAEALLEAVRSGRIDPVTVKTAAQQELQALHRVRAEWMATRTARLNAMRGFLQEHGLTIPRGARTAMATIPKLLADADTPIPARLRDVLAHLLQDVRALETNLVALERDLAAIADADPVVTRLMTIPGIGLITGTALVATVGHIHGFRTARRFASWLGLTPSERSSAHRRRLGAISKMGDVYLRCLLTHGARAVLFAAHRAQGRRRTLTRLQQWGVSVQTRRGHNKATVAVANKLARIVWAVWSREVAYQDRPALPTAA

SEQ ID NO: 350240 - protein, 350 aa, unidentified
MEQVTTLAVDLAKEVFFAVGEDATGRVCFEREFRSRRAFERFLEGLSGPLEVVLETGSGAHYWARRLHAQGVEARLLPAQRVCEHRSGHKNDRKDARALLRARRDEAIHPVPVKSAAALELQAVHRVRSGWLQRRTAVANQLRGLLAEHGVVIARGEAALRRRLEALLGSPPEWLNGDFHALLAELEAEYRALGDRLARADARLKRLAAEDPQSRRLATLRGVGPIGATALACKAQQAKRFANARQFAAYFGVVPRQHSTGGKTRLGRMSRQGDGYVRRVLVSGAQAVLQKLPAEPGEAADTRRLQRWRARHGTKGAAVRLANRNLRIAWVLLTRGGSYEPEPRRALPGG

SEQ ID NO: 350241 - protein, 326 aa, unidentified
MEHELHYIGIDTAKEKLDVDVLRPDGRHRTKKFANTTKGHDELVSWLKGHKIDHAHICIEATGTYMEPVAECLYDAGYIVSVINPALGKAFAQSEGLRNKTDTVDARMLAEFCRQKRPAAWEAPHPLERALRALVVRHQALTDMHTQELNRTETAREVQRPSIDAHLLWLEAELKRLEKQIKDLTDDDPDMKHRRKLLESIPGIGEKTSAVLLAYIGLKDRFAHARQFAAFAGLTPRRYESGSSVRGASRMSKAGHVSLRRALYMPAMVATSKTEWGRAFRDRLAANGKKGKVILGAMMRKLAQVAYGVLKSGVPFNASRHNPVAA

SEQ ID NO: 350242 - protein, 333 aa, unidentified
MMTAVHVGIDVSRDSLAVCILYADDSTDQLSFDNNTRGIRSLTKKLSGLSAEVHVCVEATSTYHFQLCLALHGTAGITIHCTDPRSSSDFRKAWRKRAKTDKLDAKGLAHFSRAIPQLPWEPPRQAVRDLRDYARTSAQLIKDIQSTRNRMHAASHGGVCKTLLREYKLLIDYHKRSLQRLRNAMMEIVKNDAELKRCFELLLTVCGIGEISALAILAELASMPRGLSKAKWVSMAGMDPEARDSGGSTPPRHISRRGNARLRHALFMPALVAVRYSPAVKAYYDRLLEGGKRKMCALFAVMRKLLLAIWGMFNTNTEWDQTKFTQKVPLTSK

SEQ ID NO: 350243 - protein, 309 aa, unidentified
MDAWVGIDVSKGTLAVFVRPQGKCFECPNTDQGWAQLLCSLAGYNVQRVLLEATGGYERGVLQHLLASGLNVVRVNPQRSKAFARAMGCLAKTDPIDAAVLAHLAEVIEAKTCPVQSPESQALHELVRRREQVVQQRDDERRRLPQARTPLVLDSLKACLKTFKEQIAQLDRAIAKAAREVDDERCSRLSEVVGIGPVTVASLLTYLPELGQLDRRQIAALVGVAPYNADSGSQRGKRRISGGRPTIRRVLYMAGWSVVRHQEDFKQRYESLRQRGKPAKVALIACMRVLLIRLNAMLRDGTSWQSVSA

SEQ ID NO: 350244 - protein, 351 aa, unidentified
MRKIQKGSSCKKDIFMGIDTHELTYRVSLFFEGEEIHNSTYPSDVRHLKKLLERYEKFTVHAVYEAGPFGYTLHDWLKKQGVKVIVTPPSKMPVAVGDFVKTDKRDARHLAHLLSSGLLKSVPVPDKRKREDRDLLRTRDQLVNQRKRIFLQIQSKLRFHGIPIRNRLLISRKNRKMILEYPGMGSSLREAFQLLLDSYDYYTENLKRVRKAVLELSEDKAYRDGVAILKGIPGVGLLTALSFLLELPDMRSFDSNEKVGSYLGLTCSEYSSGEKQHQGRITRCGNARVRGLLVQCAWKTIAGDEAMKRFYERLKRRRGGKRAIVAVARKLSGRMRTVLIKNEPYQVGLVQ

SEQ ID NO: 350245 - protein, 437 aa, unidentified
MNYKQNEKINQVKESTLVVGIDIGSTTQYARAFDWRGIELGKVFPFSNSREGFESFKAWMQHLQDKYKKLDAIVGIEPTGHYWFDLGAYLEDEGILLVMVNPYAVKQTKELDDNSQSKNDRKDPKVIAKLVTEGRYSAPYTPDGVYADLRIMVANRKRLIREMTQIKNRFARWFAIYFPEYTDVFGDYEAQSSMLLLKKVCTPEAIVELGAEKINQIWRDAKLRAVGMKRATTLCETAKRSIGLKKGSSAAQYEMKLLLEDYEYKKAQLDAVMEEIEKLCRKIPESEQMLAIKGIGVITVAGFLAEVGDVRRFESPRQIQKLAGLSLRENSSGKHKGQTTISKRGRSKLRAVLFNAAIPLIAKNPEFKSLHEYYTTRANNPLKKKQSVIAIRFKLIRVFYAILANGVTYDPQKMFSDIHRQHKKNNCEIQETSAEKC

SEQ ID NO: 350246 - protein, 391 aa, unidentified
MSMYFIGIDISKYKHDCCIISAADQKVVSKVTIKNNKAGFNELLTIIHSLANPADIRIGFESTAHYALNLELFLENSLLTFMEVNPVLISEYKKSKTLRRTKTDSVDCESIARWLMTVEYKPHSKGFYHAYSLKSLTRLRDKLIRQRSFYLIKITNVLDHTFPEFKPFFNERLSKTALYLLENYGSAEKMARMNSASYEKLRSVSRGKFSPQQFLRLKELAANTVGVNNSIFDVELNSLLSLYKSLVKEINTIEKEINKLIEEVHPHYMSVPGIGPLSAAVIYSEYGDISNFTNPGQMLAFAGIEPGINESGTESHGGKMVKRGSSQLRYTLINCCLPLIRFDMTFATYYAKKRGEGKPHRVAITHVAKKLIRVIYALERQDIDFNAQKLR

SEQ ID NO: 350247 - protein, 395 aa, unidentified
MFIVGIDIAKRSHEAIIIAEDGQVVRKAFSFRNNCTGYNLLLEQVRRLTLVKSQIVFAMESTAHYWLALYARLLKDGYTVMVLNPIQSHSLRELYIRKAKTDARDSLIIADLVRFGRCKASNVPQDKILALRELCRSRAYLVDMAADLKRKLIALLDRIFPEYESLFDSVFSKASIAVLRKYSTPQKVKNAHLGKLTDLLMESSNGHFGEWKAHQLKEAACSSFGIDDSGGVYSTLLGMFLEQILSLTAQADSLEKQISVFFQEFNNPLTSIPGVGTVLAATILSEIGDITRFSSADKLLAYAGLDPSVKQSGEFKSNQNRMSKRGSPYLRRAIWLASTVAVHRDPMFQTYYEKKISEGLHYMNVIGHVSRKMTAVIFAVLRDGQPYQPILQSAD

SEQ ID NO: 350248 - protein, 388 aa, unidentified
MNKIIYIGMDVHSTNFTLCSFEPGYGFEADKIFGQTQIKEDIFNSTVKYINKLKSMRPDVDVICGYEAWCLGYNLHRKLKAKEIESVILAPTTMAVSRNCSKKKNDYRDAITIAKCLASSAYKAVYIPDEKDENVRDFIRMRDDHKTALKQIKQQLNAFCLRHGHHYDKTKWTGLHLNWLRKLELSKLQRETVEEYLATYEALTSKIAALDVRIEDIASEERYAEKVNKLKCIKGIKTHTALSFICEIGDFNRFKSADKFAGFIGLVPGECSSGNTERMLGITKAGNRHLRRLVVEISNTYRRGTVGRKSAALKERQKDMPKDVVAYADKAINRCQRKYQRMMFKGKNSNQAVAAVARELCCFIWGMMTGHHSRTAQAEASVYRSELD

SEQ ID NO: 350249 - protein, 343 aa, unidentified
MDHFAGLDVSVKETSVCIVDDVGKIVREVKVASEPDALLQVLLNPTYRFKRIGLEAGPLSQWLFSALAEADVPVICVETRHMRAVLKAQINKTDRNDARGIAQMMRAGLYRPVHVKTLRSQKLRMLLTHRKLLQSKAIAIENDLRGTLRNFGLKVGMVGKLKFETRVKELVENLPDLAGLVEPLLLVRQVLREQIGVLHRRLLAIVRDDEVCRRLMTVPGVGPVVALTYRATVDVPARFRSSKAVGAVFGLTPAKYQSGEISRTGAISRCGDEMMRVMLYEAAQVMLLRSAKWSWLKAWAMKIARHRGMKKAIVALARRLAVVMHRIWVDGTEFRWTREVAAT

SEQ ID NO: 350250 - protein, 339 aa, unidentified
MCNYSFFIGADISKSVIDVSYRFEGKVIYLGQFPNNQKGFTKVVNKLFKISIVDTAQWFVCFENTGVYSKPLLEFLSSKSIPCREESALKISRSLGLRRGKDDKVDSMDICQYAYEKKDSLIASKLPSTLILKLRKLLSRRDFLVRQRQSLKVSLKEQKGFIDEELYNELNVGNIILIETYDQQIKGLEESIKVLIKSDSKMATNNELATSVIGIGIITSAYMIAVTENYTTFSDPRKFACYCGVAPFPNRSGTRKGTTRVSHIANKKMKSLFSNCTMSAINFDPEIAKYYKRKKEEGKKAGVVLNAVKNKLIQRVFSVIKRQTPYVKLVHPPKIRTVD

SEQ ID NO: 350251 - protein, 405 aa, unidentified
MKIWCGIDWAEHHHDIAVVDEAGTLLVKRRIGDDLDGFGQLIGVLTDLAGAQHLEVPVAMETANGLLAASLLDAGYSLFAINPLAVSRYRDRYSPSRAKSDAADAYVLANILRTDPAAHRPVPADSEQAKAIRVLARAQQDAVWERQQAQAKLRSLLREYYPAFLAAFPDLADRDARAALAIAPSPAAAARLRRPSLRAALARNGRQRNLDHQVERILTELRVEHMRQPARVEAAMSAQALAHLRSLDAAVANAAALEASTAAEFATHDDAAIITSMPGLGPVLAARVLAELGDDHSRFADAKSLKAFAGTAPVTRASGLKRSVTRRVVRNKRLGQAGHLWAFSLLTSSPGARAHYDRRRAAGDSHNAAARNLANRYFGVLHHCLQNRVPYDEAKANPTPRAVAA

SEQ ID NO: 350252 - protein, 298 aa, unidentified
MSRLTIGIDLAKNVFQVHGIDDSNRVVIAQKLRRAHLLAFFAKLEPSLIGMEACGSAHHWARELTGMGHEVKLMAPAYVKPYVKRGKNDMVDAEAICEAVTRPTMRFVPIKTVSQQSILMVHKSRALLIRQRTMLVNALRGHLTEIGMVAPVGIERTAELVERVLAHKPTELDVPPLVTDIVVSLARQIDSLTAEVRTLEAKIREWQRTSEAGRRLATIPGVGVITATALAATVPDASVFRSGREFAAWLGLTPRSNSSGGKERLGRITKAGNRYLRTLLIVGATAVLRHVRHNTSLR

SEQ ID NO: 350253 - protein, 415 aa, unidentified
MGMQVLYACCAGLDVHQKIVVVCVLLTAADGQVRKEIRTFATTTTGLLSMADWLASQQVTHVAMESTGVFWRPIFNILEGRFSVILVNAQHMKAVPGHKTDVKDSEWIAELLRHGLLKASFIPPKPIRDLRDVVRYRKTLVQERSQEINRLQKVLETANIKLSSLASDVMGKSGQAMLHAMLAGIGDAETLAGLAKGRLRGKLPQLREALEGRVDATHRSLLRHLLDHLAFLQEQVEQLEGQIEQRLLPYQQQLTTMLKIPGIGRTVAAAILGEIGVDMSCFPSDKHISSWAGVAPGNRQSGGKRLKAGSTKGNTHLRAVLAEAVWAISHTKDNYLSAQYHRLARRIGKKRAIVAVSHSLLVIIYHLLRDQQQYQDLGPHFFERLDTERLRASAVRRLEALGYTVTLHERTEVSD

SEQ ID NO: 350254 - protein, 346 aa, unidentified
MNQIIRIGMDTSKHIFQLHGVDAAEQPVLRKRLRRKQVLAFFAKLPPTVIGMEACGASHYWARELSQLGHEVRLIAPQHVKPYFTRNKNDGRDAEGTCEAMSRPTMRFVPVKTAEQQAALMLAGIREQLIARRTQLSNVIRGYAAEFGVTAAKGLDKIEPLLARIAQDENLPVLARELFATEGREYARLQAELKAIEARLMAWHRANACSRRLAQIPGVGPIGATALVMKTPDPGAFSSGRHFAAWLGLTPKDHSTAGKTRLGKITRAGDEVLRRLLVVGATAVIQQVRNGRGRPSPWLLALLKRKPPKLAAVALANKIARIAWKLMTTGESYDGARMPGASAVAA

SEQ ID NO: 350255 - protein, 328 aa, unidentified
MDNPLYYVGIDIAKAKFDVAIKLQNGKHKHKVFKNNPEGFQSLMQWLNTFGETFHCVMEATNIYHEALADFLFQQQITVSVINPKCSANFTKTDNLRSKTDKIDAKMLADYADEKRHKLPIYQPISPAQRELLRKNRQLDHLKKQLAQEKTRLTMLLDSDCIASTQQMIAFIKAQIKALEKTIKQCINADNTLKNNVKLLCTIPAIGFATAVQLIAHLGDGNRFKNAKAAATFAGLTPMIKSSGKSLNTVIGISKIGQSDIRKALFCPAMNFAFGSYKNSVYLSFVLRLLECGKPKMVIITALMRKLVTIAQAVLQKQTAFNLDTFMK

SEQ ID NO: 350256 - protein, 312 aa, unidentified
MKIICGVDVSKAGLDACIEPGAIFASFDNDAAGIAELATFCRQHQAELVVMEATGGYERRAFLLLWEQGLPCGLTNPRSVRRYAESMGVLEKTDRLDASVIARFAHAKNLQPTPAPTPAQQRLKALVARLRQVTDDLTVQKQRRASLADNAEMLASINEVIALLKRQSRTLEGEIASMIDDDPLWGQLAEAWRSVKGVAGRTVARLMADLPEIGTYSNKAIAKLAGLAPIADDSGKRQGKRSIRGGRASVRSILFLVAGMAAKYDKTLAAFRDRLLAAGKPKMVVRIALAHKLLVRLNAKARDARAQYANAT

SEQ ID NO: 350257 - protein, 355 aa, unidentified
MDNLRYIGLDVHRDTISAAVLNGEGQLLMQSVLPTRASALLDFLQGIRGTLHVTFEEGIHSAWLYDLLQRRVARLLVCDPRKTKLLKSGNKGDLIDARKLAELLRNNSLSSVYHGGISALEVQHRTRSYTMLTEDTTRIMCRLKAIYRGQAIQYHGKSVFRPDRRESYLAQLPTAGLRLRAEILYKELDAVHRLRLRAKREMLAECRKHPAIKSLRSVPFLGRVRTAVLIGRVQTPHRFRTKRQFWCYCGLALETYDSAQYRVVHGQVERKPRSVQVRGLNWNHNHDLKDVFKGAALMATHHEGVLQDFYAGLLAKGMRPEMARLTLARKIAAITLKIWKEGGMFNAEYIKPQAA

SEQ ID NO: 350258 - protein, 369 aa, unidentified
MDQHSIVVGLDVHKSSIVAAVLLPNAARPQETCTIENQAQAVERLVKRITKNGTAVFVYEAGPCGYALQRQLHRLGCPAAVIAPGLTPVRPGDRVKTDRRDAEKLAHLYRAGQLTEIRVPTGEEEAARDLVRAREDGVADRLRARHRLSKFLLRQGRLYDGKRTWTQMHYAWLRQQRFELTLAQQTFDAYLRGVEEADARLESLNTQVVELAQWPSYAALVQALRCLKGVDTLTALTLIVETQDFRRFAHARAYMDFTGLVCSENSSGDRTRRGSITKVGNAHLRRVLVEAAWSYSHHNSTGATITKRRHGCPPTVVQIARRAQDRLHRRYWRLTQRNKPRPVAIVAVARELAGFVWAIARSISSTTAA

SEQ ID NO: 350259 - protein, 477 aa, unidentified
MKKTRGGSLQAPDAKPKRRRRNKGMCLEDRPVLEANAAGIDVGAREMFVAVPPGRDENPVRVFATFTEDLERLTDWLEQCGVTTVALESTGVYWIPLFEILEQRGIRPCLVNARHMKNVPGRRTDWHECQWLQFLHSVGLLRAAFRPGQDVCAVRTVLRHRNELVSAASQHVQHMHKALTQMNLQIHHVISDITGLTGCAIVDAILAGQRDGAELAKLRDPPIKADTETIRKSLEGNWRPEHLFTLRQSRDLYRIYQQQIVNCDLEVDKMLREFEPRTDPTERPLPPDRKRYRGGSKRRKKNGHPHPKFDMRTETYKLFGVDVTQIPGLEENALPLFSEVGRDMSRWPSAGHFVSWLALCPDNDISGGKLLWRGARKVKNRAGHLFRMAAFSLHHSRTPLGNYLRRMKAKLGPEAATMATAHKIAVIFYTMVKNQVEYDETIWDARDAQREKRLEAKLKRQAKQLGYELVPIEPKAA

SEQ ID NO: 350260 - protein, 433 aa, unidentified
MSLNRLQVGIDFSQKRADFCLLSPDGEPIVGHQAFPNSLPGYQKACQMLLDHMRTQSFDGLDVSGEATSYYWLPYFWQMAHDDELSACDLSLFLLNPRQVFWFKKSLPQDDKTDQVDPFYIAERTRTRRPTSSWDPQDDWMPLRFYTRLRFHLAQALTREKNYYLIYLFLLHNTYQRNKPFSNIFGVTSQQVLSGELSLAELLALPEEELAEKLDAWSGGTLDDPHEIAQKLRRVAAESFSLPQPLAIPVQRILDSTLEHIQFIEKQCAQVEQWIAAEVQANRPEALFLDTVPGVGLVLAAGITAEIGDLQRFFRTKKWDKHHNAYRTRTLREVEDAVAKLAGLWWPMNASGNFVSEDRHLAKTGNRYLRYYLTQAANGMRRQIPAYVSFYGSKFREATRFKHKRALILTARKSIGLFVGLLHRKEAYRPQEV

SEQ ID NO: 350261 - protein, 450 aa, unidentified
MAQRSGLTRGDRRRNAKIEELRAVVRSDRAILAIDLGEDKQVAALLDHDGRVLGRRVARDKAHALGGLLRWAVEQAGRHGFVGVVVGCEPTGHRWRSVMQLADAAGLGFVCVQSLRVHLAREADDYTRDKTDHKDAVLIGKLIARLDCYLPERAEEDWARLRHLGQRRFRLVAGRSSCRNQIDDLLSCCWPAALECAVKPFDSTTWLACLAVTVDRCNGNPAKLRGLGRGRFSAAVRRELPRFGAQRVCHKVADRFFAALTDGRGVTVQRRGALERVGMLIDDWRSAIARLGEVEARMVAVLDGLGLTTLVTSVPGVSAVGAAVILAETGDLSRFATARSVVKHAGLNPAENTSANFRGQTRVSHRGRPALRAAAWRAAWGALPHNPVLGARFTHLTTRERDRLAPGQARVACAATLLRWLYAIVTTRESWNPDRAAGIRAGQAGEAAAA

SEQ ID NO: 350262 - protein, 423 aa, unidentified
MMKLKYSICCGLDVHKNVIVATIVTTNKDGISEYLQKSFSTINSDIQRFHNWLIENNCYHVCMESTGKYWIPIFNYLENDIDVCLTHPKYVKAIKGKKTDKKDSKWIADLYKFDLVRCSFIPPKDFRQLRELSRYRFKLVCMKSSEKNRIQNCMTISNVGIASVLSDPFGKTATEIISYLLEHTADSMDEKAVRKLIKKGAKSKSDEIIEAIKGYTIETDQAKKLELARGHLEYLDDMITQTEVELYVRIKPYYEFVEFVSTMPGMTELSSTIVLAETGVDMDIFDDAKHLCSWCGLSPANNESAGKKKSVRIAKAGDYLKPMMVQCALAAIKSKKQPYFAIKYGRIKKRRGHKKAIIAIARMMMVCIYHMVSEKKPFIPTDYEELMDPQNHVESVVLNENNVFAYLESLGYDSSKLVKRNDN

SEQ ID NO: 350263 - protein, 387 aa, unidentified
MAEPPFEVILGVDTHAQVHVAAVLDHLGRLQATLTIPATPAGYRQLLTWAAQHGHLTRAGVEGTGTYGAGLTRCLTRAGVKVIEVDRPNRQRRRRRGKSDPTDAEAAARAVLAGEATATPKTRSGIVESIRVLRVARSSAVKARTQTANQLRDLLVTAPDTLRAQLYPLPTAKRVAQLAAQHPGHGADPAVATRRALWYLARRYQTFTAELDALNADLAALTRRAAPRLLARYGVGVETAGSLLVTAGDNPDRLGSDAALAALCGASPVEASSGKTVRHRLNRGGDRQANNALWVIALTRLRDDPRTLVYAERRTKQGKTTKEIMRCLKRSIARELFPLLKADLHDACQLSLTQELRSVALVPARPRDEAAVLSARVIGSTPAKLRG

SEQ ID NO: 350264 - protein, 378 aa, unidentified
MKKDTRYVGLDVHAETIAVAVAETGGEVQSLGTIPNRPEPVRRLMKRLGPVQRLRVCYEAGPTGYVLYWQLTRLGVHCDVVAPSLVPVKAGDRVKTDRRDAEKLARSYRRGDLTPVWVPDAAHEALRDLLRAREADQLRARHRLGKFLLRHGRRPAPGIRSWTCKHQEWIKREVHFEMAAQEATLLDYLTEVEHVGLRLERLERAIDEAVSKVPSKMRAVIDALQALRGVRQISAATIVAEVGELSRFPRPRQLMGYSGAVPREHSSGERTRRGGITKTGNAHLRRIVGEASWAYRHRPNLSRQLRQRQEGLREELKEIAWKAQHRLYQRFRKLTARGKTKQQVVTAVGRELLGFIWAIGVTVEQGFDEQAGRRRRVA

SEQ ID NO: 350265 - protein, 347 aa, unidentified
MSAGVITAVGIDVSKYKSTVAARRPGGEVALLPFDVGHDVTGIKNLLEKLQGLDDEGSEIRIVMEHTGMYWRPVALALQQAGFFVSVVNAILIHNFSDNSLRKVKTDKADALKIANYGLTFWMDLREYSAEDETRQMLKIQNRLYERTTTTGTMLRNGLISLLDQTFPGANKLFLNEGRNSKGHVKWVDFVIRFWHKECVAALSLHTFADTFQKWCKRTGYRFSTSDAERIHTAARNAVATLPKNDSTKLLITQAAISLNTVYDSLHAFRTEMNRLASLLPEYELVMGMEGVGKITGPQLMAEVGDVRRFSHKGALVAYAGVDAPPYQSGTFDAKNRHVSKRGSSLA

SEQ ID NO: 350266 - protein, 416 aa, unidentified
MKNWKELTHYIGFDWAKDHHSVIIVNTEGQIVADFEFDHSLEGWKSFAEKTSAWPNLAVAIETSQGAAVDQLLQRDYSVYPVHPVAAQSYRQRKAPSGTKTDHLDAWGLADALRVDGHGWKPLQPMAPMTQQLRLLCRDEVSLIEQRTALVNQLQQALAEYYPAALEAFDDWTDSFTWEFVLAFPTPQALATAGKRRWEKFLHTHKLWRPQTAEKRLKLFAQADHFKASEPIIRAKSQFALSLCKLLCTLSQQLKLYRKQIEALFRDHPDHDLFGSLPGAKKVLAPRLLAAVGNDPERYGSQEVLQCIAGTAPVSYQSGRINKVHIRWSCDKFLRHTVHLWADCFRKASAWGQTYYQQKRDEGMSHACALRCLGQRLLKILFRMLTTKTPYDAELHARNQKKHGSWVIKLVNDPGA

SEQ ID NO: 350267 - protein, 342 aa, unidentified
MKIHTIGIDLGKTSFHLAGLNERGEVVVRKHFSRAQLLRFTANRKVHLIGMEACGGSHFLGRALREQGHEVRLIPAQYVKPYVKTNKSDYIDAEAIAEAVGRPTMRFVPIKSDDQLDLQSLHRVRERWVTRRTAVINQIRGLLLERGITLRKGRRYVDEALPGILEDTEAKLSGALRLLLAQLKVELDQLDTRVGEADAVIQKMVCENEACQRLVKIPGIGPVTATAVIAAIGNGAAFRKGREFAAWMGIVPREHSTGGKQKLLGISKRGNSYLRKLFVQCARAVLQQKTKQSPGLKAWLEKLTSRTHSSVAGVALANKLARMAWAVLATGEAYRAPQLAAA

SEQ ID NO: 350268 - protein, 343 aa, unidentified
MDHFAGLDVSVKETSICIVDDAGRIVREVKVASEPEALLPVLGNPAYRFKRIGLEAGPLSQWLFSALAEAGLPVICVETRHMRAVLKAQINKTDRNDARGMAQMMRAGLYRPVHVKTLRSQKLRMLLTHRKLLQSKAIAIDNDLRGTLRNFGLKVGMVGTVKFEARIKELVENLPDLAVLVEPLLLVRRALREQFCVLHRRLLAIVRDDEVCRRLMTTPGVGPVVALTYRATVDVPARFRHSKSVGAVFGLTCSKYQSGEVDWSGRISRCGDEMMRVMLYEAAQVMLTRTNKWSWLKAWAMQIARRRGKKKAIVALARRLAVIMHRIWVDGTEFRWTRDVATA

SEQ ID NO: 350269 - protein, 343 aa, unidentified
MRLIVGLDVSLEKTAICVVDEHRKIVREAQAASEPEALLCWIREQDGSIAAVGLEAGPLSQWLYRGMTEAGLDVVLMETRQVKGALKAMPIKTDRRDAEGIARLLHLGWFRPVHCKSVSAQEVRAVLGARKAVQQGFIALEMSLRGLLRNFGLKVGTISRGRFEYRIRELAAGNLMLEAATEPMLRARASLRKELAGLERSVRQLAQDDPVCRRLMSMPGVGAVVALTYRSAVDDPARFTSSKKVGPWVGLTPSRNQSGERDVSGGITKAGDVNLRRALCQAATVMMNRGRSSWLRTWAAQVARRRGAKRAMVALARRISVILHRMWVDDTNFRSDIPVPHAA

SEQ ID NO: 350270 - protein, 340 aa, unidentified
MDKLTTIAVDIAKRVFSVYWVDAQTGEIGARTMSRAKLEEFMRTREPSRVVLEAGGSAHHWGRWLARHGHEVRLIAAQHVRPFVRTNKTDAGDARAIWEAASRPEVKWVAVKGEASQAVLGLHRMPRQLIDMRRMQSNQLKALLYEFGVVAPAKVTAAQLADWVAAGRVPKLLEASLCMQLERIARLKREELELTRAIERHNAEDALAMRLIKVPGIGALGASALSAELTAGATSYTNGRQYAACKGIAPRLSGTGGKVRPGPISKRGDPYVRTLLIHGARSVITHQRRAKRLSPWLSGLLQRRPFNVAVVALANKMARTAWVLAAHDRTYQANYGAQAA

SEQ ID NO: 350271 - protein, 326 aa, unidentified
MSSVLGVDVSKAKLDVALLGENDKYRSKVVPNTRAGFELLRQWLQAQLPQGLSSVHVCMEATGAYHEPLALYLHDLGIRLSVVNPMRVKRFIELEGSRNKTDAGDAKSLARFCRMTEPQPWQAPAPAVRTLQALVARLDALQQMRQSEANRLDVAHAAVQPSLQRVLAELDKAIADIKAQIRQTIDDDPDLRQRDALLDSIPGLGERTIPQLLAYIGAPERFKNVKALIAYASLSPMIRQSGSSLDKRRGTHPQGHRQLKRALYMPALVASRHNPMVMAFCERLKAQNKPSMVIVVACMHKLLAIAYGVLKSGLPFDPRRIAPHSA

SEQ ID NO: 350272 - protein, 407 aa, unidentified
MYYLGIDISKKSFTASVLDEEGEAITKVITFPCTGKGFEKLVDKISSLKLKKSEVVIGIEATGNLWENLYSFLQGYRVIILNPYQTRKYHQVLSKKAKTDKVDSLVIAGLLRSKEALASYVPEEEVQVLRELVRLRHYLQKDKKNYLRKAYNLLNLVFPEYTDLIKSPFKKVSSMILKKYPTAIHMARARRTDLVKMARRIQGNNYSSELAEKLIQIAKESIYSGKASEVRGMALRILIDEIQSLENKIKEIEDKIDEILSSNEPSSPQKRLLGIPGVGPKTVAAFLGEVGGDVTRFSSANKLIGFIGWHPKISESGESKNLHPKMSKRGPSALRASLYMAAVASLKHNPYLRSLYHRKISEGKESKQALVCVGKKILSIMYSMLKYEEDYDPQRIFFQLEKEQVLI

SEQ ID NO: 350273 - protein, 315 aa, unidentified
MAAEVWVGIDVSKARLDVALGATGELFAVANDARGIAGLSARLVELGPELVVLEPSGGWETALVAELGAAGLPVAVVNPRQVRDFGRAGGQLAKTDTLDARLLARFGDRMRPAVRRLPDAQELELKALVARRRELVEMITAERNRLGTAAKVLRKEITAHIRWLEGRLKERDRELGRMLRSSPLWREREDLLRAVPGVGPVLCATLQANLPELGQLSRHQIAKLVGVAPLNRDSGAMRGRRTVWGGRAQVRAALYMATLAAVRCNPALKTFYLRLRHAGKPAKVALTAAMRKLVTILNAILKNRTPWSSPCAPTT

SEQ ID NO: 350274 - protein, 346 aa, unidentified
MKYYVGLDVSLKEISVCVIDGDGKIKARGTTPADPMAVKSWFKKRSLEPETIVHESGQLSIWLQRGFLELGLPAVCIDARRAHKSLSARLNKSDASDAEGLAQLARTGWFTPVFVRSVEADRLRALVGARERMIRLRKDLEGHIRGVLKTFGIRMAGVTQGKLRQKFRDQLAAAGETDPVLRIMADAFIDIHAMLCKAAADLGRALKTKVETHPVAKRLMTIPGVGPIVSLSFIALIEDPSRFTKSTDVGAYLGLTPKRYQSGEIDWSGRISKRGDKAMRSLLVESASTLIRNVKRFSALKSWAIRLAERKGFRKAAIATARKIAVLMLTLWKTETDFQWTKEVKS

SEQ ID NO: 350275 - protein, 394 aa, unidentified
MAFKIFRKNCCGLDVHKTWIYACMGITDTNGRTEYKQARFSSFTKGLQELADWLAKYDCNDVCMESTGKFWIPVFNILEKTCWVTLAYPKYTKPQKGNKTDHKDAKWICDLYMCDMVNPSFIPPPDIRQLRDLMRYRSKLTNIMTSEKNRALNCLTVSYLKLDDVFSDVFGKSSRSIIRYILEHPGETFQVAPFIDRRCKHPVEEIQAVIDGTISHQQAVKLRECLQHLDELEVHKTNVEKEILCLVQQYPYQLELLQTVPGFSGNIMTAIALISEIGADMSVFPSAKHLVSWAGCCPRNDQSSKKVKSTRISRAGVYLKPLLVQVAIQPFTANADKLSAAGALEIRCQICDGRFLSMWAALFIFLGCPLPPCQKDLHVHNGRIVILASVAWIF

SEQ ID NO: 350276 - protein, 331 aa, unidentified
MNFKEFIGIDISKLTFDVRIHSNQIASVFENNKSGYLKMVKWVSKNSPFKKEEMLFGLEHTGIYSLPISIFLSEGKYFFSLISGLEIKRSLGIQRGKNDKIDAKRIAEYVSQKRDKIKPSVLPFKIILELRRLLSLRERLVRQRVGFIKDKKENKRFLKQSENKMLFDVIDKMILQFDKQIKNIEDEFDCIIKRDELINKQYYLITSIKGVGKQTALTIIAYTNCFTLFDNWRKFASYSVTAPFSYRSGTSIKGKAKVSHLANKKIKTLLNMCARSAIVYNPEIKLYYQKRKDNGDNGMSVINIIRNKLISRIFAVVKRGTPYVNICNYAA

SEQ ID NO: 350277 - protein, 346 aa, unidentified
MMVVLGADAHKRSHTIVACDEAGAELGSITVAATGEGHLEAVRWAARWEMRRWAIEDCRHISRRLEADLLAAGELVVRVPPKMMAGQRRAARTRGKSDPIDALAVARAALREPGLPVAQLDGPSREVKLLVDYRESLVRERTALQNRLRWRLHELDPTWDPSPSSLDRYRILDEVEIRLRSYEGLVADLACREVRRIREITREANQLENQIASRVAEISPSLLELPGCGALTAAKLVGEAADIGRFHSRDAYAMFAGTAPIPVWTGNKTRFRLNRGGNRQTNAAIHRIAVTQLRIHPPAQQLVDRHMRNGKTKREALRILKRRLTDVVYRIKDMTNTTNSVPARAA

SEQ ID NO: 350278 - protein, 344 aa, unidentified
MQITVVGIDLGKNVCSLAGLDGTGRVVVRRRVRRENVFKLVAQLKPDIVAMEACGGAHHLGRLLRDDGFEVRLMSPEYVRPYVKAQKNDDRDAEAIAEAATRPTMRFVELKSAEQLDMQVLHRARDRLVAERTALINQLRAVLMERGIVIPQGWRKLNHAFAAILEDGEATLSARMRVLLIDMRSEWGELDQRIRAFDNEFAARAREGDDTRRLATIPGIGVLNATALVAAIGNGQSFASGRDLAAWLGLVPRQATTGGKPRLKGITKRGNVYLRKLLIHGARAAMAPLSGTNSALGKWLRGLRGRAHVNIVVVALAAKLARIAWAVLRTGRCFEAREAAAVVV

SEQ ID NO: 350279 - protein, 392 aa, unidentified
MIFVGIDVAKNKHDCFITNTDGESLFNSFTITNNLDGFNDLYRKISSVTENITKVKVGLEATGHYSYNLLGYLLDKGFPTYVINPLHTNLYRKSLSLRQTKTDKVDARTIASMLMSDVNLKSYSDTSYHNEELKSLTRYRFDKVKERSALKVSISRLVCILFPELENLVPTLHMTSVYSLLYEFPGASFVASAHLTRLANLLSKASKGHYNKDTAVLFRQTARDSIGSVMPAKSLELKHTIKLIQELTSEIDEIEAVIKQIMDEEIKSPILTIPGISYRMGAMIIAEIGDFNRFDSADKILAYAGMSPSTHQSGQLDNCHSRMEKRGSRYLRYALYNATKYVCHWDKSFGAYLEKKRSEGKHYNVALSHAAKKLVRTIFAMERSGQSYIASV

SEQ ID NO: 350280 - protein, 507 aa, unidentified
MMDKERRWLVGIDWGSQEHVVSLYDDTGQKIGQRRFAHGGNGLTDMIAWLLKASGGKPGDIHVGIETPHGPIVEALLERDFNVYSINPKQLDRFRDRFTVSGAKDDGRDADVLADSLRTDMRAFRKLSIAEPIVIELREWSRIDEELKVEHGRLANRFRDQLWRYYPQMLELTDDVGANWFLDLFEAVPTPEKAANVREKTIARILKNYRIRRFDAAHVLSELRKPALAVAPGTIEASTARIRGLIERIRMINNQLRDAGRQLDRLCKILSEPVADKDEETSPGQKNEQRDAAILDSLPGVARTVLATLLAEASDTLQRRDYHALRALCGSAPVTRRSGKSCVVVRRYACNQRLRNATYYWAQNAVRFDATSRAKYDALRAKGHGHARALRSVIDRLLKVACAMLNSVDFSHQNKARRVETRLDIDYYNTGFPQGKAYTIRRKSGCSGEASFHSNRPRLACGSPCHAEIQLWWMRVQAGHFFFPSPWCAHFKTLSGPLSRSEPQSCQ

SEQ ID NO: 350281 - protein, 342 aa, unidentified
MQISTIGLDLAKNVFQVHGIDASEKVVVRKQLRRSQVIAFFEALPPCLVGMEACATAHHWARELRKLGHEVRLMPAKDVKAYVKRNKNDAADAEAICEAVRRPTMRFVTVKTVEQQGRLMQHRVRDQLVRQRTQLINALRSHMAELGIIAAQGREGLKELLAIVADANDSQLPVDARASLMVLAAQLQACQTLIGTLEKRIIVKHKSNDRSRRLQTIPGIGIIGATAIDATVTDPKAFRSGRDFAAWIGLVPREDSTGGKQKLGHISKQGDRYLRRILVVGAHAVLRRARQHPEKHPWLIALLARRPFKVVAVALANKMARIAWALLAKGGTYRAPQLAAAV

SEQ ID NO: 350282 - protein, 293 aa, unidentified
MGYFVGIDLHGDNNYIGILDEEDRRVFKRKNRNDIKEITRVLEPYQEEIKGIVVESTFNWYWIVDGLQEAGYRVHLANTAAMQQYEGLKYVDDTRDSFWLAHMLRLEILPEGYIYPKETRSVRDLLRKRMMLVQQRTAHILSMQTMVSRNKGVSISSDTIKTMSDEEVEGLFGDEHLVMSAQCDHEVVGVLSGQIDKIEKAVLKEVKLKKPYKKLLTVPGIGEILAMTIMLETGDIERFREVGKYSSYCRCVSAKKVSNGKNKGKGNRKNGNKYLAWAYVEAAHFHVRPKFCN

SEQ ID NO: 350283 - protein, 316 aa, unidentified
MTHNTINVAGIDTGKAKLDIALSPGGQELQVDNSPDGHAALAAWLTEHGVIHAGIEASGGYEAAIIEHLHAQGIAITRFQPAQVRSYAGYRLQRAKNDKIDARMIAACTHDAEPTIVHEPRFSALAEQLTWLEQIEDDLTRAKTRAEAFRQDRQRELIAAEIARLKQLRSVEIRALVKAVRAHKDLARRLTLIQSVEGIGERTALAILIRMSEIGTLSREQVASLAGLAPFDRESGKCQRSRRIFGGRERLRRSLYAAALPAAFQWNEVLIGLYQRLTAAGKPHKVAMIACARKLLIYANTVVKRDQPWIAKTRTT

SEQ ID NO: 350284 - protein, 463 aa, unidentified
MEGKARRNHRPRKGPSLLERVNPNAAGIDCGSAEHYVAVPQDRDAEPVRRFKTFTADLHRLADWLSSCRIETVAMESTSVYWIPIYEILVARGIKVVLVNARHLKNAPGRKSDVTDCEWLRDLHSVGLLRGSFRPEEEIVTLRSYLRHRETLVQSAATMVTRMQKALVQMNLQLPVVIKDIIGLTGLRIIREIVEGETDPAHLAKHRDPHCRASEAEIRAALTGHYRPEHLFALKQNLELFDALQRQVEACDVQIEACLAAQAAKMTSPSSPLPTPRHRRNRRSNEPQFDVRTILYRLVNTDLSQLDGIGPHAALRLISEIGTDMSHWRTERHFTSWLTLAPNNRVSGGRLLSSKTQPSANRAAAIFRMAAMSLARTQTALGAFYRRLACRIGKAKAITATARKLAILVYRCLKGQIVYSDPGAAAYDLRHRHSVVRRLRRRAAALGFNLVSGETGEILDGVS

SEQ ID NO: 350285 - protein, 348 aa, unidentified
MALTIVETRAITGGVDTHADVHVAAALDPVGGLLGVAEFPATPAGYARLLGWLGGFGTVCLVGIEGTGSYGAGLSRHITTAGVRVVEVDRSDRQDRRRQGKSDPLDAVSAARAAQSGRARGAPKGRDGAVEAIRALMVAKRSARSERTQTINQARSLIVTGPDDLRTRFARHTAAALVAETASLRPRPGGTVGYATRIALRELGRRAQFLDGQLERLDELIVPLVTARAPGLLALYGVGPDTAALLLIAAGDHPARLRSEAAWAHLCAAAPIPASSGKRTRHRLNPGGDRQASHALWRIVITRMSSHPPTRAYVERRTAEGLSKTEIIRCLKRYAAREIYPRLRAAAD

SEQ ID NO: 350286 - protein, 336 aa, unidentified
MKNYLFYVGIDISKLKLDVVLIENIANNKSEHFIVENTSKGVKSIISQLKKKKIDLNKTLFCFENTGVYTYPLSLSLSEFKLDYWIVPAIEIKRSKGISRGKNDKTDAKDIAWYSVRNIDKLKLSAIAEKEIQQLKLLFTEREKVIKTLLVFGTTKENKDFMTNDVFKVVSAINAKTIKSLKISLKELETKMKEIIKNSSELKQQFELIRSVPGVGQQSAMYFIIATKGFKAFDNSRKFACYSGTAPFEYSSGSSVRGGTKVNHMADKKMKSLLQMGALAAIKYDPQLKEYYNKKKNEGKNSMLVLNNIRCKIIDRVFSVINRKTPYVNTYKFASQ

SEQ ID NO: 350287 - protein, 369 aa, unidentified
MKRPMERDRSIRLWSEETVAEPGRHVPHHPSPNSCQGHRARIITRSGYTKEAAMQTPCMYVGIDVSKARLDVAVRPSGEPVSVTSDASGITTLIAQLSQVRPALIVMEATGGLERPLLRALVDAALPVIVVNPRQVRDFAKATGQLAKTDALDAQVLARFAEVIRPTLRVCPDPQTQELAALLARRRQVLAMQGAEQNRLDRAPDRVRKRIEAHLRWLRDELARLDEDLDDLIQQSSVWRAREELLQSVPGIGPVMSRTVLAELPELGLLNRKQIAALVGVAPFNRESGWLRGHRTIWGGRAPVRRVLYMAALVATRWNPVIRLFYQRLRAAGKAPKVALVAAMHKLLTILNAMVHHGTPWQPVVAQEA

SEQ ID NO: 350288 - protein, 482 aa, unidentified
MRIGEEHMVSTGFEFAEHLGNTRFHCGIDVHKHQITVAMVGKDDTGLEKVVEQEFATTPEGMSQFWGFTRKYVPMTFSMEATNVYHHTVVTFLEGKKTEATWAYEVIVASPPDVAGIPGRQKNDVADAKALARYAAAGLLKNGHEIIVPLEDIRALFRSAMQVEVDRTRLKNRIKKTLDRGGFRPVGLDFNSNWSRDFVYELTNHEGTIREYFEKCIGASCPIPEHASIVARNKPKFEPFFDVQLSTGQLALVRQDMVELEFKTTRKAMLSVEIDRIIVSRPGLRQRITDISSVPGISPYTAAWLVAEIGNVKRFAGVKPFLAYCGCCPRTLATDKKVYSCHVTRKSNKFIRTMLYNAAMVVSCAVKKESGLKTYATRTVARKRHQGMKLAFMLIAAKMARIIYAILRDGVGFSADLAIPRRPSPKGGAGGCLTVTDKKLLNRARRILGRVGTMEQLRGIADHASYFAKALESVLQENQQVL

SEQ ID NO: 350289 - protein, 329 aa, unidentified
MNLSSPLPVIGIDVSKASLAVCYQVDQHLKHVEVPNTKAGFQQLVQACGTQCVFVLEATGSYYLALAYYLHEQGGQVAVLNPLVIKRFIQMHLGKGKSDRKDAQWLLRYGQQQVVKPWQPEETVLVECRQLEQVSEQLLKQKTMVSNSLEALQQQPVVSQLALKRLQQTWNQLDQQLHDIEVELLRLLEQRYPHEMNLLCSIPGIGRKTAGLLLLFAGGFTCFDNYRQLIAKAGLSPREHSSGTSIRGKVRITKMGGGLIRSKLFMCSFAAKKRNTACQALYDRLVAKGKNGKVALIAVCNKLLKQAFAIVKSGVPYQADFTSKLAPAS

SEQ ID NO: 350290 - protein, 344 aa, unidentified
MKNSNVIGIDLAKNVLQVCKVSKHGELTVNKAISPRQLKELLATSPPSIVAMEGSGSCHYWGRLAKAFGHEVRVINPKKVKAFLQGQKTDANDALAIAMAATQFGVRFSLIKDEEQQTLQTLETSRKFLDKELTALNNHIRAYVYEYGITINRGRKSLRETVTLVLDDLDTRLPRCLKNTLRLLWERYQLTLAQLKETKKVKAALVKQIEPCKRLLALESVGEVCAAMLYANIGDGKEFKNGRDASACMGVTPKQHSSGGKTHMMGINKKGGNKELRAALYQGALSVITHLPAEPQTVKQAWLIELVKRAGVKRACIALANKTVRTAWALLATGESYQPVLLSK

SEQ ID NO: 350291 - protein, 320 aa, unidentified
MQTPSVVLNIGSDVAKDEIVVACSEGSFPVRKVANQHTALLAFLKGLPAGSRIGVESTGSYHELFAEAAHKLGFLVFLLNPKDTRHYAKAVGLRGKTDRVDAELIARMIAHEHTKLHAWIPPTAQQRELDRLIKRRATLISLREAVAMSLHDLGGFDADLKALRTRFNQLITRLDLRVKTLVEANPERKQNCTRLCTITGVGPVTGTALVNTLERMPLTSADAFVAFTGLDPRPDDSGQHRGKRRLSKRGPAELRRLLYLAAMSAAKTKTWRPLYEHNRAKGLSTTATLVILARRIARTAWSIYTHKTEFDPGRLTKPLT

SEQ ID NO: 350292 - protein, 275 aa, unidentified
MDLGDQNHVVVAMDVNGKEIEMKTIRNTELSLRKFFSRYKEATVAIEAGTHSPWISRLLKEIGCNVYVGNPRKLRIIWDCNDKSDLRDARILAMVCRVEPRLLWPIKHRDRQAYADLGIIKARDTLVQNRVRMINHIRSVTKTCGCRIPKCSTPSFSKRAPSHIPKELKDSLEPLIFAIDLLTQQVKEMDRQINKLCKKYSETEKLLQVLGVGPITALAFVLTIEDPHRFTKSRQVGAFFGLTPKRDQSGRCDKQLRISKAGNTYQQFSVKKYNQ

SEQ ID NO: 350293 - protein, 402 aa, unidentified
MPMLSIGIDVSKGKSTVCGMKPGGEIVYAPFEVQHTREGMLELVSLLRSSGEEVRAVLESTGSYHCPVVAALLENGIFVSVVNSLRMKRFCSQSIRKVKTDRIDAMQIALYGLAYWQELQPTRLPEDTYRELQLLARQYYQMTSLLIKAKVDFNAICDQVLPGMQELMSDHAGRHKLSDFVLRYCHTTHILEMGETRFRKDYCKWAEKKGYRNCERMAALIFATAQNGIPVLPNAPSTQIVITEAIRVLHTVEASRDAILTQMQALAKTLPEYSLVREMPCIGDTLAPRLIAEIGDVRRFHSKRALIAYAGIDAPPYQSGKFCANNRHISKRGNRYLRKTGYEVMQSYVMHKPANDPIFTFIEKKRGEGKSGKLAMVAGLNKFLRVYYGKVTELYRSLPAIE

SEQ ID NO: 350294 - protein, 368 aa, unidentified
MVVQLTVLDGQTTWHLTSERRPCMNTIKVTQSEGKGKSLCLNEFDDFLALDWSMKVMAIGHMRRRSKEPETFERPSDLKELKQYLATLKGRKVLTIEETTTAQWLYVELMDHVDRIILCDPYHNRLLTEGPKTDKIDAGKLCLLLRAGLLKEVFHSLNGLYELRRLVSAYEDLVKAGVRMLNQKASMQQGHFESGKHAPFILEHIEKSIELYQRSKKEYERKFTELSRGNKLVKNLMEVSGIGIIGAVKIVAIVVDARRFARAGNYLSYCGLIKHEKISGGRSYGRRGSRFNHTLKTVYKLAAMSVIGGNNNPIRKYYEYLLAKGFAEHNARHALARYLARLTYGMLKTGKRFQASQWRNPAARHQAA

SEQ ID NO: 350295 - protein, 357 aa, unidentified
MQSNKINFKGQNIFIGIDVHLNSWSVTTITPSGYKRQTSHRADALELYAYLTKNFPGGIYHAVYESGFCGYSCYELRELGIDCVIVHAADVPSTQKSRLSKTDSNDSMRLAMSLSNGELNTIYIPPKEVLGDRDILRYRSIVQKGMSRTRSRIKHLLHTNGVSYPQEFREPYKHWTRRFIKWLREDVRLLSGKRLELDFLLEDLEHQRSQLLKATGKVRELSRTSRYAEDYGNLISIPGIGLITAMTMLTEVTDIHRFSSQKKFMSYVGLIPVMKDSGETIRQNEITPRGNQRIRRMLIESAWSAVRYDAQMAAAFGAFCRRMKKNRAIVRIARILASRTYHILKTRTKYDTALCTA

SEQ ID NO: 350296 - protein, 404 aa, unidentified
MIFVGVDWAEAHHDVCVLDEGGAVLGSRRVLDTLEGVRQLHELVADHAEEPGQVAVGIEKDRGLLVVSLVAAGYAVYAVNPLASSRFRDRHQVSGAKSDRGDARVLADMVRTDRHQLREVAGDSDLAEATKVLARAHQSAIWSRQRHLNQLRNALKDYYPGALEAFGTDLASNDAVAVLTAAPTPAAGRALGTGELEALLRKGGRQRNVAARARQLRDALCRGQLEQPGIVADAYGAVTASELRLIAAATAEVATLEEALSAAFEQHPDAKVVLSLPGLGTVLGARVLGEFGDDPNRYASAKSRRNYAGTSPVTRASGLSRVVLARVSRNRRLVATCDQWAFCALTSSPGARRYYDELRQRAKTHRVATRALGNRLVGILHGCLEDHVPYDEATAWRHREQLAA

SEQ ID NO: 350297 - protein, 366 aa, unidentified
MEKSSKVFVGMDVHKESIDITLAEQGGEVRRLGQIGGDRAALRKMVRKLQSKGGERVFVYEAGPCGFWIYRELAALECCMVVSPALIPKRAGDHVKTDRRDSERLASLARAGELQAIHVPDIRDEAIRDLVRARDDAVIAQRRVRQQLKALLLRNEIRYVGKTSWTGAHRRWLSELKLPEAAQQIAFEEYIDAITVATSRIERFTRAIETEVATWRFAPVVAALQALRGIQFVHGVTLIAELGDLTRFHSARQLMGYLGLVPREDSSGEHRRQGSITKAGNSYARRALIEAAWAYRHPARVTRIIATRQTGLPKAACDIAWKAQLRLSAKYRRMNARHLHHNKIVVALARELSGFVWAIGQSVKPQ

SEQ ID NO: 350298 - protein, 416 aa, unidentified
MPYKIAGIDVHKRMLHVVVSDVEVDGEYDFTRRIFGSLPEALRSLAAWLLEQQVQEVVMESTAQYWKQICQTREGALATSGTLHLAQAQSNRGRRGRKKDFRDAERLVKRLVAHELVLSFVPDVEQRLWRTVVRTKYQLTRNRVQLQNRLEALLEETHIKLSSLVSDLLGASARRMLGAIADGETNRETLAALADRALRATQEQLQDALGVCQELNPVYRRLIRMVLDEVASIDKRIEQLNQEMANLLRPHEDQVKRLAEVPGLGVDSAQQVIAEVGATAATFPSEKHLSSWVGACPGDEESAEVNRSRRSPQGNRHMRRILNQAANAAVKHKGSIFEILYRRYVPRLGHNQTIGIIAHKLCRLVWKILHRGIRYEERGPEVSKASKKKRTRKMIQALRRLGYRIEPSPSQSAITA

SEQ ID NO: 350299 - protein, 414 aa, unidentified
MLFVGDDWAEDHHDVELMDAAGRRLAAARLPEGVAGITRLHEMIGAQLGEDAGAGEDAGAGEVAIGIETDRGPWVSALVAAGYTVYAVNPLQAARYRERHGVSGAKSDKADAHTLADMVRTDAHQLRPVAADSPQAEAIKVVARAHKTLIWERTRHTLRLRYVLREYFPAALEAFDDLAAPDTLELLAKAPDPASAAKLNRSQIRAALKHARRRDIDMKTTRIQAALRSQQLGRAPVITAAYAATTRSIAAVLATLTEQINTLRGQVETHFGRHPDAEIILSQPGTGVLLGARVLAEFGDAPGRYADAKARKNYAGTSPITRQSGKRKITHARFVHNDRLVDALMSQAQSALLASPGARAYYDKQRARGLDHHAALRQLANRLVGILHGCLKTRTLYDEATAWSHHNQDQRTAA

SEQ ID NO: 350300 - protein, 379 aa, unidentified
MIVIGADTHKRTHALAAVDAGTGRGRGARQIKADEEGHLAAVRWARGLDDERVWAIEDCRHVSRRLEQALIAAGERVVRVAPHRMGASRRGERVPGKSDEIDALAIARAVVKDGVERFPAASLDEHAMEIRLLRDHREDLVRERTRAQNRLRWHPLELCPELERSIKPRSLGQTRQLDRIDRRLRRMPAGARVRIAREQVAQIRRLTRQADALERELLALVKAHRPQLLAETGCGALTAALLIGRTAGAERFRSDAGFARQAGSAPIPCSSGQRDRYRLDRGGDRQLNHALHIIAITRARHDPATKAYLERKQAEGKTHKGALRCLKRHLARRFHYLLSLPAETPQRDPGEGAAVHAVPPRRGETRIVGAAPALMPCVR

SEQ ID NO: 350301 - protein, 337 aa, unidentified
MKITTIGLDIAKRFFHVVCCNEQGRIVKKKMLRRAQVLAFFQSHPECLVALEACATSHYWAREIKKCGHAVKLIPPQHVKAFLIGNKNDYNDALAIAVAAKQPHIKSVGIKTIEQQDNQVQHKVRELAVRQRTALCNQIRGLIAEYGIILSQGVNHIRKNIPLMLDDETTQLTDAFKMILTQLQVQLLSLDDCIDTYGKTINVSAKSNPICQRLQTIPGFGPMVSSAYFNEVGNGSHYRRGRDVSASLGIVPRQHSSGGKDTLLGISKRGNSYLRCLLIQGAKAVVSRAGTKTDKLSQWINRIVQTRGHNRACVAYANKMARMAWAISASGKEYSPV

SEQ ID NO: 350302 - protein, 350 aa, unidentified
MQITTIGIDLAKNVFELAVADEAWRVVDRKRLSRAQLQRYFHNREPVHVVMEACGTGHYWGRWLTERGMKVSLLPPHYVRAYVRRNKTDQADATALLEASRASDILPVQIKSIEQQALQGVHRVRAAWRTTLTSRINTVRGLCREFGIVAPKGAKRGFDQVIEHISSDTSEIPEIIRAVLQRMVEEIRSIKERVRQVDAELGAVAARTQVCERLQKIPGVGVIAATAFAGSVGDINSFRNARRFASWLGLTPREFSSGDVRRLGSISKCGDRYLRMLLIHGGRAVLYSADCAQIGGRPLDALRKWALQVRARVGHNKAAVAVANKLARLVWATWHRQRDFEFRAPRVVSV

SEQ ID NO: 350303 - protein, 421 aa, unidentified
MKTWNEVTHFAGFDWAKDHHDVLVLDGAGKIVAEFRFDHTASGWTLCQEKLAQFPQVAIAVEAGHSAAIERLVMLDYRVYPVHPRSSKSYRTRKLPSGTKTDRADCWALADALRLEGESWRVLTAPEPLVQRLRLLCRDEVALIEQRTALINQLQQALYEYYPAALEAFEDWCAPSAWAFVERFPTPKALVQAGKRKWQNFLHAQKLFHPEWNKKRLEIFARADQFCGADATIAAKSALAVATAIMLQTLEAQLTRYRALITECFKQHPDHALFASLPGAGPKLAPRLLGELIALKALADVPQALQCLAGMAPVSYQSGKVSVVYLRYQCNRFLRATIHLWVDLSRHYCDWARIYYEAHRKKGQGHACALRCLGMRWLKIIAAMIRNQTPYDAAIHTRNQLQHGSWVMQLQPVQIMKGAAS

SEQ ID NO: 350304 - protein, 405 aa, unidentified
MDITPIHRQVVGLDVHQNKITACALIEQPDGSVTMEHREFGGFKRDRRALAEWVRGFAPDIVVMESTGIYWKSPYAALEQVGIAAWVVNARHVKNVPGRKTDISDAQWLAILARAGLVRASFIPPAEIRHLRLIARQRQKLGGMLASEKNRLHKVLADAGIRLNVLVSDLHGQSARAMIQALLDDQPIHAILDRAGRLRASREDLFEALQPEELSAKHRFVLNEILAHIEYLEATMARFEQQLLDGLAPWEPQLRLLETVPGIDRMGAAMLLVEIGTDMDSFGSAERLASWVGICPGNHESAGKRKSGRTRKGNAWVRRLLCEFAQAASRTRCALKDKFSALSIRKGHKRSIVALAHKMLRIVYAMLNHATPYQDRNIDYEALVVQRNAPRWLKMLAKHGYIATV

SEQ ID NO: 350305 - protein, 476 aa, unidentified
MFAEDFPRRPMGCLVAVERDGARQPALALERSTEKRFGGRDIPLGAEQKIDGLSLFVDRAIEVSPAALDLHVDPMREVDGDRRSLAEWDCNHALWRMAMPNTIHNDIGAIFVSLELSRSKWLITSLSPGGGERMSKHTVPGGDICALLARFSELQRKALARTGTLFPVIVVQEAGLDGFWIHRLLEKEGIESHVVDAASIAVARRRRRAKTDGIDGETLLRTLLAYKRNEPRVCAMVKAPTIEEEDRRRLCRERKTLMNERVVHVNRIKGLLFSQGVSGYEPLRRDQRRRLDELKTGDGRPLPPHLKAHVVRELERLELLLEQIKAVEGERDALLAPQEATTPEMTMLLAIKGVGLEFAAVLWSECLFRQFANRRQIAAYAGLAPTPWQSGSVDHEQGVSKAGNPRLRTTLIQLAWLWLRHQPHSALAEWFHERVRRNGGRLKKATIVALARKLLVALWKYVTAGIVIEGAVMKTA

SEQ ID NO: 350306 - protein, 356 aa, unidentified
MSHDVKYIGMDVHKGAIVIAVLNGSGKLVMETILETKADSILQFLHGLRGELHVTWEEGTWAAWLYDLLQPQVQEVLVCNPRRNALLKEGSKSDRVDARKLAELLRTGMLRPVYHGENGLRTLRELGRSYQTISKDLTGVMNRLKALYRGWGIPCAGTQVYAPRYREEWSNKIGQAGVRRRAELFYQHLDGLQVLRRNVRHEFLAESRKHKAVKLLRRIPCIGPIRAGLLIALMPTPHRFRSKRQLWTYSGLGLETHDSAQYRYVGGQLQRSKKPQQLPGLNQNHNHAMKEIFKGAATRASCGPGPFRDFYAALLAKSMKPEMARLTLARKIAAITLTLWKKEERFDAEQLKTQAA

SEQ ID NO: 350307 - protein, 310 aa, unidentified
MEIIAVGIDVSKDRLDVAVRPGAEAFAVERNGAGLDRLAARLKELSPKIVALEATGGFETVATAALAAAGLPVVVVNPAQVRAFARALGQRAKTDPIDAAVIAHFAEATKPEPRPLPDQATQLLADLVARRRQIVEMMGAERQREKRMTIPHLKRSIVRLLKTLEKELSSLDADIDDAVRGSPAWREKEDLLASVPGVGPIIARTMIAELPELGRLDRKKIAALAGLAPFTRQSGQWRGRSFIGGGRKAVRTALFMGAMVAKKHNPVLKAFFERLVAAGKPKMVALIAVARKLLTILNAMIRDNRPWQNA

SEQ ID NO: 350308 - protein, 413 aa, unidentified
MALKIVHQICCGIDVHKTFVVACIASTNKGVTTYKRHRFSTYTKGLKELSQWLCENNCKDVCMESTGKYWIPVFNILEDSCNITLAHPKYVKAIRGKKTDKKDAKWIADLFKHDLIAGSFMPPLAIRQLRDLMRYRFKLNNFMSSEKNRLQNSLTVSNIQLGNIVSDTFGKSSMNIINRLLENPLDTSFDIEPLIHGSMKDKLPELELAIDGFITPEQVEKLKVIKQHYEDLKLRKADLEKIILSLSVPYAEEINLILTVPSFKNIFSAIAVVSEIGANMDVFPTAKHLCSWAGLTPTNNESAGKKKSVRISKAGCYIKPLLVQCATAVVKSKKHPEIRNRYLRLKKRRGHKRAIIAIARMLLTAIYNILKKKEPYNAELYRISDVLPVNREITVEQAILLAKTQGYRIMMAS

SEQ ID NO: 350309 - protein, 352 aa, unidentified
MVKGNRLDFTGQPIYVGMDVHKKSWSVSIHTEHFEHKTFIQPPEVEPLVHYLHRTFPGATYHCVYEAGFSGFWIHERLREQGIHSMVVNPADVPTKDKERAGKADRVDCRKLARNLRNGDLRGIHVPSRDQQEDRHLIRTRQSMVRKQTRCKNQIKSILYFYGVPIPDESNWSKRFINHLEQIRMERASGDLSLKAHLEELKHLRQIIAGLNRSILALSRIEPYRAHVLLLRTVPGISTLTAMTLLTEIQDISRFPSLDKLASYAGLVPQITSSGEEEYTHGITNRRNAMLRTVLVEAAWTAVRKDPALTMAFLKLSRRMKKTKAIVAIARKLLNRVRFVLRNQRSYIAACV

SEQ ID NO: 350310 - protein, 459 aa, unidentified
MAKVFKTKRTKNKTKREWDEGLSTLNKNAAGIDVGNAEHYVAVPAGRDPEPVQTFGSFTADLHRMAQWLKACGVETVVMQATGVYWIALFQILESYGFQVNVVNARHTKTLPGRKTDVLECQWLQKLHTFGLLNNSFRPTEEIQVLRTYLRQRENLVAAGSTCIQHMHKTLTQMNVQLANVISDISGVTGMAILRAIVAGERDPDRLSTLKHNRVRASRKEIARSLEGNWREELLFVLEQSLELYDLYIRKIAVCDQRIELHLKTMTTKSEPEQRSDPSALPSPKQEPRFSLKDELCRITGVDLTRVAGLQVQTVQTIISEVGVDMSRWKTEKQFASWLGLCPDNRISGGKILKSGTRQVVNRAATALRLAAWSLIRSQSALGANFRRLRSKLGAPKAITAMAHKLARLIYRMIKFGTEYVDKGMAAYESRYRQQQMKWLSKQAASLNLQLIPVPEVTG

SEQ ID NO: 350311 - protein, 414 aa, unidentified
MKLFVGDDWAEDHHDIEVMDEAGTVLARRRLPEGAAGLAQLHGLIGRFLPEDPDAAESAEVVIGIETDRGPWVAALIAAGYSVFPVNPLQASRYRERHGVSGAKSDQGDAHMLADMVRTDSHQLRLAAGDSPEAAGIKVLARTHKTMIWERTRAVQRLRHQLREYFPAALEAFEDLDAPDTLELLGKAPDPASARKLTRAQVSAALKRARRRNIKDKTDAILAALRSEQLGQPGALTAAYAATARSFIAVITTLNEQVKTLQGQVEQHFGQHPDAEIYLSQPGIGAILGARVLGEFGDDPHRYHDAKARKNYAATSPITRASGKKKIVTARFVHNDRLVDAPNAQAFSALSGSPGARAFYDEQVAKGFEHNDALRRLGNRLVGILHGCLKARALYDEDTAWGHRKSLPQSQAAA

SEQ ID NO: 350312 - protein, 329 aa, unidentified
MSNLLKKVIGVDFGSKFLTLSFLDDEKGEQVLNLPNNERSILSFLSKICPSDYCFVIEATGNYSSRLLHFSIGKGFESSLINCMSVKHFARMKNIITKTDAEDAKLIRNYGEMFRPEFYIPKTQDIEYLDQEIKLLNDLEEEKRRYAVKLKVLRFHPVLNPSTEKHYEKRLKQLEKEIKEVEARLPQLQDEEFTETKNLLQSVSGIGEKTSLQLMTATSGFKNFHSSKSLVKYFGLAPRIYQSGKKSYSPGKCRTSKTYIRSILYVCSWTAIKHNQKCKELYLRLLEKGKAKKLALIAVCNKLLRICFSVVKNKTPFQQDFQNKLKIST

SEQ ID NO: 350313 - protein, 423 aa, unidentified
MNFNTKLEAITDQTLIVGVDVAKNTNVARVIDSRGAELCEKVCFENTREGFLSFTGYIEKLKSIHNKGSAIIGLEPTGVYGNTLIAYLKGEGYNVVYILGMQVKRAKEIEDNSPSKNDFKDAKVIAMLVKDGYYRTIRTFTDNITELKEETRHLYQNTKKLTRVKCQIDNFITQYFPEFSIAFKDKEKKAAMATLHLFPLPWQICALSAEQITQAWRGYGVIKGIGMKKALQLKRLAAQTVGLKATGPTLAQAKALMAEYDMFSNQEEEALGRIRALLATNADYQMLMDIPNMTMRLAAYLLAEVGDFRDFSHPQQLVRLAGLNLKESSSGKNRGASEISKRGRPMLRRTLYFIVLEQLKHAAPGWYQLHMHYTTRKDNPLKKMQSVIALCCKFLRVVWGMLNNGTAYDPDMLTRKTVCAKTA

SEQ ID NO: 350314 - protein, 453 aa, unidentified
MSRRKMNVSIKSGKARAALTITHPNAAGIDVGSASHFVAVPPDRDETPVREFPSFTADLNALADWLDACKVDTVAMESTGVYWIPLFELLESRGFTVLLVNARHVKNVSGRKSDVLDCQWLQQLMSYGLLSGAFRPTEQVCVLRSLWRQRAMLLRGQGRAVQHMQKALTQMNVQLANVISDVVGETGQKILRAIVAGERDGQVLGAMKNARIHASIDEIAKSLQGNWRAEHLFALKQALGTFDFAGTQLVECDCEIEQQLQCLKAHEGEPAKGKQRGRSRNAPQFDLRVQLFKMCGVDLTRIDGIDVTTAMAVISETGTDMSRFPTVGHFASWLGLCPGTKITGGKVMSGKTKRCANHAAQALRLAAAALRPSQSALGAYFRRMCSRMDKPKAITAAAHKLARLIYTMLTKGEEYTDKGQEYYEERYRQRVMHHLAKRAEKLGMHLVPIPHLA

SEQ ID NO: 350315 - protein, 371 aa, unidentified
MRKVALDLGARKTAYCEVQNGQVIQRATVTSIETLESLLGPEHPPAEVAIEACREAWHVHDLLSCWGNRVVLVDTTRSRRLGIGQHGRKTDKIDAEVLALALERGGIPVAHVLSPHRRELRRWLNVRRALVESRAQLVTTSRGLAREQGVQLPRCPTANFLRHTSKLTMQPLEVIAPLLKLLETVNAELAVVDAKLAVMCETEPVVKLLMTAPGVGPTVAASFVSVVDDAKRFQSPHHVESYLGLVPSEDSSGGKRRLGAISKKGNSYLRSLLVQGAWSILTKGDRHDPLRLWTEAVAERRSKKIAVIALARRLAGVLWAMWRDSKPYNPALLASASGQGTRENARALQAQAIKLTATARKRVPMEATLQT

SEQ ID NO: 350316 - protein, 357 aa, unidentified
MSQKLNSAIAVIGIDIGKNSFQVVGHDRRGAIVLRQKWSRGQVETRLANLPPCLVGMEACVGAHHLSRKLQLLGHDARLMPAKYVRPYSKGQKNDFRDAEAIAEAVQRPTMKFVATKTAEQLDLQALHRVRERLVSQRTAIINQIRAFLLERGIAVRQGLRFLRAELPEILAKRSDVLSPRMLRVIEDLAGDWRRLDERIEGLSGEIEGLAQQDQACLRLMTVPGIGPIISSAMVAAIGTGDVFCKGRDFGAWLGLVPKQISTGDRTILGSISKRGNRYLRALFVQAAWVVLVKLGPKHWERYGLKSWIEAAKKRLHHNVLAVALANKLARIAWAVLNKGRAFACVKTTDATASQPA

SEQ ID NO: 350317 - protein, 468 aa, unidentified
MKKGSRKRRSQSKGGRIGPSLLERINPNAAGIDCGASEHYVAVPVVRDPSPVQSFKTFTADLHRLADWLVACGVSTVAMEATGVYWIPIYEILEERGLEVLLVNARHVKNVPGRKSDVMDCEWLRDLHSVGLLRGSFRPTAAIAGLRAYLRHRETLVQSAATHIQRMQKALVEMNLQLHRVIANIAGVTGLKIIRDIVAGRTEPCELARHRDERCNASEEEIAAALTGYYKPEQIFLLKQNLALFDVYQSQLLDCDSAIEACLKTLAAGGAHPGDPLPPPRSKRKPHDNEPRFDIRGPLYRVSGTDLAQLDGIGPYNALRLVSEIGTDMSRWPSEGHFTSWLTLAPQNKVSGGRILSSRTQPSANRAATILRLAVMSLSRTQTALGAFYRRLAYRIGKAKAITATARKLAVLVYRTLKGGFLYKDPGADAYDKNYRDHAVRRLRQRAEFLGFTLLNSQTGEILEVGVS

SEQ ID NO: 350318 - protein, 392 aa, unidentified
MKLYAGIDLHSNNSMVAIIDEQDRVVLQKRFANALQQILLALASFKEHLLGVVVESTYNWYWLVDGLMEAGYTVHLANTAAIVQYEGLKYSADEHDARWLAHLLRLGILREGCIYPREARAVRHLMRRRMQLVQTRTTQLNSMQSQYMRSTAQRPSTNELKRMLPEDVDAHLHQPNVASGIRANLAVVHTLSGEIARLEREVLVQVRLAAQFESLLSIPGVGRILALAIMLETGEIERFESVGNFASYARCVQAKRMSNDKKKGEGNSKCGNKYLAWAFVEAANFAVRPAGELTALQLDRVCVGRSIGPGEREAEVLAIGGEFEVGDDAEREHDQRAEHQGREVPQQDGHRVAVQRDRRHAHAACACVDENAFASAKAGDACSASRPGPCSR

SEQ ID NO: 350319 - protein, 456 aa, unidentified
MAKQAMTEKKRKGEWDEGLSALNRNAAGIDVGSAEHFVAVPAGRDTEPVQTFGSFTADLHRMAQWLKACGIETVVMQATGVYWVALFQTLESYGFQVHVVNARHTKTLPGRKTDVLECQWLQKLHTFGLLNNSFRPAEEIQVLRTYLRQRENLVAAASTCIQHMQKTLTLMNVQLANVISDISGVTGMAILRAIVAGERDPQRLSALKHNRVRATREEIARSLEGNWREELLFVLEQSLELYDLYVRKIAVCDQRIERHLKTMTSKREPGQRSDPDVLPSPKHEPHFNLKDHLCRITGVDLTKVAGLEVQTVQTIISEVGVDMSRWNTEKQFASWLGLCPDNRVSGGKVLKRGTRQVVNRAATALRLAAWSLLRSQSALGANFRRLRSRLGAPKAITAMAHKLARLIYRMMRFGTEYVERGMTAYESRYRQQQMKWLVKHAASLNMQVIPSSEVTS

SEQ ID NO: 350320 - protein, 423 aa, unidentified
MEVLHECVAGLDVHKDSVVGCVRTVSGDKTTREHRTFDATTDGLLALLEWLTSCRCELVAMEATGVYWMPVWRILSDGAFKLIVVNAAHIKAVPGRKTDMKDSTWLADLAAFGLLKASFVPDEEQHELRALMRTRKQLVREQTRHVQRIQKTLTEANIKLDSVISDIMGRNGRRMIEAMITGVRDPRKLAALADQRLKATPKQLYDALHGRLTDHHRFLLQLHLGQWDTLDATIKGVDREVATRVFRMDTEGMAAKANFSELIDQLVTIPGVSRLSALTILSEIGTDMSRFATAGHLVAWAGMCPGQNESAGKRKRTRLRKGAPWLKTMLVQCAWAAKRKKDSYYKAQFFRLQSRRGPQKAICAVAASLLTAIYHMLKDGTIHQDLGSGYFDQRPPEIKVKRLVNQIAKLGFEVTLQPIAKAA

SEQ ID NO: 350321 - protein, 423 aa, unidentified
MEVMHECAAGLDVHKDSVVACVRGMREGKAKREVRGFATTTEELEALRDWLTSCGCALVAMEATGVYWMPIWKILSEGAFTLIVANAAHIKAVPGRKTDMNDATWIADLAAFGLIKASFVPDEAFQELRTLMRTRKQLVREQTGHVQRIQKTLTEANIRLDSVISDVMGANGRRLIEAMIEGVRNPRQLAALADRRLKASAKELYDALHGRLTEHHCFLLKLHLGQYDALGATIRTLDAEVEARVTRMDREVTADKASFSGLIDLLVSIPGVSQVSALTILSEIGRDMSRFPTCGHLVAWAGLCPSQNESAGKRKRSRLRKGSPWLKTMLVQCAWAAKRAKNSYYKAQFFRLKARRGPQKAICAVAASILTAIFHMLNDGVAHNDLGVAYFDARKPEAKVQRLVRQIKKLGYEAALTPIAKAA

SEQ ID NO: 350322 - protein, 402 aa, unidentified
MNAVGIDVSKGKSMVAIMRPFGEIVSTPFEIKHTSSDINSLVKLIKSIEGESRIVMEHTGRYYEVLAHQLSEANLFVSAINPKLIKDFDNDSLRKVKTDKADSVKIARYALDKWQNLKQYSVMDELRNQLKTMNRQFGFYMKHKTAMKNNLIGILDQTYPGVNTYFDSPARSDGSQKWVDFASTYWHVDCVRKMSLNSFIDHYQNWCKRKKYNFSQSKAEEIYGKAKELVPVLPKDDITKLIIKQAVDQLNSASITVESLRTLMNETASKLPEYPVVMAMKGVGTSLGPQLMAEIGDVSRFTHKGAITAFAGVDPGVNESGSYEQKSVPTSKRGSSDLRKTLFQIMDVLIKTHPKDDPVYQFLDKKRAQGKPYYVYMTAGTNKFLRIYYGRVKEYLSSLPES

SEQ ID NO: 350323 - protein, 520 aa, unidentified
MATPAVKRRRDIIVRPPTRRRESSPAEGTVAGETRETRERRPKHEGQELADQRTLLRRALGGSRRDCPGRQENGARGSRESGPPEGRYKANLAVPALRPRVHGPEGGGPVRYCLGVDWADQTHAVWVVDESGTKITARTVAHTAEGLDEWGRELDEWRAQGIDLWAAIERPDGRVVDFLLDHGVVVYPVNPKALDRARDRFRQSGAKSDPFDARVLADFLRTDHAHLRPLQPSSEAAQELKLLTEDCQRHIRQQTRLVNQLTATLKAYYPRALEVAEVTSALAREFLPAYPTPEALTALTERQWQRWARAHRLPEARTGELWVVLRQPQVPVPAHVVRAKARLMQSLLEQLKPVVAAVAQYRKTIDDFFARMPTAQWARTLPIGKHGVTAPTLWARLGDAPGRWESFRHLQAHAGTVPVTKRSGKQRVVQFRFACDKALRYVVDQVAYLSLLSSAWARPYYDQQRARGHSHRQALRALGAKWLKIIFIMWQRQVPYDEQYHLATLARQHLQAASGGNRLT

SEQ ID NO: 350324 - protein, 460 aa, unidentified
MSQRKRRIRKRKKLAAAQTPLNPTHHPDAAGIDVGAEELVAAVPPGRGEGPPVRTFSAFTEGLHALRAWLLACHIKTVAMESTGNYWLCACAILEDAGIEVCLVNARHVKGVPGKKTDVCDAAWLQQLHAAGLLRGSFRPQKEILPLRYLLRHRGDLVAQSGQQVQLMQKVLTEMNLHIHHVFSDVDGVSAQAIITAILGGERDAAKLAALRDRRCRAPLDKIKAALAGDYRDEYLFVLKQCQTRWQQIHESVVECDAEIARRTAAISGVTDAPLPAAPAAQRRVQKNMITAMPVYEEAHRLLGVDLSAVPGISGGVLCVLLSELGTATHIRQKFRSAEAFASWLGLCPDNRISGGRILKAGTRKVSNRIANILRMAANALSREQGRMGEFVRRFKGRLGKAEGIVVGAHKLARILWALIVSGQPYDEAKAFAITPASTARRLRNLQNQAKALNLTLVPA

SEQ ID NO: 350325 - protein, 391 aa, unidentified
MIYVGIDVAKDKHDCFITNSDGEALFKSFTIPNNRKGFETLFQKVQSVSDDLTKVKVGLEATGHYSYNLLGFLLDKGLPTYVINPLHTNLYRKSLSLRKTKTDKVDAHTIASLIMSDVDLKSYSDTSYHNEELKSLTRYRFDKVQERAKLKTSVSRLICILFPELEKLVPTIHMASVYTLLSEFPSAHAVASAHLTRLTNLLSESSHGRYGKDTAVMFREAARNSIGSNMPAKSLELKHTIKLIQELTSEIDEIETEIKSIMDEVNSPILSIPGINYRMGAMIIAEIGDFSRFDSPDKILAYAGMSPSTYQSGQLDNCYSHMEKRGSRYLRYALYNATKYVCHWDESFGTYLAKKRAEGKHYNVALSHATKKLVRTIYAMEKTGQSYSSAS

SEQ ID NO: 350326 - protein, 346 aa, unidentified
MEHYVGIDVSLELLSVCVVDGRGKIVKEAKVASEPEALVYFLKELGFPVNRIGFEAGPLSQWLHAGLTQAGFEAVLLETRHVKAALSAMPVKTDRKDACGLAQLLRMGWFRQVHAKSIGSQEIRALLVARKQLLGRLLDVELSIRGILRGFGLKVGQVTRKTFEARIRELVTGHTTLERIAEAMLSARATLKAQYEKLHKAVLAIVREDAVCRRLITVPGVGPVVAVTFKSAVDDPSRIAKSKAVGALFGLTPRKYQSGEKDVTGGITRTGDEMVRTALYEAANVLLSRITRFSKLKRWGMDVAKRRGSKRAKVALARKIGVILHRMWIDGTTYRWTETKPIAAQG

SEQ ID NO: 350327 - protein, 389 aa, unidentified
MLIQRIAPVAETEFASIFVALELSRAKWLVGVGTSQRWTVRRHQVEGGDLDGLLALLRRLSAGEEKRTRLPARVRVCFEAGRDGHWLHRALTSAGYDVYEIDPASVAVDRRARRAKSDGVDVDKLVRTLARLSRGELDACRVVEVPSEAEEDAKRPHREYERLVKEQTAHRNRVKALLFAQGVRDFDPMAPDRLERLAALPIMPRLKAELSRECRRLAAIADDIAEVEAEMAAVIVPPKTASPARAARSTPSAMQAKAVQLFKLKSLGVHFSTVLAGEVYYRTFQNRRGVGQYIGLAPSPFQSGDMARDQGIAKAGNGRARKAMIELSWLWLRHQPDSALSTWFRERVGDRKGRVRRIAIVAMARKLAVALWRYLETGLVPEGAVLKRA

SEQ ID NO: 350328 - protein, 407 aa, unidentified
MQGSVITLDVSKGSCHYQGFIKKNQPSTKTRILKFTKKSFAELSAYRERLAIKAGQEDIPFIFEATGVYHKPLQKYLDDHGFTYYIISPLMSARYRKLELHSNKTDPLDCANIAKVFYEYDKLRVYQRMDKEYESLRDMNRNYEDMLVHLRKYKVRFKSMLDVIFPYYQKCFKNDGIYADLPLILLKEYKHPDIIHQTNEDIMVKKLSKLCPKHQTGYIRNKVQKVKELAEDVYSGCESTDIYVELFTELIETLQKQMKECDEQLIKIIETAAKSPYFDLIRSVVGIGDNLAARILAEIGDINQFDTRNKLISYAGLDPMIRQSGKKDGIHLSVSKKGNRYLRCLLYQAASANYRLKKNDVIYRFNQKKRQQSNPLNSKAANTATAHKILVIVYGMCKNGTYYNPCE

SEQ ID NO: 350329 - protein, 366 aa, unidentified
MKKISTVQRVRNEIFKEQKLTIGVDLGDRWSFYCVLDEAGKIILEQKVPTTREAMKQAFGKIPLSLIALETGTHSPWVSRLLTELGHEVIVAHAQKVQLITKSNRKDDRHDARTLARLARIDPELLGPVRHRSAKAQIHLTVIRARAELVSARTALVNAARGLVKSYGERLPKCGTYQVSEKLAEGLSAELREVLEPLLKEVESLNERIKEYDERMEKIAKEVYPEVSLLQQVKGVGTQIALTYVLTIEDPYRFLKSREVGCFLGLKPGRRDSGESAPQKRISKEGDRYLRTMMVQGAHYILGPFGEDSDLRRWGLKLAERGGQNAKKRAVVAVARKLAVLLHRLWVSGEVYEPLRNSQKAMRAVA

SEQ ID NO: 350330 - protein, 425 aa, unidentified
MDFKQNQKINQVTEQTLVVGIDIAKRTHYACFVDDRGRVLHNSFSVSQARNGFELFYQRVLAAMKEHEKSEVIVGIEPTGHYWLNLAYFLEERGIPLVMVNPMHVKRSKELDDNLPTKHDRKDALVIARLVKDGRYSYPRILKGMEAELRAGSTFRSKLTEELGAVKNMIIRWLDRYFPEFVQVFPSFGKMALAALECTPFPSDLRQKQADEVLSLYRKVEGLKCPQRPKSVRLIEVAASSIGVTEGLEMARIEIATLVCRYHQLEQDIESITQRLVELVKTSVEYEWLSTVPGLGDTTIVDLLAEIGSFSHYQDSRQLTKLAGLTLRENSSGLHKGQKRISKRGRRKLRALLFRVMMPMIRHNEAFKKLHEYYTNRHVNPLRKKQSIVVLCGKLLKVLHGISTKHKVFDAQRMMRDIPGLAEAE

SEQ ID NO: 350331 - protein, 355 aa, unidentified
MKTTPNLITGLDVSDRHSTYCTITAEDGEVVEEGRVRTTPAALEAHFRGPRRRIVLEVGSHSPWISRLLEELGHEVIVANARMVGLIHNNPKKRDPVDAQTLARLGRVDPKLLYPIQHRSEQAQVDLSVVRARDAVVRARTGLINHVRGSVKSYGARIPECSAEGFTTKAEGHVPEALRVGLEPVLEMIRALTRQTRFFDKQIEALCEERYPETAVLRQIKGVGPVTALTFSLVIEDPARFPSSRAVGAYLGLTRRHDDSGESEPELRITKAGDEFLRRLLVQSAHYILGRFGPDTDLRRWGLHYIERGGGSKTAKKKAAVAVARRLAVLLRRLWSTGEVYEPLRENRHGTVVAA

SEQ ID NO: 350332 - protein, 350 aa, unidentified
METAYDGRQVVGMDLHRRRSVLVRMTVDGRRLGTARITNSPAELRTAIAAAGKNPRVVLEATYGWYWAADVLQAAGAEVHLAHPLGVKAFTYRRVKNDEKDAADLADLLRMGRLPEAWIAPAEIRELRELTRYRLKLVQRRAGYKDQVHAVLAKLGIPVTCSDIFGVAGNIWLDELPLPQPYAGKVASLRTLIAGLGTEIALLDAVISDLLEHHDGYHALQALPGIGPVLAAVIVAEIGDIRRFSSPAKLCCWAGLTPRHRESDLKVARGHITKQGSPVLRWAVAGAIQHQPATSPVRQVKDRIIARRGKEAKNIAKTAAARHLLTAVFYAMRDGQSRSLAARTAAPAAA

SEQ ID NO: 350333 - protein, 470 aa, unidentified
MKSTQKMNKAQLNTEFSTEEIIAIGKKAYEEATAITWRQAEVGRTLTQNDKIALVDDKTLVIGADVGSVKHDIRAFDNRGREFSKKPLEFENNEAGFALAKAWILMIRDEQHLEKIMVGMEPTGHYWINLASWLMAEGITVVLVNPHHVKKSKELDDNLNRKTDKKDPKVIAGLVHEGRYSMPYLPDGIYANLRNLNNLRLMNTEEKTRCMNRLNRWLSIYFPEYGTVFKDVSGVGSLLLLEQAALPVDIVKLGADGINRIWRTAKLRGVGYAKALKIISAAEHSIGSTEGLDIARDEIQWILENLKTLIKWDEDLLAKIGTIAKEIPCIDNILEIKGLGVRTVAGILAEIGDISRFGSVKPIQKLAGLALVEDSSGKHEGRTIISKRGRKRLRYHLYQASLVLIGQNDEFREVYDYYRTREDNPLKKMQALMAVACKLLRVLYAMVTKGIKYDPEKLLSDIHRPQKKVA

SEQ ID NO: 350334 - protein, 320 aa, unidentified
MAMSVSRSVVGVDVAKAEVVVYQADTDLLLPVSNDKPSLTKWLKTLPANSAIAIEATNIYHLDTVELAHAMGHAVYVIDGFRLSNYRKGVGGRAKTDASDARLLARYLKNEEEELRPWSPPPKVYTKLQSLLRRRATLVQARVSLTQSWNDEPLLKAAFKQQIAAMGRLDLLIQKKLLEVVKEAGLLEQVKRCQAVEGVGFLTATALTMAFQRGDFASGDAYIAFLGMDLRVSDSGQMNGRRKLTKKGDSEIRRLLHNAAMAASRSKTWKPFYERYLERGLKTTQVLVILARKLARVAFALMKNQSEYQPNPVLGASPQT

SEQ ID NO: 350335 - protein, 455 aa, unidentified
MTRTTTCDRPELKPVNVGAAAIDIGSTMHMAAVDPACADTPVRAFGTFTQDLHELADWFKVCGVTSVAMESTGVYWIPAYEILEQHGFEVILVNARYAKNVPGRKTDVSDAAWLCQLHSYGLLRGSFRPDAEIATLRAYLRQRERLVEYAAAHIQHMQKALMEMNLQLHHVVSDITGATGMRIIRAIVAGERNPDVLATYRDVRCHASIETIRAALVGNDRDEHVFALTQSLELYDTYQAKMLDCDRKLESLITALTNKGAKPVGKLFGPRVKTKQVNTPSFDVRAALYGVLGVDLTEIHGLGPSLALKLIGECGTDLRAWPSAKHFTSWLCLAPGNKISGGKVLSSRTRRSSSRAAALLRLAATSIGRSDTALGAFYRRLSSRVGKAKAVTATARKIAVHFYNTLRHGMTYRDPGADHYEEQYRSRVLANLKRRAKSLGFVLQAVPCDAELAVS

SEQ ID NO: 350336 - protein, 406 aa, unidentified
MRVYTGIDWSENKHDVVFMNQAGAVFAQLTIAHTVDGFLQLDAARQQLQVMPEECLVCLETAHNLLIDFLWSRGYVHVYVIPPSVVKANRGRQGQSKARTDPSDAELIADILRTDQGRLQPWHPDSVLTQQIRAQVSLVRHLTRDVVRSSNRLRAALVRYYPAALQVFSSVRTQVALAFIRAYPTPQAAAALSFAEFEAFAKAHRYPRPSQLRRNYLRLQEPYPEPMPGTVSVFQAEAVQLAGLLLEELRANKEAKRRLKTLFDQHPDAPIFASLPGTGDLLAPALLAKFGDDRQRFPTAASVQALAGTCPVTVSSGKRRTVRFRFSCDRAFRDIAQKWAMCSLSQSLWAAAYWQQTRPRCHSDSHAYRCLANRWLAIAWAIWQKRECYDEAYHLQQRALHSKKHP

SEQ ID NO: 350337 - protein, 419 aa, unidentified
MVKGVCAMEVLLARCCGLDVHKRSVVACLFTPGPEAQPTKELRTFGTMTADLLALSDWLARAGCTHVAMEATGVFWKPIYNLLEDRVAVLVVNAAHIKAAPGRKTAVRDAEWIADLLRHGLLRASFIPDRPQRELRELTRYRTTLIHERANEVNRLQKVLDGANIKLASVATDVLGKSGRDILAALVAGTTAATALAQLARGRLREKIPQLEQALAGQFSAHQQFLIAQQLAHIDFLDASLERVSAEIGARWRPFEGELERLQTIPGVGRRTAEVVLAEIGADLSRFPSARHLASWAGLCPGNDESAGKRRSGRTRKGSPWLRTALVEAGQAAARSKETYLAAQYRRLAARRGAKRAALAVAHSLLVMVYVLLTQHVTYHELGGQYFDERDQQSVQRRLVRRLEALGYAVSLQPTTPAA

SEQ ID NO: 350338 - protein, 340 aa, unidentified
MTITTIGIDLAKNVFAVHGVDQNGKTVLVKSRVIRAALPGLIAGLPLCVIGMEACSGAHYWARLFRQYGNEPRLMAAKFVSPYRMAGKSGKNDAADAQAICEAVRRPHMRFVPVKDESRQAMQCLHRPRQGFIEEKIATYNRLRGLISEFGVIAPQGTDALRHIVSAQKNSLPLQVQQCVDDLLEHVDRIEANITEYDQILPRIAKTDHRSQRLMKLKGVGPTTTCALVACIGNAHDFKNGRQLAAWLGLIPSQYSSGRKSNPGRITKAGDSYLRTLLVQGARSVLIGAEKRTDSFSRWVCSLVERRGYWRAVVAIAAKNARLCWASLHYGDDFRLYSAS

SEQ ID NO: 350339 - protein, 348 aa, unidentified
MVTGGVDTHKDAHTAAVLDQTGRLLGHNQFPATQKGYAALLAWLRGHGNLVRVGVEGTGVYGAGLAAFFQQAGVELVEVDRPDRKTRRWQGKSDPVDAEAAARAAQAGRATGTPKTRGGRVDALRALRVARRSAVAARADAQRQIRALVVTAPSPLRTRLQSLPITALIAYCHTRRPDLTQTHDPAVATLLALRVLARRHQQLSTEIDELDALLEPLVATINPALLTLNGVATDVAGQLLVTAGDNPQRLSSEAAFAMLCGAAPLPASSGRTQRHRLNRGGDRQANAALYRIVCCRLRWDPRTRAYAQRRTTEGMSKKEIIRCLKRYIAREVYIALLNPDPAPLPATT

SEQ ID NO: 350340 - protein, 345 aa, unidentified
MLNYGLDVHKRYTTYCVMDDSGVILKEGRCANDELLRLPALSWKVKEERRAVMEAGGNWYHIYDLLEPVVGQLLLAHPLRVRAIAAARVKTDSIDAKTLAHLLRSDLIPEAYVPPAAVRELREMLRYRLDLVKQRTALKNRVHALLAKEGLMPPLKYLFGRSGRQWLEELPLTPRKRLELDGFLSVLSCIQEHVHEAESLIQDQAASDPQAQLLTTIPGIAALTALTILSEIGDVDRFPDADHLVSYAGLAPRVHSSGGKTRMGHITKQGPSALRWALIEAAHIAVRKPGRLQDKHRRLRRGKNAAVAITACARQLLVTVYCMLKRGDAFRPDGSSAGFMPSEVA

SEQ ID NO: 350341 - protein, 443 aa, unidentified
MLAEALQVCHPHAAGIDIGEAEHWVAVPPGCDPQPVRRFGTFTADLEALADWLIDCGVTTVAMASTGVDWIPLFELLEARGRQVLLIDPRQAKRAPGRPKTDRLDCQWLQRLHAYGLLAGAFRPDDQVCVLRGYLRHRQMLLTYAAHPMQPMHKALEQMHLKLTQVVSEITGVTGMAILKAIIAGERDPQHLAQRRNPHCHHPEDDIAKALQGTWRAEHLFALRQAVELYAFSHQQITQCDQQINAHLETFGDTSAGQPLPPKARRHTKTNDPRFDARTPLSRMAGVDLTTIEGIAEGTALVILSEIGTDMTRWPSVKHVWSWLGLCPQHNISGGKVLSRRVRPGAHRVTVALRLAARSLHHSQSALGAFFRRMQARLGTPKAITAAAHTLARLVSHLLKHGSASVQQGLENYEAQYHERKVTTMAKQAKALGYTLVPLVTQG

SEQ ID NO: 350342 - protein, 406 aa, unidentified
MEVVHERCCGLDVHKKKVVACVLTPEGKEIRTFGTMTEDLQAMCQWIRQHGCTHVAMESTGVYWKPIYNLLEDQGLEILVVNAQHIKQVPGRKTDVKDAEWIAQLLQHGLLKGSYIPSREQRELRELIRYRKSLIRERASEVNRLQKVLEGANIKLASVASNVLGVSGRAILEELIAGNTNEQDMAALAKGRLRNKTKELEQALKGIVRPHQRKLMAIQLQHIDELDELIEEVSAEIERRMHPFDEDLARLEGIPGVGRKAAEMIVAEVGLDMNRFPTAAHLASWAGLCPGNHESAGKRYSGKTRKGNGWLRETMVECARAAARSKNTRLSARYHRIAARRGTKRAAVALAHTLLIIVYHLLKHNVAYHDLGPDYYDRQNRETLIRRHVHRLKQLGVQVVITGEAS

SEQ ID NO: 350343 - protein, 367 aa, unidentified
MRVLHQTCAGMDVHKKDVKVCLVTRDSEGQRQEEMRTFRTMTHDLLAMRAWLQTQGCTVIAMESTGVYWKPIFNLLEGDFTVLLVNPAHIKQVPGRKTDVKDCRWVAELLEHGLLRGSFIPPVEIRDLRDLTRYRRQLVHTHSAEVNRLQKVLEDANIKLASVATDVMGVSGRAILQALLAGVVSPEALAELAKGRLRKKKQDLQAALQGRFRPHHTQLLTPILAHIEFLEESIAECEVQIEALCHPYAEAIALLDTIPGVSQRTAQDLIAEIGIEMAWFPSAKHLCSWAKVSPENNESAGKRKSGRTGKGNKWLRAILVECAHAAGHTKGTYLGTKFRRFASWEREKAGGHHGRPPDFGGRLLYPA

SEQ ID NO: 350344 - protein, 408 aa, unidentified
MEVVYRCCCGIDVHKNLIVACLREGGRQELREFGTMTGEIKALANWLTEAGCEMAAMESTGPYWKPLYNLFELLSLDTMIVNAAHMKAVPGRKTDSKDAEWIAELLQHGLLRASFVPSREQRELRELTRYRKSIIEERSRELNRLQKVLEGANIKLGSVVADIHSKSAQRLLERLAAGEAMDDSGEISKLLHKSLLPKLDEIVASLDGIVTPLQRALLAQILDHIDDLDKRIKELDRMAEAYMAEFQPAIAEVCQMPGIARRSAEVILAETGIDMSRFPSAAHLCSWAGVCPGNHQSAGKRYHGKTRKGNKTLKSMLVQCAKAASRVKGSYFAAQYQRIAARRGKNRATMAVAHSMLIAIYHVLKEGVPFRDLGADYYDGFRREHKIRNYLKRLQALGWEPELSPTTA

SEQ ID NO: 350345 - protein, 370 aa, unidentified
MGKSVLYVGLDVHKMSVDVAIAEAGPAGEVRFYGRIGGDLEALDKVIRKLQAQGAELRFAYEAGPCGYQVYRHLTARGLECLVAAPALIPRRPGDRLKNDRRDALALARLLRAGELTPIKVPDEDDEAMRDLTRAREDAICVERRARQRTVAFLLRHGRVYQGKTTWGRGHWAWLLQQVMDHPAQQIVLQEYLDAVREASARVLRLTGQIRDLVPQWRQAPFVAAYQSLRGVSLIVAATVMAEVGDLDRFNNPKELMAYLGLVPSEHSSGASIRRGRITKTGNSHARRVLVEAAWAYRMQARVTRHLLKRQEGLPERVRQLAWKAQLRLCTRYRRLLARGKARQTIVIALARELAAFLWAISRAVAQATA

SEQ ID NO: 350346 - protein, 467 aa, unidentified
MTPPKDFCLDPGPPAPTPTCPPSPVLSDALQICHPHAAGIDIGEAEHWVAVPPGCDPQPVRRFGTCTVDLDALADWLIDCGVTTVAMESTGVYWIPLFELLEARGVQVLLIDPRQAKRAPGRPKTDRLDCKWLQRLHAYGLLAGAFRPEDQVCVLRSYLRHRQMLLTSAAHHIQHMQKALQQMNLKLTQVVSDITGVTGMAILKAILAGERDPVILAKLRNPHCQHSEDEIAKALQGTWRTEHLFALQQAVALYDFYHQQLALCDRQIKAHLETFADKSAGQPLPPKARRHKKTNEPRFDARTPLYRLAGVDLTTIEGIEENTALIILSEIGTDMHRWPSVKHFCSWLGLCPQHQISGGKVLSRRVRPGAHRVTVALRLAARTLHHSQSALGAFFRRMKARLGTPKAITATAHKLARLVYSLLQHGSAYVQQGLDAYEAQYRERKVTTMAKQAKALGYTLVPLAAQG

SEQ ID NO: 350347 - protein, 424 aa, unidentified
MKVTYPTCCGVDVHKSFLVATIIKTNGGIEPSYQKKRFSTFNNSILDFKSWLLENECHDICMESTGKYWVPVFNLLEDQINVTIANPKWVKAVKGNKDDTKDSKWIGDLFRLGLVKGSYIPCKSIRILREYTRYRYKLVSCRSSEKNRYQNALTVCNVALDSVVSDIFGKSSSSIIDYLLEQSATTINHEEIASKLLKRLKSKEDAVIESIEGYQMTDSQKYRMRLVRAHIDYITAEIDDVDKQIESLISSVPDYVKAIRFLTTIPGVKCDSAITIISEIGIDMSQFCNSKRLCCWAGLTPGNNESAGKKKSVRITCAGVYLKPALVQCAHAAVKSDKSPYYKKKYESLVKRRGKKRAIIAIARMILTAIYQMLSTGEVWNPSDLYKIDMPAPLVERQKAKAIKQAKKLLQKEGLLPPDEPLAS

SEQ ID NO: 350348 - protein, 437 aa, unidentified
MSLNRLQVGIDFSQKRADFCLLFPDGQPLVAHQAFPNSLPGYQKARQLLLDSLRTQSFDGLDVSGEATSYYWLPYFWQMAHDSELSACDISLFLLNPRQVFWFKKSLPPDDKTDNVDPFYIAERTRTRRPTSSWEPQDDWMPLRFYTRLRFHLAQSLTREKNYYLIYLFLLHNTYQRIKPFSDTFGVTSQQVLGGELSLAELVALPEEDLAEKLDAWSGGNLDDPLETAKKLHQVASESFVLSEPLALAVQRILDSTLEHVKFIEKQIEQAEQWITAEVETRHPEVRFLETVPGVGLVLAAGITAEIGDLQRFFRTKKWNKKHKCYRARTLREVEDAVAKLAGLWWPQNSSGDFVSENRPLAKTGNRYLRYYLVQAANGMRRHIPAYVSFYGSKSREATRFKHKRALVLTARKSIGLFVGLLHRKEAYRPQEVSGHL

SEQ ID NO: 350349 - protein, 343 aa, unidentified
MEQYVALDVSLQKVAICVLNASGHVVLEAEVASDPGALITFIQAKVPYAVRIGLESGPTSPWLWHSLKSAGLPVVCMDARHAHAALSVRPTKSDRNDARGLAEMVRMGWYKEVQVKSLAAHERMALLGVRRRLVDMRVEIDGQIRGILKTFGLVVGCGNSNAFAQRARILAQDHPVLSALIDKLIEVREVAVAKVAILDKEIRCFVRADPTLRRFMTVPGVGPVTALAFRSTVDEPDRFRRARSVGPYLGLTPRRYQSGETDRQGKISKCGDRFTRTCLYEAANVLLTKVQRWSPLKAWGTRLAKRIGSKKARVAIARKIAVILQCIWSDGTEFWWTKEAVKA

SEQ ID NO: 350350 - protein, 374 aa, unidentified
MKYSIKIIVGLDVHKKTIVVAVLYPGMSQVTERFTIENTTEALEKMVKRLGGQGPVCFCYEAGPCGYEVYRQLTRLGQECVVIAPSLTPKKAGDRVKTDQRDAEKLARYFRAGELTVVRVPSLEEEAARDLVRVREDALEDQQRARHRLSKFLLRQGRVYRTGKMWTQRHRRWLQSQRFEPAILEQTYQAYVRMMEETEERLRVVEVQVLALTEHPGYKTIVRSLCCLKGIKELTALTLVVETQDFERFRRAASYMGFTGLVSSESSSGERQWRGAITKTGNARLRRVLVEAAWHARHSVKVTGERLSRRRQGCPEPVVRLARRAEERLHRKYWHLVNRGKKPPIAAVACARELAGFVWAMAREVQQGPSALAA

SEQ ID NO: 350351 - protein, 362 aa, unidentified
MATITIGIDLAKLVFSACELDAAGHVRQRRDLRRDALGSWLAQLPAGTVVAMEACSGAHHWARYCLSLGLVPKLIAAQFVTPFRKSRTAKNDRNDAEAIATAARQGNMRFVPVKSIDQQARLAVHRVREGYKVEALATSNRLRGLLAEFGVVVARQDQALRHAVGDLAIRDQLPGALLHLIDDLALHWKTVIERIVACDAAIESTASKDIRCVRARQVIGVGALTADALVATVGDAREFKNGRQMAAWLGLAPTQHSSGGKSRLGTISCRGDSYLRTLLIQGARSSLQRAKAVAIEKATPEQLWIRDLVARLPFGKVLVAIANKHARQLWAMLAREEDYDAHAWLKHPMVQRPRSTRPFQTA

SEQ ID NO: 350352 - protein, 345 aa, unidentified
MREIIRIGMDTSKHIFVLHGVDAEERPVLRKKLSRKQVLEFFAKLPPTVIGMEACGASQYWARELGKLGHEVKLMAPQLVKPYVMRNKNDGRDAEGLCEAMGRPSMRFVPVKTAEQQAALMLAGLRDGLIARRTQLSNAIRGYAAELGLIAPKGLDKIEPLLARIAQDESLPAMAREVFAVQGRQYAVLQAELKQIEARLLAWHRADATSQRLAQIPSIGPITATRLVMKTPDPRAFRSGRHFAAWLGLTPKDHSTAGKTRLGKITRAGDEDLRRLFVAGATSVIQQARRGRGNPSRWLVALLKRKPPKLAAVALANKVARIAWKLMATGESYDAARLNAMPAAT

SEQ ID NO: 350353 - protein, 319 aa, unidentified
MSETVLGIDVAKKKLDVCLMMDGKVLAKKFDNDTKGIKLLQGWLRSLKIERAHVCLEATGTYGEMVAEFMYEHGHRVSVVNPSRIEAFARSDLKRNKTDTADARTIAQFCREKDPDDWHPLPPEIKQLQALSRRVDVLEKMLAAEHNRLGTAPRSVAPSVKRVITDLKKEIDQIQRLIKDHIDNNPDLRQQSELLQTIPGIGEKTASLLLGEIEFRSFSSARALAAHVGVTPRRYQSGTSLNRTRLSKIGNGRIRKALYFPAIVAVRCNQVISPFARRLRENGKTPMQVVGAAMRKLIHIAYGVIKNNRPFTPNAGLTA

SEQ ID NO: 350354 - protein, 412 aa, unidentified
MQTLIERGCGLDVHQATVVACLLIVRKDGKVQKEMRTFGTATRELVGLRAWLLSEGCTHVAMESTGVYWKPIYAILEGALEIVVANAQHIKKVPGRKTDVKDAEWIADLLCHGLLRSSFVPPKPIRELRDLMRYRRKLVESQAAERNRLLKVLETANIKLANVATDVFGMSGRLMLRALIEGKATPQEMAELAKGLLRKKIPELQLALEGKLEEHHRFLLELQLQRLEAAEKDLAALEQRIRQKLEPYAAQLALLDEIPGVDWTLAAVIIAELGVDMSVFGSVSQLASWAGVCPGNNESAGKRKSSRIPSGNVYLKSGLVEAANAAGRAKGTYLRDKFFRLKARRGYKRAVVAIAHKILVAIYHMLSQQVSYNDLGDLYLDKLNKNHLTRNLVHRLERLGYAVTLTLQQKAA

SEQ ID NO: 350355 - protein, 366 aa, unidentified
MKKIITVAKNRNEIFKQQQLTIGVDLGDRISHYGILDETGNVILEQSVPTTPKGIQQVFSKISRCRIALETGTHSPWLSRLLTQLGHEVIVAHARNVQLITESSRKDDRLDARTLARLARIDPELLGPVRHRSAKAQIHLTAIRARATLVSARTALVNAARGLTKSYGERLPKCGTEQMNREIAKGLSPELRDVLEPLLGEIESLNERIAEYDRRIEQIAKEVYPEVALLKQVKGVGTLIALTYVLTLDDPHRFRRSRDAGCFLGLRPGRRNSGMSEPQMHISKEGDFYLRTLMVQGAHYILGPFGQDSDLRRWGLKLAERGGKNAKKRAVVAVARKLAVLLHRLWVSGEVYEPLRNNHEVVSAVA

SEQ ID NO: 350356 - protein, 340 aa, unidentified
MNISVIGLDLAKSIFHLVGLDRHGKQGLKKKLRRTQMLPYFANLKPCTVAMEACASAHYWARELRKLGHQVKLLPAQHVKPYVRGNKNDYNDALGIAEASRVPQMREVAVKSIEQQSIQALHRLRRSAVGDRTALCNQVRGLLAEFGITLNQGVATLRKAIPCLLEDAENGLHALFRDALSLKYEQLCQLDELVKNLSDTIQKEANAHPEMKLLQSIPGYGPILSSTFYSVIGDGKGFRKGRDASASIGVVPRQHSTGGKNVLLGISKKGDKYLRSLMVHGARSLIKHAHKKEDALSVWVTALIERRGKNKATVALANKLTRIGWAVVRTGKPYKENYAV

SEQ ID NO: 350357 - protein, 318 aa, unidentified
MSETLFVGIDVSRDTLEVGSTGHSNTSQHANEPDAIEALAAELVAANPSLIVLEATGGYEFEAACALQAAGLAVAVVNPRQARDFARSMGALAKTDHLDARMLAEFARVLHQHPERDRFVKPLADAELQRLQALVLRRRQLVGMLTSERQRLRMAHASARPSIENTIEFLKAQVQDLERDCAAHIEAHHAQLASALRSVKGIGPATMATLIAELPELGRLGRRKIAALVGVAPLNRDSGQMRGQRSIWGGRADVRRALYMATLVAVRRNTVFQQFYQRLVIAGKPKKVALVAAMRKLLTVLNAIAKTGQHWNAALHHT

SEQ ID NO: 350358 - protein, 458 aa, unidentified
MGRGTTSGAKIKSRPEKRKHSRVLDRINHNAGGIDAGSEYHYVAVPDRVSPSPRKFATTTAGLYELVDWLIEAGVDTVAVEATGVYCVPLLEVLEERGLEVVLAKPSSLKSVNDRQKSDMLDCQWIQLLHTFGLLRGSHRPAEMVATYRTYNRQRQMLIQQASTAIEHMKKALTSMNVRVELAVTDMTGKTGMAIIRAILKGERNPVELARMRDGRCGKSEQEIAEALFGKYTDDHLFELDQAVRTWDHFQVLIAECNAKLEEQGEKFEKKADRKDIPPPRRIEHVRKNVLTFDARSLFYELLGQDLTQIDGISTGTVSAFLAEVGTDVEAFESAKHFASWLRLSPGSNQSGGKNRSGKNRPTSNRLATALRIAAQTLSRSRSALGAFYRRKRAQLGAEKAITAAAHKLARMIYFTLKEQRSYVDPGPDHYTQQHRDRILKAMEKRAKQLGYQLVKAS

SEQ ID NO: 350359 - protein, 351 aa, unidentified
MSQQVGTTIAVIGIDIGKNSFHVVGLDQRGAIVLRQRWSRSQVERRLANMPPCLVGMEACVGAHHLSRKLKALGHDARLMPAKYVRPYSKGQKNDFRDAEAIAEAVQRPTMKFVATKTADQLDLQALHRVRERLVSQRTGIINQIRAFLLERGVAVRQGQRFLRIELPRLLTAPPDVLSPRMVRVIEDLAGDWRRLDQRIEALSAEIEAIARRDAGCQRLMSVPGIGPIISSAMVAAIGKGDGFGKGRDFAAWLGLVPKQISTGDRTILGKISKRGNRYLRVLFVQAAWVVLIKPKSWERHGLKRWLEAARKRLHRNVLAIALANKLARIAWSVLANHRNFETTRILVAAQ

SEQ ID NO: 350360 - protein, 328 aa, unidentified
MCTLGIDVSKNKIDLCLLIAGPGGKKKHKVLTNEPAVARKVVDWLNAQKCVPESVTVVLEATGIYHENLAYGLHEAGVSVCMANPCRVREFAHGMDILNKNDAVDAFVLACYGELKSPAVWVPPSPEVRKLRALLRQRDALREDVQRTVNRLEKANSTSTPQEVIRSLERMKSWLNEELARIEKLITDHTDNDPGLKADLDLLKSIKGVKDQVGREMLVLLKDGTFKSASQVAACLGLTPVEKTSGSSVRGRPHMSKTGPSGVRAKLYVAALTASRWNKQAKAIYERLVAKGKAKKAALGAVMRKLVHLCFGVLKTRLPWDENYVATA

SEQ ID NO: 350361 - protein, 406 aa, unidentified
MPRNKPPPTRFIGLDVHKHYLIAIGVDVELGQVLGPQRVQLAHLEKWMLKTLTLQDAVALEMTTNSFQLYDDLLPHVHSVTLVHPPHVKLITRAQVMTDKIAALILARLHAVGLLPPVWVPPVEVRDQRALLAQRSKMVRLRTQAKNRLHAVLHRHHILPCEGGLFTADAREWWLDLPVTPLERVRVQGDLDTLTFAQSQVDRLIKTLVELAAQDERVVLLVQLPGISIVNALTLLAAIGDISRFPSAKQLVGYAGLGARVHDSGQTRRTGKITKAGRRDLRTAMVEAAHTAARVHPHWGRELKRLEPRLGRNKAIVAIARKLLVAVWHVLTKECADRFTDPARIARKLTQHANLLGKANRPAGQTVGEYVRRQLDRLGLAADLAAIQWGTRRIPLPPSQLVSADR

SEQ ID NO: 350362 - protein, 351 aa, unidentified
MENITAVGIDLSKNVMHLHGINHTGRGILRKKVLRARFLEELVKLPAGTKLFMEACSGAHYWCNQIEKLGYQARQIDGRAVRRYVKSQKNDFRDAEAIAEASTREHINFVTTKSVEQLELQAIQRVRERLIKNRTALSNEIRGFLTELGIVLPKSISQLAHYLQRRAYLEDERVTATFSAIISELSEELNELNTRVSRIESSLNERAKAMPVVKRLQSVPGIGPITAISLVAAFGNAAQFKNGRHLAAACGLVPRQHSTGGKTSLGSITKRGNSHIRCLVIHGARNLARYATAKKKCDKQSLWIRKLHAAKGTNLTAVAVANKNVRIAFHILRNADTWFDADRAHDSDLIQ

SEQ ID NO: 350363 - protein, 349 aa, unidentified
MRHFQPTADTRFYAGVDLHARSLFLCILDTDGHTRLARNLPAAPEPFLKAVAPFRDGLLVACECMHCWYWLADTCRDQHIAFVLGHAWAMKAVHGSKTKCDRQDAEAIARLLKGGNFPPAYAYPREKRGLRDLLRARLRLVRQRAELYGHVHTARRQANLPPVSSDVKYKSKRSGITADIADPFVRRRVEANLALLEPLDTTIRQLETDLEDAAQAQFPTELAVLQSTPGVGPVLSLTILLEIDTIDRFDTRQQFCSYARLCGAVQESANKRVGVGNRNAGNAWLTCAFSEAAVLSAQKDERIGGLLQRLASKLGKPKAYSALAHKLGRAFYHMLHTKEVFDIQKFVRH

SEQ ID NO: 350364 - protein, 421 aa, unidentified
MQTNMQHPELTRTYVGCDSHQNTHTFVFLTCFHKKLGEVTVGSAPSEFPKFLKQAKKYLQPGTEFVFAFEDCSAYGRAFVKFLVERGYLVKHANAVLVAGMRSTSTASDKTDSHDAECCAKVLINEFDKLPHANPQDKYWTLSTLVTRRNDITKNNVGVKNSLHHLLAENYPHYKTFFSSIIRNSALAFYEAYPAPHYLDNVTVETLAEFLHSASKGRLSTTKATLILQTVERDKVQSTEYQDTRDFNIRSLIRQIKSNLAELAAIDCEIEKMLAHFDYPLTSIKGIDTLTAAKLISEIGDIRRFKNAKALAKYSGVSPVTFASGMTKLQMANERGNRKLNEIFYRIALTSVMPIGSKGALINPIFRDYYLKKISEGKLKNQALKCVMRRLVNIVFSVMKHNRPYQNPQLGYMPPAEKQAA

SEQ ID NO: 350365 - protein, 343 aa, unidentified
MAYYVGLDVSLKTTAICVVDRDQNIVWQGSADTHPEMILNALDRWIGSVVRIGLETGSSSPWLARALKARNLPVIVMDARRAAAALKARPVKTDRADARALAEMLQSGWYTEVFVKSEESHRMKALLSARDQLVRNKRTFFGQIRGMLRPFGIRLPARQGTRKFDEAARAACRHDDLLYACVNALLEALGAIEAQIAALDKRVRAMVQTSKACWYLTSVPCVGPITALAFAAAIEDPGRFRRSRDVGAYLGLTPRRWQSGEKDIVGVISKQGDAMARHCLYEAANCLLTTWGGRSALKSWGLRLVKRVGAKKARVAVARKLACLLLGLWKAESHYDEDQVRTA

SEQ ID NO: 350366 - protein, 359 aa, unidentified
MLTQSNKIDFSGQHFYVGLDVHLKSWKVSIMAEKLTLKTFSQDPNPELLHHYLVKNFPNGIYHSAYEAGFCGYWIHNRLIALGISNIVVNPADIPTTDKEKVNKTDKRDSKKIARSLRNGDLKGIHVSSLKSLEDRCLLRIRGTLVKDLTRYKNRIKSFLYFHGIEMPEAFSKSATHWSKRFMNWLGSIELTEISAKKSLNLLIVESQHLRLTLLNALRGIQELSRSEAYANNVRLLQTIPGIGTLTAMIILTEMDTINRFANFDQLCSFIGLIPSTNSSGEKENIGEITHRGNNYLRSAIVESAWIAARWDLSLNKCFHDYCKRMESNKAIIRIARKLLNRIRFVLKNNQPYVCSVIK

SEQ ID NO: 350367 - protein, 354 aa, unidentified
MSQTLKTAIAVVGIDIGKNSFHVVGLDQRGAIALRQKWSRGQVEARFANMPPCLIGMEACVGAHHLSRKLKALGHDGRLMPAKYVRPYSKGQKNDFRDAEAIAEAVQRPTMKFVATKTADQLDLQALHRVRERLVSQRTGIINQIRAFLLERGVAVRQGLRFLRAELPRILATPPDVLSPRMVRVIEGLAGDWRRLDERIENLSGEIEAVARQDAGCERLMSVPGIGPIISSAMVAAIGTGDVFSKGRDFAAWLGLVPRQISTGDRTILGKISKRGNRYLRVLFVQAAWVVLIKPKSWERHGLKPWIEAAKKRLHRNVLAIALANKLARIAWSVLARGRAFEVSKLDVAAAQPA

SEQ ID NO: 350368 - protein, 343 aa, unidentified
MQKITTIGLDIAKSVFQVHGVDAQGKVVIRRQLRRRYVLAFFQKLPPCLVGIEACASSHHWSRELQTLGHTVRLMPAAYVKPYVKRQKNDAADAEAICEAVTRANMRFVKTKTVEQQSCLTLHRTRHLFTRQQTAVINAIRAHLAEFGIVAPVGRNGVEELLEVVADPSDKRVPEVARACLTALGAQLRVLKVRILEFDRMINAWHRSSETSRRLDEIPGIGPALATALVASVADPKDFPSARDFSAWIGLVPRQHSSGGKEKLGGISKQGDRYLRGLFTAGALAVIRYAKVHGTKHRPWLSALLARRPTKVAALALANKIARMAWAMMARSERYREPVELAA

SEQ ID NO: 350369 - protein, 295 aa, unidentified
MGNSTTTSWVAMDTAAERIHVAIFRGEEATPSEEFEVKADAQGIGRLKKKLEKETGPVKCVYEAGPCGYGLYRTLNGSGYPCQVIAPSLTPRKPGERVKTNRLDARRLGNYYRGGQLTPVRIPDEQQEALRDLVRGRDDVRRNLQQSRQRLSGFLLRHGYHFKEGSRWTRKHWAWVKAIQFKQELAQMVVEEYITGVETQIEQMKRFDQKLHEISQRPEYAAKVSAYSVLRGIQTTGAMTIIAEGGDLRQYGWAPQFMASIGIVPGEESTGERRKPRSITKTGNAYLRRILIEAG

SEQ ID NO: 350370 - protein, 389 aa, unidentified
MEARTVNNLPPAGIDDDAVRCLIAIELSKKSWIVAVNTPLSDKISRHTLKACDGKELLDLCERIRTRAARETKKRVEIVSCYEAGYDGFWLHRLLEAHGIRNYVIDPASLQVDRRARRAKSDGIDVEKLLRSLMAYLRGEPKVWSVVRVPSVAEEDDRRLHRERGRLINERIQHVNRIKGLLAIHGIYNYQPLRRDRMQQLERLRTADGRTLSPRLKAEIRRELQRLELVIGMIKTIEAERDAIASTKTETEHTSGKKIQDLVKIKSIGPEFATTLVGEVFYRSFDNRKQVASYVGLTPAHFQSGAMCRDQGISKAGNAKARTVMVELAWLWLRHQPDSPLSVWFRERVGKLKGRIRRITIVAVARKLLIALWRYLETGLVPTGAALKV

SEQ ID NO: 350371 - protein, 310 aa, unidentified
MANQYVGIDVAKAMLDVALGSDGELVQVENSEAGIARLLEQLGEVAPTLVVLEATGGYESVVAGAIVGRGIPVAVVNPRQVRDFAKATGVLAKTDRIDARVLARFAEAVRPEPRPLPTAEAKELEEYLSRRRQLVDMLTMEKNRQSIAATERMKKSLKKHIDWLEEALRRANDDIDKAIRNSPAWREQEDLLRSMPGIGPVSARTMLAELPELGQLNRKKIAALVGVAPLNRDSGTLHGSRTCWGGRASVRQVLYMAALSAVRCNPVIRRTYAALRARGKKHKVALVACMRKLLTILTAMVRDQRRWSPS

SEQ ID NO: 350372 - protein, 316 aa, unidentified
MTILTSPTVVGVDVAKAEIVVYREDLETIQIVVNDRKTLGRWLKTLPAQSAIALEATSTYHLDTAELAHEMGHQVYMVDAYRLSHYRESIGQRAKTDPCDARLLARYLASEQGRLRVWSPPPQAYKVLKSLLRRRAELINLRVSITLSWSSEPLLKNELAQQLKSFKQAEQSIQKLLQKVSKEAGITENIKRCKAIEGVGELTATGLATAFMRGHFVSSDAFIAFLGMDLRAKDSGTKNGTRRLSKKGDGEIRRLAHNAAMAACRSPTWKPFYESYLARGLAKTEALVILARKLCRVAFALMKNQSEYQPNLKLVV

SEQ ID NO: 350373 - protein, 394 aa, unidentified
MEKIIVGVDPHKLSATIEVVDDHEKALASGRFATDKAGYAAMRKHVAAWPDAVWAVEGSNGAGRSLAQRLLADGEHVVDVPAKLAGRARMLDTGHGRKTDAHDAHSVAVAAVRAKEPRVLTLDPELEALRMLVDRREELARQRTQTANRLQRLLAKLTPGKAKKDITTGQAKQILASVRPRDLVGKTRRRLAAEQLADLVVIEKKMKAMGTELRALVAASGSHLMDLHGVGPIVAARVLADVGDVTRFADRNRFASWTGTAPIEASSGETMRHRLSRAGNRRMNHMIHIAAATQIRLDTEGRAYYRRKLATGKSRMEAMRCLKRRISDALYRQLIADARAANASPGGNCGASQESSAVDLPPHIDTSDQPLPGPTEPTLQPSRRPRKAAALKAG

SEQ ID NO: 350374 - protein, 401 aa, unidentified
MKQLWCGLDWASKTHAVCVVDDSGGIRARFEVPNTGQSFAGLVKRLLKLKVAGVAIERADGPLVEALLEAKLTVHMVPPSMVKAVRARYGAAGAKSDPGDAYVLADLLRTDHHRLAPLRPDSSATKGLRALTRARKDLVEARVALTNQLLAQLGVCFPGAVGLFGDLHSGVAAAFLRRYPTAAKATSLTEARLGAFLRRIHYCGRTPVPELLRRIKEAPQAALGPEEDEPRGACVLALVEAIQVCQGRARELEADIVERLEIHPDAHVFTSLPRAGHGVRAASLLAEIGDARQRFPDAESLMALAGAAPVTRASGKHRVVSFRWACDKKLRAAVVDFADDSRRASPWARDIYQRSIAKGHTHPHAVRILARAWLRVIWRCWQDRTPYDVSKHRGAVVLMTA

SEQ ID NO: 350375 - protein, 401 aa, unidentified
MGVLVGVDWGCGAHAVCVIDAKGMVLDRFEVGHDRVGLAVLVTRLQKHGAPGVIPIAIERPSGLLVDALVEAGFVVTPVHPNVLKACRARYRAVAAKSDPDDAFILADILRTDGHRLRPLAPQSDAIKALRGLVRGRDDLVGTKVALAHQLTALLESFWPGAARIFSALASPIALAFLERYPTPEAAARLGPKRLAGFLAQHRYSGRRSPEALLERLRSAPEGGAGEAEGQAKGELVRALARTLQALVAEIAKLSSRIEHAIAALPDGRIVMSFPRAGTICAAQILAELGDVRARFPSEHQLAAEAGVAPVTYQSGKSRGVGWRWACNKRLRAALARLADNSRHQSPWAADVYRRARARGCDHPHAIRILARAWARVLWRAWTDRVPYDPGQHRGAQAFAA

SEQ ID NO: 350376 - protein, 369 aa, unidentified
MADRITYVGLDVHKESIVVAVASGGLRGEVREYGRIANTATALDRLLRKLGGEGMTLRFCYEAGPCGYGIQRRLSTQGHECVVVAPSLIPKRAGDRVKTDRRDAASLAKLHRAGELTAVWVPDARHEAMRDLVRARLDAVHSLRRARQQLSGFLLRQGCHYGRPAWTKLHRRWLAGLTFDQAVHHLVLEDYIAAVEAAMARRDRLTAQIEAMLPDWTLAPVVAALQTMRGMALVNAATLIAELGDLSRFTNPRQLMAYLGLVPSEHSSGASVKRGGITKAGNGAARRLLIEAAWSYRFPARLSRELLLRQENQPRPIRDIAWKGQVRLCARYRRLTRAAKPANVVTTAIARELTGFVWAIARQVAVSPH

SEQ ID NO: 350377 - protein, 346 aa, unidentified
MSNKVIFNLDELFISVGIDVGADFSWMSIALPNQQFVGKPYKILHNSIDSLTTAVSKIKEAEELYSLESRIFLESTGIYHYPLFCYLRDKGFNCSVINPIITKNSTNINIRKVHNDRFDSKKAALVGLKPDLKVSLMPSDLALNCRNLCREYYDLMDNRSAYVNKLQGELRMAFPQYLGIFSKVTINTSLTLLETYTSPSAFLEADKQEIIDIIKSTARFGLTYAQNKYNAIIQAATDANQFGYIIDSNIKRIRLYISFIRKYDEEINGILESLHKLVDSNEDSKFVKQIHLIETFKGAGFLSAVSIMGEIGDFSAFSKPKQLFAYFGLDPAVKQSGSLTPILVAV

SEQ ID NO: 350378 - protein, 495 aa, unidentified
MNKTVYPVRSQVVNEIFSQENRFDKILIVPLDHAKTNHTVQFCYATGEHLFKKAMTVYNDPRGLKYLIDRLRKTCENKQIEQKNVVICCEDPPQYMLNFIHGLQSAGYKFVSVNATEASRYRSNNRASSDSLDLDGIAQALINRRAMDIRPVDELYTNLKTATRSRRRLVMNETALKNRIHKCVDILFPGFLNEKNTGITPFTPVCLWLMEKNFSVIKLRRIAVKTLLEGLKRHRISKPEEVFVKLKKCSNEVLIPPPEVVSYYQKSLAAKVKLLRCMQETSHFEENEAARFLVQSPGFYILSIPGIGIKYASHIMAEYGDPAFWKSVDKMASFGGIVSRQKQTGGREKRDPSVQYLPKDCNKILKDYLLQAAQHTGKTLHPFRKIMPEYDGSHTLQQHFEHFENNECKSKLRNAKLLLKIILCLVKEQRFYEPEKDWFENMTIDEHIRFHSHALDNIKHKLNGYDLSGIPAENNFFLKEEQTLHDLIEFRKNNH

SEQ ID NO: 350379 - protein, 434 aa, unidentified
MWKDALLVVFQKASDEFLGGAAMEVVYPRCSGLDVHKRFVVACLSLIQNGERHKEIRQFSTMTSDIQALKEWLKAAGCSHIAMESTGVYWKPIFHVLEGEFEICLVNAQHMKAVPGRKTDVKDAEWIADLLQHGLLKASFIPSSEQQAVRDLTRTRTRLIQERNRLVNRIQKVLEDANIKLASVVSDIMGMTGQAILTALGAGQEDAECLAHLAQGKLIKKQDQLKAALQGKLISHHRVLLGELLQLIATLDRSIAHLDREIAERLRQHDGLIDRIDEVTGLSRRSIEVLLGELGWDMSRFPDAAHAASWVGICPGNHETGGKRLSGRIRQGNRWAKTVLIQAAHAAAQTQTYLGEQYRRIRTRRGAKRAAVAVGHSILVIFYQMVKTGESYHEKGSDYFITAHKQKIQQRLVRQLERLGNTVILQPKGETALA

SEQ ID NO: 350380 - protein, 372 aa, unidentified
MNYNTVYVGMDVHKESFSLCAYTIEAEKASHYQRTEADYKKVLNYLEFLRTIYGGDANFICGYEAGCLGYTLYHQLMANNVKCIILAPTTMLEQRSKKRIKTDKRDAEIIAKCLAQHNYSPVHIPTAKDEETKEFLRMRDDHKLALKKVKQQILAFCLRHNYRYDGNSHWTAAHLKWLKALILEALYKEILDEYLLTYQTLSDKLERLDKRIEELATQDEYKEAVKKLCCFIGVKTHTALSVLVEVGDFKRFASAQHFASYLGLVPGENSSGDDQNRLGITKAGNRHVRLLLTEASQCYARGQVGFKSKELKARQSGNTPAVIAYADKANERLRRRYYKMVLNKCKKHNVVKTAIARELACFIWGMMTYNIA

SEQ ID NO: 350381 - protein, 347 aa, unidentified
MNISIVGIDLAKNVFQVCALSVDGTIAWNRKVSRAKLSGVLEELPKSTLIAMEACSSSNFWGRYLLERGFRVAVIPAQHVKPFAKHQKNDSNDALAICEAAMRPGIHRVAVKTLDQQDIKTLRTVRRRLVQQRTATGNQIRAIAGEYGVIFPIGLRRLLVALPEALEDAQNGLSHVARTTLAQSLERLRETDRSIDDLTQEITQICKKTPRYADLQSIPGMGPLVSAALISEIGDGRQFSNGRQMAAWLGLVPRQHSSGGKQVLGSITKHGNNDLRVLLVHGARAVVRFAQRRLDPLGEWVRALIARRGRHRAIVALANKLARIAWSVLVKDQRFDAALAFAPARTA

SEQ ID NO: 350382 - protein, 406 aa, unidentified
MTLIAGLDVSKADVVVCLIDTALPLPEPGKLYIESDFPRLKTDVQGLKTLLAMKPDACVLEPTGTNYSRFWCHKLKEAGIRLLLVSHSKVRRYRETILSENKDDEGDALALAYYGAQFEGQIGAFLRNRDPIAERLRELCHRLDHLNRMQSPQVNRIRQDLAWQCPELASKGLNAVVFWGWLAGERKSALYDKVAAETIGSGITDYTREMASLLIQLWPHEEKLTREMLDLLSDARFLPYRKVFARFGFGQKLEAILLSHIYPLSNFLGEDGLPMVVRTRSKKNPDKQTDKHLSERRFLKVLGCSPTREWSGKKQSGMKQSRLAGSGQVRTALWQWVFTRIETKQATPKNLPSTGWEIDGVRVEGTLKEYFEYLKGAKTNIKLARSRLCAKTVKALFRELVEAGVK

SEQ ID NO: 350383 - protein, 475 aa, unidentified
MNIKGTKKKNQVITANIFEQQEFLKKAEVIREKLTASTWHELETNGKFGKNEKLSFVSDDMLILGCDVGSDTHYVRAIDTRGRELSKSAFPFSNTLEGFQGLMDWATKLAASNDKEQIILGLEPTGHYWFCLATWLIGNGISVVQVNPYAVKQTKEVEDNSQLKDDRKDPKLIANLVKDGNFGMPYLPEKLYADIRRLSMLRDQINEDRIRDLNRLHREMKIYFPEYKDAFGKIDGAFCLEVLKVAPFPEDLVTLGAEGIRQIWHEAKLRGRGYVNATSIFENAKKSIGIQDGTESGKLAVKWFVRRMIESNEQLADIESRLHQMCMEIPYAENILAISGIGENTLSGILAEMGDISRFDDVKEIQKLSGLGLVACSSGKHKGETKISHRGRKRLRYWLFQAAKSAVAHADEFKELHAYYTTRKDNPLKKMQSLIVIACKILRVIFAILTKGMTYDPKKMLRDIVRPNEQSVQVA

SEQ ID NO: 350384 - protein, 354 aa, unidentified
MKKVIKQVLGIDVAQKELVVCLGRMFEDVRSELYSHKAFPNTTKGFSTMLQWTKKLTDSNVAVSYVMEATGVYHEPLAYYLKDHGLIVNIVLPNKISNYAKSLTVKTVTDKTASEAIALFGLERHLEQWNKPSPLYKKMKQLTRERDQIIGERTVVKNQFHAEKSEAEPNKTSLARIKKRIMLLDKQEKEIMAELSELVSADEKIHKTVSLLCSLPGVGLLTATIVLGETSGFDLIRNKRQLSSYAGLDVQEKESGTSVKGKPRISKKGNRFLRKAMHLPALSCKRNDEYFNNIFTRLLSRPGVKMKAIVPLQRRLLEMMYTLYKTNKEYDKNYSKNHVPELLESIHNKGVNKN

SEQ ID NO: 350385 - protein, 341 aa, unidentified
MEQYVGLDVSMRETSIAVRQNGKRVWRGKCPSDPKALADVIRQRAPDAVRVVLETGPLSTWLYHALKAEALPVVCIDARHAKAALDMAPNKTDANDADGLAQIAEVGFYREVRVKGYAPMLARTLVGARGQLLRISIQLSNQIRGVMKTFGLIVPKGAGRVFETHARALLGTNEAVARVVLPLLEAWRAVRARAAELDRQLIAAARTSPACRRLMTIPGVGAVTAASFVAAVEAPENFGTSRAVGAWLGLTPRRYQSGEADYDGHISRRGDGHLRALLYEAAAAVLTRARADSALRSWGLELKEKVGFKRAAVAVARKLAVIMHAMLKTGAAFDPAPNTTA

SEQ ID NO: 350386 - protein, 441 aa, unidentified
MSAKKNQKGKLRKINYKVSGIDLSSEEMFIATVDKNVRQFSTFTKGLEEATSYLKQEKIEKIVMEATGIYWIPVYEHFEKAGFHVSLVNGAHAKNVPGRKTDVLDSEWLRELHTYGLLRASFIPNAQIRELRYYVRLRDDHIAMGAAHINIIQKNLDMMNIKLHKVIDSVMSKSGQRIIRAILDGVRDPEKLWELCQEYIRNEKKQMVIDSLKGNYRKEYLFGIGQALQMWEQYQLKLKQCDREIEKILGKMTENQANPKTLSTPKAMKQNKPEIQDFHRLMVKLTGGTDITAIAGINDYSTLKIIAEIGLDLSKFKNEKFFTSWLGLSPSAHQSAKTRRRKGRRHCNRAGFIFRQLAVNVGNGKHTALSSFYKRIRARSGKMVAIKATARKIAVYFFNLMTKGFAFVEEGIKKYEKRYAEQQQKFIQRKAQEMGYMLVKV

SEQ ID NO: 350387 - protein, 423 aa, unidentified
MSQNQPEIQYAAFLAIDWADQKHVWSLQDANSGTCERGEVDHMPEAVEAWVAQMSQRFAGRPIAVAVEQSRGALVFLLSKYEQLHIFPVPPAMTANLRKAFYSSGAKSDPTDADLLLDLVQRHREKLRRLSPDTEATRLIQNLVEERRRLVDEKTAQSNRLEAHLKIYFPQIPRWFGDLGSPLVCALLERWPTLEALQKARPDTLRSFFRKHHSRKEELIESRLKAIGEAMPALKDRAVVEAKVAVVKVSVQLIQDLHEGIEGLNRQIQEAAEAHPDFFIFDSLPGAGAVMAPRLLAAFGSQRERYQNAAEVQTFSGIAPVTESSGKSSWVHFRFACSKFLRQSFHEWAALSIPQSKWARAYYELQCRRGKKHHAAVRALAFKWIRIIYRCWKERVAYDENVYLAALAKHNSPLVTATGAEAL

SEQ ID NO: 350388 - protein, 345 aa, unidentified
MTMLADDVEVVIGVDTHKQAHTAAVVDRVGGVSATFEFAANPTGYRKMLGRVAAHGGIRVWGVEGTGAYGAGLTEFLRGAGERVVEVERPGRPLRRNGAKSDAIDAVRAAREVLASKHQIEPRQRGEREAVRVLFATRNGAVVARTKALNHLQALVVTAPQRLRSRFEGLTTTELARQSARLRLGADRPIEDQATVRAMRACARRALACEQEADELEAELERILVGQVPHLLAEPGIGPISAAAIYLAWSHHGRIRNDAAFAALAGVCPLPASSGQTTRHRLNRGGDRQLNRALHTITLSRLSCHPETKAYATRRLAEGKTPREIRRCLKRHIARRIYKLLEHTP

SEQ ID NO: 350389 - protein, 344 aa, unidentified
MPTIVGGLDIHRKQLTFDYMDTVTGEVSWGQIVPADRAHFRSWLTRFENPAEVAFAAEACTGWRYVAGELQRAGMEAHLAEPADTAAARGRKRRAKTDRADARLQRDLLMQGRLPECWIPPEHILECRALLELYHDLRTEHTAWVQRIHAVLFHQGAPAFHDLSRADAPAQLAELARGHLSPAGQVQIGIYLRMLAVLEAELAAVRHRLLAAARQLRGAKVLAESIYGVGPMTGLALTCWLGGAGRFSSARKAVRFAGLDITVYSSDGKRSPGHLSRQGPPVLRWAVYEAGKTHARLVAPDHGYYAAVKDRKDGKRAALSEARKIIRRACHILSELGDDALAAA

SEQ ID NO: 350390 - protein, 345 aa, unidentified
MYRTRVGVDLAKEVIQVCIYRNKKVQSNIEMTPNEFLCWLVNAKPVTIIFEACGTSNYWKQKAISAGHDARLISAKLVATVRQNQKTDKNDALAIVQAASLPDVIFIGGKTVEQQQLQTIKRLRELAVKHQGACQKQLVSLLLELNIRISNRKGGIISAIDGVLEDATNGLSAECRIAIDTAKVYLKVSIEAVQHYDDCLEKSVTTHADCKKLLKLEGVGTMNAINLYLALGCSDIGVFSKGKDASACIGLTPIQHSSGGFVKLGSIGKHCKNSMLRSQLICGAMAAVNQAVIREAKTRKDVWLKRLVERRGKKCAAVALANKTVRTAFAMLTQGTEYEAELLVA

SEQ ID NO: 350391 - protein, 386 aa, unidentified
MATPTTPRMTQDSLSQSTLYLAFELGKNTWKLGFTIGMAQQPRERTIPAGALETLQKEITRAKQRFGLPEDACVVSCYEAGRDGFWLHRYLAAHGVTNHVIDSASIEVNRRQRRAKTDRLDVHKLLTMLLRHMAGERKVWSVVRVPSVEEEDRRQLHRELTTAKCDRTRLSNRIKGLLAGHGVQLVLQGDVDAQLDQLHQWDGSPLPPALLSRLKRAWQQVCFLTAHIQTLEAQRWAVLRRREDAVVDQVRQLFTLRGIGVNSAWLYVMEFFAWRDFQTPKQVGALAGLTPTPSQSGQSRRELGIAKAGNRHMRAMAIEIAWAWRRFQPTSALSQWYEQRFGHGSARLRKIGIVALARKLLIALWRFLKTGVLPEGAVLKAETLGQ

SEQ ID NO: 350392 - protein, 351 aa, unidentified
MMICSLDLGKFKSVACFFNTEKQAYRFETILTKVSHVNHLFESNEIDLVVMEACGPSGWISDVCHQRKLKTIVCSTNDEAWAWKNIKRKTDRDDALRLAKMAMMKDLTSVHVPSPQIREQRAIIKYRKNLDYRITRIKNGIRASFANRGIEIDTGARAWNTGRAHIDSHRKPIHECGTDDLWKGQLDSELKQLDELTTEMEAIEQRLELFAADNVHIQRVMTIPGVGRKTAEMLVAAIDDPHRFKSARHISSYLGMTPRQYQSGEMDRSGRISKRGPRMLRSMLLECAWASLRYNEWSKLTFNRIHGGATTRRKKAGIALARKIAVVAWAMMRDETNWNASKLIAEEKARS

SEQ ID NO: 350393 - protein, 377 aa, unidentified
MKKELYLGLDVHKDCIITAAAEEGRKGEVRESGAISNDLHAVEKWIGRLRQAHGKEVILRGCYEAGPCGFGLARRLKQLGVECAVVAPSLIPTRSGERVKTDKRDALKLARLLRAGELTPVYIPESTDEAIRDLWRARSDAVDDRRRSRHRLKGFLLRHGYRYQGKSSWSAAHERYLRELVLPHPAMKVILEEYLQSIAAAGERIARCEEAMRDLLEQWRLAPAVRALMAMKGFQKVAAMILVSELGEVHRFVHPRQVMAYLGLVPTENSSSERRRQGHITKCGNAHARWLLVECAQHYASPPKVSKELSRRQEGQSQEVRAISWRAQNRLHRRYTRLLARRLQRNKAMVAVARELCGFIWELLRTQPCYQAQSRSV

SEQ ID NO: 350394 - protein, 341 aa, unidentified
MEAYYIGLDLHKKIIAYCIKTGSGTIVNRGTIATTRSALTAWIERLPRPWIGAMEATMFTGWVYDFLKPHAQELKVAHPEMLKAITAAKKKNDREDAEKICDLLRVDLLPQCYMAPQELRELRRVLRYRNHVVRMATTVKNKMSGLLMEVGAEYSKKRLHGRSYFAKLLDTVEDVPASVKELLRFSRGGLEIFTAVQKKLLSALRDNSLIHERVQRLMTIPGVGEVTALTWALEIGDPSRFFARQAISYCGLCSAQKESGGKETRGPISKKRNKHLQTILVEAAKLAPHWNLQLAELHARELTRGNRNRATLAVARKLVIYLLAIDKSGMDFVMHRELAAA

SEQ ID NO: 350395 - protein, 366 aa, unidentified
MEKSSTAFVGMDVHKDSIDVGIADATEARHYGRVGGDAASVDRVVRKLRSAHRHLVFVYEAGPCGFWLYRRLKARGLQCMVVSPSKTPRNAADRVKTDRRDSLKLARLARAGELEPIYVPDAKDEAVRDLVRVREDAVCMQRQARQRLAALLLRNEIRYSGKTAWTQAHRRWIAHLKLPNPAQQIAFEEYVQAVHEAGERLERLTKAIGAELEHWRWRPVVEALQALRGVSAIHAVRIVAELGDLSRFESPRGLMGYLGLIPSEDSSGPRRRQGSITKAGNSSARRALVEAAHAYAHPARVSWVIARRHTGLPKSVCDIAWKAQLRLCTRFRRLRARGVLKNKVVVAVARELSGFVWAIAREVKPD

SEQ ID NO: 350396 - protein, 463 aa, unidentified
MKHNSTRERKEKSARRSVSLLERIQPDAAGIDCGQNSHFVAVPPERDPQPVHEFRTFTADLHRLADWLMQCGVKTVAMESTGVFWIPLYEILEQRGLQVVLVNARDVHNVPGRKSDVKDCEWLRELHSVGLLRASFRPAAAIVPLRSFMRQRETLVEEAATRIHRMQKALSEMNLKLHTVLTDLTGQTGLRIVRSILAGERNPERLAAHRDYHCHASQAEIVAALTGNYRTEHLFALRHNFATNEFLLKQIAECDGEIEALLTTLAAQQPPPSAPLPAARRRRASKHQPQFDIRGPLHRLTGGADLSQIDSIGPQTALQLIAEIGTDMRRWPSEYHFASWTSLAPNNRISGGRLLSSRTPPSANRVAAILRRCAMSVGKTSTALGAFYRRLAIRIGKAKAITATARKLALLVYRVLSGQLVYNDPGADAYHQLNRTRELKSLRKRARLLGFHLVDQTTGEVTT

SEQ ID NO: 350397 - protein, 434 aa, unidentified
MLGQSNPRSYCATDFDIFLGMDVDKKSIDFTCSDSKGILSSLHIPNNSEHLVRYVRKHFPGQRVIWAYEAGPTGYGLYDGLTAAGFTCLVSPASMIPTAPGQRVKTNRLDSKKITEALRAGQLKSIHVPSSTYRHLRHLTKIRDLVVRQIGGTKCRIKTLLLFEGIPFPEAPQKSHHWSRSVIAQLHRLPCSEAVKFRLGRYLEALEFQRQQYLKITRERRNFCRHESELKRCLSYLTSIPGIGQIIAPHLLARIGHWQNLEEHRVHELAAFLGLVPAEHSTGDRVHRGSITRAGDKRLRSKLLQGAWTAIRQDPELREFYRSVYRRHAPQVAARKAIVAVARKLTTRIFAVLKEQRPFVLRSEIHSRPLLPEEIGPRERLDASQKEEERTFRVSFSRQRLSRGLRPSGAHLSQCDGSKAVPRMAASLSGTKGA

SEQ ID NO: 350398 - protein, 461 aa, unidentified
MRKARKVAGRRGKKRVDVTANLEILHPHAAGIDVGNAQHYAAVPVGRDPQPVQTFGSFTADLHRLGQWLRACQIETVVMQATGVYWIALYEVLEGYGFKVYVVNAKHTKTLPGRKTDVLECQWLQKLHTFGLLNNSFLPPEEIRVLRTYLRQRENLVAGAGTCIQQMQKVLTQMNVQLANVLSDLSGKSGLEILKAILSGERDPYRLAALADPRVQASRKEIAQSLEGHWREDLLFVLRQVHDLYFFHLDNIAECDRRIQAHLQTLESKVDLASQPLPQPTSLPRRKHIPQTNLQEELYRIAGVDLTRIDGIQVQTAQVVLSETGVNMTHWEDEHHFASWLGLSPNHQITGGKVIRRGTKKVLNRATTALRLAAQTLHHSQSYLGAKYRRLRAKLGAPKAITAMAHQLARLIYRLLRFGTEYHDKGMEHYQRQYRKNQIEWLKKQAAQLNMQLIPNTGVAR

SEQ ID NO: 350399 - protein, 354 aa, unidentified
MSQTPSTAIAVIGIDIGKNSFHVVGHDARGAIVLRQKWSRGQVEARLANLPPCLIGMEACVGAHHLSRKLASLGHDARLMPAKYVRPYSKGQKNDFNDAEAIAEAVQRPTMKFVATKTAEQLDLQALHRVRERLVSQRTGIINQIRAFMLERGIAVRQGIGFLRTELPTILATRTDALSPRMLRVIEELAGDWRRLDQRIDGLSGEIEALARQDQACSRLMTVPGIGPIISSAMVAAIGTGDVFSKGRDFGAWLGLVPKQISTGDRTILGKISRRGNRYLRVLFVQAAWVVLVRIKNWERYGLKSWIEAAKRRLHHNVLAIALANKLARIAWAVLAKGRAFELTRTDDAGVRSA

SEQ ID NO: 350400 - protein, 317 aa, unidentified
MEVSPIFVGIDVCKAQLDVAIRPSAQILWVPNDKAGIKTLVKHLEKLRPTLVVLESTGGLERQVMLALVGAEISVVMANPRQVRDFAKSTGQLAKTDRIDAAVLAHYAEAIRPQPRPLPDELTLELRALTVRRRQIIDMIVAEKNHLATASKAIKKRITAHITYLEQELDDADQDLDRFIGKNPLWKQNQEILCSTPSIGPVSSRTMLAELPELGTLGRKQISALVGVAPFPRDSGTLKGRRTIWGGRASVRGALFMATLVATRFNPVIRDFYKRLKAKGKPSKVALVACMHKLLTILNAMIKNKTRWSENFSLKTT

SEQ ID NO: 350401 - protein, 315 aa, unidentified
MVEQVVVGIDVSKAKLDVALLPGGEQFTVSNDRHGIGELLRRVSPLAPSRVVLEATGKLEQLAVSELAAAGLPVVVINPAQVRHYAKARGKWAKTDPIDARLIAEFARDLEPELRPLPDAETQALAALCQRRNQLLEMEQMEKSRLQRAPGANQKSIKAMLRFVRRQVEQVEKQIEHSIRHSPLWQAKRELLESMPAIGKVNSSTLLARLPELGQFTRQKICALVGVAPYNDDSGQWHGRRHIAGGRGGVRQVLYMATLSAVRCNPSLRDYYQRLLGRGVEPKAALIAVLRKMLTILNAMVRDNTPWRPPCPIPA

SEQ ID NO: 350402 - protein, 317 aa, unidentified
MNALVNQKEVSVGVDTGKDQLDIYIRPLDIHFSVSNSKSGIAEAIKKLKSYKPTRIVIEATGRLEYAFILACSKANLPFIVANPAHIRKFAGAKGQLAKTDKLDAELIAHYGEAMNPPLSTIKPAVMQLMSDLLSRRRQLMKMQTMEKNRFKAMPKNITGLIKPILTTIKNQLEKLDLKLLKLIENCDEYKLRNDILQSVPGIGNIVAFSLLSDMPELGYITNKEAASLVGVAPFNRESGRYKGQRRIRGGRYQVRTLMYMSMLSAIQCNPVFKATYQRLVLAGKPKKLAIIACIRKMIIIVNTMLRHEVMWETKTA

SEQ ID NO: 350403 - protein, 408 aa, unidentified
MGRAAEVVAPSSSLRTDGGCPVAQVNDLSRSLTAFDPISTLVVVVEMSKASWLVSGVVPGVERQPLKKLEPDATALLRLIERWRNEAVRAGRPISRIALAYEAGRDGFWLARWLIARGIEAHVIHSASVAVSRERKRAKTDRLDAAMLMRVFLGWLRGERGHCGMVAIPTMEEEDARRPSRERESLVDERSRITNRMKSALARLGIRGFKPHLRKAPERLAGLRTAEGTGLPANITDEFRRDMARLALVREQISSIEKTRAERLERAPDTGPHAMVRLLARVIGIGIETADMLVREILSRKLRDRRAVARYAGLTGSPDESGLKRREKGLAKAGNARVRRGLIQLAWRFLMFQKDSALAQWYRTRTEGPSGARKTTMIVALARKLLIALWRLVTTGEVPDGVELRPAA

SEQ ID NO: 350404 - protein, 342 aa, unidentified
MGTITTIGLDIAKSVFQVHGIDATGEVVVRRRLSRGRILAFFEKLPRCLVGMEACNTSHYWARELIALGHDVRLMPAQYVKPYVKRGKNDAADAEAICEAVARPTMRFVAVKTPEQQSTMMLHRVRLMLNRQRTQLSNAMRAHMSEFGVVGPVGRMGLERLMAVIADREDLRIPPDARVCLEMLAAQLAVVKEQILENDRRIRARARETEVGRRLMEIPGVGPLLASAFVASIADPTAFKSGRDVAAWIGLVPKQNSSGGKERLGSISRAGNRYLRQMLVVGAMAVIRHVERHGTKRRWLIQLLARRAKKVAAVALANKTARTIWALMTNGERYREPTVTLP

SEQ ID NO: 350405 - protein, 375 aa, unidentified
MKETVRFLGLDVHAETIAVAIAEPGGEVRSLGMIANREESIRKLVKKLGSVERLRACYEAGPTGYVLYWQLAELGVKCEVIAPTLVPVKAGDRVKTDRRDAEKLARSYRSDDLTAVWVPDESSEALRDLVRAREAAKQDQLRARHRLSKFLLRSGQRPAPGVKTWTQIYMTWIRQIRFVQMAQESTRLDYLHEVEHMGERVARLEQAIAEAAKLAPPGLQEVIKGLQALRGIAHISAVTIAAELGEFSRFEGARQLMGYSGIVPSEDSSGERTQRGSITKTGNAHLRRIAVEAAWSYRLRPCVGPALRKRQEGVAEEIKEIAWKAQHRLHKRYCRLAATRKDQRKIITALGRELLGFIWAIGIKAEAAARPPRSA

SEQ ID NO: 350406 - protein, 337 aa, unidentified
MESKLFIGCDIAQDSFTFCLRSDTEIIFQGEVSNSLKSIKKWLSDLKKVQRLDLSHITFCMEHTGVYGLILMRTLHERSLIVCVESAANIKLSLGLQRGKNDKVDARRIAEYAMRYTDRLKHWKPKRAILQKLQLLNGMRARLLKTRSILSRNIQEVKVFMGKEEYSILKKGTQAALSGIEKDIKQADKQIADLIKSDENLRKLSRLVTSVHGVGMVTCSALLVKTNEFQDFTEAKKFACTAGLAPFDHSSGKSIRGKTRVSHRAHKDLKTLLHMCAVGCIGRKGEYKDYFERKVAAGKNKMLVINAVRNKLVHRIFAVVRDQVMYQKNYQYNLVMS

SEQ ID NO: 350407 - protein, 359 aa, unidentified
MEEGQGTNRCVVGGVDTHKDLHVAAVVDEHDRALESRCFATTRQGYRQMLAWMHSFGQLRRIGIECTGTYGAGLLRFLQSAGVEVLEVTAPDKSDRRKRGKDDDLDAQNAAHAAFAGHRTVTPKSRDGMIESLRVLKTCRKTAIAARKVALQLIHSTIVCAPDDLREALRQMTRMQLIRTLAAWRPDLSDYRNVMSAYRIALKSLGRRFLELHDEIADLDVMIGAIVDELAPSLVARNSIGRESAAQLLLTAGDNSDRLHSEASFAALCGVSPVPASSGKVTRHRLNRGGDRAANSALHIIAIGRLRTDARTKIYVARRIAEGHSKLEAIRCLKRYIAREVYTLISHRKREINQAQIAT

SEQ ID NO: 350408 - protein, 408 aa, unidentified
MNPLFVGIDVSSKNNVAYLMKPDGSKHSSFSVQNNLGGAKLLSERIVSALGSMQLERVVIGLEATSIYGDSLVYALREDGRLGRFQRKIHVLNPKQVRKFKEAYSDLPKNDWVDAFVIADHLRFGRINREVYMDDYRYKALQTLTRARFDVIQNLTREKQRFANYLFLKCSGMAQDKDIQNTSATTIALMEHFETVDDLANADLEELTAFITETGRGKFADPDATAKAVRAAAKGSYRLPKTVNDTVNQAMAVSIASMRALKGQVKVLDKAIEQQFEIIPNTLTSIPGIGKVYSAGIIAEIGDIRRFESHASVAKYAGLVWNRNQSGGFEAQNSRMIKSGNRYLRYYLLEAANSVRRCDSEFRRYYDLKFKEVNKYQHKRALALTARKLVRLVFRLLKDNRLYIPPEG

SEQ ID NO: 350409 - protein, 483 aa, unidentified
MKAKPQEKNKRATNHPTQHHWHEMNRKQRRETMRKIQSEDLSLEVIHPDAAGIDIGNESHYAAVPPSRDSQPVRCFGCTTAELKAMAAWLQQCRIRTVAMQSTGVYWVAVYDILEQAGLEVYLVNARDTKNLPGHKSDVQESQWLMKLHTYGLLRNSFRPSQKIRTMRTYWRQRNDLVQSASRHILRVQKALTQMNVQLANVLSDISGVTGQAIIKAILAGERNPHKLAEFRDPRVQASEEEIAHYLERNWQPDLLFVLKQEQDGYEFCQQQMAECDRQLEQYLQSTEDRSHGAPLPEEKRKGRLKKKKGNKPQFDLREGLFRMSGTDLTRIDGIDVMTATTVISEAGYDMSKWKTENHFVSWLRLCPDNRISGGKVIGKGRLPTNNPVSIALKMAATTLRQSKTYLGAQFRRLRTRLGAPIAIKAMAAKLARLVYRMLRYGMKYVDQGAVFYELRHRELQIKHLKSKAEKLGYRVTPIPAAA

SEQ ID NO: 350410 - protein, 322 aa, unidentified
MTVYIGVDFHPYEQTVAYCDERDGEVRYRQFLHSDKQSLKAFYRKFGDEVVVGVEATGCLWWFEKLLFENGIKVKIGDPRLIRRAALSRHKNDFRDAETILDLLVNGSFPEITPRSERSREMLTMLNHRHFLVKKRTSIANTLQAFARSKGLDKFRLQTLKRQKELLDAVSTDMERLIVISRFSLYNELSKEIAAFDAKLAEEADKDAKTRLLMTHPGIGVVTALALIHTLGDVRRFRRKEEVVAFVGLDPLEKSSGEKRRIGSISKHGSRLTRHLLGQAAQTCRDHGIKAHYLQVSRRRGRPKAKSRSGPQTAHQLLRHAS

SEQ ID NO: 350411 - protein, 345 aa, unidentified
MPSIVGGLDIHRKQITFDYADTVTGEVSCGQIAPADRAHLRAWLAGRFEHPEDAAFAVEACTGWRYVTEELAAAGIAAHLAEPADTAAQRGTKKRAKTDRADARLQRILLAQGRLPECWIPPAHVLECRALLELYHDLRTEHTAWVQRAHAVLFHQGAPVFCDLSRAEAPAELAALARGHLSPAGQIQVSACLRMLAVLDAELDAVRRRLLAAARHLRGARTLTEQVYGVGPVTALALTCWLGGAGRFSSARKAVRFAGLDITVHSSDRKRPPGRLSRQGPPVLRWALYEAGKTHARTAAPDHGYYAAVKDRKDGKRAALSEARKITRRACHILSELGDDALAMA

SEQ ID NO: 350412 - protein, 345 aa, unidentified
MTWFVSLDVSQKLTAICVVDETGRRLWRGQCATDPGQIERIVRGHAGEDARIGVETGPMTPWLVHELRGRGLDVTCLDARHASAALKMQMNKTDQNDAEGLAQIMRTGWYRPVHVKSLDAHRARALLGARAQLVGMTTRLSNHVRGVLKTFGMLPGAMRGLPFDRRVEELLADRDDLAPIVRPMLEAWRKLREQIAAFDKAVRALAKADPTCRLLMSVPGIGVLSVLAYVSTIEDQARFARSRSVGAHMGLTPRQYQSGEVDRSGRISKCGDTLARTLLYEAAVVLLTRVKRASSLKDWAQAIAKRSGPGKARVALARKLSVILHSIWRSGEPFRWSEQEQVQAA

SEQ ID NO: 350413 - protein, 405 aa, unidentified
MAVVMIGIDPHKGSHTALALDPDEVTLGQIRVRASSTQVENLLSWSAPWPDRIWAIEGATGLGRLLAQQLLAAGEQVLDVQPKLAARVRLLNTGAVNKNDPNDARSVAVAALRSPDIRTVAAEDHAAVMKVWVRRHRDLSRTRNRIVCRLHALLCDLVAGGFPKQILAVQATEVLARIDPADAVGQARLELAHELLEDLRRVDEQRRAAKRRLTKIVAASGSSVSEIYGAGPVVAATVIGDVGPISRFPTRDHFAAYNGTAPIEASSGNRTVHRLSRRGNRHLNHAIHMAAVSQISHRGTAGRAYYQRKIDAGMTTKSALRALKRKISDALYAQMIADARRAAQRPDQGGPGGQTGNDSASSATGSHPEPALRKSHSRTATNGTAASELKLICTTHNLLKLWHLT

SEQ ID NO: 350414 - protein, 368 aa, unidentified
MNSVKFIGMDVHKKSISIAIAEEGSRDSARIYGTINNDLDALDKFCRKMVSTASELHFVYEAGPCGYGIYRYLTGKGFNCMVTAPSMIPRKSGDRIKTDHRDAKMLARLHRAGELTAVYVPDPQDEAMRDLSRAREDAVIAGRKAKQRLNAFLLRHGMIYSGKTRWSKAHFNWLADIAMPHPAQQIAFQEYIDALHESLKRIDRLTEQIRQMAPDWRLAPVVGALQAARGISLIVAVTVLAEIGDLTRFRHPGELMAYLGLVPSVHASGGTAKRGGITKAGNAHARKALIEAAWSYRLQPRVSRVILKRHENVSEAVRQIAWKAQQRLCGRFKRLRAKGKPTQVVVTAIARELSAFLWAIAKQMQPVT

SEQ ID NO: 350415 - protein, 350 aa, unidentified
MSQLIRIGMDTSKKVFQLHGVDADERVVLSRKLSRHQMIRFFANLPPTVIGIEACGASHHWARTLGALGHEVRLMAPQLVKPYVRRSKNDAADAEALCEAMSRPTMRFVPVKTVGQQAALMLVGMRERLIGRRTQLANSIRGYAAEFGVTAPAGLSRVAPFLQQIASEETLPPLARDLFAQMAEEYEVLMEQIRELDKKLATWHRSQEVSRRLSGIPGIGPLAAALLLMKAPDPHLFRSGRDFAAWIGLTPRDHSSGGKVRHGGITRAGDSRLRSTLVVGATTVLRHVRQNGQSRLATPWLLSLLSRKKPKPAAVALANRMARIAWKLMTSGETYRKPVDAVALAAAAAC

SEQ ID NO: 350416 - protein, 384 aa, unidentified
MAVARVIVGVDVAKNWVDVNQHEANEVERIVNARGDLEQFVRRYPTAALAIESTNTYHRLLVEIALAHGLTVYLINGYQLSRYAESLNIRMRNDRIDAKLLARFLDHEIDHLHGYEPKSEALSKLWELIKRRALLVKQNVQLTQSLASLGEFKSSVRALLAANRRLVSLLEKKAYALAKSLGWQPELDRLQTLPGVGDLSALVLLAAYRTHPFASRDAYIAFMGLDVRTKDSGKHRGKRKLSKKGDSEYRRVLYNAAMKAKRDQGYFTRYYESLVSRGIAGTGALVAIARKLAQLAFVLLQTQTDFDPSKLKGARASLMPSSSARRLQSLRRNRRTGLIAVQPHTLVRVRMRAHPDCPPARRSCSPQTTHSQLVPQHRISHAWI

SEQ ID NO: 350417 - protein, 414 aa, unidentified
MKSARNTLPTEPVNGITCGIDWARDDHALSIVDAKGREVTRKTITDDAAGLRDLLSTLDSAGAREVAIERPDGPVVDTLLDAGVTVVVISPNQVKNLRGRYGSAGNKDDRFDAFVLADTLRTDRARLHPLLPDTPATIALRQTCRARKDLVAHRVAVANQLRAHLKIVFPGAVGLFAAIDSPISLKFLTRFDSQDRADWLSLTRLTAWLANASYSGRTHPRELHRRLTSAPRATNEVTGAHITGAFVATLTALNTQITALDDSIADQLAAHADAHIFTSLPRSGSFRAARLLSEIGDCRARYPTPEALACLAGVAPSTRQSGKITHVGFRWAADKQLRDAVCDFAGDSRRANPWAADLYNRARARGHDHPHAVRILARAWLYVIWHCWQDHTTYDPTKHRALQALLERPQPGAA

SEQ ID NO: 350418 - protein, 330 aa, unidentified
MEFKEFIGIDVSKSHLDIFMYTKGQHIRLPNTISGLDKMINWIWRLIDLTPTKVLFGFEHTGLYSLPLSLFLDEKHYCFTIIPGLQLKRSRGIVRGKNDKADAKGIAEYIYEKREKITLCQMPSTTILKLKRLLSFRERMVKERAAFKGRLKEYKSFLAPEEHKVLFDCHHQSITHLDQQIEKVEAELYKLLKEDEKLVKQFKLINTIKGVGPQTALLLIVLTGGFTQFEAWRKFASYSGVAPFPNESGTIIRKHKISHLANKRMKAILSCCACSAIKHNPEMRMYYEKRVSQGKHKMSTLNIIRNKLLARIFAVVKRETPYVEIFNYAA

SEQ ID NO: 350419 - protein, 327 aa, unidentified
MTEYTVGIDISKAKLDVAHYREGSYQEATFDNSRDGYRRLAKWLKKGRARQAHICIEATGQYGEEVAEHLYNRGYPVSMVNPARIKAYGDSQLKRNKNDRQDARLIAHFCSTQRPSLWQPPPPEVKELRALTRHLASLKADRTRVLNRRQSGVSSVLVLQTLDEHLAFLDAQITLLKEQIQDLIDQNPSLRQQRDLLTSIPGIGEATAASFIAEVPDVSRFDSAGQLAAHAGLTPRHHHSGSSVHRPGRLAKTGSVRLRTLFYLPALAAKRCNPIVRALAERLEARGKKKMTIVGAAMHKLVHLAYGVLKTGRPFDADYLVNVQGTA

SEQ ID NO: 350420 - protein, 340 aa, unidentified
MEKRYIGIDLHRNRFTCCVRLQNERTYLSQWELADLPKFVKKLRSSDEVAVEITSNARLLHDAVAAHVARVVVVDSNQFRVISRSVKKTDPNDARLLALYLSKGLLPEVRMKNKQQARVASLTQTRDTLVKQRSALKNKVNNILSAQGLNLPKEALSSEKRLDEVLSLPFDELLLVELRVMVDQIRSLNKSTAELDQAIAKASSELEGHTSLTSIKGIGATTSAILLSVIGDVNDFSDEGRLASYFGIVPRVSNSNQTERSGRIHKRGSKLGRTALVQSALIAAHYSPYLKRFYEQVKARRGAGKAIIALARKFLGIIYRTLKNKWVFEDFPNFVLAEVA

SEQ ID NO: 350421 - protein, 321 aa, unidentified
MTYVGIDVSKATFVVAYSSAKGSRTNSFKNTAKGIHEFIQTISVAEHHCVLEATGNYSALLVYLLSEAGIAVSLENPLKIKNFARVMLSVTKTDEIDARLIAMYGEKMQPTSYKLRNDTILILKQKRTVIRQLKKQLIATGNLKGSMEVLPFFDPKCKKTIEKTIIFLEKQIKGLEEELASLAQSEYKKQMDLLTSIKGIGVTLAAALIMATGGFTYFDNAKQLTRYLGLSPTYQQSGTSVNVKGHINRNGDSSLRSQLYVAAFASLRCNTECKACFDRLRSNGKPGKVALIAVANKLIRQAFAVVTQEKLYVDGFKSEKP

SEQ ID NO: 350422 - protein, 406 aa, unidentified
MLEAMVRSCAGLDVHRRQVVCTVIREGKHETREYGAFYRELKELARWLQLEQVEIAVMESTGIFWKSVYASLEEAGIEGRVVNARHVKQVPGRKTDVQDSEWLAELARCGLLRPSFIPPRDLRELRLLTRYRRKLTGVLAGEKNRLHKVLDDAGIRLGCVVSDIDGVSARAMVEALIKGGSTPEQIAGQALGRLQKKKDALQLALEGEISDRHRLVLQKILAHVKWLRRQMVLIDAQIVAAMKPYQEEWKLLQTIPGLDVLSAAMLLAEIGVDMSRFGSKHRLCSWAGMCPGNQESAGKRKSGRSRKANSYVRSLLCEAANSARKTHSQFQGLYKGLVIRRGHKRAIVAVGHKILQVVYILITRKEPYKDPEIDYEALVVHRNAPRWLDALNKYGYLHRLKNPSRE

SEQ ID NO: 350423 - protein, 371 aa, unidentified
MKSILSVGMDVHKNSFSLCAYDGYTGEIVSESTFASDVKLVIKFIETPKSRYENDVEIKCGYEAGCLGYSLYKSLTARGVDCVILAPTTMQVSAKNKMVKNDRMDALNIAKNLASGSYKTVYIPDEEDVEIKEYIRMIHDFKKELQRVKQEICAFVLRHGYQYDGKSKWTIRYMNWIRELEMSEIQRETLNEYIAEMENLNDKIDRFMNRINEIYQSERYHEKVSKLRCFKGIETFAAMTIQVETADFERFPSAKAYASYTGLTTGEHSSGDKNNRIGITKQGNTVIRKTLVECAQALVKGNVYAKKSQRLKSRQKGMDVNIIVYADKATERLKKKYQKLIERNVPRNKAIVAVARELACFIWGMETGNIH

SEQ ID NO: 350424 - protein, 338 aa, unidentified
MKLYGGIDLHSNNCVINLMDENGIVIFKKRVANSLDAILLIFQAYQDAIVGLVVESTYNGYWLVDGLMEAGFKMHLANTAAIQQYSGLKHGDDDSDAHWLATMLRLDILPEGYIYPKEERMVRDLLRKRLQLVQQNTLNLLAIQGLYIRHLNVPLNSNKLKQLTPEKLALDFSDDNVRMAVASNLLMHDCLTGQINIIEKFLKKQLKLREEFVQLTSIDGIGLILGLTIMLETGDITRFNNVGNYASYCRCVNGARYSNGKKKGNSNTKNGNKYLAWAFVEAANFAIRYNETVKRYYQRKLTKSHPAVAKKTVAHKLARACFYVLRDQVAFDVNKAFG

SEQ ID NO: 350425 - protein, 429 aa, unidentified
MSPLHEEVVMGYIGGGLHRAFVERIRGVEPERLLAVPIDVGKHTAAALVSDFWGEVVAAPFTFDLNERGFETFARIVAGAGAGREARWTRVGLEQAGHYHQVILARLLDHGLDVALLNPAQVKENRAQDLLRSLKSDARDLGAMAELLIRGKGRPAGTIDEAMAAQAALAAHRSRRVKARTALKNQVHKSLDLVFPGLSGCFHKILDTKLGRLLVTEGMDPVRIRRLGTERLRGFCLRRGVRASRSKAAQVVQAARAALGLPHGIARVHATVLASDVALLGRLDSEIAEIERGLAEVLPRTPAAILTTMPRVGVVRASLYGAALGDPTRFRTSAQVYRLSGLVPKLYESAGRRRAGTRISREGKAELREAIIELGRALRQGHPDFARYARELEARGKGPGVVACALGHRANRVAFALVRDQVAFDPARW

SEQ ID NO: 350426 - protein, 428 aa, unidentified
MKFKQSDRQNQRIERITTSHLVVGIDMAKETQVAQATNYRGIVLTNQHLSFKNTLQGFEKLQRWMEGLQQKHRLKSIIIGMEPTGHYWYSLANWLVEKGLNVVLVNPATTKRNKENRDNCPSKSDPKDALVIADVVCRGYYYEYIRQATHYQRLRTLMSDREFWVTNSVRMQNRIVRWLDIRFPEYASVFKDWTCPRSRATLKEFPSPLDLKGQSTSEVITGWRKYMSRAGGSTGIQKAAELLSKAVQSVGETMALNEAKQDLHRLLEEYERIVSILNEIEQEIAALLAEIPIASQLRSVKGLGTIYIAAILAGAGDLKQYVHGRQLLRKAGLNLAESMSGKRKGQVILSKRGDSTLRKYLYLATLTLVGTNPIFRQLHENNVQVKRISKQKSIFKLLGKLARIIVGMVQHKDMFTPEKTVLTYSQAA

SEQ ID NO: 350427 - protein, 339 aa, unidentified
MQVTRIGIDLAKHVFQVHGVGADGSIAVRRKLRRSEVITFFAKLPPVLVGMEACATSHYWARELGTLGHTVRLIPPAYVKPFVKRQKNDAADAEAICEAVSRPSMRFVPAKSAEQQGVLVLHRTRDLLIRQRTMLANALRAHMAEFGVIEKLGGAGLETLMKQIEADEVSALPGVAREGLLLLAGQIRDTQSRVTEIEKRILAWHRASEVSQRLETIPGIGPIIASAIAATVTEPGLFASGRQLSAWLGLVPRQHSSGGKERLRGITKQGDPYIRRLLIIGATAVLRFSRHRAPSDWTSGLLTRRPPLVVAVALANKMARVAWAILTRGEIYRTRAVPA

SEQ ID NO: 350428 - protein, 280 aa, unidentified
MTNQATQYLALDVHQATIVATLRSADGSIRMRATVPTEARAVVNLVRGAGPHVRVALEEGAQAQWLHDVIAPVADEVVVCNTRGRSEIENKNDRIDADRLSELLRIGAVKPIFHSALETLSLKELVRNYLTLVEDATKTKLRIKSMFRARGIRTPGRQVFIPEHRGEWLDQLPSPGARLHAEHLLTALDTLTALRRRAKAAMVVEAQKRTAWKVLRSIPVLGPVRISCLMAIVVTPHRFRTKRQLWPYCGLAVVTRSSGEREFADGALGVVASTRRPLVV

SEQ ID NO: 350429 - protein, 356 aa, unidentified
MATQQKQSCMFVGIDVHKDTHTAVGISPYGEKLFEITVGNYKEDFETLEEKVKEHSGVLSPYIGLEDVRGYGERLAGYLYQKYPVYHVPSILVDRARQNATHPEKSDSLDALGVAKVMIQSIDTLLPYTISQESEKAKQLKEISIDREDLVLERTRLKNQVHTLLYRIYNTEYEQKFKDPFSLKALRFWRNAKPKCDPFLLKTMKRKVRRLLDIHVEVSELEKDMEKLLKNNYTIQTASGCGVVLASTIIGEIGDINRFTSPGSLSKYAGCSPRERSSGKKIRHVKSRSGNRRLNCAFHRMALAQISRMGNDRAKRYFKRKISEGKSKSQALVCLRRQMVNIVWMMMKHKTIYRNA

SEQ ID NO: 350430 - protein, 405 aa, unidentified
MERKQKDWFGPHRLYLGIDVGKSFHWAVGLDPDGSIRISRRLDNRQEDVDALLDEAGEGALVIVDQKNNIGSLVVRRCRAKGVDVGYLPGKAMKNAREMFPGTAKNDRIDAEAIAQTGIGLRTAIRPIAETDDLGASVSLVSSQLSYATRRATMARNRLHAVLLESDPAFEAAADLSSAWQLEAMAGFGGAKGLAAAGRRRYCTLCARQGVPAQARDAFWKAAMRSASSAFHPDAEDMLARSLAREILEADSERTELSAELGRLLQDDETYRCLLTIPGIGPKTASALATSIDISLFPGDSKLAAYCGLAPADHDSGSSIRSQRDAHGGNKALKNLLIFSCNSLVGTKNRFGRYYDACVARGMRHNKALKAVARKRLRVIYAVMRDRVPYVEPPADNVEKSPATA

SEQ ID NO: 350431 - protein, 521 aa, unidentified
MNDRFRRRKAVSIVFQFKVERSAGFKTGYFVMPVDITNPGAEVIVRSEGNQGVEVQVLKSYGIGIDCHSQFIAICVHVRNNQRIFKYMSEADTDWDSLVNAKEWVVDTIRNHSNPVPDLQQPLHYVIEATSTYHMPILRAWGGIPSVINPMLAGATKKKTDNLDAERLSFHDLTGVWSESFVASDNLQELRVLIAERNHYAKLATQCSNRINNIIVRFGITIGRGTSVTKNYEVRAIVEDLASESPSLHENICPDPLPADIKTLIQQEYMLYDMYVVEADSYMSRVRQKVYSMDWETKDGIISGSDMVRILCTTPGVGEITCFTWLAFVGTPRRFPNAKVLAAYCGLDPSLKVSAGHVTSTKKRGGCRTLHAILVSSADRIIRAHSEAFGRRGFLMAKSSGKWKKATNAVGRKLCTAMYHMMMSGQEFSYENYTIMKNATIFDISVDELPMLNSDFKRYIKILHENNIHTTTDMIAAYLSCSLGGVKGLGRKCFVTMQDFISHQHKYQNEYKKLYPTASAK

SEQ ID NO: 350432 - protein, 339 aa, unidentified
MKYTPVGVDIAKHLIQVHFIDEHTGEVIDKQLRRQDFLMFFCNRAPCLIGMEACRGSQHWGRELTKLGHKVRLLQAHFVKAFVMGNKNDVMDARAIWMAVQQPGKDIAVKTEEQQSVLVLHRSRRQLVKFRTMQINSLHGTLLEFGETIHKGRAAMERELPEALERMKERLPPYLITVLENQYNRLNELDSLIEDIEKKITSVARQNETCKRLLDIPGVGPLIATAAVATMGEASAFKSGREFAAYVGLVPKQTGSGGKIRLLGISKRGNTYLRALFIHSARAAALLPKEPGTWITELKKRRPTSVAIVAMANKLARTVWAIAAHGSKYDKNHVSIRSY

SEQ ID NO: 350433 - protein, 354 aa, unidentified
MSQTFNAAISVVGIDIGKNSFHIVGHDERGAIALRQKWSRSQVEARFANMPPCLIGMEACVGAHHLSRKLNSLGHDARLMPAKYVRPYSKGQKNDFRDAEAIAEAVQRPTMKFVATKTADQLDLQALHRVRERLVSQRTGIINQIRAFLLERGIAVRQGQRFLRAELPRILATPPDVLSPRMVRVIEGLAGDWRRLDERVEGLSSEIEAVARHDAGCERLMSVPGIGPIISSAMVAAIGAGEAFTKGRDFAAWLGLVPRQMSTGDRTILGRISKRGNRYLRVLFVQAAWVVLIKPKIWERHGLKPWIEAAKKRLHHNVLAIALANKLARIAWSVLARGRAFEVRKIDEPATQSV

SEQ ID NO: 350434 - protein, 349 aa, unidentified
MRFYNQPHRFYAGGDLHARTLYLHILDDQGQTRFEKNLVAKSETFLEAVAPFRDGLVVGVECMFAWYWLADLCEDEHIPFVLGHALYMKAIHGGKSKNDRIDAGKIATLLRGGLFPQAYVYPRTMREIRDLLRRRTFLVRQRAQFLTHIQNTNSQYNLPPLTKRLSYASNRSDPDLIDRFPFESVQRSIRSDLRMIDALDDEVRELELYLTRHAKIDDPNTYHLLKTIPGIGPIIALILLYEIHRIDRFPEVGNFASYARLVRCEHESAGKLTGHGLRKIGNGHLRWALGEAACLMLRCHEPAKRWLQRKEKKVGKPTALGILAAKVGRTVYHLWRKQQAFDAKKFLTS

SEQ ID NO: 350435 - protein, 412 aa, unidentified
MDVLYPRCCGLDVHKKTGVACCILSTKGRKPVKETRTFRTMTTDLLALADWLQEQGCSHVAMESTGVYWRPVYNLLEGQCELLVVNAQHIKAVPGRKTDVKDAAWLAELLRHGLLRGSFIPSKPQRQLRELTRYRSTLVQERARTLNRLQAVWEDANLKLASVVTDINGVSARAMLEAILAGQRDVAILADLARGRLRAKRDQLKEALEGRVTAHHSFLLTEHLSTLEYLAEAIERVSREIDQRLTVDQEAIVLLDTIPGVGQRAAESLIAEIGTDMSRFPSAKHLASWAGMCPGNHESGGKRLSGKTRKGNRWLRQVLVDIAPVASKTKNTYLAAQYKRIAARRGKKRALIAVGHTILTIVYMMLTRKQPYQDLGAAYFDQREQERVERRLVHRLERLGYEVSLQPRALAS

SEQ ID NO: 350436 - protein, 345 aa, unidentified
MNKPVTICSSTLYCGIDVSSRSLAVALIEPDHAVYQHEFANSASGHKALLVWLGKHNALVRVSLEATGIYSLDLALALDTAASIEVAVLNPKLVNRFAQTLRRSKTDAADAMVLAEYSQRMPFTAWQRPGIQELALRTISRYIESLVVDLAEVKNRLHAAECASTTPRALLVDLQQAQAALLRRLVKMRREAMKLIQAAAALRQRFTLLVSIPGIAEISALHILSELVLLAPEMTVRQWVAYSGLDPVHQVSGTSVHKPSHISRAGNRHLRHALYMPSLAAARFDPHMRAFYQALRARHKTGLQALMAVERKLLHAIYGIFKSGQPYDGKLLFPNIQLEVESIAG

SEQ ID NO: 350437 - protein, 438 aa, unidentified
MRAAKDIVVFRSGPLRYAALQNPKDFGLGLCYQTPLRCRRCEPSLLAATSLPKVVDPYAAEYMKARLRAEQCPPRAYNRTGWVTRTEARMREYISFDSHKYYTVMEREDIQTQVARQRRIEHAPDAIRAALRGCEADTPVAVEATGNWYWIVSEIEQAGLRPLLVHPRKAKLMMGMINKTDKLDVHGLNRLQRNGTLPTVWIPSADLRDLRELTRTRLMLSAQRTRLKNRLTATLAKYGRQHSEFTDAYGPRARTELRQRLEVLPTQTRFVSELLLQLLDFVQQQIQTIEQRLQELVQITPEMQLLQTLPGIGVILAATIALELGQIDRFASAAHLASYAGTTPRVHASGDKTRFGALRTDISQYLKWAFAEAGNSVALYHQRRPQRHVSQLYRRVRLRKGHGKAIGAVARHLAEATFYVWSRREAYRELTGGRSKAV

SEQ ID NO: 350438 - protein, 427 aa, unidentified
MKYTQNAKIMQITEKTLIIGVDIASEVHYARAFDFRGIELGKLIRFNNDAAGFKEFTAWAEEIKTKHDKSKVMVGMEPTAHYWFNIAPYLKDQSMKIVLVNPFHVKRSKELDDNNPTKNDRKDPKTIAMLVKDGRYMEPYIPEGVYSELRTAMETRWQIVKQLNGTRNRVLRWLSIYFPEFNKVFGDWEGKAALIVLKEFPLPAQIIELGAMGIVSRWKQDKMRAVGIKRAVALVEAAKTSVGVKEGIAAAINEITTLLEDYELKVKQYERVMAMVEKLALQIPGMQEILSIKGVGLIMAAGFVAEVGDAFRFEHSKQIVKLAGLNLKENSSGKHKGKSTISKRGRSRLRAMLFQGMLPMVAKNEEFKALHEYYTTREQNPLKKKQSLILLCCKLIRIFHTLLTKGVTYDPKKMMSDIKRLSMPAAA

SEQ ID NO: 350439 - protein, 319 aa, unidentified
MLVGIDVAKAELVVATRPGGERWTVENDERGVRTLVERLRRDAAELIVLEATGGYELLCVAALAAASLPVVVVNPRQVRDFAKATGQLAKTDRIDADILALFADRVRPAVRALPDTEAQELEALLARRRQLLEMLQAERNRLGQVFGRGKAPVKKSLKAHIAFLERELRMADTDLGDQVRQSPAWRERDDLLRSVPGVGPVLSLTLLANLPELGRLSRRAIAKLVGVAPLSRDSGTLRGRRFVQGGRASVRGVLYMGALVATKRNAVIRAFYTRLLAAGKPKKLALVACMRKLLTILNTMMRTGQRWCAEHADRGLIHA

SEQ ID NO: 350440 - protein, 350 aa, unidentified
MQKIYIGVDFHARQQTICYLTTDSGELLLHQLQHQDKAAVRAFYAQFTGQVIVGLEASGYSSWFERLLAELDCEVWLGHATEIRRRARWRHKNDRRDAELILDLMLHDEFPRLYLPPLQSREVLRMLRYRQKLIKIRTIGKNSLQALALQAGLAKGPHLFTKAGLQELRTAAMSPAMQWQREQWLQLLEPLNERLLQTMLWLKQQSQADQRISRLRTHPGVGLLTALCVVHSLEPVSRFANTRKVTAYAGLDPVERSSAERQRFLGISKGGSRVLRFLLVEAAHTAIRKDAELGRFYRRLAERHGRPKAKVAVSRKLLIRAYIMLRDEIDYAEFQRRAVAARLAPPAHGH

SEQ ID NO: 350441 - protein, 429 aa, unidentified
MEEEKSLELRISVDVGYRRHSVAMGLSSGEVLEEFEIDHRPEGFQEFFSRIEAQRKKRNCAVSVAMEGYNGHARPLDSLVRERGYRLYNLNNLKFARFKEIFPGAAKSDRIDARKGLELFQLSDHLPLAKEVLQEVSGTAPENEVLKRLTRRRRRLVNERVRVVNNLQADLQAVCPGLLEITGEASNQWFLNFLLSADTLPQLARLKRSTLLKIPSVGVKSAAIIEGWQKRSHFSQEVEWVSEMIQEDAKRCLELDEKIKRLQAKIAEVAKNSKIAKTLRSIPGFGAVCTSELAGEIGTIERFASEGSLSLYLGMSMLDNSSGKYQGTKAPKHVNTRAKAAMMIGVDRHRKYVPESQRYYEKKRSEGKKHNQAIRALGRHLSRIIYKMLTEERDYEIRPEKGDTKAKVGPRSFVKTKIRRPKISVKEKK

SEQ ID NO: 350442 - protein, 342 aa, unidentified
MKLYAAIDLHSNNSVLVLIDEQDRVVYQKRLPNELAVILMELSVYRCEVEGIVVESTYNWYWLVDGLMAEGYQVHLANTTAIQQYDGLKYTDDHSDARWLAHLLRLGILAEGHIYPRAERPVRDLLRKRSQLVRQRTTNLLSIQNLMTRNTGSSLSAKEVKGLDVQQIEELLPNSDLALAVKANLAVMMSADEQVKRLEQTILQRVQLRPQFRFLKTAPGIGEILALTIMLETGEIGRFPTVGNYASYCRCVGSQKISNDKKKGKGNTKNGNKYLAWAYVEAAHFAIQHHSRIKSFYQRKQAKSKSIVALKAIAHKLCRACYYIMRDQVAFDISKAFGPKKV

SEQ ID NO: 350443 - protein, 428 aa, unidentified
MDELDRNRLEEFRQLRQEVRHSEEYLIVGIDVAKDRHHAFFGTATGKTLLKRLAFSNDYEGFKKLLNHAEALRVRHDLKKVVYGMEPTSNYHKPLGEFLIHLGRTVVLVSGVTVKRNRESLDGRWDKHDAKDSANVADLISQGKCLYYEYPEARLSGLRGLVSLRRRLKKQEHGYKVRIRNHLIAQYYPEMDREWERLGGEGLSIMRWCFPPSEMTILDVEPFIERVTSGRIRMEKRRRLEAIWEKAGETIGCDGVPGVAHEARLMVEGLRQIREMIKETDDKIQELCHQFPEYPYLLTIPGFGPDVSSKVLGAIGDPDRFDNGKQVLKLAGLDLSADRSGKDSDKAIPQISKRGKADLRYALYQAGFIASTKNQGFMCYYTRKLRGREKERGIRTKMIVKLSAKMLLIAWTLMKKKEAFNPAYLNAE

SEQ ID NO: 350444 - protein, 347 aa, unidentified
MNHYAGLDVSLEETAICVVDSTGQIVKEARAASEPETLIAALREIDLPLERVGLEACSLTAWLHDELHSAGLPAVCIETRHANAAMKTMPNKTDRNDARALAQIMRTGWYRQVHVKSRQCRLWRSLLVARRTVLNEMRSIENVVRAVLREGGLKLGTPSRAAFAERVRDLMAEDASVKPLVDPLLTILVTMLDQFARLTKQVLDIVRREKVCRRLMSVPGVGPITALAFRATIDRPDRFRRSRDVGAHLGLTPARYQSGETDVSGRISRCGDELARTALYEAAHTLLVRSRKWSSLRAWGMKVARTRGMARARVAVARKLAVILHRMWSDETEFRFGRNPAAALAAA

SEQ ID NO: 350445 - protein, 360 aa, unidentified
MSKYTTIGMDLGNKKHTVCALAQDGKVLWRRDVENSPEALAAFFRENAGATVAMETGLCCRWISALAKSCGCDDVLVGNARKLAAIWKSKRKNDENDALLIAKLARADRELFHPVELRDDERHEMVQIIELRAVAVAQRTQAVNSVRGLCKAHGVFIKKCDASCFHKVAGESIPAGMAWKFKPMLRHLKEIVATVKRYDAMLEKYARAHFKEEVDLLQTIPSVGPVTSCAFVAHISDPKRFGSARDAGAYFGLIPGQDQSGDRDAPKHLTKTGSTLMRHLLVTAANYILRESSPDTALKRHGERISARGGKVARRKAKTAVARKLAVTMLAMLKSGKPYDDGLAAKKAATVEPAVTGLIA

SEQ ID NO: 350446 - protein, 329 aa, unidentified
MSGDYDGRQYVGIDLHRRRSVIVRTTEQGEQLGWVRIDNDPVALGLELAKAGPDPEVVLEATYGWYWAVDALQTAGAHVHLAHPLGVKGFAYRRVKNDVRDAADLADLLRMHRLPEAYIATPHERELRELVRHRAKLVALRSGLKAQVHATLAKQGQLPAASDVFGRAGTAWLRSAPLELVYRQRIDSLLELIDAYDGEIETFRTMIANRFTGHRGYRAIQQISGIGPTFAAVFVAEIGDINRFSRPEKLCCWAGLTPRHRESDTTVHRGPITKMGCGGRRRGLRLRSARVRGGCRGDRGWYRHSPGAVDIRLCGSRLRRSVPRADRPG

SEQ ID NO: 350447 - protein, 415 aa, unidentified
MEQMFPHCAGLDVHKKTVVACVLVTGADGKLQAVKRQFATTLAGLEQLAAWLLSYGVTHAVLESTGVYGKPVYNVLAPQCEVWVVNAQHVKQVPGRKTDWNDAEWLARLMCYGLLERSFIPDEAQRELRDLTRYRTRLTGERAAAANRLEKTLEDANLKITSVLTDIQGVSARAMLEALISGESAPEVMAELARGRLRAKLPQLEAALAGRMRPHHRFMLRELLTHLDHIGASIATVNERIAELTAPYEAIIQRLSAVTGIKRHTAEVILAEVGPDITPFPTAKHLASWACLCPGNNLSAGKRRSGKTRRGQPWLRAALVEAAWAASHSLDSYLAAQFQRLRARRGDKRAAVAVAHSILTIVWHLLANPEAVFTELGGDYFLKKNPEREQRRAVRKLEALGFTVTLTPAAAAAAA

SEQ ID NO: 350448 - protein, 342 aa, unidentified
MKPTIAVDLAKSVFEVAVSRHQGRVAERHRLSRARFLPFFAQRELVTVLLEACSSAHFWAREIEKLGHRVVLLPPHLVRPYRRRHHKTDRADAKALLEAFRNAEIHPVPAKSVEQQSLTALHRLRSGWLATRTARINAIRGVLRELGHTIPQGAGKVVPRVHELLDAESSIPFPLRAALIEACLEIEDLEQRARNASKQLEVLASEIPTVGHLLSVPGIGILTATALVAFVAEIHRFPSGRHFASYLGLCPRESSSGTIRRLGRISKRGDTYLRMLLIHGARSCLLAAKKRTEKLPLDTWVLDLEKRRGHNRAAVALANKMARIAWTVWREDRDYRIERMAA

SEQ ID NO: 350449 - protein, 351 aa, unidentified
MTLYIGVDLHTHQQTVAWCETETGETKTVDLAHNVDTVRSFYASLPGSAIVGIEASARAAWFENMLFETGHNLFVGNPVLIRKRAISRHKNDRRDAELILTLLMRGEFPSIWRRPAESSRILEVLRLRQSLVGQRTQTYNRLQCLAHNAGLPKGRMKTSAFQQKIKELGMEETDAMQRSHLFRLLENFNVQIDELEAWLQKKAAPDAKVQLLMTQKGVGYLTALTVVHTVGDVMRFTRLSRQITSFAGFDSLEGSSAGKVRFGPISKAGSSLLRFQLGQAAQIAARFDPRLKSFYKRLAKKKHRAVAKTAAARKLLVKLAIMLRDNITADEFDRRGPTVGNARQSRDLKGS

SEQ ID NO: 350450 - protein, 391 aa, unidentified
MVYLGIDVAKDKHDCYIVNSDGEILANVFTIPNDQAGFNLLLQRLKSVAPDLSKVKVGLEATGHYSYNILGFLLDKGLHTYVINPLHVNLFRKASNIRKTKTDPIDARTIAEMIMSNVVLTSYTAKSYHNEELKSLTRYRFDKVHERARLKTSVARLVSILFPELEKLVPTLHMHTVYALLTEFPGARQIASCHLTRLTHLLSESSKGRYKRDKAIQIREAARSSIGSVMPVKSLELKHTIHLIEVLTEEIDEIELSIKRIMDADPSPILTIPGISYRMGAMILSEIGDFSRFTSPDQILAYAGLSPSTYQSGKLDNAYPHMEKRGSHYLRFALFNATRYVCNWDPTFASYLAKKRAEGKHYYVAISHAAKKLVRLIFALVKSGQAYSPAT

SEQ ID NO: 350451 - protein, 317 aa, unidentified
MTDSVKVNVGIDVSKDFLDVHVGNVVLRRIPNRSSGLSVLKRILSRYSVSLVLFESTGGYENLAVTYFQSLGYDVCVINPRQARDFARSMGRLAKTDKIDAQILCRLADVIDASPERARFVKPLTDERRQRLVSMVRRRRQLCDLMIAERNRRAKTDSYGSESINTVLDFLTAEIARIDRDISAHVGSCFSDISSILQSFTGIGPVTASTLLGELPELGKLNRRQITALVGVVPFNRDSGYMRGRRRISGGRSGVRNVLFMAVLSAVRFNPVLKAFFARLVAAGKPKKVALVACMRRMVCILNAMLRDGSCFEASHV

SEQ ID NO: 350452 - protein, 352 aa, unidentified
MLYTGLDFHRSFTYATTMDEKGVILAQKKLPSNGEIVDFLKGFEDSMEVAIESTPSWYWLYDSLEYEGFDVKLSHPLRTKAIAYAKVKTDKVDSATLAHLLRSNLLPLSYVPERQVRLSRELLRYRASLVNIQTRVKNKIHMILAKSNIDNEFSDLFGKSGMAFLHSLSLPENYKIALEGYLNVLDAVRREIKIVSNRVRQVAEKDHDAILLMTIPGVGYYSALLIKSEIGDVRRFPSAKRLCSYSGLVPSTHTSGNVSYHGHITKSGSKWLRWILIEAAIHAVKKPGPLRHFYYKTQRKKGGQIAKVATARKLLEWIFHILKEEKSYQQVERVVASLGEGEPANCPGLKDR

SEQ ID NO: 350453 - protein, 343 aa, unidentified
MQAITTLGLDIAKSVFQVHGIDAAGNVIIRRQLKRRNVLAFFQKLPPCLVGIEACASSHHWSRELQALGHTVRLMPPAYVKPYVKRHKNDATHAEAICEAVTRPNMRFVATKAPEQQRCLTLHRTRHLFIRQQTSVINAIRAHLAEFGIVAPVGRHGVEQLLGIVSDASDKRLPDVARACVAALGAHLQRLKVQILEFDRMIRAWHRSSEASRRLDDIPGIGPALATALVASVADPKMFRSGRDFSAWIGLVPKQNSSGGKDRLGNISKRGDRYLRSLFTTGALAVIRYAKIHGIKHRPWLTALLTRRPTKVAAIALANKIARMAWAMMARGERYKEPAALAA

SEQ ID NO: 350454 - protein, 369 aa, unidentified
MMLIGVDPHKSTSTAAAVEPQSNREVASIRIDATLREYRRLLTWAGRWPEHRWAIENAEGLGRHLASWLLARGEQVVDVPTTATARVRQLSRGGGRKNDRIDAAAAACVAALQGDARPLEAETTADALGVLDERRGNLSQARVRAVNQLHALFRALLAGGAPTGLSAAAATGLLRTVRPVGPVEVVRKKIASDLVADIRGLDARLKANEKAMATLIKESGSTLTRTVGIGDITAARLIGRTGPPGRFPNSAAYAAYTGVAPIEVASADKIHHRLSRSGDRQLNSALHTIAITQIRKPGSLGNTYYQTKIAEGKSPREARRCLKRRLADHVWRTMIVDEKRDRAKTSNSAPAQASPDSQGLKLGTTAPQP

SEQ ID NO: 350455 - protein, 344 aa, unidentified
MSMVKTAAVTGGVDTHADSHVAAALDGIGGLLGVSEFPATPAGYARLLGWLRGFGTVCLVGIEGTGSYGAGLARHLCAAGIQVVEVDRSDRQDRRRRGKSDPLDAVSAARAALSGRAAGVPRGRDGEVEAIRALMVAKRTARAQRTQTINQARALIITGPDDIRTRFTGQTPAGLVAELAVLRPRPGSMVRYHTLLALRELGRRAQYLDGQLARLDQLITPLVTARAPGLLSLFGVGPDTAAVLLIAAGDHPGRLRSEAAWAHLCAAAPIPASSGKVARHRLNRGGDRQANHALWRIVLTRMGSHPPTRAYVARRSKEGLSKPEIIRCLKRYAARETYRHLRSS

SEQ ID NO: 350456 - protein, 378 aa, unidentified
MDVIYPRCAGLDVHAETIVACALWEEDGHIQKDIQTFSTFSKGLGDLLEWLEEHGVTHVAMESTGVYWKPVFAFLEGYVDLTLANPQRIKNVPGRKTDVSDAEWIAKLLRHGLVEKSFVPPADIRELRDFTRLRKKWVGQLTSEKNRIQKVLESSNVKLGSVLSDLFGVSGKDILARLLEKGYVDKDELDECLRGRLKKKKQAVYDSLLGTLTEHELRLLRLLWKHVEELEQLIEEVDQHIDRLLEPYREEVNLLMTMPGVKKQTAAVIIAEMGTDMSVFETPERAASWTGLSPGNHESAGKRKSTRTTKGNPHLRSALCEAAWSAARSKTHPLSRKFWSLAARCGKKKALIAIARRMLVIIFCMISRKEPFRQPQLI

SEQ ID NO: 350457 - protein, 425 aa, unidentified
MNFNTNEKINQVSENTLVIGIDIAKRKHYACAVDDRGRILQKSFPIIQSKIGFDDFYERLMTLKEKHEKQEILVGFEPTGHYWMNLAAFLTHYGIPFVMVNPMHVNRSKELDDNLQTKNDQKDALVIARLIRDGRFSYPRLLEGVEAELRNGATLRSKLQEDLNALQNRIIRWLDRFFPEFTQVFKSFGKMAYAVLEKTPLPMDIQGKTTEELLCLYRQVDGLKSPQLPKAKQLVRIAPHSIGLTEGLVMARFEIATLLSQYHMMQAQLDELTCQLTTLAKQMTDYDYLASVPGIGDITIVDLLSEVGSLTQYAHPRQLIKLAGLTLRENSSGQSKGQKRISKRGRRKLRALLFRVMMPLILHNSAFKALHEYYTTRTKNPLRKKQSIVVLCGKLLKILHALCKKKVMFDEHQMMTDFTVLKAAS

SEQ ID NO: 350458 - protein, 392 aa, unidentified
MSIQPKVSGFKRTNSRFIPRDYDVFTGLDVDKKSMAVVFIDHAGAQRALRMANNVTPLLNYVRKHFAGQRVAFAYEAGPTGFGLHDELAREAYTCVVAAPSKVPRAPSERVKTNRLDGRKLAENLRGGQLKSIHVPTLVYRDLRHLVQLRDTHVRQLMASKLRIKSLLLYEGIPFPDPQEKWTARAMRELQTLPCSPTVRFKLDDLLQTLHFHFQAAARATKQIRQHSLDDPELQQSIELLLSLPGIGWIVASHLVARLGDPQQIKNGRQIAGFLGIVSSEHSTGEKENRGAITRSGDSRLRNKLIQSAWTAIRKDPELRAFYRRIYQRHPKKVAARKAIVAVARKLSQRIYVVLKEQRPYVIRPDSSIAPLTVEETVGPRDRLDGAQNDQP

SEQ ID NO: 350459 - protein, 458 aa, unidentified
MDKSTAKPLRAAQAQVSAPEITVHALYRSAIGIDVHLNLLVCCHQTQLDDHQELSEIVEFNTDRSSLDKFAAWCRERDPSIILMESTGVLWISPYEALENVGFGSDRLALINARDAKAAVGRKTDRKDASRLAELARSGHFRRSFVPPKDFRIQRFISREYQKIKSELSVAKNRHQKLLNSTGCRASIVFSDVHGKAASAILEAKINNDPQLSKIISANCGRLRATPEMIEDALNFEIEPLVAEQLRRSSEHLKELHQYAENTFNRLRKLQQPYEAQIKLLRTIPGVQEISARLIFAELCGNLKDYFVDSEHFTSWLGICPGDNTSAGKQKSGSCPKGNKWLRRTLVECVRGYSLSGRCPSKEKFQALKLRRGYKRAVVAMAHLLARIVYSVLLNNKAFEPQETNAHRDAVVVRILSALKEAKRFPKSGIGIVDGRYLMVESTGAIIADLYGIGIKPV

SEQ ID NO: 350460 - protein, 310 aa, unidentified
MAAVVVGIDVSKDHLDVHVRPGGTSFRVNRDGAGLQELLVQLEPLAPSVVALEATGGFETVVAASLGTAGLPVIIVNPVQVRAFARALGKRAKTDPIDAAVIAHFAEATKPEVRALPDEATRLLSDLLARRRQIVQMIVAERQRARVLTAPRLQKSIARLLKALQQELNALDKEIDDSVRGTPVWREKEDLLRSVPGVGPTIARTLLAEMPELGTLDRREVASLAGLAPFTRQSGQWRGKSFIGGGRSRVRAMLYMGALVAVRYNPALRTFYDHLLAVGKPKMVALVAVARKLITILNAILRDQKPWSTA

SEQ ID NO: 350461 - protein, 409 aa, unidentified
MDVVYRCCAGLDVHQATVVATVRRPAADGTRESVTATFGTMTPDLLGLREWLQASGVTHVALESTGVYWKPVYYALEDSLTLLLINMHAVKHVPGRKTDVRDSEWLAQLLEVGLLRPSLVPPPAIRELRDLTRYRTQQVRDRAQEVNRLCKVLEDAGVKLSTVATNVLGVSGRAMITALVDGRTDPDALADLARGKLRAKIPVLRRALQGHFRAHHAVVVTHILAKIDFLEETLADLTREIDERLRPFDTAMTGLDTIPGVNRVTAMAIIAETGADMTRFPSASHLCSWAALCPGQNESAGKRHSGRTRQGNRYLKGALIQAANAAAHSKQTALHALYVRLRARRGHKRAIVAVAHQILTIAYYIMRDGVTYQELGPMYFEQRTREHSIRRHVQRLEALGLTVTVTEAA

SEQ ID NO: 350462 - protein, 343 aa, unidentified
MDHFAGLDVSVKDTSVCIVDGAGKIVREVKVASEPDALLQVLTNPIYCFKRIGLEAGPLSQWLFSALGEANLPVICVETRHMRAVLKAQINKTDRNDARGIAQMMRVGLYRPVHVKTLRSQKLRMLLTHRKLLQSKAIAIENDLRGTLRNFGLMVGMAGRTKFEARIEELVEEIPDLAALVKPLLVVRRVVREQIAVLHRRLLAIVRDDEVCRRLMTIPGVGSVVALTYRAAVDVPARFRKSKSVGAVFGLTCSRDQSGERDRPGAISRCGDEMMRTMLYEAAQCMLVRSTRWSWLKAWAMQIAKRRGIKRAIVALARRLAVIMHRIWMDGTEFRWTREPVVA

SEQ ID NO: 350463 - protein, 414 aa, unidentified
MRIVYQNVAGLDVHKKVVVAATIVLQADGRWHQEKQTFGTMTMDLLQLSDWLLGHGVTHVAMESTGEYWKPVFNILENNLEIILVNAQHSSKVPGRKTDQGDAEWLAELMQYGLLKASFIPPPGQRELRELTRYRTSFVRERSNLVNRVQKVLESANIKLASVAADIMGVSSRAMLEAIIAGNARPEEMAELAKGRMREKREALAKSMEGRVKAHHRFVLTELLCQIDSLEETIARFDREIEDYCRPFEEAVVLLDTIPGVARQTAEIIVSEIGTDMSRFPTANHLAAWAGVAPGNNESAGKRHSGKTRKGNKPLGAALTQAAQAAAHTKNTYLAAQFHRLAGRRGKKKAIVAVAHSILVIAYYLIQRKEPYHELGGDYFDRRNPEAVSKRLVKRLEKLGYQVSLQQLEPVLVP

SEQ ID NO: 350464 - protein, 410 aa, unidentified
MLFIGDDWAEAHHDIEVEDDSGRVLARRRLPEGLAGITTLHELVAEHLDPTAEPDQVQLGIETERGPWVQALLAAGYGVFAINPLQVARYRERHSPSGAKSDAADAHLLAEIVRLDRAHHRRIAGDSEIAEHVKIATRAHQTMIWSRVRQVNTLRSLLREYYPAALAAFGTDLASRDALAVLTVAPSPELGRRLSQSRLETLLRRAGRQRNVSTTAVKIRAALRSEQLAARPGVIGAYTASASALLAVLTAMAAQAEVLAGQVEQGFGQHPDAEIYRSQPGLGDILGARVLAEFGDDPGRYADAKARKNYSGMSPITKASGTKRVVLARFARNRRLGDALFLQAFAALNNSPGARTFYDRQRARGATHYQALRTLANRLVGILHGCLRTHTLYDEHLAWHTEPDKLSPAA

SEQ ID NO: 350465 - protein, 279 aa, unidentified
MGTFVGLDVSLKETSVCILDQDGTRVFEGKVASEPAAIAWLIRKRASDPARVGLESGPTSVWLTHALAAEGMPVVCLDARHAQAVLSVRPNKTDRGDARGLAEMVRVGWFKAVQVKSLASHERKTLLIVRHQLVDMRVRIDNQLRGILKTFGLVIGQCSRGQIGQRAQKLSEGRPGVDSIVASMVAVRDSLLEQIAVCDRAIRRLAKKDEAAQRLMTVPGVGPVVALAYISVIDDPQRFRHSRDVGAYLGLTSKRYQSGEVDQTGRISKCGDGFARTCL

SEQ ID NO: 350466 - protein, 424 aa, unidentified
MIPVPSYVLLVTILLIWRKISKYINMNRNRTVAGLDVHKDSIYLCIMGHDEAIIFEKTYGVLTPELRQMCNDMVDRGVTEAAMESTAVYWVPVWNELCESMELKLVNPYFIRQLPGRKSDVRDAQWIAECLLKNLIKGSFVPEPIVQDMRKLNRRIFDLQEDLTYYSNKLDAALQRCGFRLSNYVAKITGKSYRKAVESIASGVTDPDELIKCVHGRIINKHGRETMLAAMTGSFSTTDITVIRQYWELLAIYTRQSEECQSKLTALCEAHFPTEYKRLQTIPGVKERAATAIIAETGVDMKTFATAASLVGWCGLKPRNDVSNGRYKSRKITHGNKYLRKILIEISWTASRTRNCFFSNFSYIQVTQKHKSKMKIQVAIARKILVAVWHMLSKQEDFIDLYLKRLEEQRLMEGKIRQLESKMA

SEQ ID NO: 350467 - protein, 424 aa, unidentified
MKNCNKQNEKIELVDEKTLVIGVDIGSYDEYARAFTCRKQELSKKPLHFHNTAEGFKTFKDWAVNIMKANGLEKIIVGMEPTSIYWEALATYCKDNGMILVHVNPAAVHKSKELDDNDPSKNDRKDPKVIAGLVADGRYQFPYMPEEEYAELRELSNLRIRTQESLTQCKNRLARWYSRYFPEFKGAYKNVVSKTAMMILDLYPLPEDIVTLGVEGILQIWRSKKVRGAGERKARKLYEAARNSIGRKEAASIARIEFKSIKEDLDRYQERLDEIEKKADEILPKIKNADKLFEIKGVGKATVLTFLSEIGEISRFDNPKEIQKLAGYAIVTNESCKHQGEKRISYRGRKRLRWVLYQTALSVIAKNAEFRQIHAYYTTRTNNPLKGIQSVVAVACKMIRIFYKILTDGVSYNGTKMTQDIVHA

SEQ ID NO: 350468 - protein, 279 aa, unidentified
MGDITTIGLDLAKSVFQVHAVDEMGSVVMRKRLRRSQVLAFFAEIPPCLIGLEACATAHYWARELIALGHEARLMPPNYVKAYVKRNKHDVADAEAICEAVRRPSMRFVPIKTAEQQSALMMHRARDLLVRQRTMLVNALRGHLAEFGLIEAQGLHKVAKLIAIVTDENDGRVPDIARQVLQVMVNHIEDIQVRIVGLEKQVLAWHKSNPVSQRLATIPGIGPIIATAIAATVANPNIFRSGREFAAWLGLVPRHNSTGGKARLGGISKRGDSYPPITA

SEQ ID NO: 350469 - protein, 428 aa, unidentified
MNCNTQNAKIASITEKTLIVGIDVGSETHFARAFDWRNYEYTKKPLEFSNTEAGFMMFKAWVEDIAEKQGKTAVIPGMEPTGHYWFALGKFLQDSGMKPVHVNPHHVKKSKELDDNNPNKNDSKDPKTIAALVNEGRFSYPYIPTGIYAEIRSLSNLRFQTQEELTRIKNRIARWFAIYFPEYKDVYGDLMAVSGRMILKEAPLPEDIRILGVNGVNQIWRNAKLRGTGMKRAKILVSAAEHSVGSKEAPEAARIELKNLLNDMDVYVSRMEELLQTIEEKLKTIPYVDKLMEIKGIGLITVSGFIAEVGDIGRFDNPKQLQKLAGYAIVANDSGKHNGESRISYRGRKRLRYVLYEAAISLVGKNAEFKEIHEYYRTRKENPLKKMQSVVAVACKIIRVFYTILTKGVDYDPMKLMSDIRRPQLQAA

SEQ ID NO: 350470 - protein, 373 aa, unidentified
MEQKFSRVFGLDLSKKTYHQCMLFGPNLQERKFSKGEMNPQGRKDLAKGGKEGDHILLEAGSSSFTLARYLMTNTPATVTVLNPADLHIIFKTTCKTDKKDSMKIADLGRRYEIHELPTVDVPTEQEQAERSVVSQQADMAELRTAHVNRLHARFNSLGYCDISKADLKDPIKRIQLCKRCFKDPGNLRQAQMIIEHMELCEQHLAEIAEQMRCICLAHPREASSLLSIFGFGLVNTATFIAFLGDCSRFSHPRQVCNYAGITPRIDCSGQRNVIGGITHMGNRYIRRAIVQGAWAASKTKADSPLKRKYKKLVAKGKPKQVAAVAVARKMLTVAYTLVRSGELYRPMVIDEEGLIRYEQKIKGYGLGDLLKQ

SEQ ID NO: 350471 - protein, 334 aa, unidentified
MNQDPQALSKIVSGRARSDTREQLPDPEALTCCLGELPGCFERVGLEAGPLSQWLYFGLRDAGLPAVCIETRHAKAAITAMSMNKTDRNDARSLAQLVRSGWFKSVHVKSVESQELRTLLGSREFFVNKLRDHENEIRGLLRPFGLKVGQVSSSGFAGRIRDLVTDRPRLKLCMEALLTARETLMKQLAALHGELLRVTKNDELCVRFMGIPGVGPVTALAFKTAIDRPDRFRRSSDVGAHLGLAPRQHQSGEVDRRGRIAKNGDRLTRSALFAAANVMLSRSTQWTALKHWGVSIARRSSLKKAKVAVARKLAVIMHRMWRDGSPFRWTAKEA

SEQ ID NO: 350472 - protein, 412 aa, unidentified
MKIAGIDVHKKVLMVVVVDASTPEEKPERRRFASMPSELHRLLLWLREQGVEEAVMESTAQYSRSVWLELEPHMRLHLAQAFSNRAPRGRKHDFKDAERLVRRLIANELILSFVPDGEQRIWRSMTRMKLQLTRDRVRLQNQMECLLEEMRIKLSIVVSNLLGASGLRILRALAQGETDPKQLAQLGDERLQCTEEQLVDALTGRVQPVHREMLALQLQRLQLIDQQIARLNRMIADAMKAHQDAVIRLAEVPGLGVDSAQQIIAEVGAHASTFLSAAELTSWVGTCPGKEESAEENHSSRSAKGNKYLRRVLNQAAHAAVTKKDSHFQGVFRRLLPRLGYQSAIWAVAHRLCRVVWKILHEGVRFIEQGREPDPQAKKKRAQMLARALRRLGYQVAITPINPLTATNGIPM

SEQ ID NO: 350473 - protein, 367 aa, unidentified
MFTERTSVGLDVHALSVRACGLDTITGQLIEETLTPSHDHIRDWLRRLPGPVATAYEAGPTGFGLSRSLNAAGIRCEVLAPSKLIKPAGDRVKTDKRDARHLARLLHLDEYTPVTVPTVGQETARDLVRAREQCRGDLMRARHRVSKLLLRYGIVYSGGTAWTGVHTRWLQSSLLRDQLERASGAPTVLAYHAGLDAVLDTTARRDRLDQAITAMAADSEFTATVRRLGCLRGVSDLTGLALAVEIGDWHRFTGRSIGSYVGLVPSEESSGQSRSQGSITKAGNKHVRRLLVEAAWHHRDPYRPGAALRRRWDRATPGAKNRGDQANRRLHQRWSHYEARHKKRVVANTAIARELAGFCWSLAVMLD

SEQ ID NO: 350474 - protein, 439 aa, unidentified
MEFKIVNPNASGIDVSTREMQVCVPGDRCEEPNRVFGTFTKDLHEIAAWLKECRIETVAMESTGVYWLPLFGVLKGAGFEVLLVDPLQVKNYSGRKTDETDAEWLMLLHSYGLVRSCHQPDNAVRQLRNLTRHRDNLIRSSSREVLHLQKEMEQMNLKLDNVFSDILGKSGQAIIEAILAGERDAEKLASLADRRCKASHADIVASLQATWDEDHLFVMKQSHDLYLYYQSMIEQCEKKIEELMRECTAEVDEEKLDQLRSRKQKAYRGEVGFDVERYAIGMWGVNVMRLPGINTNAVLRLASELGGDFVGKFETVDKFLSWANLVPNNKISGGKLLSSKVPNRKNPVGTVFRQCANALWRANNPMGDYFRHTKARSGHLQAMVATGKKLATIFFTMTQRQQEYDEEIYAQNRRTQLERKIEYTKRKLARLEQQKANCA

SEQ ID NO: 350475 - protein, 344 aa, unidentified
MTVSNQAERVIGVDVSMSRLDIADSQGKIHKTISNTAAAIKKAIVQKLDDGDSVFVVCEATGGYEKDLVKTLQDAGIPVAIANPRQVRQFASAMGRLEKSDPIDAEVICQFGQTAELPAAPVKTAEQEARDAVVRRREQVLEMIGQENNRLQQESDPKMKKTIEQVLKTLKNLQKKLDAEISRFLAEEAKTNASVEVLMSVPGVGAVTTATLLSELPELGQLNRSEVAKLAGVAPIVHESGQSRGRRSVSGGRRPVRRVLYMASLVGIRRNPVLMEFHRRLVSRGKPQKVAIVACMRKLLTILNSMVRTKTRWRTKGEEKVVADQGPATTRAHGDRRRGDSTMP

SEQ ID NO: 350476 - protein, 404 aa, unidentified
MKGPIVSIDVSKGKSDYQAFKDLNVKYTGSRSIKHNKEGFDEIVNLVREMEKKLETEVCVVYEATGVYHRVLKKVLEDNNIKQFIINPLLSAKTRKNDSLRSPKTDKLDPKSIAKTYYSHSLHNSHKQETIYHELRELSRYYEDILVHIRKDKVAFRAQLDIVFPGYDTLYDDLYGPVALAIIEKFPHPEMLQKKKINTVSKVIQNKTCHRQAVSDTMADKAIEYSKTIYSGCDKDDIEVLILQRFIKKLNEDMAEAERTIGEMIKLAQELPDFNIIKSIPGIGDNLAARIIAELGDMTRFKKKNELVAFAGLDPRISESGQNDGDHMHITKKGNKRLRCLLYLAVTCSIRLKRDDNSIKDFYIKKKQQSNPMCSKAAKTACASKLVRIIYSMCKTGELYQYNK

SEQ ID NO: 350477 - protein, 375 aa, unidentified
MSNVRFVGLDVHAETIVVAVAESAGEVRTLGTIPNRPEAIRRLVHKLGPVDALRMCYEAGPTGYVLYWQLIGLDVHCDVVAPSLVPVKAGDRVKTDRRDAEKLARCYRAGDLTPVWVPDAAHEALRDLVRAREAAKKDQLRARHRLGKFLLRHGRRRPAHLKMAWTVGHIDWIRAVRFDSPLHQIVLADYLHEVERAAARIAHLNTAILEAVRAAPPQMRAVIQALQALRGVAAVSAATIVAEVGLLSRFANARQLMGYSGLVPSEYTTGPRRRLGAITKTGNAHLRRVVIEAAWAYRFGPAVRAPLRARQAGLDPQITEIAWRAQKRLHERHRTLTAKGKNAGQIVTALGRELLGFIWDIGRHVEAQVPVVGTM

SEQ ID NO: 350478 - protein, 485 aa, unidentified
MKTKRQEGVQEAKKASCRATLHKWPDMNRKQRREMMRKIQTEDLSLAVIHPDAAGIDIGNESHYVAVPPSRDSQSVQRFGCTTAELKAMAAWLKQCSIHTIAMQSTSVYWIAVYDILEQAGLEVYLVNARDTKNLPGRKSDVQESQWLMKLHTYGLLRNSFRPSQEVRTMRTYWRQRNDLVRAAARHIHRIQKALTQMNIQLANVLSDVSGMTGQAIIKAVLAGERNPRKLAAFRDPRVKASEEQIARSLEGNWQQDLLFVLKQEQDGYEFCQRQMAECDRQLNQYLEQREDRSQAAPLPEEKRKERLKKKKGNKPQFDLRAGLFRMTGTDLTQIDCVDVMTATTIFSEAGWDMSKWKTEHHFVSWLRLCPDNRISGEKIIGKGRLPTNNRVTTALKIAANNLRLSNTYLGAQFRRLRTKLGAPIAIKAMAAKLARLVYRILRYGIKYVDRGATFYEAQHRQIQIKHLKWKAAKLGLKIIEAPAA

SEQ ID NO: 350479 - protein, 418 aa, unidentified
MEVWFRRLSCLLSNMFQGGAALSALYIGIDVSKDFSTAQAIDGNGNKCFYLELAMTADGFSQLLKAITSHGKDIAQVTVAMESTGCYHINLFSFLTYKGIRCVIINPLLTANFARLSLRKTKTDKKDALTIAQFLLVHKDSLLKTDLSPDLQDLKDLAREHESLTNLIAGMKNDIRRMLQITFPELESICNIFSETILDLLRQFPSARLIKIAKPNTIAKALLHEDKRKKTSVSAEDIIKAAKASVASHGAAKEIILPEKISTLQHLIEKKGRMKKVLVEACEAMMVEDIEIITSIGGISNITASRLLAEIGDYRAFSTYKHLIAFAGLDPSVHQSGKFEGISRISKRGNRHLRYIIYLMTTCVVRGNNIFRSYYDKRRAEGQPFKKAIMATAHKLIRVLFAMLSKRTTYKSKEVNAI

SEQ ID NO: 350480 - protein, 312 aa, unidentified
MISERTSVGLDVHARSVVAAGLDSLTGEVFKRTLVAAHEEVIGWLRGLPGPVATTYEAGPTGFGLYRALTAEGIRCEVAAPSRLNRPAGDRIKTDSRDALLLAQLLQVGQITAVRVPSVTEEAARDLVRAREDARSDLMRARHRVSKLLLRHGHVYYGGKAWTGVHDAWLRRIRFDQPGTRAAYEADLEAVEFAVARRDRLDTTIAAMAADSEFTATVRKLCCLRGVSTLTGFALAVELGDWERFTGATIGAYLGLVPSEHSSGQSRRQGGITKAGNSHVRRPRRQPTTPPAVDLLQRPEEEAHRGDHRDRP

SEQ ID NO: 350481 - protein, 350 aa, unidentified
MTTMTPEPGSVTGGVDTHLDVHVAAAVDHLGGLLGTASFPTTASGYRALLRWLRSFGPVSAVGVEGTGSYGSALAGVLADAGLEVIEVSRPNRQVRRQHGKTDVIDAIAAARAVLSGQATATAKAHDGPVEALRLLKIVQRSATKSRTQAANQLRTIVATAPDELRARLRALRTAELVETCAMFRVRVDDDSLAAVTRLAMRELAQRIQLLDEQLARTKVRLRRITTAVAPELVARKGVGPDTASTILVSAGDNPRRLRNERAFASLAGANPIPASSGKTTRHRLNRGGDRQLNSALWRIAIVRLATDAGTRAYLERRVSEGRTKIEAIRCLKRYIAREVFAALPQTAAG

SEQ ID NO: 350482 - protein, 315 aa, unidentified
MSIKSTTTIYLGADVSKAMIDCRISDSVFSIPNNRAGFAAFDARMRSFEDQAVHVVCEATGGYQNELVAHLHTKSILVSVINPRQVRDFARSRNILAKTDRLDAGVLADYGLANSPEPDAPTPPHIQRLASLLAARDHLIAQRAVEKTRIHQIEDRWLRSQSERVVGFLTREIEKLEAQLTALRDSHAKLKANAARLQEAAGIGSYSALALLGYMPELGTLGRRAVAKLAGLAPLNHDSGQMRGQRHISGGRGSVRRILYMASLSAIRHNPIFRAFYTKLRTAGKAAKVALIAISRKLIILLNSSLKNSEIALAK

SEQ ID NO: 350483 - protein, 341 aa, unidentified
MKVSTLGIDLAKNVFQLHGVGCNGQTVLKKKLTRDKFLPFLMQLEPCLIGMEACASSHHFARVLRQYGHEVKLIPPQYVKPYVKTNKTDAADAEAICEAVARPNMRFVQIKTAEQQAILVLHTERNILIRERTACANSMRAILAEFGIIMPRTLSQLYKKIPEILEEYDNELSPFVRCSVARQLEHLQGVEDQITLIEQELSRWAKTQPACQRVMKVPGVGLMTATYLVASVGNGQQFHSAKQFAAWLGLVPREFSSGGKQRLGRISKRGDRYFRYLLVHGARAVAAVIERHKDNMPWLYRLLNKKAYNVAVVAQANKTARILWSMLVHHTEISNLIRGLR

SEQ ID NO: 350484 - protein, 323 aa, unidentified
MIDGILGIDVSKNTLDASMSSCNKVRARSFANSTDGWRHLLDWLITQGCRRVHACLESTGRYSLGIACALNEAGHVVSIVNPAQIRDFVRTKLGRNKTDGVDASHIRDYCELFKPQPWAPPSEAARRLGELQTIRAGIIAGLTEWKNRKNSGMTDAVAHSLADETISHFASQLGAVDEAIAQTIDNDSVLRRKRDLLLSISGVGETLAGVVLAELPGPDVLRSSAEVVAYAGLNPRQHQSGTSIDRVTRISKIGNAVLRAALYMPAMSAMRYNPAVAALVTRLKSRGRLNGKQIVIAAMRKLLVLCFGVLKTGKPFDPAKAMG

SEQ ID NO: 350485 - protein, 348 aa, unidentified
MASLPTVAPQVTVGVDSHKDVHVAAAVDHLGRVLGTTWVPTTTRGAAQLLRWATRLGTVQRFGIEGTGSFAAGLSRWLQEQGHEVLEVNRPNRQARRRRGKSDPVDAEAAARAALAGEATTPKTANGTVEMLRVLRVARRSAIKARSQAANQLHSLLVTAPDQLRQQLRGLPLARLVQVAATFRPGSLTDPLAATKFTLRELARRYQLLTAELDRLDAELAALAPKAAPGLLARRGVGAQVAGALLVVAGDNPGRLRSEASFSMLCGSSPLEASSGKTVRHRLNRGGDRDANNALWTIAMTRLSCDERTQRYLARRTAEGKSKREIIRCLKRYIAREVYREIKAAIVT

SEQ ID NO: 350486 - protein, 358 aa, unidentified
MAKSKQTIPVVGGVDTHKDLHVAAVVDDYDQVLGTHSFATTRQGYKLMLAWMRSFGDLQRIGVECTGSYGAGLLRYMQVAGVDVLEVTAPDKLDRRRRGKNDDFDAQSAAHAAFAERRTVTPRSRDGMVESLRVLKVCRKTAVQARRVALQIIQTTIVCAPDRLRDLLRNMTRMQLIRTLAAWRPDLTGYRDVEEAYRIALKSLARRYLELHDEVADLDAMIEAIVTDFAPDLIACRGVGFNSAAQLLLTAGDNPERLKSEASFAALCGVSPVPASSGKTTRHRLNRGGDRAANSALHIIAIGRLRLDPKTKEYVARRTAQGHSKLEAIRCLKRYIAREVFNIIARRHKQINQAQIAA

SEQ ID NO: 350487 - protein, 555 aa, unidentified
MYFTWSFILTVHFGIGIDTARFGHHVSFMDEQKRTAAAPFHFEESYGGYQKLLKILKALVAKDDSVHLHIRLDVAGQYAENLITWLRKLDLSTTISIGTPAKNKAYREAHYDKRKADPVESLACARFAIVERPAESPVVPKKFSALRATVSALESEAKHRTRLINQLHSLLAHGFPELAKYVTDIDKGYCLALLLKHPTAKKIAAAKLETIMAIAHMKEDLAKTLHEAAKTSTASASCEIHQSLTSNKVREILDSKEKSAQLLKLMKKAWDSLPDGAYKRVYTIKGIGLQTAAALVAKIISIDRFQCDSALIGYFGIFPEEKDVSGTERDGSPKPGTIIHMCAKGNDLVRRLLYMAAQSASMHNPAVKALFARQAAQAKPYNLVIGHCMAKLLRQVFAVWTKDQDYDPDFESAAQQPATTEKENVVGPKSEAVKPHRQEVTTTQPSLAAKPNQRKRPPLNYVKLKSQLPIIDVLHRRNWQQRTSRGAQLRGPCPLHASQPDDRCFAVHTGKNTYCCHSCGCKGNAIDLVTALSKKKMHEACWDWIDLTNMEPPLL

SEQ ID NO: 350488 - protein, 342 aa, unidentified
MAERFVGIDVALREHRIAVLDRDGEAVGQSFTIAASKDGVATLLRTLAARAATAAQTLIGLEASGHLWENLEAALVSAGYRVLVLNPLQTRRYRDVVRRKAKTDDIDAHVIAGLLRSGAAQASYVPDEQIQSLRELARLRARLMDDRQNYLRQLIAQLDVVLPEHRTALGDLLSARARGILAQFPTAQHLAQASPRAIRRAAQDAGTRGFALDAAVAVRDAARQSLYSGKAAAARAQVVRTLVSQLERLTTAIDEVDRAATALLPPSEPGTGPSDADLLQTIPGIGPHTAATLLGELGVLARFTNARALVAYAGFYPVIAESGGLAYCPPGPLSRRRQRRPP

SEQ ID NO: 350489 - protein, 425 aa, unidentified
MHLTATTLASSVATLAVDVSAYKLNLMCRELSSPGASAEWEIDNRTEPITSTLLAIWERAQAGGMTGLRVIVEPTGVYHKLLLRIAAALGFETGMVDAGHVKKMRSVLFGDDGKTDRRDPYAIEAVAARGRLIVDRRHAEVYSLLRQWGKLYGDAEVALIDAKSRVHRALTLLFPDFAFSTDFLYGPSGQAIVRCFGLDPHTIATLDASRIYARLRKHSRILRSSVARLLAQARQTVAAVSKSRVTDLHARDLAFAWEDFELAGRRRQAARQELEVLYDEARMSDPLLPTISVGSVVSKLAMAHLLGEAGPLSAYSSWRQLLRMAGANLRERKSGKYVGQTRIARTGRPLLRAILNQMALPLVKRDRLFGSYYHHKTGMQKMPGAKAMTAVSRKIVKMIWGWYRSGAAFDARRVFTCGAEYRHVA

SEQ ID NO: 350490 - protein, 457 aa, unidentified
MACEEMAAVMEPQEIEDEEHEQILERAAAVDVAKAAGMVCTRVPHQTRPGKRRTRVWQVDATTNAVLELGEHLAAEGIEKVTLESTSDYWRIWFYLLEAAGLDVQLVRAADVKQAPGRPKSDKLDAVWLAKLTERGMLRPSFVPPSEIRQLRDYTRLRTDLTRERTRHYSRLEKLLEDALIKVSAVASKLDTLSARDMIEALIAGERDPRKLADLARGKMKAKRAALIEALTGRFDDHHAELARMLLDQIDALSAQIGKLTARIEELIAAIPAAQGIDADGTTGPAAGQGQGAPVLPAVDRLDEVTGIGREAAQAIIAEIGLHMSVFPTAGHLVSWTKICPRTIQSGARSRAGHTGKGNPYLKGVLGEAAAAAGKTDTFLGERYRRLARRRGKLKALVAIARSILVIVWHLLADRNTRYQDLGAGYHATRIDKDRKTRNHIRQLEALGYTVTLTQAA

SEQ ID NO: 350491 - protein, 378 aa, unidentified
MQPTQHIDRTGALDVSLELAANSWKVAVTDGKRPHPAVLVVEEAPRWTRLQALLGRLRELRHKWALPQNCAVHLIYEAGQDGFWIARALKADGVEVIVVDAASVPVARHARRAKTDRLDALKLLEVLRGWLRGERGELRVVQIPSEEAEARRLLARERGLLQKEVGQHRDRARKLLLLHGCTEELDEGFVERLVAGKVRGADGSALPEELWNWLMREAERLDLARQQLARLERTLIHQLPESVQRCIAQLAQLRGVGWVGAMRLVLELFWRDFANRRQVGACVGLVPQPYDSGNSHVDQGISKQGNRRVRALMIEMAWFWIRYQPGSELAQWFARRTSGGNKRGKRVAIVAVARRLAIALWRYLRDGVIPAGAELKAV

SEQ ID NO: 350492 - protein, 426 aa, unidentified
MKSTQNEKISQIKTWSLVVGIDVAKEIHYARAFDHRGIELAKLLKFSNAAEGFQKLEQWMQDICQQHNKTDIIVGFEPTGHYWFTLGDYLKKQGHRLAIVNPFHVKRTKELDDNSPTKNDRKDPKTIAMLVKDGRYREVYIPEDLYQELRDAVAERDRLVQRMTSIDNQVGRWLDIHFPEYQTIFSDWQGKAALLTLRHFPTPEKIVSAGPEKIEAIWKASMKRSAGLKKAQVLVAAADKSIGRKTGLVAAEASLQNMLTEHELYKEQYEQLEQLMLDLLKQVPNAEKLLDIKGVGLITVATFVGEVGNINRFQDPRQIQKLAGFNLVENSSGKHKGKTRISRRGRRRLRHGLFRAMITILATNQEFRKLHQKNLTREKNPLTKMQSIIALCGKLIRVFYGLLRNGTDYSAEKMLGDIELGMRAAA

SEQ ID NO: 350493 - protein, 413 aa, unidentified
MDVLHQRCCGLDVHKSSISACILLHVSGRVQKHQRRFGAMTQDLHELAEWLRQFGVTQVAMESSGVYWKPVWNILEGQFTVVLANAQHIKNVPGRKTDQKDAEWIAQLLQHGLLRPSYVPCEIIRDLRDLTRMRASLSQEASRISSRIQKVLEDANVKLANVATNALGKSGRAMLEDIIAGEDDPERLASLALGHLRAKTPQLRLALEGKIRPHHRFLLRRLLDQLHFVEHEIALLEERLEDIGRQRPELSQAVARWDTIPGIDRVAGWTLLAEVGNNMAQFPTAEQLASWASLCPGNHESAGKRLRGTTRQGSAWLRRMACQCAWAAARTKNTYLSSQFRRLAARRGSKRAIIAVAHSLIVIGYYLQKNQSNYDDLGGNYFDRIHSDGLKRYLVRRLEQLGHKVTLLPIEAA

SEQ ID NO: 350494 - protein, 424 aa, unidentified
MKVTYQTCCGVDVHKSFLVATIVKTTGGIEPSYQKKRFFTFNSSILEFKQWLLDNDCHDVCMESTGKYWVPVFNLLEDEINVVIANPKWVKAVKGNKDDTKDSKWIGDLFRLGLVKGSYIPCKIVRILREYTRYRYKLVSCRSSEKNRYQNTLTVCNVALDSVVSDIFGKSSMSIIDYLLEQSGTSINHEEIASKLLRSLKSKEDAVIESVEGYQMTDAPKYRVRLVRAHMDYITAEINDVDKMIENMIFSNPDFENAVQFLCTIPSVKRDSAITIISEIGTDMSQFGGSKRLCCWAGLTPGSNESAGKKKSVRITRAGVYLKPALVQCAHAAVKSDKSPYYKKKYESLVKRRGKKRAIIAIARMILTAIYQMLSTGEQWNPSDLYKIDMPVALVEKQKAKAIKQAKKLLQREGILPPDEPLAS

SEQ ID NO: 350495 - protein, 375 aa, unidentified
MKETLRFLGLDVHAETIAIAIAEPDGSVRSLGTIANRAESIRKLVKKLGSAEQLRACYEAGPTGYVLYWQLAELGVACEVIAPTLMPMKAGDRVKTDRRDAERLARSYRSGDLTAVWVPDEGSEALRDLVRAREAAKQDQLRARHRLSKFLLRSGQRPAMGVKAWTLQYMAWVRQLRFAQVAQESTRLDYLHEVEHMAERVKRLEQAITEAVKLASPAVREVVKGLQALRGIAQISAVTIAAELGNIARFAGARQLMGYSGAVPSEDSSGKRTQRGSITKTGNAHLRRIAVEAAWSYRLRPGVGPALRKRQEGVSEEIKEIAWKAQHRLHTRYMRMAAAGKDQRKIITAVGRELLGFVWAIGIKAESAVMQKMAA

SEQ ID NO: 350496 - protein, 414 aa, unidentified
MEGEINKSCGLDIHKRFVIATILSRLGEKQQQRFARDDDGILNLKNWVTAEKCDVVACESTSDFWVPIYEALIDHLPVIVGNARDMKAFTHKKTDKIDSEVIAQLALNKMVQPSRVFPKKHREFRSYVRLRLTLVRKRTDIKNEAHAVLSSEMLHLGDVLTDIFGKNGRAILAGISSSKNVDQIIESLSPNVRKKSDQIREILDREISQSTAIRLQICLDLIKHLDDEIKILEREIFNYAYQKHKREMEILMSVPGIGEIGAATLIAEIGDFRDFLSGDKLASWLGLVPNVYQSADKYHNGRITKRGSKVARWILTQIAQAAARKKNSRLKEFFNRKKKSIGHAKAIIALARKIATIVWHLITKDEMYEDETGYEKGEVKKRKILETEIFSVDERITIISGIIAIMGKKEGKST

SEQ ID NO: 350497 - protein, 425 aa, unidentified
MKKIDYLSTLFVGIDIASRMNVVSAIDFNQDYFIKMKPAPNSQEGAEFLETMIVNVLGNNHQFKYVIIGMESTGFYGVHIANYLSASDTLAPFSLHVYCLNPKEVKNYKKSFNDLGKNDGIDSFVIADYARVGRIASKPWRGSQYLALQRLTRHRMHITECIAREKTYMLNNIFLKFSEYALLNKDEHPFSNKYSATAQAILTEYTTNEDLVNSSVAELVDFVNSKSRGRIADPEETAKILQAAARNSYRLDTCLYEPLTISIASSFNCISSFEKELKVIDKAILQTVQGLNPVEYTVLNSIPGIGKVFSAGILAELGSIKTFQNADALAKYCGIVWNDNQSGDFEAEDKKMSKAGNRYLRYYIIEATDSVIRNCPAYKRFYTKKYVETRNHQHKRALALTSRKFIRMLFGLLDKSQLYSPEKSR

SEQ ID NO: 350498 - protein, 355 aa, unidentified
MSEKFNSEIAVIGIDIGKNSFHIVGQDRRGSIVLRQKWSRGQVEARLANLPPCLIGMEACTGAHHLSRKLQALGHDARLMPAKYVRPYSKGEKNDYRDAEAIAEAAQRPTMKFVATKSADQLDLQALHRVRERLVGQRTGIINQIRAFLLERSIAVRQGLHFLRAELPGILAKRTDVLSPRMLRVIEDLARDWRRLDERIDALSDEIMMLARQDKGCERLMTVPGIGPIISSAIVAAIGSGDTFSKGRDFGAWLGLVPKQMSTGDRTILGSISRRGNRYLRTLFVQAAWVVLVKIKPEGWERYGLKSWIETAKQRLHRNVLAIALANKLARIAWAVLHKGRAFECVTNATASRPA

SEQ ID NO: 350499 - protein, 362 aa, unidentified
MHNISIGVDLHKQQLTVCFLCGNWNETKKYIISNSGIDLFKKDILRFKEKGCNVRVAVESTGNTRYFYNQVEKTGVEILIVNTLKFKVVNESVNKTDKRDAKTIAEFLSKDILPTVKLTSERSETMRRLISIRKELVRTRVRLKNMIHGILLSIGIETKAGQLNSKKGLAKIMDLVINDNSRMLIKNILNNITDLNQRIKEIEEEMEQYVSNDKAVKILKSIPGTGSINATTVAGYIDDVNRFSHYNKFSAYCGLVPWVQCSDKTEHYGKITKRGPIELRTAIIQMVIGMIRCKEAKDNRLMSGYRSLKKIKGSGKALVATARKLTKIIWTMLKNDEEYKKEKMNDIHDQIRSNEISEKSRA

SEQ ID NO: 350500 - protein, 326 aa, unidentified
MQGKEASEQETKAKCNVGIDVSKDWLDVHALPSEERLRVPNTCQGVRQLKRWFKRLDLALVVVEATGRWHRHVQRSLAASAIPVAVVDPFRVRMFAKAQGILAKTDRLDARVLASFAAMMMPSVRPPAPQALAELAELVTARMSAVEAQTALKNQRAAATMNFLQRQLDRRIERGDQDIAVLDAAIVKRIKADEGLARRYAILNSIPSFGFVTAAILIACLAELGSIGAKQSGMLAGLAPIADQSGKREGARVIFGGRPRVRRILYLAALTAARFNADMHVFYKRLRAAGKPPKAAVIAVARKLVVLANTLISQDRMWQPQAPKFA

SEQ ID NO: 350501 - protein, 315 aa, unidentified
MTSSDERFVGIDAGKRKNDVHVHGLADESQYHNDAEGIRELVDNMLQLSPALIVVEATGGYERLMVVELSAAGLPIAVVNPTRVRRFADSLGQLAKTDKIDARTIAHFASVVRPPVRTLKSEEEEYLGELLDRRWQIIAMQTAEKNRLHTSRGRIREDIQQHVDWLTSKEKELKQEIARLIRSNQEWSEKEALLQSVPGVGPVTAATLLADLPELGTINRQKVAALAGVAPFNKDSGKKRGKRRIFGGRSAVRRTLYMAALSCTRHNPVIKRFYHSLLERGKEKKVALTACMRKLLVILNAMVRDQETWSHIPAH

SEQ ID NO: 350502 - protein, 323 aa, unidentified
MFYLGVDVAKKKLDCLLLDSSSGKVKSKVVDNTAAGFATLLEWLGKQKAAELHVVMEPTGMYHEAAALALADAGLIVSLVNPAQLRAFAQGLGVKTKTDKQDSTVLAKFGATQKTAPWQPPSMSARRLKALLARRDAVADDLQRERNRQEAADFSLTPDAVKESIAQSIAFLEAELKRFEKMIASHIDDDPDLRNNKDLLETIPGVGPRVATHMTTLFAGRTFDSAEQLAAYLGLVPVEWQSGTSVRGRPRMSKAGPAHLRKVLYMPAVVARRCNPHIKALNERLIAKGKSKMAAIGAAMRKLAHLCFGVVHSGKPYDPKFAM

SEQ ID NO: 350503 - protein, 329 aa, unidentified
MSVHQQGRETVAASRPCAGIDVSKAHLDVAWGQRFERLSNDAGEWDALVAKFKADEVDVVLLEASGGYESAAACALQAAGLAVVVINPRQARDFAKSLGRLEKTDRIDAQVLRDFAEVIARHEQRERYIRVLPDAQRAHLAALVMRRRQLLDMRTEETNRLHTAHQAARKSVQAIVKAIDKQLAAVDDDIDRHMQQHYKDLRTWLESASGVAQVTSSTMIALLGELGHLPRRSIAKLVGVAPLAQDSGPRRGSRVIWGGRSEVRNVVYMATVSATKHNPVIRAFYERLIAKGKPPKVALVACMRKLLTILNAMARDHAVWDPAKHIKPA

SEQ ID NO: 350504 - protein, 342 aa, unidentified
MNVKEGPVVIGMDPHKRSVTIEVMTADETVLGGGRFATDVEGFAAMLDAVRGWPERTWAVEGCNGIGRHVANRLIAAGEHVVDVPPKLSARARVFATGQGRKTDATDAHSVALVGTRMTGLRPVVRDAQREVLRILVDRRRAIGEEHTYKVNQLHALVLELIPGGAKRDLSAAQARRLLASVRPRDVVGKTRKRVAMELVVDLERIYARKKAANKELLALLADVDTTLLGLHGIGPSGAARLLAEVGDITRFPDRAHFASWTGTAPIDASSGDNVRHRLSRGGNRKINRVLHIMATVQLRTRTTDGRAYYDRKVATGKTPNEAMRCLKRRLSDIAIGPCLMT

SEQ ID NO: 350505 - protein, 399 aa, unidentified
MFVGWDWASTAHDVTVIDSAGERVHRMAIPHTEDGIARAVAKLADYGDPGELPVAIEATRGLVVDRLLGAGHPVIPVHPNAFHAVRPRWGSARAKNDPGDSFKLADYARTDIHRLPVLVPTLPETLELQALTRQRDCQLALRIAAVSQLAALLDQHWPGGKTIFAQLHSPITLEFLHRYPTPQAAASLTAARIEAFCRRRGYSGRRSGAELLDRLRSAPISASRLGEPVVAQMIRGQVAVVRALQAGIDALDTVIAEKATAHPYAGLLADLPRVGTLNLAQIIGEVGPVLERATSFDQLAAETGLAPVTRSSGKTHTVAFRYATNRRARQALHTWLDNSRRSNDWAQQRYAAARARGQRHPHALRTLGRAWLRIIWACWRTKTPYNPARHEAAKQPTAA

SEQ ID NO: 350506 - protein, 411 aa, unidentified
MQALVERGCGLDVHQATVVACLLIIREDGRVQKQVRTFSSTTRELLALRAWLLAQGCSHVAMESTGVYWKPIYAILEGALEIVVANAQHVKKVPGRKTDVKDAEWLADLLCHGLLRPSFVPPQPIRELRELTRYRRKLVESQTAERNRLLKLLETANIKLASVASDVFGISGRLMLRALVEGKATPQAMAESSKGLLRKKIPVLELALEGRIEEHHRFLLKLQLDRLDSVERDLEVLHQRIQEKLQPYAAQLALLKEIPGVGWTLAAVIIAELGVDMRVFQSVSQLASWAGVCPGNNESAGKRKSSRIPQGNVYLKTALVEAANSAARAKGTYLRDKFYRLKARRGYKRAAVAIAHKILVAVYHMFSQQVSYNDQGDLYLDKLNKNHLTRNLVHRLHRLGYTVTLTPQPQA

SEQ ID NO: 350507 - protein, 422 aa, unidentified
MRFIGMDVHRDFCEVAVAEQNGKVRSAGRVASTVQALEVMAQSLAADDVVALEATSGAGLIADLIRPHVGAVLVANTRRLPQISKAKAKTDRLDARMLARLAASGFLETVWAPDEPTRALRRLCARRETLVRARTRAKNEAHAVPARNLCGRPPVSDAFGKRGRQWLESLELPIDERLTLDGCLRQIDMLDIELKGLDRALAEQALASPEIRRLMTVPGVNVQTAAAFMAAIGDIRRFPSAKQLVGYLGLDPRVRQSGNTEARHGHISKTGSSLARGMLGEAAWSVAQTPGPLRAFFERVRSRKGPQVAATATARKLCCLFWCLLIREQDYAFARPAMTRFKIRQLELAAGAPPRRGQAGVAGGHKTRSVREAERELATQAEAAYRRLISDWKATRPTKSGAGATPGRASLTALEGRSRATG

SEQ ID NO: 350508 - protein, 401 aa, unidentified
MEGPIVSIDVSNGNSHYMCFIKNNKRFGKVKKIDHDIEGFKRLLEDIQKLEAETNEKVCAVFEATGVYTKPLERFLSKNSIKTYIINPLESARKRKEEIHNKKTDKLDPISISKVYYDKEEMMELKKKDETYNWLRKKNRLYEDQLNHLRKYKGTFQNQLSICFPGYLDLFKDGYSDIPMTILKKYPHPDLLKNKKAETVARYLERNTCHTHKISLEYALKIIEFAKKTYPGCEKDDVEVEIFKILLDKVIETQRECEKTLNEMITVASTLEEYRYISSIDGIGPNLAARIIAEIGDIEEFKSREALVAYAGLDPHIYQSGDQDGKHLKISKKGNKYLRCLLFLAVGCSIRGAKDNPVNRFYQKKKQQSNPLNSKAAKTACTAKLLKIIYGICKNKTTYER

SEQ ID NO: 350509 - protein, 401 aa, unidentified
MNAVGIDISKGKSMVAIMRPFGEVVASPFEVMHTDSELRQLANRLKSLNGETKVIMECTGNYFYPVAYALHEAELFVSAVHAQLIHDYGNNTIRRVKTDKADAIKIANYGLSNWMELPRYIPEEDIRRMLKAYSRQYNKIKVMLKNNLISLTDQTFPGVNELFTSPPRKRDGHEKWMDFVLKFWHCECVCKLSQKAFAERYRKWCKKHGYNFSAAKSEDIYIASLGHWLVIPKDDTVKLLVTQAVAQINAICETIAVIATEMKNLASLLPEYPVVSKFYGVGDILGPQLMAEVGDVCRFRSKGSLVCFAGLEAPPFQSGKFESEDRSVSKKGSPHLRKVLFQIMDCYLKQSPADEPVYQFLDRKRAEGKHYYSYMTAGCAKLLRIYYARVSEYLRTLETDD

SEQ ID NO: 350510 - protein, 412 aa, unidentified
MEIQIQRGCGLDVHQATIVACLLIVLADGKVKNQMRRFGTTTRELLALGDWLQAEGCTHVAMESTGVYWKPVYAILEGTFEIIVANAQRVKNVPGRKTDVKDAEWIADLLLHGLLKPSFVPPKPIRELRDLTRYRRKLVESRSDERNRLQKVLETANIKLASVASDVFGVSGTLMLEALAEGQDTPAEMAELAKGRLRDKIPQLEPALEGRMEEHHRYLLKLQLRRMRDLNKDLAELEAHIREKLQPYQKELELLKEIPGVDWTLAAVIIAELGVDMKVFASASQLASWAGVCPGNHESAGKRRNVRVTQGNLHLKTALVEAAHASTRVKGTYLRDKYYRLKARRGAKRAAVTIAHKILTAVYHMLKEDVSYNDLGDLYLDKLNKQHLKRNLVRRLERLGFRATLEEQRPAA

SEQ ID NO: 350511 - protein, 440 aa, unidentified
MAMHKREEQVFPNAAGVDVGASSHWVAVPSISTDAPVREFGAMTDDLNAMADWLLGCGVDVVALESTGVYWIAVYEVLEQRGLKVWLVDARQVKYVPGRKSDVQDCQWLQKLMSHGLLRAAFRPSADVCVIRAVARQREVLLTEQASWVQRMQKALVQMNIQLTEVISDVMGLTGQAIIRDIVAGERDAKSLARHRHRRIKASEEDIVRSLTGNWREEHLFVLKQALGMYDDIARHLRECDEKFRELLAERSAASVDIGKTPRTGSKARAAFDVRQQLANWAGADLTRINGLGLDTVMKILSEIGTDLSHFANVKHFCSWLGLCPATKISGGKVLSARTKRSANRVRQALKMAAMSLSHSDSALGAFYRRLCGRMDKPRANTATAHKLARMVYFMLTRGEAFVDQGQQRYEEQQRQRNIAALKRRAAALGFQINPLQAAA

SEQ ID NO: 350512 - protein, 344 aa, unidentified
MESVPIFVGLDYHSGSVQACVVDAAGKVLLNSKRASSVPDVVSVVQSLGHVQRVAIEACCGAADFGDHLAHATGWRVSLSHPGLVSKMRSSIDKSDRSDARVLADLCRTGYLPGVWLPPEPIRELRTLTRRRHQLTDAIRRAKTRIGALLRDKRVATPPEIVTKWTLRHVAWLKALTLPPCARIVLDDLLAEIHYHAQRRDTIDAQLEQATAGDAMIARLRQVKGIGPVTAWTLRAVIGRFDRFRNGKQLSRSCGLTPKNASSGERVADAGLVRAGDPTLKTVLIQVAQRVVRCAGEWNSLYLGLLERGKPACVAIAAVANRWTRRLWHDLKGMGDGGGMSAAA

SEQ ID NO: 350513 - protein, 422 aa, unidentified
MQSTRALKLKQVPVGYLIVGIDPHKRKHAAVVMGQDLVVHGKFKVLNSRQGYEEILERVQRHMMATGSRGAIFAIETGGHLWRNLAYFLDERGIPFRLINAFTLKRRREGKDLNRRKNDFRDAEVAAELLRTGEFTETKLPQGVYAELRAAHNAYRRLVKERTRIANLLQGLLDGLFPEFVDVFKDPCGLTALAVLSACSMPRAIASMGKDEFIKAVEVAHQGQRLMRKKLLALHQSAHTSTGIQAGAQSVALELSFLVERLRVIKGQVERAVEVMVRLVDSSEEGKYLLSIKGLNYVSVAGILAELGAFSSYRHAKQLVKMAGTNPTEHESAGKRGSHTPMSKKGRPVLRHCLWDAVIPMLRHNADFRSWAKNLRERPVHANPLNGREVIGAAINRLLRLCFALVKQQAAYRMPEPAQAGA

SEQ ID NO: 350514 - protein, 389 aa, unidentified
MYFVGIDISKYKHDCCIISAADQQIVSKFTITNDKDGFEQLLISLNSLSNSEDIKIGFESTAHYALNLELFLENANHSFMEVNPVLIKEYKKSTTLRRTKTDSVDCESIARWLMTVEYKPHSKGFYHAYSLKSLTRLRDRLIRQRSFYLVKITNVLDHTFPEFKPFFNERLSKTAIYLLENYGSAEKMAHMNSVSYDKLRCISRGKFSIQQFLRLKELAANTVGVNNSIFDIELNSLLTLYNSLCKEIKNLEAEITRLIEEVHPHYMSIPGIGPISAAVIYAEYGDISNFSNPSQMLAFAGIEPGINDSGTESHGGRMVKHGSSQLRYVLLNACLPLIRFDLTFATYYAKKRAEGKKHRVAITHVAKKLIRVIYALERQDVDFNAQKLR

SEQ ID NO: 350515 - protein, 365 aa, unidentified
MQKISTMQASGKNIFEGQLTIGLDLGDRSSAYCVLNEAGEIVLEHKLATTPEAMKQVFGSLPRCRIAMETGTHSPWVSRLLTALGHEVIVGHAQKVRLITKSRRKDDRLDARTLARLARIDPELLSPVKHRSAQAQLHLTEIRARAVLVSARTALVNAARGLVKSYGERLGKCGTQQFPRETTSGLSTGLREALEPLLREVESLNERIQEYDRRIAKMAKQTYPETALLKQVKGVGDLIATAYVLTIEDPHRFRKSRDAGCFVGLQPGRRNSGESEPQMRISKEGDEYLRTLLVQGAHYILGPFGKDSDLRRWGQKLSARGGKNAKKRAVVAVARKLAVLLHRLWVSGEVYEPLRNSQKAMSAAA

SEQ ID NO: 350516 - protein, 403 aa, unidentified
MNAVGIDVSKGKSMVAIMRPFGEIVASPFEVAHTDSELGKLAGLLRSLNGETKIIMECTGGYHLPIAYALHDTRLFVSTVHAMLIHGYGNNTIRKVKTDKADAIKIANYGLDNWLNLTQYVPEDEVRQMLKAYSRQYIKYSKLKTTLKNNLISLLDQTFPGVNELFTSPPRKSDGHEKWLDFVAKFWHCKCVCDVSQKAFALRYRKWCKKHGYSFRESKAEAIYIDSIGHINVMPKNETAELLITQAIKQINTIAESIAIVAREMKQLAASLPEYPIVIAFYGVGELLAPQIMAEIGDIYRFRNKQALVCFAGLEPQPNQSGKMETAGAISKKGSPHLRKSLFLVMDCLLKKAPIGDPIFQFLNRKRAEGKHYYNYMTAGSAKFLRIYYARVKEFLDTYYDET

SEQ ID NO: 350517 - protein, 369 aa, unidentified
MSETSVAYQSFVGVDLHKCTVTLVAVDPAGDEIARLKAPTKCIGNITSWLRSLPDPVWMAVEACPFVEWFIDRFRWCVCRMDIADATELANRRGKRRKNDPNDALDIALRLARGECPLGFIANEELMQLRKLGRHWRQLSRLLSRTKHAMKSMLNAANIRGPKFDAAGAHRWFLAHGHLLKPVQQACFADFIDQLVLVERQRERLRREIILANRSESFIHITELLKSVPGIDEIWACIIAAEIGPFDRFPNADALEFWAGMTADLKESAGRTQSGHITKAGSRTLRWALCKAAVTLCRPDAKQEATRQRLIRQVGGVKAKANVAMGRRLLGILYAMVRDGKPYENAQPTAHNRAANRARAARRKRKEAA

SEQ ID NO: 350518 - protein, 363 aa, unidentified
MHMKRQPQYFISKSPRRGSRVGTTMGIDLGDVWSHYCTINEEGEVIDRGRFRTNPSGVDKRFRDLEPTRIAMEAGTHSIWISEQIRDLGHEVIVANVRELRAISHSDRKSDSVDAEKLARYARLDPEILRPIAHRTVAQQETLTLIRARDVLVRLRTSAVNSVRGLAKPCGYRLPASSTLCFAKRCLAMMPSGLAVALSPLLHQIGDMTVKIKEYDRAIKKLTETEFQETQALIKVYGVGHLTALTYVLTLGKKERFQRSRDVGCYLGLRPKRSQSGDSDPQLGITKAGNGYLRQLLVECANHVIGPHGKDSTLRRWGLSLGARGGSHARRRAVVAVARKLAVLLHRIWITQEAYLPFYAAAA

SEQ ID NO: 350519 - protein, 339 aa, unidentified
MQVTTVGIDLAKHVFQVHGITRDGQVVFNRAIRRAQLMQFFTNLEPCLIGMEACGSSHYWARELSKLGHDVRLIPANYVKPYVKRGKSDANDAEAICEAVTRPTMRFVAPKSEEQQAVLFLHRARDLIVRQRTQLSNMLRSLLAEFGVIIPQGTGAAVKYAKGVLEGEKPALPEFARDVLRQLSHQLVAMHLRFRWYEMRMRLHSKLDKRVMLLRTIPGVGPVTASALVATVGDAKQFKNGRQFAAWLGLTPLNLSSGGKERLGRITKMGDRYIRRLLVTGMTARLRQMKVNPDRVDPWAIGLLERKPARLATVAMANKTARIVWAVLTKNEYYRPHAA

SEQ ID NO: 350520 - protein, 473 aa, unidentified
MHRRIVGLDLGVATDHTAVIVDETNTELGRRRAKPTRDSLAALRAAALAGAPAGTVAEVVIEPTGPAWLPIAVFFAATGDVVYRVSSQKAADLRRYFRRHHKTNRIDATTLARIAILEGDALRPVELARGDAAELDREVRVCERLTEEIAERKTRIRDLARQLMPTSGDALSRTLSRTDLEVLRAFGDPRALVAQGVEILTAFVTKVSHGMYRRPKAEAFLAAATEALDLYGDTDAVPFSALAADLATEIALLDTLEAARAPHERRREELYHLVDPQGLARTVPGIAHNGAPLAVAAVGRAGRFANADRFASYTGLVPKASETGETDHKGQAMTKAGNRKLRRMLYRAADTARKEDPQLARIYWTQMVERGANHTKALAVVAAHLARRLWRVLERQSPYVVCDVDGRPVDKAEAKAIIAEHYTVPEEIRRRRRAKKKVGKAPHQVLEGHANKRARGAITRRPSPPTILVGAPT

SEQ ID NO: 350521 - protein, 401 aa, unidentified
MKRFPGGIDVGSERHHVIIMDNQEQILYDREVTCKFSDFHKAIEEFREIEAKEKMTIEFAMEGKNGYGTPFDRLLIENGYRLYNVDNLKLKRFKDVFGAEWRNDRRDAKMLAKMLKLREYVDKGKEKAFIEVTKMPSVNEKLKILSRHQQSLINEKIRIQSRLKKRIQEVCPDILEFGNTDSKKLLRLMIKYPDFSKYKKLTKEALLKIKMIGKKQASLMLDGLRDIQCLEEMAETYKTIISSGARRVLELKEEIATLDSKLEELGEKSREVKRLISMSGVGTKLSSRLVGEIGDINRFEKEDQLAVYCGVACINDDSGKSKKTRAVYKANRICKATMIDIAGCTIRYVPESKAYYEKKRAEGKKHNHALRCLARQLIKVVFKMLKEDRNYIMKEKVKKAA

SEQ ID NO: 350522 - protein, 334 aa, unidentified
MNSKLSHVGVDVSAETLDVSVRMPASELHAAQFDNTADGHAKLIGWITKKGRAARVVLEATGSYSLDLALALHAAKRVEVMVVNPRVARRFAEACLQRSSTDTTMALTLCEFAARMEFVHWIPPAPEIRELRAITRRLAALIVERTRELNRAHAARASADASKVVANDIEVNVRHLQRRIEELERHALELVAQHPPLQRACQHITSVRGFADRSAVQLLGELLVLPEDMVVRQWVAHSGLDVRHFDSGTSVHKQPRISKRGNAHVRRILYMPALVAIQHEPNVRVFYEQMLAAGKQKLQAIVAVMRKLLHAIYGMLKTDTNFAGEKFRKLPQAA

SEQ ID NO: 350523 - protein, 353 aa, unidentified
MNTTPELVTGVDVSDRFSTFFTITADGEVEEEGRVRTTAAALRAHFEGGRRRVVIEAGPHSPWISRLLTELGHEVIVANARMVALIHKNPKKRDRVDAEALARLGRADPKLLYPIEHRSEESQIHLGVIRTRDAVVRARTALINHVRGTVKSLGARIPRCSAETFHTKAAEHLPDPVRPALDPILETIARLSTQIRFFDKQIEELSAERYPETALLRQIKGVGPVTALAYRLIVEDPSRFERSRDVGSYLGLTRRHDDSGESEPELRITKAGDELLRRLLIQGAHYILGPFGPDTDLRRWGLHYIQRGGHSKTAKKKAAVAVARKLAVLLHCLWKTGQVYEPLHNATHAAEAA

SEQ ID NO: 350524 - protein, 340 aa, unidentified
MGNVTTIGLDIAKNVFQVHGVDADGAVVVRQRLTRGRMLKFFAKLPRCLIGIEACATSHFWARELVALGHDVKLMPAQYVKPYVKRGKNDAADAEAICEAVTRPTMRFVGIKSPEQQSAMMLHRVRLILNRQRTQLSNAMRAHLAEFGIAAPIGRNGIEQLLDVIADPTDERVPADARFCLEMLAAQLRIVKEQILENDRRILASARETELGRRLMEIPGVGPLLASAIVATVPDPAIFRSGRNLAAWIGLVPRQNSSGGKERLGSITKAGHQYLRQMLIVGAMAVVRYAERNGAKRPWLVQLLARRKTKVAAVALANKNARMIWAMMASGERYREPQIV

SEQ ID NO: 350525 - protein, 343 aa, unidentified
MMQYVGLDVADEETSVCVVDQEGAVLVEAKVASEPAAIAAFIRARAPQAAKVGFETGPLAAWHWHELKQHGLPVVCLDARHAKAALACQINKTDRNDAFGLAQLVRMGWYREVQVKSYGSHYVRAVLRVRSMLVRSRCDFENQVRGLLKIFGLRVGKTGRKGFAKRVDELLEAQPELEAVVGALLKVRETIVEQIATLDAGLQRIAKGSATIRRLMTVPGIGPITALAFASAIDDPSRFRKASSVGAYFGLTPRRYQSGEIDRPGRVSKAGDMMVRRCLFEAALVLMTRVGGWSPLKAWAVRLSKRIGWPRAVVALARKLAVILHCIWVDGTEFWWTRTEATA

SEQ ID NO: 350526 - protein, 384 aa, unidentified
MADRTQIASPTAEDFDAARCFAAIELSKKNWLVAILTPLSDKVSLHSLPAGDGKKLLALLEQARRRAAEGLGRPVEVLSCYEAGYDGFWLHRLLERHDIRNHVFDPASLLVNRRARRSKTDRIDVQGLLRALMAHLRGEPKVVSVVRVPSIEAEDARRLHRERHRLVGERVQHVNRIKALCALQGIYDYEPLRGNRRERLAELRTGDGRALPPQLAAEIGRELQRLELLLSMIAELEAQRDAVAAEAQPHAAKIQQLRRLKAIGPEFATVLTNEVFYRRFDNRRQIAAYVGLDASPFCSGQMNRDQGIAKAGNPKARTTMIELAWMWLRHQPGSTMSRWFHDRVRELRGRPRRIAIVALARKLLIALWRYLETGLVPEGAALKA

SEQ ID NO: 350527 - protein, 412 aa, unidentified
MTITCGIDWAEQRHDVAVLDHDGRVLARRRIDVGVAGFTELVGLLNDLAGGPSGLDGRSVPIAIETDKNLLVVALQSAGFTVYPINPLAVARYRDRHGQAGKKSDADDARVLADILRTDAHRHRALPEVSEHGREVKALARQHQEAVWAMQQTANRLRSILLDFYPQALLAFPNLLHKAAQAVLTAAPTPAHGARLTSRRVVTLLHRCGRRNDAALVEHIVGALTAPALRQPVAVEAALGVSARTLLTVLGAQQAAVETLEEALSERFAAHPLAPILRSAPGLGPVLAARVLAEIGDDPARFESPSGLRAFAGTAPVTRASGRSHYVKARKIRNKRLGDACHWWAFAMLTKSSGARAHYDRRRAAGDHHNAALRNLANKLLGRLWWCLKTNTLWDEGTAWSAPTRQAAQAAA

SEQ ID NO: 350528 - protein, 341 aa, unidentified
MSESALIGIDLGKHNFHLLGQDKSGREVFRKKLSRAQMMRFFGNLPSCVVVTEACAGSHFIARQLAAMGHTTKLISPQFVRPFVKGNKNDFIDAEAICEAASRPSMRFVTPKTESQQTLSVLHRMRESLVHDRTKTANQMHGFLLEFGISLPKGSAIMKRLAAVLAEHELPVRLTVLLQRLHDHFVYLDEQIKELDKELACQLADDDLGSRLLSMPCVGPITASLLAVEMGDGKQYRCSRDFAASVGLVPRQYSTGGKANLLGISKRGDKHLRQLLVQCSRVYMQRLDHQKGALADWVRALLRRRHSNVVACALANKLARIAWAIAAHHAQYEAGPDALNA

SEQ ID NO: 350529 - protein, 399 aa, unidentified
MNLQYLPKELQIGIDVGSINHSVAIGDGYGNPIQQFEIEHNIKGFNKLISIIDKEAKERDAIVHVAMEGYNGWARPLDTVLLEKGYKLYNVNNVKLARFKEIFPAPQKSDRFDAQKILELFSLQKHLPVAKKVLQEIMPFSNNNVKLKKLTRRRRQLVDEKVAISNRFSTDLQAVCPELRAITNNIDSLRFLRFFTLKEDIRDLAKVSKVKILKVNRLGESYYNIIHQWQKEAVFTVDTELVAPMLYEDAIHILELKNRIKQLETEIRSLIPNSTIARVIDTIPGFSTVTAGELAGEIGTIDRFNSEASLALYLGMTNLDNSSGKKTGTKRNISTNRHAKKAMITATMKHTQHVEQSKQYLEKKISEGKKYQQAIRSIGRHLIRVIWNMIQNDRAYEIR

SEQ ID NO: 350530 - protein, 401 aa, unidentified
MKYGVGIDISKGKSTVSILSIEGEIIEEPFEITHDIEGLALLDKKIKKLPIEDVKIVMEETGTYHLPVLGYLLDKEYCAIAENALKIKKYLDRGLRKAKTDKKDSYKLAEYACDNWFKLNKSKENDEVYNELRFLSRQYLSQIAIQVKQKLFFSSLCDLVFPGYYQLLDENTFILGLKIFRKYFHPDIVKKKKESEFIAEIDKIAKKLGHKGVGISLATEIYALAQIAYPSRPNNKNTQLCAHSCVDELIVTIKTSNVIISEMDKLASTLPEYNEISEMPGCGKKLTSRIIAEIGDIRRFNNAGSIIAYAGLDAPPYQSGQFEAVNRHISKRGNKYLRKTGYEIMKSIKSSVRSDNEIRTYIIKKENEGKAKKVAKIAGLNKFLRTYYGVVKKKYKELNIW

SEQ ID NO: 350531 - protein, 425 aa, unidentified
MDKLPTGTGNGQRKIEEALFVGCDIGSSNHAAAIMDSSGTVLEKLPKVFNTLKGFMFLDKKIAYWKIRIGATTVRFGFEPTGHYWKPLVHFMCNREIEVFFIKTTAVKAMRELTDSTQSKNDKRDAITLAHLLREGKVLKSPPVEGIWRELRDLVKHYRGLSDAYESVLSRLQVIIETFFPELAEVFCSTKAVGLWRLLEAAPFPSDLIAKETNWLTSHLKRWTRRGKSAEEKASYLMQAARESVGLPVRQGDRVRLQSLLGLLEHYKKELRTLEREMERSLMETGYGEILLSFPGVGVITAATFLGELGDPANFDDARQVVSFAGIDPSEKSSGKKESRRKISKKGRPILRTNIYFMVLGAICHCPELRTYYQKRKKDIESGKLDLKPQQLMFAVAIKQVRILFAMCRDRSLYNPDYREMKKAA

SEQ ID NO: 350532 - protein, 352 aa, unidentified
MPMLEGMIDHVIGVDTHRDTHAAAVLDPNGGVRAHVEVTADQPGHARLLAIATRRAPGRRVWALEGTGSYGAGLATFLSAQGEWVVEIDRPKRSRGRTGAKSDPLDAIRAGREALARDQLASPRQRGQREALRVLHTTRSQILQVGADARRHLKALIVTAPDPLRQALRGRPWLQQARACAALQAAPTDSIEVRATVQAMRLTAQRLLGAYAEAADLKQQLHTLITTMAPGLLDQPGVGPISAAQVLLAWSHPGRVRSEAAFAMLAGAAPIEASSGQVVRHRLNRGGDRQLNRALHTIVMIRQLQHPATRAYTARRTGQGKSPREIRRCLKRMIARQLFRLLERTATNQIAA

SEQ ID NO: 350533 - protein, 393 aa, unidentified
MFYYLGIDVGKFSHSLCLLTEAGKKTIFQINNNREGFEKLRIKLSELNCDKNILVGMEATGHYFLNLYDWLLQCGFDSEQIALLNPLQVKSFRNTNLRGAKSDNVDSERIAVLLKFGEFKRCNVATDEMMNLRELTRLRADLVANIGDLKRKIISVMDRVFPEFMTVFSNRFGKTVMSLLNSYTPEEMAELSLEKLTDVIKNLSGRGRGISQKKIQALHEASRNSIGITFGRQAFKIELDILSTRLKVFKEQVEKLENEIQLIAEKFDSKIFTIPGIGATTGAAILSEIGNIQNFSLAVKLIAFAGLDPKLKESGKYQGRTPISKRGSKYLRNAIWYSAMVACRVDDKFKKFYQDRRNKGKSHRYSVTAAANKLTKVIYHVLKNKCEYDSKLV

SEQ ID NO: 350534 - protein, 391 aa, unidentified
MLYLGIDIAKNTHVASLLNESEKPLFKAFSFSNTTDGANSLIEKLDHHAKSVSEVEIGLEATGHYWLSVYSFLIERGYTVYVINPLQTDGWRKGIEIRTRKTDAIASVLIAELIRYGNFVETTLADENIMSLRSLSRFRNYLVSSISDLKRKVICVLDQVFPEYQSVFSDVFGKTSKELLLHFQTADDFENITAAQIENALKNITLKSFAKNKLSQISEIAAKSFGLGFCRDSFSLQLKLLIEQIKFIEAQVDDVETQIKQILVKVNSPITTIPGIGSVNAAVILGEIGDINRFSNPSKLAAYAGIDVNVNQSGESKSQNGKMSKRGSSYLRKTLFQSALVAAFNDPTFSAFYQKKRSEGKHHLTAVGAVARKLCNIIHAVLKNNSPYQLQ

SEQ ID NO: 350535 - protein, 316 aa, unidentified
MVSYGADVSRTWVDIVRTDNSRQCKSYDRIANERTALEAYWRAEQDIRPTLQVTVESTGLYQLTLVRTCLRLGIAVRLINPILTKRLTQTSVRKTKTDQKDAHRIALLGLERAGYPVVEEQLSQTKFYLRASSKLANLSRTLQATRTHYELAGVPASSLDETFGACQLALQQASKQLQAQGVAGCNVADMQLLQSIPGIGPVTAARIHAEIGDVRRFRHAKQLIAYAGLDPSVHSSGNTIRLGKLTKRGSPHLRHAFFIAASVARRYDPELRMVYERKRAEGKAYTQAVTHVARLMVYRVYAIWSRGTPFVKKGDG

SEQ ID NO: 350536 - protein, 307 aa, unidentified
MFIIGIDPHKGSHTAVAVDRSETVVDTIRVEADRHQRSRLLEWATRFEPRTWAVEGATGMGAMLAQQLVGAGEHVVDVPPKLSSRVRLLERGRIDKTDPNDARSAAIVAWRTPALNVVTTNDEHRVVLRLLADRDHQITAQRTRSICRLHAVLCLLIEGGTGRSLTVSGAEKLLASVDVDGPITTERIATARQLIDEVRALDTARGEVRRRHVAALEASKTTVTQVYGIGPLTAAIIVGRVGDVRRFPTSGHFARHNGTAPIEASSGPIKRHRLNPRGDRQLNHAMHMAAVTQVRHDTPGRAYYLRK

SEQ ID NO: 350537 - protein, 323 aa, unidentified
MIKDIKYFGIDISHLVFDVTDSKGNYYQFKNNVTGFKKFLKLLGSSSHCVMEATGYYHYQLAYFLLESGIKLSVENPLAVKRFIQMKLSKIKTDKSDSKLICEYAKQVELKLWEGNSKHQTECLQMTRLLSVYTKQSTMLKNKLHGEAVLGNPSKVVVSSLKRSLKHVKKELKTLEDKLLEMVKENHQDVLTRLKTIPGIGNKTAVMLIVLTDGFDRFTSGSELCSYAGLTPVIRKSGSSVNGRSRISKIGNQKLRNLLFMCSFNACKYNKACRDIYQRIVAKGKSKKLALIAVCNKLLKQAFAIAKSGLIYDDTYRSILVKN

SEQ ID NO: 350538 - protein, 380 aa, unidentified
MRDATRFVGLDVHAATIAVAVAEPGRAGAVRQLGIIPNELTAIRKLFGKLGTKKLKACYEAGPTGFALYWQLTQLGVDCEVIAPSLVPVKAGDRIKTDRRDAVKLARCYRAGELTPVWVPDQAHEALRDLVRAREAAKRDQHRARQRLSKFLLRTGKKPPQSSSTWTQKYVAWIRSLSFEHRAQQATLLDYVGEVDHLEARLQRLELAIDKALTEAPAGLKAVIDGLQTLRGLARLTATTIAIEIGSFSRFATAKQLMAYCGVVPSEHSSGASRRQGAITKTGNSHVRRVLFESAWAYRHRPGLTGRVKKQQKLVAPSTSEIAWKAQHRLHRRYVALSARGKPITKVIGAIGRELLGFVWAVAVDVERRHQLEQTHAKAA

SEQ ID NO: 350539 - protein, 393 aa, unidentified
MICVGIDVAKDKHDCFILSSEGEVLTDVFTIPNNAEGFDTLLQTIRRCARPEDKIKVGLEATGHYSYNILGFLLNEGLDTYVINPLHTNLYRKSLSLRKTKTDRVDARTIAAMLMSDVDLKSYTDTAYHNEELKSLTRYRFDKVRERAKLKQSVSRLVTILFPELEKLVSTLHMASVYALLSEFPGAKQVAGAHLTHLKAALYDASKGRYGRDMATTFRDAARCSVGSVMSAKSLELRHTIRLIHELDAEIEDIEAAIQSMMGEIQSPITTIPGMGVRMGAMILAEIGDFSRFDSPDKILAYAGMSPSTYQSGQLSLSGAYSHMEKRGSRYLRYALYNATKYVCLWNPTFAAYLAKKRAEGKHYNVALSHATKKLVRLIYALEKSKWPYSTAA

SEQ ID NO: 350540 - protein, 388 aa, unidentified
MQVIADRPEAPSAIRTNLGAIFASLELSHSTWLITSLSPGSGEKMSKHVVHGGDIAGLLQRFAQLREKAVAQTGRNFPIIVIHEAGLDGFWIDRVLKNEGIESHVVDPASVATSRRRRRAKTDKIDGEALVRTLLAYKRGEPRVCAMVKAPTPEEEDRRRLCRERNVLITERVRHVNRLKGLLFSQGVCGYEPLHRNRRRRLDELRTGDGRPLPKHLKAQISRELDRLELLLEQIKAVETERDALLAAQQIAAPPSAAMLLAIKGIGPEFAAILWSEGLFRHFDNRRQIASYAGLAPTPWKSGSIDREQGVSKAGNPRLRTTLIQLAWLWLRHQPQSALALWFKERVVHNGGRLKKAAIVALARKLLVALWKYVAAGVVIEGAIMKAA

SEQ ID NO: 350541 - protein, 407 aa, unidentified
MQITCGIDWAEVHHDVAVLDAGGQVLGRRRIETGLAGFTELMSLLAEHTDNPTSVPVAIETDKNLIVAALQAAGVPVFAINPRAVARYRERHGQSGKKSDPGDAAVLADVLRTDAHQHRRLPEISDAGRAVKALARQHQEAVWALHQTLSRLRSVLLEFYPQALRAFPNLKHKAALTVLAAASNPELGLRMTSRKLVTLLHRCGRRNDAALVEQILTDLKTPALRQPAPVEAALGQTVTGLLGVITAMQTAVEQLEQALTAEFEQHPLAPVLRSAPGLGPVLAARVLGEIGDDPTRFATAGGLRAFAGTAPVTRASGRSRRVSARQVRNKRLGDACHWWAFAMLTKSPGARAHYDRRRAIGDHHNAALRNLANKLLGRLWWCLHNNQLWDDNAAWTNPSQQPQQLAA

SEQ ID NO: 350542 - protein, 411 aa, unidentified
MQVVYPRCAALDLGKDVLVAAVRLQDAGGVSCECRTYGTTANQLSTLRGWLISHGVTHVVMEATGSYWKCVWRALEGHFELTLANPRQIRSLPGRKSDVKDARRIVDFHAHGLIQGSFVPPAEIDAVRELTRTRKQFVREINRHIQCIQKILDVANVKITGLITDTLGVSGRAILKALIAGQTDPERLAALAHPRLRASRVQLVEALQGQPTEQQRSLLGMHLQLIETLETSIAQLDDRIAQAVEPFRELVARLGLVPGLSDEVSIPALLGEIGVDMTKFPTPGNLISWACLCSRNDESAGKVRSRRTLKGAVWIKTLMIQVAWTAVRTKNSYFRAQFYRLCRTTGDRRKAIVAVAASILTVVYHMIREGTPYTDLGVNYFDERNRAGAARRLVARLQTLGYNVQVTEAVA

SEQ ID NO: 350543 - protein, 415 aa, unidentified
MKVVFPTCCGVDVHKTFVVATIITTPVDSLQPHYQKKRFSTFNSDLNRFADWLLKHDCLDVCMESTGKYWVPVFNILEKRGIRVVIANPKWVKAIKGNKDDTKDSKWIGDLFRIGLVKSSFIPDLDIRILREFTRYRYKLISMKSSEKNRFQNAFTVCNVALDCVVSDMFGKSATAITDYLTSDESFDPAHCVSLLQRTLKKKAEQVLESIEGFSIADEQKARIKIVREHYDFIEKLIAKVDTCVNEMVAKYGDEINLLCTIPGIDRNSAITIISEIGTDISQFGSSKRLCCWAGLTPGNNESAGKKKSVRISRAGVYLKPALVQVAHAAVKDKNNPYYALKYERIAKRRGKKRAIIAIARMILTAIYSMFCTGEVWNPVDLFKIDMPEHLKQQQLAKAIKQATRFLEKQGLSLA

SEQ ID NO: 350544 - protein, 426 aa, unidentified
MNTTTDFAATIGLDWADQKHDLWIRPADGSKAEHLRLEQTPEALHEWVAKVRERFGNRKIAIAVETSRGPVICALMAYDFIVIFPVNPKCLKDYRSAFSVSGAKDDRTDAQLLEEFVRLHRDKLRALEPDTELTRKLGGLVENRRHMVDERTRLVNQIHATLKTYYPMAETLLDGQMNTAMAADFLARWPELESLQKAKPEVVRSFFYKHNSRGAKKTEERLAAIPKAKALTTDAAIIVPARHLVLALAGMLRPLHQAVARFDKEIQQAMDQHPDAALFRSFPGAGPALAPRLLVAFGTNRDRFQKSRDVAEFYGIAPVIVQSGTSKTIHVRYRCPKFGRQTFHENAGCALKKEPWAKCYYEQQKERNKGKHHQACRALAYKLVRIYFACWKHRQAYEPNRYLKALEDHASPLHRKLGKLTAAPCE

SEQ ID NO: 350545 - protein, 455 aa, unidentified
MPKRTTGDRPELKRINLGAAAIDIGSKMHMAAVNPAFTDVPVRSFGTFTQDLHDLADWFKACGVTSVAMESTGIYWIPVYEILEQRGFDVILVNARYAKNVPGRKTDVSDAAWLRELHSYGLLRGSFRPDAEIATLRAYLRQRERLVEYAAAHIQHMQKALMEMNLQLHHVVSDITGATGMRIIRAIVAGERDPDVLATYRDVRCHSSMATIRAALVGNNRHEHVFALTQSLELYDVYQAKMLDCDRKLEVLIAALNNKGAKPLGTLSKPRIKTKQVNAPSFDVRTALYGVLGVDLTEIHGLGSSLALKLVGECGTDLKAWPSAKHFTSWLCLAPGNKISGGKVLSSRTRRSSSRAAALLRLAATTVGRSDTALGAFYRRLSSRAGKSKAVTATARKIAVLFYNAVRHGMTYRDPGADHYEQQYRKRVLANLQRRAKSLGFVLRAIPGDANPAVS

SEQ ID NO: 350546 - protein, 357 aa, unidentified
MRFYISKLNSSVGCEPVYAMIVYEVYNCLFKYKVIKFIGIDIAKNTFVAAYPQLKGYQTQTYTNDVKGVKKFINSFITAEYHCVLEATGNYGTLLLYMLSEQNVAVSLINPKHVKHFARMMMTVTKTDDVHAKLIAMYGEKMTPSIYKMPARVIIMMKQKKVVLRQLKKQLTFLTNLRGSFDALPQTDKNGLLVLNKTVKFIQKQIAVLEADITNIANEEFNKQIKSLTSIKGIGLTLATSLIVSTGGFTQFESAKQLSRYIGICPTYQQSGTSINIKGTINRNGNSDLRSLLYIASWSAIRYNQACKESYEHLKAKGKPSKVALVAVANKLVRQAFAICISETVYQDGYVGKHKIV

SEQ ID NO: 350547 - protein, 351 aa, unidentified
MYTLGIDLHKKSSVWVLIDEQRTELWKETVLCHPEYINIAVEKIPVLLKEIQVAIEPVAGWRWVSQQLEEMGMKVHIAHPRKIQLIAKSTKKTDDEDSRTLANLLHSGFFPEAHKSTEEIYQLRLLLRERTFIVRQRTSVKNQIHGIATTQGLHHISGGNPLFKRGKVDIVSGNNFVLKELHHLDEDLEKRIKPFDERLQKEFKKYPEALILQTIPGVGIITALTIISEVDDFKRFKTGQKLTSFAGLVPRQRSSGEVVRYGSITHAGSAPLRTALVETAMRIREGNAPELFAFVKRLTPICGAKKARVALARKLLVIMWKMVVSNTPYKPKILFSSCTTNVSDLDTGSGN

SEQ ID NO: 350548 - protein, 322 aa, unidentified
MKKTVEYEQVFERGCGMDIHKDSVYATVMGEGINTETRVFKTTTRGLRELGAWLTKLDVKAAAMESTGIYWKPIFHVLSEFPIELMVVNASHIKNVPGRKTDKADSQWICKLLISGLLKGSFIPPADIQKIRDLYRYKKKLVQYISSERNRIIRALEDANVKLSSVISDTSGVMATHIIEGLLAGRKDLKNLVMERYHHRVKASPEEIVEAIDGKITPHIRFLINCIQKHISALHQQIAEVDAEIDKYVKAYETQIELLESIPGVGREGAISIISEIGVNMDFFPSEHHLASYGGMCPGNNESAGKKKVVERAKGINILTHI

SEQ ID NO: 350549 - protein, 343 aa, unidentified
MKKLKSDPQALLALLRRWRDQSTKAGGQIRRMVLAFEAGRDGFWLARWLRVRGIEAYVIHPTSIPVSREHRRAKTDRLDTSLLMRALLGWLRGEPKHCSMAAIPTAAEEDACRPTRERETLVRERTRVVNRIKSTLIRFGIRSFKVKLRQARQALEALRTPEGEPLPPNTLAELRRDVARLELMREQIAEIERTRLERLKQAPHKGTHPMIRMLARVMGIGIETADMLVHEVLRRNLRDQRAVARYSGLTGSPDESGSKRREKGLARAGNARVRRGMIQLAWRWLMFQKNSALAQWYQARTADGRPGLRKTMIVALARKLLIALWRYVTSGETPAGAVLRPAT

SEQ ID NO: 350550 - protein, 358 aa, unidentified
MNRTAGMSAGQIIGMVGGWQVVGLDIAKSVFQLHMVDMVTGEIVNKQLKRAKVLEHFANKAPCLIGIEACGGAHHWARGFKALGHEVRLIHAKAVRPFVSGNKTDATDARAIWLAVQQPGTKFVGVKTLEQQATLVLHRQRELLMKMKAMQSNALRGLLYEFGATFARGKNALFGEIEAALEALVNDIPQYVADSLREQVQRIKQLSADIKAIELRLAQRLRSDVDMKRVAKIPGVGLLTATAAIATMGEAQAFKSGREFCAWLGLVPKQSGTGGRVKLLGISKRGDTYLRTLLIHGARSVLTHAKEPGPWLEQIKTRRPANVVIVAQAAKMARTIWAVVAKQQDYQRGYQSVRPQVA

SEQ ID NO: 350551 - protein, 309 aa, unidentified
MAYKVAGIDVHKEVLMIVICEVDAPEAEPERRRFGTTTSELRRLSAWLREQGVQQAVMESTAPYGRPVWHELEPSLHLSLAQAFSNRAPRGRKHDFRDAERLARRLMAGELILSFVPEPEQRAWRTMTRMKVQLTRDKSRLQSQLECLLEEMRIKLSSVVSDLLGASGCRILRALAQGETDPRKLAALGDDRLQCTEEQRVDALTGNPQPFHRQLLALYLERHQLLTEQMDKLERLIAEAMKSHQEAVVRLAGVPGFGADSAQQVIAEGGPEASTFPSAAELTSWVGTCPGEETSAGENQSSRSAKGNR

SEQ ID NO: 350552 - protein, 362 aa, unidentified
MAKVRSWVGLDVHAAKVVAVTVDGESGELRAHQLSGVTAEVVALCAGLPAPVKAAYEAGPTGFGLARALEAAGIGCVVAAPGKIERPAQDRVKTDRRDAERLVRLLMVGGLHAVRVPSTGEEALRDLVRAREDVRGDLMRARHRMGKLLLRHDVRYDGAGDNWTARHREWLGRVELGDRGAQVTLLDYVGAIDALVMRRDALEATIAQLVPDSPWATTVARLRCLRGIDTLTAVGLCAEIGDFERFARAGQLASYLGVVPSEDSSGQRRRLGSITKTGSRHARRLLVEAAWHYRRPPRRGKTLAARQDGQPTAVMAISWKAQQRLHHTWRRLDHQRGKRRTLVAVAVARELAGFCWAIARAD

SEQ ID NO: 350553 - protein, 349 aa, unidentified
MRLYSRTHDVSCGIDLHARTMYLCVLDRAGQSLLHCNLPTRPEALLGALAPFRSEDLVVGCECLFAWYWLADLCERDGIPFALGHALGMRSIHGLKTKSDKLDSWKIAQLLRGGNFPCAYVYPRRFRATRDLLRRRLHFVRFRSELLTHLKMSEAQANLEPLKQRLDQAPNRAGFAERFPLGSSRSSIAADCRLLDSIDDLVGGLERELVACAKGDDLAAFYRLRSVPGIGEILAMTIFYEVPDFDRFDTVQQFASYARLVAPRAESAGKLGGASGRKQGNVHLKWAFSEAAVLLLRNNPSAQKLHSRLVARFGKAKALSVLAHKLGRAIFHMQKRQQPFDAERFYREA

SEQ ID NO: 350554 - protein, 412 aa, unidentified
MKDLLEISCGLDVHKEKIVACILTGPLGKPTHSEIREFSTLIPDMIALRDWIVSRNCHHVAMESTGIYWMPIYEILEDAFSGDITLLVVNARHMKNVPGKKTDMRDSEWISTLLRAGLLNGSFIPEKRIREFRDLNRYRKSIIRDITSQKNRIEKFLQSSGFRLSSFISDIFGASGKNIILHLIEHGQIDRTALDSCLKTKIRNHIDEILMSVNGTLSEHQKKFLKILMNHYDSLKEHLNEIEKDLEQDIEPFILQVQQLNSIYGISTTASCAIIAEIGVDMKPFKTAEHICSWAGLCPGNNESAGKRKSTSVTKGNPYIKSMLCEIAWVIAGKRNTYLSAWYWRIKQKKGAKKAIVALARKLLVIIYTMLKQGTLFDESCFEARRKNCEQKQLSRYIRELEKHGYHVEAQG

SEQ ID NO: 350555 - protein, 352 aa, unidentified
MVYAGLDLHRRYSVITVIDEDGYILRQKRLPNDESIIDFLQSLGEPVQVAVEATRNWYWLYDLLDAHNIEVKLSHPLKTRAIAAARIKTDRLDAHTLAQLLRSRLLPCSYIPDRSTRHQRELLRYRASLVKLQTGIKNRIHTLLAKNNISHRYTDLFGNAGMAFLSQLQLPEPYQDILDSYLNLLAAIRKEIAKADHQIRSLAREDELVRLLTTVLGISYYSALLIRAEIGEINRFPSAKKLAAYAGLIPATYASGGRVYHGHITKQGSRYLRWILIQAVMHIIRRPGLLRQFFRRIARRKGPKVARVAVTRKLLTWIYYMLKERKPFEEIAYEQACRVSPPMNLVRRRPLI

SEQ ID NO: 350556 - protein, 313 aa, unidentified
MHTIGIDMSKDTFHAAFDEHEVVIFKNTVRGVHEFIQALGQRGYEKNTTEIGTEATGVYHLLFCEQLRSDGWNVKVINPLITHRMFKSNLRHAKTDRTDAIAIRKTLLTGAGYAYTDTPEILALKTLVQEREALCRMRAETKQRIHAHTIRGKAAGLDLHDSFSGTIKLLSYEMKEIEKKMGDYAADTQKLLRSIPGIGKVTAASLVAYIGDIRRFSSPEKLVAYIGLDCRVHESGTSIHGKGYLTKRGNRYLRYMLFNSAFIARQRNPELKEYHQKKMSEGKHYYSALCAVERKLVHLIYAVWTRGTPFEAR

SEQ ID NO: 350557 - protein, 406 aa, unidentified
MENRFAVIIGLDVGKTAHHGCALDATGHKLFDKPLPQDETQLRELFTSLQERGEVLMVVDQPNTIGALPIAVARDTGCAVAYLPGLAMRKAADLYPGRSKTDARDAFIIADTARTMPHTLRQVDHDNEVLSALKVLAGFDEDLAHETTRALNRIRSLLTQIHPALERVFPGGTLSTDLVLELLEKFGGPTGFTSAGRGRVLRFARSHSRRDPSALVEKIFTALSEQTVTVPATAAVELVIPRVAGQVKELKAQRATVAHEVEAMLEDFPLASVLMSMPGIGIKTAAQILLAIGDGSAFETPGHLAAYAGIAPVTRRSGSSIRGEFPARSGNKRLKNALFYSAWVASDSDPISKAYYDRKRAEGKRHNAAVICLARRRCNVIFAMLRNGTYYQPPTAPTPEPTALAA

SEQ ID NO: 350558 - protein, 326 aa, unidentified
MSASFEQICIGIDVSKASLDVAIRGQTQASRFANTPEGVALLLASLEPAGTAVVLMEATGGLERSVAAALCAAGFAVMVVNPRQAHDFGKSLGYLSKTDKTDAQALAQFGYTLYSGDKRDKLLLKLPTPEQEALTAMVTRRAQLVGMRVAESNRLGSSHRTQAKSIEAMLKAIDHQLKALDEDIGGSLGKHFAAKLELLKGIKGVGTGTKAVLMACLPELGQLSMREIAKLVGVAPLNRDSGRMKGRRTTWGGRSEVRSALYMACLSAVRFNSVIRVFYQRLRAAGKPAKVALVACMHKLLTIMNAVIRSGKPWQADYGYAQAATA

SEQ ID NO: 350559 - protein, 332 aa, unidentified
MYNFFVGVDVSKKTIDVSWTDGPKPSYLNHFANTIPGFKKMIASLSKHTAVSFSEWIICFENTGTYSKALLSWLVSQEIPCLEENPMKLNGHKILSRGKSDKIDSRIICDYVYTKRDRVVPSTLTKPLIQELKKLLSQRELLLKQKQALAKSLQEQKAEFSPVLYELLEKQNKLLIDQYNLNITKIEELIDEKIKTDKEMDKNNKLAQSVIGVGPIITWYMIAYTNNFSSVKNSRQFANYIGIAPHPYESGTSIKRNAKTNKMANQQVKAIVSNGIQSAIQYDPQIQAYYVRKISEGKPEGVVYNNVKNKLISRVFSTITRGTPYVKLNSYV

SEQ ID NO: 350560 - protein, 473 aa, unidentified
MECITFGLDVSKGRADIEIINQSGTRLAGSCGYDDTRTGHDRLSEVLRDLRQRYPAAKVIAGVEATGGYERNWVAFFRREQAQGRSVAIHRLNPLGLKRFLDADLHRKVDDQRAALGIARYLQERKRQAEPNAIPLDGRVVFYRNIRGLIHGRTALVQRYKTLLSSTNPELVQFSHDEVPRWLLLVSVRYPTAAHLARSHGQALADLPHVGSVRAEQLRAAAKTSVAALTDEGSAAAIRLLAEEIIHANERIDALKKQLIAMTEDDPRVKLLDSIPGVAPWTATALALEIGDITRFADVRQLVAWSGLDPREDTSGDGIIKRGISHRGNAHLRTLLVQMARSGKLHNPVITRFIGRKIAEGKKPLVAIVAGAAKVLRIAFAILVSGKPFDPDHETKRAKPAAEAQQKRRIATRAKVTETPEPDLTAPVSAVEARKRRRATTNNATASKRPKCEVKPQEGAPATVATAVLPTAP

SEQ ID NO: 350561 - protein, 403 aa, unidentified
MYVLALDVSMGKSYAVIYHETTCLFEQEILHDKPYFCQLLQEIYALPERPQIVFEATGVYSRVIETFCQKNHFAYCLLNPLEAKRQLNSDLRSVKTDKRDAHRLAQTHSQFLRKQKQQSSEIYEQTRDLARFYQQIESDIKHMRMHLHTALQLTFPELETIFTNRLSKLALNLVELFPHPAYLVGLSQTKVKNLLKKNTDKKISDQKALAKAQTLLYLAQNSYPAESGQSISVQKVVYYAQQLKQLLTTKEQLAAQLIEAAKQTEEFDLYQSIPGIGELSAGLIIGELGDIRRFSSHKQLNAFVGVDTRRYQSGKYIAQEHMNKHGNPKARKNLYFIMMNMIRQQAAAPNHIVDYYYKLKTQPSPKKHKVALVACINKLLKCLHSMVRHSSTYDYSYTASNDQ

SEQ ID NO: 350562 - protein, 363 aa, unidentified
MLHAGLDLSRKGVDVCVLDEHGERVIVTAGSSDADGRRHLVGETGAFGGPVIATVESMTGTRFVHDSLELLGWNVEIADAQRAKGLAALACKSDRVDACALAELSRRDLVPAIWLPNLEVRGERRRARFRLHFVCHRVMLANRIHASLMSFGKPCPVSDLFGISGRALLHRLALPEAWTKNIEVALGLIEDVNEQIDAVELELRTLGADHPYVSLLTSAPGIGYILGYTIALEIGDIHRFSSPKKLCGYTGLCPRVHQSGERDFRGPLAKNGPKCLRWALIEAVIHAADTPSTAITTTTPRNDLDANGVRRSPGSRSLASSRKPSGTCARPTPHSLRQGHTSQFWSPDDPSMKWTSRRCSRKT

SEQ ID NO: 350563 - protein, 428 aa, unidentified
MTPGQPTMPRKEPMKTYSELSHFGGLDWAKHHHDVCILDPGGQIVERLRFEHSGPGWEKFRQQIQKYPALGIAIETSQGAVVEQLLGSGVTVYPVHPKAAKEYRKRQAPSGTKDDELDSWSLADALRMDGQHWRALSPQDPMIEELRLLCRDEEELIEQRTALVNQLQAALQEYYPAALEAFEDWTVPYTWEFIARFPTPQQLAGATVHRQRVFLHTHKLWRPGTADKRLEIFARADRFCGSEAVTRAKSRLALSLVKLLQAVQKQLDEYRAAIERLFTEHPDHDVFGSLPGVGEKLGPRLLGSIGADRGQYPDVQGLQCVAGSAPVSFKSGQMRRVKIRWHCDRFLRHTVHLWAGCSLKTCTWAAAYYQAKREAGQSHACALRCLAQRWLKILWKMWQTHTPYDPEFHARNQQRHGSWVLQLNPKKA

SEQ ID NO: 350564 - protein, 415 aa, unidentified
MSVQERWYAGVDWASESHHVWLTDSQGSRIGEKIFKHAGEGLAEMVIWLLATSGAVEPGQINIAIEVPHGPVVETLIERGFNVYALNPKQMDRFRDRYSPAGAKDDSRDAEVMASALRTDMHCFRHLAVTDPTIVELREWSRIAEDLAGERTGLTNRMRQQLWRYFPAFLDLDADLAAPWLLELWQAVPTPDKARRSRPSSIATILKRNRIRRLDAAQVLDILRKPPLTVAAGTTEAARAHIVTLVARIGLINRQIAQAHHQLDTLTARLGTAGEAEPGQPKQRDAEILASLPGIGRIVLATLLAEATDALQRRDYPALRCLTGVAPVTKKSGRSRFVLRRHACHRRLANAVYHWARTATQHDKTSRAKYAALRARGHSHGRALRSVADRLLNVACSMLRTGTTFKPSLPTQNAA

SEQ ID NO: 350565 - protein, 506 aa, unidentified
MEATDETVQLVERVAALDIGKATLMACIRVPHERAADRRRQEVDEYATTTGALLRLADRLRELSVTRVAMEATSDYWKPVFYLLEAEGFECWLLNATHVKNVPGRPKTDKLDAVWLAKVVERGMCAPSFVPPQPIRRLRDLTRYRRSLIRDRTREKHRLEKLREDAQIKLSVVASDMFDVSGRAILAALIAGQRDPQVLAELARGRLRSKISQLREALTGHFADHHALLCAKMLERIDAITAAITELSTAIEAQISPYAAQVAHLDEVTGIGVTCAQELIAELGVDMGVFRTAGHLASWARFAPRANQSAGKTKPATTGKGNPWLASTLGEITAVLARSDTFLGERYRRLSRRRGKLRAIVATGNSILTVVWQLLADPAARYHDLGADFHDTRYHQRHQHNLIHQLERVTGQKVTLTARDEPTEVTKDLGHVLQVERMSTCPSNVVGSAASSRPKPSRWSSRPANPSRRSPGISVFMTEPWAIGSTPGAANIPNPNRRSARWSVPG

SEQ ID NO: 350566 - protein, 351 aa, unidentified
MIHVGMDLHHRSSVVRALSGETGELYPARRIHHDRIDELWQYLDSFGAEPIRVVFEAISNARWMYRLLGQRAHVERVAVTPHKVKIIAETVSKTDKIDAGKLAWLSSVNMLPRAWLPDERVERLREMTRHRADLLGVQTKCKNQITRGLVRLGMQRPYDDLFGALGRRWLAEVPLPEVMRLQVEHWLALLDATAQRMGRMDRKIDGIIQGDPIWARAAALLDTIPGVGKVTISTLLAELGDWRRFRRRAEVASFAGLVPASKRSANTKRYGHITKRGSKELRRVLTEIAQGVARKVPRYGRLYARVADQKCANVAKTAVARRLIEDAWTLLMKEEPFRLMPVQAESPTRVG

SEQ ID NO: 350567 - protein, 366 aa, unidentified
MKKTSTVRVSGNMIFKGHKLTIGLDLGDRWSFYCVMDEAGQIIVEQKLATTPEAMKQTFGKIPRSLIALETGTHSPWVSRLLTELGHEVIVAHAQKVQLISKSNRKDDRHDARTLARLARIDPELLGPVRHRSAKAQIHLTVIRARAELVSARTALVNAARGLAKSYGERLRKCGTQQVSRELAAELSVELREVLEPLLQEVESLNERIKEYDARMEKIAKESYPQVELLKQVKGVGTQIALTFVLTLEDPHRFPKSREVGCFLGLRPGRRDSGESQPQMHISKEGDPYLRTMLVQGAHYILGPFGQDSDLRRWGLKLAARGGKNAKKRAVIAVARKLAVLLHRLWVGGEVYEPLRNSQKAMRAVA

SEQ ID NO: 350568 - protein, 421 aa, unidentified
MTEHFQWFVGIDWASEFHAVCLLDATGAIREERTVAHTIEAVNEWLTTLLEQTGADPSAIAVAIETPRGILVDTFLERGLAVFAINPKQLDRFRDRHTVAGAKDDRRDAHVLADSLRTDPGAFRRVQLDAPIVLELRELSRAEDEWQRDLGRLTNRIREQVARIAPALLSLCPAADEAWFWSLLEIAATPAARQRLTRTDIRALLKRHRIRRLTSDEVWTRLRAADFVPAPGVIAGVQVRLDGLVEQVRVTYAQRQRCLKEIDRVLAALTEREPTAEEPCEHRDVEILLSLPGVGRLITATMLAEAARPLADRDYDTLRTHAGAAPVTKRTGKRFCVVQMRRACNERLRDAVYHWARCSLRQDARSRAYYAQLRRCGHTHGRALRSVVDRWFRILIAMLTHRTLYDPTRFSSCAGTVPVTA

SEQ ID NO: 350569 - protein, 375 aa, unidentified
MEFIGIDLHTNKFTCCYRDEHSSLDGKGGKLTETFELNPCGLMAFSQTLGPETYVLIEATISTFTFARLIQPLVKEVIVANTYELKQISLARKNTDKIDADILCRVLKMQVLSGEQAISPVTIPPVEIQELRSLFSTYRLLKKESTQTKNRIHSLLKEKLYGFTQEQIFSQKSREMVRKIEVDQGPKGSMMHRQINLLLDLLEKLEAEIESLKEMVLEQAEPFMREIKILTSMKGVSVFIAIAIIADIIKVDRFKNSKAFTSYLRSAPRVSNSNTSVSIRGINKKGRKLSSSLLTQSMHHVLDSSPKLDKWYRRLAKYKKAGLVRTGLRRRIFAEMFQMLKKGEYHYGREVEKHEAKMRQYRNFLKKRKILVKTA

SEQ ID NO: 350570 - protein, 408 aa, unidentified
MKDSRKRYIGLDVHKHYLIAIGVDDELNVVLPARRVAFSYLETWMKKTLTQQDEVVLEMTTNTWQLYDELSVYAGSVMVVHPPHVALITRSQVMNDKIAASILARLLAKGLLVGIWVPPQDIRELRGLVAQRKKMTGLATQAKNRLHAVLQRHHLLPPAGNPFHEAQQSWWLTLPLGALEKVNVQSDLDTLHFAEAQRMHLTSMMEALANQQEQVTRLLQVPGFGVVTAVTVWAAIGDIQRFADPQHLVGYAGLGTRVHDSGMSTRTGRLTKAGRRDLRVVLIEAAQVAANSHPHWKAELARLAPRLGRNKAIVAVARKLLVAVWYILAQHKPDRFAQPEAIAQKFLKFAYQLGKENRPAGQSAAHFVRQRLDALLLGQELTSIAWGSKKPIPLPPSTNKVSDVPNTK

SEQ ID NO: 350571 - protein, 318 aa, unidentified
MTAQLLALAAGIDVGQRYLDVGLAPSGKTFRFPNVAEGIAAVVERLTQAGVGRVVLEAIGPYARQLVSALGAAGFEVGLVNPRRIKAFRDFEGRRAKTDRLDARLIARFALAMTDAIRPLPSAEQLALKALATRRRQLTEMIAMEKTRLKQTAEPLLLDNHRATIAALTAQCRQIETELARRINADPQLACSFEILTSIPGIGERVATALITELPEIGRVDRKAIASLAGLAPHISQSGNAPPRAAISGGRPCVRTALYMAALVASRHNPQMKAAYQALRDQGKPAKLALIAIARKLLVTANAMVKNNTPYTPQSLDS

SEQ ID NO: 350572 - protein, 357 aa, unidentified
MNQPRNTTQATPAVISVGVDTHQLTHHAALLDLSGRELGDREFPATQAGYEDLAAWATSHGQDRLVFGVESTGTYGAGLAAHLIAVGYEVHEVARPDKTTRAMQGKSDPIDAYAAARAVHAGHAQGWVKAKGGAVEAIRVIKLARDSAVKDRTAAISQLRDVITTAPEPIRAELLGLSAAKRVTKALGYRPDPARAVDPTQAVKLTLRALARRIHALNEEIRAADKILDALVGEHLPRLVALPQVGTQIAAQLAITAGQNIDRMRSEAAFAKLTGVAPVPASSGKTRRMRLNRGGDRQANSALYMIVVGRLRNHPDTLAYSERRATEGLSKKDIIRCLKRYVARETYQALKADLTTT

SEQ ID NO: 350573 - protein, 360 aa, unidentified
MFIIGCDFHTRFQWIAMLDTETGELVERRLEHENGEARAFYAALARRARVGMEATGYSQWFEALLAELGHELWVGDAAEIRRGMVRKQKTNSRDAWHLLDLLVKDQFPRIWTASPAERDVRQLLRHRYKLVCWRTSVRNQLHALAMGEGVCRKGKLWTAAGRKELEGLALGPWASRRRRELLAMQDWLEAPIRALDEAVLAEAGRRPAAQRLMEQRGVGPVTALAFVATIGPIHRFQSSKQLVSYLGLNPRESSSGGKQRLGSISKQGNCMLRFLLVEAAQTAARLDPELRRDYLRLKFRRGSAVAKVAIARKLAVRLYWKLRESRQPGAAGSYAGWPGNFRGGPRSIDKMVERPASPGN

SEQ ID NO: 350574 - protein, 423 aa, unidentified
MKFEKDTSGFRQAQPARIKRYVAFDIHKEYALVGGQNAQQEWVMAPRRIGMEKLREWAAANLRKGDAVVIETTTNVWDVYDMVEPLVSYTVVAHAGGVRQIAEARVKTDKKDIERLIRLLIADIVPEVWVPPVEVRELRGMISYRNRLVKTSTMIRNRLQSLIHRHNLILPKGKLRDKAWWEAQQVSALEKIQIRQELAMLEELEKHKGEVDGELGRQSLGEVWGQQAMRLLQLPGFGVIVSMTVLSAIGDVTRFESAKKLVGYSGLGAGVHDSGKEHIEKRITKSGRKELRWALVEAAWRAIRISPYWKEQYEKYLRRMRKPNQAIVVIARKLLVVVWHVLTKQETDERVNEEDLAYKMLVLAWDLDENVRMGLSYKQFAKYALMKLGVEKDITRFVRKEVPRRLAPREEVLARMVELGIAQ

SEQ ID NO: 350575 - protein, 416 aa, unidentified
MSGKREIACGVDVHNKFILATILSSDGLKLQDRFGTSLEDLLKFKIWLKESGCHKVALESTGNYWLPIYHVLEGSVNFILANAYQIKHIPGRKTDTLDSEWIAEICLKNLITPSRIFTKDHRELRSLTRARESLIKVRTKIKNRVTHELEAACIKLSSVIADVFGKSGRHIVDGLLNGMDLEEILGSIPSRRVRKNKEEIRGIIQANLSPSQIFLLRSHLNTIDAVTKQIKEIDAKISDQISLRNEDMKIAMSMPGMGFISASTILAEIGEFRDFSSANKLAAYCGLVPSVYQSAGKLINGHITKHGSPHIRRIIIEVAHAIILTKRLSKLKKFFLRIKARRGAKIGIVALARKVLCILYHLLVRRELYQDDLLNKPRRIKNPRQHPIDAMDLDEMIGIIIKAGYEVRKNDCLESG

SEQ ID NO: 350576 - protein, 336 aa, unidentified
MGEIILIGLDLAKSVFQVHAVDEAGRVVLRRQIKRAQLLAFFADLSPCLVGMEACSGAHFWARELGKLGHDARLMPPSYVKPYVKRGKTDAADAEAICEAVARPNMRFVPVKTEEQQAVLMMHRARDFLVRQLTQVSNALRAHLGEFGLVVPKGVQNIERLVTLAEATGLPANALNSVRLLAEQFRDTKVKIEDVTAEISRTSETDAVARRLKTIPGIGPITSSVLAATLPDASGFKTARDLAAWLGLTPKPHSSGGKERLGKISKMGNRYIRRLLYLGAMGVIAARRRRPAGDDWLWQLLERKPVKLVAIALASRNARTVWALLRSGETYQAARA

SEQ ID NO: 350577 - protein, 402 aa, unidentified
MNAVGIDVSKGKSMVTIMRPFGEIVSSPFEIKHTSSDINSLIELINSVEGESRIVMEHTGRYYEVLAHQLSEANLFVSTINPKLIKDFDNDSLRKVKSDKADAVKIARYALDKWQNLKQYSVMDELRNQLKTMNRQFGFYMKHKTAMKNNLIGILDQTYPGVNTYFDSPARSDGSQKWVDFASTYWHVDCVRKMSLNAFIDHYQNWCKRKKYNFSQSKAEEIYGKAKELVPVLPKDDITKLIIKQAIDQLNSASTTVESLRTLMNETAFKLPEYPIVMAMKGVGPSLGPQLMAEIGDVSRFAHKGAITAFAGVDPGVNESGSYEQKSVPTSKRGSSDLRKTLFQVMDALIKTKPQDDPVYQFLDKKRAQGKPYYVYMTAGSNKFLRIYYGRVKEYLAALPES

SEQ ID NO: 350578 - protein, 318 aa, unidentified
MSTEIFVGLDVAKDHLDVALRPSGEGWRVANDETGTSQLLARLRTLHPTLVVAEATGGFERAAIAALAAAGIPVVVANPRQVRDFARATGELAKTDQLDAAILALFAERVRPAPRPLPDATTQLLDALLTRRRQLLEMLVAEKNRLGFAPKPLHRSIGQHIRWLERQLDDVTTALTDQVEQSPVWRAKDDLLQSVPGIGPVVSCTLLGELPELGTLSHKQIAKLVGVAPLARDSGTLRGKRMIWGGRASVRTALFQAALSARRWNPAVRAFYDRLRAAGKPAKVALVACARKLLVILNAMVRSNTRWQVLPASAQHSC

SEQ ID NO: 350579 - protein, 370 aa, unidentified
MDESINFFVGLDVHKDSIAVAVAEAGRAPARLVGSIAHDVAKLVKVLARYGEARQVQLVYEAGPTGYGLQRALAQRGYHCQVIAPSLIPKRAGDRVKTDRRDGLRLAELSRAGELHPVWIPDLADEAIRDLARAREDAINARTQARHQLKGFLLRHDVRYVGKTSWSKTYYRWLATLNFGHSGAQTAFTEYWQAVTAADERVARLTGALAGSIEGWRFEPVVKALQALRGIDQISAIGLVAEIGDIGRFAHPRQLMGYLGLVPSEYSSGDRVARGSITKTGNAHARRLLTEAAWNYRFQPRIGHRAQRRAEDLPQAIRDVAWKAQLRLTGRFARLRGRGVQINKVCVAVARELTGFVWAIAAAQAQLAHS

SEQ ID NO: 350580 - protein, 482 aa, unidentified
MKKRNVFQNQSQEILSLFEMAKDRSKVMCIPIDYAKKDHVVMFCNGNGRIIRKPFSINNSKEGKDYLLDQVKKSCRHHGISLQHIVFGGEDCGSYADNFISTLRSESWLVAGVNAHDAKTQRENVQASTDRLDLIGISKMILNCRGNCSPAQSGDYLDLRTLMRQRRKMVNITTGVKNRIHTIVDQIFPGFLNEKNSGILPFSQCSLLLMEDRFSVHQIIRRRRSTLIKLLTRCSIHQPNNCAKKLHQYATQVLKPPENHLVTLQISLKQQVKLFNCLQESTEQLEKEVAESLAQTQGVFLTSIRGIGIILAAGVCAEIGNPNKQKSLSNLVSYSGIIPKVKQTGGTQGKSQTKKVGKRCNRILKDYLVQSASHIGLHGPEELMSDYKRRDTQGQHADFGMGRRYLRMAIGLMRTSQTYLPKSLRGKKSSIKRRGQYYLMTWPKLREKWRTLNTLDIAFDKNMPLGQWRNIVQELYGIKLKL

SEQ ID NO: 350581 - protein, 311 aa, unidentified
MQVMYQRCAGIDVHLRFLVVCLIIVEAGQRRKEVRTFRNETADLLALRAWLLEDRCSHVGMESTGVYWLPVYRRLEGFFELVVANAQHIKAVPGRKTDVQDAEWIADLLQHGLLTASFVPSQEQQDVRDLTRTRISLVQERARLVNRVQKVLEEAGIKLSLVLSDVMGLSGRAILDALCAGESDPERLARLMHPSVHATREQVVAALTAEVRDHHRFLLRELLSLIDAQDRSIKHLEQEIERHLHPFEEQVQRCEQITGVSRHVLHVLMAEVGTDMQRFPDAEHISSWAGVCPGESGKCGETAQRTVQTRQ

SEQ ID NO: 350582 - protein, 353 aa, unidentified
MAIVVALDVHRKQITYKTLDRETGEVERGRIAPAARAEVRAWLARFAGCEAEFALEGTTGWRFVVEEIERAGHRPHLADPAETAAKRGRKRRAKTDRADCDLQLRLLCAGELPESWIPPPHILELRTRVRMRKTLIDQRTAWQQRLQAQLFHQGVPAGLRPRTRAGREALARVELSRAGRELVSLALRMIEAIDRELAPLDRDLHAFARRQPGCRALIARLYGVGPVSATAILAELGDARRFARSDDAVRHSGLDVTVYQSDEKRAPGHLSHEGPELLRWALFEAALSAARAGSPDHAYYLQVAERIDHNRACLSVARKLCRRAYHILRELGDEALAPVEGDPHAEEAIAAAA

SEQ ID NO: 350583 - protein, 353 aa, unidentified
MKKIVIGIDISKEKIDATAIDVRSGQLGVVKLDYQVFENKPMGYRRMLVWARNLIDGARLEDVLFCCETTGGYDRRLCDYIYAKGQSIWRESALQIKRSMGVRKGKDDKADSLMIAEYAMRHMDKAVIYESPNETVQELKALLLYRHKLIQERTEKKVRMAQLGTTAAKSKSLSFILRDARKSIKSIDKSIQECEQQIIELLKTNETLKKNYDHIVSVNGIGIVNATAFIAYSNNFKSITTANKLASYWGVASFREKSGTSVDKKACVSCYSCSHLKSYLTQAAECTVRNHGIYYNYFLRMKAQGKPYRVIINNVRNKIIHLVFSLVTNDTDYEKNHEFLRTQRKISRTFEMN

SEQ ID NO: 350584 - protein, 360 aa, unidentified
MWTIGLDAHQRLFVVCILDSAGKRLKWERIRGGPEKLLAYLRCLPERFQICYEASCGYGYLYDRLNGLARRVVVAHPGGVRLIFRAKRKCDRIDARKLATLLFLDQVPCVYVPRLEVRSWRRLIQFRRRLVAQRTAVKNRLRALLRAYGVEAPRRGGLWTRKGRVWLGALEWPTREAALERDLGLDELEHLHRRLGVVERWLNQVARRDPRVKCLRTIPGVGPRTAEALVAWIDEVRRFRHNRQVGCYFGLVPSQDQSAGTNRLGHITREGPSVVRQLLCEAAWQAKGRSAFARAYYERICGGDPDRAKIALIALARYLACVAAAMLRSETVWRHDSPSAAETVPAEAGTPAAACVTGVA

SEQ ID NO: 350585 - protein, 342 aa, unidentified
MDEVSIVGLDLAKRVFQAHGASPNGDAIFRKKLSRSQVLPFLAKQPKCIVAMEACASAHFWGRAIRELGHEVRLIPPIYVKPFVKRQKNDAADAEAIAEAAVRPNMRFVEVKSESQQAGAMVFRTRDLLVRQRTQLINALRGHFAEHGVVAPQGMTNVRILEAAIEEVKKSIDLLIVETARLYLAQIASLSEQIATLEKVLQKTATKAANSARLLTVPGIGHITAMAIEAFAPPMETFRRGRDFAAWLGLVPVQRSTGGKQVLGRTSKMGQRDIRRLLITGAMTIVRWASRKTPPKGSWLAGMLERKPRMLVAIALANKMARSVWAMLTKGEDYRDPVAVAV

SEQ ID NO: 350586 - protein, 341 aa, unidentified
MQKFTIGADISKDKINFAVRYCNEFILEMEVENNSKPLTKFIKEILAISKKYANENFHPSLIEFVMEHTGIYNTLLIACLAEHHIVTYVVPGLEIKNSLGINRGKNDRIDARRIAEYGVRFSDKLKPYSLPDKSLEKLKMLNTKRAQLVKIMSQLIQSDEDTKKFLGEESYRNMRFYINPVIKELSASIKMIEEEMLSIIKIDEQLFENYQFAVSVPGVGKVIAIAFICATNNFTKFETAKALGSYCGVVPFGRESGKYRGKEMVSPIANKKLKTLLHLGARATISGNNQFTKYYQRKIMDDKKNKMLALNNLANKIVKTLFACVKNKEMYKPDYVHTLAA

SEQ ID NO: 350587 - protein, 438 aa, unidentified
MSNKVIFNLDDLFISVGIDVGADFSWMSIALPNQQFVGKPYKILHNSIDSLTTAVSKIKEAEELYSLESRIFLESTGIYHYPLFCYLRDKGFNCSVINPIITKNSTNINIRKVHNDRFDSKKAALVGLKPDLKVSLMPSDLALNCRNLCREYYDLMDNRGAYVNKLQGELRMAFPQYLGIFSKVTINTSLTLLETYTSPSAFLEADKQEIIDIIKSTARFGLTYAQNKYNAIIQAATDANQFGYIIDSNIKRIRLYISFIRKYDEEINNILESLHELVDANEDADFVKQIHLIETFKGAGFLSAVSIMGEIGDFSAFSKPKQLFAYFGLDPAVKQSGKFEGTKVQMSKRGSAIARRVIHTLTLQSISISRNGEAKNPVLREYYLKKCDSKPKLVAMGAVSHKVCNMIFAILRDNKPFEIITPQEHIKQYNASKCDMAA

SEQ ID NO: 350588 - protein, 341 aa, unidentified
MNIKRIGIDLAKQVFQIHGVDGQEKVVLRKQLRRAQLLDYFKKLPPCLIGMEACGSAHYWARELQKLGHTVKLMAPQFVKPYVKSNKNDANDAEAICEAVARPTMRFVTIKSIAQQDIQAVHRIRSELVQQRTAKVNQIRGLLAEYGTVVGRRIDVLEHALPLILEDAENGLTADFRVLLEGLQQDLATLNGRVDDLDKTIKSLAISNTDAKRLQQIPGIGPIIATALICAIGDGKQFKRGRDMAAWLGLTPRQHSSGGKDRLLGISKHGDAYLRTLLIHGARSVLKVASQKDDPRSRWLQNLCSRRNKNIAAVALANKNARIAWALLSKKTDFLPEGELV

SEQ ID NO: 350589 - protein, 352 aa, unidentified
MSKNITGSLTIGLDLGDRWTEGRVLDEAGEVLESFRVRTTEPAMDARLSAYDPCRVILEVGTHSPWVSRCASRHGHDTIVANPRRVRLIAENDSKSDGVDAELLARLGRIDPSLLRPVVHRGEQAQRDRILIQTRDGFVRARTQLINQVRGFAKALGHRMPSSSSEAFAKRVRAAAPMDLFPGLERLLETIEQLTATIRDMDRAVEKLCRERYPETQVLRQVPGVGPITALYYVLTLEDPSRFTKSRSVGAYVGLRPRQRDSGEQRPQLRITKAGDALLRRLLVSAAHYILGPFGPDTDLRRAGLRMAASGGSAAKRRAVVAVARRLAVLLHRLWVTGEVYEPLRGETAEVA

SEQ ID NO: 350590 - protein, 310 aa, unidentified
MTRNVGIDISKETLDVHRTDDGAHAQFQNDSMGRRALFRWIGDKVALVVFEATGVYHRGLEVDLADASVPFAKVNPKQARRFAQAIGKLAKTDRVDAAMLAKMGAVLDLSPQTPATSELHDMRELLAARRALIKDQTAARTRLATAAVGSVQTILRRRLRQIVKDIDQIDDALRNLSSLDVTFARKVAILASIPGIGQLTAITLLIDMPEIGGIDNKQAASLAGLAPVSQSLGKWQGKERIQGGRAQLRKALYMPALVATRVNPDMARKYNQLINAGKEKKVALTAIMRKLLVMANALLRGNRMWTETRP

SEQ ID NO: 350591 - protein, 362 aa, unidentified
MEITTVGLDLAKSWFQVHGADAQGRPLLRKKLARGKLLAFFAGLPPCLIGMEACGSAHHWARELIKLGHEVRLIPPQYVKPYVKGNKHDAADAEAIGEAVTRPTMRFVPVKTIEQQTICQLHRIRQLLVKQKTMHVNALRGHLAELGIIRARGLNKVSELMRLIEDAADDGLPAKIRGQLRHLVEPLRDLHHRLAEIDRELGELAREHPAARRLATIPGVGPVTATALAAVIGDIGRFRSGRHLAAYLGLVPLQHSSGGKERLGAISRRGDAYLRMLLMHGARAVVRIMKARPASADDWIGRLLQRRPVNVAVAAQANRTARIAWAVLAKAEDYRHPARPQPCKGPDAGRLRPARASNDVMA

SEQ ID NO: 350592 - protein, 411 aa, unidentified
MEVLHPRCAGLDVHRDSVVACVRLAEGRHVERHVETFATTTADLERLSAWLAGHGVTQVAMEATGVYWKPVWAVLCEGDFALVLANAHPVKAVPGRKTDVNDATWLADLVAHGLIRPSFVPPMAVQALRELTRTRKQLTRERASHVQRIDKVLQAANLKLGSLLSDLMGRSGRAVLDALAAGESDPERLADLIGTKVRASRAQLVEALRGRLADHQRLLLGLHLAQTDAIAAAIARIDTEVNARLEPFRDTVTRLSRMPGLSGVAASVILSEIGFDMSRFPTPAHLVSWAGLCPHNDESAGKRRSTRLRPGAPWLKTLLVQSAWAAVRAKATYPQALFHKLKARRGPKKAIVAVAASMLTAIHVMLQRGITYRDLGADHFDRVQNDRLAQRLIKKLQQLGLDVALTQPAAA

SEQ ID NO: 350593 - protein, 351 aa, unidentified
MNTQITATPKLFIGIDIHKRSWKVHCATDLSSGKTFSMPPDAELLYEYVAKHYTGYEVSTAYEAGCCGYRAHRCFVGYGWRSLVVNPADIFRRGKERHTKTDRIDAQLIARELKDGRLSGICVPDKCREQLRSLFRRRNDLVKDMRQIKSYIKMQLLYYGIRIPQEFDNDHWSHKFRDWLDELDFGYDTGNEVLRSRMRSFRFIDREFREVSTLLRRYTKKHFKKDYMLLRSIPGIGPIVASGILSELGDLRRFGNIKHLAGYVGLAPGIYQSGDTIRHTGVSMRAHRLIRSYFIEASWQAIRTDPVMQGYYRKHHGKNVKSVIVKVARKLLSRTLAVIKTETPYEIGVLE

SEQ ID NO: 350594 - protein, 374 aa, unidentified
MHVYVGVDIAKELHYAAIMDSDGVVTKPFSFENNDKGFNLLLSHLAPYDKESILIGFESTAHYQENLAYFLKSLGYRTAEINPLQTAALRKANIRNTKTDSVDARLICLALMNHHIQGDQRDSVRLDDLYQLCKMRMDTMKKRTTCKIQFVAIMDRIFPELASFFDNNLHTNTIYRLIDSFPLPSQIKKTRIDILTKLLHKASRGHFKKEKAQKLKNLADISVGIPSDIFAFQAQTIEERINTNPDVMSSPLMTIPGIGTFCVACILSAIKNINDFDAPCKILAYAGLDPVIRQSGKFTASHTRMSKRGNSLLRYALVWSAGNVVKNNHTFAEYYRHKTEDQGKSHYQALGHCAKKLVKSIYHMLKYNESFNLD

SEQ ID NO: 350595 - protein, 388 aa, unidentified
MNVGADKSEPLTAVHTDLGAIFVSLELSRSSWLITSLSPGGGEKMSKHSVPGGDFARLMERFAQLQEKARLRTGQSFRIIVVQEAGLDGFWIHRALQNEGIESHVVDAASIATSRRRRRAKTDKIDGETLVRALLAYKRGEPRVCAMVKVPTPGEEDRRHLCRERKALTAERVRHVNRIKGFLFSQGVSGYQPLRRDRRQRLEELQTGDGRAFPPHLKALVNRELDRLELLLKQIKTVEAARDALLAVGQTGKPAPAAMLLDIRGIGPEFAAILWSEGLFRHFENRRQIAAYAGLAPTPWQSGAVDREQGVSKAGNPRLRTTLIQLAWLWLRNQPRSALSVWFHERVSRNGGRLRKTTIVALARKLLVALWKYVTAGVVIEGVTMKVA

SEQ ID NO: 350596 - protein, 428 aa, unidentified
MTEKISNRLKRFLQLRRGIRGSKAHLLVGIDVAKGKHYAFFGTATGKTLLKRLIFENSKEGFERLLLEARRQKENYGLKKVVFGLEPTANYHKPLGEYLIKGGQEVVLVGTVAVKHNRRLMDGRWDKHDTKDAANVADLISQGKCLHYEYPELRLRELRNLLSLKRRLRKQEHGYRVRIRNHLVAQYFPELDSYYGESESTGLAVVRWCLSPKEIAGLTVEEFVRRVTGRRVGIKQRRRLEAIWERAKESIGCESGERVAFEAKVMVEGLGQIRGVIKETEDRIQEICEGFKEYPYLLSIPGFGPDISSKMLGAVGNPFRFRAGKQVIKMAGYDLSAERSGESSDRATPVISKQGKADLRYALYQAAQIASSKNRDFRIYYAKKLKGREREKGIHTKIKVKLAAKLLVIAWTLMKKKEAFNPVYLKAA

SEQ ID NO: 350597 - protein, 350 aa, unidentified
MSEHITIGMDLGDRHHIIVVFDQNGNEIAIKRIANSKLALQKYFQTYTGATVAIEAGTHSPWISRELQQMGLVVYVGNPRKLRLIWDSHDKSDERDARILAMVCRVEPRLLWPVKHRNAQAYSDLELIKARDMLVQTRTKLINHVRCVVKSHGERLPSCSAASFARRVAGLLPAQLSAALSYLIETIADMSQRIVQLERKIEQLSKQRYPESQGLQQVAGVGPITAMAYVLTIEDPSRFSKSRMVGAYLGLTPRRDQSGASDKQLRISKAGNRYLRKLLVNCAHYILGRFGPDCHLRRFGLAIAARGGKNAKKRATVAVARKLAVLLHRLWATQRCYEPFYAVGSHHKAA

SEQ ID NO: 350598 - protein, 351 aa, unidentified
MTMYLGVDYAKKFSVTTLISESGEVIKQGKLRNERTEFEHFLCSYCEVKAVLEAGRNWRVCVDLLEGLVEEVQLAHPLKVKAIAEAKIKTDSIDSATLAQLLRADLIPQAYLRSRASSDRQKILRSRCFYVRMRTRVANRIHHIIDGQQEHIRQAASTFRDLFTKKARRWLRQLQLQQPDGEILKRLLDYEEYLSERITESDLAIGKLFEQDINCQLISSIPGFGKFLSVLTVVEIEQIQRFRTADHLASYAGLVPSTYSSGGKTWHGKIHKQGNSWLRWAFVEAAIHTAACPGQLRYFYLRIKRRKGTKTARVATGRKLCSVVFRILKDQKPYQAIMDLRSRPRSVYSSG

SEQ ID NO: 350599 - protein, 335 aa, unidentified
MGVDVHKETSTVTCVCHKQIVKTATVQAEPASLAASVRRWFPGATLASAYEAGFSAFVLHRALTTAGITNIVVNPASIAVAANDKVKTDRRDSKRLAVDLADGRLRGISVPTEEEELARLLPRTRAQLVEHRATLARQIKAKLHQFGLIAPSSRRLLSHRYLREIESWTLPPELRASLKLLAEQWRFVTRQLLEMRRLLREQATAQAAIDKVYRSVPGIGEVVARTLATALGDMTRFANERALFSYTGLTPSAYSSGASVRRGHMSRQGSSRVRHLLVETAWRALPYDAVLQTMCERIAATRGKKRAIVAIARRLIGRMRACFRQGTMYAVGTLA

SEQ ID NO: 350600 - protein, 355 aa, unidentified
MSTITIGVDLAKSTFAVCVVDAAGRVVKRVTLGREAFSTWLAAQPAGSIVAMEACGGAHFWARRCLEYGLTPRVMAAQFARPFRKNPLAKNDPADAEAIATAARQGNMRFVPVKDVDQQARLAWHRIREGYKVEGLAIANRMRGLLAEFGVVIAEGDVALRRTLADLDAYADLPAEFKEALRALAEHWQRVTTATLTCERRIQAHARLDNRCTRLRALVGVGPLTADALVASIGNAREFQNGRQLAAWLGLVPSQHSSGGHAQLGTISCRGDAYLRTLLVQGARSSLERAKRVSEEASTPEQRWIRALACHMPFGKVLVAIANKHARQLWAMLAHDVDYDPTAFMGNPMQRRAAA

SEQ ID NO: 350601 - protein, 340 aa, unidentified
MTEIATIGLDLAKNVIQVHGADETGAAVLRKRLRRREVLAFFTSLPRCLIGMEACATAHHWARELIAVGHEVRLMPPQYVKAYVKRNKNDLADAEAICEAVKRPSMRFVPVKTSEQQSALMMHRARDLLVRQRTMLVNALRGHLAEFGLIQAQGLHRVAGLTAIVMDDTDELVPGMARQVLKVIAGQIGELQGRIAALEAQILAWHKSNPVSQRLVTIPGIGPIIATAIVATVTDPSVFHSGREFAAWLGLVPRQNSTGGRARLGGISKRGDGYLRRLLVSGAHTVLLRSKTAQADPWLISLLGRKPRLVAAVAVANKTARVAWAIMNRGDTYRRVAAAA

SEQ ID NO: 350602 - protein, 341 aa, unidentified
MSYLGVDLHTNSFTVCRRTKQGKNSIGTFQIVRIADFRKTLRKRDLVAVEATGNTAWFVSQICDRVKKVTVVNPYQFEVIRRSVKKTDKHDAKTLAFFLSKDMLPEARMKTKENAQLHSLATTRDKLVKQRTALINKIHNVLNSYGIKFKKESLGSEKGLKSVWAYDWDVIVRIELEALIDQIRSLNKSIKTLDKEMTDHGQKLKGHKNLTSIKGIADRSATVLLSVIGDVNDFADENKLAAYFGIVPRVSDSNETVRHGRITKHGSKLGRTTLVQCTLVAKRYSPYLRQYYERIKSHRGSGKAIIATARKFLAIIYNTLKNDWIFEDFPNFVLTSSCVNK

SEQ ID NO: 350603 - protein, 341 aa, unidentified
MDKELFFGVDVSKKTLDLAYYDGEAIDWKNAHIQVSNDDAGFKKIGSWVAKVGKDFDTFLFCMEYTGLYNQNFRLWLESKEYIYGMVEPRKMHRFEPDLDDDQRSLDRIKTDELDAFRIAIYCEQNHKKILRNPSKLPSPVYFKLKRLLAERKQNTKQSVLYKQQLHDICAYDTDLSVERKKLLLKNMQENQKAIDKEIDSYMNEDTSIRKNYNLLTSIPGIGRIIALEAIVLTENFTAISNPRKYACYIGIAPFKKESGTSVRKKTGVSKKGFSEAKADLSIAVLSAIRNNPSIRDYWIRKRKEKCGGIVLNAVKFKLVLRMFAVIKRGTPYVETDAYKN

SEQ ID NO: 350604 - protein, 412 aa, unidentified
MDVLVERCAGLDVHRDSVMATVRLPGTRRRQREQHKRAFASTTAELHALGDWLQGFGVTLVGMEATGVYWRPVFDALEPRFTCWLINAQHLHNVPGRKSDVIDSAWLCQLLEHGLVRPSFVPPPEIRRLRDLTRLRRAQIEERTRAIQRLEKVLQDAGIKLTSVASGAYSVSARAMLEALLAGVSDPAELAELAKGRMRAKIPRLREALAGRFSLAHHGVLVAQLLGHIDSLDLAIANLDARIAHETESLTELVELISTIPGVKLRTAQVLIAECGIDMSVFPTVAHFSSWAGICPGTNSSAGKRSSGKTRPGSKWLRTALTESAKSVARSKGTYLASHHWQIRGRRGEAKAIGATRHDLLVAYYHVVRDRVPYRELGPDWLARRYSPEHRARRLLRQIEALGFNVSIEAAA

SEQ ID NO: 350605 - protein, 368 aa, unidentified
MKNVLYVGIDVDSKNFHAAGFCEQTGELLEFKCKPNNSSLLNKLRKLEKKGFILKTCYEATYLGYTLHRFLESKKVDNQIIAPSLIPEVAGHQIKTDRLDCIKLAKYLAKDLLTEVYVPSLEDEQTRDFIRSRSFLVDERAALKKHILATCRRYGLDYKQETKGKTYWTQMHIEWIDKQLSKLGEVASINLKLLMNQYDNLCDAIFEYDEKIEELANSEKYKKKKDALCCFRGVATTTAMTLITEIGDINRFSHPSKLTSYAGLDIREYSSGGREKKFGITKLGNSKIRTAAVESCQKSSLEYRISKRLKANRKGQPEEIIDIADRCMKRLRKKSLRLQHKGKHINKVKVACAREFLCFTWEALRAVA

SEQ ID NO: 350606 - protein, 434 aa, unidentified
MRPDAAGIDIASGVHYVAVPEGRCEQSVRSFGTYTEDLHTIAKWLLECKINTVAMESTGVYWIQLFLILEEYGLEVFLVNARHVKNVSGRKSDTLDCQWIQQLHSYGLLTASFQPNSITRELRTYLRQRKSLTESYSREIQHIQKAFDQMNIKVHNVLSDICGKTGQQMIKAILAGEKNPEKLAQYCDPRVKASKDELIKSLKGVWREENLFELKQAYELYNVFKEKIKDCDEQIEKTVRKLEKNTQHKSDNNIKRKGNNKNSLNFNGTLYLKNILGVDVTKIFGISELTALEIVSETGVDMTKWKTVKHFTSWLNLAPNNRVSGGKLLKPKKSKRRNKAGQSLLMAAYALQRSDHWLGQYYRRMKSRNGPLVATKATARKLAIIFYKMIKSQTEFNPMAMETYSLKYSEQKLKYLKKQATNLGYQLVAMEFVS

SEQ ID NO: 350607 - protein, 345 aa, unidentified
MSMVRSVVGGVDTHADTHVAAVVDTNGGLLGIESFPADESGFEALLGWLTSHGEVKMVGVEGTGSWGVGLSRFLHVHKIVVVEVDRPNRQTRRRVGKSDPTDAVSAARAALSGSASVTPKLRNGPVEQMRILMVARRSARSQRIATLNQLRHLVFTGPEEVRSRFKDRPKTGLVTEVAQLRPRKSSDPVLYTTMVTMRGLARRIQTLNNEIKALDGMLTELVTHTAPSLVGLYGVGIDTAATLLVAAGDNPDRLASERSWAHLCGACPIPAGSGKTSGRHRLNRGGDRQANAALYRIVLTRMSGDERTRTYVARSRGEGKNTAEIMRSLKRYVARETFKHLPRVV

SEQ ID NO: 350608 - protein, 405 aa, unidentified
MRYYIGVDWADTEHAIWVEDAQGARVLERAVPHTAEGLAAWGRWLDAQRARGAELWAAIERPDGRVVDFLLDHGVVVYPINPKALDRARDRFRMSRAKSDPFDAQVLATFLRTDHAHLHALQPSSEAAQELKLLTRDYARLVREQTRLGNQLTATLKEYYPRALEVCGDVTAKRTGAFLRAYPTPAALAALTAEQWHAFACTHRWSAEQAATLWERLHQPQLPVPAHVVRAKSRLVPVLVTQLETAVQAVADYREAVMDFFGRMPAAEWASTLPASHGTLVPAIWAELGDAVGRWASWQHLQGHSGVVPVTRRSGKYQGVYFRFACNLHLRRALHQFAFCSLKSSEWARVYYDRYRQRGHRHHAALRALAAKWLKIIFVLWMRQVAYDENYHLATMARQHLRQAA

SEQ ID NO: 350609 - protein, 336 aa, unidentified
MNIKHFIGVDISKSTLDWAVCTAEGGIIYQSQSANSEEDIKATIKIIKALPNFEYLKSVCCMEHTGIYNAHLLSYLNKFHFPIWLENSLQIKRSGGVQRGKNDAIDAVRIAQYAFRFKDRIRVWQPPRQVIQQLAALSAVRHRLLIVRQQLQQPLNEQESFIESSLQKQLCKTCQASLKAINTDLEKIEKQVKEIRDKDDRLKELFEFITSVPGIGVVTASEVIVATNEFNNIAEPKKLACHAGVAPFEHQSGTSVRGKTSVNHHARKRLKSLFHLAAMSAVRVKGEIQDYYLRKVAEGKNKMLVLNAVRNKLIHRVCAVVHKKEKYDKNYVLTLV

SEQ ID NO: 350610 - protein, 332 aa, unidentified
MLDEAGAIVQEQKLGTTPKAMKEVFDAIPRSRIALETGMHSPWVSRALSELGHEVIVAHARNVRLIGESRKKDDRLDAQTLARLARIDPQLLCPVKHRSAKAQADLTVIRARAGLVRARTALVNTVRGLAKSYGERLRGCSVRNMNAEKAKALSPELQTALEPLLAGIESLSEQIREYNERIETLARQSYPQVTLLKQVKGVGTLIALTFLLTLEDAHRFRKSRDVGCYLGLQPGRRNSGQNEPQMHISKEGDPYLRTLLVQGAHHILGPFGADSDLRRWGLKLAERGGRNGKKRAIIAVARKLAVLLHRLWVSGEVYEPLRKNSPLVAMAA

SEQ ID NO: 350611 - protein, 345 aa, unidentified
MVETNRAVTGGVDTHLDVHVAAALDPIGGLLGVAAFDTTGAGYEALLAWLTSFGVVHRVGVEGTGSYGAGLAQFLMGHDVEVIEVDRPNRQARSRTGKSDPVDAVEAARAALSGRATGLAKTKDGPVEAIRALLVARRSARDHRISTLVQMRHLVFTAPQELRERFFGLSKTQLVKQAAGLRPRDNGDPVAYATKVALKGLAQRVQLLETQIKQIRSLLRPLITAAAPSLLDVNGVGLDVAAILLVAAGDNAHRLKNEAAFARLCGVAPLEASSGKVVRHRLNRGGNRQANHALYRIILSRLSSDPETKRYVQRRTQEGKSIAEIVRVLKRYAAREVFKHLPHTI

SEQ ID NO: 350612 - protein, 395 aa, unidentified
MNAEYAVLVGLDWADQKHDLRCYYVMEEKEEAVMLSSTPEAMEQWCLKCAGQNPGGRLAICLEQSRGPVVYELMKYDFVDLYPVNPVTLKKYREAFFPSGSKDDLKDAVLLLDLLRKHREGLKKLQPDDSCTRVLRLLCEDRRKAVDARTALTNALGSTLKQYYPQALALAGWSLHAELACAMLMKWPNFERISAATPQTVRRFYYAHQCRSETELQKRLDVIRSSCALTQDPAIVGPCMLRVQTLVAQIRGWNKAIGLYDQKIRQHWQDHPDATIFKSLPGAGEKLEPRLAVVFGTDRQRFESAQQFSSYSGIAPVIQASGKQQWIHWRWNCPKFHRQSLVEFADHSIGWSTWAKVCYIRIAGTRKGPSCRCTGVGVQMEPYHIPVLADSYTIQ

SEQ ID NO: 350613 - protein, 409 aa, unidentified
MRYYVGVDWADQTHAVWVVDESGTKITVRTVPHTAAGFSEWGRELDEWRAQGIERWAAIERPDGRVVDFLLDHGVVVYPVNPKALDRARDRFRQSGAKSDPFDARVLADFLRTDHRHLQALQPSSDAAQELKLLTEDCQRHIRQQTRLVNQLTATLKAYYPRALEVAELTTALAREFLQTYPTPEALTTLTARQWQRWARGRRVSAARIGALWAVLHQPQLPVPAHVVRAKARLMQSLVEQLTPVVTAVAQYRTAIDDFFARMPAAQWARTLPIGKHGITAPTLWARLGDAPGRWESFRHLQAQAGAVPVTKRSGKQRVVHFRFACDKSLRHVVGQVAFLSLLSSDWARAYYDQQRARGHAHHQALRALGAKWLKIIFVMWHRQVPYDEPYHVATMTRQQLRQRQTTIA

SEQ ID NO: 350614 - protein, 453 aa, unidentified
MCLEERPILEPNAAGIDVGAREMFVAVPPGRDENPVRVFATFTEDLERLTDWLEQCGVTTVALESIGVYWIPLFEILEQRGIRPCLVNARHMKNVPGRRTDWHECQWLQFLHSVGLLRAAFRPGQDICAVRTLVRHRNELVSAASQHVQHMHKALTQMNLQIHHVISDITGLTGLAIVDAILAGERDGAELAKLKDPHIKADTETIRKSLEGNWRPEHLFTLGQSRALYRIYQQQIVSCDLEIERMLGEFEPRVDPTQKLLPPDGKRNRAGRKRRRKNGHPHPEFDLRTEVYKLFGVDVTQIPGLEENALPLFSEVGRDMSRWPSAAHFVSWLALCPDNDISGGKLLWRGARRVKNRAGHLFRLAAFSLHHSPTPLGNYLRRMKTKLGPKGATMATAHKIAVIFYVMVKKQVEYDQSIWATRDAQREKRLETKLKRQAKQLGYELVPIQPKAA

SEQ ID NO: 350615 - protein, 385 aa, unidentified
MGTQTFIPRDYDVFAGLDVDKKSISVTFTDHQGFLKSLNMPYKVEHLVNYVRKHYPDKKVAFAYEAGPTGYGLYDGLEAQAYPCLIASPSMIPKAPGQRVKTNRLDSRGISENLRGGQLKGIHVPTPLYRELRHLTQLRDTLVSEMVRMKQRIKSLLLMEGLEFPPAPAGSQWSFLVKKKLRELPCSTTVRFKLDRLLDSLEFDEKQVLKATREIRRFCQTDPELSQCIEYLRTLPGIGWIVASQLLARVGDWRQIKNIRQLPAFLGLVPTENSTGERTERGSITHTGDGRLRSKLIQASWSAIRQDGELREFFRIVAKKHPRHLGARVAIVAVAHKLSVRASVVLMKQRPYEVRQKVQSAPLTQEETVPQGTTRRLAVPGETNS

SEQ ID NO: 350616 - protein, 340 aa, unidentified
MDKVTTIAVDIAKRSFSMFWVDTETGEIGAKAMTRAKFEEFMRTREPSRVVLEAGGSAHYWGRWLEPHGHEVRLIAAQHVRPFVRTNKIDGADARAIWEAAQRPEVKWVAVKSEASQAVLALHRMREQLKQMRRMQSNQLNALLYEFGVVARGKIAQAQLRAWVAAGRVPELLAASLGEQIERIARLKREELQLTRAIERHNASDALAMRLLEVPGIGALGASALSAELAAGAKGFANGRQYAACKGIAPRLSGTGGKVRAGAISKRGDPYVRTLLIHGARSVITHQRRAKRLSPWLSALLERRPLNVAVVALANKMARIAWALAAHGRSYQQNYGAQAA

SEQ ID NO: 350617 - protein, 346 aa, unidentified
MKHCAGLDVSVKETAICIVDEMGTVCREVKVLTHPEDIARVLKDPAWRLERVGLEAGPLSQWLFEGLAKAGLPMICIETRHTKAFLKAQVNKTDRNDARGIAQMMRVNLFRPVHVKTLTSQKRRALLTARKLLKDKAIAIENDIRGLLRNFGLKVGKVGAVKFEERIRELTEGMPDLVEIVEPLLDARRKLRQNYAALHRKLLAIVRDDEVCRQLMSIPGVGPVVSLAYTATIDIPARFRNSKAVGPILGLTPALHESGESRRVGGISLCGDGMMRTLLYEAAQTLLTRVTKWSWLKAWAMDVAKRRGQQKAIVALARRLAVIMHRIWSDGTQFRWTRTEIKPVAG

SEQ ID NO: 350618 - protein, 346 aa, unidentified
MMIIGCDFHPSWQQVCWLDTETGETGEQKLVQAAGDAERFYRQVPAPALIGMEATGNCHWLVDLLSELGHELWVGDAAQIRASYVRPQKTDKRDAAHILKLLVEGRFPRIWMPSAEVRDLRQLLLHRYKLVILRARVKNELQHLCLNQGVQRQHKLWSRAGQQVLRELPLKPWAARRREDLLRLMAMLDQQIEPLDQAVKAEAQRDKMALLLQTQPGVGPITALAYVLTMGEVSRFPRGKQVASYLGLIPREHSSGGRQKLGAITKQGNRMMRMLLVEAAQAAVRYDPEFRKEYRHRCHRKPKAVAKVAAARKLAIRLYWMLRTHKPYPEIVRIESSPRVPLVGAS

SEQ ID NO: 350619 - protein, 431 aa, unidentified
MEIVHSRVAGIDVHKKVIWVAVRLPGAEPGQRTVTVRRFKTFWRSLQQMAAWLAELGVTDVAMESTGVYWWPVYHALAQAGLVEVCVCNAAHMRNVPGRKTDLKDCQWIAELHEHGLLRPSFIPGPQVAALRARTRYRKKLIEHRASEGQRLAKVLEDAGIKIDSVASELLGVSGRDMIEALIGGERNPHVLAGLARGRLRAKLDDLQMACDGRFTAGHAQLCRIHLDAYDLLTGQIATLDELVAQAAEPFGPVIARLMTIPGIGPRLAQVIVAETGADMTRFASSARLAAWAGPAPGDNQSAGKRKKAAARNGNPHLRAAMVEAAWACSRTATRPGARFRRLARRFGKLNLKKAAVAVAHTLLCVAWAVMKHEADYAEAGADYYDQRDRRNHEHLARHHQQALTRLGHQVTLVLPGGDSPPPGSPQQPAA

SEQ ID NO: 350620 - protein, 360 aa, unidentified
MFTERTSVGLDVHARSIVGCGLDTVTGELSRRRVCPTLRGVTEWLAELPAPVAVAYEAGPTGFGLARQLTAAGIRCVVVAPSKLQRPPGDRVKTDARDARHLANLLRMDQFVEVRVPGVEQEAARDLVRAREDVRGDLMRSRHRLSKLLLRHGIVYSGGHPWTGVHEVWLRGQHFDLPGLQLAYDTAFETVLLTTARRDRLDKAIAQMAANSEYTPVVRRLCCLRGVSTLTGFGLAVEIGDWQRFTGSTIGAYLGLVPTESSTGSKRVQGSITKAGNTHARRLLVEAAWHHRKAYRPGLTMQARWNLAPAAARARGHQGNQRLHDRWEVFTERKKRPVIANVAIARELAGWCWSLAVMDG

SEQ ID NO: 350621 - protein, 372 aa, unidentified
MQSDSEVFVGLDTSKLKISVALAEEGRHGEVRFLGDIENSPDVVRRVVARLSGKYRKLSFCYEAGPTGYGLYRQIRDLGHDCSVIAPSLIPKRPGERVKTNRRDALTLARLHRAGELTAIWVPDPDHEAIRDVVRAREAAMEDLRAKRQHLQSFLLRHGRRYPGLRSWTQVHARWLSNLIFAHPAQYLVLHEYRQAIEDAETRLERLEQQIAELVTSWSMAPVIEAYQAMRGVAFLTAVTFVAEIGDVRRFDTPRQLMAYLGLVPSERSTGELVRRGNITKAGNPRARRVLIEGAWTYRYPARLSRPLQIRQENLPKAVREIAWKAQVRLCARYRRLMATGKRQTLVTTAIAREMAAFLWAIGREVTPRPVA

SEQ ID NO: 350622 - protein, 339 aa, unidentified
MSKLFKNFVGIDISKTWFDAALIRSADPSKIIHQQFLQTPDGYKKMQQWLHDHDVSLQDDTLFCMEYTGIYNTGLVTYLVAQQAQLWVEMPLRIKRAGGLERGSDDRSAACKIAWYALRYHDQAKLWKPADSSIEKIKHLITQRERIITSIKHLTVPAEELKQCGCLADAKMIEKLQQPAIKQLQKAKQGIEALITKTIKQDEALYNKVQLMQSVSGIGSVTATALLVYTKGFTAFNNAKELACYCGVVPFNKTSGSSVKYKPSVSPFANMKLKKLLHLCAMSAIQNDKEMKAYFERKVAEGKNKMSVINAVRNKLIHRVFAVVRDERMFEDNYVRQCA

SEQ ID NO: 350623 - protein, 334 aa, unidentified
MKSGTVHIGVDVSKGKLDIYVPAEKEGSRPVTKEVDNNLAGFRELRDLARKAKATVCVEPTGGYELELIAFMHKFGVAVAYTDALRVRQFARAEGSLSKNDVIDAALISRFADKIGARPLQAQEVEAVELRRKAKFRQTMVDSRTAMTNRLETEVDAEMKALLKEQIRLASRIIEKAERLCLDTVKKNERMDGLKDRFTQIGGVGNLTAISILSGLPEIGMLSDGKLNRLVGIAPEEKQSGAREWQRRIWGGRKDVRNALYMAAVASIKWNAILGGYYRKKRAEGHPHKWAIVPTMRKLLSLLNRIARDPGFTPAPEPESTKQNANVGRKKKAA

SEQ ID NO: 350624 - protein, 316 aa, unidentified
MSETLVVVGIDVAKAHVDVEVLGGKLETRRYANDAEGHSALVLALQGIGATLVVMEATGGYEAGLACALQAAGFAVVVVNPRQARDFAKSMGRLAKTDGIDARILAEFAAVLVRREDLGNFIRPLADAEQQALAALVTRRRQLLTMLLSERQRLQLAIAVVRPSIEALIKAIHQQLDDLDAQMVSHVREHYTALDDLLRSTSGIGPVTSATLIADLPELGRLNRRQIAALVGVAPMAHDSGNNQGRRHVQGGRFEIRRVLYMATLVATRFNQTIRVFYLRLIAAGKAKKVALVACMRKLLTILNAMVRSGTCWQPA

SEQ ID NO: 350625 - protein, 392 aa, unidentified
MFYVGIDIAKKNHEASIIDSNGKLLDKSISFSNSESGCNKLTALLEGFNANSSNVIVGMEATGHYWLSLYSHLLNLGFTVYVINPIQSDAFRKMYIRQTKNDSKDSFVIAQIMRFGEFSTTSLADEDIMALRQLSRYRFSLVDECSDWKRKCIALLDQVFPEYSKLFSDIFGVASRELLSKYPTPEDMVSIDANTLSELLSEASRGRFGISKASEIQMSASNTFGISFARDAFAFQIKQIIAQINFIEVQLKELESEISTLLHKTNQVITTIIGIGDVLGAVIIGEIGDISRFESASQLVAYAGLDASVKQSGDFVGTHTKISKRGSPYLRRAIWLAATVAAFKDPALSVYYQSLKARGKHHLTAIGAVARKMCNIIFAVLTNDKPYVPNIH

SEQ ID NO: 350626 - protein, 440 aa, unidentified
MEAGRSELYWPGDPRDPRSGNQRNCTTSSVSTQIPSGGCARVDTKEGSATPLSRNVADVSETVMLNPSRARTTEIKGSKPNVLRSALEELPMITNTTKESVVYAGIDYHKRTIAVALGDKEGRVLERFNLLNQTELVTQFFQQFSKIECVVESCRGYEWFVEMLQKQGHTVHVGDSRSIKLIAHSRCKTDKVDSQILMELLAIKYLPTTYIPTAKEREYRELLRHRSSLVQTATRSKLRVHALLDKENKGIRFPFSKNGRKQLEELDLSESRRRIIEHELDIIDFAEEHAHAQQLRIHLLASYEPEIKRLRTIPGFEVLMAAAFLAEVGDVSRFKNGDQVAAYFGLVPRVYASGNTMRCGRITKAGSKFMRWMLVQAAWAAIKTSPNLRQSFGVIGRRRGQKVAIIAIARKLATIAFRVLRDKTTYKEELLDAGLARASF

SEQ ID NO: 350627 - protein, 354 aa, unidentified
MSQTSNTAIAVIGIDIGKNSFHVAGHDARGAIVLRQKWSRGQVEARLANIPPCLIGMEACVGAHHLSRNLASLGHDARLMPAKYVRPYSKGQKNDFNDAEAIAEAVQRPTMKFVATKTAEQLDLQALHRVRERLVSQRTGTINQIRAFMLERGIAVRQGIGFLRMELPTILATRTDALSPRMLRVIEELAGDWRWLDQRIDGLSGEIEALARLDQACLRLMTVPGIGPIISSAMVAAIGTGDVFSKGRDFGAWLGLVPKQISTGDRTILGKISRRGNRYLRVLFVQAARVVLARIKHLERYGLKSWIEAAKKRLHPNVLAIALANKLARIAWAVLAKGRAFELTRTDDAGVRPA

SEQ ID NO: 350628 - protein, 337 aa, unidentified
MTGKIVKQVAGIDVAQKELVVTLGHLLDDFSIELFAYKVFKNSDSGFKSLVEWANKLTDNQVDVLYVMEATGVYHQKFAYFLTDNNYKLSIVLPNKISNYMRTLELKTITDKSCSQAIAQFGLERKLDKWSKPKPTYKELQQLTRERDQIVQERSIIKNQIHAEITEAEPNQRSMERMQARIRFLNSQEKEIKEDIEWIVKENPDIRQIIDRITTIPGVGELTAVIVLAETNGFELIRNKSQLSSYAGMDVKEKQSGTSVKGKPRISKKGNRALRKSMHLPALTAVKWDDNFRETYARLVSKHGIKMKALVAIQRKILQLIYVLFKNETIYDKDYSI

SEQ ID NO: 350629 - protein, 391 aa, unidentified
MINIGIDVGKFKHCATVLDDSTGEVLIKPFFLTNNRKGFDLLYSKTKQFIHRKHSVGMEDTGHYMINLTNYLLDKKFTVKYINPRATCLRRKGLGISAKNDRKDALLIAEMLSEKRFWRSISVRSIENSKFRDITRLYHQLQEQQNQDMNRLQRALDIVFPEVNSLSWTRYSKAYMKFLSTYPSASSIALEDIRILRKALKTEGRGRQCKVTAEEIRELAKNSVGEDNISIDLEVTSIIAIINTREEQIRMLEKKIEEFSHKLNSPIISIPGISHISGMTILAEIGDINQFQNTGNLISFAGMDPLVYQSGKYDAAHMPISKHGSRYMRKALYQAVFTVCKYSPTFHDYYTKKRNQGKSHRCAQGHCARKLLRVIYKLLSTNSLYDQNHIQ

SEQ ID NO: 350630 - protein, 377 aa, unidentified
MKAPSTRPAAVLGLGVGKSSHWACLIDRDGEVLASAPVRNREAELDALFASAPAGTLVVVDQFRNIGSLAVRRARAAGLGVAHLPGLAASRAAGLFAGEAKTDERDAAVIARTALGVPDSLSGVPGRGEALEAARALSSQRDHVVACATRDKNRLRAVLLESCPALEAAVDLSDRRWLELLAGFGGAWGIARSGAEGPRAEAAGEAAAASTAPPPALVEAENRQVRFLAARISEALDEAGALEAETAALLEGDETYACLLTVPGIGPRTAAQLAVSVDIGRFPDHDHLASYCGIAPRVRSSGTSVRSVRASRRGDARLKSLLIFSCNSLVRSSGRYGEYYRACRARGMGHGRALKAVARKRLRAIYAVMRDRVPYRE

SEQ ID NO: 350631 - protein, 407 aa, unidentified
MEGCFAGVDWASEEHACCVVDGDGRIVEGRRYRHDERGITALCRRLLDLGVELVALERPDGLLIERLLDAGLQVIAIHPNQVAAMRPRFSASGGKSDSFDSFVLAELARTDSHRYRILVPDSDQTKAVRALTRAREDLVKTRVGLANELRAQLECFWPAAIGVFADIDSPIALAFIKRYPSPADARGLGEQRLARFLARHAYSGRRTPAELLSRLKGAADGRAAALETEARRQIVLALISALEPIVARIGELTSEIRGALHDHADGDTFRSLFKDPKSVVTAATMLAEIGDCRARYPTYKALSADGGQSPVAVESGKSKRARFRWACDHRLRDAIATLADSSRHHNPWAADIYQRAIARGATHPHAIRILGRAWCGVIWRMWQDHDVYDPARHTALQRLLATQTTTP

SEQ ID NO: 350632 - protein, 349 aa, unidentified
MEHYAGIDVSMEQSSLCVIDGKGEIVLETTVDTHPDVIADALSPYEATLKRVGQETGALSPWIHKHLRAHGLPIVCMEAGHTRAALKSMRNKTDRNDARGLAQILRTGWFQPVYIKSDEAYRMRLLLTARRNLKRKFLDLENAVRHSLKAFGIRLGHVTRKDFERKVREHLQDDPVMTSMVEGLLTARAVLWKEHLKLHNLIVRVVGRDELMRRFTSVPGVGPITAMSFRAAVDDPNRFQKSRIVGAHFGLTPRRYQSGTSVDYGGRISKLGDENVRHALYEAANALLTLKRGKDPLKSWGQKIAKKRGHKAACCAVARKIAIILHAMWRDGTAYGAPKKAPHLLQIAA

SEQ ID NO: 350633 - protein, 351 aa, unidentified
MELIAFDSHKKYTLASIESQDGRTHREARIDHGPGVIRRFLERCPKGSHVAVETIGNWYWIVDEIEAAGMIPQLVHARKAKLMMGHTNKTDRLDARGLNRLQRTGTLPTVWIPPMELRDLRELLRTRMDLVVQRTQLKNRIHAALARYCLQLEEANDAFTIEGRKEMAQLFEKLPPQTRFANTLLLEEVDAVQKQIDRLEERMEEVLEDTPAVELLKSLPGVGRILSAVIALEVGDVKRFPSAGHLASYAGTTPRVSSSGGKTHFGKLRGDANRFLKWAYIEAANVVARFHRKHPDAHLSRMYSKLRKEKGHAKAIGAVARQLAEATYWMLTKNEVYKEPARTGTGSSTEA

SEQ ID NO: 350634 - protein, 316 aa, unidentified
METSKPFVGIDVSSQRLDVDMVPVSQPFSEANTEDGIASLVPRLQALKPQIVLLEATGGYEIPVAYALYEAGLNVVIANPKAVRHFAKALGKLAKTDKLDAQILALYAQRIQPQVRPLKDQEQLELANLMTRRRQLQGMIGMEENRRRTCTPKVRSNIDLSLAHLRQLLKDLDRDINDSIRRTPLWHENSEILQSFTGVGPKVSASLIADMPELGTLPGAKASSLAGLAPMNRDSGQYRGQRKIQGGRPAVRRALYMAALVASRYNPVIREFYQRLRLAGKPPKVALTACMRKLLVILNAMLKNRTYWNPQLPLAA

SEQ ID NO: 350635 - protein, 346 aa, unidentified
MKLIKKVIGVDISKDSFTVRFGTLDQDLQQKTSKPFTFKNNPAGFNQLLKTISKVHYFNCEDLSSKDIPVWFIMEATGVYYENLAYFLTENKFSVSVLLANKVKNFSKTLENKSKTDDIDAAIQTQYGLEKTLKAWTPPSGIFRELKELTREYRSIKESITIIKNQMHAKSCAYNANKETVKRLNQHKKFLQQQLKQINAQITALLKSDKELYEKIKTVSSIKGVGIMTVTKVVAETAGFALIKNKNQITSYSGYDIIHDESGTHKGKTKISKKGNSQIRSALYMPALTAIRCNKELKQVYIRLCKTKINKKIAIIAVARKLLILIYCLWKKNEKYNDNYRNLKAA

SEQ ID NO: 350636 - protein, 341 aa, unidentified
MNLKRVGLDTSKAIFTVHGVDQDERAVLRHNLKRAGMEAFFAKLPPTLVALEACGGSHHWGRRLAALGHTVRLIPPQYVKPFVRRGKNDRNDAEAIADAASRPGMPCVPVRAAEQQAEAIVLSVRELLVRQRTQLVNAVRGHAAEFGVVAAKNISHLSGLLETVAAEEAVPSTAKEMLAFLGAQVAQLDERIAELERRMKQQHKASAVSQLLAEVPGIGPISALTLALKIEPGRFTSGRHFAAWLGLTPKEHSTGGRQRLGGISRAGNERLRQLLVVGAMAVIRYAKPGSKTASAWLLALLERKPRKLAAVALANKMARIVWAMMATGEAYRGSKGAAAAA

SEQ ID NO: 350637 - protein, 433 aa, unidentified
MGLIVPTARHPERADQPMPYAWCVGIDWGSQQHQVCVLDRNRRLVGERTVSHDGASLAQLASWLWTLSEGHPQRISVAIEVPRGAIVEGLIERGFHVFAIHPKQLDRFRDRHSVAGAKDDRRDAFVLADSIRTDLPSFRRLRLDEPQLIVLRELSRAEETLLEEFRRSANRLREQLHRFYPQLLQLGLAADEPWLWDLLELAPTPAHAVLLSAEQVQRVLKAHRIRRVKATEVLACLQAPALPVAPGVLEAAPAHCGFLLPCLRVLTEQLRLCAQQVQALLNTLAEEPGEAGGPSDVAIVQSLPGVGRKITAWLFAEASQPLAERDYQVLRTHGGVAPVTRQSGKRRQVVMRRGCNPRLRQALYHMARVAMQRDAHFSDVYAALRAKGQRHGQALRHIGDRLLRILVAMLRHRTCYDPSRIRQGLVVQMGRKI

SEQ ID NO: 350638 - protein, 316 aa, unidentified
MDHKQAVYGVDVSKAKLAIAQYEGEMVVEIDNAPEPIAAWLASVPAGSAVAMEATGVYHRVLAQLAHAAGLVVYVLNPQVLKHYARAIGQRGKTDGCDARMIARYLVHERSKLRPWQPPLAAVDTLSRLLVRRRALVNARQTLAQSLTGMPMLKAPRQTLLASFKRTIATLDLLIRRELARLPEMAALHRRLTSIVGIGEVVAAQLVAALSTLCFTRSAAFIAYTGLDPRPDDSGQHRGRRRLSKRGPALLRCLLYNAAMAAANSKVFKPVYLRLRERGLQSTEAIVILARKLARIAFALYKSGETFDVQKHLKTT

SEQ ID NO: 350639 - protein, 318 aa, unidentified
MIKYHKHIGIDIGKYNFVVGIEGIKDTKEYENTSSGIFEFINDNKDILANSLTVVKTTGGYELELLYSLCERGYVVHRADARKVKNFIRSYGNSAKTDKLDAKALGLYGKERADKLEVFKPESKQNIQLFRLVQRRNDLKQMLVAEKNRLQQANTDKFVKNSCINMIDVLSNQITEITNQVEVIISSDQLLKAKHEILKEINGIGNIVAFELLILLPELGKLTRRQIASLAGLAPKANDSGKYQGYRKVGHGRAGVKPILFLAAMSARNSKTSGLRLFYERLINNGKKKMVALTALMRKIIVIANAKLKSLLFNLKHS

SEQ ID NO: 350640 - protein, 319 aa, unidentified
MAQNEVVVVGIDVAKDKVDACIRAFKLRRTWPSTAQGHRKLVAWLRKYQVNKAVMEASGGYERDWARVLREAGIEVRIVDPKRVRSFALSAGRLAKNDAIDAEMIAWFAETFSEAPSQPHDAAREELQALVKARLDLIDFRMRLVSRSEHAAPGLVQKAHAHILKSLASEIAKLEAAISAKIKSTSDFAERAEIIESVPGFAQTSSANLVAGMPELGQVSDEIAAALIGVAPYDDDSGKRRGERHIKGGRRWVRNAIYMPCVGAATQNNPVLKAYYQRLLAKGKEPKVAIIACMRKLIVILNTMIARRQKWDPSRYVLS

SEQ ID NO: 350641 - protein, 341 aa, unidentified
MRKATHFIGIDLHKTVVQICVLDERGDVSDEFRVRLGTEAAGQEVLRRLTRWKTTGRFVVEALGLNRWLVNACQHAGFNMVVADAVKLSVKRLGKKTDRHDARELARRLWVGDVDRYARSYYPTDEEYGVRKILRVRHQLVGIRQQVSNQIRALLNAYLLPSPGTALYAASSLTTLASIELPTADLPVGLQTLVTAIRQLQERMEQLTKQIRHRAKATSVQALATQLPSVGPQTALTLQYELGERRRFANATQVCAYAGLVPRVANSGDTQHHGRLTKRGNPELRWIVSEWAVRLLAFDPHARAWARPRLHRRHQNKVRMALARRLLVGVYVSQTRGAAFS

SEQ ID NO: 350642 - protein, 522 aa, unidentified
MAVRTARKGKRSSCTEVLHRPRGLFHSRVQQVGPEHFGIVSVDCAKARSKWMLADFYGRVLIPPTVVAHNRVELDATIAQIRQALTTNDLHDMLVAIERTGRYHHVIRDAFVRAEFEARLVHPFATKRFRQPADPSTKTDDTDLAAIHRAAVNGFALLEPKLSEDWLSLQMLVRHRRNLVQKNAALRCQIREHLEAAWPGYAACFDELWDSHIAQALIRRYATPLELLAERTPAIDHWLRQQGVRFQRPTLDTILAWAQRATPGDPLTELHRRLALAYDDDRLQKTQEIQALERDLAHRLAQTPYVLLLSFPGINVVSAAEFAGEMGPIEHYANPRNITGRAGLFPSRYQSDQVDRPHGPLVRRGNRKLRAAILGVADNLLACNQHFKVLATRWKALGKHTRHTHVKIALRFCRIAFHMVAGRQVFHHPSLRERHYILDKLLAFHTEHQTPWEQTLRDLHHAIDQVPTKEHRGEAQPLADRLQRWRQRRRGPQALAEILAIVLARLGVGIVQSQESGEQDPT

SEQ ID NO: 350643 - protein, 390 aa, unidentified
MDVLYQSCAGIDIHQANIVVCILHGPLTSTRPKREMATFDTTPKGLRACHDFLSQFHVEAVGMESTGVYWRPVWHALCDDFELILAQPAHMKAIPGQKTDKKDAHWIAKLTRIGLLPRSFVPDETIQELRELTRQRKHYVESRNRETNRIHKILQSGGIKLTTYIEDIMGLSGRNLLQLLVDGTPITPRLVHQSVYTSLKKKVPQLMEALDGYFSDHHRFMLKQSLEIYDFYQKQIELLEERINIYLSQYEKHVEILDSIPGIDVITASVIISEVGVDMSQFPTAGHLASWAGLCPGNNESAGKKRSTKIRHGNSYLKKCLCQAAFAIKKQKGNPLADRFYQIQSRRGSQKATIALAHQLLKIAYILLKEQITYSEFLAQKKTTRDELVA

SEQ ID NO: 350644 - protein, 341 aa, unidentified
MDIVVLGIDLGKNSCSLAGLDASGRVILRRRMRRSSVESFVNGLGRCIVAMEACCGAHHLGRVFVAQGHSVRLMSPEYVRPYVKAQKNDELDAEAIAEAATRPTMRFVTVKSQYQSDVQALHRARERLVSERTALINHLRALLLERGIVAPQGRRKLQEELAVFADEDGIEALSPRIRLLIEDLRSEWRALDERIAAFDVEFVRMAREDEAVRRLTTIPGIGTINATALAAAVGNARAFRRGRDMAAWLGLTPRQMTTGGKPRLLGISKRGNRYLRKNLIHGARAVLPYLVERETPLGRWARGLLARAHKNVVVVALANKLARIAWAVLARGRTYEAAAAV

SEQ ID NO: 350645 - protein, 500 aa, unidentified
MPRRLRASWAPASSWGKGSGPESGFIRLLRLAARVNSGPGGRQPLCASSALGRVAALTTGPSVSRSTSDPVPVREVVETRSRVPPPNGGNTKGNEEGGWTPNPGLGLDVHKATTTATYLGRDGRTQRVWTFPTTRSALTALPREVDPPTPIVLEASTAGKAVATILKEAGRELHMASPREVGLIAKSSVKTDARDRAKLAHLYPAGFLPECYIPPPEIDRMRSVVRQRQDLGYKVVLVKNPVHALVTRSLRDSEMGGVSDWFGVSGLRRLVQLPRGPEDRTALARYLRQLTYLATPEEELRRELAQLAVDREDVRLLMSIPGVDYCTAVAWVGEIGDIRRFPTQRTLASYAGLVPRADNSGDHVSSHSHVKPGDRVLKRFLCGAVMGMLLARQDTAVKRFYQPKSKPIGGAKAQVAAARKLSAVVWWILTHRTPYREQDEDLTERKEAQLDRVAQPSTALVSVEELTARGAEVEAKTEVLGRLHREGSTPPSEEKRERKG

SEQ ID NO: 350646 - protein, 400 aa, unidentified
MPDIGKRYVALDVHKSYLMVGAVNSQQGVVLSPRRVSFLEFETWAKKHLRADDVVALEATTNAWYVYDLLAPLVERVVVAHPYHVKLIAASMVKTDKIDTLVLARLLAANILPTIWVPPVYVRELRGLVAHRQRLIKQRTAARNRLQSLLHRHNLIPPEGDLVEQRDWWASQALSQTEKLRARQDLAVIDYLAPLVAEVEAELARLSVTAPWADQAPFLIQLPGIGILTAMTILGAIGEIERFPSAKKLVGYAGLGARVHASGQTHYTGAITKQGRRDLRSVMIEAAWVAVRSSAHWQDQFEHLEMRIGRQKAIVAIARKLLVVVWHVLTARAADRRAEELAVARSFMDWGTYHGLAHRLHMRRIQFVRQQLDRVGIGQSLTVLHHSGHDYALPPSQLGS

SEQ ID NO: 350647 - protein, 347 aa, unidentified
MRFYTKTHQHYCGIDLHARTMYVCILSREGQVLLHRNLPCDPERFLRTVAPYRQDLVVAVECIFTWYWLADLCAREGIAFVLGHALYMKAIHGAKAKNDKIDSKKTAALLRGGLLPQAYVYPPEMRATRDLLRRRLHFVRHRGQLLAHIQNTHHQYNLPTPGKRIAYRANREGIGEGFEDASATKSLEADVALIDHYDTVIRDLELTVLRCARGHGLDSFERLKTIPGIGKVLALTILYEIHDITRFSRVQEFASYSRLVKCQKGSAGKVLGTSGAKIGNAHLKWAFSEAAVLFLAKCPEGKKLLARLERKHGKGKALSILAHRIGRAVYFMLTRKRAFDLDRFLRM

SEQ ID NO: 350648 - protein, 467 aa, unidentified
MKHNSTRERKEKPARLSVSLLERIQPDAAGIDCGQNSHFVAVPPDRDPQPVREFRTFTADLHRLADWLVQCGVKTVAMESTGVYWIALYEILEQRGLQVVLVNARDVHNVPGRKSDVKDCEWLRELHSVGLLRASFRPAAAIVPLRSFMRQRETLVEEAATRIQRMQKALTEMNLKLHTVLTDLTGQTGLRIVRSILAGERDPERLAAHRDYHCHASHAEIVAALTGNYRTEHLFALRQNFAAYEFLLKQIAECDGEIERLLTTLAAQQPPPSAPLPAARGKRASKHQPQFDIRGPLHRLTGGVDLSQIDSIGPQAALHLIGEIGTDMTRWPTEKHFTSWLALAPNNKVSGGRLLSSRTPPSANRAAVILRRCAMSLTKTSTALGAFYRRLAMRLGKPKAITATARKLAVLVYRALSGNLDYHDPGADAYHQLNRTRELKSLRKRAKLFGYDLLDRATGEVLVNPVF

SEQ ID NO: 350649 - protein, 470 aa, unidentified
MADTRPSRLNRKQRKEVARRLQAADPGLTIIHPNAAGIDVGNSVHYVAVRPDRDPHPVRQFECFTADLHRLADWLQHCGVTTVALQSTGVYWLPLYDVLDARGLEVYLVNARHTKNLPGRKTDVQESQWLLKLHTYGLLRNSFYPSADIRIVRTYWRQRADHVSAVSSCIQRMQKALTQMNIQLANVISDLSGWTGMRIVRAMLAGERDPHALAALSHPGIHASRDTIAKSLEGTWRVDLLFVLQQEVTTYDAYLQRIAECDQALEHHLRSLAGKVDDHGDLPLASTAALRQAPPKRRRKAGSHTPQFDLGPELQRISGVDLTRLDGIDVSVAQTVISEVGLDMSRWQDEHHFASWLGLCPDNRITGGKVIRRGTRRVVNRAATALRIAATTLLRSQSYLGAQYRRFRGKLGAPKAITAMAHKLAVLVYRMLRWGHEYVDKGMQYYEERHRDQQIRMVKKRAATLGLIVV

SEQ ID NO: 350650 - protein, 341 aa, unidentified
MSELVLVGIDLGKHSFHLHGQDKSGREVFRKKLSRQQMMRFFGNLPACTVVMEACAGAHFVARELMIMGHQAKLISPQFVRPFVKGNKNDFVDAEAICEAASRPSMRFVSPKTEAQQTLSVLHRLRESLVRDRTKTANQMHGFLLEFGISLPRGLAIMKRLSSVLAEHELPVRLTVLLQRLHDHFVYLDGQIKELDKELAGQLANDDLGSRLLSLPCVGPITASLLAVEMGDGQQYGCSRDFAASVGLVPRQYSTGGKANLLGISKRGDKNLRRLLVQCARVYMQRLEHQKGALADWVRSLLMRRHSNVVACALANKLARIAWAIATHHTEFEAGPDTLSA

SEQ ID NO: 350651 - protein, 313 aa, unidentified
MSESLSIGIDVAKDSLAVDSSPAGLTLSVPNSNEGRRDLIKALKEHTVALVVLEATGGYERPAAAELLEAGFATVVVNPRQVRDFARGLGELAKTDPIDAHVLARFAQIVQPKPRPAASAQQAELAELVVRRRQLVTTLTQESNRAEMARLPRVRRSIEKITNLLEAEIARLDEEIAKLIEADETLSRKDKILRSTPGVGPGTSAMLLSHLPEIGQLNRQEVAALVGVAPWDIKSGRWAGQSSIWGGRADVRSVLYMAALAARRCNPTIRAFARRLEEQGKAFKIVITACMRKLLIILNSMLRSQTPWRQKNS

SEQ ID NO: 350652 - protein, 337 aa, unidentified
MKLKRIGIDLAKQVFQIHGVDSHEQAVCRKQLKRSQMLDFFRRLEPCTVAMEACGSAHYWARELRTLGHEARLIAPQFVKPYVKSGKNDANDAEAICEAASRPSMRYVEVKSAEQQASQALHRIRSRLIRARTALVNEIRGLLGEFGLVEARHGVAATRRLTQTALDTQNGLPGQMRELLAELGGELDEHDARLSRLDDMIQRQAREDERVGRLMQVEGIGPITATALVSAVGDARQFSSARQFAAWLGLVPRQHSSGGKERLGAINKRGDSYLRTLLIHGARAVLRHCQDKADRRSQWLRQLVCRRNPNIATVALANKNARIVWAILSRGEGYRPG

SEQ ID NO: 350653 - protein, 342 aa, unidentified
MKHYVGLDVSQKETSVCVVDDAGKIVFQGKAKSDPGALAELLRKRAPHAERIGFETGAMSSWLWHELQRVGLPVVCIDARHAKAALSVRMNKSDENDARGLAELVRVGWYREVKVKSSESQAIRSVLVVRSRLVAIRRDLENQVRSMLKEYGLQFGRSIGAQFRRLVREQLSGGHRLTLVVEALLAVHEQVCEEQDKLDQQVRFLAREDATTRRLMTVPGVGVITALTFRHTIDDPSRFHSANDVGAYLGLTPRRKQSGETDVNGRVSRWGDRLLRAYLYEAASVLMHRTKKWSALKAWGMHLSKRIGMKKAKVAVARKIAVILHCIWVDGTSFEWGNEKTA

SEQ ID NO: 350654 - protein, 426 aa, unidentified
MSQRDYSRQVARRQRIGKETLIVGVDIGNAFNAVGFMNKEGNILGKCAKVYNNREGFEQFINMIEELKAKDGFRDVLIGMEPTGHYWRKLAYFAKDHGYEVRFVRTTALKHHRELDESSSAKSDQRDALTIANITREGRYIDTVIEDGVLRQLRTLSKARERLLRYSVSAKNSLHAALDDYFPELHEIFWSMGSRSLWAILEKCPFPQDVALMKVSTLQELIGRISRKQAGSVQKAKELYEAAQKSIGVKQIGSADRYRVGMCLEEVKRTVLTLKNIDIQLKRMLKEIPSASYLMSIPGIGPLSAAVYLGELGDPTHFHNARQIVKYAGYDPQESDSGSRVGRRFISKKGRWLLRKYLFFMSMRVVVLSKYFQEYYLRKLETKNRVGQQPRRKEMLCAVAIKLIKVIFALLRDKREFEDLAPAAAA

SEQ ID NO: 350655 - protein, 403 aa, unidentified
MNAVGIDVSKGKCMVAALRPFGEVALSPREVLHGAAALESLGYTIIGLGEDTRVVMEATGRYHEPVAAALHEMGIFVCVLNPIVIKQSGAGSVRKVKTDKKDALKIAKYGLDNWNDLREHTPMDSVRQQLKLFSRQYNLYMKTSISLQNNLISLLDKTFPGANTLFDSPARADGHQKWVDFVMDYWHCDCIARVSPKAFSERYQKWCKRKGYNYSAAKAEEVYAASAGHFTTLPKNDNTKLLITAAAGELIAAMKVLMTIKAETIRLAKQLPEFDTVLAIYGVGEITAAQLMAELGDVRRFANRGSIVAFAGIDPEVNQSGTYAVNSNPTTKRGSSHLRKTLFQVVSTYIKKSPADEPVYQFLDKKRAEGKPYYVYMTATANKFLRIYHARVRDCLNAKDANS

SEQ ID NO: 350656 - protein, 372 aa, unidentified
MQQKSKVFVGLDTSKLKISVAVAEDGRQGEIRFLGEIDNTPEAVRRLVHKLASRHGELLFCYEAGPTGYGLQRQIAALGHECAVIAPSLIPKRPGERVKTNRRDALTLARLHRAGELTAIWVPDPGHEAVRELVRAREAAMADLREKRQHLQSFLLRHGQIFPGRQPWTRAHARWLAELIFEHPAQYLVLQEYRQAIEEAEARLARLTQQVAEVMATWSMAPVVAAYQALRGVALLTAVTFVAEIGDVRRFDSPRQLMAYLGLVPCESSTGERVRRGGITKAGNTRVRRVLIEGAWTYRFPARMSRLLQERQEGLPAAVRAIAWKAQVRLCARYRRLMAAGKRQTVVTTAIAREMAAFLWAIGREVQPRSAA

SEQ ID NO: 350657 - protein, 318 aa, unidentified
MKTSKNQSNVYIGIDTGKHSLDVHIRPLDIDLSVTNDEKGIKKLMAEFKKYNVISIVIEATGRLEHEFIITCSKHNLPFSVINPAHTKKFAGAIGRLAKTDKLDAQLLAHYGEAIKPAISSLKPEKIRLMSDLLSRRCQLMTMQTMEKNRMKIMPKSIQGMIKPILTAIKNQLDKVDKKLSDTLETCEEYKVRNDILQSMNGVGKVVAFTLIAEMPELGSLTNKQAAALVGVAPINRESGTYEGKRYIRGGRHRIRTVMYMAMMSALQSNVIFKTLYQRLVGSGKSKKTAIIACVRKMVVTLNAMVRDGEKWHAPTAL

SEQ ID NO: 350658 - protein, 475 aa, unidentified
MNIKGSKKKNQVLSVNIFEQQRIIAKADAIKAGLKASTWHELETRGKFDKNDKLSFVSDDMLILGCDIGSETHYVRAIDIRGRELSKSAFGFSNTAEGFESMLDWSTKLAAANDKKQIVLGLEPTGHYWFCLTTWLVAKGISVVQVNPYAVKQTKEVEDNSQLKDDKKDPKLIANLVKDGNFGMPYLPEKLYADIRRLSMFRDQLNEDRIRNLNRLHREMKIYFPEYKDAFGKIDGAFSLELLKAAPFPDELAALGTEGMKQIWHEAKLRGRGYANASSILEYARKSVGIKDGADAGRQAVKWFVSRIIELDGQLSDIENKLNERCMEIPHAKNILAISGIGENILSGILAEMGDISRFDDVKEIQKLSGLGLVACSSGKHTGETKISHRGRKRLRYWLFQAAKSAVAHSEEFKELHVYYTTRKQNPLKKMQSLIVIACKILRVIFTILTKGTTYDPKKLLGDIIRPNQAIPQAA

SEQ ID NO: 350659 - protein, 344 aa, unidentified
MKLFIGLDVSLAKTAVCVVSEHGKIVKEAEVGSDPAALTQFALEQQGEIAMIGMEAGPLSQWLHRGLTEAGLEVVLMETRQVKGALKAMPIKTDRRDAEGIARLLHLGWFRPVHCKSVSAQEIRALLGARKSIQQGVIALEMSLRGLLRNFGLKVGAISKGRFDARIQELVASNTTLVAATEPMLRARATLRHELARLERHVRSLAQDDPTCRLLMTMPAVGAVVALTFKSAVDDPARFSSSKKVGPWVGLTPSRQQSGERDVTGGITKAGDAHLRRALCQAATVMMNRGRGSWLRTWASRVAKRRGTKRAMVALARRIGVILHRMWLDGRNFCWEGAPEPIHA

SEQ ID NO: 350660 - protein, 401 aa, unidentified
MQVYIGIDWSENKHDVCFMHETGEVLLILQIQHTMAGFRELDQAGQSLGLSRQEVVIGLETAHNLLVDYLWDQGYAQIYVLPPSVVKSAQKRFRQSGAKDDPWDARLIADLLRTDHHRYTIWQPDQPLTRQVRFANQLGRELVRDENRLRALLVRYYPAILDAFPHLDSLVFLAFLQTYPTPSQADALPFEQLQAFLRAHHHTHTHRWPHIYAGLHAGHPHANPALEAAYSPLALAQARIVETLLRSRQACLARLGNLFQQHPDHEIYDSLPQAGALLAPALLAKLGDDRHRFPSPAILQAVAGTCPVTNRSGKHVHVYFRSACDHEFRHITQQWARLTLNASPWAATYYHLVRPHCKTDSDAIRRLANRWLEILWRLWIDRKPYDEAFHLKQHTLRSHAR

SEQ ID NO: 350661 - protein, 346 aa, unidentified
MEYIALDVHKRYTWARVKNSHGDRVTEQRVLHQRGAIQAFMQQWTAGSPVAVETVGNWYWVVDEIEAGGGQPQLVNARLAKLMSGSVNKSDRLDAKGLNRLQRAGTLPTVWIPSGVVRDARELPRTRMVFSGQRTQLKNRVLSTVGKYGLVIEGVSDAFGKRGRQLLSTLVPQLPPQPQQAVTCLLTQLDQVEATLLLLERQMRAVFAPCPQTAWLKTLPGVGALLAIVIWTEIGTLARFSRAEALASYSGLVPREHSSGGKVRFGAVRRDVNQYLKWAFVEAANSAVLNRTRCGYTHISQLYDRLCARRGHGKAKVAVARHLAEASFWMLTKGEPYRAPMASTPR

SEQ ID NO: 350662 - protein, 441 aa, unidentified
MAMRKREEDEVFPNAAGIDVGGSSHWAAVPRAADKEPVREFGAMTDDLNAMADWLLACGVDTVALESTGVYWIPVYEVLEQCGLTVWLVDARQMKYVPGRKSDVLDCQWLQKLMSLGLLRAALRPGDEVCVVRAVVRQRAALLTEQASWVMRMQKSLVQMNIQLAEVLSDIMGASGQAIIRAIVAGERDPHVLASCRHSRVRRSEEDIVRALRGNWREEHLFVLARSLAMYDSLAQRVLECDAKIDALLVPLKRHEIELAGATKRGSPNPLGFNARLALASWAGVDLTRINGISEGVALTILSEVGPDLSRFASVKHFCSWLSLCPGTKISGGKVLSARTRRSANRVRQALKMGAMSLSRSDSALGAFYRRLCSRMDKPRANTAVAHKLARMVYFMLKRGEAFVDQGQQRYEEQQRQRSIAALSRRASALGFRLELATTPA

SEQ ID NO: 350663 - protein, 351 aa, unidentified
MQPIPVLYLKAMDKISKKKWFAGIDISKDNIDVALVNEKEMKRFNDHRFSNDLKGFGAMETWLVEHKVKVGDCLFCMEHTGTYGLLLFAWLSQQSANFCVESGLQIKHSLGMTRGKNDKVDARRIATYAMEKKVELKQYVLPSVNLIRIKQLLTYRDQMVRARTSFKNSLQSHREYQQVSSWDFVTTNIQKQIEQFDEIIDQVEKQIKTIIKSENELQKNFKLSTSVKGIGLVIGAFMLVSTNNFTGFENGRKYACYAGIAPFPNESGKSIKGKAKVSHLANKKIKTLLANGANSAKSYDPEIRAYFERRINEGKDHKVIINAISCKLVNRVFAAVKRQTPFVSIYQQKFA

SEQ ID NO: 350664 - protein, 369 aa, unidentified
MYGTTVALNPTYFIGMDLHSNNVVVCVLQNAANQAGQLIKKVIKRKKIALSTELKELHHFLQPYCSTQHQATVESTYNWYNIADLFERNGWHLKLADPTTVKNNKTKFSDDISDAEFLADQMRLGALKATDIIPKQDRAFRDLVRLRVDLVQDRARYRTVLKNFFNNHRYMKISTGRLDRLAEQYCDGNATELVGIFKDENTCLKAGHYLMAMHHLSLQIQQLEEQIKAQELKNYLTCHRYLPRLYSMKGCGFILGSIIATEIIDINRFRTDKDFVSYCRLSPAVRLSNEKKKGEGNRKNGNAYLSWAMTELANLMVLFNPVIKKKYDRQFKKSHLRAKAIRSIAAKLACCIWHMLKKDKDFQIDLAFK

SEQ ID NO: 350665 - protein, 372 aa, unidentified
MSVYVGIDVHRKRSQVAVIDSGGEVLANRNVPNGTETILGVIGGLPPGTPAAFEAAFGWGWLLELLEDYGFDPHLVHPLQCKAIASARLKNDKVDAAILAQLLRADLLPEAWIAPPAVRQLRALLRHRAQLVRLRTLLQNRIHAVLADHGQDRPSGCWSGPGRGWLASLELPAVSREVVEDDLALIDALQVPIDRLDAEVRQRARSDPRVKILTQLPGVGTFTALVILAEVGDITRFGSARKLASWAGLTPTVRGSDRTVRHGHISKQGSAWLRWILCEAAQTAKRHPDYAASYAAIARRRGKKIATTAIARKLLTRAWHLLTDAERTASHQATATTSAPRAPRPGCGHQPGGVAKPRVSSQNRMSRPSRAR

SEQ ID NO: 350666 - protein, 417 aa, unidentified
MNPFDDFAALLGIDWADRKHDLCLKPLDADTLEFSVLEHSPEAIEAWAQGLRLRFAGKPVAVCIESRKVPLIHALLKYDFFVLFPVNPQTLCRYRRALVPSRAKDDPSDARLLLELVFRHPVQFRPWWPQSARMRTLAQLVQHRRTLVADRVRTTNRLTAALKLYYPQVLDWFEDKATLVFCEFLEKWPTLAAAKRARKSSLERFFHAHNSRYAQVIEQRIQAIRCAIPLTSDPGVIEPNRLNVMALVHQLALLLGQIDHFDDKIAECFNSFDDADLFRNLPGAGKQLAPRLLVAFGEDRERFPSANALCCYAGIAPVTERSGNQSWVHWRYSCPKFLRQSFIEWANQTIRFSFWARAFYQAQRAKGKTHQMAIRALAYKWIRILWRCWQDKQPYDEAKYLMALKDKGSPLVKELAS

SEQ ID NO: 350667 - protein, 313 aa, unidentified
MRTAGIDTGKDRLDVAIHAGGDPFAVENTPAGWQSLAARLSQEGVQRVGIEASGSYERGIARHLQAAGFTVVVLQPLQVRAFARLQLRRAKSDRIDAVLIAACTHLLDPKETKAADPRLDGLCDQLTFIEQVEADIARLKTRLEHIRDQRLRDIVTADIENLKARRVDELRRLIAALRSHTDLARRFELVLSVPGIGERTALALVLRMPELGAVSREQAAALAGLAPFVQQSGRWTGETHIAGGRSRLRRSLYAAALPAAFRWNLALKALYRRLMGRGKAHAVALVACARKLLIFANTVVTRGTPWTERTAEA

SEQ ID NO: 350668 - protein, 379 aa, unidentified
MNHATASAFPENMLHGALELSKNSWVLAIQFPDRQQPSLYRINGGDTEDLMSKLTSARDRWAKISGAPPSIRLCYEAGYDAFWLARFLKAHGIDCLVVDAASLQVNRRGRRPKTDRLDVNMLLRALIAWARGEQHVWSIVRIPSVDEEDLRRSHRERSRLVHERTAHINRIKGLLFAQGIRGHNIKSQCKSLELDKLVTGDGRPLPPRLAHEISRELDRLALIEDQLIQIEREFVDTPTSCKDTEKKRVLLQHLKGIGPIVSAVMAREVYYRTFDNRRQVAGFLGLATSPYDSGAVERSQGISRAGSGPVRATLIQAAWLWIRYQQKSALTRWFLARTKGHGSRVRKIMIVAVARKLAIALWRYVEQGLVPDGAILSNK

SEQ ID NO: 350669 - protein, 373 aa, unidentified
MANVEKDFAKGKPIHVGIDVHKRDWAVTVLCQGEELYHATVVPDPGALVRLLKRFEASEVQTVYEAGPTGYWLHDALVEAGFDSMVTPPSLVPRVGGRIKTDRRDSKKLASMLAGGFLRRIHILTPEERAHRQLLRTRNQIEHHRRQTQNQIKSLLLFHGKHPPSRLRERWSEAHVQWMETLLWEHPALKTSLDAMLATYRFLTEQYKRLTAELERLAMTEKYRERAVLLTQIPGIGIFTAMAILVELQNIERFHRADQLASFLGLTPSQHSSGERIRMGHITRCGNYQVRTRLVESSWTLIRYDAGAKTTYERIKHQTGSGRKAITAIARRLALRIRRVLLDRVPYQLSGGGHLATGRDKKREAKRFVLRAV

SEQ ID NO: 350670 - protein, 345 aa, unidentified
MPIVGGLDIHRKQITFDYLDTATGEIRRGQIAPADRAHLRAWLARFAGRDDAAFALEGCTGWRYVAEELAAAGVTAHVAEPADTAFARGRKRHAKTDKTDSRHLRVLLEQGRLPECWIPPAQILECRALLEAYHDLRREHTAWIERIHAVFFHQGAPRLGEGALRTEHGLAALRQAAAIHLSPAGQLQVATALDMLAAVEARMDTLRQQLLHAARHLAGARALQARLYGVGPLAGLAMTCWLGGAGRFSSSRKAVRFAGLDVTVYSSDGRRSPGHLSRQGPEILRWVAYEAGKTHGRAAAPGHDYYAAVKDRTDGKIAALAQARKLIRQACHILAELGDDALTAA

SEQ ID NO: 350671 - protein, 362 aa, unidentified
MNYVGVDIHKKYSVLCAVDERGRKLREARIEGNSGCGFAQFFASLEGPSKAVVEACWNWGLVNDELEEIEQVEEVVLAHPYKTRLIADAQIKTDRLDAHALGTLLRGNLVARAHVPRGETRVRKNLLRQRLYWARLRTMLRNRIHALLDRQRGLELPQCSDIFGVRGLSFLRRLELPETDAALLGEQLALHDLIAQQMKAQEKRIGLEFGSEAMHRQLLSVPGIGPTLAAVIACEVDSIERFSSAEKLCAYAGVVPTTHSSGGKTRHGQLLPFCNKWLRWALIEASWVAIGCSPYFGALYKQHRARGKKANSAVLIVARRMCRIIWQLLHEKRDFEKRPLRPNFNFPGCSVVRLTAATAARP

SEQ ID NO: 350672 - protein, 333 aa, unidentified
MTTMTPVSTYAGIDVGAEELVLVLRQQGTSLKPRHFANTTADRTRLLKKLIKFPGLTVSLEATGVYSMDLAVALHDADIRVMVLNPKASHHFAKVLLRHSKTDGVDADTLAQYAERMPYQPWARPSHEALALRVFARRLHALTRQKAAAKNQLHALSVAAGTPPAVRRDLQLAIAQLEERIAALTQEGRTFIDAQATLREPFALLLTIKGIAQTSAIALLGELLLLPAGLTHKQWVKFAGLDPRHFQSGTSIEKRARISKSGNRYIRHALYMPALSAKAHDPHVKAFFEHLLVNGKTPLQAVCAVMRKLLHAIHGMLRNNQPFDNTRFYAIPV

SEQ ID NO: 350673 - protein, 338 aa, unidentified
MAIVFVGIDLAKNVFAVHGVDEAGKAELVRPAVPRGRLLELVAMLPPCTIGMEACSGAHHWARQMQAHGHTVRLMAPKFVAPYRLSGKRGKNDAADAAAICEAVQRPNMRFVPPKSVEQQARLMVHRARQGFVEARTATLNRIRGLLSELGIVLPLKASTVRSQAAERLEELPGWANTVIGDLLGEVKRLDQRIEEYDRHITEMARQDERVARLMRLSGIGPTTATALIATIGNGHEFRNGRQLSAWLGLVPGQYSSGGKVRLGRITKAGDAYLRSLLVLGARAMLNASVGKTDSLSRWAQALVQRRGYWKAVVAMAAKNARMAWAVLSRGERFELPA

SEQ ID NO: 350674 - protein, 419 aa, unidentified
MSKSNIARQLAQVQPGTLHAGVDLALENNVVVVINEKAERLDHFSFPQDRGGYDYFLRRLEGLRQKYQASEVVVAMEPSNYFWKLLARELEEKKITYHLVNAYTVKKHREGDQLDRSKDDRRDADQIAEISRNGNYTETRLQKGAYEDLRQYATLHDQLVQGIRREKHVLWGLVGQAFPELSQVFKNLVGETGQALLMTGASAAIIRQLTVEDFIVQVRAAYSGKKLHVSKLHRVHQLAVSSIGVTEGLRAIQLAIQVHLVELQTFQKQLKRVTNAMTACLATLPEAPYLLSVKSLQTVSAAIFLAEVGDPKRYQTAAQWVKLAGIQPAPNISGKKQRSKTPMSHQGRARLRTMLFFTCLRMVRFDEHFAQIYANLQRRQNNPLTKMQALGVLMNKLLHILWALIHNQTFYNPSFGQSI

SEQ ID NO: 350675 - protein, 422 aa, unidentified
MKKRAYRSTLVKKVCLEQLKDKVEGQQIVVGIDVAKEKFFASLMDKEQSVLLTLRWRHPMETRQFVELLTALDAAQLEVATEPSGTYGMAVEELLRQAQFPVFQVSPKRTHDAAEVYDGVPSSHDAKSAAIIAKLHLDGLSHPVSRRSVERRELAAAIGVMDQHDEQLRRLLNRLEAHLAAYWPELTLHLTLDSVSTLTLLSKYGCATQVAARAEEALETLVRASRWNLKQEKIEQVLRSARETVGVQPVAGEIVAVQELTAEALRSRKQLRHWSDVVRELSQQQTQAHRMSEVAGKVTAAVFVCDLGEPTGFSSTRAYVKAAGMNLKVHQSGNKRGRLAITKRGSGRVRKYLMMFALRLIQHDAVVAAWYHKKVARDGGTKMKAVVAIMRKLLAAMWHVGRGAPFDTRKLFDVSRLELTAS

SEQ ID NO: 350676 - protein, 285 aa, unidentified
MSQKSSSAITAVGIDIGKNSFHIVGHDRRGAIVLRQKWSRGQVEARLANVPPCLIGMEACVGAHHLSRKLQQLGHNARLMPAKYVRPYSKGQKNDFRDAEAIAEAVQRPTMKFVPTKTADQLDLQALHRVRERLVSQRTGVINQIRAFLLERGVAVRQGLRFLRVELPGILATRTDVLSPRMSRIIEELAGDWRHLDARIEDLSGEIETIARQDQHCERLMTVPGIGPIISSAMVAAIGTGEVFSKGRDFGAWLGLVPKQISTGDRTILGSITKHGNRYLRALFV

SEQ ID NO: 350677 - protein, 522 aa, unidentified
MKPFTTVVGIDLARRAPHQAVVMPAEGPGRGVAHRARPVTHDLPGLERLCGHIRRQTGRDSLEGVLVNMEPTSGAWPVVAAYLGLQGAEVCLTRTDLTSQWRKVHSRYRKTDRIDAQTLANVPLSFPEHVWPVRPVSEPIRVLRELSAQRQRLVEEIIRWKNRFLAVVEPVWTGLLAVLLESQRFSEVGRAFFRRFANPCEVERYGRARFAAWYAKHAHGLTDPNLLDVLWKAAQSAAAVWRTLEQRQALPWSPAALDLLIEQDLRLIEVYEQELRGIEARIATARQEVPECDLLEQMPGVGKVVTVTLASLLLPTDRFANTRQCGAYTGFTGRKKSSAGRDTQGLRITKTGNRRLKRDLALAADTAMYKDPQLAEFAIRLLTHGKHYNEVRVAVGRKIALRARALLKRAAREPGAAFEWRDLHGDPVKPQQAKALARKLWERYRLDHPKGPSVPASSGPSVDAQQQADARPDPQYAHTARHPATTTPTPTAATLVDNLSPVRTKPGKKPPTHHPKNKLIST

SEQ ID NO: 350678 - protein, 433 aa, unidentified
MEEAADEPLFCERAAGIDIGKQAVMVTVRVPSETRRGGRAQETREFGTTRRQLLELADWLRSWGVERAGMESTSDYWKPVFFLLEQQGLECVLYKAAQVKALPGRPKSDKLDSVWLAKVTERGSLAGSFVPPEDIRRLRTHTRYRRRLTQARTAEKQRAEKLLEDGHLKLSSVISDIHGVSGREMLRAVIAGERSPLVLAEMARGVMRRKLAALREALDCSFFTQEHAFVLSMMLDNIDHYSAQIAVLDAKIAVLCEPYQRQVAQLDQIPGFGVTTAQDLIAEIGVDMTVFPTAGHLCSWARVAPRPKESGGRRKGGSATGKGSPYIGAALGEAAASAGRTQTFFGAKLRRLYRHMPKKKAQVAVMRAQLVTAHALLSDPEASYRDLGPGYYDQRAGTQRQARGHVRSLARLGYKVTIEPVDPGTGELTAKAG

SEQ ID NO: 350679 - protein, 338 aa, unidentified
MKKYSGIDLHSNNCVVAVIDEADQVLYRKRLPNEIAVIVAALGVYRGELHSVVVESTYNWYWLVDGLMEAGFEVRLANTAAIKQYEGLKHTDDGDDAVWLAHLERLGLLPQGHIYPKAERAVRDLLRKRSQLVRQRTANILAIENLVARNSGRLINGNQVKRLSPADLPAIEPEADRRLAIAANLAVMGALNEQIKQLEMAVKARTKAHEALPPLKTVAGIGETLALTIALETGGIERFAKVGNFASYCRAVDSRRLSNGKKKGEGNAKCGNKYLAWAFVEAAHFAVRYCAQAKRFYQRKRARTNNAVAIKAVAHKLARACYYVMRDRVPFDPARCFS

SEQ ID NO: 350680 - protein, 372 aa, unidentified
MEMETFVGLDVHRKSVVATAIDGTGQPVAQKKLGPNDSELTEFLEGLPGRKHVALEACAMWEHYFDAARASGAEVVLSNPYKTRLIAEATIKTDKVDSEALATLLRLNSLPTVYTPTPQLRALRLLVKDRVFFARKTHDLQNHIYYFLARRGIVYEDGVLRHRRRREKLREWGLPEVDRSLDALDHLQETVKTLERAIHEAFLTSPEAQLLASIPGIGELTSVGLVAYLCPIERFSTIDQLSSYVGLAPTTYQSGDRLYHGHLKRDSNALVRWLLVEASWTHRLRARSSEVAKVGRRVGRRRGASKGAVAAAHKLLKIIFAILKERRPYLPHAPERTAAMQPVRDPPPGIAAMQRVRRAALGSSAADCLSAQ

SEQ ID NO: 350681 - protein, 326 aa, unidentified
MMNYLGIDVSKEKIDCCLFINGISGKGKSKIFSNSESGFIKLTDWLTHLNINSNDLLVTLEATGIYHENLCYFLHDLKFNIAISNPMRTRRFAQGMSILNKTDKVDSEVLAKYGALAPIKYWKPDSKNFRELRDLMIRRDALSTDLVRESNRLEKSTFTKTSLHVISMIKESIDNLQTRINHIDVIINELIKNDSELTDEMSLLISIPAIGQRTALQMLTLFHGKDFDNAGSAAAYVGLVPIQKQSGTSVRGATRISKSGSSRIRAALYMAAIVAIRFNPHSKVLYDRLLKNGKSKMSALCAVMRKLVYLCYGVLKNKTPYQPDYA

SEQ ID NO: 350682 - protein, 343 aa, unidentified
MAILHPNGEAVDVERIFHDETSVRRLVGRFAEPRDLRACYEAGPTGYELHRLLTSLGVRCQVIAPSLIPKAPGDRIKTDRRDATRLARLHRAGELTAIRVPSPQEEAVRDLCRARDDAVADRTRARHRLSKFLLRHGQVWRGGNPWTVTHDRWLRSIRLGEPALQATSRHYLAVLEVRDADLRSIDADLVPWFSSGPFAEQVGRLGAYRGIDQLGALTLASEVCDFRRFASAQMFMGFCGLVPSEHSSGERTRRGHITKAGNAHLRRQLVESAWAYRFPPNLTDRMRRRQDGLPRETVARSWRAQLRLCSRFRRLAARKESKTIVATAIARELAGFLWAEMVA

SEQ ID NO: 350683 - protein, 409 aa, unidentified
MVVGIDIGSTTQYAKAFDWRGIELGKVFPFSNSREGFESFKAWMQHLQDKYKKLDAIVGIEPTGHYWFDLGAYLEDEGILLVMVNPYAVKQTKELDDNSQSKNDRKDPKVIAKLVTEGRYSAPYTPDGVYADLRIMVANRKKLIREMTQIKNRFARWFAIYFPEYTDVFGDYGAQSSMLLLKKVCTPEAIVELGAEKINQIWRDAKLRAVGMKRATTLCETAKRSIGLKKGSSAARYEMKLLLEDYEYKKAQLDAVMEEIEKLCRKIPESEQMLAIKGIGVITVAGFLAEVGDVRRFESPRQIQKLAGLSLRENSSGKHKGQTSISKRGRSKLRAVLFNAAIPLIAKNPEFKSLHEYYTTRANNPLKKKQSVIAISCKLIRVFYAILANGVTYDAQKMLSDIHRQPQAA

SEQ ID NO: 350684 - protein, 416 aa, unidentified
MEVIYPRCAALDVHKKTVVAGVRIAEESKVTTDTGIFATTTKGLLELLDWLSQYSVTHVVMEATGVYWKPVWQVLSGDDDLTLVLANAAHVKNVPGRKSDMNDTAWLRELFAHGLIRPSFVPDIATQQLRTLMRSRKQLVRDQTRHVQRIHKTLEEANIKVASLLSDMLGKSGRAMLEAMIANETDPARLAALAHKGVKATQEQLREALTGRVTEHHRFLLALHLEVIDHLDGSIARIDERVEATLSPFRDAVELVATAPGIRDLTAEGIIAEIGIDMSRYPNEGHLLSWAGFCPRQDESAGKRRSTRLRRGNRWLKTLLVEAAWAAIKKKGSYLQAQFLRLKSKRGPQKAICAVAASLLTSIYHMLKNGVPYKDLGAEHFQKRSGKSHAQRLVRQLQRLGYAVNLSAAKEEFVPA

SEQ ID NO: 350685 - protein, 369 aa, unidentified
MSKPITSFVGLDAHADSIAIGIAPSGRQEPHFVGTVSPQWGSLSKALSRLGKPEALQIVYEAGPCGYTLARQLQAHGYACQVIAPSKVARRPGDRIKTDRRDALLLARAARAGELVSVTIPDERDEAIRDLCRAREDAVRARLKARQQLKAMLLRHGRRYSGRSSWTEAHERYLATVSFTQPAQNIAFAEYRSAVREAHERVERLTDSMRAQLEHWRMRPVVEALMTLRGIDMVAAMTVVAEIGDFTRFARPRELMGFLGLVPSEYSSGSKRTQGQITKTGNSHARRVLVEAAWNYRFPARMSAIVQRRQEGQPKVVRQIAWKAQLRLAKRYRHLSARKLAMNKICVAIARELSGFIWDIARQVKPSST

SEQ ID NO: 350686 - protein, 394 aa, unidentified
MILVGIDIGKNKHTFSIIDKNSGEILLSPSDFSNNLKGFLFLIQKLSSYTKSELLIGMEDTGHYHFALLKYLLDRRYTVALINPTTTDLTRKLQGGITKNDPLDSLTICDVISCNHRNKPYRVTKLNRFDLYEQKQLTRHHHNLKEELNTYKNRLQKCIDIVFPEFNSLFHSKYGIVYMNILKAFSSAKAIANADIRSIRKCFELKGQGKRISLSAEQLKLTAKSSIGIPSVAEEIQIRHLVSQIELLEKQLSEIDKRIEEFSLKNNSPILTIPGISHFSGTSIISELGDICNYTKASQIIKFAGVAPYHYESSQFTAQHTAITKKGSKYLRKTLYQIILPVISNNEVFYAYYTKKLNEGKGHRCAQGHCIRKLLRVIYHLLSTRQPFNPKLLV

SEQ ID NO: 350687 - protein, 344 aa, unidentified
MGVAIGVDSHKSSLAAAALDELGRGVDVREFPNDAGGHDALLRWSRAQGRARVIGIEGAGNYGASLARHLLEAGESVYEVPAFLTHRERKRNPSKGKSDPADAVAIARVAARGEGLSSPQRTDVLVDLKLLSDHRDQLVRARTRLINRTHTGLVISHPGYEKKIPKLSSKKNQAAALTLLRGDRTVRAELIRDRISETRRLSKKIADVEKQLAGKVRESGTTLTALQGIGFVLAAKILGEVGDPARIRSKGAFAMLTGTAPIEASSGATKRHRLNRGGNRQLNYALHMMARVRLRHDDDSKGYVARRQLEGKSDKEATRCLKRHLSNVVFRQLVVDSRGLPEAA

SEQ ID NO: 350688 - protein, 458 aa, unidentified
MSRNKSTDRVRRTMAVVHPNAAAIDVGATMHMAAVNADRTTEPVRSFGTFTTDLHRLVDWFAECGVDTVVMESTSVYWIPIFELLDARGFAVFLVNARDAKHVPGRKTDVSDAQWLQRLHSFGLLRASFRPKGQIAELRAYLRQRERLLEYGASHIQHMQKALTEMNVQLHHVVTDITGATGLRIIRAILGGERNPAVLARMRDRRCHATVETIEKALAGNYRAEHLFALEQALALYDTYQQKAYACDARIEAVLKELSARRRREAGPLPSPRQNRSRQQNSLLFDLRTALFALLGKDLTQINGLGPYLALKLIAECGDDLSAWPSAKHFTSWLCLAPSNKISGGKVLSSRTRRSGSRAASLLRLAAVTVGRTDTALGAFYRRLSARIGKAKAVTATARKIAVLFYNAVRHGMDYVDPGASSYEIRYRARVIDNLHRRAKAFGFMLQPMAPTPGMVVS

SEQ ID NO: 350689 - protein, 458 aa, unidentified
MKKKSQTKSGPKVDWKALEVVHPDAAGIDIGGQEHWVAISPEKDEQPVRCFECFTADVERMAEWLAAHGVRSVAMQSTGVYWMPVFEILQQRGMEVYLVNARHTKNLPGRKSDIAECQWLLKLHTFGLLNNSFQPSEEVRAVRTLWRHRGGLVAQASSAIQRVQKALVEMNLQLRNVLSDLSGVSGMAILEAILAGERNPRKLAALADPQVKASKAVIAKSLQGNWRPELLFILGQEMEVYRGCQKRMAGCDQLLQQLLRAMETKVDPQSQPLGPRPPGKRARGNAPQFDLRSELYRITGVDWTQVDGIDVQTAQTVISEVGPSLHDFASEKHFTNWLGLCPTNETSGGKVLKRRTPKVVNRAKAAFRQAATTLLRSDSYLGAQYRRLRTRLGAPKAITAMARKLACLFYRLLTKGQTYVDKGALYYETRHREQQVRMVLKKAQQLGLQVIQPETQTA

SEQ ID NO: 350690 - protein, 427 aa, unidentified
MNNRRYQSTDVKRMNWSKVDEAVAGGSLTVAVDVAKEDFMAALMKPGHEVVETVRWKHPQETRRLEAGLLSLGLPVERIAVAMEPSGTYGDSLRYTLSKRGIAIWRVSPKRVHDAAEVFDGVPSLHDAKSAYLIGRLHQDGASERWQDLPETRRDDQALLAELDLYQSEHRRNLNRLGALLSRHWPEAETVMDLDRASLLNLIAEYGDPSHLQQQRSAAGQALRQHGGHFLEEAVIEALLDSAANTLGVPCTAGERAYLQCLARELLRTREGIHEVERRIQARTASEAVLQSMAGAVGAVTSLALNATLGSPLDYPSPKHYLKALGLNLRECSSGKHHGQLRITKRGPALGRKYLYFAVLRWLQADHGANAWYQEKSARDGGIHGKALIGLMRRLVKGLWHVARGACFDSSKLFEARPEGRPVMAMT

SEQ ID NO: 350691 - protein, 298 aa, unidentified
MGIDVAKDHHVIYNWQTEQTTQLPNRTSDIRTWLKSCHGPVRIAIEPTSNYHLTMVDEALKLGYEVYLINPRQLAHYREAVNVRNKTDPLDAWLLARYLEHEEGHVRPFQPRDPRAQRLWTLILRRATVVKSRQQLQQSFAEVQMSIQGVLTQIQHLLVRIERHIIALIRELGWWSDYQYCLSIPGIGSGNASALVAAYHRGCFAGSDAFISYLGLDVRIRESGHFKGRRKLTKRGEPELRRLLFCASHPARYYQRFAEYYQLQLDKGMCKTAARVALSRKLARIAFTLMRNEEIFIR

SEQ ID NO: 350692 - protein, 394 aa, unidentified
MKLIGIDIGKNKHFFCIMDQQTGEIVSLPVSFSNDKEGFDFLLQKIKSYQKESVLIGMEDTGHYHFALLKYLLDLQYTVALINPKTTDFNRKMQGGITKNDKLDTINICDVLDTPERKKQYRISKVNSFDLYEQKQLTRHHHNLKEELNVYGNRLQKCIDIVFPEFNSLFKSKYGTVYMNLLKTFGSAEAIVDTDIRTIRKCFDINGRGNRIALTPEQLKQCAKSSIGISSTAEIIQIKHLVNQIELINKQIAEIDKKIEEFSLKTNSPILSIPGISHFSGTSILAELGDISNYKKPSQIIKFAGVAPLHYESSQFTAQHTSITKKGSKYLRKTLYQIILPVIRYNPVFKAYYQKKISQGKGHRCAQGHCVRKLLRIIYHLLSTNQKFDPVLLR

SEQ ID NO: 350693 - protein, 399 aa, unidentified
MFIVGIDIAKKSHQAVIIDEEGNQRSKNFRFANSLEGFNLLLNNMEEIDSDHSNFEIGMEATGHYWINLYTRLIDKGFKIHVINPLQSDALRNLYLRKTKTDSVDSKLIANVIRFGQYTETRLTDDKLLTVRELSRQRFYLVDMNSDLKRKVVVIMDKIFPEFQGIFSDMFGKTSCAILKKCPSSKEVLEIDFDEFAAIIKKSSRSKFNIAKAKEIKLAARDSFSALIDPAPLSFLVKQMVEQIELLENQIQNLEHEISEIFMQLDSKITQIPGIGPVLGAVILSEIGDINRFSSSKKLVAFAGIDPSIKQSGEFISSENHMSKRGSPYLRRALWIASFVNLNHNKEIIKLYGKKTSNGKGHYKTMGFLCHKLLNVVYAVLKNNADYIPYAWTESKACS

SEQ ID NO: 350694 - protein, 392 aa, unidentified
MICVGIDVAKDKHDCFILSSDGEVLADVFTIQNNAEGFDTLLQTIRLCTRPQDIIKVGLEATGHYSYNILGFLLDKDLATYVINPLHTNLYRKSLSLRKTKTDRVDARTIATMLMSDVDLKSYTDTAYHNEELKSLTRYRFDKVKERAKLKQSVSRLVTILFPELEKLVPTLHMASVYALLSEFPGAKQIAGVHLTRLKTLLKEASRGHYGRDMATELRDAARLSVGSVMPAKSLELQHTIRLIRELDAEIDDIEAAIQIMMDEIHSPITTIPGIGIRMGAMILAEIGDFSRFDSPDKILAYAGMSPSTYQSGQLSLSGTYSHMEKRGSRYLRYAIYNATKYVCLWDPTFSAYLAKKRAEGKHYNVAISHAAKKLVRLIYAMEKSQRPYAAA

SEQ ID NO: 350695 - protein, 411 aa, unidentified
MKLFCGIDWAETHHDIAIVDGGGNLVAKKRITDDADGFAQLVELLAEAGDSAEHRIPVAIETPRGLLVASLRATGRSVYAINPLAVARYRERHSVARSKSDHADAMTLANILRVDAHVHRKMPADTELCQAIAVLARGQQDAIWRRTKASNELRSLLREFYPSFLAAFKGRFQIGIASLEARAVLAIAPTPAVANKLSASRLAAALRRAGRTRNIDQVAAEIKTALRAPQLRQLPLVESAMGRQTLALLAALDAACVSVDELGQAAAELFHTHPDYAVITSFPGLADSTGARVLAEIGDDRTRFADAKALKAYAGTAPITRASGRSISITRRRIKNDRLAAAGWVWGFAAMADHPAAQDHYRRRRDQGDHHAAAIRHLVNKFLGQLHYCLQNQQMFDTVKAFPPPNEGLAA

SEQ ID NO: 350696 - protein, 402 aa, unidentified
MRFIGLDVHRDFCDVAIYENGKVRSAGRVASSPSDLELFAQSLCCHDHVALETTGNALPIARILEPHVGGVLVADTRHVRAMTHAKVKNDRFDAQLLAKLFAAGMLPGTWICDEQTRILRRRISRRSQLVRGRTRARNQIHAVVIRNLGGRAPGTHTFSKKGRDWLATLELPADERAMLDSCLREADFLTREIAHLDREIAVYALGSADIRRLMTIPGVDVTTAATLMATIGRIDRFPSARHLVGYIGLDTRSRQSGVSAIHHGHISKQGSASARHVLCEAAHSAMRAPGPLRAFGQRVRARRGSNIATVAVARKLVCLAWQLLTKQEDYYYERPVLTFRKLRRLELTAGAPKRCNPAGRNGAATPDTPAQWKAERAQAIAVEARYLAAVADWQPKGPSAPT

SEQ ID NO: 350697 - protein, 424 aa, unidentified
MLAVGIDWAEAFHLVALGRPGEGVIGVRRVEHTPAAVAALLADIAALEPDPAEVRVVLETRHGVLVERLVDAGFTVLPVNPDLIARRRGPARKKDDAEDARLACLLALDRYTSLRPLLPHGELAAELRAIARDDERAARDQRRLLNRLRQDLLSTFPAALQLAGEELGAPTILKLLARWPTAAALGTATRHELVAFARGAHHGWPERLADQVAAALATDQFTPRDYLVRAKADTIRLAATQLLAIATQRRVWERRMGTLLLGAPRRGRANTPRQDELDQGQAFPGGEVYLSFPGLGDRLAARVAGEIGDHPQQFGSPNALACYAGKASVTRRSGKSELVVACRLACNRYLAGAVQQWAFCSLRESGWARAFYDAQRARGKTHQAALRALGNRWLEVLWHCLRKGVRYDEATHVANRNRALGKAA

SEQ ID NO: 350698 - protein, 350 aa, unidentified
MIIIGADFHPAYQEIAWVNTDTGEYQERRLAHPKEAEEFYRSLASMGQAVRVGMEASGQAQWFERLLEELRLELWRGDAEVIRAKRGRKQKTDREDARHILKLLLKDDFPRIWVPSWENRDLRQLLWHRHRMVQARTRVMNQLQAVALKEGLHCKKRLWRASGRQQLESLQLAPWSSRRRHELLELLDRFNPTIAELSQAIEREAEKCPESQRLMTHPGVGALTALAFVLIIGNAERFGCGKQVASYLGLVPLEKSSGNRRRLGHITKQGSSIVRFLLVEAAQVTVRSLPEWRSKYHHLVMRRGRKTAKVAMARKLAVRLYWMWRKGWDYEQWKKFGSYVGQPGNRDGVR

SEQ ID NO: 350699 - protein, 444 aa, unidentified
MTKALYLGIDVSMAENACCPLLQDGTEARRRFSVSNNLPGAEQLVREILELMEHYHLDRLLVGLEATNLYWWHLACFLNSSPQLSPFQPGVYAFNPRLIKAFKKALSDTTKSDINDAYAVAERLRFGRLPAPFIPNELYQPLQRLTRFRCHLMHQITREKNYFLSFLFLKFSEYQNLDPFSDTFGAASQAVLTDYFTVDEIVATPLEELAQLLAKEGRNHFPSPQAVAAVVKRAAQDSYRPHPSLNEPLNLILGATLENIRTLSRQIKKLDHAIEREVRKLPNPLSSVPGLGPVFVAGIMAEIQDIHRFPDQSALAKFAGLFWRTRESGSFKAEETSLGKSGNAYLRYYLIEAANSVRVHNAEYGRYYRTKCNESTKHKHKRALVLTARKLVRLVDAMLRRNQLYLSPSMNLTEEVNKPALTSARPAKQHRYRQPESHSLALCA

SEQ ID NO: 350700 - protein, 316 aa, unidentified
MRSITRVGIDTSKDTLDVYIDRPGSKRLKVKNDKSGIAQLKSELGGGDHLIAIEATGRYESLARHELEAAGHEVKVQNPRKVRRLADGIGTKAKTDRIDAKFLAKTAELCAASKPRSKEREALGDISRAINTLKTERSGHLKRIQVPGYSPVAKRVLKQVIKAFDRQIKKLEEEFEKLVAVSSLAEKYKLVQSIPCVGSNTARVAVCELPEDIENWSVRQLSAYAGVAPMDDSSGKRNSPARVPKHGNFHIKAALYMPALGLLKKGGLYATTYRRLLARGLTHQQAVIPLMHKLLIHIAAVLKRGTAWEAVPPKKT

SEQ ID NO: 350701 - protein, 323 aa, unidentified
MFVGIDVSKDHLDVCVRPSGEASRWKNNEDGIAALVARLAELQPKLVVVEATGGYEAPLVAAIVLAAVDIAVVNPRQVRDFAKATGKLAKTDKLDAAVLAHFADAVRPEPRQPDDAQTLDLQALVLRRRQLIEMLTAETNRMYGCRQTTMRESIYAHVKWLRAQIKDVDRDLDTKLRETPVWREKEDLLRSVPGVGPVLSRTLLSQLPELGKLDRGRIAALVGVAPLNRDSGTMRGKRSIWGGRAAVRATLYMATLAATKHNTVIRAVYERLVSAGKAKKVALVACMRKLLVILNAIMRDDREWKAPAEKRELASGAADQLST

SEQ ID NO: 350702 - protein, 356 aa, unidentified
MIVIGADTHKSSHTLVAVDSVTGRRVGVCTVASTTAGTLDALSWARRVCGGADRVWAVEDCRHVSGRLERLLISAGEAVVRVAPRLMAGARSSGRERGKSDPIDATAVARAAIREGVEQLPVARLEGAELDVRLLLDHHDDLVKARSQSQQRLRWHLHDLYDDLSIPAGALDRTVWLDRVLGRLRRSPQTTRVRIARDLVCEIRGLTRRIRELEQEIRLLVCELCPQLVAMPGCGPLTAAKLLAEVAGADRFKSDAKLARAAGVAPVPASSGRQDRHRLDRGGNRQLNLALHRLAVNAARHDPTTAAYLARKQAQGMSRMEALRCLKRHLVRRVHKLLTQPAHDQARAPETALALT

SEQ ID NO: 350703 - protein, 434 aa, unidentified
MSKRNHLKERLNEKLEAITFKTLIVGVDIAKHNQWARFVDCRGIEHNKALKFENNRNGFNAILARIYEICKKEDFNKVIVGMEPTGHYWKAFANFLLKQAKITVVLVNPYHTKKAKELDDNSQTKSDKKDALTIARLVKDGRYFDTYLPHDVYAELRGLTTTRQSMNKRKKSIINTITAVLDEYFPEFETVFKHPFKGKTSMHLLKVCPIPKFILELGEDGVLDEIKKAVKKTVGRKKAAQLVEVARDSIGVDYGEYAARFKIQQLMEELELITSQLEELEVEMAEALKKTEVSEYLLSITGMGVVSLATCLGELGDPLRFEDARQMSRLAGYNLIEDSSGKNKSGTCISKRGRKNLRSVLYQISLTMVATNKEMRQLYDYLKTREDNPLKKMQALVVVSKKVLTLIFTLSKKKAYYEPELVFGSYRKSQLQAA

SEQ ID NO: 350704 - protein, 356 aa, unidentified
MREGITTNHGITIGLDVSDRFSEAYAIDGEGKWIESLRVPTTREGLAKGLSRYAGARVVLEVGAHSPWISRQLKEQGFEVIVANPRRVRLIAESDSKNDRFDAEHLARLGRLDPALLSPIVHRGEGAQRDRVRLLARDGLVRARTQLINQVRGFAKSLGSRLPSSSAEAFAKQMRAARSADLFPGFETMLRVIEQLTLEIRKMDREIEGLCKERYAETAVLRQISGVGPLTSLAFVLTLEDPQRFAKSRAVGAYLGLRPRQRDSGGRGPQLRITKAGDALLRRLLVSAAHYILGPFGPDTDLRRFGLRLAERGGKAAKKRAAVAVARKLAVLLHRLWLTGETYKPVGYAKRGQRAA

SEQ ID NO: 350705 - protein, 392 aa, unidentified
MVVSVGIDVSKDKHDCFIVSSEDEVLADVFTIPNNMDGFRFLLQRIQDYTHAQDKIKVGLEATGHYSYNLLGFLLDNGLTTYVLNPLRTNLYRKSLSLRKTKTDRVDARTIASMLLSDVGLKPYTDTAYHNEELKSLTRYRFDKVKERAKLKSSIARLVCILFPELEKLVPTLHMVSVYALLEEFPGAKQIAAAHLTRLKALLETTSKGRYKRDMALEIRGAARNSIGFPMPAKSLELQHTIRHIRELDNEIAEIEEQIQAIMDELNSPITTIPGLGFRMAAMILAEVGDFTRFDSPDKLLAYAGMSPSTYQSGQLKNCYPHMEKRGSRYLRYAIYNATKYVCHWEPTFAAYLAKKRAEGKHYNVALSHAAKKLVRLIFAMEKSGQPYCLAA

SEQ ID NO: 350706 - protein, 513 aa, unidentified
MVVCSKPERVLVRNSIPLDSLGWGAFWNSKWMLIETPYSRSKIIYSTLSDCLQPIYIMKDQEQSSVSSSHAKKKRFNRGLPVYNPNAAGIDVGDTQYDVAIDDQDGGHEVRVFLTFTEDLIELVAWLVSKGITTVSIESTGVYWLNLYLKLEEAGIEPYLVNAKHVKNVTGRKRDDTDAIWLQKLHSCGLLQKSFQPEADIRVLRNYVRHRKNLISIGSDSVRRMQKALELMNIKLHTVISDLLGKTGLLMVEAILNGERDPNVLIQLKDPRIKADEEEIKKSLQGIWRDEYLFMLGQAYDEYQFYQSQLIECEQKIEASLRSQAVEILEGDITNLDLEKKSSRKKKNQYSFNAQSLLKVIVGVDLCEVNGIGEVSAVELISEIGTDMGKWKSIKHFAAWVNLVPNTKITGGKIISSKMQRKKNYAGQAFRMAASTLTRSKVPIGDYARKMRSRLGKKGGVVATAHKLSRIIYIMIKEQRSFDPDILSREQEKWKQRRIGYLENQLSQLKKSA

SEQ ID NO: 350707 - protein, 350 aa, unidentified
MEYISVDAHKRYSFVSIEDQQGKICCEARVEHHRGAIREFLSQRAPGSPVAVETVGNWYWIVGEIEEAGMAPRLVHAYRAKMMLASGNKTDRLDARGMNRLQRSGTLPTVWIPPKEVRDQRDLYRTRMILAGQRTRLKNRIHATLSKYGLVVEGTSDAFNKKGRKELEECLLLLPEHTRYSAERVLEQLDCTEKQIGLLEKRMKEVFLPNEEIRLLMTLPGVGLILAVVILSEIGEIRRFGSSGQFASYAGVVPRVKASGGKVRLGQLRSDVNRYLKWAFIEAGNSVAIHRAAHPRWYVKNLYERVRARRGHQAAMGAVGRHLAEASYWILQKHEEYRPPKMGSISSRKG

SEQ ID NO: 350708 - protein, 408 aa, unidentified
MNPLFVGIDVSSKNNVAYLMKPDGSKHSSFSVQNNLGGAKLLSERIVSALGSMQLERVVIGLEATSIYGDSLVYALREDGRLGRFQRKIHVLNPKQVRKFKEAYSDLPKNDWVDAFVIADHLRFGRINREVYMDDYRYKALQTLTRARFDVIQNLTREKQRFANYLFLKCSGMAQDKDIQNTSATTIALMEHFETVDDLANADLEELTAFITETGRGKFADPDATAKAVRAAAKGSYRLPKTVNDTVNQAMAVSIASMRALKGQVKVLDKAIEQQFEIIPNTLTSIPGIGKVYSAGIIAEIGDIHRFDSQASVAKYAGLVWTQHQSGDFEAEHTHLIKSGNRYLRYYLLEAANSVRRCDSEFRRYYDLKFKEVNKYQHKRTLALTARKLVRLVFRLLKDQRLYIPPEG

SEQ ID NO: 350709 - protein, 375 aa, unidentified
MKEKVRFLGLDVHAETIAVAVAEVDGEVRSLGVIANRADSIRKLIGKLGAVDRLRACYEAGATGYVLYWQLSELGVDCAVIAPTLVPVKAGDRVKTDRRDAEKLARNHRAGDLTAVWVPDSGSEALRDLVRAREAAKQDQLRARHRLSKFLLRTGQRPASGVKAWTELHMAWVRQLRFQQVAQESTRLDYLHEVEHMAERVKRLEQAIGEAVKLASPEMQEVIRGLQALRGIAGISAVTIAAELGNISRFQSARQLMGYSGAVPAEDSSGKRTRRGSITKTGNAHLRRIAIEAAWSYRLRPAIGPGLRKRQEDVPDEIKEIAWKAQHRLHKRYARLGAAGKDQRKIVTAVGRELLGFVWAIGIKAEAASKLRMAA

SEQ ID NO: 350710 - protein, 433 aa, unidentified
MTFAGLDLHKKEVEAVLLDDDGRILHRSRFPATRAALETFAQTHFSPDSTVAAVEATTNTWPVAAILQPLVHKVVVSNPLRTKAIACAKIKTDKVDALALAQLVRTGYLPEVWIPDEPTRLMRQRSTERAMLSADRTRIKNRIHSVLHQRLIEAPTGDLFSGKNLAWLKALPLESLDAFGRDSLDRHLRQLDRVDQELAALTAQIAVHAHQTPAIKLLMTLPGVDFTVAETLLAALGDLSRFPTADKAASYLGLVPSTRQSGDHCYHGPITKQGARHARWLLVQAAQHAGTHPGPIGAFFRRIARKKNRNVAVVAVAHKLVVLAWHILKNNEPYRYAQPKTLQAKLSRLRILATGQKRKSGPAKGQPRTQQYGKGRTKAVPGLDDLYNTEGLPPLSTPTKPGEQAMLERQGLAAFAAAVRVPRRVPRGVKPKA

SEQ ID NO: 350711 - protein, 356 aa, unidentified
MKIIGVDLHTRQQTIAMLDDQTGELVEKQLNHEGEGVRQFYSALPRPVLVGIEATGSMFWFLRLLDELAIDFRVGHPAKIRAAEPRKQKNDRRDARLLLRLLVENRFPAIWMPSPILRDLQVLLRHRHRLVRIRTRVQHGLQALALSHGLRRGSSLWTPGGQHQVRTLPLAQHAATQRETLLTLYPQLQHSIDCLDRQIETQVNERPQASRLMTHPGVGPITALATEVFLGDPRRFANGKAVASYIGMIPEEKSSGGRQRFGKLSKQGNTLLRFLWGQAAMQAVRRDPELLRFYRRKLVQKGLGKAMVAAARKLGIRLWIMLRDEIDYSEFCRRGNLLRQCGTAYAGMPEGDSGPR

SEQ ID NO: 350712 - protein, 359 aa, unidentified
MQKYELNFNGENVYVGIDVHLKQWHVCVRTAHVSQKPFSQPPSAMALKSYLESNFPGGTYLCAYEAGFCGFSVHYDLESAGIRNIVFNPADINDTQKERSRKTDAVDCIKICRNLMNNELKAIYVPSREELGLRGYLGARDAAVKKQRVAKQRIKSLLNRNGVKISEELFPTNKGHWSRRFNGWLEHVAADLGSGEGYRLNDLLKDLHHAHSQVLAAGRRLNEVISAHHMDTNELLLSIPGIGRLTAARICLEVPHVSNFINSDHLASYIGFVPDVHGSDDNVYVRGITYRGRALLRSAFVESAWRAIGRDPAMGLAYSNYIKRGLKPNNAIIRIARKLVNRVFFVLRERKRYEIARVR

SEQ ID NO: 350713 - protein, 341 aa, unidentified
MGEVSTVGIDLAKSVFQVHGSDPSGAVIFRKKLRRDQVLSFFSTLPRCVVAMEACASAHYWAREIAAVGHDTRLIPPAYVKPFVKRQKNDMADAEAICEAAQRPTMRFVQGKSAEAQASGVIFRTRDLLVRQRTQLINALRGHLTEFGYIVRQGVGHVAKLVDIVGDPASEIPTEARPVLTVIAESLQAMQAQIAVLDREIASRAKADPVAKRLMTIPGVGPVIATALVALAPAASTFRRGRDFAAWLGLVPRQHSSGGKERLGRTTKMGERSLRRLLILGASSATKVAARDPDKAGAWLAGMLARKPRMLVTVALANKMARTVWALMAHGGSYRAPAAAV

SEQ ID NO: 350714 - protein, 370 aa, unidentified
MKNTITYVGIDAHKKDLFVAMLAGTQSPGAWTVPNEPNAVRRLVRKLEREAPGPVRACYEAGPCGYALQRQMTTARVSCQVIAPALVPRKPGERVKTNRRDARKLVELLRAGLLTEVRPPTLEEEAVRDLCRARDDAREDLQRCRHRLGKLLLRRGLHYSGRNWTQAHRQWIDSLVWAQPAERVVVEDYLLGLDQVEARLIELDARLTEIAQSDPYREPVAWLRCFRGIDTLTAILILAELHDFRRFQSPRALMAYLGLVPGEDSSGEKHRRGRITRTGNTLVRRLLVETAWHYQHRPAVGVALARRRKGQPGRVIAIADKAQQRLCRRFRKLAAEHKPAPKIVVAIARELAGFLWAALQPAPATVAQRH

SEQ ID NO: 350715 - protein, 347 aa, unidentified
MPFAGVDAHKRYSRVVVKDETGSILCRASLQNDVAAFQGFFSNINGPTKAVLEAGRDWGVIYDLLEAIGVEPVLANPLKTRAIAEARIKTDTVDATILADLLRADLIPVVHVPPKEVRAQKNLLRQRLWLVELKTRIKNRIHNIIDRNHAGPPPAADLFGKAGRRFMDQLHLPSPDDRLLKAHLELLDLAQNQIGRSEEWIDEALSQRPELAIMRTLPGFGKVLAAVVALEVDDVRCFHHPSKLCAYAGLVPTTYASGGKVRHGRLLPSCNRWLRWAFVEAAWAAQRCSAYCHAYFERIKRRKGANCAVSALARRLCEITWHCLTDSRAYEERVMMPTRTELARPPS

SEQ ID NO: 350716 - protein, 418 aa, unidentified
MIQGDSSKIIEVVHSVCCGLDIHKESISACLIFFDEQGREHTEVQVFRTLTDDIVRLRDWLLDHECPVAAMESTGIYWRPVHNIFEGFIQVILVNAREVKNVPGRKTDIGDSKWLAGLLKHGLLRGSFIPPAEVRQWRDLTRLRRRYVQTVADYRRRTQKLFESANIKIDSIISDLFGVSGRNLMNLLVSGKEISLSDVRGCMKGNLKASEAEIYRSIQGFFMDHHRFQLSLLLRTIQNLSEEIETIDSRIRDLMTQQQNILERMKKVPGISEISSRDILAEIGPTLEAFATDAALSSWSGLCPGNNESAGKRRSGRSPVFKHHLKTIMIEVAWAAIRTKGSYYKDKYHRLKSRIGAKKAIVAIAHRILKAIYRIIKDGAIYKELGEEYLVLRNKSKKIHLLKKQAQMLGFTLVPQTI

SEQ ID NO: 350717 - protein, 380 aa, unidentified
MVDRVVFVGVDTHADVHHAAVVDELGRWLGDRGFATTPAGYAELWGWAGSFGAIAVAGVEGTSSYGAGLTRYLRAQAVRVVEVDRPDRKSRRMQGKSDPLDACSAARAVASGRAAGVPKSHDGVVESIRCLHLARRSAIKARTQAVNQIRALLTTGPAVLREQTRGLGRKALISRMVRLRPELNGAQHPEQATKIAVRGLARRCQALNEEIAALEVQLSQLTLAAAPRLLARPGIGIDTAAQLLITAGDNPDRLRSEAAFARLVGVAPIPASSGRTDRHRLSRGGDRQANRVLHTIALVRLHRDPRTWAYLNKRTAQGLSKKDILRCLKRAIAREVYHDLRPTCAAAVATIVDLAPMTSPTSSRAAEVKAGRRPPEGHRP

SEQ ID NO: 350718 - protein, 352 aa, unidentified
MLIIGCDFHPGFQQVAIFDKRTGEIEEKRLKHRAEAEQFYRSLAGEPVRVGMEACGHYPWFERLLAELGQELWLGDASKIRACEVRKQKTDRRDAELLMQLLIEDRFPKIWVPSLEERDVRQLLVHRHKQVQGRTRVKNQLQAMALSQGVQKKRKLWTQMGRGELEKLELLPYAAERRKQLLLSLDRLEGEIAELNRRVEEEVKRRPAALRLQTHPGVGPVTALAMVVTLGPAERFRSGKNVGSYLGLIPSEHSSGGRQQMGRISKQGSSFLRFLLVEAGQSAARYDAELGRFYRRLAVRKHRALAKVAVARKLATRLYLMLREDWNYAQLCRAVVQVSPSHSVVAKSAPTA

SEQ ID NO: 350719 - protein, 358 aa, unidentified
MSSKAFVPRDYDVFAGLDVDKKSISVTFTNHQGFIRSLRMPYSAEHLVNHVRKHFPDQKVAFAYEAGPTGYGLYDGLVAKSYPCLIASPSMIPKAPGQRVKTNRLDGVSLSENLRGGQLKAIHVPSPIYRELRHLTQLRDTFVSEMVGMKQRVKSLLLLEGIAFPPAPAGSQWSFRVKAKLRKLACSGTVRFKLDELLDSLEFNEKRVVKTTREIRRFCQNDPELSRCMKYVMSVSGIGWIVASQLLARIGDWRELKNVRQLAAFLGLVPTEHSTGERTDRGSITHTGDGRLRSKLIQASWSAIRQDDELREFFRSVCQSHAHHLASRVAIVAVARKLSVRISVVLMKQRPYEVREKV

SEQ ID NO: 350720 - protein, 343 aa, unidentified
MQAITTLGLDIAKSVFQVHGIDAAGNVIIRRQLKRRNVLAFFQKLPQCLVGIEACASSHHWSRELQALGHTVRLMPPAYVKPYVKRHKNDATHAEAICEAVTRPNMRFVATKAPEQQRCLTLHRTRHLFIRQQTSVINAIRAHLAEFGIVAPVGRHGVEQLLGIVSDASDKRLPDVARACVAALGAHLQRLKVQILEFDRMIRAWHRSSEASRRLDDIPGIGPALATALVASVADPKMFRSGRDFSAWIGLVPKQNSSGGKDRLGNISKRGDRYLRSLFTTGALAVIRYAKIHGIKHRPWLTALLTRRPTKVAAIALANKIARMAWAMMARGERYKEPAALAA

SEQ ID NO: 350721 - protein, 429 aa, unidentified
MSEEKSLELRVSVDVGYRRHSVAMGLSSGEVLEEFEIEHRPEGFQEFFSRIEKHRKKEYCAVAVAMEGYNGYARPLDSMVRQRGYRLYNLNNLKFARFKEIFPGAAKSDRIDARKGLELFQLSDHLPLAKEVLQEVGGTSPENEVLKRLTRRRRRLVNERVRVVNNLQADLQAVCPGLLEITREASNQWFLNFLLSADRLPQLARLRRSTLVKIPSVGVKSASIIEGWQTRAHFSQEVEWVGEMIQEDAKRCLELDEKIKRLEAKIAEVAKGSKIAKTLRSLPGFGAVCTSELAGEIGTIERFSSEGSLSLYLGMSTLDNRSGKYQGTKAPKHVNTRAKAAMMIALDRHRKYVPESQGYYEKKRSEGKKHNQALRALGRHLSRIIYKMLTEEREYQIRPEKGNATTKVDPRSLIKTQIRRPKISRKETK

SEQ ID NO: 350722 - protein, 342 aa, unidentified
MAIFAIGLDLAKTVFQVHGVDETGCAVLRRRLRRCDVEGFFASLPPCLIGMEACGSAHHWARRLSALGHEVRLIAPSRVKAYVQRGRKSDANDAAAIAEAVTRPHMVFVPVKSEEQQAVLMLHRSRDLLVRQRTMLINALRAHLAEFGIIAAKGRSKVADLIADLATVDIPPLARMALRQIAEQIEACDERITALEKEIVGWHKTNETSRNLATVPGIGPITASALVAAVPNPKAFSCGRKLAAWLGLVPRQNSTGGKERPGSITKAGDSYLRRLLVIGATSVIGYARTKAPGQGEWLKALLERKSPREASVALANKMARIVWAIMVRGEACRENYPVSQPA

SEQ ID NO: 350723 - protein, 396 aa, unidentified
MELMDAAGQVLAKARLPEGVAGMTRLHALIGRHLGEDAEAAEVVIGIETDRGPWVAALVAAGYTVYAVNPLQASRYRERHGVSGAKSDAGDAHMLTDMVRTDSHQLRAVAGDSAGAGAVKAVARTHKTLIWERTRHIQRLRHQLREYFPAALEAFEDLDAPDALELLARAPGPARAARLTRAQVSAALKRARRRHIADKTDAILAALRSEQLSQPPAITAAYAATVRSLIAVITVLNDQVRTLGEEVGAHFGQHPDAEIYRSQPGLGAVLGARVLGEFGDDPHRYADAKARKNYAATSPITRASGKKKVVAARFIHNGRLVDALNAQAFASLNASPGARAFYDGLRARGIEHNDALRRLANRLVGILHGCLKTRTLYDEATAWSHREKSSPSALAA

SEQ ID NO: 350724 - protein, 413 aa, unidentified
MRLFVGDDWAEDHHDVELMDSAGRRLAKARLPEGVAGIARLHAMIGEQLGEDADEDDAGQVAIGIETDRGPWVAALIAAGYTVFAINPLQASRYRERHGVSGAKSDTADAHVLADMVRTDSHQLRPVAGDSAQAAAIKVVTRTHKTLIWERTRCTQRLRHALRDYFPAALEAFEDLDAADTLELLGRAPDPAAAAKLTTAQISAALKRARRRDIAAKAERIQAVLRAAHLGQPDIVAAAYAASVRALIAVLATLNEQVKTLQGQVEAYFGQHPDAEILLSQPGLGPVLGARVLAESGDDPARYASAKARKNYAGTSPITRASGKKKTVMARHVHNDRLIDALISQAFTALRTSPGARACYDHQRARGAGHNPALRQLANRLTGILHGCLKTRTLYDEATAWPQYTATSEKTAA

SEQ ID NO: 350725 - protein, 381 aa, unidentified
MSQFSGSPQAAIDYNSTIIGALELSEKKWVLAVQLPGVDRHSRHVLDGGGETLASFVERLKVRCVSAGRKIARVILTHEAGRDGFWLARFLARRGIEVHVMQPASLPVDRRARRAKTDMIDVEMLLRTLMAWLRGEPRVCSMVPIPSEADEEARRAHREREDLTRERRSIVNKIDGILATLGVKGYKALRRDRREQLNYARQPGGDPIPQKARARIERLLDRLDLVLKLIDQVESARDAVLKKDAPADEAEEMIRSLTELRSIGPDVATLLVREAFVRQFRNRRALAGYVGLGGTPFSSGGSEREQGIGKDGNRRVRAAMVELAWMWLRWQPDSALSVWFRARVGAMGGRIRKIMIVALARKLLVALWRYVTDGVVPEGAN

SEQ ID NO: 350726 - protein, 458 aa, unidentified
MAKSKKKAKSPSEKSVSMRIINEHAAGIDVGSRFHFVAVGQDLDKDVREFGVFDLDLRECASWLKSHNVETVAMESTGSYWQNLYDVLIESGFEVLLVCGRQTKNMESKTDVKDCRWIQFLHTVGLLNSSFLPDLDTEELRTIYRHRDFLLKQGAKYICKMQKSLRFMNFRLDIVLSDITGVSGQAIIRGIISGETDPVKLAALANYRVKASKEEIARALSYNGRRDYLYELSDSFDIYQSYVKKMEACDKKIEEIIRSQIVKLNKPQTDPPPLDHKKKVNKNSPKIPLEKLSWQWNNEVNLMAIKGVSHSTVLTINTEIGQSIDKFPSAKAFTSWLRLSPNNRITGGKIISSHVKKGSNRVSAALRHAAESIGKQIDAPLYPFFQRILFRKGRCAAIIATARKLGVIIWNMLTKKEAYKPYDTTKIESQIRDKQIKKINKLMKSFNVQVSELSLAIA

SEQ ID NO: 350727 - protein, 426 aa, unidentified
MNCTQNYKIDQVTEQTLVVGIDIAKRTHYACFVDDRGRVLRKSFPIFQSKEGFQQLYKAIQGAMQAFGKSEVIVAVEPTGHYWLNLAYFLEEHGIPLVMVNPAHVCRSKELDDNLPTKHDAKDALVIARLAKDGRFLVPRLLHEIEADLRVGSTLKEKLRKEQTAVKNAIVRWTDRYFPEFWTVFRDLGKTALSVLEWTPLPADMAGRSAQELIEVYRQSEGMKCPQKAKIQALINTAKDSIGVTEGTAMARFEIAALVRRYRQLEAEIAALDAELKALVQTTMEYQWLKTVDGLGDATIIDLLAEIGSFAHYRDPRQLVKLAGLTLKENSSGQRKGQKHISKRGRKRLRSVLFRAMIPLIRHNEAFRELHEYYTTRSVNPLTGKQSIVALCRKLLNVLFAICTKKQAFDAERMKQDVLSQVQRAA

SEQ ID NO: 350728 - protein, 401 aa, unidentified
MTGQLWAGVDVGKEHHWVCVVDDTGTVVVSRKLINDEQPIRALIGEIDTMSQTVSWTVDLTTVYASLLLTVLADAGKSVRYLAGRAVWQASGTYRGGEAKTDAKDARVIADQSRMRGTDLPVLHPHDDLITELRMLTAHRADLVADRTRTINRLRQQLVAVSPALERVAELTQDRGWVVLLSRYQRPKAIRQSGLSRITKTMTEAGVRNASAIAEAAVTAAKTQTVRLPGEEVAAALVVELAQEVLSLDGRIKATDADIEGRFRRHPLAEVITSTPGIGFRLGAEFLAAVGDPTLIGSADQLAAWAGLAPVPRDSGKRTGRLHTPQRYSRRLRRVMYMSALTAIRCDPHSRTYYQRKRDEGKRPIQATMCLARRRTNVLYALIRDNRAWQPDSPQIIESAA

SEQ ID NO: 350729 - protein, 355 aa, unidentified
MTSTKYIGRDVHKESISIAVANAAGKIVMECVIETKASMILQFIDGLRGDLHVTFEEGTWAAWLYDLLKPHVTKLVVCDPRKNKSMREGNQSDKIDARRLAELLRLDHLTPVYHGEHGLRTLKELVRSYLTITQDLSRVMTRVKAIYRSWAIPCTGKQVYASRHRAEWLEKISAPGVRRRAEFYYQQLDALRALRQGVRRELLAESKKQKAWKRLCGIPSIGPIRAAVLLAILQTPHRFRTKRQLWTYGGVGIETHSSADHRVVDGQLERKKKQVEIRGLNRNYNHDLKNLFKGAALVAATKPGPFAEFYAQLLAKGMRPEMARLTLARKIATIVLIVWKKGVCFDAQHLKPQTA

SEQ ID NO: 350730 - protein, 410 aa, unidentified
MKKHTYRSKNVNQLNWPELRGQVGGNTVILAVDVAKALQFALLTTADGTVSQLLKWPLFETAALIDELKQLGGPVEVVMEATGTYGDALRHQFRQAGFSLYHLHAKQVNDAKEIYDGVASLHDAKSACLIARLHRQGCTRPWLELDEAARELNAARREYEIHQDQYDRNRNRLEAYLSRHWPEVLTIVDLESVTLEQLLIAYGSPQTVAAHADEAARQMKAWGGHFLSEDKINAMIACAETTLGVPCIEAERQYLQALAREMQHSRLEGKAAKQRIEAKVQAMTGLKEMAHTVGKLTTGVLVSAHLDPRQFPTARSFLKALGLNLKEKSSGQYQGRLKLSKRGSATARKVLFLAALRLIQNDPVIAKWYHAKAKPDAKLKTVVALLRKLAKALWYVARGEKFDATRLVTV

SEQ ID NO: 350731 - protein, 373 aa, unidentified
MAGSREAFVGIDAAKLRNAVAVADEGRDGEIRYLGEFDAAPESMRRLVARLAAKYDRLHFCYEAGPTGYGLYRLIVSLGHSCTVVAPSLIPRKPSDRVKTNRRDATTLARLLRAGELTAVWVPDPAHEAMRNLVRARTAAVETVRVHKQQVGAFLLRHGRISPLKKGWGARYRRWLQEQAFEHPADQIVLQEYVEAVRLAEERLGRIERAIAEFLPGWSLAPVVEALMALRGVDLVVAASSAVEIGDVRRFESPRQLMGYLGLVPEERSTGETVRRGSVTKMGNARLRQLLVESAWTYRHPPRVGKGKLAKIERVPPKVREIAWKAQSRLTARFRAFAARGKKLTVTCTAVARELAGFMWAVAWEVRPASGVA

SEQ ID NO: 350732 - protein, 369 aa, unidentified
MNMNAVGIDVSKGKSMVAILRSYGEIISKPFEVKHTVSGIRSLIEQIQSIDGESRIVMEHTGRYYEPLVRELSKADLFVSAINPKLIKDFGDNSLRKVKSDKADAVKIARYTLDSWTELRQYSLMDEIRNQLKTMNRQFDFYMKHKTAMKNNLISILDQTYPGANTYFDSPAREDGSQKWVDFSATYWHVDCVRKLSLNAFIDHYQKWCKRRKYNFSRSKAVEIYEASKELVSILPKDDLTKLIIKQAVEQLNTASQTVEQLRTMMNEAASKLPEYPVVMAMKGVGKSLGPQLMAEIGDVSRFTHKGALTAFAGVDPGVNESGSYEQKSVPASKRGSGTLRKTLFQVMDALIKTKPQDDPVYLFMDKKR

SEQ ID NO: 350733 - protein, 421 aa, unidentified
MQEEVSGFAAFVGIDWADRKHDICLQVAGADAIELSVVEHRPKAIEEWAQKLRTRFAGRRIAVCLELSQGPIVSALLEHDIFVIYPVNPSTLAKYRRAFTPSRAKDDPTDAAIALELLVLHREKLKPLRQESPNMRALRRLVESRRDLVQDRVRLTNRLTFTLKAYFPQVLDLFRDKETRVFVAFLERWPSLLDAQRARRETIVDFFHAHSVRRAAVIGRRIDAIKSERPLTSDAAVIEPARLLVEALLPQIRAVSAGIERLDEEISRRCQQLPDFRLFENLPGAGRVFSARLLAAFGEQRDRFADASAFQKYAGIAPVTERSGNKHWVHWRWSCPTFLRQTFVEWVASSVPHSFWARAFYESHRAKGASHNASIRALAFKWIRILFRCWVDRTPYDESRYLAALQKRQSPLLKFAAQAPS

SEQ ID NO: 350734 - protein, 322 aa, unidentified
MTASAFAAQVCLDPQLLAALIRKHVREAEGVVFETGPLSIWFYHALTAEGLPTICIDACHAKAALDLAANKTGANDADSLAHLAEVGFYKEVRVKSFHSMLGRTLLAARTRLVRIGTELSNQVRSLMKTFRLVVPPASGSKFERQVEALLADNADPGRIIRPQLEAWHAVRLRAAELGRKLLADARRGDACQLLMTIPGVGVVTVTSFVTAIEDPTNFQRSRSVGVWVALTTRRYQSGEIDFDGHISRRSDRHLRAPLRGSDGVAGPQPVRVRSAQVGSAGLQLRERLGFKRVAVAVAPKLPVIMHSMLITGEPFKETRATA

SEQ ID NO: 350735 - protein, 460 aa, unidentified
MIMNKKNQKTFIIEEGFDMINPDAAGIDIGSKIHYVCVPEGRDNERIRSFGCFTEDINKMASWLKKCKVKSVAMESTGVYWIPVFQILEQAGFEVNLINAQYIKGVPGRKKTDVEDCSWLQKLHSYGLLKASFRPNDQICVLRSYIRHRARLTENASTHVLRMQKALTEMNIQLHNVITDIMGVTGTAIITAILEGQRDPLELAKLRNERIKSSEDVIAKSLQGNYREEHLFILRQEFESYQFYQNQIQALDKVIEACYQTFDQQGNREPLKTKKKPKSKHTPPFDLRERLYVLTGVDFTAIPGLNELTVQTILSEVGTDMSKWETEKHFTSWLGLSPTNKISGAKVLSSRTRKVKNSAATAFRIAACCAGKTQTAIGAFMRRIKSKAGSPKAITATARKIACLFYRLLKYGSDYVEQGLEYYEKKYEENLVEKVKKAAKRLGYELVKNLEKPAMEANVS

SEQ ID NO: 350736 - protein, 420 aa, unidentified
MRSIALDVHRDFCEVAIKDESGLRLAGRVKTAPEELELFARSLAPDDQVALEASEPAGSIARILEPHVGRVLIANTRKLRAIAESKVKTDELDARTLCELLAAGFLPAVWQPDQFTRALRRHLQRRAKLVRSRTRAKNECHAVLARNLKGKPPMSDLCGRKGRRWLAALDLPADESETVACCLREVDFLDSEIALVERELAARALSCQEIRRLMSVPGVSLVSAATFVAVVGDARRFSSPKKLVSYVGLDPRVRQSGEAPARHGRISKQGSPEARHMLCEAAWVAIRTPGPLRAFYERVRARRGTQIALVASARKLSVLFWHLLTREEDYAFERPTLTRRKLRGLELKVKDGRRSWPSGHAVGTKEEREREREFAEQVETAYRRLVADWQPKARRSGAGATRGRASSSHLLDEETAARQG

SEQ ID NO: 350737 - protein, 447 aa, unidentified
MRVRYERVAGIDVHKEMIKVAIRSPGENGERTTEVLEFRAFYGVLQEMARFLRERGVTHVAMEASGVYTEPVCHALCEQDFTEVLVVNPQHVKALKGHKTDARDCRRIAELLECGLLRGSYIPSAEQKEMRDLTRYRKKTVQARTSEIQRLQKALESAGIKLGSVVSDVTGKSATAMIGALIDGERRTDVMADLALRSLRTAGKQADLKMALAGRFTEHHAMLCRMHRDQIKLADQAVAKLDQQIAAMACRWQRELDLLLSIPGFGVVVAAVWLAEIGPAPHLWFDSHGKLASWVTLCPGNHISARKRKHGKTGEAGAYIKPALIEAAWGAIRAKGRLQSRYNRLVRRFGGPKNPGAKKKAITAIAHTLLKIAYQVLKSGQPYTDPGADFYTRRESPARQQAWLERRLQQLYPGRTVTVTIGPPPGSPPRGNPPPGAPAQAALPGHH

SEQ ID NO: 350738 - protein, 348 aa, unidentified
MRFYNGSHAFYAGIDLHARTMFTHVLDHSEATVFARDLPARPDAFLHAVAPFRHGLVVGCECMFAWYWLADLCEDQSLPFTLGHALYMKAIHGGKAKNDRIDAAKIAGLLRGGMFPMAYVYPRQKRATRDLLRRRCCFVKERAQLIAHIVNTNSQYNHPPLTAKLCYARNRTEGIAERFADPATQLSIRADLNLIDHFDEQIDEIERVVLRTAKVDDPLTLGFLRTIPGIGKILSLVMLYEIDQVARFPEVGNFLSYSRLVRPEHESAGKKKGSGAKKIGNGHLKWAFSEAACLMLRAWPDAKKWLARQERKRGKRKALSVLEAKIGRTVYHLCRKQQPFDHKRFFCQ

SEQ ID NO: 350739 - protein, 333 aa, unidentified
MNMNAVGIDVSKGKSMVAILRPYGEIVSSPFEIKHTSSNIQSLIERIKSIEGNSRIVMEHTGRYYEPLARQLSLAGLFVTAVNPKLIKDFGNNSLRKVKSDKADAVKIARYTLDNWIDLKQYSLMDELRNQLKTMNRQFGFYMKHKTAMKNNLIGILDQTYPCVNTFFDSPAREDGSQKWVDFATTYWHVDCVRKLSLNAFVGHYQKWCKRRMYNFSKDKAEEIYGAAKELVPVLPKDDLTKLIVKQAIEQLNTASKTVEELRTLMNETASKLPEYPVVMEMKGVGPSLGPQLMAEIGDVTRFTHKGAITAFAGVDPGVNESGTYEQKSVPIS

SEQ ID NO: 350740 - protein, 373 aa, unidentified
MCGDFRNGVMGWAPPDGIDVPEWRCFTPLEEASVTEVTTIGLDIAKHVFQAHGVDATGRAVFRKKISRAKLLAFFAAQPRCLVALEACGGAHHWARELIKLGHDVRLIAPAYVKPFVKRQKNDAADAEAICEAVQRPAMRFVAVKTEAQQAAALVFRARDLLVRQRTQTINALRGHMTEYGWVAPQGPSHMAKLAELLEDPLAVPGPVQAICRVLLDSLAMLDRQIAVLDKEIARRAQEDEVARRLMTIPGIGPITATAITALAPPPETFTKGRDFAAWVGLTPRQHSSGGKQKLGAISKMGERTLRRLLIIGSSAVVLQASKRGAPKGSWLAHMLARKPRMLVTVALANKTARIVWALLVKQEDYQAPAMTA

SEQ ID NO: 350741 - protein, 343 aa, unidentified
MKLRTITIDLAKTEFQACGVNERMKPQFNTRLKRDQLLDFIRQQALTMVVMEACYSSHYWGREMAKLGHDVKLIPAQHVTPFVRGNKNDHNDAFAIAEASQRPFIRFVPIKTEHQQEICCLHRIRERLGKNKVALSNQSRGLLSEFGVVFPCGHAAFLHGLTSIIDNPQYSHRLQDMVIDMLSEYKTTINRLKRIEKQLTEFVDGCESGRILLSIPGIGVINASAFLASIDKGQAFSSSKEFAVWLGLTPKQHASGNISKMGGITKRGDRYLRKQLIHGARALVSRAPKSSDPLALWAMKLRVTKPFNKVAVAMAHRLARLIWVLLTRQEHYRAMPASLEVSA

SEQ ID NO: 350742 - protein, 355 aa, unidentified
MSQEKYIGMDVHQATISVAVMDGNGKLVMECLLETKAATILEFVQGLRGTLSLTFEEGTSAAWLHDLLKPHVSRLVVCDPRKNALLKEGNKSDRIDARKLAELLRTNQLKAVYHGEHGIRTLKELGRSYLTLSKDVTRTMNRIKSLYRSWAIPCAGTSVYAPRHRAEWLAKIVEPGVRIRAERLYQQLDGLQSIRQQARRELLQESHQHPAVKLLRQIPSIGPIRSALLVALLQTPHRFRSKRQLWAYSGFAVETHDSGEYRYVRGKVQRNRERITVRGLNDNHNRDLKNLFKGAAISASTRPGPLHDFYVARVAQGMRPTMARLTLARKVAAITLTMWKKGVSFDPQQLSRQSV

SEQ ID NO: 350743 - protein, 352 aa, unidentified
MRRSKHQVTSGEDLFIGIDLHKIRWHVTVRTFDVELLSASIPGDWEALQRILARYAGHQMQAVYEAGYFGFRLHDRLVAHNIPCIVTPPSLVPQEYGNRVKTDRRDSSKLAYLLAKGMLKRVWVPSEEELYHRQVIRRRRQLVRDRVRTQSRIKAELSFFGIRLEEPRGRWTQIYFETLKRIRFGNRWMQESFNRLLEQYEFLSAQIDKQTQLLRELSEDELYQERVKILQSIPGVGVISAMELLLELQDVSRFRRAEQLAAYVGLTPSQYSSADKVRMGRITGIGKNTLRAILVEASWKLITKDQVMREKYERIKIRSGGKRAIVAIARTLLLRMRRMLLDEQAYTLSRAA

SEQ ID NO: 350744 - protein, 402 aa, unidentified
MHYLGIDVSKASHQCVILDAEGEALGKSFTIQSSKDDFANLVKKLSDLNIPQTDITAGLEATGSLWENLYVYLKERGFNIVLLNPFQTSKFHQVMLKKAKTDSIDALVIAGLLRSGCAASSYIPDEEIQSLRDLVRLKDGYLKDTKNYKRKAYSLLNLVFPEFLNLIKDPFNISCTEILSKYQTASDFKNIRPKDLLKIARGHQGNNYDEAWAGKVIQAAKDSIYSGKASKARSIVLKSLVLNIKNLKEQMSELDNEIQNILKTDGGSSNNDIDNLLTIPGVGPKTIAVFIAEVGDITRFTSCKDFIGFVGLYPKIEQSGSSLNRAKLTTKGSRILKHALYMASVASLIHNPYLKSVYNDKLSQGKCAKQALIVVARKIACIMYSMLKNNAVYNPGRVAIAV

SEQ ID NO: 350745 - protein, 355 aa, unidentified
MDNEKYIGLDVHQATISVAVMDCSGRIIMECILETKAVTILEFFAGLRGSLAVTFEEGTCAAWLYDLLKPQVGKLLVCNPRKNALLKAGNKSDRIDARKLAELLRGNQLKPVYHGETGVRMLRELSRSYLTIVKDLSRVMNRLKALYRSWAIPCAGRDVYYNRHRAEWLEKIREPGIRRRAERLYQQLDMLQHLRQQARRELLVESRKHAITAQLRQIPYLGPIRSALVVALIQTPHRFPTKRQLWAYSGLALETRVSAEYSYATGQLRRSKKIISIRGLNKDHNHDLKGLFKGVATMASVRPGAFQNFYLALLAKGMKPTMARLTLARKIAAITLTLWKKGEGFDAEKLKPQAA

SEQ ID NO: 350746 - protein, 396 aa, unidentified
MRIYGIDIASEVHVIAGLDHEGEVLLKATKIEETGEGHEKLIHMLGDAVGALVVMEATGHYWKNLFARLSTAGFSVAVVNPLSVRRFAESLLTRAKTDATDALVIARFGHAVRPRPAPMLDEQLEDLREHMRLRDRWVQDLGDRVRQLHRLVDLGFPEFTQHVADLGSGIATALLTRCPTAAAFQQVKPSTLAKLKYDGRHFVPEELAASVVAASKHSAGMHHGAAYQLGIRTACEDIDVLRGRIREADRNISKLIETSELGALLQTIDGIGPTTAARILAEFGGPSSYASADAFAAHFGVVPATSHSGKSTPSRAGATNLGDAKLRAKLWMPTLTAVVRNAWLKAFYDRLLAAGKPAKVALVASMRKLITAIYSVAKNRKPFVPRLPATPSQTTC

SEQ ID NO: 350747 - protein, 408 aa, unidentified
MNAVGIDVSKGFSTVAIIRPYGEIVRKPFEVVHTPEKLSELANLVLSLEGESRVVLENTGKYSDPVVKVLSGAGVFVCPVNAKLIHDYGGDTIRRDKTDPLDSLKIAGFCLDKWAKLECFLPVDESRKTLKTYNRQLDEFMKIKAMLKNNLISLTDQVFPGVNRLFSSPGRENDGHEKWVDFLSRFWHCECVTSLSKDAFAAAYKKWCKRNGYHFSPSKTVQIHEYASRQQASLARNDFTKTLIVHCVGQLNHICTTIAKLKTEMTTMAKTMPEYETVMAMYGVGKSIAPQLIAEIGDITRYPKRSSLARFAGIEPPQNQSGSYSQRSRRISKQGPPQLRKALFQVMRCVLLLGNPDEDTFRFLSRKRSEGKPFKVYMIAGANKFLRIYYARVKECMDLSAQNRTTRA

SEQ ID NO: 350748 - protein, 351 aa, unidentified
MPQSSTVHAVTTLGIDMGKNTLHMIGLDTRGGIVLREKVSRGRITSRLANLPPCLIGIEAGMATHYVARELAALGHDVKQVPPTYAKPFRQGHKNDFRDAHAVAEAVQRPTTRFVPAKTNEQLDLQALHRVRSRLVSERTAVINQIRGFLLERGIIVRQGLRFLRQALPDILAKRTDVLSPRMVRMVADLASDWRQLDERIEAVTDEVKTLAKSDDRCRRVMTVPGIGPIISSAMVAAIGNGAAFARGRDFSAWIGLVPKQMSTGDRTILGRISKRGNSYLRTLFMQAARVILLRQASWPKHGFGIWLARAAQRLHPNVLAAALANKLARIAWTVLAQERSYEARIMTAAA

SEQ ID NO: 350749 - protein, 427 aa, unidentified
MPYRIAGIDVHKKMLAVVVADAEVDGDFHFEREKVGTTPADLRKLADWLVEREVEEVVMESTAQYWRPVWEALEQHWRPQRRACADAVRMSGTLHLAKAQSNRGPGGRKKDFPDAERLVKRLIAQELTLSFVPDAEQRLWRTVMRRKYQITRNRVQLHNRLEALLEEAHIKVSSIVSDLLGISARRMLQALADGETDPTALATLATARLRATPEQLCDAFQACPTLHPVYRRLLRLTLEELRVIEDHLGQLDQQMADLLAAHHDAVQRLAQVPGLGVDSAQQIIAEVGATAATFPSPKHLASWMGACPGNEESAGVNYSHRCPKGNRQMRRVLNQAANAAVKAKGTIFSVVYRRIVPRLGHAQAIGAITHRLCRLIWKILHERVRYEERGPSVSAEAKKVRTRKMIRELRSLGYHVERLSAPSGSPA

SEQ ID NO: 350750 - protein, 349 aa, unidentified
MWIIGCDFHPGWQQVAWLDLETGETGEAKLEHAKGEAERWYRQLPVGSLIGLEATGNCEWLVELLQKLGHEVWIGDAAKIRASYVRKQKNDRRDAEHILTLLREKRFPRLWRPTAEQRDVRQLLIHRHKLVEMRARVKNALQHLAMNRGMQKKSRLWSQAGQRAFRELALPGWAGCRRQDLLELLVYLDKKLAPLDRAAEELSQVDEVACLLRTQPGVGPITALAFAVTIGDASRFQRGKQVASYVGLIPREHSSGGKQRLGGISKQGNRFLRSLLVEAAQSAVRCDESLRRSYLHRCHSKPKGVAKVAAARKLAVRLYWMMRTRTAYPEIVPIESSPRVPRDRSTAAD

SEQ ID NO: 350751 - protein, 394 aa, unidentified
MHKDIHVAVVIDCWTNILGEITFENRPSKFDKFMQDIKKIYKDLTPCFGLEDTRGFGRNFASYLLGHKFTVKHVNPAYTDSMRSSAPMSKKNDAFDAFCVAKVLRDMVDTLPDEEHNDLHWTIRQLVKRRNSLVKGIVIAKNQLNSNLTTVYPSYKKYFCDVDNKTALLFWEKYPHPQYLKGVTPELLLEELRIIYKGMKQEQAEMILTLSEQNSPKEKEFQYERDLIIKSLVKEIRFKKQENEDIDNELERLVDLTGYKLQTMPGINLITASNIISEIGNVERFPNSDKLAQFCGVCPVNFSSAGKGKDQRSRQGNRVLNAIFHFLAIQLVQISPSGKPRHPVFREYFEGKIKEGKTKPQALVCVSRRAVRIIYGMMRSKTEYKPIEKVQCLH

SEQ ID NO: 350752 - protein, 345 aa, unidentified
MPIVGGLDIHRKQITFDYLDTATGEVRRGQIAPADRAHLRAWLARFAGRDDVAFALEGCTGWRYVAEELAAADVTAHVAEPADTAFARGRKRHAKTDRTDSRHLRVLLEQGRLPECWIPPAQILECRALLEAYHDLRREHTAWIERIHAVFFHQGAPRLGEGALRTDRGLAALREAAACHLSPAGQLQVATALDMLAAVEARMDTLRQQLLHAARHLAGARALQARLYGVGPLAGLAMTCWLGGAGRFSSARKAVRFAGLDVTVYSSDGKRSPGHLSRQGPEILRWVAYEAGKTHGRASAPGHDYYAAVKDRTDGKIAALSQARKLIRQACHILAELGDDALTAA

SEQ ID NO: 350753 - protein, 319 aa, unidentified
MNLGIDVSKNTLDCCLISDGIFFERQFKNNKAGFEELKSWLNKNGATNALHCCCEATGKYYEAAADYLAASYVMSVENPRKIKGYGNAKLQRSKTDRLDARLIAQYCRDMKPRAWQKPSEAQTKLKELNQYCQRLKAQKAAEQTKLHTAPDYLAPLIEDTIRHLQKQIKAVQEKIGRFHRDHPDYKADRNRLKTITGVGDNAADTLLTVLAEQDRFENQRQFTAYLGLDPKQFKSGTSVKGRERISKVGSSRLRTALYMPAMHAYRSRTFATFVSRLQANGKRPKQIIVALMRKLAVIAYNLIKTGKDFEPQRYMSQNK

SEQ ID NO: 350754 - protein, 416 aa, unidentified
MKTYILREPKTVEPQTPERPGRRPDPAVTVSVNAICGPAPATASGLILFIGLDVHTDSIAVSLAPSESTEVRRYGIIGGTHDDVLRLAKKLQAAHPGVRLKFCYEAGPHGYPLARCLQAHGYDCILVAPSKIPRQPGDRVKTNRRDADQLARLYRAGELTAIYVPDPQDEAVRDLIRARYQVLKQQHRARQQLKMFLLRHNFRYAGTKAWSAAHLRYLATVKLPFAEQQFVFQEMVNVITEAGERLARYEAQIPRVLPGWRWAPVVQALMSLRGVAWLTAATLVAELGDLHRFATARQLMGYLGLVPSEASTGAQRKQGGITKMGNGIARRALIEAAWNYRAPARLSRELLKRQEGLPKEVKDLSWAAQTRLHHRYQHLTKVKHKKATVAAAALGRELSGFVWALGRLVRPHAKKT

SEQ ID NO: 350755 - protein, 323 aa, unidentified
MNLLALGIDIAKLKFNVCLIREDGRLRHKAFANTAAGFSQLSAWLTANNVPQVHACLEATGTYGEALATYLADSGHRVSVVNPAAIKSYAGCQLSRTKTDKLDGELIARFCLTQQPPLWTPLAPEIRTLQALVRRLDSLQEMHTMEVNRLSSGVSVPAVETSIQSLIKSLEGEIKRTEKLIKEHINFHPTLKSDRDLLLSIPGIGAATTARLLAEINFHHHDTARSVAAFTGLVPRLRQSGTSVRGRARLSKVGSPRIRHALYFPAVTAIRCNPQIKAWAKALRERGKCEMQIIGAVMRKLIHLAYGVLKSGRAYDPLYAQNA

SEQ ID NO: 350756 - protein, 461 aa, unidentified
MTRNTQRRSKKDALLPTSLPVIRPRVAGIDVGSSQHWVCGPARPDGTPNVRVFGTTTAQLEELAAWLVEHHVESVAMESTYVYWIPIYELLESRGIEVLLVNARQLHHVPGRKTDFSDCQWLQLLHSCGLLRGSFRPGEAITRLRALQRQLANLVAEQTRCVQWMQKALDQMNVQVHRAVTDLTGVTGMAIVRAIVGGERDPARLAEHRDRRCRKSADEIARYLTGTWRDEHLFNLASALRLFDALDTEVASYDARLLAEVEALQPPDRQEQPVPAHPNPAKEKALTARGQQQARTALWRFAGVDLTRIDGLSTGATQTILTEVGPDLSAFPSEDHFVSWLRLCPRVPISGGKPLKKRRNSLGANRIAGVLRMAATSLQRSKTALGATFRRVARHKGGAVAVFATARQLARLIYRMLRYGHDYVDIGEQAYESQFHIRRLSAITETARALGYTLVPKVALS

SEQ ID NO: 350757 - protein, 386 aa, unidentified
MYYVGIDVAKDKNDCIIIDSEGKPVIDVFTFENNKMGFEKFYRSVASLLPIEVRVGLEATGHYSLNLIDFIDSKQLPLIVLNPLSVNLYRKSTTLRKTKTDKIDCLIIAQMIHSGEHKSYSPVSYPLRELKTLTRHRYRLIQDQSRIKVSITRLVQILFPELPNHFWSIHQKSSYELLKRYPSASLIADLHLTTLTNILAKSSRNKYSKDKAVEIRDAARNSIGSERTSFQLELMQNIAIISAFQKELKIIDSEIKKSMDEINSVILTIPGISYTLGAIILAEIGDISTFDNPSKLLAFAGLEPGISQSGNFISDNQKMVKRGSKYLRWAILQAARLIAMRDPVFNEYMHKKLNEGKHYNVAKSHVARKLIRVIHKLLSSNTEFER

SEQ ID NO: 350758 - protein, 381 aa, unidentified
MTTAVTHKTNVHTTEATLFVAFELSEKIWKLGFTMGHGQKPRDRNVTARHQERVLDEISLAKHRLGLPETAPVVSCYEAGREGFWLHRFFLAHGITNHVVDSSAIEVSRRQRRAKSDGLDVRKLLSMLIRYEQGEHQVWQVVKVPSVEAEDQRHLHRDLETLKRERASTTTRIQGLLSSQGIQVSTLAKLPEQLDTLRLWDGTPIPPGLRRRVLRVYAHHTFLTEQIAAIEAERRAQLQTSSDASIDQIRQLMMLKGIGINGSWLLVREFFGWRAFKNRREVGGLAGLTPTPYQSGESAREQGITKSGNPHVRWMITELAWSWLRFQPESALSVWFRERFGDGGKRLRRIGIVAVSRKLLMALWRFLETGVLPEGAVLKEG

SEQ ID NO: 350759 - protein, 345 aa, unidentified
MNIIRVGVDIAKSVFHVHGVDRHDKTQWQGKYARHKWLDALSRKVPAGAEIGMEACASSHYWARELQKRGYCVRLIAAQFVKPYVKSNKNDRVDAEAICEAMSRPNMRYVAPKTVAQQDVQAAHRIREELVGQRTAKANQIRGLVGEYGVVAPVGIQQLRRALPRWLEDAENGLSDSFRILLNGLADDLRYLDDRIAALDQRITDTVNQDPVARRLMTLRGVGPLTASALSGALGDGQAFRRGRDFAASLGLTPRQHSTGGRDRLLGISKRGDSYVRKLLVHGARAVLRHVNGKDDGLSHWLKGLVSRKHVNVATVALANKTARIAWALVHNGTAYDDKLAAVGT

SEQ ID NO: 350760 - protein, 401 aa, unidentified
MQDTQQRDAVDVFVGVDVGKGHHHAVALDRNGKRLYNKALPNDEAKLRALIAELKTHGRLLFVVDQPSTIGALPVAVARAEGVLVAHLPGLAMRRIADLHAGEAKTDARDAAIIAEAARSMPHTLRSLRLADEQLAELTMLCGFDDDLAAQVTQTSNRIRGLLTQIHPALERVLGPRLDHPAVLDLLERYPSPAALAGTSEKTLANRLTKLAPRMGKGLAAEIVQALSEQAVTVPGTQAATIVMPRLAQQLAALRKQRDEIAAEVERLVLAHPLWPVLTSMPGVGVRTAARLLTEVVHKAFASAAHLAAYAGLAPVTRRSGSSIRGEHPSRRGNKVLKRALFLSAFAALRDPVSRAYYSRKIQQGKRHNQALIALARRRCDVLFAMLRDGTIYQPKSVPNA

SEQ ID NO: 350761 - protein, 343 aa, unidentified
MEHYAGIDVSLESASICVVDASGRVVREAKVASDPEALIVWFGGLEVSVTRIGLEAGPLSQWLYAGMRKAGLSVELLETRHVRNAFKTMPVKTDRTDARGIAQLMRLGWFRSVHCKSLPAQELRAILTARKLVQTKRHDLEMSIRGILRGFGLKVGQTTPRSFEARVRELIDGHATLLVVADALLSARAVLAEQLGKLQKRLVSLARQDTRARLLMSTPGVGVVVALTYAAAIDDPARFRSSKAAGAHFGLTPKKYQSGETDLTGRISKIGDAGVRTALYEAANVILTRPVKASPLKSWAMRVAKRAGMRKAKVALARKLAVVLHRMLVEGTEFVASKAAAKA

SEQ ID NO: 350762 - protein, 342 aa, unidentified
MYYIGLDVHKKTISYCVKDAGGQVHREGTIGATRNELDWWLKTLPQPRMMAMEATIFTGWIYDHLLPHTEQVKVAHPLMLRAIAAAKKKNDRIDAGKIADCLRCDFLPECHMASTEIRDRRRTLRYRHLLVRQMVQMKNRISGLLMETGVSHNKQRLHKVGYVRELLSSNEEVHENIRPLLRLSRETIVRCQKTEYALVSSLQRDPLLAERLKRLRTVPGVGPITALTWALEIGDVTRFRSVKQAISYCGLCGEEKSSADKVLRTPLSKQRNKHIQHVLVEAAKLAPRQNHDLALIHERETQKGHRNRATLAVARKMVAYLLAVDRREREFVPAEDRSTAAA

SEQ ID NO: 350763 - protein, 343 aa, unidentified
MNVYIGLDVSLASTAICVLGPQGKIVEELQADSEPEALVHAVGSLPYTIDAIGLEAGPLSQWLSKGIEEAGFEVVLMETRLVKAALKAIPIKTDRRDAQGIARLLQMGWYRSVHRKSVSSQEIRALLTARKSVQQAIINIELSMRGVLRNFGLKLGHVTRIRYDARVRELVAQNDILSASALSLLRAREQLRAELASLDTKITGLAKHDDVCRLMMTMPGVGPIVALTVRSAIDDPTRFARSKDVGPWAGLTPRRTQSGEMDIVGQITKAGDRGLRTALYQAAMILMHRGAPNWLQSWALRVAHRRGAKRAIVALARRIGVILHRMWRDGTPFRFTQSSSATA

SEQ ID NO: 350764 - protein, 389 aa, unidentified
MFYLGIDLHSKQITVSVRDAHGEILLRRQVSTRPQKIEAFLQQMNELAGHDGYTAILEVCGFEEWIVLRLQQQTACRDVILIQPEKPSKKKTDRRDAAALSELLWVNRERLADGQKVHGVRRVLFPSSDDRQDRQLTAARRNLAAACTKTLNRIHFVLRKNNLEWHYPTKTFQTQKGGAWLKAVELGETDRLEMDLLLEQWELWDRQLEQVDCRLEQRAERNVDARLLGTIIGMSHYMALAIACRIGDISRFPSPRSLANFFGLTPGSRSSGEKERSTSITKQGSRMVRFLLGQLVVHVLRRDGRMRTWYKRIKKRRGAKIARVAVMRRLCVIIWHMLKHRESYRYGGLPVSERGSLDAAGSACSTDLEKIEADYLGGLSEVSSAEEAA

SEQ ID NO: 350765 - protein, 326 aa, unidentified
MTHSAEDSKATVRPTSITVGIDVSKHHLDAARYPTGETLRVDNTRKGHSALLRWIGDPGRVQRVVFEATGPYHRFLEERLAARGLPVAKVNPRQARHFAEAIGTLAKTDRVDALMLARFGALLEPPVRAVRPEYQVQLCELVAARRALVKDRTATLNRLQTLSIKILKRHADHRLRQIAAQIISIDDEIKTLISNDPVLARRQQVLMSIPGLGVTTVHTLIATMPELGSMEEGQAASLAGLAPMTQQSGTWRGKSTIRGGRAALRQALYMPALVAMRFNPDLRRVYDRLVASGKHAKVAIVAVMRKLVVLANALIRDDRIWAPKAA

SEQ ID NO: 350766 - protein, 478 aa, unidentified
MDDRRLVGIDLGIASAHTVRVLAGDGSLVCRRKAAPTVESLAEVEQAALTGVAPATRLEVVVEPTGPAWLPIAVFFSARGHTVYRVSSAKAHDLRRVLSRHAKSNGIDADTLARLPLVDPAGLHPLQLPDAPRAALDRRVRACDRLTRQAASHKRRIKDLVHQLLPASPLVGELGQADLAVLERWADPHALVAAGRARLQRLLASASAGQQGPQRAQQWLAAAHAALELYGDHPAIAWQDLAAEVTSEVRLLRATQAELAAHATKREACYQRVDPAALARSLPGLATIGGPALVATMGTASRFATAAKFRCFTGLAPKASETGHSDRKGQPISKAGNRLLRTTLVRAADHARRQDPQLARIYHTQMVQRGKDHLGATCVVAAHLAERAWAIMNRGTPYVLCDTDGTPVTPAKAKAIIADHWTVPEQVRQRRRSKKGKAPQQVLTGHVHGARSATRRPSPSSATVGQQPNRVKPTQPQP

SEQ ID NO: 350767 - protein, 403 aa, unidentified
MEGPLISLDVSKGKSNYRFFENGTDRKGKKGVIRHDIQGFDSIRDEAEKMEERLRIKPSVIFESTGVYSDVVEKYFTDKGFDVYVISPLLSASMRKEGVRPAKNDSLDTLSIAKVFYSKDDLRKCSENDKKAERLREMSYELDMMNRRIRPMKCQFLRLLDKVWPCLDEVSDYSSRFMLDFIIAFGHPENIKTVKGVLSVIRKSEMGTAGRKDRIAQDLFDYCHTHLSAVSKDSSYVELLKRMAIELKAMAKKKSELIDRMAEEARNKDGFARLLTIPAVAKTTALKIMARVGDISRFRNAEALVAYCGLDPRVYQSGKMTGEHRTITKKGDCILRSTLFLAVKLMVILYPDTKVARFVAAKAKNGLSYKQAVVAGSAKLARIIYSMLTHHENYVEFNADIVA

SEQ ID NO: 350768 - protein, 413 aa, unidentified
MDVLHSRCCGLDVHKSSISACILLREAGRVQKHQRRFGAVTQELQELAEWLRQFGVTQVAMESSGVYWKPVWNILEGRFTVVLANAQHIKNVPGRKTDQKDAEWIAQLLQYGLLRASYIPCEIIRDLRDLTRMRASLSQEASRLSSRIQKVLEDANVKLASVATNVLGKSGRAMLEDIISGEDDSEHLASLALGHLRVKIPQLRLALEGKIRSHHRFLLRRLLDQIQFVEHEVALLDERQEDIGRQRPDLAQAVARWDTIPGIDQVAAWALLAEIGDNMAQFPSAGHLASWAALCPGNHESAGKRLRGTTRQGNTWLGRMACQCAWAAARTKNTYLSSQFRRLAARRGKKRAIIAVAHTLIVIGYHVQKNQSNYEDLGGNYFDRIHSDGLKRYLVKRLQQLGHKVTLEPIEAA

SEQ ID NO: 350769 - protein, 355 aa, unidentified
MTRIVYCGVDFHARMQTIAYCDTADGEIHLMQLDHRKDDVRDFYSKLTGQVTVGLEAGGYSSWFEAMLEELGHTVWIGHATEIRRRANWRQKNDRRDAELILEIMLRGDFPKIHRHSRESVEVLRMLRYRARLVKMRTMISNNLQAIAISSGLTERSRMLSRAGQQRLKNARMTPAIKHQSEDLISLLVPLNERIAKVERWLREQASTDERVKLLMTHPGVGVLTALGVVHTLEPFNRFSRQRAVVAYVGLEPMERSSADRKRYIGISKAGSRLLRFLLGEAAHVAVRFDPELKQFHERVGKRRGKSKATVAAARKLLIRCWIMLRNNIDYAEFRSRGVEARLARDRSRPSVPVE

SEQ ID NO: 350770 - protein, 424 aa, unidentified
MSCLPALAGVCPTHHQVRRDIVILTESTLIVAGADTHADTIHVAAISMTGAAVKDREFPTTRSGYAAAIKFLTSLGQVERIGVEGTASYGAGFTRALIAAGIEVVEVTRAVKSTRRLKGKSDPLDAYSAARTALAGGGLAAPKDDATAGLRALHIARRSAVKHRTAAINQLKAMLVSAPDDVREKYCRLTIFRLIEAIARCRPDTQNEPWAQSVLTAAKMLAQRVQFLEAQAETLEAQIDALVTDANPGLRAAYGVGADTAAQLLITAGANPHRLHSEAAFAALCGVAPVPASSGKTTRHRLSRSGDRAANNALHRIALVRLSHHQPTKDYAQRQLVNGHSRSKMEVLRKLKRAIAREIFKLLTRQIAVPEYTDLRPARQAKNITLTAVANHFGVWPAVISRIERGRQRDDTFADTYRNWLKAA

SEQ ID NO: 350771 - protein, 410 aa, unidentified
MSTTDPLASPVDPCGFTYVVGIDVGSEHLLYTICQPDKRAVVKPSQINNDRVGFGQLDQALHALGSEPSRILIGLDENLYQFLAEQGYTLCLLHPRQTHQFAQQRGLRAKTDRLDASTIARLLLSGEARVGYVPDELIASYRELERLHSQLTAESARYQNEIHALLTVLFPEFTQVFADPCGATALGVLKRSPGAAAIATAGVEALTATLRELARRRYGRPTAVELVRLAERSAASGVATSARALSLKVLCDQLEHTLVNLAHREQELDRVLGGDEGASRLSSVPEFGRQTIAVLRAELGDVTRFSRIDQAVAYVGLDLEVRQSGKWKGQVKLSKRGSGRVRRVLSMAALRSLTLPDSPFAAYYHRLVARGLKGRKALMAVMRKMLLVACHLLRSNESYDPAKVCAVTGP

SEQ ID NO: 350772 - protein, 414 aa, unidentified
MIEVVNKACGLDIHKLFFIATILSRSGEKQQQNLRRDDEGILALKNWVISEKCDVVACESTSDFWVPIYDSLIDHLPVIVGNARDMKAFTHKKTDKIDSKVIAQLALNNMIQPSRVFPKDHRDFRSYVRLRLTLVQKRTDLKNEAHSILASEMLNLKNVLTDIFGKNGRMILSGISSGKTVDQIIASLSPNVRTKSAQIREVLDKEISQSAAFRLQICLKVIKSLDDEIEALEKEIFNYAYINHKREMEILMSVPGIGELGAATLIAEIGNFTDFSSGDKLASWPGIVPNVYQSADKYYNGRITKRGSKTARWILIQIAQAAARTKNSKLKEFFNRKKKSIGHSKAIVALARKIATIIWHLITKDEMYEDEKGYKKGEIQKKKIVETEIFSVDERIKIISGIFAIMGKKGREST

SEQ ID NO: 350773 - protein, 343 aa, unidentified
MEHTTIAVDLAKSVFQIAVSHRPGHVDEERRLSRDRFLPFFAQQPAATVVFEACGSAHYWARQLQPFGHTLRLLPAHDVRRYVRRNKTDRTDTKGMLEANRNEEIHPVPVKSIEQQAIASLHRLRSTWLATRTARLNTLRGLLREFGVFIPVGAQHVVPRLRALLGEPTDTVPIAVRGTLAHACAELDVLETNMRDVERQLTAMARQLPDVTLLQTVPGVGVLTATALAALVGDIRRFRSGRHFASFLGLTPKEDSSAGRRHLGAISKQGDVYVRMLLTHGTRSFVWHAKTASLPTSLQRWAVHTEQRRGHNVATVAVANKLARIVWAVWVQQRPFAAEHRPG

SEQ ID NO: 350774 - protein, 379 aa, unidentified
MYYIGIDISKFKHDCAVIDDSGEIVTPSWSFTNDAEGFSQLKLLLNSLDTETGIGLESTGHYGMKLFLESNNFSFMEFNPLLINRFVKSKSLRKTKSDSIDCMMIAHYLMTVEYKPYPSSFYHTEKLKSLTRFRDSLIRFRSRQLVELTNILDKVFPEFKPFFGSRFSVTALYILSNYSSPEKIANMNSKSYEALRKLSRGRFSTVDFAKLKQLAKNTIGTTEDYLLLQMQIVLDIYRQLDSKVDETEVSIKECVSDMNPPMLSVPGIGIESAAVILAEFGDFSKFKNASQMLSFAGLEPGYFQSGTSETTGKMVKHGSSYLRYALMNCAQTVVNYEPTFAMFYSKKRAEGKPHRVALLKSCYVSSTHCKLKTLHMMPI

SEQ ID NO: 350775 - protein, 348 aa, unidentified
MIVIGIDSHKHTHTAVAVDGTGRKLAEKTLPATSAGHLELVRWARRLEDRTWALEDCRHLSRRLSTDLLVAGEGVVRVPPKLMAGARRSSREPGKSDPIDALAVARAALREDLPVATLDGPDREVRLLVDHREYLVAERTRAQIRLRWHLHELNPGSEPPLRSLNRTVVLAALERDLAAAPGIVGRIARELVLRIRDLTATINGIEREIARLVADLVPSLLTLTGCGPLTAAKLVGETAGIGRFRSRAAFARHNGSAPLPVWSGNTERHRLSRTGNRQLNVALHRIAITQLQREGPGRTYLEHRRAQGNTKTEAIRALRRRISDEVFRRMRNDEAARAASPSGLAAAA

SEQ ID NO: 350776 - protein, 405 aa, unidentified
MAYFAGVDWGGTAHAVCVVDEHGRAAARFGVAHDADGLAELRRRLSCFGAPADLPVAVERPSGLLVDTLVDAGHPVVPIHPNAVKAARPRYRASGAKSDGADARLLADLLRTDGHRFARLRPQSDELRALRALVRGRDDLVAARVALANQLRALLDGYWPGAAAVFAEVDSPIALAFVRRYPTPDSAKRLGENRLAAFLAQHSYCGRRSPADLLGRLRAAPAGLVGAEEEEARGQLAQALCATLSRLAAEIATLTARVQHAVAALPEGRVVMSFPRAGRVCAAQITAELGGVRERFPGPDALAMEAGVAPVTRQSGKSRSVVFRWACNRRLRAAVTCFADNSRHASAWAAQLYARARQRGCDHPHAIRVLARAWIRVLWRAWHDGRTYEPTAHRAANALAQPQPG

SEQ ID NO: 350777 - protein, 362 aa, unidentified
MVSSQIRHPSAMIEFELTIKQDKTKMKITTIGLDIAKRVFHVVCCNKEGRLLKKKMLKRAEVLAFFHSHPQCLVAIESCATSSYWAREIQGCGHEVKLIPPQHVKAFLVGNKNDYNDALAIAIAARQPHIRACGIKSVEQQDNQAQHKARALAVGQRTALCNQIRGLVAEYGICVPQGVHKLRKHISIWLEGSNQQLSVQFKALLLQLNEQLQTLDSSIEVYDKAIMQYAKNNAICHRLLSVPGIGPMISSAYFNEVGNGRAYRKGRDVSASLGLVPKQHSSGGKDVLLGISKKGNRYLRCLLVQGAKAVVSRAKSKDDKLSLWINHLVFTRGHNRACVAYANKMARMAWAITVSGEEYSPV

SEQ ID NO: 350778 - protein, 348 aa, unidentified
MKIIGCDFHPSYQQFAMVDTETGEASEGRLGHEQGEARRFYEALRGQPVRVGMEAMGNSQWFEQMLAEMGHELWLGDAAEIRRLVVRQQKTDKRDAQHILTLLCDGRFPRIWVPSVEMRDVRQLLRHRQKLVEMRSQVKNQLQHLALNQGVRRRGKLWSREGRAVLEALPLKGWTAQRRKELLAMLEQFDRQVAEKDRAVGVEAERRPEVRLLMTHPGVGPVVGLAYVLTIGPASRFPRGKQVASYLGLIPRERSSGGRQKLGSISKQGNTMMRTLLVEAAQTASRFDEELRRDYCRLKARKHSALARVMVARKLAVRMYWMLRERQEYPQCLVARKQGSPSHSVVAG

SEQ ID NO: 350779 - protein, 345 aa, unidentified
MQQISRIGMDTSKHFFQLHGVNAAEKVVLRKKLRRKEMVAFFEALAPTVIGIEACGASHHWARILRSFGHEVKLIAPQLVKPYVKRGKNDTADAEALCEAMSRPTMRFVPVKTGEQQAALMMVGLRDRLIRNRTQLSNAIRGYAAEFGFTAARGMAHIDPLLDRIQADESVPVLARELFAAQAEEYAQLQAQIAEADAKLMAWHKADECSRRLANIPGIGPIGATLLLMKTPAPEMFRSGRQFAAWIGLTPKDHSTAGKVRLGVITRAGDEALRSVLVVGATAVIQHVRRGGRGSPWIVDLLKRKPPKLAAVALANKMARIAWKLMVTGNSYAAKSAPAALMGAA

SEQ ID NO: 350780 - protein, 347 aa, unidentified
MDQIIRIGMDTSKQVFQLHGVNPAEQPVLRKKMRRKEMVDFFAKCPPTVIAIEACGASHHWARLLTGLGHEVKLIAPQLAKPYVKRGKNDAADAEALCEAMSRPTMRFVPVKSAEQQAALMLVGMRERAVAARTQLVNTIRGYGAEFGLTAAKGVSHIPRLLERIMVDENVPALARDLFASLAAEFAELGERLKEIEARLMAWYRSNERCRHLAKIPGVGPIGAVLLVMKAPAPEQFVSGRQFAAWMGLTPRDHSTAGKARPGVITRAGDEALRKTLVVGATSLLRQVRAGRGRNASPWLIELLKRKPPKLVAVALANKTARIAWKMMISGEAYKNTAARPALTCAA

SEQ ID NO: 350781 - protein, 429 aa, unidentified
MTRISVGVDVSKNRSTVCIMDQDGKVIMRPFLVWHSTEELDFLADTLKRLNGEVRVIMESTSIYQYPIALHLKEKGIFISIVNAYKVKKFANTDFIGGKTDKKDSRTIASYGISYWDKLVEWQIPKDTYFNLDLLNRTYMNAKKHRQIILQELQHYIDCAMPGMDKELHSLNLNTKKDFMLDFVEKFWHRDEIVNMTEAEFTEVFTAWAKEKGYRPGKGKAAKIYAIAKSCIPYYPANPTVKTILQCIVDKLSGVNRTLVTIVTQMIEEAKKLPEYQIVREMPGVGDPLAARFFGSAGDIRRFKNSKALVAYAGIDSPPDESGDFSSTHRHITKKGSKVFRDTGYEIMMALRAQKRTWEKVRKNPDVYDYMLRKEAEGKPPKVAKIAALNKFLRIIYARIKELYDNMALAERAKAKTKSKTKAKTKATA

SEQ ID NO: 350782 - protein, 431 aa, unidentified
MNVKKEKDKEELMDTKIATLFVGIDLALKTNHVVIVDNQGSKLASFSIDNDLIGAKILRDKLLHLVEENNVTAFDIGMEATNIYWWHLHQFLLEEKLLNAVSKVTVYIINPKLIKKFKESFSKLNKTDPIDAYVIAERVRFGNLTKSAMIDEMYEPLKRLTRFRFHLIENLISEKNYLLTHLFLKYSSWQKVKPFSDAFGKTASEIISEMDMEEVASLQVGELVKKVTTLSKGTIADPKKAAELLKKVVEESYVIKDSFVSPVDLILTNTYENIKYFQGKIKSIDAVIEKEYQRSLNTLTSIPGIGLVFAAGITGEVGDINHYPAEKYLASYAGLTWSKFQSGEFTAEETHMKQGNQYLRYYLVQAANSLRIHNEEYKDYYQKKYDEVSIHKHKRALVLTARKLVRLLYAMLRDQRLYSPTVKKGEKDKIA

SEQ ID NO: 350783 - protein, 346 aa, unidentified
MNQQQHYVGLDVSLETTSICVVDDKGTVVWRGKCTSTPESITEAVRTYAPAAIRVGLETGQLSNWLTLNLRRRGLPIVCLDARHAKAALSLQINKTDANDALGLAQIVRTGWYREVAVKSMDAHTLRMLLVARAQLVSQRQTIANTIRGLLKTFGLVIARGSGGLFAVRVREQISGNDVLVAILEPLLVVWHAIREQVQILDRQTLARARADVAARQLMTIPGVGVVVALAYTAVIDDPARFRRSASVGAYLGLTPRRYQSGEADTSGHISKCGDALLRAYLFEAATVLLQRHSRASTLKTWGLALAKRIGKRRAKVAVARKLAVIMHRIWRDGSEFRCGEVPVAA

SEQ ID NO: 350784 - protein, 362 aa, unidentified
MGIIGCDLHARQQVLAMLDTETGEVVQMTLKHEGDNVREFYSKLPRPVLVGIEATGSMQWFLNLMEELGIECRVGHPAQIRACEPRKQKHDRRDAELILKLLADDRFPAIWLPSKELQDLRALLRHRHQWVRMRTRIQNALQSIALANGLRRGTALWSHDGQSRIAALPLAPHTAYRRSELQAMYEKFEAEIEKLNQRVEEQACGRAGARLLMTHPGVGPITALATEVFLGDPARFADSKALASYVGLIPREYSSGGRQRLGGLSKQGNPLLRFLWGEAGAHAARKDPELQRFYRRKLVQKGLGKASVAVARKLGIRLWIMLRDQIEYNEFCRRGQKQQKSSDACAGMPETPYGAKSHRPVD

SEQ ID NO: 350785 - protein, 371 aa, unidentified
MVTKKIVYVGVDVDDTAFHGAGIILETGELFEFKCRPDHGVLRKKLKELFGDRYEIRLCYEACYLGYSLCRFLRKAGIHCDVIAPSLIPVKAGTRVKTDRLDAAKLAEYYAKGLLTPIYVPNETDEEVRDMVRSRHFLVKQRTMLKTHILSTCKRYDIKFKEETGIKTLWTDQHISWLKTKAKTQQRPICQIDIETLLAQYTSLAESIEKLDAAISRIAEGERYKKAKDALNAFRGIDTLSAMTIISEIGDIRRFAHPRQLTSYVGLDVAEYSSGGKERKKGITKTGNKHIRTILTESCQMASRPPILSKRIKRFRAGQPQAVIDIADRCMNRLYKKAIRMLFSGKHINKIKTACAREMLGFIWETMRLVA

SEQ ID NO: 350786 - protein, 349 aa, unidentified
MKEYITTVGLDLGDKSHRYCVLNGDGEVVDSGAVVNTKAALKVRFEGIGRALVVMEAGVHSAWVSAYVKTFGHEVLVANPRKLAYLTRDEVKTDLRDAECLARIGRADRSLLKPIVHRGPQAQADLAVVKARDACVQMRTALIAQVRSLVKVTGERLPKCSADHFGPKAITIPEALQPALAPLVEVIEDLTRRIHKYDAQIETLCTKCPETELLQSVQGVGPITSLAFALTVEDPARFKKSRNVPAYFGLTPRKSQSGDRDPQLRITKAGNDLVRRLLVQTGHYILGPFAKPSALRDWGMKLMERGGKNAKKRAVVAVARKLAVLLHRMWTTGEMWVPYHERRQRPAAV

SEQ ID NO: 350787 - protein, 423 aa, unidentified
MAYRIAGIDVHKKRLAVVVADVEVEDEYQFERRWYGSNPEQLQRLSEWLIEQQVEEVVMESTAQYWQPVWGALERYWRPICQKREGAGAMSGKLHLAQALSNRGRRGRKRDFPDAERLVKRLVAQELVLSFVPDPEQRLWRTITRRKLQMTRLHVRMQNQLESLLEEAHIKLSGFVTDLLGVSARRMLQTLADGETDPAALAALADKRLRATPAQLCDALGACTELNPVYRRLIKMALEELQFLEQQMGQLDQEIANLLRPHEDAVKRLAEVPGLGVDSAQQIIAEVGPTVATFSSDKQLCSWVAVCPGDNETGGVNYSHRSPKGNRQMRRILNQAANAAARTKGSIFEIVYRRQVMRMGHNQAIGVIAHRLCRLIWILLHRKVRYEERGPAVTERSKRVRTLRMIRTLRSLGYRVEPLGNPA

SEQ ID NO: 350788 - protein, 375 aa, unidentified
MDELSKIHVGLDVHKDSISVGVAEPGRAAARVAGKIAHDVGKLTKMLSRVGAPEHLHLVYEAGPTGYGLQRSLTARGYLCEVIAPAQMPRRPGDRVKTDGRDCVQLAECSRAGQLRAVWIPDPADEAIRDLSRAREDAVNSRTQARHQLKGFLLRHSLRFSGKTSWSKAHYAWLGSLSFEAQPAQTAFTEYWLAVQAGDTRVQRLTQAVRDSVNGWRFEPVVKALQALRGVDVVTAVGLVAEIGDLRRFEHPRKLMGYLGLVPSEASSGDRVHRGSITKTGNAHARRLLTEAAWHYRFKARIGSHAQRRQQDLSQPVREIAWNGQLRLNKRFALLQARGVQINKACVAVARELAGFVWAIGRQSMIESGDWPRAL

SEQ ID NO: 350789 - protein, 321 aa, unidentified
MANKKSSRSWIGIDVSKRLLEVAVHKSDYHFCCPNQPAKFPDLIAELISLRPVRIVLEATGGLEQPLLQTLRTAGLPVVLVNPRQVRDFAKALGQLAKTDRLDARVLAHFAAAIKPPLRPLKTTDDTELDALMGRRNQLSAILAAEKNRRGSAATDTARADVEAHIEWLEQRLKALDEQLKAQLKRSVAWQQKDKILQSAKGIGFVTSVGFLADCPELGQLNRHQIAKLAGVAPLNRDSGKQRGTRHIFAGRAPLRAKLYMATLTAIRCNPVIKAFYQRLVARNKLKKVALVACMRKLLTIVNAMIRDNQLWTAKRQPVST

SEQ ID NO: 350790 - protein, 430 aa, unidentified
MKSNTQNKKIEAITEKTLVIGIDVGSETHYARAFDYRGIEYSKKPFKFSNTEAGFVTFKEWILDLKEKHEKDKVVPGMEPTGHYWFNLGKYLQDNEMKPVLVNPHHVKKSKELDDNNPTKNDRKDPKVIAGLVREGRYMIPYLPDGVYADLRTASNIRFQLQSELTRIQNRISRWFNIYFPEYKTVYGKPDAKSGMLILKEAPLPEDILTLGIDGVDQIWRDAKMRAVGKARAKTLIEAAEHSVGSKEGAVSARMEIRMLLEDYESRNMRLQEVMVLIEELVKQIPMAEKLLEIKGVGIKTVSGFLVEVGDISRFNSPKELQKLAGLALVENSSGKHKGETTISRRGRKRLRYLLFEVAMSLVAKNPEFRELHNYYTTRRLNPLKKMQSLMAIAAKLIRVFFAMLTKGVDYDPKKMVSDIKRPAVYLQAA

SEQ ID NO: 350791 - protein, 355 aa, unidentified
MSEEKYIGLDVHQASVSVAVLDRAGKLTMECVLETKASTIVEFIQGVCGSLAVTFEEGTCAAWLHDLLQPHVSRLVVCDPRKNARLQDGSKSDRIDARKLAELLRGNQLSPVYHGDHGVRTLKELARSYLALTQDLTRVMTRIKALYRSWAIPCSGARVYAARHRNQWLAKISQGGVRQRAERLYQQLDLLRPLHQQARCALVEESRRHPAVKWLRQIPSIGPIRAALLLALVQTPHRFRTQRQLWAYSGFAVETHDSGEYRCVGGKLQRNRERIRVRGLSDNYNRDLKNVFKSTAISASTRPGPLRDFYLALLAKGMRPSLARLTLARKIAAVTLTIWKKGVDFDAKQLGRQAA

SEQ ID NO: 350792 - protein, 349 aa, unidentified
MSHKLSSAIAVIGIDIGKNSFHVVGQDDCGAIVLRQKWSRGQVEVRLANMPPCLIGMEACVGAHHLSRKLKALGHDARLMPAKYVRPYSKGQKNDFRDAEAIAEAVRRPTMKFVATKTADQLDLQALHRVRERLVSQRTGIINQIRAFLLERGVAVRQGLRFLRVELPRILATPPDVLSPRMVGVIEALAEDWRRLDKRIDHLSSEIAALAQQDAGCERLMSVPGIGPIISSAMVAAIGSGEVFSKGRDFAAWLGLVPKQISTGDRTILGKISKRGNRYLRVLFVQAAWVVLIKPQSWERHGLKRWLDAAKSRLHRNVLAIALANKLARIAWGVLARGRAFEASKLQAA

SEQ ID NO: 350793 - protein, 341 aa, unidentified
MSIVTIGLDLAKHVFQVHGVAADGKVVLRRQIRRDGVEDFFKSQPPCLVGMEACASAHHWARRIAAFGHDVRLIPPTRVKPYVQRGKKNDAADAAAIAEAVTRPQMAFVPVKNEDQQSMLMLHRTRELLVRQRTMLVNALRAHLAEFGIIAAQGRSKVKELIEGLADAPIPPLARTALSEICGQIESCGQRIEGLEKQIIAWHRTNEPSRNLATIPGIGPITASALAATVPDPAIFKNGRHLAAWLGLVPRQNSSGGKDRLGHITKAGDTYIRRLLVIGATGIIRYARDKAPGKAMWLKGLLDRKPPRLAAVALANKMARIAWAVLTREEVFRETSPATAA

SEQ ID NO: 350794 - protein, 343 aa, unidentified
MECYVGLDVSLKQTSICVVSRTGSVVREGVVDSDPAAIAAFVRSKAPGAIRVGLETGPTSTWLWTELKQLGLPVICIDARHAKAVLKMQINKSDRNDAAGIARIMQTGWFKEVRVKDIDSHSVRALLASRALLVKIKRDLENQIRGLLKNVGLVIGRAKFNVFTMRAEELIADRLELIAVVGPLLKARQAIEQQTDDLDRKVLNLARHDAQVRRFMTASGVGPITALCFKATIDNPARFKRSRSVGAYVGLTTRRHASGEVDWSGRISKCGDAMLRTYLFEAANVLLTRVPKWSALKAWGMRLAKRNGLRKAKVAVARKLAVILHRMWVDGTEFNWSTKKAAA

SEQ ID NO: 350795 - protein, 336 aa, unidentified
MSPSAWLGIDIAKETFVASLLLEKRSAQGSFDNAPAGFTKLDHWLKKRKVAQIHACLEATGRYSEGVAEHLHAAGHIVSVINPARLKAFGQATLVRTKTDQTDAALLAEFCRRQQPAPWTPPDPATRGLRALVRRRESLLNVRQQEANRLSSGEDDPWVVTSLETVLTCLDEQLAQVEQAITDQVARDADLQRRVELVDSITGIGLTTATALLAEIDFGAYPSARQVAAQAGLTPRQRQSGTSVHGKPRISKQGASQLRQILYFPAISAMHYNPVVRAFAERLAKAGKAKMAIVCACMRKLLHLVYGVLKTGLPFDPNYKSTPAQPAKPVQLLQPA

SEQ ID NO: 350796 - protein, 356 aa, unidentified
MKIIGCDFHPSYQQIAMLDQGTGEFTEMRLSHQAQGEEARKFYSALHGPVRVGLEASGQSQWFERLLGELGQELWIGDAAKIRASTDRKQKTDRRDAELLLQLLVEDRFPRIWVPTVGERDARQLLLHRAKLVRVRTQIKNQLQALALNQGVQRKWKLWTVAGRKQLESLALLPWASRRRTELLKLLDELDVSITELDEAVCQEANTRPEVRRLMTHPGVGPVTALAFALTLGPAERFRRGKQVGSYFGLIPSEHSSGGKQRLGHISKQGSSFVRGLLVEAAQSAVRREPQLRREYRRLSQRRCRALAKVAIARKLAVRLYWMLREKVDYAQLIRGSHAGQPWAPGLPEASGSLKK

SEQ ID NO: 350797 - protein, 346 aa, unidentified
MTTVDATRPVTGGVDTHLDVNVAAALDPIGGLLGVAEFPTTPAGHRRLAEFLASFGTLTRVGVEGTGSYGAGLSRYLRGSGVEVVEVDRPNRQSRRHTGKSDPVDAIEAARAALSGRAQGAGKSRDGNVEAIRALVVAKRSSRSTKIQTLNQIRHLGFTAPEELRSRLQGISRQHLGAEAAALRPRAGGDPVVFATKTALSLLGHRVLVLDAERERLNLLLGELVEKTAPQLLEIHGVGVDTAATLLVTAGDNPGRIRSEAAWAHLCGVAPIQASSGKVTRVRLDRGGDRQANSALWGVVITRLRSEPRTQAYMERRLKEGRSKPEIIRVLKRYVAREVYHRLPRA

SEQ ID NO: 350798 - protein, 361 aa, unidentified
MYATTVAVDLAKSVFQLAVADAHWRVTEQLRLTRSQFEKWFINRAVSLVVMEACGSAHHWGRWLNSLGIEVKLLPAAYIRAYVKRNKTDAADACALLEAARCADIIPVKVKSIEQQALQGLHRTRSLWMGTCTARINALRGFCREFGISVAAGSRNGLEQISRVLADPYSAVPGLIRGTMTLLVEEIRLLEVRIAQLERELTELAKQSPACTTLLSIPGIGLLTATAMVAATSGQVSHFKDARHFASWFGLTPKEHSSGSTRHLGRISKRGDRYLRMLLTHGARSVLRAASVAHAAGRQIDGLRHWALTVQGRTNHNKAACALANKLARICYAALRDGEPYTGMVTRMNKKIERTAYAMPA

SEQ ID NO: 350799 - protein, 362 aa, unidentified
MQSTPLIAFDQHAATTVAAVLLPGQRTPVLHSLTSDSPTILRFVQRLQREVGPIRCCYEAGPCGFELQRALTAAGVPCEVIAPALIPRRAGDRIKTDRRDAGHLAVLFRADALTAIHIPTDQEEAVRDLLRCREDIRADLLRARHRLSKFLLRHGRRFTATKSTWSQRHYAWLRAQTWPLPALTQTHAAYLRAVDEAAARLRAVEGQLQDLVTLEPLRTRVQRLRCFRGMDDITALTIAAELGDARRFPSARGLMAYVGLIPSEHSSGTKRARGAITKTGNAHLRRVLVEAAWHYRHHPFIGKQLRHRQQAAPEPAKVQAWRAQQRLYRRYQRLAARGKPKQHVVTAIARELTGFVWATLIP

SEQ ID NO: 350800 - protein, 340 aa, unidentified
MQIAVLGIDLGKNSCSIVGFDDGGAVVLRRRMHREGVIKLAGKLRPCVVAMEACCGAHHLGRVLRAQGHEVRLMSPEYVRPYVKSQKNDDRDAEAIAEAATRPTMRFVELKSEEQLDMQTLHRARDRLVGERTALINQLRAVLLERGITVAQGRRKLERHLAGLDAQEGLSQRMRVLIEDMRLQWCELDRRIAELDKELTEWVRNEEVARRLMTIPGIGVLNATALIAAIGQGESFARGRDLAAWLGLVPRQLTTGGRPRLVGISKRGNKYLRKLLIHGARAALPTLLESPTSLGAWLRGLMTRMHKNAVVVALANKLARLAWAVLRHGEMFRFAVSAAA

SEQ ID NO: 350801 - protein, 353 aa, unidentified
MTKHFWAGLDVGVETTAVCVISDAGELVHEASCPTALNSVHRELACLRRRRFARVGLEASTGMNLARGLRTLGYQVDLYETRQLSKFLRIRRNKTDAGDASGIAEAGRLAASTVSKVHLKTLECQSLQSRLVIRRHLIKHRVAAVNLLARQLELYGGRIHRAKTKQLRLEAESEIRKLFGKAATPLTRELRHLIDHCERLLDYQQMVDRELKSWAFDNEVCRRFMEIPGVGPLCALTFYAVVGDPHRFRRSTDIGSYFGLTPRVHQSGLTARLGRISKMGNRAARTVLVQASVAHMRFSSSDSGLRAWTERIEARRGRGKARVALARKLATIMLAIWRNGETYRPRLRDAGQI

SEQ ID NO: 350802 - protein, 434 aa, unidentified
MLRNIVDHAAGIDIGSQKVFVAIEDKPVKSFQTFTSSYKEVVRYLKENGIIHVAMESTGVYWITLYDILEESGFDVCLVNPTDSKNLPGRKTDVQDCQWILELFSMGLLRKSFVAKDFIRELRCYTRLREDKIQTASMHINHMQKAMIQMNIRLPEVLNQIHGASGMAMIEAILKGERDENKLLSLCHSSLKKRKSEQILEALKGNYKEEYLFELQMAYDGYMFYQNQISSCDIKIESLLKQVTKDKDYDREKIKKHRIKAIRHNKPKIVDLHEFLLKLNNVNATALPGITDYTFLRLNSEIGTDLSQWASEKNFTSWLGLSPGKNQSGKINKRSKKKVKTRAGQIFKEAAQTLLISKNIALGDFARRIRAKRGPSIAIKATARKLAILYYNLFTKGVDYVEQGIKFYQDKQKEKLIYYLKKKAQEYKMQLIEI

SEQ ID NO: 350803 - protein, 349 aa, unidentified
MTKVTIGVDLGDQYSQLYVVDAAGTCVETGRVRTTRAGLERWFARQAPARVVLEAGTHSPWASRALQALGHEVLVANPRKLRGLYENDSKDDRVDAEYLARVGCLDPALLKPITHRGAAAQADLAVLHARDALVRTRTQLISHTRGVVKALGGRLPRCSAEAFARRASGDVPAELQPALAPVLAQVQQVTAAIRAFDRELERRCAEQYPATARLRQVSGVGPVTALAYVLVLEDPRRFARSRAVGAYLGLRPRRSQSGERDPQLGITKGGNPFLRRLLVQGAQYILGPRGPDCDLRRHGERIAARGGKNAKKRAVIAVARKLAVLLHRLWISGAVYEPLRHSTALAQAS

SEQ ID NO: 350804 - protein, 353 aa, unidentified
MTSTSVDVFGGVDTHGRTHHAAAVDGAGRLLGDAQFAATASGYAALLAWLTAFGRLIKVGVEGTGTYGAGLARHLAGRDVQVIEVDRPDRKTRRRQGKSDPIDAIAAARAVLAGTATGAPKTRTGPVEAIRALRVARRGAVKARTAALNQLHGLLVSAPEQLRADLTGLRATELVGRCAGFRIDASRLLEPMMATRAALRALARRIQILDEEIALADARLRPAVSTVAPRTAALFGAGPDVAGQLLATAGDNPERLRNEAALAHLAGISPLPASSGRTDRHRLNRGGDRAANAAIHRIVLCRMRYHQATRAYVERRTAQGLNKKEIMRCLKRYVVREVHTALLADFEHLAALA

SEQ ID NO: 350805 - protein, 407 aa, unidentified
MEVLYPRCAGLDVHAGSVTACARIATGSQVTYEHRTVPTTTRGLLELAEWLTAHGCTHVAMEATGVYWKPVWHVLEEHVALILANATHIRNVPGRKSDMNDATWIADLLAHGLIRSSFVPPAPIQELRDLTRTRRQLVHEIARHVLRIQKTLEDANLKLTQVMSDIVGVSGRAILNALIAGETDPDRLADLTRGRLKATRADLRDALHGRVTDHHRFMIKLHLTQIDVLETAVATIEARIGDALGPFRAAVSLLTTMPGLSETTARVLIAEIGTDMTRFPSVGHLISWAGFCPRLDESAGKRRSTRTRQSAPWLKPTLINAAWAATRKKDSYLRAQFLRIKSRRGAKKAILAVASSMLTAAYFMLRDGVEYHDLGSRHFEQRDKEQLAKRLLQRLRDLGVAVEVRAA

SEQ ID NO: 350806 - protein, 424 aa, unidentified
MKFKMQDKQNQLIERISDNHLVVGVDIAQQLHVARAVNFRGIVVGDPLAFENNEDGFASLLKWMDKLQRLNKLEAAIVGMEPTGHYWINLSKWLFKQGIEVVTVNPHLVKRNKENRDNTQSKSDKKDALVIADMVKNGYYAFVRNTSESFEILRVLMSNRDVVVKRLVGTINQLNRWVDIVFPELRQVFKDITGKGAIATLRLFPSPMELRSLKPHDVVSGWKSIMKRQPGLKKAQLLLQLGRKSVGTRQALEAYKFHLEQLLEEYDLAVLQLERVEQEVKDVLKQIPFAKKLLAIKGISEISLAGILGEAGDLSGFSHGNSLLRHAGLHLAEASSGKWKGQIVISKRGRSRLRRFLYLATMSLVMNNTEFRAIHTHNVKVKKMKKMKSIMKLVGKLARIFVGLARRNESYCADKVQPITELVA

SEQ ID NO: 350807 - protein, 296 aa, unidentified
MEDVTLIGIDFGKHTSHLHAQDRAGHAVWRKKCNRSQLMILLANTPPCTVVTEACAGAHQMARDLIRFNHTVKLISPQFVRPFVKTNKNDFIDAEAICEAASRPSMRFVTPKTEAQQCLGAWHRVRESLVCDRVQVTNQIHAFLMEFGISLPKGAAVIKRLPSVLAEQRLPARLVILLERLRDQYRALDAQIAEIERDLAAQLREDESGRRLLSVPGIGPVTASLLAAEMGDGKQYGCARDFAASLGLVPRQYSTGGRAHLMGISKRGDKNLRRLLVQCARVYMQSVARRQCLIKF

SEQ ID NO: 350808 - protein, 411 aa, unidentified
MNNTLFVGIDISKRSNVATFMNCEGKVVGRLAFSNNGSGADRLVAKILSYYEKGDFEAIRIGMENTSVYSKNLVWFLYEHEALNEHKLSIIPLNAIMVANYKKSFLDMDKDDITDSFAIADFIRIRPGLLPFKLDDRQEALKIMTRSRYNYVQALSRMKSQFLTRLFLSFSEMEAGKPFYSIFSKTSLSLLEEEFTLDELAEKPIPELVEFLQEKGGGKFQNPEEIAKVLKKAASSSYRVPAMVRESLNRTMASDMEIMRILENEIHNCDKNIEKLMKSVPAILVSIPGIGPVLAAGIMSEIGDISRFRKQESLGKMAGFKWKRNQSGKKESEDKAAVLSGNKKLRYYLVEAANRVRIHDPVFEAYYRKKYAESKTHAHKRALILTARKLVRVIFYLLKENKLYKPDVGIS

SEQ ID NO: 350809 - protein, 427 aa, unidentified
MKYNQNLKILQITEKTLIVGVDIAKETHHARAFDFRGIEYGKRIEFSNDIDGMERFFKWAAEIMNKSNKEHLMVGMEPTGHYWLCFAQFLKDKNHKVVLVNPFHVKRSKEFDDNSPTKNDRKDPKTIAMLVKDGRYVEPNIPEGIYSELRIAVDIREMLTKDLNKIKNRVARWLDIYFPEFNKVFADWEGKAALITLKEFPTPAKILGIGAKEILAAWKKEVNRAVGIKRALKLIEAASRSVGKRDGIEMAEIEIKIILEQYEMLVKQFKEIESKIEELFMQVSDASEMLGIKGVGVITAATFIAEVSDITRYEHPKQIQKLAGYNLVENSSGQHKGQTTISKRGRRRLRSTLYKMMMPILANNKEFQELHKYYTTRKENPLKKKQSMIVLCCKLIRVFFVILKKGVKYNGNKMLRDIKRPEIRNAA

SEQ ID NO: 350810 - protein, 350 aa, unidentified
MNPCLSRMTVGVDTHADTHVAAAVDPLGRTIATAAFPTTLAGYADLLAWARSHGDIDGVGVEGTGCWGAGLTRFLADHDVRVVEVLRPDRRDRRSHGKSDTLDAEAAARAVLAGTATNTPKSRDGVVEAIRALRSARDGAIKARSAARNQLRCLIVAAPAGLRADLEDLTWTRLVAACANLTAGDLTDPAEAVKTALASMARRWQHLHAEITALDRQLDTLVTAAAPQLLERTGIGVQSAADLLITVGDNPQRIATEASFARLCGVAPLPASSGKITRHRLNPGGDRRANRALYTIVITRMRLDERTRDYVARRTEQGRSTREIIRCLKRYVAREIYRDLIAPTQPVTTT

SEQ ID NO: 350811 - protein, 397 aa, unidentified
MYIVGIDIAKRKHEAAVIDGEGAVIIKPFSFTNNCSGYNRLLAMLAKAKLPLDEVSFAMEATGHYWLALFTRLQKEGFRVQVINPVQTNSIRSFYIRQAKTDPRDALLIAEVIRFGHFSESTLHPENIYELRELCRGRHAIVSMQADVKRKAVALLDQVFPEYETAFTNMFSDTSMAILQTCPTPKELSEMPLEELCHLIEVSSHKRFRMAKARELQALARNSFDFAMVGDVFSTMIRLYAKHLDFLKQQVREMDRKIAEIMETLDTPITTITGIGPTLGAYILSEIGDISRFSSAAKLAAYAGIDPTMRQSGEYNGVRNRMSKRGSPYLRHAIWLAASSAVLHDPALKLYFQKKRDEGKPYMASVGHACRKMVSIIYAVMRDNKAYTPYIPNEISA

SEQ ID NO: 350812 - protein, 410 aa, unidentified
MRYCLGVDWADQTHAVWVVDESGTKITARTVAHTAEGLDEWGRELDEWRAQGIDLWAAIERPDGRVVDFLLDHGVVVYPVNPKALDRARDRFRQSGAKSDPFDARVLADFLRTDHAHLRPLQPSSEAAQELKLLTEDCQRHIRQQTRLVNQLTATLKAYYPRALEVAEVTSALAREFLPAYPTPEALTALTERQWQRWARAHRLPEARTGELWVVLRQPQVPVPAHVVRAKARLMQSLLEQLKPVVAAVAQYRKTIDDFFARMPTAQWARTLPIGKHGVTAPTLWARLGDAPGRWESFRHLQAHAGTVPVTKRSGKQQRVVQFRFACDKALRYVVDQVAYLSLLSSAWARAYYDQQRARGHSHRQALRALGAKWLKIIFVMWQRQVPYDEQSHLATMARQQLRQHQERLA

SEQ ID NO: 350813 - protein, 318 aa, unidentified
MPMRTDWIGIDVAKDTLDVAGHQDPTPWQVANDDAGIATLVAHLQAEAPALIVLEATGGYEQAVVWALGSAGLPVVVVNPRQVRHFAKATGQSAKTDRLDAQVLAHFAATIRPAVRPLGDEAQHALEALLARRRQLREMLSAEQTRLKRAHTNAVRQSLQKHIAYLRHELRDTEHDLEALIKASPVWREADDLLQSVPGIGAITSHTLITALPELGTLSRRAIAKLVGVAPLNRDSGQSAGHRWIGGGRAHVRHTLYMAALVAATHNPVIRAFYQRLVAAGKPKKLALVACMRKLLTILNVILKTKQPWQPHVAATAP

SEQ ID NO: 350814 - protein, 343 aa, unidentified
MREPYHYIGLDVHKQTVAFCAKRPNGETVDGGTFRARRECMAQWAAQRTTPWIGGMEATLFTGFVYDVLSPYAVEIQVGHPLQLKAISWAKHKSDKIDAQTLANLLRADLFPACHMVSPLVRELRRVLRYRNFLVRQAVTMKNKTTTILMEVGVPYDSSRIHRQGYFYELLDNLANTPNSVRELLRTTRCGLEMFQGAQKQLLVALKKHGHLRERVTRLMSIDGVGEMTALTWALEIDDPTRFSNLKKVQSYCGLCSGRNESAGKNKRAPLSKQRNPHLQTILIEAAKLAPRYNAQLKQVHAAALERGYNRNRATCAVARKLVAYLMAVDQSGQDYEDRSSAL

SEQ ID NO: 350815 - protein, 342 aa, unidentified
MEISTIGIDLSKTTFHLIGLSPRGDIVLRKKLSRKQLLTYTATRKPMLIGMEACAGAHYLARALRDQGHDARLMPAQYVKPYVKTNKNDYLDAEAIAEAVQRPTMRFVPIKNDEQLDLQALHRVRDRWVARRTAVMNQIRGFLLERGIAIRKGPSYLVTQLQVIFTEGDSSFSGRLLHLIRELKHEWDELERKIEEASAELARIAKKDDGCHRLMEVPGFGPIVSTALVAAIGNGISFRKGRDLAAWLGLVPRQHSTGGKTRLLGISKLGNEYLRRMMLHGARSVVMQMERKPSALGEWLTSLSARRHRNVTVVALANKMARIAWAILSKGTHYSAPAFVAA

SEQ ID NO: 350816 - protein, 431 aa, unidentified
MIETVESTQHTGLSQEASIAHQWFVGIDWGDQNHQVMVLDQQRRRVGERVVPHDGTSLAQLASWLREVSGGAPSRVAVAIEVPRGAIVETLLEQGFEVFAINPKQLDRFRDRHTVAGAKDDRRDALVLADALRTDPQSFRAVRLGAPDLLVLRELSRAEEGLLQEFRRIANRLRDQLHRFYPQMLQLCSAADESWLWDLLELAPTPRHATLLSEDQVRRILKAHRLRRFKAQDVLACLQVPALHVAPGTAEAAQAHCGFLLPCLRVLAEQLRACEQHVSTLLSTLAEDNAASDPSDVAIVQSLPGVGRKITAWLFAEAAQPLAERDYPVLRTHGGIAPVTRQSGQRRQVVMRRSCNQRLRHALYHMARVAMQRDTHFASVYEALRAKGQRHGQALRNIADRLLRILMAMLRDRTRYDSSRIHGGQKVLMER

SEQ ID NO: 350817 - protein, 389 aa, unidentified
MFYLNPKSMRNVCGLDVHKDNVFVCIDKENGEKIQFKTGILTKELDVLRDTLVANDVTEIAMESTSVYWMPIWRVLENDFKLYLVNPYAIKQLPGRKSDIKDAEWIATCLRKELIRGSYVPNSEIQQLRQYNRRIFDINKQSVYIQNKIDAALQRCNIRIGNYISNVRAKSYCEIVDMLSEGKTSPELLIVKVHKRTVNKWGRETILAALEGVVNKTDCRILKQLKEELDMLRRHKVECLVMLREICMENYKEQLLDIQTIPGIGEQGAMQIIAETGVDMKAFMTAAMLVGWAGLKPRNDESNGKFKSRSTTHGNKYLRRILIECAWGASRTQGCFFNKFSYHQTMVRKKNRQKVQVAIARKILVVIWNILEKGVVYNDVLEKNKTKDK

SEQ ID NO: 350818 - protein, 450 aa, unidentified
MGRPQVIDDEERERVYEKVAAVDVAKDSGMVCTRLPHPSRAGTRQSTVWTVQARMGAIRELGRQLARGGIQTVTLESTSDYWRIWFFVLEGCGLAVQLVNSSQAKNLPGRPKTDKLDAMWLARLTEMGLLRASFVPPAPIRALRDYTRARTRLTQERTRCWQRLEKLLESALIKLSSVASKLTTLSAQDMVRALIAGERDPQVLAALARGKMKAKHDDLVEALDGMFGDHHGELAQLLLDQIAFLDSKIAELTARIQEQAAAQPGAWGVNADGTTGPGAGTSPGDPVLPVVQRLAQVPGISEELARSIIVETGLDMSRFPDAAHLVSWAGLCPRAHQSGPRARNGKKGRGNGYLRGYLGQAAIGAAATATFLGERYHRIARRRGKAKAQVAVARSILVIIWHLLASPEARFTDLGYGYYQARTDKDKRIKNHIRQIEALLGHPVTIAKAA

SEQ ID NO: 350819 - protein, 387 aa, unidentified
MIEFRNIHKPFDVPHKSRNLHDLAQYIGSLEGDTRVVMESTGRYHEPIRNVLFKAGLFVCTVNPHLIKNYGNNTIRKVKTDSTDAKKIARYTLDNWAELREYTSMDTTRTQLKTLNSQFSFFMKQKTAAKTNLIALLDTTYPGVNKLFDSPVRADGSEKWVDFAYSFWHVDCVRKAGITAFTDRYKRFCKHHGYEFQEAKANAIYKDSKELIATLPKEAVYKELIQESIRQLNLLSENVEHIRKTMNELASTLPEYNTVMSMYGVGPTFGPQLMAEIGDISKFQHREALTAYAGVDPGKNDSGQEVHNSSHASKCGPSRLRHTLFQIMTTILQTGGKEDDAVSSFLFKKKAENKPYLVYMTAGANKFLRVYYGKVKECLRNQEQAEE

SEQ ID NO: 350820 - protein, 367 aa, unidentified
MKKVSTVSTKRSKNLSHPTLTIGLDLGDRNSWYCVLDEAGQIQLEQRVRTTAKALQEVFGAMPRSRIALEIGTHSPWISRLLSELGHEVIVANARKVRLIGESRKKDDRLDAQTLARLARIDPELLYPVKHRSVQAQADLMTIRARAGLVRARTALVNTARGLAKSYGERLRGCNVRNMNPEKAESLSPELQAALEPLLNAIESLSERIVEYNDRIENLAQQSYPQAALLKQIKGVGTLIALTFLLTVEDPHRFRKSRDVGGYLGLQPGRRNSGQSEPQLHISKEGDPYLRTLLVQGAQHILGPFGVDCDLRRWGLKLAERGGRNGKKRAIVATARKLAVLLHHLWVSGEVYEPLHNSSRVTVAAAA

SEQ ID NO: 350821 - protein, 343 aa, unidentified
MSNDTRIAVDVAKAVFEIGISDRPGHVSRRERLPRAQFLAFMAQQPAATVVMEACGSAHHWGRKIQSLGHRVVLLPPHQVRPYVRRNKTDRTDTKGILEASRNEEIRPVPIKTVDQQVITSLHRLRSGWMTERTARLNALRGLLRELGVFIPMGAREVVPAVWSLIEDADSDLPEALRPIFAEACREIREIEARIKQVERQLEATAEQLPAVEYLRTIPGIGLLIATALVAFLGDIRRFPSGRHLASYLGLTPREYSSGLKRHLGRISKRGDGYLRTLLIHGARSVLIHARKQQPDRLREWANKLAKTHVHNKAAVAVANKLARIVWAVWSHARPYGLMTTTV

SEQ ID NO: 350822 - protein, 319 aa, unidentified
MQSKLTFGMDIGKNEVVVACHEGAFAILKMANAVAGLRRWLGSVPAGSRLGLEATGGYHEPVAELAYSLGFTVYILNPKDVHFYARALGARGKTDRLDAQIIAAYVAEHCARLHPFTPLSADEKLLRELARRRATLVNAKSMLQQSLRVLPGFEREGRELLRAMGSFADRLERKLAQIAARSSERATLVKRLQTIDGVGTLTSIRCATLFTRVPFHSSDAVVAFFGLDPRPNDSGQHRGRRRLSKRGPSEDRRLLYNAAMSAIRTPTWRPLYQHLRSRGLASTEAIIIIARRIVRIAFAMYQNHSDFNPRLVPRPSCPA

SEQ ID NO: 350823 - protein, 365 aa, unidentified
MTNATPTRSYTGEEIYIGIDVHKKSYVLEARVGQERVKRWTTPALPQKLPEQLLKYFDGGMIHTAYEAGFSGFVLHRSLSQAGIDSRVVHAAAIEVAVHNRVKTDKRDARKLATQLEAGRLKAIYVPTEAEEQARLLTRTRKQLANERGSLKRKIRMKAHQFGLIAPEDNREMTHKMVTEILEKSPGEEFTLAIEVSWAVWRTLDEQIARLETRQRQQAQADPNEAVYRSAPGFGPISSRVCSNELGNLKRFSNERQLFSYTGLTPQEDSSGETVHRGPITKQGNRHIRAVLIEVAWRAIRQDPSLARFYQKVSSRAGAKRAIVAVARKLIGRVRAAFCKGELYQIESEASPQATDNPPAPVAAA

SEQ ID NO: 350824 - protein, 349 aa, unidentified
MKIIGCDFHPGYQQIAMLDEETGELSEKALSHEKIEEVRAFYSALQGPVRVGIEASGQSQWFERLLAELGHELWIGDAAKIRASCERKQKTDRRDALLLLQLLMEGRFPRIWVPTPAERDVRQLLLHRAKLVRMRTQVKNQLQALALNQGVQRKWKLWSVAGRKQLEGLALMPWASRRRAELLVLHDQLEASISELDLAVAEQANTRSAVRRLMTHPGVGPITALAFALTVGPAQRFRRGKQVASYLGLIPSERSSGGRRQRLGHISKQGNTFLRGLLVEAAQSAVRHEPEMRREYQRLAQRKCRALAKVAMARKLAVRLYWMLRSDLDYAQLIQGSHAGQPESFRGRG

SEQ ID NO: 350825 - protein, 397 aa, unidentified
MYIVGIDIAKRKHEAAVIDGEGTVIIKPFSFTNNCSGYNRLLAMLTKAKLPLDEVSFAMEATGHYWLALFTRLQKEGFRVQVINPVQTNSIRSFYIRQAKTDPRDALLIAEVIRFGHFSESTLHPENIYELRELCRGRHAIVSMQADVKRKVVALLDQVFPEYETAFTNLFGDTSMAILQTCPTPKELSEMPFEELCHLIEVSSRKRFRMAKAQELQELARNSFGFAMAGDVFSTMIRLYAKHLDFLKQQVREMDRKIAEIMDTLDTPITTITGIGPTLGAYILSEIGDISRFSSAAKLAAYAGIDPTMRQSGEYNGVRNRMSKRGSPYLRHAIWLAASSAVLHDPALKLYFQKKRDEGKPYMASVGHACRKMVSIIYAVMRDNKAYTPYIPNEISA

SEQ ID NO: 350826 - protein, 318 aa, unidentified
MYLGLDIAKAKIDCCLMHDTKYLHRTFENNQEGFIKLTNWLEKHTANKVYACCEATGSYSEAIADYLHDTGHKISVVNPLRIKAFVTSELQNVKTDKQDAKSIAIYCQRNQPELYKPASPSERELKALTRYLDGLKDLLTSHNNRFLVAHHSVKPYIETSIKNTKAEIKVIEKVIQSRIKSDDDLDKQAKLLKSITAISDGTIPHILTLFADKQFKTAKQATKYVGLNPIIKQSGNKSTRHLAISKMGDKYIRSALYMPAVVAFRMAVYQPFIRRLKDKGKTNKQIICAMMRKLLVYCFTVLKTGNQFDPKTILNQQS

SEQ ID NO: 350827 - protein, 340 aa, unidentified
MNQSMTIGIDLAKHIFFVAALDGSGKPARRKKLRRHEVLPFLANHPGAVVGMEACSGAHHWAREIRALGHSVQLLPAQHVKAYLRGQKNDYNDALAIAEAVQHGRIRCVEIKTVDQQLDQSLHRLRQALVTEQTGLINRTRALLADHGVDLPEGKYRFRQAVLAQLEDAQNGLPWRLRELLGRQYQLFIALEQELAWYEREIKTKAAENEACQRLMSVPGYGPIVSSAFYGWLGSGQQFRCGRDVAAALGLVPKQYSTGGKTVLGSISKRGDRHLRALLVHGARAVARYAKERDDRLSRWVCSLIERRGYNKAVVALANKLARIGWAVVARGQAYQAVPA

SEQ ID NO: 350828 - protein, 341 aa, unidentified
MIHIGVDMHKNFSNFAVLYDGKDSIIEQRLDNDAEAIRSFLDQLPGHKQVTVEANRNWYWFVDLLQDMGVPVQLSNPFQTKAIAWARVKTDTVDARMLAHLLKANLLPTCWIPDQQHRNLREFVRFRTKLVRLRTQVKNHLRALLSKHNLHPPLQSLWGPKGRKYLQRLSLGYPQDQILIQSLEIIDLLDHQIHTWNETIRQQIKHTTELKLLCSAPGIGPILAITILLETGPITRFPSAKKYAGYAGLVPKVHSSAGKTHYGGHLSRQANLTLRWAFVEAATDATKGDSQWSRFYRRMASRKGKSIAKVALARKMSKMVYHMLKRNIDYQTYLSGGHLGR

SEQ ID NO: 350829 - protein, 327 aa, unidentified
METQVASQWVGIDVSKAKLDIALRPGNNAWQVTNQESGWQELSEQLKKYKIELIIIESTGGMERGVAQKLQKEEFKVAVINPKRARDFAKALGRLAKTDKIDAEVLAHFGEALQPSPKPLASESQVALSDLVNRRSQLVEMLNSEQKRAHSVRSSTAKADIETNIQWLKQRIKGMDEQIDQLRQDNEESKKQYELLTSVPGVGRVTAVTLLSMLPELGELPLKKLSSLVGIAPMNCDSGQMRGKRRIIGGRARVRAVLYMSALVAIQHNPVIKAFYQKLLQAGKAKKVALIACAHKLLGFLHAIVKSQKPWRCPENIEIKEEKLQAC

SEQ ID NO: 350830 - protein, 331 aa, unidentified
MEIIDVVGIDVSKLTIDVVIHQGKNYQKFKNTNKGFNSLCKWALSQNKVKKENLLFVFEHTGLYSHQLAIYLSKKEFSFFIVPGLEIKRSLGIARGKDDKIDAAKIARYGYRLRDEISLTSLASDEIQSIKNFLTLRDRMVRQRAGYKTSLKEMKRVLTVKNNPLLFSSQQKVIANFDKQIAKIEERIESIILSNEKLKEQYNLILSIRGVGPQTAQSIIAATSGFTKFKNSRCFASYCGIAPFPNSSGTSIRGRTKVSHLANKKIKSLLDLAAKSAIQHNPEMKAYYNKRIEEGKDKRSTINIIRNKLVSRIFAVVNRRTPYVNIMNYAA

SEQ ID NO: 350831 - protein, 342 aa, unidentified
MEYFAGIDVSLEQSSVCVVDGAGKIVRETKVASEPEALVRFFRGLEIGVTRIGLEAGPLSQWLHAGLVAAGFEVVLLETRHVKAALSAMVNKTDRKDARGIAQLLRMGWFRPVHAKSPGAQEVRALLVARKLLQTKLLDVEFSIRGILRGFGLKMGKVSKGQFVARVRELAVGHPMLELITEPMLRAREALRAEYARLHGEVLAIAKPDPVCRRLMTAPGVGAVVAITFKSAVDDPGRFIRSRALGAYFGLTPKKYQSGERDVTGAISRVGDAMVRVTLYEAANVMLSRVTRFSSLKRWALDVAKRRGLKRAKVALARKLATVLHRMWIDGTTFHWGKQAVV

SEQ ID NO: 350832 - protein, 343 aa, unidentified
MQTITTIGLDIAKSVFQVHGVDAAGQVVIRRQLKRRYVLAFFQKLPPCLIGIEACASSHYWSRELQALGHTVRLMPPAYVKPYVKRQKNDATDAEAICEAVARANMRFVPTKTPEQQSCLMLHRTRHLFIRQQTAVINSIRAHLAEFGIVAPVGRKGVTELLHIVADPSDKRVPEVARACLAALGNQLLSLKEQIVEFDRMIMVWHRSNETSKRLHYIPGVGPMLATALVASVADPRTFRSGRNFSAWIGLVPKQHSSGGKDRLGSISKQGDRYLRSLFVAGALAVIRYAKIHGTKHRPWLTALLARRPTKVAAIALANKLARMAWAMMAKGERYKEPIALAA

SEQ ID NO: 350833 - protein, 340 aa, unidentified
MINNFLGIDISKDRFDVFLSFISKKGKRETRKRNFKNEDSGFQGLQDFLQKHNVEEVKACMEATGCYGEALAEFLHNAGYFVSVVNPYCIKSYARSKLVRQKNDQTDAEIIADYCQRQEPTRWTPPSPELKKLKHLYRCSAALKDELTLVNNHLEKKERLPKEVANAWEDLAMNIEQRIETIKNSIRELLKQHKELLENFQLLLTISGIGEKSAIAILAEVPDIKAFRDARQLAAYAGVIPRNITSGSSVYAKPRLSKAGSRTLRKALFFPAIAAKNHNPIIMTFCERLKEKGKHNMAVVGAAMRKLLHIVFGVLSSKKAFDPDHIKNYRAKRLAEGLVL

SEQ ID NO: 350834 - protein, 343 aa, unidentified
MEHYVGLDVSLKKTAICVVDGTGKVVSEGLVPSDPEAISLFIEKNAPGAVRIGLESGPTSTWLWTELDALGLPIICIDARHAKAALKMQINKSDRNDAIGIARIMQCGWFKQVRIKSLDSHAIKALLSSRALLVKIKRNLENQIRGLLKNVGLLLGRGKGNIYTTRVETLIEDRPELSIAVRPLLEARKEVERQVADLDRKVRELARKDDEARLFMTVPGVGPMTALSFKATIDEPTRFRRSRSVGAYVGLTARRFASGEIDWTGRISKCGSSMLRSYLFEAAGVLLTRVPQWCALKAWGLRLAKRSGFTKAKVAVARKLAVILHRMWMDGTEFQWSHSDAIA

SEQ ID NO: 350835 - protein, 268 aa, unidentified
MSKVVVGIDISKKTFDASFKNQHGNWKHSKFDNTSKGFIQFNEWICQHNIGDIHVVMEATGRYSEKLSYYCYNLGLSISVVNPARIKYYGQSKLSRTKTDKADARLIADFAMHNEVGLWVPKSSEHVKLQELTRRIDNLKGDKTCLMNRIEGSSDKGIIKIYESLISSIQKKIDSLEKKILDIVKKDEILSRDYNNLCSYPGIGQWTALTILSEIPDIEMFDHAKQLTAYAGLNPSVRQSGTSVSGHRAISKMGGRVNYANLYICQLW

SEQ ID NO: 350836 - protein, 469 aa, unidentified
MSTIYVGVDVSKGYVDVVFLNDAGSVLGEPYLFDDTPKGHKAMMSVLTELVRRDKEISFMIGVESSGGLEKNWLKFFSSISVQLPVSPYYLNPFCVKKFMARELHGGKTDILSANAIALYLKRGLRLSDKPYVEENTSDRLRFNLIRSFSKHCALMTNQLHILLIQVQPYLVQYCRSGFPDWILNLLVKYPTAKKLATAKPEKIAKIPYITLSKAQDLIAQAKESVGALTDSNTARTIELLASELLRNQKLVEDEKKSLIKSNSNNMDKEILTSIPGFGEWTAIGFLTLIGDISKFQKASSLIAYIGSEPVVEISGDLKINRGISHHGSKELRALLYPATLAAISFNKVIRNFYDRLREKGKSHLVAMMACMNKLIRIAYSCLKTRMKFDASYGEKRRQEIETRAQLERKQNVRKRYKVSISLESPISARKAKERREMRKATENITRSHASKIYGVKHHKTQCLPHPSL

SEQ ID NO: 350837 - protein, 405 aa, unidentified
MSIERYDQVEVFIGVDVGKGEHHAVALDRAGPGRAGKTSFDKALPNDEAKLRQLISGLKQHGRVLFVVDQPATIGALPIAVAQAEGVLVGYLPGLAMRRIADLHAGEAKTDARDAAIIAQAARTLPHALRSIQLADEQVAELSMLCGFDDDVVGQATATSNRIRGLLTQIHPALERVIGAHLDHPAVLDLLQRYPSPAAMKAAGPTRLGNRLVKLAPRMGRRLAAEISQALSEQTVVVVGTNAASLVLPRLAEQLTGLRRQRAEIAAEVERLVEAHPLQPVLTSMPGVGVRTAARLLTEISGKHFETSGHLAAYAGLAPVTRRSGTSIRGEHPSRRGNKILKRALFLSAFAALRDPTSRAYYDRKIAQGKRHNQALIALARRRCDVLYAMLRDGTMYQTPDPLNA

SEQ ID NO: 350838 - protein, 324 aa, unidentified
MLCVLDESDRIVFSKRLSNDHAKIEQALRSYPGEIQGVAIESTYNWYWLVDGLQDAGFTVHLVNTCAVKQYDGLKHTGDFDDARHLAHLLRLGILPTGHIYPRHERALRDLLRKRGQLVRQRTSQVLSMQNLIARNLGAHAKGNEIKRWQAADIDAMPLLPEQALALKANLAVMDCLDEQIRQLESVILKQARDSEVFQALNTVPGIGKALALTIALESGDMTRFASAGHFASYARTVDSRRESNGKNKGSGNAKCGNKHLAWAFIEAAHFAVRYDETIRRWFQKKCAKTLQVVAIKAVAHKLARACFHVMKTGTPFDAARAFG

SEQ ID NO: 350839 - protein, 337 aa, unidentified
MLFVGIDLHKKTIMLCVVNQAREIKERKQFHRCHPEQIRSFFAALGPFQAVVEATASYEWLWEMLEPLAERLVLAHPKKLRVIAESTRKSDKLDAKVLAEFLALDMIPEAYRPTPRQRQHRRLVRHRYYISRGLRGVKNKMRRLVSDYNADRPDLFTEAGQEYLDQVAVSPADRFVLQQLQQRFQYYRVQMRDVDKALAEFARKAPLAEAEARAALESIPQVGPATVDVVISELGDIRRFSSAKQVVAYAGLAPGQRESAGKSKDLGISKEGSRLLRWIMVEAAWRLVYHSRRWGLAFEKLRTRRGKKKAVVAIARRLLGVMVALMRSGQRYRLAQA

SEQ ID NO: 350840 - protein, 403 aa, unidentified
MIFVGDDWAEQHHDVYLMDEAGRRLASRRLPEGLAGIRQLHELIAAHAEEPDQAVIGIETDRGLWVAALSGAGYQLYAVNPLAVARYRDRHHVSGAKSDASDAKLLADLVRTDRHNHRLIAGDSPEAEAIKVLARTHQSLIWARNRHTNALRNALREYYPAALVAFDDLAHGDALGVLDRAPTPAQGAHLPLAAIQSALKRGGRQRNIAARARQVQAALRSEQLAAPAAVTAAFAATTRATVGIIAELNRQIGELEATLAEHFEQHPDADIYRSLPGLGVILGARVLGEFGDDPNRYTDAKSRRNYAGTSPLTVASGKKRAVLARHVRNRRLYDAIDQWAFCAISASPGARALYDQHRAAGDLHHQALRALGNRLVGILHGCLRHQAFYDEHTAWAHRMPAAA

SEQ ID NO: 350841 - protein, 409 aa, unidentified
MSQPSWWLGIDLGSQQHELCLLDATGTVVRRGQIRHDPAGVARLVAFVDEATGRRPTAVAAALETPRCLVGEVLQERGVQLYAINPKQLDRFRDRHTVAGAKDDRLDAYVLADSLRTDTHLFRRVAPLPPENYRLRELTRTLAELEQLHRQQANRLWSVLNRYFPILLRWCPGADEPWLWALLRQAATPAQAAALSTADLQQILRRHRIRRLTAVDLQAALAEPGESGDPLTVELGAQRVHVYLDQLELIQRQIRQCSRAIQAIMNAPSADPAPTDREIVRSVVGIGWKTGAILLGEAATALQQADYRTLRGECGVAPVTKGSGLHRVTLMRRACDHRLRLALHHAAGVAIQHVGPWYRIYHRIRLRGGSHARALRQVGDRLLKVLTTMLHNRTLFDLGRLNGVTSTLG

SEQ ID NO: 350842 - protein, 339 aa, unidentified
MPHYAALDVSNQETAIHVVDEAGRTVWRGKRASDPEALAVALRRHAPDLVRVGLETGFLTPWLYHSLKALGLPVVCLEARHARAATTLQRNKTDANDAETLAQLVRTGWYREARVKSFAAHAVRHLVGARAQLKGVSVDLSNQIRSILKTFGLMAGKGAGHAFAIRVRELLEGRPALAAIVDPLLAAWQGVREQIAVLDRRLIRLAKGDSTCRLLMTCPGVGVIVATSFAASIEAPEHFRHSRSVGAYLGLTPTRHQSGETDRTGGISRRGDRLMRTYLFEAAASLLIRVRQNSALKTWGRDLAKRMGFRHAAAAVARKLAVVLHAMWRSNTPFQAWPA

SEQ ID NO: 350843 - protein, 412 aa, unidentified
MEIEPILISCAGMDVHEKKVDVCIAHGALDKPPIFEIRTFSTMTSNLEDLKSWLNKHEVTTIAMESTGIYWKPIFNIMEDEFEVVLANPQHIKALRMNKTDIKDCKRIANLLRHGLVPRSFIPPREIRELRDLNRTRRKLVGTMASEKNRLTKVLEDANIKLSSVVTRIYGVSSQNMIQALLEKDKLSKDEISEMSKGKLKSKVDLLEKALNGKLTDHHRFLLRMHLENIQYLAKQIKKLDEEIQLKMAPFQKESKLTQSLPGISEVSAAAILAEIGIDMSQFPDEAHLCSWAGVCPGNNESAGKRKNGKTRKGNSFLKGTLTEAAWAASRTKGSAYHAVYNNLAKRIGKRKALVAVAHRMLIDIYRVLKTGEPYHEIGAEAAHERAVERREQSMIRLLERAGYSVSRAAIA

SEQ ID NO: 350844 - protein, 379 aa, unidentified
MNKNQVIQKDNNTREVNLYMAMELSDKKWKLAFSDGSKERLRTIDAGEMIVLWKEIADTKEKFKLDEEVKVISCYEAGRDGFWIHRCLLSNGIDNNVIDPASVEVDRRRRRKKTDRLDAKKLLMALMRHMWGDKQACSMVRVPSVEDEDDRQLHRELESLKKERTRHSNRIRSLLISHGVRIENPGRRDFIKYLDSVRLWDGSEISKNLKDRLKREHDRYSQVEDQIKELEGIRKILIRDKESESMSRVRQMLKLKGIGIESSWILEKEFFGWRKFKNRKEVGSLSGLSPTPYSSGNSNKEQGINKAGNRRVRAIIVEISWIWIRFQKESKLTKWFNERFASGGKRMRRIGIVAVARKLLIDIWRYIEHGVIPEGAVVA

SEQ ID NO: 350845 - protein, 363 aa, unidentified
MNDSTTVTVGLDVHARSIRLAAVRAYELLEERTLPYDEEAVELALRRWPAVRCCYEAGPTGFGLQRFLVERGFDCLVVAPGLVPQRPGDRVKTDSRDARKLARLLAGGLLESIHVPSRELEAARDLVRAREDARLDRMRDRQRLSKFCLRHGRTLPSSSWTVTRRSWLSEQRFEFAAQQQTFDTYLHAVDLVDARIAQLERAIRETAEQEPWRALVARLRCLRGIDTLTALALVAEIGDFNRFRTAAELMAFVGLVPSERSSGEQRRQGSITKVGNSHVRRLLVESAWHARRRPTVGYELARRQRGQDPAIVERAWRCQQRLHARWQRMAGRGKPQQKIVVACARELTGFVWAIATEQPLRNA

SEQ ID NO: 350846 - protein, 323 aa, unidentified
MALFLGCDVCKTKIDMALVDETNRVLWQDVVANDATVLAGYLLTVAGAYPGESITGVVEATGRYHYPLLDAAVAVSFCCRVYNPILTKQGIKASIRSKKTDKTDAVLIARMGVRGEGRIYTPEPYMTTKLQARSYAKLGEFQSSFNKHRDHLKAMSDDVMTKQVISVFQAVEDAITEARAVLYAELQTSADGDVYTRLKTIPGVGPFVASCLIGEIQDMVRFKRAKQLIAYIGLDPKVRQSGHSLNSTGHLTKRGTPHARRAIFIAANVARRFDPHCKAYYDKKRNEGKSYTVANCAVARKLLLIVRAVWLSGGKYDTSFWET

SEQ ID NO: 350847 - protein, 331 aa, unidentified
MEKIVIGIDISAKTLDICIKKSNDYFFEVIENDSKAIKTFFKKIQKTYSEIVVSMENTGRYNWNLYQILEDFNFKIFVLNPLHLKKSLGLIRGKNDKIDARRICDFTDKNEKDLILWKPCSEVIKKIKVLFSERNSKIKIKSSLLKQRVLYSQLEKMNLDSKLMKMNKKEVKILEEHIAFLESEIEKLIEGDQDLSCKKKNIQSIPGVGKVVSWMIIAKTEGFTKIGNPRKMACYAGVVPFGYQSGTSLKYKPKVSYYADKSLKSILHMAAMRAVRLENDLKEYYERKIKEGKNKMAILNAVRNKIIHRIFALAKNGKSYEKNYINNLQVS

SEQ ID NO: 350848 - protein, 386 aa, unidentified
MDHLTTLSVPDPTGICGDCATLFVSLELSRSTWVATSLALGSRKMSKHTLVGGDARKLLDLLARLKNKAEQRMAAPVKIVAIQEVGLDGFWIHRLLETNGVESHVVDPASIAVPRRHRRAKTDAIDGETLLRTLMAWQRGEPRVCAMTMPPSPSEEDRRRVSRERAILLRERIRHTNRIRGLLFGQGITNYNPLHKNRREDLEELRTGDGRLVPAHLKAEILREIDRLELVLRQISEVEAERDEMLRPAQASSPAALLMRLKGIGAEFAGVLYLEGLFRHFENRRQLAAYAGLAPSPWKSGSVDHEQGISKAGNPRLRTTMIELAWMWVRYQPASTLSCWFRERVGSERGRIRRISIAALARKLLIALSRYIKHGEIPAGAVVKPV

SEQ ID NO: 350849 - protein, 360 aa, unidentified
MTSLPADPPGVIVGVDTHQDVHVAVALDALGRRLGELQIAATTSGYGQLVSWVRELGPAARFGVEGTGSYGAGLHRYLRRHGLAVVEVNRPDRSTRHRRGKSDPIDAEAAARAVLAGTATGIPKAGDDQVEMVRLLKLTRDSAVKSRTQAINQIKGVLVTAPAELREALTGLSGTAQLDRCAALRPGPVTTPTAAAKQALRSLAHRAIALAAEAAALGTQLDELTTAVAPALRALTGIGPDGAAALLTAAGDNPDRIHSEAGFAALCGTNPIPASSGKTTRYRLNRGGNRQANAALHRAVITRLRHHEPTKAYMQRRLTEGKSTKEILRCLKRYLAREVYHQLNPTTPSRNRPNDLPASA

SEQ ID NO: 350850 - protein, 350 aa, unidentified
MQYVGIDWAYRRAAWCAKQADGTIFGEGFVPADEDGLARLVIELGPEVRACLEMMSGAVWVRDQLAGAGWQVEVADARKVKNVAPLACKTDRVDARVLAELCRRELVPALWIPSLEERALRERLKRRLHLVRLRTSAKNRVFGLLTQWGLRIPADRLRRPDAMELLETRGVPEVWRRSVAEALAVIELLDERIAPLDRELGPLARADRRVCLLSTIPGIGPLLGLTIAAEIGDVARFPSPRKLIGYSGLAPRVKQSGERSRTGELSKAGSRTLRFAAVEAAQGAWRETNPWHRLYSDVKARTGKANPAKSAVARKVLIACWHVLSLDEPFKPPHPPTDLVPASSLCFLAA

SEQ ID NO: 350851 - protein, 376 aa, unidentified
MKTKTNTNTQTTTPSVVPPLTPAPVTAGGFTIGLDLGDRSHYVCVLDAQGQIIHEGPLLNERVALALLLTKYPAATVALEAGTHSPWISRYLTGLGATVIVANPRKLHAITRHERKCDRRDAVMLARLARADVALLHPLQHGSAQAQHDLLGLKLRDSLVRTRVNLINTVRFTLKSLGHVVSNPSSESFHKNIVTAVPADCLPVVQPVLAVLALLTEQIKTLERGLIARGKKDYPVTQRLQQIAGVGPLTALCFVLKIGEPKRFGRSRDVGPYLGLCPGRDQSGGTDKQLRISKCGDGLLRRLLVSAAHYILGPFGPACALRAYGQHLIGTSTREKKRAVVAVARKLAVLLLSLWKHGTDYEPRVPAAPALVMIPA

SEQ ID NO: 350852 - protein, 312 aa, unidentified
MTQACAAGVDVGRDFLDVGLEPLGRVFRLANAPQSVDRLVERLRRAGVVRVVLESIGGYAARLVRALADAGFAVGVIDPKRIRALRIAEGKRAKTDRLDARLIARFALLMQDAARPVPSAKAFEVRALSTRRRQLVEMIAMEKVRLKQTLDEAVAASCRQIIALLSQERTKVEGLLQAQLLFDAAGARRSSLLQTIPGVGPAISMTLLADLPELGGLERKAVASLAGLAPHPNQSGTRTAQAHIGGGRPCVRAALYLAALSAVRSDNGFKREYQAMRQAGKPAKVALIAIARRIVVAANSMLKTDSPWEKHA

SEQ ID NO: 350853 - protein, 354 aa, unidentified
MKRTTKYVAFDVHQATTVASVRDDRGRVLARSVLETHGPSIVEFLRGMRGALHVAFEVGTQSQWLHELVAPLADRVVVCDGRRVTRHGNKGDRVDADRLSELLRLGGLHAIYHGSAHRTDLKELTRTYRNVVEDSTRVMLRIKALFRARAIPTPGTTVYHATGRAQWLEQLTERGVRFRAEVLYAELDVLRALRPKAKAAMIAEGKRDPAWPVLWAIPFYGPVRVALLLATMGTPWRFRTKRNLWAYAGLAVVTWSSADHTFVAGQPVRRRRAPLTRGLNRNHNGVLKDVFKGAATAAAAKPGPLQDFYHGLVARGLRAEMARLTLARKLAALTLRLWKRGERYDPTQLTRPSS

SEQ ID NO: 350854 - protein, 391 aa, unidentified
MIYVGIDVAKDKHDCFITNSDGEVLFKAFSIANNRNGFNDLYQKIESVMEDVTKVKVGLEATGHYSYNLLGYLIDKGLPTYVINPLHTNLYRKSLSLRQTKTDKVDARTIASMLMSDVNLKSYSDTSYHNEELKSLTRYRFDKVKQRAKLKSSVSRLVCILFPELEKLVPTLHMASVYTMLSEFPDAKQVANAHLTRLTNLLSESSKGRYGKETAIAFRNAARTSIGSNMPAKSLELKHTIKLIQELTSEIDEIENEIKLIMDEINSPILSIPGINYRMGAMIIAEIGDFNRFDSPDKILAYAGFSPSTYQSGQLDGAYSHMEKRGSRYLRYALYNAAKYVCNWDPTFAEYLAKKRAEGKHYNVAISHAVKKLVRVIYHLEKTNQQYIKAV

SEQ ID NO: 350855 - protein, 416 aa, unidentified
MQKHSNLPVKSEQRSKQTKSRVPVQRDTKELMAELLGKLMEKQDPKAISASAGKEQKQGRLRPNLDRLTVGVDLGDKWSAYCILGLEGETLIEGQLQTAPLGVAEFFQSLPAARVVLEVGTHSAWVRELISGCGHEVLVANPRLMEGSKRRKRKNDRIDANKLARLGRMDPQSLYPIQHRSPQVRQDLVMLRARDALVAVRTELINSTRGLVKSVGARLPKCASPSFSKKVKESLPVEIREALLPLVELVAALSDSIQGYDEKIEKLGSEKYGHTALLRQVKGVGPITALAYVLTLENPNRFAKSRDVGPYLGLVPNQEDSGDIQPQLGISKAGDTMLRRLLVGSAQYILGPFGPDTDLRRYGLRLCERGGKNAKKRAAVAVARKLAVLLHHLWVSGEVYEPLRQGLSATMRQAAA

SEQ ID NO: 350856 - protein, 347 aa, unidentified
MLADEVDYVIGMDTHRDFHTLGIVQASTGGLAFEAEVTANARGYAKALRLAGEHARGRRAWAIEGTGSYGAGLARFLCARGERVLEVNRPKRDGRSLAKSDPIDAIRAARTLLGREKLAQPRVGGKREAVRALVTTREGALKAKKAGLCQLRALLVCLPEPLRSELRGLTRSTLLGRCAHLRPQQHRDGELRGALVSLRALARRVETLTVEERELAREIRTLVVELAPQLLAEPGVGPISAAQLLVSYSHQGRFKSEAAFARLAGTAPIEASSGERKRHRLDPGGDRQLNRALHTIIISRRKHHAKTIAYIARRQSEGKTAREAIRSLKRYLARHLFRVLTATPAPA

SEQ ID NO: 350857 - protein, 339 aa, unidentified
MKTYAGIDLHSSNNYTAVIDEHDQRLYRKRLPNRLDAVLSALEPFKDTLEGTVVESTYNWYWLVDGLTEHGYKVHLANPSAIKQYEGLKHTDDQWDSFWLAHMLRLHILPEGYIYPKEERPVRDLLRRRLLFVKHRTAHILSLQSMITRNLGSQMSGNAIKRLEQRDAEILFNHPHLVLAAQNNIAVIHFLKERITGIEREVKSVIKLRDQFTYLLTIPGIGDILALTIMLEVGDISRFPKVGNYSSYCRCVKAERLSNGKKKDENNRRNGNRYLSWAYVEAANFAKRFSPHAQRFYQRKMAKTNGIVATKALSNKLARASYYVMRDKVAYDVDKLFRK

SEQ ID NO: 350858 - protein, 320 aa, unidentified
MEKDTLSIADAQSIGVDISKTSLDAHAFPCGVARSFPNTPNGSKAFLKWIAGFDVTRVVFEPTGAYHHGFERALGSAGVPACKINPLQARRYAQARGTRAKTDAVDAAMLARMGQEFALEAKVIQSQALDDMKELSVARMALVKDRTAAMNRQHVRRSPLLVRQTKARITQIDKQIEEIDAAIATIMATQTDLKSREKILLSIPGIGPATVRALLIDMPELGQIGNAQAASLVGLAPVARDSGAMRGKRHIGGGRAHLRQAIYMPALVACRYNPDLKVKYNSLIKAGKPPKVAITAIMRKLVVLANALLAKGKIWTPKLA

SEQ ID NO: 350859 - protein, 383 aa, unidentified
MRKIQETLQAQSTTDQDVMYIAFELSNSTWRLAFSDGNKKRHVTIKARDLKQLEREIEKAKRRFGLKDNVQIKSCYEAGRDGFWIHRYLLSKGIDNLVVDSSSIEVNRRKRRAKSDRLDAENLLRLLMRYHGNERQVWKVVTAQTVKEEDARHLHREIETLLRERTRYRNRIRALLVQHGLDVKNPSRKNFLKVLNTLRSWDGQALPESMKARVVREHERLKMIEDHIKLLKKEREQRVKSKETASLRQVAQLRELCGIGVNSSWIFVMEFFGWREFRNRREVAALAGLTPTPYDSGGSQREQGISKAGNKRIRTMAVEIAWCWLRFQPHSKLSRWFNERFASGGSRMRRIGIVALARKLLISLWRYLEHGVIPEGAIIKSAS

SEQ ID NO: 350860 - protein, 379 aa, unidentified
MRRYHPDADAVATDVTVYIGIDVAAEELAVCVLGSDLEVLARVKLPYAEEAVSWLMDRLPGCSVHAVYEAGPTGYVLLRWLRRYGCRTAFMVAPSLVPVASGDRVKTDKRDALKLATLLATHNLKDAFVRDLTDEQYADRQVVRCRTQARQKRTTIQIQVKSLLLMHNIRLPREMKNWSKRTRAWLNQVETGHCSVGLALREQLRWWEEAHAAVKRLDQLCKGLAEEERFAADVKRLRTIPGIGLTTAMLLLTELPDLPARFENGEALARYTGLVPTEYSTGKTQGRRGHLPGDGNAEVRSALVQAAWRLIDGTRLLSITANFGDTKSTICHPASTTHGRLPPGEREAAGVVEGLLRLAAGLEDAGDLREDLERGLAAA

SEQ ID NO: 350861 - protein, 364 aa, unidentified
MEQFIGCDAHKKFSVFVAVNEKGQAGEALRVAHDRQLYREFLARLPPHSPIAVEASGSYSWLVDEMERSGHRPKLCNPLEAKRRMGLTNKTDKLDARGLAILLRNGTLPEVWIPPSELRDQRELLRLRIFLVRLRTRVKNRIHGALARHNVQIAGADLFGVAARLQLGARLPELPEHSREAVEQELATLDFLETQIESAEDRLEAIMQVSVEADLLKTLPCVGPILSMVLMLEIGKVDRFPTAAHLASYAGLVPRVHSSGGHTRMGQVCGNVNRNLKWAFVETGNLIVINQRRLAGSHVVRLYQRIKRAKNHQKAVVAVARHLAEAAWWVLTRQEVLSRAAGPAATGSFVDARVSAAVHLAPRG

SEQ ID NO: 350862 - protein, 346 aa, unidentified
MMIIGCDFHPSWQQISWVDSETGDCGEQKLVHAAGDARLFYQGLAAPVLIGMEATGNSQWFIELVEDLGHEIWIGDAAQIRASYVRKQKTDKRDAAHILKLVVEGRFPRLWTPDREQRDLRQLVLHRHKLVIIRSRVKNELQHLSLNKGVQRKHKLWSQAGQKMLRELPLKPWAACRREDLLGLLAMLNQQVGTLDDAVQQAAEENPQAKLLMTQPGVGPNTALAYVLTIGDVGRFRRGKQVASYLGLIPREESSGGRQKLGAITKQGNRMLRALLVEAAQVAVQHDPGLRKQYLHRCHQKPKGVAKVATARKLAVRLYWMLRSNVAYPEIVGIESSSGLPLVGAS

SEQ ID NO: 350863 - protein, 311 aa, unidentified
MSESVVYVGADVAKDSIVWDFGGECVTLPNSLAGCVRAFVRLQKLGTNVHIVCEPTGGQERTLLKACATRGRAVCLVNALRVRQHARAAGVLAKTDSLDAQVLSAYGRAHRPAVRAERSDERQALIDLTTRRQQLKQMRLAENNRLAQADARAVRASVLTLLRALDRQLERIEKQLRELVGENPSWSASIDRLCQVKCVGWLTACAIFSLMPELGTLDDNQAAALAGVAPFNVDSGKYRGRRRIQGGRPAIRTALYMAALVGIRYNPVFKAAYRRLRQNGKPGKVALTAIMRKLIILLNRMIKNPDFALAQ

SEQ ID NO: 350864 - protein, 503 aa, unidentified
MLRNAIGLDPEAKGFASAYVKTRGEKAKIKSFLSGQEDLGRFVSWVKKQGDLIIAIEGSSGQSKPIEEALRAEGIVIYSFKPADVSKFRKAVLGQNKNNERDAESVARYAMALESQGKLEGYKRVFFPNEELRTLTRGYEQKSKAVTSEVNRLWKLTRAASVDLYLTLGGKHPDNEIRNNIIQKQAILQRLSEKPDLLEWKGLSEEDFLRAMGTRNCRGRMELIEELKKITKTFEPQSAVLTYLIKNSADQVLSLSRQMKEIRQLLDAITQENEAVQLLRGYKGISTITATTLMAEMIDIRRFSTDDNLASYSGLCRREYSTGEKRGEAANSLFNRRLKDAFINAAKNFVRFNPESHLSGYCRNLIKGGMKVTEAYKRIARALARTFFRRLTSLHQTEREDEGADEMKMRESDMASGNSNRSDNNHSSNISSFSLAYDKGESQKKTSERHSCLIGGEKVNLSVRKEKLSFTGSKAHPLSGELKTNCPPDKVPNCGIANVKKEV

SEQ ID NO: 350865 - protein, 378 aa, unidentified
MTVTLQNQAYENMVVLYMALELSNKSWKVCFGDGKRRRRVSVDAGDMARLREQIDLARKKFGLAKDCRVVSCYEAGRDGFWLHRCLLSQGIENVVVDSSSIEVSRRQRRAKTDRLDVEALERLLIRYVGGEQRVWSVVRVPSRADEDCQRLCRERDRLIKERGAHTSRIKSLLVAQGIRLDLRGDFEQALESVRLWDGSALSVDLKAELLREWRRRSQVQAQIDALEREQRVRVKSAQEGPACLVRQLMTLKSVGWQSSWPLVMELFGWRKFANRRQLAGCVGLSPSPYNSGDSERDQGISKAGNRRVRRVLIELSWLWIRYQPDSEITQWFNRRWADQGKRARRVGIVAVARRLVILLWRYLEAGVLPAGVILQASR

SEQ ID NO: 350866 - protein, 350 aa, unidentified
MRTKPDPQTAAFGIDIGKKVFHVVALNAAGSVIQRAKFSRDTLLAFFDAAPNALISMEACPGSQWLARRLATMGHDARIIPAHFVKPYVKWNKTDTVDAAAIAEAVTRPTMCFVEVRTPEQIDLRALHRIRDRLVGQRTALINQARAFCLEHGLAMRVGAGGFHADIRRHLSNVENDLTPAMRVLLEELLDDLAYIEGRIKAVTGKVEAYASQHDAVSRLVTIPGIGALGATAIVAAAGDGRQFRKARDLAAWLGLVPAEHSTGGKQTLLGISKRGNRYVRRLIIHGARSCFLHLNRANHALGDWLSALEARTHRNKAVVALANKLTRIVWAILTRPGAVYLPSRGAALS

SEQ ID NO: 350867 - protein, 337 aa, unidentified
MVYVGIDLHKKTIAVCVVDQQRRVIGRKTLLCGEPAKIVTFFRGLGEFQAVVEATASYEWLWRLLEPLADRLVLAHPKKLRVIAESRRKSDKIDAQVLAEFLARDELPESYRPTPRQRQHRVLVRHRCYIRRRAAATKVKIRRILADYNADRPDLFRAEGLEYLARVKIAPADRFVIDQLLDEWEHQVKQLRAVEQRLKEFANDASAAEAEARAALRSIPGVGVVTVDVVLSEVADIRRFRSEKDVIAYAGLAPGFRESAGKRQALAISKEGSRLLRWALIEAAWRLVRLTRRWGTVFANLSQRRGRRKAIVAIARRLLTVMVAVWRSGVRYRPAAV

SEQ ID NO: 350868 - protein, 343 aa, unidentified
MKLSYVGVDLAKNVFQLHGIDRHGQAVWRRRLRRKQWLKVLLETVEPGCIIGMEACSSAHHWARQLQANGYDVRLVAPQFVKPFVKSNKNDRNDAEAICEAITRPHMRFVPLKTVEQQDIQAIHRVRCTLMSQRNAKANQIRGLVAEYGIVAPPQMLSLRRAIPDWLEDAENGLSTCFRALLHDLWMDLQHLQERLAELDRQIEQIAKDNPVTRRLQQLRGVGPMVATALVATVGDGSHFRKGRQMAAAIGLTPRQHSSGDKRRLLGISKRGDAYLRTLLIHGARAVVSQAKRRDDPLSLWVTSIAERSHTNVAAAALANKTVRIAWSMLRNESDYNPAVAVA

SEQ ID NO: 350869 - protein, 347 aa, unidentified
MLTDTLLSNTTNLMETLYFLGIDISKKKFDAALTIDGKQFHEAQIENTPAAIQLFFRDLKKQLSSLNRLTVCLEHTGIYCLPLLNFLVKHKIRVSVEPALQIKQSQGMTRGKNDQADAKRIALYALKNCENLRFWQPQRHCIQRLKALLVLRERMVKMKVQLEVPLHESREFVATSIFKQTLANCQKTIRALQSDIKGIEKEIDTLVSNDEQISQQCRIATSVPGVGKITALNMIISTQEFSRIQDAKKFACYAGVAPFEHSSGSSIRGKTRVSKMANMTLKKLLHLAAMSAIQCNDELRIFYKRKVDSGKNKMSVMNAVRNKLISRIFACIKDKRIYQKVYQHALV

SEQ ID NO: 350870 - protein, 336 aa, unidentified
MMNASEMIFVGIDVSKDSLELALDDKSKTQCFGNDEKGIAALLAAINAALLTGEDGADKAQRKVGAVVLEATGGFERQAAVALCLAGLPVMVVNPRQAHDFAKAMGFLAKTDAIDARVLSHFAHTLYQSEKREQLLMCLPDPRQMALHALIARRRQLIEMRVTEDNRWLMSPKIQRKSIDAVRKVLNREIGKIDEEVAAQLKGHFADKLKLIENCKGIGAVTQACLISALPELGSLSHEQIAKLVGVAPLNCDSGRHRGRRVTWGGRAEVRCALYMAVLSAVRYNPVIKAFYERLLVKGKPKKVALVACMHKLLTILNAILKSGKPWDDHFSLKVA

SEQ ID NO: 350871 - protein, 390 aa, unidentified
MYYCGIDVAKRKHAIALLDEHGQPAHRPFTIDNTRAGFDQLLQALAHLAGPVLIGLEATGHYWWALYEDLTQQGHPVVVLNALQVHAFRKSGVRKVKSDRTDASWIAEFLRFSQPTPARPTTTIFLQLKEVSRFRYHLAEQIGDCKRKLLSILDRVFPEYETLFSSVFLTSSRQLLARAASAQELATFDLAELTDLLKTTSRNRFGRTKAETVQTTAQQSVGVRFLADAAQLEVRCLLAQIDLLEEQRAQVDTALAQLMAQVPQHLTSIPGVGPTTGAALLAEIGDIQRFDAPEKLVAYAGIDATVYQTGQFEAHQMHMSKRGSPYLRHALWQAASMAIQYDAELRAYYDRKRTEGKSHGTALGAICRKLITRIYIVLKENRPYVVRPQL

SEQ ID NO: 350872 - protein, 381 aa, unidentified
MKTLHKRCAGLDVHKAEVVACLRVVMNRKVGQEVRRFPTTTQGLLALAEWLENAGCTHVAMEATGVYWKPVWHILEGHFVLILANAAHVKNVPGRKSDVNDATWLGDLLAHGLIRSSFVPPPEIQELRDLTRTRRQLTREIVQHVQRIQAVLEEANIKLCSVITDIMGASGRRMLKAMIAGETDAEKLAALGHERLGCTRAELVEVLTGCVREHHRFLLGQHLRTIEQLEDSVAAFARIEAALSPFHDIVERLKEVPGLGATATETVIAEIGTDMSPFPTAGHLLSWAGFVPRLDESAGKRRSTRIRKGAPWLKPVTGASCVGRSAQEEQLFPGPIPPSQSAPRRQEGSDRGCRVDPDNRLPHAAGWYLLPGPRPRILHSP

SEQ ID NO: 350873 - protein, 344 aa, unidentified
MTNIQFKDIDPEAKPVLFAGIDVGAEELILVIRKNGKPFDPQKFANTPADRARLVKKLVKLPGIIVCLEATGVYHFDLSLALHDAGVLLMVVNPKAAHNFAKVLMKNSKTDAVDANTLAEYAARMDFVGWTRPSNETIALRSFARRIDALTGQKAAAKNHLHALTATSETPKAILKDVKLAIAQLEKRIDSLTAGALILIGKYPDLERTLALLIGIKGIGNTSAIALMGELLLLPPDLSHREWVKFAGLDPRAFDSGKSVHKKTRISKAGNHHIRSALYMPALSAKQHDPHVKAYFQHLVANGKKPLQAVCAIMRKLLHAIHGMLKHNEPFDNTRFYAIPECNG

SEQ ID NO: 350874 - protein, 354 aa, unidentified
MKRTTKYVALDVHQATTVASVREEGGRVIARSVLPTDSGALTEFVRGMRGARHVTFEEGTQAQWLYDLLAPLVDRVVVCDRRGAPRQGNKGDQVDADQLSELLRRGALRAVYHGSADRATLKEFTRTYRTLVEDATRVMLRLKALFRARAIPTRGTTVYQARARGQWLAQLADRGARFRAEALYAELDVLRTLRPKAKAAMVTEAQRDPAWPVLRTIPFLGPVRVALLLATMQTPWRFRTKRQLWAYAGLAVVTRSSADYTLVAGAPVRRRRAPMTRGLNRNHNRVLKDVFKGAATAATARAGPLQDFYHSVMARGTREELARLTLTRKLAALTLRLWKRGERYDPTKLTTPAR

SEQ ID NO: 350875 - protein, 332 aa, unidentified
MTAVSTLGIDLAKNTFSVHGVDAQGVVTVRRTVSRAKLGELVARLPPCLIGMEACSGAHEWARRFSEAGHTAKLMAPKFVTPYRKSGKNDGNDAEAICEAVGRPNMRFVPIKSVQQPCDLSLHRVRLGFVEERTATLKRIRGLIAEFGYVVPLGTERLRREVRDLLERLPARAASCVRDLLEHAERLRSKALEYEREIRSSLQHNELALRAHTRPGIGPITASALVATVGNGHDFRNGRQFSAWLGLVPRQYSTGGKTRLGHITKRGDPYLRTLLVMGARSVLQRAYRETDPLSRWALALQQRRGYHRACVAIAAKNARVAWALLAKGAAAA

SEQ ID NO: 350876 - protein, 365 aa, unidentified
MDPQRKEDSKARSHHHNVTAGIDIGDRYSHLCLLDTESGEVIEEGRIPTNTKAFQRRFSGAEPMRIAIETGTHSPWISRMLQECGHEILVANARKVRLIYGEGRKNDKIDAEKLARLARLDPKLLAPVKHRGEASQAHLALLRSRDALVSARTKLVNHVRGAVKSFGARLPKCTAESFHNRVAEHLPQELAPALGPILKTIASLTERIRDYDRKLEGVAEEIYPETKLLRQVHGVGVLTALAFVLTLEDPPRFAKSREVGAYLGLVPASDQSGGSDPQKHISKHGNKMMRKLLVSSAHYILGPFGEDSDLRRHGEKIASRGGKNSKKRAVVAVARKLSVLLHRLWVTAEVYDPLYNANHRESQAA

SEQ ID NO: 350877 - protein, 420 aa, unidentified
MKSASNTLMTQLPETPPNDVTGGLDWARDDHAVSVVDTRGREVLRHTVEHTAAGLAELIDVLAGAGCREVAIERPDGPVVEALLAAEMTVVVISPNQVKNLRGRYGSAGNKDDRFDAFVLADTLRTDRARLRALVPDTPPTVALRRSCRARRDLIAHRIGAANQLRAHLRAAFPGAVGLFADIDSPISLAFLTRFTTQNQADWLSPTRLGKWLSSVGYSGKVDPTVLHARLTGAPRGLTGADADAHAAITRAFVAVLTSLLEQIKTLTAEIETQLAAHIDAHIFTSLPRAGRVRAARLLAEIGDCRAKFPTPESLVCLAGVAPSTRQSGKIRAVGFRWACDKQLRDAVCEFAGDSRRANPWAADLYQRARARGHDHPHAVRILSRAWLTIIWHCWQDRVDYDTTKHGALQRLLKDQTQAA

SEQ ID NO: 350878 - protein, 337 aa, unidentified
MKKKWFVGIDVSKLTLDIALYTAKSKMTASDHIQVKNTVSGFQEFLDWLKERGITRSGCVVGMEHTGIYSLDISLFLENKRFDYCLFNPIHLKRSLGLVRGKNDRVDAFRIANYCYLHREDLVYSHMASSSMLEIRSLLSERKLYVEQMATHKGFLTESKGRKSSSRGQRCARIVDYLEKQIEEIEKEINDIIDADTTLKKNYELVTSVKGIGFVNAINFLVHTNNFMNFENARQYACYTGIAPFEYSSGTSVRGKTRVNKMGARQVKADLTQAAKSAVQHDPQMTAYYVRKKQEGKSHGSIMNAIKFKLVERVFAVIREQRVYLDAEKFQELKKAV

SEQ ID NO: 350879 - protein, 458 aa, unidentified
MPRGQRRTTRAVTTPVLHPHAAGIDIGATERYVCVPLDRDPQPIRRFGTFTEDLLALATWLTQCGVTTVAMESTGVYWIPLYQILETRGIEVCLVNARHVKNVPGRKTDVQDCQWLQYLHSVGLLRGSFRPPETVCAVRSLLRHRDTLVQLAATHTQHLQKALTQMNLQIHHVISDITGVTGLAILDAILTGERDPQVLAGHRDRRIKASSETIAKALVGDYRSEHLFTLRQSLDAYRHTQRLIGECDGEVQARLGAFASQIDPAVSPLPSAASARRPAPRPPTTPPFDLRAELSRSLGTDLTQVPGLQTPTVHTIFSELGADLSAFPSGAHFASWLGLCPDNRISGGKVLSVKTRHVKHRVAYALRLAAQSLSRSQSVLGGFFRRLRAKLGAPKAITATAHKLARIVYHLLTTRQPYEESRLAAAEADHRRRTESRLRAQARALGFQLVPVTGQSVS

SEQ ID NO: 350880 - protein, 310 aa, unidentified
MNITPGYVGIDISKATLDIFDTAIGRAERLANAREPIAAQAEQWRRDGRFVLFEATGVYDRCLQEVLQSAGVPFARVNPARARDFARASGFLAKTDAVDARMLAAMAQRLRPEAQEPAAPERDRLAALQRRRDQLVAMRASERTRRKDALDTQEEHSLASHIAWLSEEIARFERRISAHIRATPQMARAYLRLRSAPGVGPVAATTLLALLPELGRRSPKAIAALAGLAPLNRDSGTFRGKRTIGGGRRRVREALYIAAFAAKRYCPHFRERYQDMRAAGKPMKVALIAIARKLLVRLNAMLRDDLCYQT

SEQ ID NO: 350881 - protein, 408 aa, unidentified
MKTLHKRCAGVDVHKTEVVVCLRLVTHGKVEREVRRFPTTTHGLLELAEWLESARCTHVAMEATGVYWKPVWHILDGRFALILANAAHVKTVPGRKSDVNDASWLADLLAHGLIRPSFVPPAAIQELRDLTRTRKQLTRQIAQHSQRIQAVLEEANVKLCSVITDILGASGRRMLKAMIAGEIHAHKLAALGSERLGCAPETLIDALTGHMREHHRFLLAQHLQTIEQLEKTIAAFDTRIEEKLMPFRDTVERLKEVPGLGSTATEVILAEIGPDMSLFPSAGHLLSWAGFVPRLDESAGKSRSTRIRKGAPWLKPVLVQAAWGATRKKNSYFQAQFLRLKARHGAKKAAIAVAASILTTVYHMLRDGTCYQDLGPEYFTRRNPAKAAARLANRIRNLGYHVEIRPAA

SEQ ID NO: 350882 - protein, 394 aa, unidentified
MNCTQNYKIDQVTEQTLVVGIDIAKRTHYACFVDDRGRVLRKSFPIFQSKEGFQQLYKAIQEAMQAFGKSEVIVAVEPTGHYWLNLAYFLEEHGIPLVMVNPAHVCRSKELDDNLPTKHDAKDALKLRKEQTAVKNAIVRWTDRYFPEFWTVFRDLGKTALSVLEWTPLPADMAGRSAEELIEVYRQSEGLKCPQKAKIQALINAAKDSIGVTEGTTMARFEIAALVRRYRQLEAEIAALDAELKALVQTTMEYQWLKTVDGLGDATIIDLLAEIGSFAHYRDPRQLVKLAGLTLKENSSGQRKGQKHISKRGRKRLRSVLFRAMIPLIRHNEAFRELHEYYTTRSVNPLTGKQSIVALCRKLLNVLFAICTKKQAFDAERMKQDVLSQVQRAA

SEQ ID NO: 350883 - protein, 328 aa, unidentified
MTLTIVGEACAVTGGVDTHADAHVAAALDLVGGLLGVEEFPATPPGYARLLAWLRGFGPVSLVGIEGTGSYGAGLARHVAAAGIRVVEVDRSDRQDRRRKGKSDPLDAISAARAAQSGRASGAPGGRDGAVEAIRALMVAKRTARAQRTQTINQARALILTGPDDIRVRFTRYTPAGLVAGLATLRPRPGSMVRYHTLLSLRELGRRAQFLDTQLGRLDELMVPLVTARGPGLLRLFGVGPDTAATLLIAAGDHPERLRSEAAWAHLCACSPIPASSGKVSRHRLNRGGDRQANHALWRIVITRMGSHPPTRAYAAREVYPHLRPGPG

SEQ ID NO: 350884 - protein, 413 aa, unidentified
MLKIVYPICCGIDVHKGFIVACIASTNEQGVTTYQSKRFSTFTNDLRRCAVWLAQNHCKDVCMESTGKYWIPVYNILEATCTIVLAHPKYVKAIRGKKTDQKDAKWIADIFKHDLVSGSFIPPADIRQLRDLMRYHWKLTNFTTGEKNRAQNCLTVSNIKLDDVFSDVFGKASSAITTRLLESSEPFDVTPYLTKNIKAPVEKIQAAVEGKMCAEQAEKLRIIRSHMDALELCRLNLQSLILTTAEKYLPQLNIVATAPGIQAFSAIGIISEIGVDMSVFPSSKHLCSWAGLTPQNNESAGKKKTTRISRAGVYIKPLLVQCALASIKAKKKHPEIFNRYNNLKKRRGHKKAIIAIARMLLTAIYNMLKKNEPYNPELYCKDDRPPAHREVSVEEAVYILQRQGYLVTAPSSP

SEQ ID NO: 350885 - protein, 309 aa, unidentified
MMKYLQKSFSTINSDIQRFHNWLIENNCYHVCMESTGKYWIPIFNYLENDIDVCLTHPKYVKAIKGKKTDKKDSKWIADLYKFDLVRCSFIPPKDFRQLRELSRYRFKLVCMKSSEKNRIQNCMTISNVGIASVLSDPFGKTATEIISYLLEHTADSMDEKAVRKLIKKGAKSKSDEIIEAIKGYTIETDQAKKLELARGHLEYLDDMITQTEVELYVRIKPYYEFVEFVSTMPGMTELSSTIVLAETGVDMDIFDDAKHLCSWCGLSPANNESAGKKKSVRIAKAGDYLKPMMVQCALAAIKSKCRLE

SEQ ID NO: 350886 - protein, 352 aa, unidentified
MQYIAFDSHTRYTYASAEDHASGRIFDKRIEHERGAIRSFLSAYEPGSPVAVETIGNWYWIVDEIEAAGMQPRLVHARKAKMMMASSKKTDKLDAHGMNRLQRTGTLPTVWIPGATLRDIRELYRTRMVLTRQRTTLKNRIHLAFAKYAIPFEDTSDIFNQKGRKLVEARLAFLPPHTRFAVAQLLEELDMIDLKILSFEKRIDEVAELSPQVSLLRSIPGIGKILSLVITYEVGDVTRFASSSHLAAYAGTTARVHASGGKVRYGRAPADVNRYLKWAFVEVANCVTLVRRRLRYRHIADLYERIRARKGHSVAVGAVARHLAEATYWVLARNEPYREPKRDSKAVSSTKG

SEQ ID NO: 350887 - protein, 370 aa, unidentified
MGEYIVCGVDAHERTLECRIGVGREAPSRLRFENTRGGRQDLFGELERMRQRTGSEKVLLGYEASPLGYGLYDESVEAGMECVVLAPTKIARSVEDRKRKYDDRDATRILEALRGHVLAGNELPAIWIPEVQTRDDREVSRCRLDLTEKLTAVKAQVRMLLKRNHIEKPEGVGTSWTLSDRAWLEGLRLAPGAQVWLSSLLRQVDALAEEIGRLDRELEQLAEQERYRGAAQALCGMGGIGVLTALVFLTEMGDLRRFGNRKQIGAYLGLVPSSHESGDGDDRKGHITREGPARVRKVLCQAVWARLRTDPTEADAYRRVVERNPKHKKIAVVAGMRRLAILMWHRAKEAQESTGARSCGVTQRPSRIRT

SEQ ID NO: 350888 - protein, 415 aa, unidentified
MTEHGIEEFAALVGIDWADRKHDICLQPMPSGRREFLVLEHSPEAIDEWANGLRVRFDNRPVAVCVELRKGPLIHALSKYEHLVLFSVNPGLLAKVRRAFTPSGAKDDPSDAAPAVDILEKHPQQLRRWAPDDPRTRQLQALVEARRRLVEQRTRTTNRLTANLKGCFPQALDCFDSLDTMVACDFLHDRPSLGDARHAGTATLTAFYHKHGVRGRARIEGRIAMLKGAMAPTRDGGAILPALLATRTLVEELRTVLANIECYDRVIAKSFKAHPDAAIFSSLPGAGPTFAPRLLAAPGSDRERYADAAAMQQYLGVAPVTERSGNSTRVHWRLACPTFLRQSIVEWAGMSVRYSVWAEAYYRRQREKGKRHHVAIRSPAFKWLRILFRCRKDHKPYDEAKYLFALQRRNSPLLG

SEQ ID NO: 350889 - protein, 372 aa, unidentified
MGWLPSAPNGIAMCQDGSINSHWMERTATVTKTIMIGVDLAKNVIQLHAARMTGEVEYRKQLSREKFRRFMAEQPPALVVMEACGSANYWARELSRVGHTVKLIAPHYVRPFVKRQKNDAADAEAIVIAAQRPEMRFVAAKSEDQQGRAMLFRTRTRLVHQRTELINMLRAFLYEFGHAVPQGVQQCQRIEAIVEEVNSDLPEIVRSECLEILDQITGMTARIKRSDERIRALAAQTDTARRLQTMPGVGPMTAFAVDAFAPPMESFKSGRDFAAWLGLVPRQHSSGGKARHGRISKAGQADIRRLLIIGAMSRLNWMGRKSIIAGSWLANLSARKPRMLVAIALANKMARAIWAMLTRQENFRDSMAATVA

SEQ ID NO: 350890 - protein, 419 aa, unidentified
MSSLTQEFTAFIGIDWADTKHDICLQPAHSQQREFDQLPHQIPAIEQWAYSLQKRFGGTIAVVLELSKGPIVYALQKYDFFVLFPVNPSTLAKYREAFKPSRAKDDPSDAELALDLLLCHGDRFKPIKPQSVEMRTLTYLVEQRRQLVGDKTRLVNRLCNTLKQYFPQALDWFEHRDTVLFCDFMTRWPTLTQVKRARKASLETFFKTHNVRFDTVIATRISGIRAATPLTLDVAVLTAHQLQAMAQVNQLRATLQAIDQFDDAIAKLAPTLPDYALFNALPGAGPHLAPRLLVAFGEQRERFTSAAQLQQYSGVAPVTERSGKKCWVHWRWQCPTFLRQTLVEWAAQTINKSFWAGAYYRQQRDKGCSHQTAVRALAFKWLRILYRCWQNRTPYDESKYLNALKRRNSPLLKQVTTTS

SEQ ID NO: 350891 - protein, 342 aa, unidentified
MDRLSPVTRIRKVGFTMENELHFIGIDVAKAKLDVDILRPDGRHRCKKFDNTLSGHEALVRWLRGHDVNRAHVCMESTSTYMEDAATHLSDAGYTVSVINPALSKAFAQSEGLRSKTDKVDARMLAHFCREKRPPAWEAPHPTERALKALVLRHQALTEMQTQEKNRRETAPEVQLTSIDILLGCLSAELARIEKQIKDLTDNDPDMKQRRKLLNSIPGIGEKTAAVLLAYTGLKLKFGTARQFAAYAGLTPVQHESGSSVMRASRMSKAGPVHLRKALYMPALSALYHTAWGKAFRKRLEGNGKRAKVITGAMMRKLAQVAYGVLKSGKAFDASQHELLIA

SEQ ID NO: 350892 - protein, 400 aa, unidentified
MKQSNATQLGVVKEAVAERLSTASDIHAAYIGLDVHKASISVSIAEAGRQEPEFRGEIPNVPQAINKLVHQLSQRFAGQPLLFSYEAGPCGYGVYHQIQASGHDCEVVAPTLIPRRAGDRVKTDRRDAQMLARLSRSGELTPVWVPTPEQEAIRDLTRAREDMKAIELKARQRLSAFLLRHGKVYTGKSKWIPVHFRWLETVRFDTPVQQIVLQEYIEAVREAQRRVAGLEKQMEVALPSWSLAPVVEALMAMRGIGLVTAMTVLAELGDISRFDSPRQLMAYLGLVPSEHSSGGSRRQGGITKTGNGHVRRVLVEAAWSYRFPARKTRIIEQRAQKTSPAVQAIAWEAQKRLCGRYRRLAATGKVKQQVITAIAREMAGFLWAIVCEAMGKAHGSRATA

SEQ ID NO: 350893 - protein, 309 aa, unidentified
MKQSVVYIGIDVAKAYLDVAWQKQCRRFPNDKSGRAALVGWIKQSAVPVQLICEASGGYEQALLECAQRADLKMSLVQANRVRQYARAAGILSKTDKVDAGVLSAFGAAMQPKPTAPLSAEQKRLREFDAQRRHLSSLLVAEQNRLVQLRVGELRTLSRTLISKIKKQIASIDACIAKLITQDQELALKAQKLTSITGIGERTAALVLAQMPELGQLNRRQAAALGGLAPFNRDSGTLRGKRTIFGGRRALRSGLYMAALAAARRNHTLSEFYQRLRAKGKPHKLALTAVMRKLLIALNQTLKPIISPA

SEQ ID NO: 350894 - protein, 424 aa, unidentified
MNLLEFKATLGLDWADRQHDIWIRPADGSKPVHRRVEHSAEALHEWVAQLRARFPEGRVALGIETSRGPVISALLAYDFIVIFPINPKALKNYRDCFGVSGAKSDDADARLIEEYVRLHGEKLKPLQPDDTLTRQIGGWAEVRRQRVDERTALINQVQARLKTYYPLALELLGGQFNTVMAAEFLTLWPDLESLQAADPEKVRSFFYKQNSRSKKKMAERLLAIKDARALTRDAAIIQPGRELVRALAGMLKSLHRSVKQLEEKIKRAMDEHPDAPLFRSFPGAGPNLAPRLLAAFGTQRDRFQNAQEVAQFFGIAPIVIASGNSRVTRLRRRCPKFGRQTFHENAVCAAKNAKSQDWAPHYYKACRARHEDQHHQACRSLAYKLIRIYFACWKNRTEYRQQTYLEALKKSGSPYRATAETSGE

SEQ ID NO: 350895 - protein, 320 aa, unidentified
MQTANSVLNVGADVAKDEVVVASSDGSFPVRKLANQRTALRAFLKTLPPSSRIGMESTGIYHNLLADLACKQGLVVYVLNPKDARHYARGVGLRSKTDRVDAELIARMIAREHANLHVWIPPTPEQREIDQLIKRRSRLVSMREGLGMSMKGMAEFNADLRATRKRFNQLIAHIDRRIQTLVEVSQDRKEHVAQLRTINGVGSLVGAALVNTLERMPLKSADAFVAFTGLDPRAADSGQHRGRRRISKRGPAELRRLLYLAAMAARKTKTWKPLYEHYRGKGLSGTEAVVILARRIARTAWSMYTYKTDFDPARLTKCLT

SEQ ID NO: 350896 - protein, 427 aa, unidentified
MRYRVAAVDVHKKMVAVVVADVVIEGEYEFERRKFGATPDQLHLLAQWLDQQEVEEVVMESTAQYWKPVWGSLERYWKPARQKREGATPMSGTLHLCQAKSNRGPRGRKSDFVDGERMIKRLVAQELVLSFVPDPEQRLWRTVTRRKYQLTRDKVRFRNQLESLLEQAHLKLSSFVSDLLGLSARRMLKALAEGETDPAALAALADRRLRATPEQLRDALGACAQLHEIYRRLLRMALEELKLMEDQIEQLDREAANLLNQHEAAVQRVAEVPGFGVDSALQMIAEVGPKAAAFESEKAMASWVGVCPGSEESAGESHSTRSPKGNRPMRRLLNQAAQAAVKVKGSIFDVTFRRLLPRLGYKQAIWAIAHRLCRLLWKILHEGVRYDERGPAVSAKSQRTRTARMIKELRKLGYRIDGGPLPAGTPA

SEQ ID NO: 350897 - protein, 338 aa, unidentified
MGITTLGIDVAKNVFQLHGVDARGRAVLSRRVKRDQLLHTVACLPPCVIGMEACGSAQHWGRAFEQLGHTVKLMHPKYVRPYVKTNKNDSRDAEAICEAVSRPTMRCVSIKTVEQADLQAVHRTRSLFVKHRTAVINQIRGLLAEYGLVIGQSPEKVRPALVRFLDDAASGLTAFARETFSELYAQLTELDSRIERVTHRVERVYQAHPVCRKLAAVPGIGPLTATALVATVGRPQAFHNGRHLAAWLGLVPRQYSSGGKERLGGISKRGSRYVRTLLIHGARAVVQRAERRTDTQGRWLCALKHRKGTNVAAVALANKNARVIWAMLAHDEEYRPPA

SEQ ID NO: 350898 - protein, 343 aa, unidentified
MKYIGLDLHKKSIFATVLGGDGKILSKVNLGSKREDLSYYLNAQGKSDDISVAIEASYNWLYYYRILEDITPNIVVAHPLKTRIIGEAKIKTDKIDSEVLAYMLKADMLPKVYIPTKTAMENKLLLRSRISLVRVRTALKNKIHAIIDRNRDLYTGLENLSDIFSKTGTFILASTKIPCPDYMILTNYLDLISDINKKIADIEKEINKRVTPDKDIEILKTIPGIGIFTAFILKSEIDDISRFISKEKFTSYTGLIPSVHQSGNKSYMGKITKQGNKFIRWALTEAAQVAIRHSGYFRYYYNKTRAGQGANKATIAVARRMAEVAYVLLKEKRPYIEKPIIFS

SEQ ID NO: 350899 - protein, 411 aa, unidentified
MVRNDTVGRDTPVIAGVDTHKDTHYAAVITSTGQQLEAAPFPATPAGYRALTAFITAHGPLARVGVEGTNSYGAGLARHLIAAGIEVVEVLRPSRQVRRMRGKADQIDAYAAARTALSGTGCSTPKNGDGLVEAIRVTVVARSSAIKAGTDTTLQIRDLLVSAPDTLRSQFRDLSGSALINMLARTRGHESDDRLTGLTRATLRTLARRIGMLDAEIAGHDRTLRRLVAEANPALLQAKGIGVICAAQLLIAAGDNPERIKGEGAFAMMCGAAPVPASSGKTIRHRLNRGGNRRANSALYHIAVVRLHSDSRTRAYAARRRAEGRTTKEIIRCLKRAIAREVYHLITNPPQPLDTTELRPLREAADLTLAQAADALKCSISTLSTIERGHSSNRQTITTYRDYLTHHQHAA

SEQ ID NO: 350900 - protein, 381 aa, unidentified
MKNTIVHHEGAASLEAAVKKVKLSVSIIKIGLDVHARLYVAVAQYDCLLPKPVRRLGRSEFVPWVKQLLRVGHTVHVVYEACGFGFGLYRELKAAGAHCYVIAPRKLDEQCTRVKTDPRDATTLWQRLSRYLEGNTRELAVIGVPTEGEEQARHVSRQREQLVCLRQKLEAQGRSLLVNHSLPSPAHWWKNQTWSRLLKLLPGWICLRLEVHRPVLLGLEQQIGVLSAQLEATAPADVPAGVGKLTTVIMTREICSWERFTNRRAISSYTGLCPGEHTSGTKRVPGSVTKHGNPRLRAALVECAWRMVRFQPNYPPVKKRLAILAKGARATGAQRKKAIVAVARHLAVDLWWIHTGRCSAAQRGLKNAETLVVRGEQKAER

SEQ ID NO: 350901 - protein, 387 aa, unidentified
MGAVLIGVDPAKRSNTIEVINTSEKTLATGRFDNSTVGYREMRALARKWPDRVWVIEGATGVGLHLAQRLVSDGERVLDVPAKLSTRVRAMDTGHGRKSDPADAHAVAVVGLRSPGLREVRLDDETVALKLMSERRRDLVRSRTQAMNRLHQILMQLIASGAPKQLTVAQAKAMVASVRPRDAVGKARRQLAVDLIDDVVVFDRKIKAMEVRLSEAVAATGTHLTEIVGIAAVTAATIIGEVGNVSRFATSNHFATYTGTAPIEASSGEIVRHRLSRAGNRRLNSALHIAAMANKRHDPRGKAYYERKLAAQKGHMGALRCLKRRLSDVVFRVLLEDQARANPGGQMGATLTASAVDQIPKANTSDKPQPGFTTEATPTRRPAKAAS

SEQ ID NO: 350902 - protein, 509 aa, unidentified
MLEETQETEEIIQRVAALDVGKAELTCCVRVPGQGSSDRRCQEVRTYQTMTRWLLAMADRLAELGVTRVVMEATSDYWKGVYYLLEAAGFEVWLVNARDVKHLPGRPKTDTLDAVWLCKLAERQMLRPSFVPPRPIRQLREVTRYRADLVAARTAEKQRVEKLLEDAQIKLSVVASDIFGVSGRAMLAALIAGERDPKVLAQLARTRLRAKLGPLAEAFTGFFTDQHAFLLAKMLARVDTLDADLADLDAKLAELIAPFADAVERLDEIPGIGQLAAQLLLAELGVDMTRFPTAGHLVSWAKFAPGVSESAGKRKGRGSTGHGNPYLARVLGEAAVAATKTDTFLGNATGGSPAAAVPSGPSSRSVGPSWSSSGTCCRTRPSGSTTWAPASTTPASTLSGPSATTSASWRPSATRSPSNPPPDPWHHRSTRLTLIGSGRRPDAAARLLTVDFRIRMRSLVRAGSARHRGPLVLGGHERSTSANQPRRSAAVHRPDPGRRNSPVQGSNPT

SEQ ID NO: 350903 - protein, 344 aa, unidentified
MKLTRCGLDIAKQVFQVHGVNEHGVVKARKSLPRGKVLEFFARLPPCLIGIEACGGAHYWARELTKLGHTVKLMAAQFVVAYRKRGKNDANDAEAICEAVGRPNMRFVAVKSEEQQSVLMVHRGRTLAVANRTAQVNQIRGLLSEFGLVVSKGVARLRRGLPGILEDAENGLPALAREVLAGMLEQLHELNARVTRYDDQIRALAQASEPARRLMRIEAIGPQTATALVASIGDPHVFKNGRSFAAWLGITPRQHSSGGQERLGQITRQGDRYLRTLLVHGARAYLRFVDKKTDAKSAWARRLKERRHPNVAAVALAAKHARIVWAILAHGTEYRPANSPAVAA

SEQ ID NO: 350904 - protein, 409 aa, unidentified
MEVIYPRCCGLDVHKREVVACVVTTGSDGMPSKTIRTFGTMTPDILALADWLAAHEVTHIAMESTGVYWKPLWNLLEESFALLLVNARHVKAVPGRKTDVRDCEWLADLLRHGLLTGSFVPDRSQRELRELTRYRTSLVRERTAAANRLQKTLEGANIKLASVATDILGKSGREILAALVAGETEAAQLAQFAQGRLREKIPQLERALVGCIGTHHRFLVAEQVAHVDFLEESIARVNAEIAERVRPDEDAITRLDTIPGVGRAVAEALVAEIGSDLTRFPSAKHLASWAGLCPGNHESAGQRHSGKTRKGSPWLRACLVQAAHAAARTKGTYLAAQYRRLAARRGRAKAAVAVAHSILIIAYHVLTEGTAYRDLGGNYFDERDRQGVERRLVHRLEGLGYTVSLHLAT

SEQ ID NO: 350905 - protein, 355 aa, unidentified
MSSEKYIGLDVHQATISVAVMDSQGKVVMESIVETKACTLLEFFAGLRGSLLVTFEEGTWAAWLYDLLKPHVTEVLVCNPRKIPLLKQGNKSDKIDARKLAERLRLHDLKPVYHGETGVRMLRELARSYLTVVKDLSRVMNRLKALYRSWAIPCAGRDVYYTRHRSQWLEKIPEAGTRRRAEQLYQQLDMLQHLRQQARRELLAESRKHAITAKLRQIPALGPIRSALAVALIQTPHRFRSKRQLWAYSGLGLETRDSGEYHYVHGQVRRRKKQPTIRGLNKDYNHDLKSLFKGAATRASVQPGPFQEFYQRSLGKGIKPTMVRLTLARKIAAITLTLWKKGEDFDIDKLNSQAA

SEQ ID NO: 350906 - protein, 367 aa, unidentified
MKKGSTAAKQRVRNISGQTLTIGLDLGDRNSWYCVLDEAGRIQLEQRVRTNAKALQEVFGAMPRNRIALEIGTHSPWVSRLLSELGHEVIVANARKVRLIGESRKKDDRLDAQTLARLARIDPELLYPVKHRSAQAQADLMMIRGRAGLVRARTGLVNTARGLAKSYGERLRGCNARHLNPEKAEGLSPELQAALEPLLNAIESLSERIVEYNERIENLAQQDYPQVALLKQVKGVGTLIALTYLLTLEDPHRFQKSRDVGCYLGLQPGRRNSGRSEPQLHISKEGDPYLRTLLVQGAQHILGPFGIDCDLRRWGLRLAERGGKSGKKRAIVATARKLAVLLHHLWVSGEAYEPLHNRNRVAVAAAA

SEQ ID NO: 350907 - protein, 367 aa, unidentified
MYIGLDVHKDSIDIAQVEGDRDAKVRFQGTIGGSLADVEKAVRKIRKAHPLAVFHFVYEAGPCGYDIYRHLTRAGYDCMVVAPSMIPKRSGDRIKTDRRDSIMLASLHRAGELTAVHVPREEDEAMRDLVRAREDAVKAERVGKQQLKGFLLRHGVKFAGSGDWKASYMKWLADVKMPNPAQQIVLQDYISTVTDGTERIKRLTTQIRELLPSWEMCPVVNALQAMRGVALIVAATVVAELGDLNRFDNPRELMSYLGLVPSEHSSGKTRRVGGITKAGNGHVRKVLVEAAHSYRLPARISKILLERQTGLPKEVRDIAWKAQLRLCARYRKMVAKGKKIQIIICSIARELCAFMWAIAREIKTVTA

SEQ ID NO: 350908 - protein, 408 aa, unidentified
MRLFVGDDWAEDHHDVEVMDEAGKVLARRRLPEGAAGMAALHALVGGCLDADEDPDDARVLVGIETDRGPWAAALVAAGYLVFPVNPLQSARFRDRLQVSGAKSDAGDAHVLADMVRTDSHQLRPAAGDSPQAAGVKVLARTHKMMIWERTRQVQRLRNQLREYFPAALEAFEDLDAPEALELLGKFPEPARAARLTRAQVSAALKRAGRRNITEKATAILTALRSEQLGQPQVLTLAYAATARSLIAVITTVNEQVKVLQAEVEAHFGRHPDAEVILSQPGLGLILGARVLAEFGDDPRRYRDGKARRNYAATSPLTRASGKKKTVTARFVHNDRLVDALNAQAFSALRTSPGARAFYDQQRANGHGHNDALRRLANRLVGILHGCLKTRTLYNENTAWAHRQQQAA

SEQ ID NO: 350909 - protein, 359 aa, unidentified
MQTQSNKIDFTGQHIYAGIDVHLKSWKVTILTERLPFKTFSQDPRPELLYQYLTRNFPNGTYHSAYEAGFCGYWIHNKLSELGIDSIVVNPADIPTTDKEKVQKADKRDSQKIAKALRNGDLKGFHVLSSKTLEGRCLIRTRATIVRDMTRNKNRIKSFLQFHGIELPQNFKELTHHCSTRFMTWLKSLEIKEPSAKMSIDLFIGEAEHLRAMILGATKSIRELSEKEPYSNQVGLLRGIPGIGPLTAMIILAELETINRFGNFDKLCSFIGLIPSTHSSGEKENIGEMTHRGNSFLRCALVESAWIAARMDPALNISYHNYCKRMEPNKAIIRIARKLLNRIRFVLKNNQPYVCAVVK

SEQ ID NO: 350910 - protein, 343 aa, unidentified
MKLMRIGVDLAKNVFQIHGVDRHEQPVWRQRLSREHWLQTVLEKIEPGCEIGMESCSGAHHWARQLQARGFRVRLIAPQFVKPYVKSNKNDANDAEAICEAMSRPSMRFVAVKTIEQQDIQATHRIRAGLIEQRTAKANQIRGLIAEYGLVAPKELLMLRRAIPCWLEEADNGLTVRFRRLLDGLWGDLRTLDERVGELDSEISAIAASEPTAVRLQQLRGVGPMIATALVAAIGDARQFANGRQLAASLGLTPRQHSSGGKDRLLGISKRGDAYLRTLMIHGARSALRTAKFKDDRLSQWAVRLAERSHPNVAAIALANKTARMAWAMLRNGTDYQPDRAAA

SEQ ID NO: 350911 - protein, 396 aa, unidentified
MKAVSGLDVHKDTVFACILQKGKPPFIKEYSTLTCDIKELRKDLHTRGVCQVAMESTGIYWIPVWKILEEQFKLVLVNPYYIKQVPGRKTDVKDAQWIATLLQKGLLKESFVPNELLSELREYERGYVRLCSHVSRLEQAIERQLIKCNIRITSFTSQIGSATVMKIVQAICEGETQEDKLENLVHGRIRNKHKEKILQSLQGAIRPSDKLLLRQAYQQYQLVNEQQDELVEQMNRICEEHFKKEKEVLCTVPGIKHLSSMQIIAEIGVDMQSFPTDKHLVSWAGLRPRNDESAGKVKSKKITHGNKYLRRVMVQCGWAASRTKGSWFQGKFQQLCVRKSEKKALIAIARKQLMICYHLLETKQNYAAPVKVLTEKQKERKIKYLQKQLDTLLNMG

SEQ ID NO: 350912 - protein, 427 aa, unidentified
MSGKNKPKANVVLVDHRNIVGIDIGKRKHAATAITPQGAVIASVNVFENNKEGVDLLEREVLVPAGGKSKNKPLVALEATGMYWNALHDELTRRGYCCVVLNPIQTNRHGKKRIRKTKTDRVDSETIARTILAGDAQATLVPDEPMWELRLLVRHRWRLIRSQNTILLYAISLVDRVFPELEGVFSKPFLRSVRTLIREVGLTPDVLAANQKKVREVLEKASRKRLTSETIDNLLQRAKTSIGTRQGETVVNNQLRMIVDYLDFMDDQVEQIGRELQQRMKTLNSPIMSLGIGPEIAATILAESVVWSEYRRGAVERFAGPREYAAFCGLDPSVRDSGDSIRGISHISKRGSPLLRWALYMAAIAVYKKHRDFGKIYARHTKQQPKGRRQKGHRYALIAVAHKVARVTWRLMKDNRPFTKNPPKREC

SEQ ID NO: 350913 - protein, 312 aa, unidentified
MTIICGVDVSKAKLDACIEPGGIFARFDNDAAGIAELAAFCRRHAASLLVMEASGGYERRPFLELWQLGVSCALTNPRSVRRYAEAMGFLEKTDRIDASVIARFAMAKNLSPTPLPSPAQQRLKALVTRLRQLTDDLTVQKQRRTNLLDNPEMLASIDEVIALLKRQSRSLEGEIASMIDDDPLWALLAKTWRSIKGVAGRTVGRLHAELPEIGTRSNRAIAKLVGLAPLADDSGKRKGRRSIRGGRAGVRSILFLVAGIAARYDQSLAAFKARLVAAGKEKMVIRIALARKLLVRLNAKARDARATYANAT

SEQ ID NO: 350914 - protein, 411 aa, unidentified
MRVHHNVCCGIDVHKKSVTACLMWGPADKEPEFEIRRFGTMTRDLQKLAEWLKQAGCEAATMESTGSYWKPVWNVLEGQIPKLILANAQHVRALPGEKTDRKDGKRLAELTRHGQVRPSYVPPRAILELRDLTRYRSKLLSAGSSERNRIQKVLEDANIKLGSVLSDVFGLSGQKMLQQLVNTDTIDIANAIQLAHWKLKPKMEAIEQSLEGKLTDHHRFMVKASLEHMRFIEEQLKRLDEEIQRRLQPYQEEYALLQTIPGIKETGAARILAEIGTDMSAFPDGDHLSSWGGVCPGNNESAGKKFQSKIRKGNVHLLSALTQCAWAATKKKDCHFRNKYYRLKSRRGSQRAIVAVDHAMLKCVYVVLTRRKPYEEPKPVSLTEAQKQRKASSLCRQIRALGYDVKIQKTA

SEQ ID NO: 350915 - protein, 337 aa, unidentified
MDYFAGLDISMEETHICVVDREGEVIHASKTVSTAQAIADELAKAPSCRRIVFETGRMGPILFHGLSQLSLPVVCIESRQAYQALKSLATHKTDRNDARGLAHLARTGFFKPVHVKSLSAHALRSLIIARQKLVGQRVTLENQIRGLAVVFGVRLPRALTTAFIDQALKASEGVAGLSVAVRGLIAARTAVMSAVAAIDADMRRMTRASKACLRLMTIPGVGQLTALAFVAAIDDPSRIRRSRDVGAYLGLVPRRYQSGEVDYAGGISKCGDRRVRTLLYEAANVMLTRYKGQLKLKDWAFAIARRSTMRKARVALARRLAIIMHAMLRDGTEFAPA

SEQ ID NO: 350916 - protein, 469 aa, unidentified
MPEGQQVEVEDHEQIVERVAAIDVAKASGMVCTRVPHQAKAGRRTTTVWQVGATTNAILELADQLVGQGIERVVVESTSDYWRPFLYLLEARGLVVWLVNARDVKHLPGRPKTDKLDAVWLCRLNERGMLRPSFVPPAQIRQLRDYTRLRADLTQERSRHKQRLEKLLEDALIKLSTVATDIFGVSGRAMLEALISGQRDPKVLAELARGRLRSKHARLVEALTGQFSDHHAFVARMLLDQVDALGGQIDQLTARIEQTITQIPAAQPTAQGSGPDATLQAGIQPTRSVPSPAAAVDPQTGELLAAPLPVVDRLDEVAGIGRVAAQVIIAEVGLDMGQFPTPGQLVSWARLSPRTAQSGATHRAGITGKGNPYLKAVLGEAATAAAKTDTFLGERYRRLVRRIGKLKALVAVARSILVIVWHLLADPTARFHDLGADYHASRIDKGRKTRNLVHQLEALGHKVTLEPAA

SEQ ID NO: 350917 - protein, 377 aa, unidentified
MDNDSTVYVGLDVHKESITVAYAIEGGDVEVLGKIETTPTAIDRLSKRLRSKGQHVRATYEAGPCGYELYRRLIRQGVDCTVCAPSLIPRKPGERVKTDRRDAIKLARSLRAGDLSTVYVPSVEDEAFRDLARAWASAREDLRQARQRLKSFLLSHGVRYAARADWGPAHRRWLSKYSFESAWRQLAFEEHRRSIDDRVAQCERLEVALREAVIEWSFYPVVLALQAMRGIQFVTAVGIVSELGDLSRFEHPRQLMAWLGITPSEHSSGGTRRQGGITKAGNSYARKLLVEAAWSYRHPARVSKIMQPRHEGIPKEIIDRAWDAQLRLCKKYRKLATRGKDVNVAVVAVARELAGFIWDIGRLAMSLALPRRSAQSI

SEQ ID NO: 350918 - protein, 401 aa, unidentified
MNPVIGLDISKGESHAQAFSERGMPYGKTFKFEHNLEGLASFLRYAQGVESYTGQRPAVVLEATGHYHSPVIQFLDEHQYLYIVINPLISHQAKKMNLRKVKTDVADAYQLGEMFYKEELEPYKKRGQYLMNLRYLTRQHESLTEIYVQVKLQFQAVLDQVFPEYHGVFGDLYSKVSLRFLAQYPTSQSVLAMSEENVTANIQRLVGHVVSNRWSLERAQKLMAAAKRNPFRETVFPSHLISLELFINLLLQYQEHLTKLDKSIETLAEELLEYDLIQSIPGIGTKIAATILAEVGEIDRFDHAKKLVAFAGIDPSVFSSGKFTANRNKITKRGSRRLRTALYQAVRCGLKGSRNKRIRAYYDKKRAEGKLFKVAVIACVNRLIHWIYAILTKKEPFRLTE

SEQ ID NO: 350919 - protein, 351 aa, unidentified
MDIINCGIDLHYKQSHFYFIDETTGKEFYRVIPTNRIQISKMLDDFDDHSIQYAFETGTMARYLYGILSGRSNTARIHVVHPKKFKVIVESKHKNDKIDSKKLAEGLSKDYLPMPVYMKSERCRRLQMLLNLRRSRVKNKVATVMQAKSIVRGLGIQKTGVITKKKGFERLAARVEEKSYDRHIIEKQFASFIADLDAIDEIELEIRDIILSDFSDEYSLLVTIPGIGFITAASLLAKIDTIDRFKNADALSSYLGLVPSEHSSGQKVSHGTITKEGDTETRWLLIQSAWTLIRLKKEDDLRGSALRKKFYRIAMKEKNTPKAIVAVARHLTRIVYGVLKSKTPYSGDIHV

SEQ ID NO: 350920 - protein, 340 aa, unidentified
MTQHKIIGIDLAKNIFFLFEINHKGKNLSRKKLQRSKLLSYIANKEPCTIAMEACSGAHYWAREFSQFGHEVILYAPQHVKTQRRRQKNDYNDAEAIAEVALYKRPHPVPHKSLEQQDIQSLIRMRRLLVTERTRIVNQVRGLISEYGIIMPKGAAAFRKAIPEILENDENQLSCILRELLSHQYERYLYIDEQVKWFDDKLNQTIKQFENAKRLMSIPGFGPLTSQAVAVWLSSGQQFKTGRDASAAMGLVPKQDTSGDKVILLGITKRGNTYIRSLLVHGARAALRRAKFKSDNLSKWMLELQERRGPNRAAVALANKLMRIAWAVITKNEEYQPKQS

SEQ ID NO: 350921 - protein, 384 aa, unidentified
MMLNLTDTPAATEYATIYVAIELSKAKWKLGVLLPGSQKLSRHTINGGDIDALREYLARWRAKAAAAGKPVRIISCYEAGYDGHWLHRWLSNEGVINYEIDPASVQVNRRARRAKTDNIDIDQLMGTLLRYVRGEPRVCSMVRVPTPEDEDRRRVSRERKRLQKERTQHTNRIGGLLHGQGIRDAMPLKRHFIATLDQMRTGDGRPLPPKLKAEIVREHERLCLVNKQLSELERMSRAEVKAAAPGSAGEKIKQLAELRGIGLVAGRDLVNEVFYRTFDNRRQVGSFIGMVNSPYQSGARNCDQGISKAGNKRARALSIQLAWLWLKHQPESELSRWFQARVGELKGRIRRIHIVALARKLMIALWKYLTTGLVPAGAVFGRGI

SEQ ID NO: 350922 - protein, 428 aa, unidentified
MDGEDHIRLEEFRQLKKQIRGSEEHLIVGIDVAKDKHNAFFGTARGKTLLKRLVFENTIEGFKRLLIQEEALKVQHGLEKTVFGLEPTANYHKPLGEFLIKCERMVVLVSGVAVKRNRELLDGRWDKHDTKDSANVADLISQGKCLFYEYPPMPLRELRSLVSLKRRLKKQEHGIKARIRNHLLAQYFPELDRYYGQSESDGLAVVRWCGNPSVITGLEYAQFAQLVAPRKRSLAQQKRLQVVWKLASDSIGCEAGAALEFEAKVMVEELQRIRELIRATEQKIEDICLQFPEYHYLLTIPGFGPDVSSKVLAAIGNPFRFTAGAQVLKMAGLDLSADRSGDRSDDATPVLSKKGKADLRYALYQAALIASLRDRHFIFYYTHTLRGREREKGIKTKMRVKLAAKLLIIAWTLMKKKEPFNPEYLTTE

SEQ ID NO: 350923 - protein, 411 aa, unidentified
MDLMYARCAGLDVHKATVVACVRMPGPRPDARHAETQTFATTLRGLEALAAWLTAHGVTHVAMESTGVYWRPVFAVLEGTVQVQLVNARHVKMLPGRKTDVRDCEWLAQLLECGLLRGSFIPPAAVRDLRDLTRLRKALIRERGHHVNRIAKTLELANIKLGSVVTDIMGKTGRAILQALSAGLDDPAQLAACAQGLLRKKQAALREAVEGRLTPHYAFLLQQHLALIDTLDAHITTLDARIEAAMAPFAEAAALMQTMPGVATRAAEAILAETGMDMSPFPTAAHFASWARLCPGNHESAGKRRPTTTGKGATWLRATLQEAAWAAVRTKKSYYRALYYRLKARGGPKKAIVAVQHAMLVALWHMLKRRVPHQDLGADYFAQRNTERTLRHHVRRLEQLGYQVLLAKEAA

SEQ ID NO: 350924 - protein, 480 aa, unidentified
MADNTKARTSQTQRLTRKQRKELGRRIWSEHPGLEVVHRDAAGIDIGSQEHYVAVGPDRDAEPVRTFGCFTEDLHRLGRWLRECGVRTVVMQSTGVYWIPVYDVLEQHGFDVWLVNAQDTRNLPGRKSDVQESQWLLKLHTYGLLRKSFRPEANIRALRTCWRERAEYVQQAGACIQRIQKALTEMNVQLTNVLSDLSGVTGMRILRAIVAGERDGRRLAEFRDARVQASQETLAKSLEGTWRPEQLAILQRQLADWDHVRQQIEACDVDLAAMMKQLPDAEIDQEPPATPPSKSTRRRQKKDRSSRNEPSFDLSAELKRVTGVDLTRIDGVKEMTIQTIITEAGLDMSKWATENHFVSWIGLSPRNDVSGGKVLKKKTRKVVSRLATALRLAATTLRASDSYLGEQFRRLRTRLGAPKAITAMGAKLARLVYRMLKYGQEYVDKGSAQYQAKYHEQQIRYLKKKAARHGFTLVSMPDPT

SEQ ID NO: 350925 - protein, 406 aa, unidentified
MAVIIGIDPHKGSHTAVAVGAAEQPLGKIRIRGCPAQAEQLVAWAAAWPERTWAVEGAPGLGRLLGQQLVAAGERVLDVQPKLAARVRLLHTGNTGKSDPNDALSVAVAALRSTANREVIADDHAVVLKVWAKRHRDLSRACNQVACRLHAVLCELVPGGVPEEITAGRAEKVLAQIRPAGAAGTARCELAAGLLADMRHLDGQRREVKKKLAAAVKATGTTVTSVFGAGPVIAATIIGDVVTVARFLTRGHFAAYNGTAPVEVSSGKKKTCRLSLRGNRRLNHAIHMAAITQISHAHSDGRAYYQRKITEGKTHKEALRCLKRRISDAIYARLRADARQATAAASKDPGGQPGNNSDSSAAGSHPEHRLFGQATPGPDTSLRATAALTPAMPSAGPPSNKARRAT

SEQ ID NO: 350926 - protein, 346 aa, unidentified
MMVIGCDYHPSWQQICWLDTATGETEERKLEHGSGEAEKFYRGLPGHALIEMESTGNCQWFVEMATTAGHNVWIGDAAQIRASEVRQQKHDRRDAALILKLLLEGRFPRIWTPSGAEKDLRQLLIHRYKLVRIRAQVKTELQHLAMNQGVTKKRKLWSKAGEKVLRELPLKPWASRRREDLFKVREMLNGQIVLLDQAVVEAAEKNEKARLLMTQPGVGPITSLAFVLTMGDVNRFQRGKQVASYLGLIPREYSSGGHQRFGSISKQGNRFLRMLLVEAAQGAVRCDPQMRSEYLHRCHKKAKGVAKVAAARKLAVRLYWMLRTNTGYPEVVRVESSSRVPLVSAS

SEQ ID NO: 350927 - protein, 350 aa, unidentified
MRYAQINSKYVCGIDLHAREMYACVMNEKGEILFHRNMRTDFDQFKKKMQPFLPHLVVGVESTYMYYWLADACRKSGIPFYLGHAYYMKTIHGGKTKTDRIDCRKIADLMRTNYYPLAYAYPKEMRGTRDLLRRRHRHSRLRAECYRHIQSLFHQQGLSVNPKDIKNVKIRHEVVQSHLDQNILSNAQADLDMIDFLDPVIKQLEQQIRAQAKCHDRASLNILMSVPGIGDIFSLIILYELHDIDRFESHQMFCSYARLVKCERSSAGKHTKGGNQKIGNPYLKWAIADIIIHASHKSQLIGEFYQKLQSRFGKRKAKSIISHKFGIAIYYMLKNKQVFDEQRFVQTNMK

SEQ ID NO: 350928 - protein, 366 aa, unidentified
MDAIYIGVDFHARQQTTCYLKTETGELVISELKHQDKEQVRAFYQQFPSPVIVGLEASGYSPWFEALLEQLGCEVWLGHATEIRRRARWRQKNDRRDAELIWDLMVHDEFPRLHRPAATSREVLRMLRYRQKLIKLRTMAKNSLQAIALQAGLAKGKQLFTAAGQEEFKSAALSPVLQWQREHWFALLRPLNQQLLETMVWFKAQSKDDLRIQRLRTHPGIGLLTALCLLHTLQPVERFRNPRKVAAYAGFDPVERSSAERQHFLGISKAGSRLLRYLLVEAVQTAVRYDEDLKRFYKRVAERRGRPKAKVAAARKLLIRAYIMMRDEIDYAEFRHRAVAVRLARGGQGPINVPAVLIGQPASPGA

SEQ ID NO: 350929 - protein, 308 aa, unidentified
MFPVGIDVSKNPLDRCMLYDGIKGRIKTRNIQNNRHSVENILRWLRLQHCSPEDVHVVMEATGVYHEQLATELHDAGFRVSLANPHRSREFARGMGIMTKTDKVDAYMLACYAFLKKPHRWEPPAPEIRYLGALLRRRDVLLGDALREENRLEKYLSTDTPADIISSCRRMAQLLREEISNIERQIKAHIKASPALRRDYTLLASIKSVGPQLGMHMLIVLRSHNFVSAEQAAAFLGVVPIEKRSGTSVRRRPRMSKIGPPQLRAKLYMSALCGKIYNKRMRNIYDEMCLRGKPKMVAIGALMRKLVH

SEQ ID NO: 350930 - protein, 331 aa, unidentified
MFPVGIDVSKNTLDLCMLYDGIKGRIKTRNIQNNRHSVENILRWLRLQHCGPEDVHVVMEATGVYHELLATELHDAGFRVSLANPHRSREFARGMGIMTKTDKVDAYMLACYAFLKKPHRWEPPAPEIRYLGALLRRRDVLLGDALREENRLEKHLSTDTPADIISSCRRMAQLLREEVSNIERQIKAHIKASPALRRDYTLLTSIKSVGPQLGMHMLVVLRSHNFVSAEQAAAFLGVVPIEKRSGTSVRSRPRMSKIGPPQLRAKLYMSALCGKIYNKGMRNIYDEMCLRGKPKMVAIGALMRKLVHWCYGVLKTGTVFNDEGLKQVLST

SEQ ID NO: 350931 - protein, 345 aa, unidentified
MNKSIPTSTTTVFCGIDVSAASLSVALIVPDHAVCQREFPNSASGYKALLGWLAKFNAPVRVSLEATGIYSLDLALALDAAASIEVAVLNPKLVNRFAQTLRRSKTDAADAVALAEYSQRMPFTAWKRPGVNHLRLRTIGRYIESLVVDLAEVKNRLHTAASTSTTPRAVLVDLKQAQAALLRRLAKMRREAMKLIQADELLRERFALLVSIPGIAEVSARQILSELVLLPPGMTVRQWVAYSGLDPVHQVSGNSVHKPSRISRAGNRHLRRALYMPTLSAVRNDPHLRAFYQALRQRHKTGLQALMAVARKLLHAIYGIFKSGKTYDGRRLFPQIQLAVESIAG

SEQ ID NO: 350932 - protein, 317 aa, unidentified
MIVQDQKSYIGIDVSKNILDVYILPTSKYMQFKNDVKGIKKLMTKVKLLSPAAVVMEATGGYERKVASSLTQDKIPVSIVNPRQIRAFAKALGKLAKTDQIDAKTIALFAQNIKPNSYGSPSEEQQNLSQNTARRRQLIDMITMEKNRLHQVASHDLKKSIKRILKALEKELDHINEKIEKEIQHNSQLIRKKDLLESIKGVGSVISATIIADLPELGSVSAKQISALVGVAPYNCDSGTLQGKRAIWGGRMPVRNALYMATLVAMRFNARIKAFYQKLCNAGKLKKVAMVACMRKLLIIMNTMIKNNEPWRSVVLS

SEQ ID NO: 350933 - protein, 346 aa, unidentified
MEVTYYTGIDVSLRSVSICVVDDKGKVCLEAKVAAEIDAIVDRLRQFSSDVKSVGFEAGTLTQYLTYGLQAAGFEVICLEARQVSVTLAAMRNKTDRNDARGLAQILRTGWYSRVHVKSLHSHQVRALLASRKAILKKCVDLENELRGLLKVFGIRLPSRVGHGSFDAELRDTVSGDEMLACALVPLLDARTVLYKTYLKLDNAVKGLVRVDPVCRRLMSIPGMGPVTALTFKAAVDDPNRFKSSRTVAAHFGLTPRRFQSGELDNPGHISRAGDADVRSALYVAAHSLLTRNAQWSTLKAWGVGLAKIRGHRRAVVAVARKLAVILHRMWIDGSEFRWGPVVASA

SEQ ID NO: 350934 - protein, 341 aa, unidentified
MLKVDSAGIDVSARSLMVLVRRDGQARPARSFLNTPEGHRLICRYLAKGGHRVRVCLESTGLYGLDLALVLSVCDGIEVMVANPRAVRRFAQALGHRSKNDQIDAALLEEFAARMPFEPWQRPGQAALELRAIARRIKALTVACTAEKNRLHAATSTHTTPRIVRKDLQQSIRHHQQSILRLRNEAQRIVALDARLKQQFDLLVTVPGVASTSAILILGEIVVLSEDLDARQWVAHCGLDPRHEISGTSVKHPGHISKAGNKYLRSALYMPALVARRRQPNLKAFALHLVSKGKKPIQALVAVMRKLLVAIHHMLKRSQPFDGSKLYSLPTQHTPPTTEAA

SEQ ID NO: 350935 - protein, 348 aa, unidentified
MNNMHYVGLDIHKKTISYCVRQSDGTILRENTIAATRPALEIWMRHLPQPWTAGMEATMFTGWIYDYLGESGATVKVAHSAMLKAIAAGKKKNDQIDARKIADLLRCDYFPECHMAPREIRDRRRVLRYRNLLVRQAVQMKNKVSGLLMEVGVQYNQQKVHGKKYFAELLHEQRKEMPPSLPELLQLSRSTIESLTGMERQLMRALEQDDLLAARVERLATIPGVGRVLSLTWALEIGEISRFSSVKDAVSYCGLCGAEKSSGGKAERTSISKQRNKHLQSMLIEAAKLAPRWNAELALVYEREKQKGNSNQATLAVARKLVAYLMAVDRRKQGFTKTAPKVGEKQAA

SEQ ID NO: 350936 - protein, 407 aa, unidentified
MVDTTAIDLFLGLDLGKEFHHAHGRTEDGRTVHDKRLPNTEPRLLELFTRLVAKFGTVLVIVDQVANIGALPLTVARAAGCRVAYLPGLSMRRAADLHPGEAKTDARDAFVIAETARTMPHTLRAVDRDDEVLAELTMLTGYDNDLASEVNRTTNRLRGLLSQIHPSLERVLGPRLAYPYIQALLQRHGSPARLKKLGRARCEALLKVHGSRKAHHLTTEIFDALAEQTLVVPGTEASALIVPGLAAQLAAAHTQRRQAEQEIAALLEALPLFHLLTSLPGLGVRTTAAVIVAIGDGTGFPSSGHLASYAGLAPATKSSGTSIRGEHAPHRGNRLLKRALFQAAFAAIGCKSDPSSRIYYDRQRARGKTHTQAILRLARQRVNVIHAMIRTGALYEARTPGDVGLAA

SEQ ID NO: 350937 - protein, 338 aa, unidentified
MTDFRGKTSIFSHPVYLFLRKFSLQDSRGGSLLRKKFTRTKLMQFLATCPPSVVVMEACAGAHFMARCISDFGHETKLISPQFVRPFVKSNKNDFVDAEAICEAASRPSMRFVQPRTETQQAMRALHRVRESLIRDKVKTTNQIHGFLLEFGISLPIGDAVIKRLSLVLAEHEIPEYLSRLLVRLHTHYFYLVEQIAELESELSQSINADDTAQRIMTIPGVGPITASLLSSQLGDGKQFSCSRDFAASTGLVPRQYSTGGKSTLLGISKRGDKNLRRLLVQCARSFIMRLERKHGKLAEWVREQLNKKHSNVVTCALANKLARIAWAITTQKKEYQA

SEQ ID NO: 350938 - protein, 318 aa, unidentified
MQDSVVTWIGVDVAKDSLDVAWGSAHEPQRSSVANSRSGLTSLVNQLPPPAGARVVVEATGGYERALVTALVEAGYCVAVVNPRHVRDFAKALGILAKTDRIDAVVLARFGHQVQPRVLEEDPAERAELVQLVARRRQLIDLRTMESNRLQQTSVRAAQKSIQHVLKLLGKEVDQLEAEIARLLQSDDDWRTKIELLSTTPGVAKVTSATLVAEVPELGRLNRQAIAALVGLAPFNNDSGRHRGSRRVAGGRASVRHVLYMAALSARRCNPVIRAFSERLAAQGKKPKVIITACMRKLLVILNTILKNNTPWKNLHAC

SEQ ID NO: 350939 - protein, 430 aa, unidentified
MKQFELLHSLFVGIDVSMKENVVHAMPFSPEDHPGHAHLRFSAPNTPAGSAEIVEKVGDFLKFYPDVTQVVIALEATSVYSFHLATFLSVAQFNGHIPAIVYSVNPKEIHAYKKTFTDVGKDDYVDAMVIADYARSNKIRSRPWKGPELLGLRILTRLRFHIARLIGILKNSTGNSIYLECSGFMTGENPFCNVWTATCQQLLTTFQGPDEILNLSDEELLNFITEKGHGRFSHPLDVVKKVKKAARNSYRLDKRVYEPLTSGLSVSFFIIHSLEAAIKKLDKSIETIAKSFSSDSYQILLSIDGVGPVIAGGLLAEIGDIKRFETDDDLAKYMGLTWRGKQSGQSESPVKHMSKAGDVYLRYYVLLATGQIINYSAKYREAYERIRSRKTLFPYRAALNLVARKIVRLIFTLLDRHQLYSDNKVMVTLE

SEQ ID NO: 350940 - protein, 391 aa, unidentified
MIYAGIDVAKDKHDCFITNSDGEVLFKAFTISNNRDGFDEFYHKIESVTDDLTKVKVGLEATGHYSYNILGYLLDKGLTTFVINPLHTNLFRKSLSLRKTKTDKVDAHTIAKMLMSDVNLKSYSDTSYHNEELKSLTRYRFVKVKERSKLKISISRLVTILFPELENLVPTLHMASVYALLSEFPSASSIASSHLTHLTKVLSTASKGRYNKDTAILFREAARTSIGSYMPAKSLELKHTLRLMQELDSEIDDIELEIKSIMDEINSPILSIPGISYRMGAMIIAEVGDFSRFDSPDKILAYAGMSPSTYQSGQLESSYSHMEKRGSRYLRYALFNATKFVCNWDPTFAAYLAKKRSEGKHYSVAISHATKKLVRVIYQLEKSGELYRKAA

SEQ ID NO: 350941 - protein, 400 aa, unidentified
MTAVGIDVSKGKSTVALLSDTGEVLKKPYDAPHTRCALSELAKLIKECKDDVCVVMEAIGNYHKPIANFLCEQGLSVSVVNPKLIRDFGDNTLCKPKTDKKDAIKICRYALTYRVQLPNYSPENDERSALKILNRQYSLAEKTLTMHKNLLISYLELVFPEINKMFTSHIRNSDGHEKWIDFLVRFPHADMVAKVSLNEFRLKYKNWCKTAKYRFCESKAEELHQFARECVCAVQNDEKMRFLVKEQAKMVNQLLEHMQNIRTKMTAIAQTLPEYDTVIEMYGLGSTLAVQMMAEVGDVRRFQNRRAVTAYFGYDSESDQSGTHESKSNPMTKKGSAYLRRTLFLVMVAHMQNQPDNAVYQFLDKKRSEGKNYYSYMAAGSAKFLRIYYAKVKKVMEQIT

SEQ ID NO: 350942 - protein, 353 aa, unidentified
MNSLAHLREVVDVVIGVDTHVHTHSAAVVDAATGGVLDEITVEATAEGYAELVEFANNHATLRAWAIEGTSGHGAGLSRHLLESSEIVIEVDRPKRAARRNGAKSDPLDAIRAAREAMARPRVGSPRGGGDRQALSVLLAARRSAINASTEAQLQVFSLVIAAPEPIRARFRGQKLAAMLNTAAKLRVHPKWDVETTSTVVALRTLARRAHTMLQEARELEKAILAIIRSWRPDLLEEFGVGPIVAATVLCAWSHPGRIHSEAAFAMLAGVAPIPANSGQVTTRHRLNRYGDRHLNQALHTVVRVRIQYQAATRDYVARRTAEGKTSREIKRCLARYVARDLYRLLENGAAAA

SEQ ID NO: 350943 - protein, 355 aa, unidentified
MTFKIREDSVAASVIGIDIGKEVFHLVGFSADGRLVLRQKIKRLALEATFKKLPPCIIGMEACLSAHFVSRTLRGMGFEPRIIPAIYVKPFNKGQKNDYNDAEAIAEAALRPNLRTVSEKSQDQLDLQALHRVRSRLVSRRTATINQIRAFLIEQGITIRKGLRAVQNSLLTLLDERRDEISPRMRHIILDLHDDWMRLDARIEAISGEIAEIGQSEAHCRALRTIPGVGPVISTALVAAVGQGEAFDHGRDMAAWVGLVPRQYSTGGRTTLGRISKRGSRYLRTLLIQAAKIILMRPKRWPELSFGAWLAEADQRMHRNKLAVALANKLVRIAWAVLRYGRGFDAPRDTVAEAI

SEQ ID NO: 350944 - protein, 387 aa, unidentified
MPQPNDLSRSLVALDQNSTIIAVVEMSQSSWLVGGILPGIERQPRKKLEPNPERLLALLHRWRDESVRAGRTITRIAVAFEAGRDGFWLARWLEARGVEAHVIHPSSVAVSREHRRAKTDRLDTELLKRGFLGWLRGERGHCSMVRVPTIAEEDAKRPNRERECLVKERTRLVNRMKGTLARLGIRNFRPTLRNAAEHLAALSTPEGSPLPPNVAAELERDIARLRLVIGQIKQIEEARRQRLEEQPERGPHAMVRLLARVVGIGIETADMLVNEVLSRPLRDRRAVARYAGLTGAPDESGAKRREQGLAKAGNARVRRGMIQLAWRFLRFQKNSALAQWYQARTADHRGATRKTMIVALARKLLIALWRFVTIGEPLDGVTLRPAS

SEQ ID NO: 350945 - protein, 394 aa, unidentified
MATIGIDVGKRQHIAAIQYDGEREARRAVLHFGADRAGLATLSAWIARQGGISRAVLESSGHYHLNLAAALQRQGLPVAVVNPLESKYFGKRRLQRTKSDPADARTLATLAMVDEPQVRDVLAGAELREAARFAMGLVDQLGRVDQKICRLVEIGFPELEQAYDDPTCVSALAVLRTAPTAQAAARKHTATLAQVARPGGGRRIGPNKAAQISALAHDTIAAPELAAQIGFQMRLLIAQHDMLESQIAEAEAHLASLLDGELVRRLRTIPGVGPAIVATLIAEIGDIARFSEFDKLVAFVGVHPAERSSGEKGKNPETSWRMSKAGNAYLRTALYRMAIVGITHNPLIRAHYARKRAQGKSKMNAVGHCMKKALAIVWGVWRSGTDFAAPPSHP

SEQ ID NO: 350946 - protein, 362 aa, unidentified
MNRKQWRELARKIQADDVSLEVVHPDAAGIDIGNETHYVAVPPKRDTEPVRRFGCTTGELRSMGGWLKQCGIRTVAMQSTGVYWIPVYDILEEIGLEVYLVNARDTRNLPGKKTDVQESQWLMKLHTYGLLRNSFRPTQEIRMMRNYWRQRNDLVQSAGRHIQRMQKVLTQMNVQLANVISDLSGVTGQAIIKAILDGARDPWELASLCHPRIKASEEEVASSLQGNWQNDLLFVLKQEQDGYEFCQKQMAECDARLEEYLKEREDRSGGASLPEEKRKGRLKKKKGNAPTFNLREALFRMSGTDLTQIDGVDVMTATTILSEAGPDMSKWATEDHFVSWLRLCPDNRISGGRSDRQRTSTD

SEQ ID NO: 350947 - protein, 430 aa, unidentified
MTDNKFNRIDHFRQIKKEIRGNSDFLIVGIDIAKDKHYAFFGDANGHTILKKLPFENNQNGFEKLITHTEEKKAKIPFEKVVFGLEPTADYHKSLGEFLIKKGYPLVFVGAAATVKNRELLDGRWDKNDMKDAANIADLISQGKCQYYDHASEQIRNLRSLLSLKRKIKKVEHSTSMRIRNHLVAQFFPELDSYFGSYSEGCLSIIKHCFDPSDIAQMPFDSFVSLVTSRQPTRLQWGKLKSIWEMAPSSIGCSMTTGVDFESSMLVDSLRKTRIDIVAVEREIKRICLTLPEYEYILSIPGFGDTISAITLAAIGDHTRFDNTRQLLKMAGLDLSSNRSGKFSDTQPAKISKKGKSELRYGLYQAAMVASTRNLDFMAYFTNLIKDRSKEKGIKTRMRVKLSAKLLIIAWTLMKKKTVFNPVFIKSKQV

SEQ ID NO: 350948 - protein, 407 aa, unidentified
MDSLKTVFGIDVSSRKSNVCIMVNGQKVNDYAISNDMVGFNQLLGDLKQVTNPQIIFEATGVYSRRLQAFLDMHELRYVMMNPLEAKRKTKDDLHQNKTDKLDAMYLAKMQSEHPQRLAYVQSEEYQELMANNRIYEQASHDLITNKNRLHKAIQLTFPEIEHLMANPRGKNYWSIVLKFPHPNIVLETKEADIIDFLKSLSGIGEKRANDLAQRLIRLAKLACPAVKKSSAHIRGLEMAINNILSAEETCQTALKEMAKLAPKRDLEILKSIPGIAENTALRIISELGDIRRFNNPNQLNAFIGVDPQVYESGNLTAHLSISKRGTAIGRKVLYLAINQIQSAKKAGNPCHIADYYEKRKRSSETASHKKAAIASIHKLLRTIFALITNDQLYSYDIAKHNQRLLS

SEQ ID NO: 350949 - protein, 387 aa, unidentified
MVMDAVDQPAAPAPRRPWGVAGIDPHKRTFTVAVLDERGGLHGVVSFDTSDQGLAAALAWLDATEFELDRVGVEGSAWLGSQVATFLAAAGYDVREVQASRTAERRRRRRRAKTDAEDAQAIARETLAHPDLPPAGKQHTPDPDWDELVALRNQRRSLTAQRRRLLNEAESVLVGLPLVVRAALPATSQVRPRLRALARGAADQLELTGADRVHLAWLAASTADIARLDQRIGRLDQRIPAVLARHCCTLTEEVGIAAVGAMELLVEVGDPTRFTTEARFARWCGAAPVAVSSGEGDGEPERHRLDLGGNRRVNSVLHTMHITQARCYQPAKDYLSGKRAEHKTAREARRAHKRLLANVVIRRMWADHQRRRAHTLNVSNQTTPKAA

SEQ ID NO: 350950 - protein, 351 aa, unidentified
MIVLGADTHKRSHTVAAVAAATGELLGEQTVPVGQRGFGALLRWARGLEGERVWVLEDCRHVSGSLERFLIERGERVLRIPTHLTATARRSARQRGKSDPIDALNVARAALQEGLECFPAAHLDGPELDLRLLVDHRERLVRHRVELNSTLLWHLHDLWPELQLPGGALFSKKWSTRIARRLARAEQTMRVRIARDELRRLRELTQAISRLEREISELVDQLAPQLVSQPGFGPLTAAKLVGEIAGAQRFATSAKLARAAGVAPIPASSGNTRRQRLDRGGNRQINAALHRVIVTRARCHAQTRDYIARRRSEGKSTREAIRCLKRYLARHVWRLLQPPHPAQGTLSPSIS

SEQ ID NO: 350951 - protein, 434 aa, unidentified
MTLINFVAANQKYYAFNLLSVFIMVFWSVQYLLQHLLVQTQLSAQLLQPLILILQLPQTPQFRHARPGKFFLPVNGMDYLLPLRLTVRNVLTRRITMNIVFLGIDLAKNVFHLCGLNQAGKPVYTKRTGRKELLQTLANIPACLIGIEASTGAFYWQREFEKLGHKVKVISPQYVKPFVRGQKNDGNDAQAIAVALMQPTMQFVPPKSPEQQDIQALHRARRRIVNHRTATVCQIRGLLLDRGIPIGSAVSRARRAIPLIPEDAENGLSSRMRRTIAELYDLFNDLGRRIHFFDKEIETVFRQSEACQRIAKVKGIGPETATAVVAAIGKGTEFKNGRHFAAWQGLVPRQHSSGDRQVLMNMTKKGDKHLRTLFIHGARAVVRVATNNNDGHMNQWVNQLKERRGFNKTTVAVANKNARIIWSMLRNETGYQVV

SEQ ID NO: 350952 - protein, 314 aa, unidentified
MEQQAEETFFGIDVSKTHLDLARWGQQEVRRYENNATGIAALVETLLAETPVTLIVAEASGGFEQAMVTELAAASLPIVVVNPTRVRNFARAKGQLAKSDQIDARGMADFAQAIRPEVRPVGADDQQFIKALVTRRRQLVDMQTAEKNRRSSINPELLPRLEKHLAWLEAELAEIEQELNDWIDKNARWRDTRNRLESVPGVGSVTSFTLLAELPELGSLCRQKIAALVGLAPFNRDSGHFRGRRHIFGGRADVRSVLYMAALSGIRYNPVLKAFYDRLVAKGKLFKVAITACMRKLLTILNAIVRDGSTWQVT

SEQ ID NO: 350953 - protein, 346 aa, unidentified
MASYDGRQVVGIDLHRRRTVIVRMTGDGRKLETSRITNSPQALRREIAKAGQAPQVVVEAAYGWYWASDVLQDAGAEVHLAHPLGVKAFTYRRVKNDERDAADLADLLRMGRLPEAWIAPPEIRELREVTRYRHKLVKTRTSLKDQVHGVLAKLGTAVPCTDLFGGFGSAWLDSLDLPQPYAGKVDSLRQLMAALSGEITLMEQVTGDLLAGHEGYHAIQDLPGIGPVLAAVIVAEIGDIRRFPGPGQLASWAGLTPRHRESDVKVTRGHVTKQGSRTLRWAVTEAIQRQPAGTRPRQAMDSVIARRGKEAKNIAKVAAARELLCDVFYTMRDGRVRRAPRPGQAA

SEQ ID NO: 350954 - protein, 357 aa, unidentified
MEKRLKQSLGIDVSKLNLSLSLGSLNEKLVKKFEYHPDVANDLEGYKVLLRWLRTSVDPEVELLVVMEATGVYHQGIAHYLYELGYRVCVMQSGRVKRYAQSLDQRSKTDALDSRMLSMLGLERNIRLWHPPSEELQELKGLSRERSSLLNDRTVETNRQGAIASSVHSNARALKRHKARLKLLNTQIAAVEQEMRSLIGDNEELKRKLEYLTSIPGVSFISAATVVGETLGFESIVNGKQLASYAGYDVVLRESGNFKGKTRISKKGNSHIRAVLHMPSMTCVRCNPTLKQFYNRLKPNKAKPLVALVAVQRKLLILMYTLWKNEENYDAEFEIKKQQKHEALAARDNSLINQSVS

SEQ ID NO: 350955 - protein, 330 aa, unidentified
MHKNLFAGCDISKHHIDACLLRVDGRRHRSRFKNEPSGHEKLIQWLCRGGIVRVVIEATGHYSLDLALALERTAGIELMVANPRAVKTFASAQMRRSKTDRLDAEVICDFAQRMQFVPWQPPDEAVLKLRGISRRMQALTTERTRELTRLEDAHATQTTSGIIINDIEVNLRHLERRLNEMLRQALKIVRSHSRLETAFNRLTSVRGIAEKSAIMILPEVLILPAEMSIRQWVAQAGLDPRRHSSGSSIEKNERISKVGNVRLRRALYMPALVAIRWEPNVSAFYEHLIAKGKKPIVAVVAVMRKLLHAIYGMLKHDQDFDGSKFYQIPA

SEQ ID NO: 350956 - protein, 457 aa, unidentified
MRRDKKSQPAVWEGLKVVHPNAAGLDIALSEIWAAVPPERTAEPVRMFGTYTPDLAALADWLRACGVDTVAMEATGVYWIPVYELLEHRGFQVQVVNAQHLKNVPGRKSDIQDCQWIQGLHSIGLLHASFRPEGEIVALRAYLRHRGSLIEHRSAHIQHMQKALQQMNVQLTQVLTNITGVTGMAIIRAIVAGERNCHVLAALRDPKVRKSEAEIAKALTGNYRAEHVFALKQALALYDFYTEQITECDREIERQFSNIKPTLSPDDLPPQPPSSKPASHMKNKPDYDARSLLYQLTGVDLCEISGLNESTVQTIISEVGTDMSRFPSEKHFCSWLGLAPHNDISGGKVLRSHTLKTTNRAGQAFRMAAYSIGRNPNTAFGAFYRRMRSRLGAKQAIVATAHKIARAFYHMLKYRTPYHDLGGEEYERRARERELRNLTRRAAKLGMTLAPSTAAAS

SEQ ID NO: 350957 - protein, 354 aa, unidentified
MYYCGIDYHKKYSVVSIIDSTGQTVDERRIGHQAPNLFRELFSGLDQPVKVVFENSLNWSWLYEILEQIENVESITLANPYKVKLISEAQIKTDKIDAGKLALLLRLDVIPACHVPSRRMRERKEVLRQRIFWVRERTKIRSRIHKIIGRQHNLNMPQVTDLFGRKGRAALNKVFLPSPDDMLLKQNLMMHDTINALVKEAEAQIKSDGNDDPAVTFLQSIPGVGLIIGNVMACEIDGIERFRTNRHFLAYCGLVPSTHSSGGKTHHGRMLTGCNKWLKWAFIEAAWVAVGCSPYFGTLYRHHRGRGKKANTAICITAHRMAEIAYRLLNEKRNYKEQIYSGRSGIEGLRASAA

SEQ ID NO: 350958 - protein, 343 aa, unidentified
MGEVSTVGLDIAKSVFQVHGVDADGAVVMRKRIGRAKLLEFFAALPPCVVGIEACPSAHHWSRKLRVLGHTVRLMPPSYVKAYLKRSKNDANDAAAICEAVTRPSMRFVPIKTQEQQTGLMLHRTRQLLVRQRTMLSNAIRGHMAELGIISAKGRNGTAELLQIVGDVADDRIPPVARFCLDLLARQYLTLNAEVYAVDKRIHAWHRSCEESRRLEEIPGIGPIVATALVAEIGDWRAFRSGRNLAAWIGLVPKQHSTGGKERLGSITKQGNRYLRWLLVTGAMAVIRYARAHGTKRPWLTRIMDRRPAKVAAVALANKIARMAWAIMVRAERYKEPKLLLAA

SEQ ID NO: 350959 - protein, 346 aa, unidentified
MMIIGCDFHPSWQQIAWLDTETGEIGERKLVHADGDAERFYRQLAGPALIGMEATGNSHWLVDLLSELDHELWVGDAAQIRACYVRQQKTDKRDAAHILKLLVEGRFPRIWMPSSEVRDLRQLLLHRYKLVIIRARVKNELQHLCLNKGVQRQRKLWSKAGQKVLRELPLKLWAGRRRDDLLGLMAMLDQQIDPLDEAVKAEAQRDKMALLLQTQPGVGPITALAYVLTMGDVGRFPRGKQVASYLGLIPREHSSGGRQHLGAITKQGNRMLRMLLVEAAQTAVRLDPQLRKEYLHRCHQKPKAVAKVAAARKLAVRLYWMLRTQKPYPEVVRIESSPRVGLVGEN

SEQ ID NO: 350960 - protein, 377 aa, unidentified
MSNYSHYKVGCDAHKHYSLFSVLDDRGHLIQRMRVNHEPGAIRAFLSQFPPGTPVALETVGNWYWIVDEIEEAGCLPLLAHAAKAKSMMGHVHKTDKLDAAGLATLLHLGTLPAVWIPPADLRDERELPRTRMAFSKVRTMLKNRIHSTLAKYALSLDTDSDIFSAKWRPQLSAVLLQLPGETRRCVDQELELLDLLQAHIQRLEVRILQRVELTPTIQFLMSIPGPAEILSIVIDRELGSIDRFPHPKHLASYSGLVPKVQASGGKVHYGRMIKQCNHYLKWAFIEAANVIVRQRHHPNWRRKYVVQLYERTRRRKGHSVAVGATARYLAEAAYWVLKKGEPYREPVRRRPAGKNARFRPSRTRPLPNMGPQRSAS

SEQ ID NO: 350961 - protein, 438 aa, unidentified
MSNKVIFNLDELFISVGIDVGADFSWMSIALPNQQFVGKPYKILHNSIDSLTTAVSKIKEAEELYSLESRIFLESTGIYHYPLFCYLRDKGFNCSVINPIITKNSTNINIRKVHNDRFDSKKAALVGLKPDLKVSLMPSDLALNCRNLCREYYDLMDNRSAYVNKLQGELRMAFPQYLGIFSKVTINTSLTLLETYTSPSAFLEADKQEIIDIIKSTARFGLTYAQNKYNAIIQAATDANQFGYIIDSNIKRIRLYISFIRKYDEEINNILESLHELVDANEDADFVKQIHLIETFKGAGFLSAVSIMGEIGDFSAFSKPKQLFAYFGLDPAVKQSGKFEGTKVQMSKRGSAIARRVIHTLTLQSISISRNGEAKNPVLREYYLKKCDSKPKLVAMGAVSHKVCNMIFAILRDNKSFEIITPQEHIKQYNASKCDMAA

SEQ ID NO: 350962 - protein, 378 aa, unidentified
MDSTKYIGMDVHKEATTIAVMNSAGKLVMESIVETKAVTIVQFLEGLRGELYVTLEEGTWAAWLYDLLKPHVTKVVVCNPRKNALLKAGNKSDRIDARKLAELLRAGLLSAVYHGETGLRTLKELCRSYLAISKDLTRTMNRIKALYRSWNIPCGGTSAYAPRHRAEWLSKITEPGVRRRAELFYQQLDGLQKLRQEARGDLLAESRKHGATELLRRIPYIGPIRAAVLIALLQTPHRFRTNRQLWAYSGLALETHSSAEYHYVQGQLQRSRRPVALRGLNQNHNHDLKSIFKGAATKAGSAKGPFHDFYAALLAKGMKPTMARLTLARKIATITLIVWKKGVCFDAQQLKHKCRFERLGKESVPAAGILPGDVPSDS

SEQ ID NO: 350963 - protein, 343 aa, unidentified
MDHFAGLDVSVNETSVCIVDDAGGIIREVKVTSEPDALLEVLANPAYQFRRIGLEAGPLSQWLYSALAEAGLPVICVETRQMRAVLQAQINKTDRNDARGIAQMMRAGLYRPVHVKTLRSQKLRMLLTHRKLLQSKAIAIENDLRGTLRNFGLKVGIVGSVKFEARIKELVEKCPDLALVVEPMLIVRRALREQIAVLHRRVLAIVRDDEVCRRLMTIPGVGPVVALTYRATIDVPARFRSSKAVGAVFGLTAAKYQSGEINRSGAISKCGDEMMRVMLYEAAQIMLMRSTKWSWLKAWAMQIARRRGMKKAIVALARRLAVIMHRIWVDGTEFRWTREIAAV

SEQ ID NO: 350964 - protein, 329 aa, unidentified
MRTIGIDVSKATLDVALRDEQGIALEKQVKNSPAALRALLRGWVKRGLCQKSTLVCLEPTGHYSLGVIKTLLDMGQPTWMAHPNDIRLSIGMQRGKSDKVDARRIAEYAHRYSDKARLITPAYLGFAELRSLLALRQRMITQRSGHRVQLKDNALYQGKSIKTLVKDELERQVKSLERSLKKLEAAIAALIAADEVVQRKKALAQTVSGIGPVLASEFVAHTEGFTRFTTPRQMVCYVGCAPFERTSGSSVRGRTATSPCANKRLKSLLRLAALAAVRTPGDLRDYYKRKIEQGKRPVVALNNVAGKIIHHLWAVLASGKPYQSHLQVS

SEQ ID NO: 350965 - protein, 350 aa, unidentified
MIIVGCDYHPSFQQIAFVDTETGEVKEQRLLHREGAEEFYRALAATGQQARVGMEASGHARWFERLLAELQFELWIGDAAEIRRKRGRKQKTDRQDAQHILGLLLKDDFPPIWVPSWENRDLRQLLWHRHRMVQARTRIMNQLQAVALNEGLLCKKRLWRERGRQQLEAFPLPPWADRRRHDLLELLDRLNPTIAELSQAVEKEAEKCPVARRLMTHPGVGSLTALAFVLIIGDADRFQCGKQVASYLGLVPLEDSSGNRRRLGHITKQGSSMLRFLLVEAAQVTVRSLPEWRRKYVHLMMRRGRKTAKVAMARRLAVRLYWMMRQGWDYQQWTKFGSHAGQPGPGDGVQ

SEQ ID NO: 350966 - protein, 318 aa, unidentified
MSVSNHRCAGIDVSKGTLDIAISNNASQFTVPNGTDGFTQVLRELKRNETRLILMEATGGLESGVACYLQSEGFDVVVINPRQARDFARAMGYLAKTDRIDARVLLQMSEVINQHPEREKYIRPLPDAHRQILAAMVARRRQLTAMLTAERNRLHPSHPLSHATIKSIISALKGELARIEGEMAIHIKEHFSELSELLNAVKGVGTATVAVLLAEVPELGSLSRREISALIGVAPVNRDSGTMRGRRTVFGGRASVRTALYMSALVGTRIKEFYTRLVAAGKPKKVALTACIRKLLTILNAMLKKNEAWDPMYHQHAS

SEQ ID NO: 350967 - protein, 385 aa, unidentified
MPKLKDLSRSLITLEQDATLIAVIDMGHSSWLVAGIVPGIERQPLKKLGVDESALLKLLYRWREEAEKAGHKIKRIAVAFEAGRDGFWLARWLNAHDIETHVIHASSVAVSREHRRAKTDRLDTELLKRCFLGWLRGERDHCKMVAIPTIKDEDAKRPNREHESLVGEQSRIINRMKATMARVGIRGFNAKLKKAAERLDGLRTPEGEPIPPNTLAELRRDMVRRRLISDQIKQIEDARLGRLTQAPSDGPHTMVRLLARVIGIGVETADMLVQEILSRSMRDRRAVARYAGLTGSPDESGKKRREKGLARSGNARVRRGMIQLAWRFLIFQKDSALAQWFRARTENARGARKTMIVALARKLLIALWRFVREGVVPDGVVLRPA

SEQ ID NO: 350968 - protein, 368 aa, unidentified
MLYLGIDQHRKQLTVNLRNEAGEVILRRQVSTEWARVRKFLEELRERSVAAGGFVAIVEVCGFNDWLLKLLREYGCRETVLVQPEKQSKKKTDRRDANTLGELLWVNRQRLLAGQRIQGLRRVELPTAAVAEDRQITELRKRLGQSRTRTVNRIKGLLRKHNLEQECPTKGLDTIRGRKWLVGLTLGAIDRLELDALLTQWDLWDKQIETVEKEIKRRQKQSLTACVVSTMPGAGAYGSLALAARLGRIERFPRPASLANYWGLTPGCRNSGEATDRLGSITKQGSATARFILGQIVLHVLRRDGTMRAWYLRIKKRRGSKIARVAVMRRLATILWHMVKYNEPYQIGGPLRLRLSAKTKPEKTKQSA

SEQ ID NO: 350969 - protein, 408 aa, unidentified
MARYYLGVDWADQSHQLYVSDESGRKIRELEVQQTADGLAELGRWLEESRGQGIELWAAIEKPEGRVVDFLLDHGVVVYPVNPKALDRARDRFRMSPSKSDGFDAYVLAEFLRTDHAHLRALEPNSAEGQELKMLTRDHQRLGRQKTRLLNQIGITLKEYYPVPLEVFESLDTKIALDFLKAYPTPQALSKLTRRGWKRFAKRDHHLSEARCSELWDKLNKPQLAVPAHVVRAKAKLLAALVMQLETSVKAVDSYSQEVQSFFAAMPAAEIAKTLPGGKSGTTVASIWAELGDAPKRWNSFRHLQAEGGAVPVTKASGKSRMVQFRFACNKHLRQAMYWFSFNSLQRSEWAKKYYRNQRAKGHSKHESLRALGAKWLKIIFVMWRDHKPYDENYHLANIARQMMRQAA

SEQ ID NO: 350970 - protein, 361 aa, unidentified
MSDATTTEETKLTVGLDLGDRHIQVCVLDEAGEIIEEARLATRPEALRRRFFGADPLRIVLEAGTHSPWVSRLLAKLGHEVIVANPRKLRLIYANDSKSDRVDAEYLARVGRLDPALLAPLTHRGAETQADLALLRSRNALVRARTRLISHARGTTKSLGARLPACSAESFAAKAGAGVPDELRPALGPVLVVIAGLCAEIRALDERIAEMAGQRYPETALLTQVPGVGTLTAMVYVLTLEDPERFPRSRSVGSYLGLRPRQRDSGSLQPQLRITKAGDEHLRWLLVGAAHYILGPFGPDTDLRRWGLGLAAQGGRAGKKRAAVAVARKLSVLLLRLWVTGEVYEPLRNARLRGELLPAST

SEQ ID NO: 350971 - protein, 345 aa, unidentified
MKKVIAGTDLHSNNLVIGIVDMDGKRLASQRLACDLQEVVKFLAPFKKRLQQVAVESTYNWYWLVDGLGALGYPVVLANPAGMEQYSGIKHADDTNDAFFVAELARLGILPTGYIYDAELRPVRDLLRRRLLLVRQRTALMLSFKSLYTRMTGKSMSLKELKGLGVKAAQKLYEHPANQLIAGMQIEHIQQLKQSIHSIDKEVLQSARQFSYYETLTSLPGVGTILGLTITMEVGDIERFADAGHFASYCRTVGAERTSNDRKKGANNSKCGNKYLGWAFVEAANFARRYDWQWRQWFDRKAAKTNTVLATKALACKLAKAAWYLMAEGSKYNPKRMFGQPAKTQ

SEQ ID NO: 350972 - protein, 342 aa, unidentified
MQVITTIGLDIAKSVFQVHCVDAEGHVVLRRQLKRRYVLVFFQKLPPCLVGIEACASSHHWSRELAIGHTVRLMPPAYVKPYVKRQKNDATDAEAICEAVTRPNMRFVATKTPEQQSCLTIHRIRHLLIRQQTSVINAIRAHLAEFGIVAPVGRNGVDQLLGIVADLADKRLPEVARVCVAALGAQLRMLKAQILEFDRMIRAWHRSSEASRRLDVIPGVGPALATALVASVADPRAFRSGRDFSAWIGLVPKQNSSGGKDRLGNISKRGDRYLRSLFTTGALAVIRYAKIHGTRHRPWLTALLTRRPTKVAAIALANKIARMAWAIMAKGEHYKEPAALAA

SEQ ID NO: 350973 - protein, 346 aa, unidentified
MENIALDVHKHYTWARVENREGQQLYASRLVHSRGSIKNFIRRWTPGSSVAVETVGNWYWVVDEIEAGGGKPQLVNARLAKLMIGNVNKSDKLDAKGLNMLQRTGTLPTVWIPPSGVRDARELPRTRMVFSRQRTQLKNRVHATLSKYGYSIDEVSDAFGKRGRQIIEELSSKLPPHTKQALDHVLEQLDEIIENLKAIEANMIKVFAPCPQTIWLQSLPGVGQILAVVIWTEIGSIERFNRAEQLASYSGLVAREHSSGGKFHYGAVRRDVNVYLKWAFVEAANSAILNRERCDYQHISRLYQRIKPRRGHNRAKVAVARHLAEASFWMLKKGESYREPVLSTQR

SEQ ID NO: 350974 - protein, 370 aa, unidentified
MEEGIKFFVGLDVHKDTIAVAVAEAGREPAGWVGGIAHDVGKLLKRLACYGAPAQVQVVYEAGPTGYGLQRELARRGYRCQVIAPSLIPTRAGDRIKTDGRDSVRLAELSRAGELRAIWIPDPADEAIRDLARAREDAVNARTQVRQQLKGFLLRHDVHYAGKTSWSKTYYRWLATLNFGATGAQTAFTEYWQAVTSSDERVARLTTALAGSIDGWRFESVVLALQALRGIDQISAIGLVAEIGDIGRFAHPRQLMAYLGLVPSEHSSGERVARGSITKTGNAHARRLLTEAAWNYRFQARIGYRAQRRAEELPQEIRDVAWKAQLRLTGRFARLRARGVHINKVCVAVARELAAFVWAIASLRAQLPHS

SEQ ID NO: 350975 - protein, 371 aa, unidentified
MKKNSTVQQSPKRATARKEGPITIGMDLGDKTTQYCILDEQGEIVQEGSVGTTKKALVQKFGAHRRCRMAVEVGTHSPWLSRLLTSLGFEVIVANARQVQLISASSRKSDRMDARLLARLARMDPQLLRPIRHRSERAQTHLMVIRVRAALVETRTSLVNTARGLAKSMGERLPKCDADQMGVERMEWLPEKLQEALRPLLEQIESLTEKIKESDGRIEQIARTEYPETALLKQVKGVGTLIALTFVLTIEDRERFRKSRDVGCYVGLRPKCSESGESRPQLRITKEGDVYLRKMLVQGAHYILGYRGPDTDLKRWGVGLASRGGKNAKKRAIVAVARKLGILLHRLWVTGEVYEPLRNSQAGASARTVAA

SEQ ID NO: 350976 - protein, 368 aa, unidentified
MKKVSTAAAQQSRNFSRPQKLTIGLDLGDRTSCYCVLDENGQIVLEQRVATTVKALREVFGGMPRSRMALETGMHSPWVSRLLSGLGHEVIVAHARSVRLIGESRKKDDRLDAQTLARLARIDPQLLCPVQHRSAKAQADLTVIRARAGLVRARTALANTARGLAKSYGERLRGCNIRNMNPEKADGLSAELQKGLGPLLAASAALSEQIAEYNQRIEQMAKESYPQVELLKQVKGVGTLIALTFLLTLEDAHRFQKSRDVGCYLGLQPGRRNSGQSEPQMHISKEGDPYLRTLLVQGAQHILGPFGVDCDLRRWGLKLAERGGRSGKKRAIIAVARKLAVLLHHLWVSGEVYEPFHHRQQNAVAIAA

SEQ ID NO: 350977 - protein, 330 aa, unidentified
MKIQNVYPDGLPLCFGVDVAKAKLDCALLRADGKYRNKTFSNNLKGFAELADWLTKQQVTEPLHVCMEATNIYWEDIAQYLAEAGHTVAVVNPAVVKAYGQSLSIRNKTDAVDARVLANFCRERRPEAWQPYTASEKILRALVLRRQALIDMQTQEKNRLGVARDNVTDSLNDHLGWLESEIKRIEKLINQHIDNDPELRENSRLLCSIPGVAEHSSAALLAYLGRMRLCEKASAFAAFAGLTPRRHESGTLKGKSTLSKKGHAFLRRALYMPAMNAAFNTAWGKAFQARLAAKGKPSKVIISAMMRKIAQIAFAIIKSGKPFNPHLHPA

SEQ ID NO: 350978 - protein, 350 aa, unidentified
MSEMIIAIDLGRHNSVACAYDRRTRAHTFRTLDTTPAALDRLLDRHRGALVVIEAGANAGWVHDRAVAAGHVVKVANTAAEAWKFKHLKRKTDRDDALRLAELEAIGQLPTVCMPDPVTRQRRMLIAFRQELVGRRVACQNRIRALFAAVGLATPRGHRAWTETGLAGIEQWTRPLAECGSEELWRGMLALALAEYRALLAQIGEAERRLDALAEADEATRLLETIPGLGRRTAEAVAAHLGDARRFASAKQVGAFAGLVPRQYQSGVTDRRGKITRRGPAILRKLLVECAWCMLRYNPWAQKLYKRLTGGGAARKKPAVVALPRKILARCWAMLRDGVPWRAEPVAAPE

SEQ ID NO: 350979 - protein, 344 aa, unidentified
MPSIVGGLDIHRKQITFDYLDLATGEVGCGQVAPADRAHLRAWLARFEHPGEVAFAVEACTGWRYVTGELQRAGMEAHLAEPADTAAARGRKRRAKTDRADARLQRDLLIQDRLPECWIPPEHVLECRALLELYHDLRAEHTAWVQRVHAVLFHQGAPVFHDLSRAGAPAELAELAREHLSLAGQCQIGACLRMCDALEAELTAVRRRVIAAARHLRGAKVLAESIYGVGPVTALALTCWLGGAGRFSSARKAVRFAGLDITVYSSDGKRSPGHLSRQGPPVLRWAVYEAGKTHARSVAPDHGYYAAVKDRKDGKRAALSEARKIIRRACHILSELGDDALAVV

SEQ ID NO: 350980 - protein, 424 aa, unidentified
MPTPPEELIAAWVGIDWADDHHDVALQVAGSDAVEAHRLAHTPDALATWRAQLAARFGGRPVAIALETSRGPLVAALLEAPFVVLYPINPRSLRRFREAFSPSGAKDDAPDARLLLTLLVKHHAQLQPWRPEAPATRLLAYLVQERRAAVELRTALTLQLGAALKDYFPHALEWAGDDLSAPMATAFLQRWPTLAAVQRARVDTVRQFYTQHRCRSHARIAARLAAIRTAVPLTRDAALITARVAVVQLLVAQLRALAPSLARVDALIAEQCAQHPEAPLFAALPGAGAALAPRLLVAFGTDRTRFPSAEAVQTQVGIAPITIRSGRSEQVHWRWTTSTFLRQTFHEYALHSIRESAWARAFYTQQRQRGKSHHTAVRSLAYKWIRILWRCWHDRTAYDEARYHRALHLRHSPLATAVKQHNAA

SEQ ID NO: 350981 - protein, 343 aa, unidentified
MDYFAGLDVSVKVTSVCIVDDAGKIVREARVASEPEALLQVLTNTTYRLKRVGLEAGPLSQWLYSVLAEAGLPVICVETRHMRAVLKAQINKTDRNDARGMAQMMRVGLYRPVHVKTLRSQKLRVLLTHRKLLQSKAVAIENDLRATLRNFGLKVGVVGAVKFEARIRELVESLPDMAVLVEPLLIVRRVIREQLGILHRRLLAIVRDDDMCRRLMTIPGVGPVVALTYRVTVDVPARFRNSKAVGAVFGLMPSKYQSGQNDRTGAISRCGDEMMRVMLYEAAQSMLVRSTKWSWLKAWAMKIARHRGMKKAIVALARRLAVIMHRMWVDGTEFRWTREVAGA

SEQ ID NO: 350982 - protein, 415 aa, unidentified
METLVERGCGLDVHQATVVACLLMVRKDGKAQKQVRTFGTTTRELLSMREWLLSQGCTHVAMESTGVYWKPVYAILEGAFQIVVANAQHVKKVPGRKTDVKDAEWIADLVCHGLLRQSFVPPKPIRELRDLTRYRRKLVESQSAERNRLLKVLETANIKLASVATDVFGTSGRLMLRALIEGKNTPEEMAELAKRKLRSKISQLELALEGKIEDHHRFLLKLQLDRLERAEGDLAVLEEHIQEKLEPYAAQLALLDEIPGVDWTLAAVIIAELGVDMSVFQSVSQLASWAGVCPGSNESAGKRKSSRIPKGNVYLKTALVEAAHAAARTKGSYLRDKFYRLKARRGYKRAAVAIGHKILVSIYHMVSQNVSYNDLGDLYLDKLNKNHLTRNLVHRLERLGYSVILALQQKAAYRN

SEQ ID NO: 350983 - protein, 326 aa, unidentified
MTCKVGVDISKMKLDVAWLRADGKYRSKVFPNNASGFADLLRWLDFNLPDGKATAHVCMEATGAYHEGLALFLHDNAVAVSVVNPLLVKRFMEFERVRNKTDDGDAKAIARFCHRTAPALWEAPSPAVRSLQALVARLDTLLELKQGELNRLGVAHDSVKPSLMAIIASLDGAIEDVRMQIRKTIDDDPDLQQRSDLLASIPGLGDRTIPQLLAYIGCPERFTSVKALIAYASLTPMIRQSGTSLDKRRGTHPQGHRELKKALYFPAMVAARYNPLVAEFWQRLKAQNKPGKLIVVACMHKLLAIAYGVLRSGTPFDANYGKKACA

SEQ ID NO: 350984 - protein, 364 aa, unidentified
MKRKLYVGMDVHKETIRIAYLTSNSKEILKEQQIKHEEVQIKKFINRLKLEWDEIDCCYEAGVTGYPLYRYLKSLGVNCILVAPGKIPRQSSDKIKTDKRDAIKLARLMRSGELESIHVPSEEDEAVRDYLRSRDSLRLDLGRNRQRLMKFLLRKDIKYSTTKYWTVSHYKWLNNLHFNNEILQETFNDYYSRVRVQEENLKAMDKKIQEVAESEPYREKVGILRCFRGVDYLTAMCLLCEVNDFKRFKTAGSFMSFLGLVPGEYSSGSKRKQTGITKTGSPRLRRILTEAAWQHRFPGTGSKIVTARRSGQPALVVALAEKASLRLHKKFRNLQLRGKTPQVMITAVSRELSGFLWAAMNLVA

SEQ ID NO: 350985 - protein, 378 aa, unidentified
MGLDVHKNSVYITEMDNDGNIMDQYEIENNEDAWNSFRSQYIDLKPEIALEMSTTGKYVSVLLRDMGFSVHVADPVKLALIYNTPKKNDREDSYKLAKLLRLGDLSEVHVPSREADELRSLVRYRKSLGEEMTMIKNKIHAILTAYGISIKATDIFGKKGLRIMEKSSHKIRSADRFVMSHMLESVVDLKHEENEVEDEIARSCEQRKDVKIVMTIPGFNIYSAAAIMSEIDDISRFSSKEKLASYAGLVPRQDQSGNRDIRGHITKHGPSMLRYVLINAAHTVIKYSNKMRKKYLSLVRRVGRNRAIVAIARVLLETIYVMLTREEEFVDRIDDLTDRKMKSMSERAKHEVKGRDLADAIKLIRGERIQKVTKGNFS

SEQ ID NO: 350986 - protein, 421 aa, unidentified
MSKHRYHSVECKGVDWEALVSAVGGRCLVFAVDVAKHDFVSHLQVKDGEALLRVKWQHPEETPELLAGLGRLLAAGPVEAVMESSGTYGDALRWQLRQRGATLYRVSAKRVHDAAEVFDGVPSLHDPKSAELIARLHVLGHSEAWVEASPPRRALSAQLKMLHQSKARHQQELNRLEALLSRHWPESLSVLDLGSVTLHRLIAAYGGPAQVQAFEGPARLLMQKTGRPGLADAKIEALLQSAGQTLGMPCILEERELLRWQAKTVVETHTELRRIEKLIEHAVADDPALASLSTVVGSVTSAVLLAAQGSPLDYPDANSYVKGLGLNLTERSSGKHKGRLKITKRGPGVARFYLYFAALRLIAHEPVVAKWFQTKTARPGAMKQKHVIELMRKLAKALWHHAHGRLFQAARLFDQHPVTSV

SEQ ID NO: 350987 - protein, 339 aa, unidentified
MQLYTGIDLHSNNSYLAIIDDTGKRIFHQKLFNDPVAINQALAPYEGTMAGIVVESTYNWYWLVDALMTAGYHVHLANPSAIQKYSGLKHADDKHDAFWLAELLRLNILPEGYIYPKEERPLRDLLRKRGHLVNLRTSLLISLKNIISRNCGQTLKANDVKKIREDLVAPLLAGNEDLALAGQVSKEAIDFLTKKIRKIETFIETKVKLQEPYEYLLGLPGVGKILALTIKLESGPIARFPQVGNYASYCRKVCAKWSSNGKAKSGGNKKNGNKYLAWAFSEAAELARRFDPQSRAYYNRKLQKTNFMVAHGALSHKLARAAYHIMRDNVPFMPEKLFG

SEQ ID NO: 350988 - protein, 408 aa, unidentified
MNPLFVGIDVSSKNNVAYLMKPDGSKHSSFSVQNNLGGAKLLSERIVSALGSMQLERVVIGLEATSIYGDSLVYALREDGRLGRFQRKIHVLNPKQVRKFKEAYSDLPKNDWVDAFVIADHLRFGRINREVYMDDYRYKALQTLTRARFDVIQNLTREKQRFANYLFLKCSGMAQDKDIQNTSATTIALMEHFETVDDLANADLEELTAFITETGRGKFADPDATAKAVRAAAKGSYRLPKTVNDTVNQAMAVSIASMRALKGQVKVLDKAIEQQFEIIPNTLTSIPGIGKVYSAGIIAEIGDIHRFDSQASVAKYAGLVWNRSQSGDFEAEHSRMIKSGNRYLRYYLLEAANSVRRCDSEFRRYYDLKYHEVNKYQHKRALALTARKLVRLVFRLLKDNRLYIPPEG

SEQ ID NO: 350989 - protein, 339 aa, unidentified
MQLYAGLDLHSRNTYIGIMDKEFNRIFNQRVVNKLPVILNTLDPFRNQLNGIVVESTFNWYWLIDGLMDAGYQYVHLANPSAMKQYEGIKHTDDQHDAFFLAQMLILGILPQGYIYPKEDRPVRDLARKRLFLVRQKTAHILSLQSLIARCSGQRISTNDIRSFTVDDLQQLLKEENIVLSAQANLDTIMFLKQQILRLEKTIKNKVKLDKVFQQLMTVPGIGFILAMTIKLEVGDIGRFPKVGNFASYCRSVSSRRLSDGKKKGQGNRKNGHRYLSWAFTEAAHLSRRYNEHFRSYYNRKVAQANTSLATKALSNKLARICYYIMRDQVPFRDNLLSQ

SEQ ID NO: 350990 - protein, 341 aa, unidentified
MDVHQATISAAVRDSRGNLVMEAILETKAETILQFIRGLRGSLYVAFEEGTWAAWLHDLLQPHVARVLASDPRKNALLKAGNKSDRIDARKLSELLYLNKLSPVYHGEQGIRTLKELARSYITITRDLTRVMSRLKAIYRGWGIPCAGQQVYAPRYRAEWLSKISEAGVRRRAELYYQQFDVLAALRQGTRRELLAEARKHPAMRLLRQIPAIGPIRATLLIALIQTPNRFRTKRQLWAYSGLALRTYTSGEYRFVAGQLKRSKKVLAVRGLNINHNHDLKNIFKDAATRAAATAGPLQGFYQACVARGVKPHLARLTLARKIASITLLVWKKGARFDADI

SEQ ID NO: 350991 - protein, 365 aa, unidentified
MAEVTRGAAARVGVDLSKRVFQVHAVDRLCHKVLARPMSPERFFAWCAELPSGCLVAMEACGGAHHVARRLRLLGLDARLIAGHFVTPYRMAGKSGKNDANDAAAICEAAGRPHMRFVPVKTAEQQGQLSVHRLREGYKAERTALINRIRGVLQEFGMSFPQSPEALRRVLADVIEDGGNELTGIARLVLQRAHLHWIDLDLQMKWCDERIEAHTRSDARGSKAAQLQGIGPIGASALVASVGDFKQFASARQFGAWLGLVPSQNSTGGKASLGRITKRGDDYLRTLLIQGAKSAVMTAHKRSDRISQWLVQLKERVGWQKAVVALANKNARILWAVLTRDGAFDPNHVPEGPAPRCALSQRPAL

SEQ ID NO: 350992 - protein, 373 aa, unidentified
MNHIIYCGVDFHARQQTVCCLKTETGELVTQELKHDNKDELRKFYSQFNGPVIVGLEASGYSPWFEQLVEELGQEVWLGDATEIRRRARRRQKNDRRDAELILDLLIHGEFPRIHRPTPESREILRMLRYRHKLVKLRTIIKNSLQALAIQSGLSRQAKLFTRQGEKQLLASLMSPVMSRQRQQWLELLKDLNQRITETEWWLKQEALKDPRISLLRTHPGLGLLSSLGLLHTLIPVSRFPNQRKVAAYGGFDPMEHSSADRKRYLGISKAGSRLLRFLLIEATQTAVKADPDLKRFYRRLVQRRGKPKAKVAVARKLLIRGYIMLRDEINYAEFQQRAVAARLARDYARTNLPGHLIGQPASPANGSEERAD

SEQ ID NO: 350993 - protein, 362 aa, unidentified
MRTQTYKKSEPELVNFAGKTIYSGIDTHKKNWDVSIFIDDMFVRRFHQEADPKAFHSFLTKHYPGARYVTCYEAGFKGFSIQRDLSELGIECVIAHAADVPQTNKDKLQKTDKIDSRRLGEALSKRMINAIYIPDIQTEADRSLVRYRRKIKGILKSRKTAIKSLLFRLGIDIPPQFDKSHISKKYISWLRSLMFNESSANYTLKAMIDDVEWLRKREYEHTKQLRILAASERYSDTYNELHKIPGVGLITIMTLLTEVVDINRFCSFKKLNSYVGMCPTEFSSGEKIKHGKITPRANKGVRTVLIEAAWTAVKYDPALSLKYSELRKRMESNDAIVSIARKLLTRIYAVWKNHVDYTIGVK

SEQ ID NO: 350994 - protein, 398 aa, unidentified
MISVGIDVSKEKSTVCILKPYGEIVRKPFDIYHTQTDLTRLSVIIRDLDEEVRVVMEATGVYHLPILTFLKDEGFFVATTNPLEMKRYRCQGIRTAKTDRIDSKIIANYGLDFWFHLKEFQSDDDCYYELRLLGRQYRQYMKFRVENVLSLTHILDLTMPGLKTMLPDWNKYSGKDKLADFAYEYWHFDNITKKTEKQFINSYISWAKKKGYRQNEEKAKQLYALAKDGIPTLPSSTPSTKMLVQESVKIVREVDNTLTQILTRMQELAKTLPEYPVVRAMGGVGDTLAPRLIGEIGDVRRFKNGKALVAYAGIDAPPYQSGKFTGTERHISKRGSSNLRKVGFETMTCVRRLKPENDAVYLFIQKKIDEGKPGKVAKIAGFNKFLRIYYARVMEVYQ

SEQ ID NO: 350995 - protein, 409 aa, unidentified
MDQLIERCCGLDVHRDTVVACVRGPGPNGRRQHEVRTFGTTAVELLALRDWLEAHAVTDVAMESTGVYWKPVFYVLEEAFTCLLVNAAHIKQVPGRKTDVKDCMWIAQCLEHGLLRGSFVPPAPIRELRDLTRHRKVLIQERTRAANRLHKLLEDAGIKLASVATNILGVSGRAMLAALVHGTTDPAVLADLARGKLRKKLPALRQALAGRFRPHHAFLVSQLLAHVDYLDEAITTMSEEVEGRLAPFAAQLTQLDTIPGINTRTAEVIIAELGVDMSCFPSDRHLASWAGICPGNNESAGKHQSGKTRKGNRWLRMTLIEAAGAAIRTKDSALGARYRRVMRHRGHKKAVVAVAHAMLRAVYHLLAEGTTYREPGADYSDRHHTHRVTRRAIQLLERQGYRVVLEPAA

SEQ ID NO: 350996 - protein, 413 aa, unidentified
MDRLIERVAGLDVHKASVKACVRVPAERPGERQSQTRTFRTTTAGLVLLRDWLASHQVTVVGMESTGVFWKPVYYLLEDEFQCWLLNARHLRNVPGRKTDVADAAWICQLVEHGLVRPSFVPPKPIRQLRDLTRYRKALIHERTRETQRLAKVLEDAGIKLACVASDTLGVSGRAMLEALVAGTTDPQVLAELARGQLRKKLPALREALEGRFGPHHALLVGEMLARIDQLDESIERLSVEVARVLVPFSPLVGLLVTIPGVDRRTAEVVLAEIGPDMGRFPSSAHLASWAGVCPGNHESAGKHYSGRTRKGSKWLRTALVQAANAAARSKDTYLAAHYQRIKGRRGHHKAVVAVAHSILVIVWHLLTGNQPYTDLGGDYFIQRQHSEAYKNRLIRQLERMGHKVTVEPADPA

SEQ ID NO: 350997 - protein, 346 aa, unidentified
MRYSTTVGVDLAKNVIQVSVVSARGKELLNRSLSRRKFAEFLGKQKSSLVAFESCASAHYWARAAQRHGHAARIIPAKAVAPFRQGHKTDSNDALAVAEAARRPNIKEAPLKTAEQQGLQAIQRSRELLIGECTALSNHLRGILLEFGVAIPQGLASLLRALPEILEDGDNELPDLYRPTLRRLHSRLLALREDIDSLTREIDGLVKQHPVCKRLTAIEGIGPIGALSLYAVLGSGKAFTRSREFSAYLGLTPRQYSSGGKTHIVGISKKVGNRRLRSILIQGARAYVYRMKEPRSPKDRWLKDLIDRAGCNRAAVALANKNVRTAWAMVTQGTEYQRRLQLEMAA

SEQ ID NO: 350998 - protein, 401 aa, unidentified
MNAVGIDVSKGKSMVCVMRPFGEVVLEPFEVLHTAQNLNDLAGKLKALDGETRVVLEATGNYHKAVAFVLHDAGLFVSVVNPVLIHDYDNNSLRRVKTDRKDSVKIANYTLDKWTRLRQYLPEDDTRLALKNCYRQYQQAVAIRTMLKNNLISSLDLTFPDVNKLFSSPAKNNGCEKWVDFIGDFWHSECVSSLSPDAFSKKYLKWCQKHGYNFTRSKSDEIFACAVNAASLPKSPTSKLLIQQQVAQLKAVSQSVAAFQHEMLRLSQQLPEFDTVMEMYGVGPSLGPQLMAEIGDVRRFSSKKSLIAFAGIEPQPNDSGKVVGNDKGISKVGSAVLRRTLFLIMTVILQTQPQDEPVFQFMNKKRSEGKPYKVYMMASANKFLRIYYARVKSVMDSECSQ

SEQ ID NO: 350999 - protein, 427 aa, unidentified
MRHDPNTIKDYLQMYYVGIDIAKRSHVACVMSEDNSLMVKPFEFLSTQSGFKKLLVHLQSLSCSLSDVIIGMEATGLLFENLYRYLKELDFRVVLLNPYQTSKFREMDTMKRVKNDNIDSVMIAALIKSGRFSEGYVSDEQLQSLRELYRHKASLDDQLKALKRQSGTLLAVVFPELEQVISNPFNVTGLALLEKYPTAKHYEYASVDRILKTFRGIKGNNFNQAKALKLLALAKESIYSGVAKEARAMNIRSNIALIRLLQEQMAQCDEEMLHLFNNKATSISQEQQHEISELIDNLRTIPGVGDKTILALLAECGNLDRFTDAKALVGFLGLYPTLEQSGGTLRYGRLAKRGARLAKKAIYLAAIAAIRHNSELHTLYDKYRSKGRAKKECIIIVARKLIQIIYAVYKRNTPYDPIRVFVPKPNQ

SEQ ID NO: 351000 - protein, 338 aa, unidentified
MFIIGIDPHKGSHTAAAIDDDEQVVGEMSVRADRRQRQRLLEWAAPFAPRLWAVEGATGHGALLAQQLVASGETVVDVPAALSARARLLDSGRKDKTDPHDARSAAIVALRHRNLRTVALEDHRQVLRLLARRHHQLSAARTRAICRLHAVLAEMIEGGVSKNLSAKRASAELHNLRPANAIGMERKRIATELLDEVRRIDLALVDLHERIAHAVKVADTSVTEVHGVGPIVACYLIGYSGDVRRFPSAGHYARYNATAPIEASSGPRVRHRLNPNGNRQLNHAIHIAALGQISHDTAGRAYYLRKQSDGKSRKEAMRCLKRRISDAVYRQLVADANH

SEQ ID NO: 351001 - protein, 315 aa, unidentified
MQVGKLIVGADVAKAELVIHRDDRDEIIKVKNTKPEIKKWLKQQPLNTAIAVEATNVYHLDLVELAHSLGFEVYVIDGFQLSNYRKSVGVRVKTDPSDARLLSRFLKNEGEDLRPWTPPPAVYGKLQSLLRRRAALVTARTAMTQSWANEALLKAAFQTFVKSIDRLDLLIQKKIKEVLREAGLHEQVARCQAVEGIGFLTATALVMAFMRGEFKSSDSYIAFLGMDLRVIDSGQKNGRRRLTKRGCSEIRRLLHNAAMSASRTATWKGIYEQHRNAGKATTQALVMLARKLARVAFALMKNQDEYVSKGGKPAC

SEQ ID NO: 351002 - protein, 361 aa, unidentified
MHYVNNTELSSLEGTRRQFKGGRCAIKLGVDVHQDFCVVVLQEDGASPKPPQRFQKEAFLHWAARLKRKSGAEVHAVYEACGFGFALQRQLSALSIQCYVVCPQKLDEHNRRVKTDGLDAKALCLKLDRFVQGNRAALARVRVPSEAEEQLRAIHRQREQLLKARKQLEAQGRSLMVNHGLEPVQNWWKPRTFAALQVSDWMKQLLQNSQPILIGLQEKIAALTGQLQRAASPDQPRGLGKMTSVIIDREIGHWHRFRNRRQIASYTGLCPGEYSSGNTRLQSCVTKHGNPRLRAALVELAWRLVRFQPDYHPVRKWRQVLGKGALATGAARKKAIVAVARQLAVDLWRIKPAGSAQKNWD

SEQ ID NO: 351003 - protein, 345 aa, unidentified
MSQQHFVGLDVSVKETAICVVDLQGRVVHRAAVESHPAVISQYLLGLGLTFSRVGLEAGPLSPWLYAGLVEAALPAICVETRHMHAALSARINKTDRNDALGIAQMMRVGLFKPVHVKTPASQQRRLLLTSRKLLQRKVYDIENDLRGQLRNFGLKVGIVGAVGFEQRVRDLVLDLPHIAAVVIPLLAARSALRVQLAKLHKMLLDDVRADPVCRRLMTAPGVGPVVALTYRACVDNPARFSRSKCVGAHYGLTPRLYQSGDTARIGRVSKCGDAMMRAALYEAALVLLTGSRSRWSTLKAWGIGVAKRRGMQKAVVAVARKLAIVMHRMWRDGTDFRWSAAQAA

SEQ ID NO: 351004 - protein, 352 aa, unidentified
MRSVAKVTIGVDLGDKRNAICILDESGDVVETASVANTLARMREFFSRYKGALVAIETGTHSPWVSRMLSELECKVLVGNSRKLRSIWKGDYKTDSRDAEMLARIARFDQKLFHPIHHRGLKAQSDLALLKARDILVQTRTCLINHIRGTVKTVGERLDGCGAEVFHKRAVGSIPEILKDALLPVIEQIEALTKRIRSYDRRIEEISKTEYKETALLRTVPGVGPITAMGYVVVLEKAERFKKSREVGSFLGLTPKKDQSGDLDKQLRITKAGDKFLRKLLVSSAQYTLGPFGPDSELRRFGLRLCQHGGKAAKKRAIIAVARKIAVLLHRIWITGEEYDPFYVKHARQQMG

SEQ ID NO: 351005 - protein, 608 aa, unidentified
MSTTVPLDRIGVGIDTARYGHRVSFLGPDRKPAAKPFTVMENHAGYQALQERLKQLHEHHPTAHFHVRIDAAGQYAVNLEQFLRALKLPMTISVGEPKRNKDYQKAHFPKRTTDDTESQAMARFAVVEQPDATPAPSQPMILLGEVAGRLQAQVKQTTRAINRLHNLLARVFPELATLTEDIGVGWVLKLLDKYPTAERIAAAHRSSLEKIPYLPAEQAEALHQAAEQSVASLRGDVAEALVRDLVEQVRHSQCAEEKLRQLLIAAFADLPASPHVQVVTIPGIGDATAAVLVAKIVNIDRFATPNHLVNYFGVFPEENSSGVDKRGKPLPPGTLVMSPKGNDLVRSYLWNAARSAIQCNPAVRALYRRLKSKGKRGDVAIGHCMRKLLHLVFAVWKTNRPFDENHFPWDNPGDSQSSTTPPLAADASATPAADEKAVGHKRDLPAEAVVTTAPSTLEPVPAPVKPASQRSRATRPKIDFECLREHVTIEQVLQHLGLFASLRGRGQQRRGPCPVHSQPTAPERTFSVHLGRNVFQCFHADCARKGNVLDLWAAIHRLPLYEAALHLAETFQVPLNREEEPVLGTRSSRTATRKPSAPAATVRTGGSE

SEQ ID NO: 351006 - protein, 341 aa, unidentified
MKHLYLGIDWGKNFSQLFGFDQDGEVVIEERLKTLDLSVWRKKLRSLKDYSIHAAFEIGAHYDWLYDLLTEYCGEVAVIDPAQFAVICKSQRKTDKIDAQKIAEGLRRGDLPLVHVPDKQTRADRRLVAFTHWHSQQAASVKGKIRSLLLAQRLECPYSNITGMAALEWLNEQAPQMSDDAQLFLRLLLAEVELLRQQRQELDARVAIRVKRYKQVAVLDSIPGFGQLTILAVLSSIAGVARFSRPEQLSSYWGVCSSVYQSGATLRLGSLTRRGNVHVRWLLSQALQHLHRKDARARKRYLKLKRKKPRGVARAAQVRWLTQIIWHLLKKDEPYRIKAAA

SEQ ID NO: 351007 - protein, 427 aa, unidentified
MSTPQPFAAWVGIDWADEQHAVCLLAEGSPRAEHRQVAQQAEALDAWAAELHQRFDGRPLAVCLEQSRGALIYALMKYEFLVLFPLNPKQLAKYRQAFSPSGAKDDPQDAELLCRFVREHHGQLRAWRADDACTRQLRLLCEDRRRWVAQRTALGNQLLQRLKETFPWALKFQGREVHGQAFLRWLAKFPTHSELRRASPKQLERYLPKRRRVPDDPDTFAPWVAEIRAALPLVTDEAVLAAARLAIVSLVRSLEQLNAIIAQYDQQIAQVMAQHPDAALFHSLPGAGAALAPRLAAALGTDRGRFRSAADLQQFSGIAPITVRSGKSCQVRRRRACPHFLRQTFHEFARCSLMASPWAAAYCRMLRAKGHAFHAAVRSLAYKWLRIIFRCWQDRKPYDEQRYLNQLQQKSSPLLAYLPPNPSLTEP

SEQ ID NO: 351008 - protein, 412 aa, unidentified
MEVLIERQCGLDVHKAQVTACVRVPDEDGGRRELIAQFATTVPGLLGMGDWLAAHRVSHVVMEATGDYWKPVWHLLEDDFELMLVNARHVKQVPGRKTDVSDAAWLCRLAEAGLLSPSFVPPKPIRDLRLLTRYRRTQIVERRREAQRLHKALEDTGIKLSCVASDILGKSGRAMLDALIGGTTDPEVLAAMALGKMRRKIPALREALQGRFEPLHALLVGSILAHLDFLDEHIAGLSGAIEAQIAPFAAARDLLMSIPGVGQRTAETVIAEIGTDMSVFPDAGHLASWAGQCPGNDISAAKRRSGRTRKGSRHLDIALKDAALAAIRTNDSYLQALYRRKRTSLGHGRAMGAVKHSMLCAIWRMLTTGELYEDLGGDYFARRDPERQTKRLVAQLERLGHHVTLAESAEAA

SEQ ID NO: 351009 - protein, 411 aa, unidentified
MNAVGIDVSKGRSTVAILRPMGEVVQTPIDVMHNAVSLERLAYQILTLGEDTRVVMEATGRYHEPIARELHAHGIFVSVINPIAIHGYCTSGTVRKVKNDQKDALKIARFALDRWTELREYTPMDALRQQLKIFSRQYNLYMKSCVALQSNLISLTDKVFPGVNELFKSPQRADGHEKWVDFVTTFWHCECISTVSENAFTERYQKWCRRMGYNFSLTKAADIYTESLGHIITLPKNNNTKLLIQTAAKELTAMNELIAVVRGEMTRLARELPEYETVHAMYGVGDTTAAQLIAEIGDIRNFPRRSSLVGFAGVDPAINDSGKSVGNSMAATKRGSPHLRKTLFQIMTIYLRLTPQDEPVYQFLDKKRSEGKPYYVYMTAGANKFLRIYYARVKECMANLDASAEDSETAE

SEQ ID NO: 351010 - protein, 423 aa, unidentified
MRFIGLDVHRDFCEVAIVEAGVVRPAGRVQTEPAALELFAQSLGGDDEVALEATGNSLEIARIIEPHVGRVVLANPKAVKGITRAGAKTDKIDARTLAQLLAGGFLPAVWRPDEQTRILRRRISARAQLVRQRTRAKNQVHATLIRNLKGKPPVSDLFGARGRRWLAAQELPADEQETVAACLRQIEFLDGEIALLERALAEQVLASAEMRRLLTLPGVNFVTAAALIAAIGEIGRFPSARQLVSYLGLDPRVHQSGSEPARHGRISKQGPGETRHVLVEAAWHATRTPGPLRAFHQRIAVRRGGNIATVAVARKLAVIAWHMLSRGEDYAFARPSLTREKLRRLELMTGAKHQKGKRIGVFVTKEQHRLDRELAAQAEIAYRRLVQDWQPAIRGAGAAPGRASCGPSSGQAARQETAPPPAL

SEQ ID NO: 351011 - protein, 363 aa, unidentified
MLGTPELVSTPPSVDGQEVIVGVDTHKDFHVAAAITTLGLLMGSKTFPTTQAGYRALVTWARGFGSVRRAGVECTGSYGAALARHLAAAHIQVFEVNQPDKANRRRRGKNDTIDAEAAARAVLAGRAHALPKTGTGPVEMLRLFKMAKSSATKARSQTINQLKAILVAADPKLRDQLRGLSTDKLVKHCAQLTPAAATDGATAAIYTLHLLARRIHQLTREITDLQAQISAILADHNPQLLSTYGVGPDTAAALLIAAGDNPERLGTEASFAALCGVSPIEASSGRTQRHRLNRGGDRQANCALHTIVLSRMRWDQRTRDYVQRRSSDGKTRREAIRCLKRYVAREIYQIITRSPSATAQKAA

SEQ ID NO: 351012 - protein, 320 aa, unidentified
MRCSTKQHQFYCGIDLHARTMDLCVLHQEGEILLHRNMPAGPATFLQAITPYRDDMVVAVACIFTRYWLTDLCAQDGLPFVLGHALSMQALHGGKATNDTIDSQNIAVLLRGGMLPQAYVYPAEMRATRDLLRRRLHLTRKRAELLAHVQQTTSPYNLPEIGKKIAYKANRDGVAERFPDPAMQKSVEVALTLMDSYDRLLSDIELTLLQTAKQHDAQSLYRLQSVPGIGKILRVVLLDEMHDLTRFPRVQDCVSSGRLVKCAKESAGKRSRTSGAKIGHAYLQWAFSEAAVLCLRNHPMGQTYLARLEQQHGKGKALTI

SEQ ID NO: 351013 - protein, 354 aa, unidentified
MKQQAIQYLALDVHQATVVASLRDEHGRVVMRATVATEAKAILTLVRSAGARVHVAFEEGTQAQWLHDLLVAHAERVIVCNVRGRSETTNKSDRIDADGLSELLRLGALKAVYHGAPEVLTLKELVRSYNDLVKDSTRVMQRIKAIFRARAILTPGVSVYRPSQRKQWLAKLEGGARVRASSLLAQLDVLFELRPKAKAAMIATAGRQSGWKILRRIPFLGPVRVAQILAIMRTPFRFRTKRNLWAYAGLAVVTRSSADEELHEGKVRRKRRAPLTRGLNRNHNSILKDIFKGAATAATARPGPLRDYYDASVARGVKEDLAAVTLARKIAAIALRLWKKGELWDPKKVTMQAT

SEQ ID NO: 351014 - protein, 355 aa, unidentified
MNQEKYIGMDVHAATISAAVKNAEGKLLMECVLETKAATILEFIQGLRGTLALTFEEGTLATWLHDLLKPHVSRLVVCDPRKNALLRDGNQNDRVDARNLAELLRTNQAHAVYHGKHGTRALKELGRSYLTLTQDSTRVMNRIKSVYRSWAIACAGTSVYSRRHRAEWLAQLVEPGVRIRAEHLYEQLDSLEPVRQAARRELLRESRKHAAVKLLRQIPSIGPIRSALLVALLQTPHRFRTKRQLWAYSGFAVQTYDSGEFRFVRGKLHRNRERITVRGLNHNHNHDLKNLLKGAAISAIQRPGPLQDFYAALVEKGMRPSMARLTLARKIAAITLIIWKKGASFDPKQLQRQTA

SEQ ID NO: 351015 - protein, 403 aa, unidentified
MAVMIGIDPHKGSHTAVAIGAGEEPLGTLRVRACPAQAQELVAWAVAWPERSWAVEGASGLGHLLAQQLVAAGERVLDVPPKLAARVRLLEAGDTNKNDPNDALSVAVAALRSKAPRQVQAEDHAAVLKVWAKRHRDLARARNQVACRLHAVLCELVPGGIRKEITAAQAARILEQVTPSGAVEAARCELAAAFLGDLRRLDAQLRDTKKKLAAAVKASATTATEVFGVGPVIAGTVIGDIASIWRFASRHHFAAYNGTAPVEVSSGDRKTHRLSLRGNRRINHAIHMAAITQIRHRHSEGRAYYDKKVAEGKTHKEALRCLKRRISDALYARLLADARQAAAACAKGPGGQPGNDSASSAASSHPARQLFGQATPGPSTTIRPGTTAGSPSKPISKKTHATT

SEQ ID NO: 351016 - protein, 343 aa, unidentified
MQSISTIGLDIAKSVFQVHGVDAAGQVVIRRQLKRRFVLSFFEKLPPCLVGIEACASSHYWSRELRALGHTVQLMPPAYVKPYVKRQKNDSTDAEAICEAVTRPNMRFVPIKTIEQQSCLMLHRVRHLFIRQQTAVINSIRAYLAEFGIVAPVGRRGVEQLLEVVADPAECRLPEVARACLAALGSQLQALKAQILDFDRRIIAWHRSNATSKRLDAIPGVGPALATALVASVADANAFRSGRDFSAWVGLVPKQNSSGGKDRLGSISKQGDRYLRSLFTAGALAVIRYAKIHGARHRPWLTALLARRPTKVAAIALANKLARMAWAMMARNECYREPAALTA

SEQ ID NO: 351017 - protein, 352 aa, unidentified
MDATTVAVDLAKDIFEVALANRTGRILERKRLTRRQFERFIDGLAPGTEVVMEGCGTAQYWGRRCQTRDLQVRLLPVQYVRPYVRRNKTDRTDTEALLEANRCGGIQPVPVKTIEQQTLQALHRVRTQWQAARTARINVVRGLLREQGLPIPVGARKVLTRVMSIVEDADAALPALLRHTVALVVEEIRALETRVAAIDRQLAHVARTHPVAVRLQQIPGVGVVTATALVGAVAHIHAFRRGRQFASWLGLTPRESSTGSRRFLGRISKRGDVYLRCLLTHGARAVLLTAQRTVRSTPHRATRFQHWAVTIATRRGHNKAAIAVANKLARMIWAVWHYDVDFRDNLPAVAAA

SEQ ID NO: 351018 - protein, 346 aa, unidentified
MLYAGLDLSRQKLDVHILDEEGRTVDLLAVRPDADALRTLAERIARHGQPIEAAIESMNGARFVHDALERYGWDVAIADAAKAKGLAPLAAKTDKIDARVLAELCRRELVPAIWLPDPDVRAERERARFRLYLVRHRTSLKNRIHATLITFGHPVPVSDLFGVRGRELLAALAIPEPWATTLGTSLRLVDELEAEIGTCEAELRAMGADHPYVPLLCTVPGISWVLGYTIAAEIGDIGRFASPKRFTGYTGLCPRVYQSGPVDRRGSLTKSGPKYLRWALVEAAATAARNPQYRERYEHTKRRLGKQRGSKIARVELARELASAIWHMLTRQEPFRAAGPTFDLVA

SEQ ID NO: 351019 - protein, 346 aa, unidentified
MKQISTIGLDLAKNVFQIHGADAEGAPVLNRKLRRAEVLRYFEKLPPCLVGLEACGGSHYWAREIAAFGHDVRLMPPIYVKPFVKRGKTDAADAEAISEAVTRKTMRFVPIKSADQQAPSMVLKTRALLVRQQTQAINALRGHLSELGVIAAIGTAKVAALIEIVRDEEEFRLPKAAHFALAEIADQIEALTRQIDKLERAIVAEAKRDEDMRRLTTIPGVGAITAANIKALVPDPDGFKSGRHFAAWLGLTPKPHSSGGKERLGSISKMGNPTLRSLLVCGATSVLRHVKGNDKAPQWLIGLLARRPFKVVAVALANKMARIIWALLTKGGTYRNTGAASNAASA

SEQ ID NO: 351020 - protein, 391 aa, unidentified
MINIGIDVGKFKHCATVLDDSTGEVLIKPFFLTNDRKGFDLLYSKTKQFIHRKHSVGMEDTGHYMINLTNYLLDKKFTVKYINPRATFLRRKELGISAKNDRKDALLIAEMLSEKRFWRSISVRSIENSKFRDITRLYHQLQEQQNQDMNRLQRALDIVFPEVNSLSWTRYSKAYMKFLSTYPSASSIALEDIRNLRKALKTEGKGRQSKVTAEEIRELAKCSVGEDNISIDLEVTSIIAIINTREEQIRMLEKKIEEFSHKLNSPIISIPGISHISGMTILAEIGDINQFQNTGNLISFAGMDPLVYQSGKYDAAHMPISKHGSRYMRKALYQAVFTVCKYSPTFHDYYTKKRNQGKSHRCAQGHCARKLLRVIYKLLSTNSLYDQNHIQ

SEQ ID NO: 351021 - protein, 408 aa, unidentified
MDMFCGIDWAEGHHDVAIIDNTGKQLAKCRIDDDLDGYQLLLDLLAEHGDSAETPIPIAIETSRGLLVATLRTGSRQVFAVNPMAASRYRDRHGVSRKKSDPGDALVLANIIRTDMHMHRPLPADSDLAQAIGVLARAHQDAIWNRQQLANQLRSLLREYYPAAIEAWRDKAGALTRPDARKILGAAPTPTLAAQLPTWKLRLMLTNAGRKRGITEDAERLHTLFRQPAARLAPAVEEAMGIQAKALLTQLNAVCKAVDELAKAVERTFRTHPDAPIMLSFPGVGPGVGARLLAEIGDDRTRFATAGGLKAYAGSAPITRASGKRKYVGRRFVKNNRLNHAGYLWAFATLSHSPGANAHYRRRREAGDWHAQALRHLFNRMLGQLHHCLQNRVHFDASVAFPPPAAAG

SEQ ID NO: 351022 - protein, 348 aa, unidentified
MNTTTIGLDVAKAVFQVHGIDARGQTTLQKRLRRAQLVTFFANLPPCLVGIEACGSAHHWARELSRLGHEVKLMPAQFVKPYVKTNKNDARDAEAICEAVRRPNMRFVAIKTVAQQELLMLHRIRQRLVVERTAKANQLRGLLAEFGIVLPQSFCALERGVPEVLADAENGLSDRLRERFSQLFSQLRELCATVREWEQEILAWHRESPLSRRLDQIPGIGPLGASALVASIGDIRTFKNGRQLAAWLGLVPRQDSSGGKTRLLGISKRGDRYLRTLLILGARSVLRQLQRHPARAAHSWLGRLAARSHPHIAAVALANKNARIAWALLAHEREYQADYRARVALAPA

SEQ ID NO: 351023 - protein, 338 aa, unidentified
MLNTHIIGIDLAKHVFHLVGHDLSGRETFRKKLTRQKTLQLLSVHEPVIVAMESCGGCHWFARKCQEYGHQVKLLPAQYVKPYVKTNKNDFIDADAIAEAAMRPKMRFVSPKSEQAQVAIAIRRIRSGYIKERTACMNRIGSMLLEFGISFPRGHHYMKGLFQWLADKKESVPPLLIQELRQQLDYYNLLNQWIKEQEKKLEQLNEGNELMGLLQSVPGIGPMTASCCLSAVNDPQDFSNGRNFAAWIGLVPYQYSTGGKPRMLGISKRGNKELRELFIHAARSILWRDSSVERYFGPWLAELKRRKPFNVAVVALANKLARISWSVMATRKPFEVRI

SEQ ID NO: 351024 - protein, 364 aa, unidentified
MKTKRNKTVKMQLVSDRPIKKVSFGIDISKDNFEVSVGLGYDYSEEPQIRNIGSFNNTGAGMGRFITHSRNLLTGLNLTPEAKIQFVMESSGVYYECLAYRLYQEGLSVHVALATKMKNYTKTLKNKSKNDKQDSLAICRYGLEKNLQDWKPMSDEMKKLKELTRELALHKDDIVAAKSILHSQKAAYKTNPEGINRMKSKIKYLERLIKKVNEEIKATVDSNPELKEKVNMIIKNFRGVGYQTVVILLAETDSFKQVTNSKQLVSYSGLDIMENQSGNKTGKARISKKGNSVIRRALYMPALCAIRFNDRMKGFYQRICDGHTGVSKKIGIVAVMRKILCIIYALWKNNTEYNPDYLSMPMAC

SEQ ID NO: 351025 - protein, 394 aa, unidentified
MKLVGIDVGKNSHHFCVIDKETGEFNVAPSSFSNNKEGFDFLINSLKPYSKKSILIGMEDTGHYHVALLKFLLSNGYTVALINPKTTDLTRKMEGGITKNDKLDTITICDVLDTPERKKQYRITKVDRFDLYEQRQLTRHHHNLKEELNVYCNRLQKSIDLVFPEFNTLFSSKYSIVYMNLLKTFGSAEAIASTDIRTIRKCFEVKGRGGRISLTPEKLKECAKNSIGISSEVETIQIKHLVSQITLIKEQIAEIDKKIEEFSITNNSPILSIPGISHFSGTSILAELGDIGNYSKPSQIIKFAGVAPYHYESSQYNAQHTGITKKGSKYLRKTLYQIILTVINNNPVFKKYYLLKISQGKGHHCAQGHCIRKLLRIIYHLLETGQSFDPALLR

SEQ ID NO: 351026 - protein, 414 aa, unidentified
MEVVHARCAGMDISKTDAKVCVRIAGAGRRKTAETVTTWGAMTGQILTLRDHLAAEKVTCVVMEATGDYWKPFYYLLEDLPGVQVLLVNARHVKNLPGRKTDVADATWLAQLGAHGLVAGSFVPPAPIRALRDLTRTRTAVTRERGREAQRLEKLLEDAGIKLSSVASDILGVSGRAMLEALIAGQRDPDVLAGLARRRLRARIPELAQALEGRFSEHHGFLARVHLDLIDQHTAAIGELTRRIEQVIEPFRGFRDLICSIPGIATVTADVIVAEIGDDMSRFPTAGHLASWAGTVPGSNESAGKVKSSTTRPGNPYLQGVLGTAAMSCAQHPGTYLNAKYRRIATRRGPQKANVAIQHAILVAIWNMGTSGTFYEDPGGDYFTRLNPERARTRAIRQLESLGYAVTLAGTSAS

SEQ ID NO: 351027 - protein, 395 aa, unidentified
MEFLKYGLGIDMAMEKFDACISIIDKQQHVMIRAQCSFNNNKKGFETFILWVTKNTKLPIPAVYLMEATGIYYEQLAWFLHNKKCSVSVVLPNKAKKYKEALGLKSKNDRIDAKGLAQMACEQNNTIWKPLSGNLYVLRLITRQIQSVSEQSTVLKNQLHALEYCMYRDKAIEKMYAGQIDLLQKNKKSLQLRVEQIVEKDEILKKKFKNIGKIKGLGLQNLAVIVAETNGFTAFENIAQLVSYAGYDVVENQSGKRSGKTKISKKGNNHIRRCLHFPAFNMITYDVAPFKNLYERVYEKSKIKMKAYTAVQKKLLAFIYILWKKDEAFDPNYQGKESGDEESVPSFASVPQEPLIACGNEEKKLNLIKQKITPAITRVTQDKHPSKYRRMPSFA

SEQ ID NO: 351028 - protein, 347 aa, unidentified
MRFYTTQHPFYCGIDLHARSMYVCILSHDGELLLHRNMNAAPEPFLKAVAPYREGLVVAVECIFTWYWLADLCAAQGIPFVLGHALSMKAIHGGKAKNDKIDSQKIAALLRGGMLPQAYVYPAEMRATRDLLRRRTHLMRKRAELLAHVQNTNSQYNLPEIGKKIAYKANREGVAERFEDPAVHKTIEVDLALITYYDQMLSDLELFILKTAKQHDAQTLYLLQTVPGIGKILSLVLLYEIHQIDRFPRVQDFASYCRLIKCAKESGGKRLGTSGNKIGNAHLTWAFSEAATLFLRGNEPGQKLLARLEKKHGKGKALSILAHKLARAVYFMLKRQTAFDLEQFLRP

SEQ ID NO: 351029 - protein, 337 aa, unidentified
MAKEKAVRWVGVDVSARWVDGSRAAADEPVSARQFANTPAGHGELASWLTQGGRRARVVLEATGLYSLDLALRLQRTARIEVMVINPRASKEFAGAWGQRARTDASAAQGLREYAARMPFTPWTPPGPQALALRTIMRRVVALIEARVQERNRLHALSATEAVPAVVRTDIRQHIRTLERRIARLEHEARALVEPAPALRAGFRHLCSVKGIGRRSALMILAEVAVLPGELTARQWVAHAGLDPRPIRSGTSVHPPVRMSKHGNVYMRRSLFMPALVAVRRNPAVQRFATELTARGKAPLQVLVAVIRKLLHAIYGMLKTDTDFDGEKFRRSAHAEG

SEQ ID NO: 351030 - protein, 380 aa, unidentified
MVFLPSTIPSRMARTNLASSLQPGGDPGPVSVFIGVDTHRDFHVAVALSLQGSLLGEMHLPACMAGYEALLDWALELAEGRATSLLFGIEGTGCYGAGLSRHLQAAQCSVREVNRPNRQTRRQRGKDDAIDAEAAARSLLAGTATAVAKAGNADAEILRVLKSTRDSAVRCRTRAITQLKALLIVVPAELREALQHLDTAELVNRCLDRNEEVATSPLTAARLAMRTLAERIRHLEQELIVLGRQLDRITQAVAPGLRAAQGIGPDNAAALLIAAGDNPQRLRSEAAFAALCGASPIPASSGTRQRHRLNRGGNRQANCALFRIALNRLRWDPATKAYAERRTAEGKSKREILRCLKRFIAREVYRLLQAGSLRPAAMSA

SEQ ID NO: 351031 - protein, 420 aa, unidentified
MKAWNQITHYAGFDWAKDHHDVIILDNTGKIVADFRFEHTAGGWEQFREKLAAFAGVAVAIETKFGTVIERLQEIDCCIFPVHPQSAKAYRQRKVPSGNKTDHVDAWSLADALRLDGANWKQLAPQEPLIKELRLLCRDEVALIRDRTALITQLRQTLYDYYPAALEAFDDWTMPAAWAFILAFPTPEALVKAGKRKWEKFLHVHKLGRPETYQRRLEIFARADRFAGSPPAIHAKSRLAVTRAKQLQLLQTQINEYRQEIRRLFAQHPDAALFESLPGAGDKIAPRLLSEIGDDRVLFPDAQGLQCLAGTAPVSFQSGQIHRVHLRRQCNKSLRNVVHLWANLSREFCPWAATYYTALRGKGKSHACALRALGQRWLKIVWKMWQARMPYDADLHARNQIKHGSWVLQLVSKADASPKT

SEQ ID NO: 351032 - protein, 366 aa, unidentified
MFKVGEKSKSVSADRDGSRDHIVKRRGSMSQLSKSATDVVFCGIDVSAATLAVAVEQQDQPVVEREFPNNASGHKALIAWLGQRGQARVSLEATGVYSLDLALALDAAEGIEVQVLNPKVAHRFGQTLSRSKTDPVDARTLAAYSRRMEFTGWRAPSRSQLQLRSLTRHIDNLTAELTRGKNRLHAAKVSDMTPACIVEDLQNALESLECRIHVLRREALALVRADAVLKENFELLISIPGIARVSALQILGELVVLSPELSVRQWVAHSGLDPAHHISGSSIHKPSRISRAGNRALRRVLYMPALVAIQHDPHIKAFYRALVHRHKAKMQALIAVARKLLHAIYGVLKSATPYNGQKLFPQIQTI

SEQ ID NO: 351033 - protein, 348 aa, unidentified
MKITTSGIDVAKSVLQVHGVDERGKVALRRQIRRSQLLLFFSKLEPCVIGMEACASSHHWARKLMALGHTVRLMAPQFVKPYRKNDKNDGNDAEAICEAVQRPSMRFVPVKSPEQQAELAVHRIRRRLMSQRTALINQLRGLLAEYGLILAQGANHVRSKLPALLEDGSESLPALAVELFRDLYEQLVQLEQRIDVYERRVERLYRGNPVCQRLGQLDGIGALTATAFAATVAHAAQFKNGRQCAAWLGLVPKQDSTGGKPRLLGISKRGDVYLRTLLVHGARSAMRHTPKQNDPKSRWVEQLRKRRGENIAAVALAAKHARILWALMVRGEASSPSASHIVELQPTI

SEQ ID NO: 351034 - protein, 431 aa, unidentified
MLKINPLSTLYVGIDVSSKSNYVCALDFYKNKYINSSFANNQPGAEELAQKILVCLKEHPDLNTVVAALESTSVYSIHVANYLSSCEELMGFKPFVFVLNPKCTANHKKSFIGLGKSDPIDAFVIADYARGGNIETEPWRGSQFLALKRLTRHRLHLVECITREKAYLVSNLYLKFSELQMLEKDDQPFCDIYGATSSSVLTDYLSPEEIIEASEEELIEFLAGKSRNRIKDISKTADLLKKAARDSYRLDKALYEPLNVSIASSFNCIETFKKEIKAIDAAIEREIKGLNPNAFIILQSIDGIGPVFAGGIIAEIGDISAFTSSDALAKYAGLCWKSNQSGDFDGEDTPMTKAGNRYLRYYLGEAANSMRKHNVEYGAYYRKKYNEVPKHQHKRALALTSRKFVRLVFGLLARNQLYSGVSLDTSTEQQS

SEQ ID NO: 351035 - protein, 278 aa, unidentified
MLYAGLDLSRKRLDYHLLDEGGDTVELGVAPPDADGLRGLAERLARHRQPMRAAIESMNGARFVHDRLERHGWEVEIADALKVKGLAPLACKTDRIDAWVLAELSRRELVPAIWLPDPQVRAERERARFRLHLVRPRTSLKQRVHACLLAHGKPCPVSDLFGLSGRALLARLALPEPWTGHLEARLHLIDELEREIERCERELRRLGAKHRYVPLLLTVPGIGWVLAYTIAAELGEIERFPSPTKLAGYSGLSASTSRANPTAAVDSASRVPSTCAGR

SEQ ID NO: 351036 - protein, 386 aa, unidentified
MSQANNLRRCHSTFDQDTSLIAVVEMSQSSWLVAGIVPGISRQPANKIKPDQTVLLGLLRRWQGEVAKVGREISRLAVAFEAGRDGFWLARWLQARGIEAYVIHATSIAVSREHRRAKSDRLDTELLKRAFIGWLRGEPNHCSMVPIPSLEEEDAKRPNRERESLVGERTRIVNRMKSLLARLGIRDFKPMLRKAPEHLATLRTAEGVQLPPNTLAELRRDMARLRFVMEQITEIEQARLDRIAQGPEEGMHAMVRVLSGVKGIGVETADMLVHEIFSRPLQDRRAVARYAGLTGSPDESGSRRHEKGLAKAGNARVRRGMVQIAWRFLVFQKDSALSQWFRFRTENARGTRKTMIVALARKLLIALWRFTRTGELPEGVVLRASA

SEQ ID NO: 351037 - protein, 377 aa, unidentified
MKKELYLGLDVHKDCIITAEAEEGRKGEVRESGALSNDLHAVEKWIGRLRKRHGKGTLLRACYEAGPCGFGLARRLGQLGVECQVVAPSLTPTRSGERVKTDKRDARKLARLLRAGELTAVYIPDARDEAIRDLCRARSDAVDDRRRSRHRLKGFLLRHGYRYQGKSSWSAAHERYLRELVLPHPAMKVILEEYLQGIAAAGERIARCEAAMGDLLEQWRLKPAVHALMAMKGFRTVAAMILVSELGEVHRFTHPRQVMAYLGLVPTENTSSERRRQGHITKCGNAHARWLLVECAQHYATPPKVSQELSRRQQGQPAQVRTISWRAQNRLHRRYRRLLGRRLQRNKAIVAIARELCGFIWELLRTQDCYQAQSTPV

SEQ ID NO: 351038 - protein, 413 aa, unidentified
MNTLFVGIDVSKHTNDAVAMTSAGDTVDGFKVRNDLPGAESLCDRLVKVMTKGGFDHLLMGVEATGIYGWHLTQHLRKATVLQPFKPVVHTFNPKIVKGFKKAYPEMDKTDPVDAWVIADRLRFGRLPAPGGVDERYEALRRLTRTRFHLVQDLTRAKQRFLNALFLKCSGFALDTPCDRLFGATALGFTVETACTETLAATSIEELTERVIHYSRGRYAAPEEVAEAVQKAARSSYRLPKALADPVNLELATFLALIRSLEAQIKSLAGPIEQLVATMPNTLRSVKGIGPVFAAGILAEIGDIHRFPDHNAVAKYAGLAWSRHQSGQYESEDKRLIRTGNRYLRYYLVEAAYSVTMHDAEFGRYYQRKKAEAKTHAHLRALALTARKLVRLVDHLLRSNRLYNPLGAPRRKH

SEQ ID NO: 351039 - protein, 361 aa, unidentified
MSNSTTWIGMDVHKERIHVVAVNEAGHTEARWETPNTPKGKGRLATRLAGLGKARCVYEAGPCGYDLRRFLDEKGIPCDVIAPSLIPTRAGDRVKTDRRDAEKLARMHRMGELTAIHVPTPAQEALRDLVRAREDANEDLVRARHRLQKFLLRQGRRFEGKSWTRDHWRWIRALSFEDRNAETVLAEYLLAVDQQLERVARLDARIEEEAQNPGIAPAVARLKALRGIRTLTAMTILSELIDTNRFASPRELMSFIGLVPSEYSSGGKQRRGSLTRAGNAHVRRVLVEAAWHYRHPPHRTGETIRKRREGQPPEVIETARKAEVRLHRKFTRMVMRGKRTTVAAVAVARELTGFVWAIGRI

SEQ ID NO: 351040 - protein, 402 aa, unidentified
MFFAGIDWADDHHDIAVLDQQGQLIGSLRVSHSPAGLAQLKAFLLDIAGDPQQIPCFVETNHGLLIPSLLEAGFPVYPLNPKTVDRRRKPAGAKTDAIDAYLLARTGRSDLADLRPLQPDSSLVQELKALSRDLEALIQSQTRLVNQLTACLKEYYPVALELFCKLHQPATLAYLQAYPTLEAARVASVEELALLLRQQRHPQPQRTATKIYSQVHQPQLQADPVTTRTKSRLMLVLVGQLALLVEQIKAYDQEIHHFFVLHPDSSLFCSLPGAGKRLAPKLLAEWGDDRERYTGAGSIQALAGTSPVAYQSGNYRKAHKRYACVKPLRNALHQFAWQSTRKEPWAGEFYQRKRAEGKSHSMVVRALANLWVRIIYAMWLKHEPYDAATFLAARQAHARVAA

SEQ ID NO: 351041 - protein, 368 aa, unidentified
MKKVVYIGLDVHKDSIAIAVAQEDREAAREFKTIACDYMRVLKAVRLLTPEGGKAVVCYEAGPTGYGLHRRLHKAGIDCRVVAPSLVPTRAGNRIKTDRRDAVRLAHYLRSGDLTEVYVPQEADEALRDLERARDDAKRAERTARHQLGKFLLRYERRWEGKTNWTVRHMEWIRRLKFKHEAQQCVLADYLKAVEDAGERVKHLTNQIKQQVETSALAPLITALQSFRGIALVSATVIAAEVGDLRRFATAGQFMSYVGLVPSEHSSGERRRQGAITRAGNGHLRRILVEAAWHYRYRPGISRELRRRNQPVAEGVRRISWAAQRRLHERLYHLIYKGKNKKTAVIAVARELAGFVWAVGQESDLLAS

SEQ ID NO: 351042 - protein, 465 aa, unidentified
MKPNRRLPQKNSAAGPSLLERMNPNAAGIDCGAATHYVAVPADRDTTPVRAFQTFTADLHRLADWLTACGVTTVAMESTGVYWIPLYEILEGRGLDVVLVNARHVKNVPGRKTDVVDCQWIQELHSVGLLRGSFRPTAAIAALRAYLRHRETLVQSAATHVQRMQKALVQMNLQLPIVISDITGVTGLRILRDIIAGQTDPHALAQHRDHRCQASEAEITAALTGHYRPEHVFVLQQNLELFDAYQRQLAACDAAIEAHVLTLVAQAPPPPGPVPAPRTSKKPRANEPRFEIRTPLHQLTGVDLTQIDAIGPYSALRLLAEIGTDMSRWRTEKHFTSWLTLAPHNKISGGRLLSSKTQPSANRSAAILRMAAMNLGRTDTALGAFYRRLAYRVGKAKAITATARKLAILVYRTLRDGLVYQDPGAAAYDAQHRVRVLHRLRQRAAHLGFSLLNRDTGELLEGAVS

SEQ ID NO: 351043 - protein, 331 aa, unidentified
MFPVGIDVSKDTLDLCMLYDGIKGRVKTRNIKNDRSAVENISRWLRLQHCGSEDVHVVMEATGVYHERLATALHDAGFYVSLANPHRSREFARGMGIMTKTDKVDAYMLACYALLKKPHRWEPPAADISHLSALLRRRDVILADAVREENRLEKYQSTDTPADVVSSCIRMAQLLREEVKSIERQIKAHIKASPDLKRDYALLTSIKSVGPQLGMHMLVVLRSHHFESADQAADFLGVVPVEKRSGTSVRGRPRMSKIGPPQLRAKLYMSALCGKIHNKRMRTVYEEMCLRGKPKMVAIGALMRKLVHWCYGVLKTGTAYNDGGPRAALNT

SEQ ID NO: 351044 - protein, 352 aa, unidentified
MPVLHYIAMDTHSYTTEICVKTRANGPARRWNVPTTIPAIREVIESIKRPRQLTFEEGPLAAWLYRNLKDAADRTLVCDPRKNAWISKGGDKDDPIDAGKLVDLLAGGFLKAVHQTEDLSGEVFKQLVGRYHERVARRVSESNKIIGWLRRWGVMVTARDFAEKSLRAELLGRLPADAELEPVRIGLELMFGGFDHAVRQETRLRRELIKRAKKEEFIVRLEELPGISWIRASTFFVYVDTPWRFAGKSALWKYMGIGLTRNTSGNGPQSLHVERKINRRLKSMILGAAKTVLERNGPDDPFAQQHRRWKESGLSPRNARRNVARNLAAVAWGMWKNGGVYEPARIGMKSSE

SEQ ID NO: 351045 - protein, 421 aa, unidentified
MEQPTTIIAGVDTHTGIHTLALLDMNGRVLSTNTFGADPDGYGHLIAMLGDPARCAGIGVEGTNSFGAALARRLQAAGFPVYEVLRPKRGVRRKDGKSDPIDAIAAARSVLAGDGTSLPKSSDGWVEALRHLNAERSQPVTAMTTPANSTGGLPAAAPEPIREKYRGLRTETRMNRLASCRPSGGLVAHSVLTALKGAAKAWRALKEQADPLEERMRSILDTNARPLLDIYRAGTITAATIAIVAGDNPELIRDEAAFAKLCGACPIPASSGKTNRHRLNRGGNRQGNMALHRIAIVRLGYHQPTRDYVAKKTREGKSKLEFIRCLKRHIAREAYKALIAIRNGGAGRQTPQERGALLRRLRTSHGITQQQIGEALAVPSSRISEIERGTRDLPELEQRATQWIHSITTPTTRHSQPLDDE

SEQ ID NO: 351046 - protein, 317 aa, unidentified
MNTSKIQIPVNIGVDVGKANLDIALHPSGEFYSIPNSEAHIRRFVKILKGYSIERIVVEATGRYEHALVQACDQAGLPIIVVNPTSVRRYAQAIGVLAKTDRIDAQVIAKYAATLKPEFKPIPDKTSQKIKDLLTRRGQLLEMSTMEKNRLQILPKTLHRSIKSLLKMLQSQIETITKQIEQEVAKVDHWRIKSEILTSVPGVGKVLTYTLLSELPELGSLNRKEIAALVGVAPINRDSGKLNGKRRIRGGRHRIRTVMFMAMLSSIQCNPVFKRFYEHLKAQGKVPKVALIACMRKMIVVLNTMVKNQEPWRQNMA

SEQ ID NO: 351047 - protein, 325 aa, unidentified
MPPTFVLGIDVAKTTFQVCLLKAGRASAAAFTNDPAGFQQLTTWLKRRKACTVWACLEATGRYGDALAEYLYDQGHTVSVVNPLAIKAYAQSQLSRNKTDAVDARLIADYCATQQPAAWSPPTPEIRELRELARQYQSLQTSRQQAHNRLTSGFQSATVLAQLQAQVDLLDQQLAEVQHYMRQHIDRHPDLKRQRELLDSIPGIAELTATKLVAEDLGRFDSARSLAAYAGLTPYNQTSGSSVRRRPKLSKLGKISLRRALYFPAIAAKRKSVFQALYQRLLAQGKSKMAALGAVMHKLLRVAYGVLKSGRPFDPDHAAQFHFAS

SEQ ID NO: 351048 - protein, 350 aa, unidentified
MMIIGCDYHPAFQQIAFVDTETGELQERRLQHPEEAEKFYRALAAAGQKVWVGMEASGHARWFERLLAELQFELWVGDAAEIRTKRVRKQKTDRQDAQLILKLMLKDDFPQIWVPSWENRDLRQLLWHRHRMVQARTRIMNQLQAVALNEGLRCKKRLWREAGREQLEAFRLAPWASRRRRDLLELLDRLNPTITDLTQTIEQEAEKCPEAQRLMTHPGVGPLTALAFVLIIGRAERFQCGKQVASYLGLVPLEESSGNRRRLGHITKQGNALLRFLLVEAAQVSVRSIPEWRNKYFHLMMRRGRKIAKVAMARRLAVQMFWMWRKGWDYEQVRKFGSHAGQPGHRDGVQ

SEQ ID NO: 351049 - protein, 372 aa, unidentified
MNAVGIDVSKGKSTIAVMRPFGEVVASPYDVGHTESELKELASFLKSLPGETRVLMEYTGRYYEPIAQYLHEAGIFVSVVNAILAHDYSGNSLRKVKTDKIDAVKLANMAIDRWLQLVEYVPEDEIRQTLKICNRQYNQYNKLKTMLKNNLIALLDQTFPDVNKLFNSPARKSDGHEKWVDFALKFWHCECVCGISERQFKDKYERWCKRNGYHYSADKAEDVYVEACGNVGLLPMCESTKVLITQAIIQLQTIEETLAAVKCEMQKIASDLPEYGTVMDLYGVGEVLGPQLIAEIGDVSRFKSKKSLIAFAGIDSPADQSGQVDNKSKAITKRGSASLRKTLFQVMTVILQNSPEDERYCQVFFANLSLIK

SEQ ID NO: 351050 - protein, 329 aa, unidentified
MEHYAGIDVSLESSSVCVVDATGRVVREGKVASEPETLIAWLRQSDLDFARIGLEAGPLSQWLHAGLRDAGFMTELLETRHVRTAFKTMPVKTDRKDARGIAQLMRLGWFRPVHCKSMAAQELRAVLTARKLIQGKLHDVQMSLRGILRGFGLKVGPTTQRTFADRIRELVVGHPTLQMIAAALLSASDELGRQLGQFEVQVRNLARRDTRARLLMSTPGVGAIVALTYVAAIDDPARFRSSRTVGAHFGLTPKKYQSGEIDVTGRISKIGDVSVRVALYEAANVILTKPVKGSTLKSWAMRVAARAGMRKAKVALARKLGIHPVRTAA

SEQ ID NO: 351051 - protein, 361 aa, unidentified
MRIIGCDLHARQQTLAMLDMATGEVKEHVLEHNGNAVRDFYAALEGRLRVGIEATGSMHWFLELMEELGIECQVGHPAKIRACEPRKQKHDRRDAMLLLKLLSEDRFPRIWMPTVEQRDVRQLLLYRHQWVRIRVRVQNALQSIALSHGLRRGTSLWSQAGLEAMGALALPPYASQRRDALVRLYRQLEAEIDVLNKTVAACAVQRPQARRLMTHPGVGPITALATEVFLGDAARFADGKAVASYIGMIPSEYSSAGRQRCGALTKQGNALVRFLWCEAVGHAVRRDEALKRFFRRKLAQKGLGKATVATGRKLGIRLWIMMRDEIDYDEFCRRTRQTREPHAEMPACKHGPASGSDRTPE

SEQ ID NO: 351052 - protein, 445 aa, unidentified
MKDKTILKEEVFKLVHPNAAGIDIASQMHYVAVPPDRDEQPVRKFGSFTVDLHEIAKWLKQCNVDTVAMESTGIYWIQLYLVLEEYGFSVFLVNARHVKNVSGRKSDVLDCQWILQLHTYGLLNPSFQPETMIRELRSYMRQRKNLTQSYSVEIQLMQKAFDQMNIKLHNVLSDITGKSGQSIIKAILSGERDAQLLAELADKSVKAPKEDIIKSLQGNWREEHLFELKQAYELYLIFKEKINECDRQIEKVLGRLETCSNVLSGEHKTDRNVYSKNRFNFNATSSLKNILGVDVTKIFGISELLATEIISETGMDMTKWPTKKHFASWLNLAPNNRISGGKLLKSKRMKKKNKAGQAFLMAAFALQRSEHWLGEFYRRIKAKHGAIIASKATARKLALIFYDMAKLKVEFNPIPIETYNQYFKERKMKYLKKQAFKYGYDLVPA

SEQ ID NO: 351053 - protein, 424 aa, unidentified
MEEKELAKPIRAWIGIDWADEKHDVSLYDLETGKQEVLTIAQNPEALQEWLGQLRARYEGGYVAVVLEQGRGGLLNALMSCEFLVLYIINPKSLSSFREAFYGSGATSDPVDAELMRDMVRQNPSRFRAWRPDDVPTRSLRLLTEGRRHLVNQSTALTNQLTALLKGYYPQALAWVGSLDTASACDFLEQWPTLQSLQISRRRQILRFYETHPRAALDLNEQLKQIQDARALTQDEAVLESSALMVQALVSQLRPLLASIAEFDRKIATIFRKHPDRPIFESFPGAGAALAPRLTAAFGTDRDRFQAATEMQELAGIAPVTEKSGKKTFVHWRYACPKFMRQTFQEFADHSRRWCTWAKAHYELLRSRGKSHNAAVRALAYKWIRILFRCWKDRQPYQDEVYTNSLFKHGSPLSQLLAKPVENP

SEQ ID NO: 351054 - protein, 369 aa, unidentified
MSERTRFVGLDVHKATIAVAVAEAFGDPEDHGQIANDPSAVRRLMQRLGGPDLHLEVAYEAGPTGYALHRQLAAMGIACVVVAPSLIPVKPGDRIKTDQRDAAKLARLLRSGDLTPVWVPDEAHEALRDLVRARDDAKADLLRAKHRLSKFLLRRAIHPPAGVQAWSRAHDAWLVRLTFEHAADGVVVEHYHAVVREAAERVRRLETALAQCAAASPHAELLAALQAIRGIGFLTAVTIVAEAGDLRRFPTARQFMAYVGLVPSEYSSGASRHRGHITKTGNRLIRHVLGQAAHNARYRPNVSTSLRARQRGVSPAVVELDRRAQARLHARYRHLAGRIGTNKAIIAVARELAGFVWATGQLVPAAQAA

SEQ ID NO: 351055 - protein, 342 aa, unidentified
MKQYVGLDVSQNETSVCVVNEVGQVLFEGKAKSDPGALTELLRKRAPQAERIGFETGAMASWLWHELRRVDLPVVCIDARHAHAALSVRMNKSDQNDARGLAELVRVGWYREVKVKSEESQKIRAILVARSRLVAIRRDIENQVRSLIKEYGLLFPRAIGKQFRNQVSELLGEDHQLLGVIAPLLLIHEHICEQQCKFDDEVRRLAKSDEATRRLMTVPGVGVVTALTFRHTIDDPSRFRSASSVGAYLGLTPRRNQSGETDINGKISRWGDRLLRTYLYEAATVLLYRTKKWSSLKAWGMKLAKRIGMRKAKVAIARKIAIVLHCIWVDGTSFDWGQAKEA

SEQ ID NO: 351056 - protein, 355 aa, unidentified
MTSVKYIGMDVHKEAISIALMNGAGKLLMESIIETKAGTILQFFAGLRGDLRVTFEEGTWAAWLYDLLKAHVTEIVVCNPRKNALLKDGSKSDRIDARKLADLLRGNYLKPVYHGEHGLRMLKELSRTYLAISKDLVRVMNRLKALYRGWGIACSGRSVYAPNQRAVWLKKITEPGVRLRAEYFYQQLDTLQRLRREARRHLLSESRKHSATKILSQIPTIGPIRAALLVALIQTPHRFRTKRQLWAYSGLAVETHDRAQYRYLDGQLLRSRKPQQLRGLNEDHNHDLKNIFKGAAQKAIGATGPFHEFYERLLTKGIKPSMARLTLARKIAAITLTIWKKGARFDPQQLKPQAA

SEQ ID NO: 351057 - protein, 307 aa, unidentified
MNTCVGIDVSKDELVVHVLPTEAARTFPNTADGRADLLGWLLPQPHPRVVFEASGGYERDLLDTLHHAGLNAVRLPPRRPRALAQALGLKAKTDAIDARVLAVAAQLLPAAPTVPLTAATQTLREWLHVRTALVNERDSLRRRRIHLRQASVRAWVDAHIADLQGRIAEVNTQLEQALAACDLSLPAAPGLGPILRATLAARLPELGTLDRRRIAALVGLAPYNRDSGRWKGQRCISGGRPDVRRVLYMATWAAIRARSPLASTYQRLVNAGKPKKLAVTACMRKYLTMLNAMQRDNLPWNPKGSSA

SEQ ID NO: 351058 - protein, 447 aa, unidentified
MSNGNGLSRGDRNRNARLARLRELVPLSHAIVGIDLADNTQAAVVSDHDSRVIARRRVSVRAWELGELLDWAVDRAAAAGFASVTVACEPTGHRWRVLDQLAAGRGLALVCVQPLLVYRAREGEDLTRDKSDPKDAVLIARLAGELRCYEPERADAVWARLRHLGARRSQLTTGATAAVNQIRDLLECAWPAVLAASGSPFRSVSWCASLAVVLDRCAGDPGRVRRLGLARFTAAVRRELPRWGGRRPCLRIIRAVFAALADPAGVAAHRPGALERAHLALGDWRDTRARLADTETRMRAVLEDLGLTELVTTIAGLTVTGAAAILAETGDPARFATARALVKHAGLCPRDNASGTAQGKTSISGRGRPALRLAAWRAVWAAMPNNPVMAARFEYLTTRQDNRLARQQARTACAAALLRWIHVVVTRHVAWDPAIAAGAAQAAHRAG

SEQ ID NO: 351059 - protein, 379 aa, unidentified
MESITQNEKVLYVGIDVHKDTYALCCFDFQRNELSDEMIVKGTTKAVISYLEAIKQKHREELLFVCGYEAGPTGYGLCRGLQQAGFGCVVMAPTTMANPEGKRRVKTDRIDARAIARILAYKSYRQVYLPSEAMEALKEYTRARDAKKKLYKKAKQELLSFLLRNGKRYPESGKYWTARFFKWIKTVQFSEKWMQEAFSEYLAEVYSLKAKIELMDAKIREIAGLEIIKDVVDKLVCFAGIDVTSAVETVVEINDFTRFATAAQFVSYVGLCPGQDSSGKSKVMLPLTKAGNRRVRALFCESAKAIKRTNPYGEKSKRIQMRQKNASAEVVAYADKATKRIRTKMKQLEWRGKNYNVASAAGARELACFVWGMMNGRIA

SEQ ID NO: 351060 - protein, 359 aa, unidentified
MQQKISEKDFSGQSIYIGLDVHRKAWKVSVMTETFMYKTFSSPPVAEKLGNYLRNHFPGATYYSAYEAGFSGFWLHRELTKLGVNSIVVNPGDIPTTDKERKQKEDLRDSRKIAQTLRAGQLKGIFIPSEKVQQDRILLRTRETIVKDLKRSKHRIKSLLYFQGIQYPDRFYLNSTHWSKAFIKWLDGLTFVHESGKGGLNAHLEMVRQLRGLLLKVTRQLRELSRSPDYGQAAELLMGIPGIGMLTAMKILTELETIERFENFDNLCSYVGLVPSTNSSGENQVDSGITPRRNSRLRAALVESAWIAVRNDSALLVSYQKLCRRMPSNRAIIRIAKKLLNRIVYVLRSKEKYEKSVVK

SEQ ID NO: 351061 - protein, 409 aa, unidentified
MGDGPAARLLDFLNGVPSRRRARRDDGSSASALRRFGCSQEPALAKAGDTVVAGVRHMVGGRVRREVRTFKTTTKDLMALSEWLSAEGCTHIAMEATGIYWKPVWHVLGDGEFELVLANAAHVKNVPGRKTDVNDATWLADLMAHGLIRGSFVPDAHTQELRALLRTCKQFVRERSSHIQRLQKTLEDANIKLDSALSDVMGLSGQAMIEALIAGESDPDTLAGLAHRRVKARPEDLREALRGRVTKHHRFLLQLHLQQVDAIDAAISEIDREVDANVEPFRTAITLLTTIPGVSDLSARVIIAEIGNDMSRFPTEGHLISCAGLCPKNDESPTEPARRLRSRRGVEKAIGAVAASILTAAYHMLAHGTLYHDLGPDHFDRTAKATQTRRLIARLHNLGYAVQITPLAP

SEQ ID NO: 351062 - protein, 420 aa, unidentified
MKDFSVDDFAAIVGIDWADKKHDICELPAGTRDYQWSVISSKPDQLHAWAMALEKRYPGQSIAVACELKKGPLIYALSQYRNLVLFPINPSSLAKYRRAFFLSGAKDDPGDALLQTEMLEKHMDRLKPIEPESAKVRALAQLLEYRRKLVQDRVDLTNGISATLKNYYPQVLDWFNEKDTHIFCDFVIKWPSLTQAKRARKNTLIEFFNAHNARYHQVNLGRIDAIKAAVALTDDAAIIEPNVMLVEILVPQLKHLLDGIKRLDDEIKRRYKLLDDRYLFDSLPGAGPQFAPRLLVAFGSNRARYQTASELQKYSGVAPVIERSGQKSWTHWRYSCPTFLRQSFVEWAGLTVRYSFWARAYYQQQEARGKPHNTIIRALAFKWIRIIFRCWKDHKPYDESKYLEALRRRGSPLLQFAVNP

SEQ ID NO: 351063 - protein, 423 aa, unidentified
MPVSTLYVGIDVSLKTNQVCPINFNQDVFFNEKFDNSPSGTERMIVKILDILNKNKDLNKVLFCMEATSVYHIHVSSILASDSRLLAYGCKVYAENAKSIQKYKETFLDREKTDPEDAYLCADYARIGKCKKSHPVIGYQKIALQRLTRQRKHIAEQLGKEKQYLSSNLFLKFSALKVNPEDNPFSDTFGKTSSVMLTDFLSNEEMLKADLGDLVVKTGEISNNRISDKDEVARKLKRMAQHSYHLDSYASDSVSMAMASSFRLIETYQNELKKLDKEILRMIEGYDNKYYTILTSIKGVGNVFAAGIIAEIDDIHYFRNDGHLASYCGLRWKKNDSGNKRSDHTKQSNTCNTYLRYYLVEAAGSILRFNDEYASYYCRKKSEVKVNSHKRALVLTSRKFVRLVYGMLRDHKLFDDHYLAHRS

SEQ ID NO: 351064 - protein, 387 aa, unidentified
MAKVDDLSRSLTGLDQEETLICVVELSQSSWLIAGMVPGVERQPLKKLEPDAPGLMRVIERWRDEAIRAERMITRIVLAYEAGRDGFWLARWMRARGVEVHVIHSTSVAVSREHRRAKTDRLDTAMLMRVFLGWLRGERGHCSMVAVPTIDEEDAKRPGRERESLVGERTRIINRMKAALARLGIRGFKPELRNAPARLETLRTPEEVMLPPNTLGEIRRDMARLDVIREQIKTIEQARLESIGRAPDQPPHAMVRLLARVIGVGIESADMLVREVLLRGFRDRRAVARYAGLTGAPDESGTKRREKGLAKSGNSRVRRGLIQLAWRFLLFQRNSALARWYLERTSGTKGARKTTMIVALARKLLIALWRLATTGLVPDGVMLRPAV

SEQ ID NO: 351065 - protein, 386 aa, unidentified
MQASSMDTPTAGYCGTIFVAIELSQRSWLVTMHCPDRDKISHHRLEGGDHAGLLALVDRMGERATRALGVTPAVVSCYEAGYDGFWLHRLLMAAGITNHVFDPASIAVDQRARRVKTDRIDGEKMLRTLMAYLRGEPRVVRIVRVPTPEQEDARRASRDRGRLTKEQTAHTNRIKALLRLLGMAIGNPRRRDWLSWLATQKDWQGQAVPPQIMAEIKREHARLMLVREQLEALARPLAAADLTPAAAQMAQRSELLLRLKSLGPAFATTLTHEVFYKDFRNRREVASYFGLTPSPWQSGGTDRDQGISKAGNPRARCAAIEMAWLWVRHQPDSKLTQDYRRRTLNASKRIKRIAIVALARKLIVALWRYLTTGLVPEGAMLKAVEM

SEQ ID NO: 351066 - protein, 347 aa, unidentified
MRFYTRQHRHYCGVDLHARSMYVCVLDQEGSVLVSKDIATAPEPFLELIVPYREDLAVAAECMFTWYWLADLCVREGLVFVLGHALYMRAIHGGKAKNDRIDAHKIAALLRGGMLPQAYVYPQAMRATRDLMRRRNYLMRQRAELLSHITNTNHQYNLPALGVRPARPAERSGLAEHFTEVSVRKSIEVDLSVIGHYDRELPRLERYLESNAQAHDPMALAIVRTIHGMGKVLGLSILYEIHDIGRFARVQQFLSYCRLVKPTKESGGKILGHSGRKIGNAHLKWAFSEAAVCFLLANKPAQALRARLMAKHGKGKSLAIIAAKLARSVYFMLRRSEAFDAERFFAH

SEQ ID NO: 351067 - protein, 414 aa, unidentified
MELLHERCAGLDIGKKDLKACVRTPNPSGRRSRRQEIRTFATTTNALLELRDWLVAQKVTLVVLEATGDYWRGAFYLLEDCLNVMLVNAAHVKGLPGRKTDVSDAAWLCQMGECGLLRASFVPPEPIRQLRDLTRYRATLAAERTREASRLEKELEDAGIKLSSVATDILGVSGRAMLTALIEGERDVHVLAEMAKARMRPKIPQLVEALTGNFGEHHAFLCRLHLERIDQLSAAILELSTRIEDQMSPFARQLEHLTTIPGVGQATAEVIIAETGADMTRFRTAGHLASWAGICPGHHESAGKRKSGKTRHGNRWLGGALGTAAMAAARTKDTTYLGARYQRLIPRLGKKKAIVAVEHSILTAVWHMLTHDIDYHDLGGDYFTRLDPERAMRRIVRQANALGFTVRFDPIQAA

SEQ ID NO: 351068 - protein, 385 aa, unidentified
MSLPNDLSKSLLPFDQKTTLVTVIEMSQSNWLVAGIVPGVERHPLKKLDPDERALLQLLKRWQAEAVKAGHTITRIAVAFEAGRDGFWLARWLRARDIDAHVIHPTSVAVSREHRRAKTDRLDTELLKRAFIGWLRGEPEHCHMAAVPTMEEEDAKRPNRERESLVGERSRIVNRMKSCLARLGIRNFKATLRKAPERLADLCTPEGTLLPPNTLAEMRRDMSRLRFVMEQIKQIEEARLARLVQATEKGPNAMVRMLARVIGVGVETADMLVHEILSRNLRDRKAVARYAGLTGSPDESGSRRRQKGLARAGNARVRRGMIQLAWRFLMFQKESALAQWYRARTENARGTRKTMVVALARKLLISLWRFVTTGEVPVGVALRPM

SEQ ID NO: 351069 - protein, 457 aa, unidentified
MRKKTKRTAGIEEAHPFSGMSRIHPHAAGVDIGAIEIVACVPGDENTQIVKAFGNYTVDLQALAQWMKGHHIQTVAMESTGVYWIPLFEELERQGFECLLISSRSLRRVAGRKSDITDAQWIQTLHTYGLLEGSFRPQGDLVALRTLLRHRSQLVEHRSPHIQHMQKALLQMNVQLSQAVTDITGMTGQKIIRAILAGVRDPQTLAALREPGCKKSEEEIGKALTGTWREEHLFVLKQSVLLYDFYTQQIQSCEEEIERLYGLTRPDWEEGEVEPFTRRKKNSHSKNLPQHPEEIRKHLKRISGVDLSVVDGFGVSLAQTVIMEVGTDMSKFPDEKHFCSWLGLAPKHEISGGKVLKNNTLKTRNRAGQAFRMAAQSVKKAENVFGIFYRRLRARLGPSQATVATAHAIARVVYRMLKYKVEYEPLSVNEYQRQYEAQQIKYMKKRAAKFGFQLVPT

SEQ ID NO: 351070 - protein, 342 aa, unidentified
MGSVLRKRRSRHVMSAFVCGLDVHKDSTYATILNHEGKIVNQTRMNNERVLSYLSHFRVSKVGMESSNQIAPLFRQLTSKGYDVVTSHPKKTRYIAEAKIKSDRVDSKAIAELVRLDALPLAYFPTGEIAKLREKVRRRAFLVRERVKLRVKIKSVLTYEGLKWPSDHGLFTKKGLEWLHGLNNESVECYLRILKPLDLEIKLLSKELLGIAENDEDVKLLMTIPGIGYYSAVLMKSEIGDINRFPFAERLCSYAGLVPSTHASGKTVRHGGITKEGSRWLRWVMVEAAQTHVHKYDTSITRAYNRIAEKRGKKIAVTAAARRLLMCSFSVLKNKRPYYDQA

SEQ ID NO: 351071 - protein, 340 aa, unidentified
MNHYAGIDVSLECSSVCVVDASGKIIGEGKVASEPEALILWLASLGMRLTRVGLEAGPLSQWLFAAMRQAGLAVELLETRHVRDAFKAMPVKTDRKDARGIAQLMRLGWFRPVHCKSLAAQETRAILSARKLVQAKLHDVEMSLRGILRGFGLKVGKTTVRQFEGRIKELVGGHPSLEEVAAALLAVRAVAWRAFNALEKRVRSMAREDARARLLTSVPGVGAIVALTFASAIDDPARFKSSKSVGAHFGMTPKKYQSGETDVSGRISKIGDGGVRTVVYEAANVILTRPVKGCASLKSWAMKLAKRAGMAKAKVALARKLTVIMHKMLADGTTFANLPG

SEQ ID NO: 351072 - protein, 334 aa, unidentified
MLYAAIDIHKHAFQAAVLDPEGGEVVEARFSADRESLARWAEEWQGRVAAVAIEATTGWRWVWRELVAEGFEVRLAEPVQTRALLGRRRSAKTDRLDARWLARLLAKEMLPQSWIPPAQIQELRDRTRLRKALAEDRRRWGQRLHAYLLHEGWPCSRSNLLRPPGLRWAAALQLPEHARLQVDSLLAVMAALETQLETVDAELRRFAPGDERCQALQSISGIGPILACHLLAEIGEARRFRRAEQITRLAGLDPVVDESGETRRRGHLAKAGSPHLRWALVEAAVHAHRTTAPDLELYRATRQRRDTTVARLTVARKIGKRAFHALRELELATT

SEQ ID NO: 351073 - protein, 323 aa, unidentified
MTRIICGVDVASKSLEARVGQQGAAGSFANDAEGINALGDFCRTHEIDLVAMEATGGYEQQAFAQLSGQGLAIAILNPRAVRQFAQSMGSLEKTDRIDASMIAWYAEVKKSQPVCLAPENQQHLRALVTRLRQLTEMRVVQLNQQRLVTDRKVQASFKKLLALLARQIGELEQGIAVLLAKDPLWRELDQAFRTIKGVADRTVARLMAEMPEIGTLSNKTISKLAGVAPLANDSGKHLGKRIVRGGRAAVREILFIVASVVGRHDPDFIAFRERLRSAGKPPKVVRIALAHKLLVRLNAKAREVRQRQTTLQTNSAVLLAESC

SEQ ID NO: 351074 - protein, 392 aa, unidentified
MPVLAAQSEAAIAVRTDLCAIFVSLELSRSTWLITSLSPGGGEKMSKHSVSAGDIEGLFRRFGDLRERARLRTGQSFAVVTIQEAGLDGFWIHRLLEREGIESWVVDPASILTSRRRRRAKTDRIDGETLVRTLLAHKRGEPRVCAMVQAPTPEDEDRRRLCRERKVLTAERISHVNRIKGLLFAQGVRDYQPLRRDRRARLEELRTGDGRCLPVHLKAQISRELDRLEIILAQLKTVDSERDALLAKGNEDQPPTPASLLVQLKGIGPEFAAVLWSEGLFRSFNNRRQVAAYAGLAPTPWQSGSIDHEQGVSKAGNSRLRTTMIQLAWLWLQHQPGSALSIWFRERVQRNGGRGKKTAIVAMARKLLIALWKYAAHGVLIEGAVAEAFEKG

SEQ ID NO: 351075 - protein, 350 aa, unidentified
MIIGVDYHPSFQTIAFLMEETGECGEQELNHSDGQAEKFYRDLKQRRICVRVGMEATGYSRWFERLLAELGFELWIGDPAEIKAKRVKKQKYDRNDARLLRRLMLENNFPQIWVPSPENRDLRQLLWHRHRLVQMRTRIMNQLQALAMNEGYRWKKKLFREQGRAQLEKLTLAPWASRRRRELLELLDRMNPTIEELTAAVDREARKRPEVLRLMTHPGVGPLTALAFVLIIGTWERFPRGKQIGTYVGMIPSEDSSAGKQRLGHISKQGNSLLRFLLVEAAQAAARIHPGWRRRYMHLAMRRHKSIAKVAMGRRLAIRLYWMWRNGCEYSPSLEFGSYAGQLGTGHGVR

SEQ ID NO: 351076 - protein, 475 aa, unidentified
MAAVMIGVDPHKASHTAVAISAAEEPLGELRVRACAVQAERLLEWAAAWPQRTWAVEGAGGLGHLLDWQLLSAGERVLDVPPKLGARVRLLAAGDVNKNDPNDARSVAVAALRSPGVREVRPDDHAAVLKIWSKRYRDLGRSRTQVVCRLHAVLCELVPGGISKAITAGQAAQVLGSVTPPDAVAAARCELAAAFIEDLRGIDARIRETRNKLTAAVQAAGTSLTGLFGVGPVVAAVVIGDVRDVSRFAGRDNFAAYDGTAPIEVSSGQRKVHRLSRRGNRRLNHAIHMVAITQVRHRHSEGRAYYDKKLAEGKTPKEALRALKRQISNAIFACLQADARRAAARAGGPGGQPGNDCVASAAGLHPGHRLFGQATPGPGHHPTTAASTPAPGSTRRDRYGARGRAGHSPVAATLPPATPQVQVERPQRSEDERPGGAARRRPHSAARKASGRGSLAKPQRPKGTSQAGKKADGTP

SEQ ID NO: 351077 - protein, 389 aa, unidentified
MPEFHAYVGLDVHKDSVSAAVAEAGRDGEVRHWGVIRNTPEAVARLARKLVERHRAVEFAYEAGPCGYTLYRHLTASGLTCRVVAPSRTPRKPGDRIKNDTRDAVTLARLLRAGELTFVWVPDEVHEAMRDLVRARQTAANDVRQARAHIQMFLLKHGVRYRGKPWGFRHRVWLADRRFPHAAQQLALQSYVNRLDQAESRKRQLEAQLAELVPAWSLAPVVAALQALKGIQLVIAATLVAEVGDFSRFASPRQLMAFLGLVPSEHSSGRRIRPGGITIGLCPIPRRDVGAADRAGNAAARSLLFEAAWSYRLPAKVGQAMWLKQRGVAQAWRDISWKAQVRLSGRYRKLVGRGKKSNVAVTAVARELLGFVWAIATSSMPAPPKAPPM

SEQ ID NO: 351078 - protein, 308 aa, unidentified
MSSHCIYLGVDLSKEKFDFHGADTRGTLDNTPTGHRRFLAKLTPGTHLVCESTGSCHRALVTAAHAAGFALTVANPRQVRDFANGLGRRAKTDPIDAQSLYDFARLVQPKADLAPSPTQVALQELVVARQQAVLERSSLLVQIASHSVPLIVSLHRARIAMLSRHIAKLEAALTTTLAKDEALAAHAARLTEVTGVGLLTATTALALCPELGTLNRGQAASLLGVAPFNHDSGQLQGQRHIAGGRYRLRCAIYMAALSAVRFNPILRAFYQQLRARGKAAKVALTAVMRKLFLLLNHLLKHPQFQLAS

SEQ ID NO: 351079 - protein, 342 aa, unidentified
MDHFAGLDVSVKETSICIVDETGRIVREVKVASEPQALLKVLGNQAYRFKRVGLEAGPLSQWLFSALAEAGLPAVCVETRHMQAVLKAQINKTDRNDARGIAQMIRAGLYRPVHVKTLRSQKLRMLLTHRKLLQSKAIAIENDLRGTLRNFGLKVGMVGKARFEARIQELVENFPDLGVLVEPLLVVRRALREQIVLLHRRLLAIVREDEVCQRLMTTPGVGPVVALTYRATVDVPARFRKSKSVGAVFGLTCSRYQSGEIDWSGRISRCGDEMMRVMLYEAAQSMLHSKKWSWLKAWAMQIARRRGMQKAIVALARRLAVIMHRIWVDGTEFRWTREVAAA

SEQ ID NO: 351080 - protein, 316 aa, unidentified
MKTQVFVGIDVSKQHLDVAVRPQGRHFVTPNHDRGIKQLVKRLAALKPQLIVLEASGGYEFLATAALAEAQLPVALINPQAVRKFAGATGKLAKTDKIDAQVLAHFAEALRPEPRPLPDQAHQVLKAALQRRQQVVKMVGQEENRLEKTYIPAVRQDIQDHLTWLRRRLKDLDRELDDQIRQSPLWRDRDRLLRTIPGIGPIVSRAVIAQMPEIGTLPGKKAVALVGVAPYNRDSGRFRGKRMIRGGRSYLRRMLYMAAVVASRFNPVLRAFYQRLLAAGKPKKLALTACMRKLVLILNAMVKHNQPWNQFITQVP

SEQ ID NO: 351081 - protein, 338 aa, unidentified
MKTHVGVDLHQRFCYLTAVSARGKVLRHSQVVNQPAALQQWLRSLPGPRQVVVEASGFWPAFHRAARSEAERMVMVHPQRVKAIASAKLKNDRVDSATLAHLSRCDLLPEAWMADEATQQLRLRVRLRMALGRQRARAKNQLQAVLHQEGFVKPVTDVFGKKGRLWLKEIGLSAAGRMVVDTWLREVDHLDAEIGAQTRELERIAAEDGRARCLQSMPGIGAYAAMVMLAEMGDVARFANKQALASYAGLVPVVRESAGKRKRGAITHQGSNTLRWIMLQVAQVAARKSPAAGQWYARLRARKPAQVAKIALARKLLNASWAMLRHGVCFDEKMFARS

SEQ ID NO: 351082 - protein, 347 aa, unidentified
MSIVGNPDAVVGGVDTHVDMHMAAVVNHVGGLLGVEAFATTHSGYRQLLSWLRSHGELVLVGVEGTGSYGVGLSRYLTRAGVPVVEVDRPNRQTRHRQGKSDPVDAVAAARAALSGTATGLPKSRDGNVEAIRVLMIARRSAVDTRIETLNQLRHVIFTATPEIRAKFTGLTAISLANKAAVLRPREGDDPVRYTTQVTIRTLGQRIKYLREEVKRLNRLLRPLIRDTAPGLLEVFGVGFDTAAKLLVAAGDNPERIRSEAAFAHLCGVAPIPASSGKTTRHRLNRGGNRQANSALFHVIITRMRHDQATRDYVARRLAEGKTMGEIARILKRYAAREVFKHLPRPA

SEQ ID NO: 351083 - protein, 517 aa, unidentified
MIAIPVISERCAAIDVGKRGLAVAVALGPADKEAEIKTRASGTTVPALLDLWLVEQGCTTVALESTGSYWIPVKNILEDGFQITLVCARKHHPKKGDKTDFRDAIDMVIHHRHGLLTGSYLPERGIVELRDLTRRRKKLLGNLRAEKNRIQKVLETANVKMGNVVSDVFGVSGQEILQAQLEDKPLTAEELADKAKKRLRDKIPQLTEALEAHQMNHHHRWLIDQSVEHAKFLDRQIEELEKKIDQHLPPYRRQHELLMTIPGIKEAAAANILAEIGADMNQFPEGDHWSSWAGICPGNNQSAGKRKGSRIKKANKFLLAALVEASWAAVRKKDSALQRKFHRWLRAKGEKKTNVAISHSLLKVIWSVLKHDRPYVEPDVLVLKTLEREKQIRHHAQRLRQLGADEQTIATLIKNLLEAPKPDSTDHPPVATHPYPSDSACASRPKCSPQKQGSPPPRRRPLARGVLGFRIRTAEKKQYSAVQDLPDSPSTTTPPEKNTPPKPSATNNKKGQSTTRH

SEQ ID NO: 351084 - protein, 324 aa, unidentified
MIDGILGIDVSKNTLDASVSSCNKVRAKSFANSPDGWRHLLDWLVTQRGKRVHACLESTGRYSLGIACALNEAGHVVSIVNPAQIRDFVRTKLGRNKTDGVDASHIRDYCELFKPQPWAPPSEAHRRLGELQTIRTGIIAGLTEWKNRKNSGMIDAVAHSLADVTISHFASQLGAVDEAIAQTIDNDSVLRRKRDLLLSISGVGETLAGVVLAELPGPDVLRSSAEVVAYAGLNPRQHQSGTSIDRVTRISKIGNAVLRAALYMPAMSAMRYNPAVAALVTRLKSRGRLNGKQIVIAAMRKLLVLCFGVLKTGKPFDPAIAMGQ

SEQ ID NO: 351085 - protein, 391 aa, unidentified
MISVGIDVSKDKHDCFIVSSEGEVLADVFTIPNTLDGFNFLLQKIRDCTTPQDKIKVGLEATGHYSYNLLGFFLDNGLATYVLNPLRTNLYRKSLSLRKTKTDRVDARTIAAMLLSDVGLKPYTNTAYHNEELKSLTRYRFDKVKERAKLKSSISRLVCILFPELEKLVPSLHIASVYALLEEFPGAKQIAAAHLTRLKALLETVSKGRYKRDMALEIRDAARNSIGSWMPAKSLELQHTIRLVHELDSEIAEIEEQIQSLMDELDSPITSIPGLGFRMAAMILAEVGDFTRFDSPDKLLAYAGMSPSTYQSGQLKNCYPHMEKRGSRYLRYALYNATKYVCHWDPTFSVYLAKKRAEGKHYNVALSHAAKKLVRLIFAMEKSRTLYRLAV

SEQ ID NO: 351086 - protein, 332 aa, unidentified
MSNCIGIDVSKASINVHIPKNNQDLVLENSLKGFKSLFSKLKKIYKKEIEDVVFIFEPTGSYSEALRKYCSEKQIKCFIINPKQFSNYAKALGEEVKNDANDARVLSKALHLAKENQVDIPLFNEDVEHIKELMSFYKFTKKQTTQQKNHLESLTSKDGDKFSIKELKKSIKESQAKELRIIEQVQTLIDSTDEYRNAYANITLIKGVGQIAGIVLLHLFLKYPEANQRQITSLTGLNPIYRQSGSSIQSGYKIAKSGASLYRSILFMSVLAAVQHDKNFKTFYERLKSNGKHTTSAQIAVMRKIILTAHSLYKNNSKYDENLNSQKASRMQ

SEQ ID NO: 351087 - protein, 430 aa, unidentified
MTIQGADPAETEGRVVMEVVHQRCAGLDVSKRDVKVCLRVPGKRRGSYVKPVSTFGSVTGEILRLREHLTAEQVTLVVMEATGDYWKPFYYLLEGGPFEVMLVNPAHARNLPGRKTDVSDAQWLAELGAHGLVRGSFIPPQPIRELRDLTRARVTLTRDRAREINRLEKVLEDAGIKLSSVATDILGVSGRAMLDALVSGQKDPVVLAALARMSLRNKTDQLTAALTGRFTDHHAFLVRLHLQVIDQLAASVAELTERIEAVIEPFRPAIKLLKTIPGISDRSAVAILAETGADMSRFPTAAHLASWAGVCPGHHQSAGRVGSTSTRPGNAHLKAALGNAAMGAARTNGCYLQSRYRRRASRSTPLKALVAVEHAILTSIWHMLTTGQPYRDLGGDYYARRDPEATKRRIIRQANDIGLTVRFDPITHAG

SEQ ID NO: 351088 - protein, 316 aa, unidentified
MLYVGIDIAKNKHDVTALNVPGKTVLKPLTFSNNKAGFELLDLSLRQLNQDCLIALEDTGHYAFNLLNFLHEQGYKVYTYTPLLIKEFAKSLSLRKTKTDKKDAHGIALKLLSDPNREQFQHDNRQVELKILARHIHRLKKKQSDWKVQYTRCLDIIFPELDKIVGKHSEYTYQLLTCYPNPQKRLEAGFDNLIEIKRLTASKIQDILSVAPRSIGTTSPAREFEIIENIKHYKRLIDKAETCVNDLMAELNSVITTVTGIGNRLGAVILAEIQNIHAFDNPAQLQAFAGLDSSIYQSGQIDLAGRMIKRGSPHLR

SEQ ID NO: 351089 - protein, 432 aa, unidentified
MNESIPAASLEGVAAYIGIDWADQKHDVVLRSAAEPNKVEHRVIEHQPGALMEWIGQLQQRFGGHGQILVCLEQSRGALIHHLMGYGFLELYPVNPLQLARYRETFSPGGAKDDQPDAELLCELLYCHRDRLRAWKADAELTRKLAFFNEGRREAVDQRTRLSNAIKSQLKVYFPLALELLNQDTSTALAADLLLRWPSLEALQKQIPHRLRKFFYAHNCRGESTMLERLELVQQAQALTQDSAVIEPATVRVQMLARQLKNLLPDIARYDQKIAELFAAHPDRFLFENLPGAGRVLAPRLLSALGSDPNRWESAQEIATLYGVAPVRRASGKKSGKKGEKKASVRFRQACPKFLRQSFHEFAGCSIRYCGWARAHYEAQRAQGKGHHVALRALAFKWIRILFACWKQRIPYDPQRYLQALQQRASPYANAC

SEQ ID NO: 351090 - protein, 408 aa, unidentified
MNTLYVGIDVSSKSNVVYLMLPNGDKHSNFSVANSHEGSTLLVKKIYSALTSHSLDTVLIGLEATSVYGDNLVYFLREDATLAPFNRKIHVLNPKQVKKFHDTYNDLPKNDYVDSFVIADCLRFGRINKEVYMGDYRYKALQNLTRARFFAVQNLVKEKQRFMNVLFKKYSTMTQEKVFSDAFSTTALAVYDEFESAEALANMDLHELTDFIIEKGKNRFPDPDAVAKAIQKAARSSYRLPKTVNDSVNQVLSISITSMKALESQIKEFDKAIKALMELLPNVLISIPGIGPVYSAGIMAEIGDINRFDNQASLAKYAGLAWKQHQSGGFEAEVTRLIPSGNRFLKYYLCEAAFSLVRCDKEYSDFYHLKYKEVNRCQHKRALALTAHKFVRLVFRLLKDNRLYCPAK

SEQ ID NO: 351091 - protein, 364 aa, unidentified
MKKLVLREVGKQAQRPRAPEAGEVVIIGVDLSRSKWVYACRWGGQEQRRFGSAGELKHLQAVVREYQHRGCEVHVVYEACGFGYQIAWWVEAHNAQVIVVAPSCVEKAPGAQVKTDGLDAGSLALKYERGMLKGIYIPTREHHEYRQLSRTYGQALKDRSRQQVRIRMLLQEHGYTPPAAGSGWGALERWLSAQSWAPAVGICVTELRELRASASRSARRLATEVRAVGRLPPYGELGKALAEQSGVGRFTAIRFMLEVGDIHRFATADSLPNYLGLTPKEYSSGDLVHRGRIRKCGPGSLRAWLVQCAWAAIRAGKDVALVECFQRLEPRVGRKRAIVAVARKLALRLRARWLAFEKEVPQAA

SEQ ID NO: 351092 - protein, 429 aa, unidentified
MNNEILIRIEKFRQFKERIRGSEEHLIVGIDISKSQHHAFFGTANGKTIKRRLIFKNDFKGFMDFLSMAQVLRDQNGLSQIVFGMEPTGNYHKPLGMFLLNHNQEVVLVSGIATQRNRELLDGRWDKNDTKCAANVADLISQGKCLFYEYPAPEISGLRSLLSLRERMKKNYHILRMRIRNNLVAEYFPEFDRYFGQSPKQTLSIVKYCLDPVKINRMEFKEFLIKVTTTNRGLAQEKRLRQIYALASESIGCETNRYTEFEGKVLVDQVEQTKSLIKEIEDKIAEAAGEFEEYHCLLTIPGFGPYISALVLAKIGNPFRFENRKQVLKMSGFDLSAKRSGKSSDKAYPVISKKGSNALRYALFQGAVIASSRNDYFIQYFTNTLKGREKERGIKIKMRVKLAAKLLIIAWTIMKTKNAFNPDLLQSVK

SEQ ID NO: 351093 - protein, 346 aa, unidentified
MSYSTTVGVDLAKNVIQVSVVSGRGKELLNRSLTRKKFSEFLGKQKPALVAFESCATAHYWARAAVRHGHEARIIPAKAVAPFRQGHKTDSNDALAVAEAARRPNIKEAPIKTVEQQGLQAILRARDRLIQECIAQSNHLRGILLEFGIAIPQGFAALLRTLPEVLEDGDNELPDFYRPTLHRLYHRMLELRQDIDAMTKEVGQLVKTHAVCSRFTALEGVGPIGAMSLHATIGSGAAFSKGREASAYVGLTPRQYSSGGKANIVGLSKRVGNRKLRSVLIQGALAYVYRMKEPRSAKDRWLKDLIERAGPRRAAVALANKNVRTAWAMVTQGTEYQRRLQLEMAA

SEQ ID NO: 351094 - protein, 451 aa, unidentified
MAKRKEKQERRSVMLEPHAAGIDIGAEEIYVAVPPDRDEESTRRFSSFTGDLHALADWLGRCRIKSVAMESTGVYWIPLFQILEARGFKVYLVNAHYLKSVPGRKSDVSDCQWIQYLHSVGLLRASFRPPEAICALRTLWRHRGSLLEMAAEHILHMQKALSQMNLQLHHVLSDITGTSGQAILDAILAGQRDPVALAQLCHSRVQSPREKVAQALVGDYRPEHLFTLKQSLAGYRYYQKLILELDLETARLMQALPSATEQPMPPRTKPTAYHRQGNDPQFDLRSELYRIAGVDLTDIPGVSAATAQVILTEIGTDVSRFRHASAFASWLGLCPEKRVSGGKVLSSKTRKVKHRAATALRMGANSLCRAKGYFGEFFRRLRAKLGTAQAITATAHKIARILYHVLSTKEPYAETVFHRYDEQAQRRAEMRLRKQAARLGFQLLPIQATGE

SEQ ID NO: 351095 - protein, 342 aa, unidentified
MYYIGLDVHKKTISYCVKDASGRICQEGKVGATRWELDLWIKTLPQPWTVAMEATIFTGWIYDHLKPHAAAVKVAHPLMLRAIAAAKKKNDSIDAGKIADCLRCDFLPECYMAATEIRERRRTLRYRHLLVRQMVQLKNRVSGLLMETGVSHNKQRLHKIGYFPELLANADAVSTSIRPLLQLSRESITRLQRTEGAIIRSLQRDPILEERVRRLQTIPAVGKVTALTWALEMGDISRFRSIRQAISYCGLCGDEKRSAEKVMRTPLSKQRNKHIQRVLIEAAKLAPRRNPDLALIYENARQKVNANCATLAVARKLVAYLMAVDREQRDFQPMGVFASTAA

SEQ ID NO: 351096 - protein, 394 aa, unidentified
MRYAGIDIASEAHVLAIVAADGMVAVKATAFAEDDLGYQKALTLLGSPGEVLVAMEATGHYWKNLFAVLAAAGHAVALLNPLRTHRFAGVDLERTKTDAIDALGIARFAAQKRPAITPLPDALAEELRELVQLRQRLLQDFGDRVRQLHRLVDLGFPEFTRYVRTLDSELATAVLRDYPTAAAFRGVSARRLAALRYDGRHQVGPDLACTLIDAARRSVGQHHSATYRLQIRYACDDLDTLRGRLRALDRDLDGKLREHEVGRLLTSIDGIGPQTAARIIAAVGNPAHFRSGSALAAYVGTIPALKQSGKHQPLRGGHTPIGNAQLRAALWMPTLSAVRCNLWLRAHYQRLIARGKLPKVALLACMHKLLLAIYSVAKHGQPFVPHLQPPQAAI

SEQ ID NO: 351097 - protein, 330 aa, unidentified
MNYKYYIGLDISKTSIDYCFLQEGKPLVQGKIHNTLGGYKKLQAQARALNLSLKEVLFCLEHTGEYSKRVLKWLNQTEMKVWLESPLAIKRSLGLTRGKNDKVDAYRIALYAYRFEDQAVLWEKPRLELEQLQQLTSWRKHLVGSVSSLETRLKESQDHLDKRVVKSSQKILKGLKEELKQVNDLIQAHIKKDKELSDQHKQVSSVHGVGKVLAAELMVTTNEFKRFSSAKQLACYAGVAPFEHRSGSSIRGKTRVSRLANMGLKKLLHMAAISCLRKGNELYEFYQKKVAQGKAKMAVINAIRNKIIHRIFACVRDNRLYEKNMPPALA

SEQ ID NO: 351098 - protein, 419 aa, unidentified
MAHKLAEKLASVKSGTLFAGIDMALERNMAVLITERAAVQAQFHFPNDRLGYDYLLRRLRVSQERVQAPAVLVGMEPTNYFWKLLAAELEQQAVPYRLVNPYTVKKHREGDNLDRSKDDPRDAFTIADLLRTGKFTESQLLHGPYADLRQYAQHYDRLQQELRRHKNLLVTFTGQLFPELRREFKDLTGKTALALLRSGAAAGAIRQQTGAAFLAQVAAHFSGPGLARAKLQRAHQLAATSVGLTAGAEALQWTLASHVATWELLQAQLEQVRTRLGDTFLALPEAPYWLSVPALGLVSAARIVAEIGDPAQYHRVNQWIKLAGTQPAPNRSGKKSRSPTPMSHQGRPRLRTVVYFAVLRLVQQDESFGRRYVHLQNRKPNPLTKMQSLGVLMNKLLRILWALWRQRIFYDPTWGLPAA

SEQ ID NO: 351099 - protein, 344 aa, unidentified
MSIVSPKKVFVGLDYHTQSVQVCVLDEHGKVLLNRSCDNDWEKIDAAVQRWTGPEKASVQAAIEACCGATNLAEELIAKAGWCVNMAHPGYVNRMKQNPDKTDFSDARMLADLERVGYLPRVWIAPEEVRELRRLVRYRNQLAGERRNLKLRIRALLREGRIAMPNCTAWSKLWLAWLGQQAPLSEQTRWVVDRQLGRLKTLQTEIKEVEQRLEEVSRSDDQVQRLLAQPGIGLITAVTIRAEIGRFDRFRSGKQLSHFCGLSPRNASSGQKQADAGLIKTGNRELRSVLIEAAHRLARYDERWNKLNCQLRARGKKGSVVAAAIANRWVRKLHHQMQTEALAV

SEQ ID NO: 351100 - protein, 344 aa, unidentified
MHAIRTNVAGVDVHKQILAITILKGDADKEPVVEQFECGTFTEDLMAMAVILKECEVLEVAMESTGIFWKPVYNVWSKMGIKCTVGNARSMRNVPGRKTDMNDSHWIAQLHRFGLIRASFIPEDKFQQLRLLSRHRTNLTDDITRVKNRVQKILEDGNIKLGSVVSNVFGVAGVKVLRLLAEGTTRADVLAASVTTNIKRKGEIKKSLTNCFTSHHIFLIKELMQQYDDLNSRVLEVDRQLAVDVTPYANLIEELRKIPGIDMTLAVGIIAEATNDVSNFADERKFAAWAGVAAGNNESAGKKKDQNVETARRILESCLSRLLTEPNSTVVPFTGPSTTSGSSH

SEQ ID NO: 351101 - protein, 376 aa, unidentified
MTQTDVQYPTIHLAIELSRSAWLVAARMPGVEKPSLHRIEGGDTAALLALAAALRARAAARLGTPVRVARCFEAGRDGFWLHRLLTAEGIAAYVLEPTSILVNRRARRAKTDRLDALGMLRVLAAYLGGDRQACSMVRVPTPEEEDAKRPHREREELVRERVRLENRIAALLATQGVRERPSLRSWERDLAALRTGDGRPLPPHLRAELDRLRRRLVLTLGLIREVEAERDAALAAGPRDAAGRKIAALCRLRGVGANFAAVLTREVFYRAFDNRRQLAGYVGLAPVPHQSGEADRDRRISRAGNARARTTLIQLAWLWLRYQPDSAPARWFRDRVGALRGRTRRIAIVAMARKLLVALWRYVETGLVPEGVEVAA

SEQ ID NO: 351102 - protein, 363 aa, unidentified
MAVAVAGERPIDLRDAKPEEKLGSSPAVPSNPNSRKGRAASPLWQGREKMDAIVVGIDVSKDKLDIAFRPGGETFVVERNASGLEELTERLRSRPVRVVAIEATGGFETVAAASLFGAGLPVVVVNPANVRAFAQALGKRAKTDPIDAAVIAHFAEATKPEVRPLPDEATRLLSDLVARRRQIVEMIKAEQQRRQRATNKRLVKSLDRLLKALQKELSDIDEQIYECVRSSPKWRETADLLTTVPGVGPVIASTLIAELPELGTLDRRQIAALAGLAPWTRRSGKWQGKCMIGGGRANVRAALFMGALVAGQYNPVLKSYHDRLIAAGKVKLVAVIAVARKLLTILNAIARDRKPWSPEAAHV

SEQ ID NO: 351103 - protein, 411 aa, unidentified
MEVVHARCAGLDISKKDAKVCVRIAGAGRRKTVETVTTWGSVTSQILALRDHLIAERITCVVMEATSDYWKPFYYLLEDAGFDVVLVNARHVKNLPGRKTDVADATWLAQLGAHGLVRASFVPPEPIRHLRDLTRARTAITRERSREVQRLEKLLEDAGIKLSAVASDIVGVSGRAMLESLIAGNNDPAALAELAKRRLRSKIPALTEALTGRFTEHHAFLARVHLDLVDQHTAAINEITTRIEATIKPFHWFRDLICTIPGISTLTADVIIAETGADMTRFPTAGHLASWAGTTPGNNESAGKVKSSRTRPGNRYLQGALGAAAMSCAQHPGTYLGARYRRIAQRRGPQKANVAIQHSMLIAIWHMGTNGCLYDDPGADYFNRLHPGRAKKRAISQLEAMGYQVTLTHAS

SEQ ID NO: 351104 - protein, 405 aa, unidentified
MTDIEQHDSVKVFVGVDVGKGAHHAVALDRKGKRLLDSALPNDEAKLRALLGKLKEHGSVLLVVDQPATVGALPVAVARAEGVLVAYLPGLAMRRIADLHAGESKTDARDAYIIAEAARSLPHTLRSLKLADSQVAELTMLCGFDEDLAGQITQVSNRIRGLLTQIHPALERVIGPHLDHPAMLDLLERYPSPAQLAALTQKQLANRLVKLAPRMGKIWAAEILQALSEQTVVVLGTQAASIVLPRLAQQLAALRIQRDEVAKEVERLVLAHPLHPVLTSMPGVGVRTAARLLIDVVSRAFASAGHLAAYAGLAPVTRRSGSSIRGELPSRRGNKQLKRAMFLSAFAALRDPVSRAYYARKISQGKRHNQALIALARRRCDVLFAMLRDGTFYAPPRPQTLLTRT

SEQ ID NO: 351105 - protein, 343 aa, unidentified
MQTITTIGLDIAKSVFQVHGIDGDGNVVVRRQLKRRYVLTFFRKLPPCLIGIEACASSHYWSRELQALGHTVRLMPPAYVKPYVKRHKNDAADAEAICEAATRRNMRFVPTKTPEQQSCLTLHRTRHLFIRQQTAIINSIRAHLAEFGIVAPVGRRGVEQLLKVVADANDTRLPEIARACVAALGTQLLALKAQILAFDRRIMAWHRSNETSKRLDAIPGVGPALATALVASVGDPKAFRSGRDFSAWIGLVPKQNSSGGKDKLGSISKQGDRYLRSLFTAGALAVIRYAKLHGTKHRPWLAALLARRPTKVAAIALANKIARMAWAMMTRGERYKEPVALAA

SEQ ID NO: 351106 - protein, 331 aa, unidentified
MKKVTETIGIDVSKLTLDVYVRTTKVHKQFSNDVKGFRQIISWTIKQKINLEETLFCFEHTGWYCLLLSYFLFENKHRYCCINAIEIKRSMGLKRGKSDKADAWEIANYAWLRREELIPSVPPAKKLIELQRMMSLREQLVKQLTASKNLYKGMQEIVIDELNDVSLGILKENMSQLEKQILTTEKSMNELIKTDETMINNYKLSKTVKGVGMVLAVQMLLHTHNYTRFESPRQFSAYCGLVPYPYQSGTSINGRNKTHPISDRKMKSLLSMSAISAIQHDKELKLYYQKRVEEGKPKMVVLNIIRNKIVSRVFATVNRGTPYVEMSKFCA

SEQ ID NO: 351107 - protein, 375 aa, unidentified
MEHHSEAFVALDTAKLRNAVAIADAGRNGEIRYLGEFDNTEAATRQLVTKLASKHARLTFCYEAGPTGYGLYRLIKSIGHDCIVVAPSLIPSKPGDRVKTNRRDAVNLVKLLRAGELTAVWVPDERHEAMRDLVRARDAAVKYYRIKRQNVSSLLLRLGRSYPGKKTWGRTHINWLTGLKLEHREQRIAFEEMLLAVRQVRERIERLEQAMREAVADWTLAPVVEAVQALRGIDMVGAVAFLAELGDLLRFENPRRLMAYLGLTPSERSTGESVKRGGITKAGNTRARRLLIEAAWSYRFPPRVSKDMQTRIGAAPRTAREIAWKAQMRLCGRFRTLTRKGKRSTIVVTAIARELSAFIWAINREVVGSHATANQ

SEQ ID NO: 351108 - protein, 346 aa, unidentified
MEHYVGLDVSLKLTAICIVDQTGRIEREGVVASNPEAIAAFIKSHAPHVARIGLETGATSTWLWTELNKMGLPVICIDARHAKAALRMQINKSDRNDAVGIARIMQCGWYKEVRVKDLDSHAIKALLVSRALLVKIKRDLENQIRGLLKNLGLVIGRAKMNVFAVCAAELTEDRPELAAAVEPLLKAREAIERQIADLDRKVLRLARNDAQVRRFMTAPGVGAITALCFLATIDDPTRFKRSRSVGAYVGLTTRRYASGEVDWTGRISKCGDKLLRSYLYEAANVLLTRVAKWSALKAWGIRLAKRSGLRKAKVAVARKLAVILHRMWIEGTEFKWSSKEATNQPA

SEQ ID NO: 351109 - protein, 385 aa, unidentified
MVYIGIDIAKFKHFASVVSSDGEVIIKPFPFENSRKGFMKLIEEIENFQDCLLGLESTGHYAENLIFFLYQRGYKIGLINPIQTDAPRDSNIRKTKTDKIDTKLIVQCLMLKKNSIITSQDIDIIKLRRLSRFIMELIQQQNRIKTQLTGCLDIVFPELFRFFKGNLHLKTSYALLEKHPSAKDIRSTRIDGLTNIPYNDSHGRYTYDNAVHLKNLAKESIGLDNLAIDIQIKCLITQLKLYQEQIKDIDLSIRTLMEIINSPITSIPGIGYILGAMIISEIGDIKRFSNPSKLLAFAGLDPVIKQSGNFQANQMKISKRGSTSIRYAIYMAAFFIIYINETFNKFYLGKRAQGKTYRIALGHVCNKLVRVIFQILTDNISFNLS

SEQ ID NO: 351110 - protein, 345 aa, unidentified
MKKSTTIAIDLAKHSFQVCKLQGSSDEFNKAFTREKLKAWLIQQPPTTVVMEACSTAHYWGRFCCNHGHSVCLIAPKYVTAYRTGQKTDKNDATAIAVASQQANARFVALKSIDEQALQSIDRIRQHLTDSMTATSNMVRSLLSEFGFNIPKGHSAFKRHIIEILEDGQNSLPDILREHIANAFHLHETLAKKRADLETSLTQHLKHHDACRKLEALEGVGPVNALGLYLSLGANGGNFKNGREASACIGLTPKQHSTGGRVTLLGIRKKVGQKKLRSSLIQGALAVAKVVDKREPRNVKETWLKSLIQRAGLMKAAVALANKTTRTAWALLHYGSEYQVPLTYE

SEQ ID NO: 351111 - protein, 412 aa, unidentified
MKDLLEISCGLDIHKGKIVACILTGPLGKPTHSEIREFTTLIPDMLALRDWIISENCHHIAMESTGIYWIPIYEILEDAFSGDITLLVVNARHMKNVPGKKTDIRDSEWISTLLRAGLLNASFIPEKRIREFRDLNRYRKSIIRDITSQKNRVEKFLQSSGFRLSSFISDIFGASGRNIILHLMEHGQIDKMSLDSYLKTKTRKRIDEILMSVNGTLSEHQKSFLKILMCHYDSMKEHLIEIETHLQEDMLPFALQIEQLNTIYGISTTASCAIIAEIGTDMKPFKTAEHICSWAGLCPGNNESAGKRKSTSITKGNPYIKSMLCEIAWVIAGKRNTYLSAWYWRIKQKKGARKAIVALARKLLVIIYTMLKQGTNFDENCFEVRRKNCEQKQLSRYIRELEKHGYTVEAQV

SEQ ID NO: 351112 - protein, 545 aa, unidentified
MQGFKKDVMPVVVTANTTCGLDIHKDKIDACIRINDGTLDGVIYEKSFNAARGALLELRDWILSFNCFKVLMESTGVYWMPIFFLLGEIAGMDVGLGNSRHTKNTPGRPKSDKEDARWLSRLCMLGYLPKSYIVPKPFRNLREYTRYHKKLVQERARHKNRIEKLLQMNGFKLSSVLTGITGVSGPRILSLLCEQGSLTLEDVSLAIDKRVKAAPEEIAYAINGVMKPTSRTLLKKQLAKLARSDKEVDDIYGHMVEPSKTYSRAIEIISSIPGLPELSAIYIIAETGVGMSSFKTSGHLASWAGLAPKGDQSADKESPKKTKKANQYVKTILVECARAAANARSSRTSMWYWGKVNGMGEKKATIAVARKLLCYIYTMLKNDTLYDASLDRAYEKNINAKKLDPARKIVDSNPRHSGVNKNSSSLLEKVNNVSNRPQSGPELNDSVATPKKRGRPKKNIASTDGKTPNSEDNKQDTDVSAPKKRGRPKKNIVAPTDGKASDAEDSQPVSSSENEPTTGILAPRKRGRPRKKQALTEDSESLIKC

SEQ ID NO: 351113 - protein, 427 aa, unidentified
MLKINYMSTLFVGIDVASKSNVVCAIDFYKNRLLKTTVSNNKPGSYDLICQLVSIMQKHTDLNTIVIALESTSIYSVHIANYLSSCEELMPYKPYVFCLNPKMTANYRKSFIGMNKTDLLDAFIIADFARVGRIETDPWRGSQFLALQRLTRHRLHLVESLTREKAYMVSNIFLKFSELSITPKEEQPFSDNYGATASSVLTEFYSLEDIMDTPYEDLVAFLGEKSKNRINDLARTASLLKKAANNSYRLDKCLYEPLNISIASSFNCIDAFKKEIKGIDKAIEKAIAGLSPNTYTILKSIPGIGPVFAAGILAEIGDIYAFHSQDALAKYAGLTWTRSQSGEFEADESRMTKAGNRYLRYYLCEAANSVRSHSAEYHTYYYKKYDEVPKHKHKRALALTARKLVRLIFGLLTKEKLYSTDKVDALS

SEQ ID NO: 351114 - protein, 366 aa, unidentified
MEKSTAFVGMDVHKESIDIAVADRKEARLFGRVGGDARSVDQATRRLRSVHRDPLFVYEAGPCGFWIYRRLAAQGLRCMVVSPSMTPRRAGDRVKTDRRDALALARLARAGELEPIYVPDARDEAIRDLVRTREDAVCMQRQARQRLQALLLRNEIRYVGRSSWSAAHRRWIAQLKLPDPAQQIAFEEYVQAVEEAGARLERLGKAIEAQLRHWRWRPVVEALQALRGLSVIHAVRIVAELGDFNRFEAPRKLMGYLGLIPSEDSSGPRRRQGAITKAGNSSARRALIEAAHAYAHPARVSWVIARRQSGLPKRVTDIAWKAQLRLCARFRRLAARKLAKNKIVVAIARELCGFVWAIARQVQPAH

SEQ ID NO: 351115 - protein, 309 aa, unidentified
MINSTIGVDISKDHLDAHRMSDGASQRFANDKQGHQAFLKWLHGDRVVYEPTGPYHRALERRLAAAGKALVKVNPRQARRFAEATGRLAKTDRLDAAMLARMGALLELEARPVRSPILNDLKDLHMAREALVKNRTAAKNRSKNLTLAILKRHNAEQLRQIERQIAAIETEIMALIKTHPDLASRFGILVSIPGVSAITAFALLIDMPELGTLENGQAASLAGLAPVARQSGNWSGRAFIRGGRANVRQALYMPALVAMRFNPDLRTKYDRLKAAGKAPKLAITAVMRNLIVLANALLRDGRKWNPSLP

SEQ ID NO: 351116 - protein, 340 aa, unidentified
MDHIAIDLGAQESQVCVRQPDGMIIEERRCTTRSLSTFLRRRPKSRVIVETCSEAFSIADKALELGHEVRVVPGSLVRSLGIGSRGVKNDRKDAQVLSEVSCRIDLPSVHIPTAMSRERKTLCGMREALVQCRTKAVNTVRGWLRGQTLRIRSGVVETFPRRVREGLAADGIVLPQHVERQLTAIEGLTGQVLLADEELALAAQSDQTCRRLMTVPGVGPVAAIRFAAAIDDVGRFGDAHAVASYLGLVPGEDSSSTRQRRTGITKAGPPKLRWALMQASWSARRTRPTDPIVLWCLQIEQRRGRQIAMVALARKLAGVLYAIWRDGTTYEAHRTAAQKN

SEQ ID NO: 351117 - protein, 372 aa, unidentified
MNNIKIIGIDLAKEIFHLHVANKNGEEIFKKKINSRKRFLEFISNLDADRKECVIAMEGCSGANYFAKKFRGFGYENVKIIAAQFVKPYVKTNKNDFMDASAIVKAALDPDMRFCSIKEDWQQDITNFHRVRSRLIKQRTALGNEIRGLLAEYGKIAPRSINKLRQRLMLFVNGEIIDNKNINIQNLNININDDFSIHAKEIFNDLLDELDLINQRVGKIEIKLKEIAKNNKYCQKLQKIPGIGLISSTSLISELGNAKNFKNGRELSSYLGLVPKQSSSGGKNNLLGISKRGNKYLRTLLIHGSRAVMTSVDRSKNMQNNQFAKNKDLYNWFSNLRKRKNNNVAVVALANKIARICFVILNKDQEYKESFC

SEQ ID NO: 351118 - protein, 421 aa, unidentified
MPNIEIGVDSMVKENFIYVGIDLHKETHTAVMIDCYNQKLGEITFPNRPAAFPKLVTKVKKCNTDGKEVVYGLENAYGYGRALAVWLIDKGYLVKDVNTAISHRQAKHRGAMYRKSDSDDAEAIALATLNMLDKLPDACPNDAYWSLGQLVHRRDNIMKQRTRLVNQLHEQLCIAYPSYKSFFNDISRPTALYFWEHYPSKKYLRGKSVEDLRKELVPVSHNRCSTKNCEKILDAVASDKVKNNAYQDARDMVTLSIVSDLQHYDSQLAEVDKMLEQMYKMLGCTLTTIPGVNVITAVKILAEIGDIKRFSNANKLAQFAGIAPLHLSSSGKGKDVATKQGNRRLQATIYFLAIQMVQVSSKGTPRNPVVRAYYEKRKAEGKTSQQALICISRRLISIIYGMLKYGTEYRMPVVENAGENR

SEQ ID NO: 351119 - protein, 376 aa, unidentified
MENDSTLYVGLDVHKDSITVAYAIEMGEVELFGKIGTMQIDVDRLCKKLQLKARQICFVYEAGPCGYGLYRRLVDKGFDCMVCAPSLIPRKPGDRVKTDRRDAIKLVRSLRAGDLSAVHVPTVEDEAFRDLARAWSAAREDLKAARCRLKSFLLAHGVHYLGRPNWGPTHRRWLSTFSFDSAWQQLAFNEHRRSIEDRLAQCERLELALREAVINWRFYPVVLALQAMRGINFTSAIGLVSELGDLTRFQHPRQLMAWIGVTPSEHSSGGKRRLGSITKTGNSYARKLLVESAWSYRHPARVSIDIQRRHEGLPKPIIDRAWDAQLRLCRRYRKLVARGKTAHVAIIAVARELAAFIWDVGRLGMTLAAPYSEQAA

SEQ ID NO: 351120 - protein, 340 aa, unidentified
MSEYDGKQFVGIDLHRQRSVIVRQTDTGEQLSVVRIVNDPVVLGLEIERAGSSPEVVLEATYGWYWAVDVLQAAGASVHLAHPLGVKGFRYRRVKNDVRDANDLADLLRMNRLPEAWIAPPATRELRELVRYRAKLVALRSGLKAQVHAVLAKAGVLIVASDLFGMTARKHLERTPLSGVYAQKVASLLHLIDMFDAEEQALAARIATELRRHDGYHAIQALPGVGPVLAAIFVAEIGDVHRFPDPDRLCCWAGLTPRHYESDTVVHRGHITKQGSKLVRWAAVEAIQRKTTAKITADKDRIAARRGKNIAKIAAARKLLTLVYYGLRDERIRALAKDAA

SEQ ID NO: 351121 - protein, 331 aa, unidentified
MSCRFYLGIDVAKAKLDCLLLDTSNAKRKAKSIANSADGVATLLSWLSKQEAALQDVQVIMEPTGVYHEHALFALAQAGLAVSLVNPAQLRKFAQGIGVKTKTDAADSAVLARYGAANQPPAWQPPSASARELRALLARRDAVAEDLQRERNRAEKAAAAIDTPQRVQHSLNEAIIFLQKELSELQRAIDEHIDNDPELRRIWTLLHSIPGVGERVAGHMTALLAARQFQTAEQLAAYLGLVPVEWQSGASVHGRPRMSKAGPAHLRQLLYMPAVVAKSCNPHIRAIYDRLLAKGKPKMSAIGAAMRKLAHLCFGVVHSGKPYDPNWAIKA

SEQ ID NO: 351122 - protein, 335 aa, unidentified
MFYSGIDLHSDNCYITTVDDNGVTIKQQRVDNSPHMLLDYFHSLNGQHTAVVESTMGWYWLDDLLQDNNIELVLAHAKYLKAISYAKVKTDKVDSLTLATLLRLDLIPRAHKIDRKLRGLRDTMRARLRIVQKRTTCFAMLNTIQIKFNYPEVLPEQYQLYAHMLEQQIQLLSEQILTLEKSLHPSLIPNEDIQRLLRIPGIGKITAFSIYLEIDGIERFSSDKQFLSYCRLVPGADNSNRHIHHRSSKDGNKYLKIAFSDAAVHALQYYPEYRAFYQKKLKRSNQPIARTLVAKELARIVYYVLTSHSPYRGLKGQPISRQKSLQWPRLPSPDA

SEQ ID NO: 351123 - protein, 402 aa, unidentified
MNAVGIDVSKSKSMVAIMRPFGEIVSTPFEIKHTASDIRSLVELINSVEGESRIVMEHTGRYYEVLAHQLSEANLFVSAINPKLIKDFDNDSLRKVKSDKADSVKIARYALDKWQNLKQYNVMDELRNQLKTMNRQFGFYMKHKTAMKNNLIGILDQTYPGVNTYFDSPARSDGSQKWVDFASTYWHVDCVRKMSLNAFIDHYQNWCKRKKYNFSQSKAEEIYGKAKELVPVLPKDAITKLIIKQAVDQLNSASTTVESLRTLMNETASKLPEYPVVMAMKGVGTSLGPQLMAEIGDVSRFTHKSAITAFAGVDPGVNESGTYEQKSVPTSKRGSSDLRKTLFQVMDVLIKTHPQDDPVYQFLDKKRAQGKPYYVYMTAGANKFLRIYYGRVKEYLSSLPES

SEQ ID NO: 351124 - protein, 446 aa, unidentified
MQEKRESEAGRNRRRQLQGLPLMRADVAGIDIGSERHWVCAPTTDGSGREIADFGATTAELIRMAEWLQARGVRSVAMESTGVYWIPPHEVLEAHGLEVLLVDTRQLAQVPGRDKKTDPTDCEWIQRLHSCGLLRGSFRPAEAICMLRTLVRDKATLVAESADWMRRMQKRLDQMNVRVHRAVSDIDGATGMAMVRAIVEGERDARKLAQLRDPHCRKSEAEMAEQLNGHWREDHLFSLSQAWKMDEAIQQRMADYDNEILRKLGEMEQEEAHGQEAPALKNANKARKIKSRGQEPIRQALFRMSGVDGTQIDALGVETMEVILSEYGPDLSRFPSEKEFVAHATLAPHVPKSGGKPIQKKKRHSASARVANVLRMAAQSLRHSDTALGAYYRSMAQRKGADVATFATFCRRQKVSHACLSPAPMGATLCRRRSGGLRKTLSAAAH

SEQ ID NO: 351125 - protein, 313 aa, unidentified
MEKYIGIDISKATLDLYDGAKSHKVSNDLEGFTFIRRLAKHKKDLVLIFEPTGVYAHALIAYCQKQSIRAVIVGSKEARDYARSIKQRSKTDKIDAQVLYRYHTQVSPEMITVPSLDTRVIQITQRRNAYDKYRHAITQLNNLIEATRKEDTKLIHSIQKQIASLQEAADKLLEEIEKLLMEKEENKHAMKNLQTIPGIGKKSALALLLEFMRYPKARSSEMVALMGLDPVLRDSGVFKGKSRISKQGGKHLREKLYMATVVAIKHNDRLKLFYERLVSNGKPKMVALLAAMRKLLRIAFAVVKNNEPYRALV

SEQ ID NO: 351126 - protein, 350 aa, unidentified
MITIGIDPHSRTHSAAALDHHGRILAELTVGSNTRELDRLARWISGMGPERVVAIEGARGFGLALSRRLLVAGETVVDVAPALTMGERRAARRPGKDDRGDAVAVGRIALRERSLPRVYPEVTGTDLKLLVDARDQLVAEATRTRNRLHALLVAIAPGYHEQVRALTSSTALMVARRLASRARGTDRVRSTLACAAISRLRSLSGEIGALERELTAALDREAPANLLAICGVGPLVAAKILGEARDVGRFSSSSAFASYAGTAPIPASSGTVIRHRLDRGGNRQLNRALHTVALTQARRDDRARAFLVRKRGEGKTPREARRALKRHLAVAVYRALVLDAEEARSAGVLT

SEQ ID NO: 351127 - protein, 332 aa, unidentified
MNMHPQGGVANRDHGPNAGVDVCKQHLDVCLGTLELRVVNDATGWDVLIAKFKEDEVDLVVLEATGGYERGLVCALQGAGITVARLNPRQARDFAKSMGVLAKTDQVDARTLRDFGDVLARHKDRAKFITPLVDEQRQVLAELMTRRRQLVDMRVAENNRLEHAGKHSMRSIKSVLKTLDRQLEAIDHEIDDHLDRHFKDQRTLLDSVKGVGPVTILTLTAAMPELGSLGRRQIAKLVGVAPLANDSGLHKGKRRIWGGRADVRAVVYMAALAAIKHNPTIKVFHSRLIAAGKPKKVAIVACMRKLLTILNAMLRDQSMWNAAKHLQSTKTA

SEQ ID NO: 351128 - protein, 354 aa, unidentified
MDGITYVGLDVHLRTIHGAVVTAAGEDRDLGVIAHTPKALHRMLTRINDDRSTLRVAYEAGPTGYTIARQLSRAEIACIVVAPSLIPKRAGDRVKTDRRDARNLARLLRSDALTAIAVPSEELEALRDLSRAREGALRGQHRLRQQLLKFLHRQDFPEPAGIGRWSVRYDAWLATLRPVQPAHQVVLADHLTAIAEASARRDRLHEAPRATAVVGPFAAQIAQLQTLFGIGPLTAIGLTAELGDLRRFAHPRDLMSSVGVVPSEHSSGKRVQRGAITKTGNAHVRWLITEAAWHNARHPPPPGTTADVAARARNRLFWRYRHLCAHGKPPQVAVIGIARELLGFVWEVTVKTPA

SEQ ID NO: 351129 - protein, 308 aa, unidentified
MHAIGIDMSKRSFHAAFDDTTVRQFPNTEEGVIEFIALLTPGTTVGIEATGAYHLLFCVRVTQQDFLVRVINPLESHRVIQAQSLRKVKTDRTDALAVRQAVLLGLGYPFTDTTDIIALKTLVVERQGLVALQAQLRGRQEAHAAKEAAAGLLHDSTTPVLKALRKEIRLIEAKFARYQPGTQALLRSIPGVGVLTAAALVAFVGNIKRFSTPEKLVAYIGLDVRVHQSGTSIHGKGFITKRGNVFLRHVLWNAAFIARQHNPELGAYHRKKLSEGKHYFSVMCAVERKLIHLVFAVWTRGTPYVPRG

SEQ ID NO: 351130 - protein, 475 aa, unidentified
MNIKGSKKKNQVLSVNIFEQQEIIAKADAIKAELKASTWHELETKGKFDKNDKLSFVSDDMLILGCDIGSETHYVRAIDTRGRELSKSAFGFSNTAEGFESMLDWSTKLAAANDKKQIVLGLEPTGHYWFCLTTWLVAKGISVVQVNPYAVKQTKEVEDNSQLKDDKKDPKLIANLVKDGNFGMPYLPEKLYADIRRLSMFRDQLNEDRIRNLNRLHREMKIYFPEYKDAFGKIDGAFSLELLKAAPFPDELAALGTEGMKQIWHEAKLRGRGYANASSILEYAGKSVGIKDGADAGRQAVKWFVSRIIELDEQLSDIENQLNQRCNEIPYAKNILAISGIGENILSGILAEMGDISRFDNVKEIQKLSGLGLVACSSGKHTGETKISHRGRKRLRYWLFQAAKSAVAHSEEFKELHVYYTTRKQNPLKKMQSLIVIACKILRVIFTILTKGTAYDPKKLLGDIVRPDQSIPQAA

SEQ ID NO: 351131 - protein, 370 aa, unidentified
MRFYQGQHPFYCGIDLHARTMHVCILDQAGQTVFDKGIPCRPEALLRAIQPYRDHLVIGAECMFAWYGVADLCVEQDIAFVLGHALYMKAIHGGKAKNDRSDAGKIARLLRGGTFPLAYAYPKGMRETRDLMRRRTYLVRKRAELLTHLQILNAQYNLAPFPKKLACAANRTEMNVAERFADPSVQKSAAINLALIDRLDELIGDLELYLVRTAKVDDIQTFYRLRSIPGVGKVLALILLYETHDIGRFDTAGQFLSYARLVRCAHESGGKKLGTGGKKIGNAHLRWAFAEAACLFLRSSERAKKWKQKQAAQRGEGKALAILAARLGRAVYHMLRKGEAFDEDRFWSGARRTRTGSSSLSRKEARDAGH

SEQ ID NO: 351132 - protein, 391 aa, unidentified
MVCVGIDVAKDKHDCCILDSEGTTLVDCFTIPNNMDGFKSLLQTIRDCSKKSDKIKVGLEATGHYSYNILGFLLDNDLPVYVMNPLHTNLYRKSLSLRKTKTDRVDAKTIATMLLSDVDLKSYTDTAYHNEELKSLTRYRFDKVQERAKLKQSVSRLVTILFPELEQLVSSIHGTSIYALLSEYPGAKQISEAHLTRLANILVKTSRGHYRKDKATHIRDAARTSIGSVMPAKSLELKHTIKLIQELTSEINEIEDAIRKIMDELKPPILSIPGMGFHSAAMILAEVGDFSNFNSPDKVLAYAGCSPSTYQSGKLTNCYAHMEKRGSRYLRYALYTATKYVCYWNPVFTEYLTKKQAEGKHYNVALSHATKKLVRLIYALQKSGKAYLAVT

SEQ ID NO: 351133 - protein, 428 aa, unidentified
MDEVNRNRLEVFRQIRREIRGSEEYLIVGIDVAKDRHHAFFGTATGETLLRRLVFSNDYEGFRKLLDEAEALRVRHGLKKVVYGMEPTANYHKPLGEYLITQGRTVVLVSGVTVKRNRESLDGRWDKHDVKDSANVADLISQGKCLYYEYPSAKLRGLRGLLSLKRRLKKQEHSYRVHIRNHLIAQYFPEMDRDYERLGAEGLSIVRWCFPPSQITELDVEPFIERVTSRRIRMEKRRRLEAIWEKAGESIGCDGVPGVDHEARVMVEGLRQIREMIKETEDKIEELCKQFSEYHYVLTIPGFGPDVSAKVLGAIGDPDRFENGKQVLKLAGLDLSADRSGKNSDKAIPEISKRGKADLRYALYQAALIASTRTKDFMRYYTRKLRGREKEKGIHTKMIVKLSAKMLLIAWTLMKKKGAFDPAYLNVQ

SEQ ID NO: 351134 - protein, 400 aa, unidentified
MYDISDVDVFFALDVGKTAHHGHGLTPAGKKVFDKPLPNSEPKLRAVFDKLTAKFGTVLLIVDQPASIGALPLTVARDAGCKVAYLPGLAMRRIADLYPGEAKTDAKDAAVIADAARTMPHTLRSLELTDEITAELTVLTGFDQDLAAEATRTSNRIRGLLTQFHPSLERVLGPRLDHPAVTWLLERYGSPQALRKAGRRRLVEVIRPKAPRMAQRLIDEVFDALDEQTVVVPGTGTLDIVVPSLARSLGAVHEQRRALEAQIEALLEEHPLSQVLTSMPGIAIRTAATLLVTVGDGTSFPTAAHLASYAGLAPTTKSSGTSIHSEHAPRGGNRQLKRAMFLSAFAALHDPASRTYYDKCRARGKTHTQALLRLARHRISVLFAMLRDGTFCEHRTPSLA

SEQ ID NO: 351135 - protein, 338 aa, unidentified
METYAGIDLHSSNNFIGVINDKDKIIYGKRHRNRLDDVLRALDPFQDSLKGVVVESTFNWYWLVDGLQEHGFPVHLANPSAIQQYEGLKHTDDPWDSFWLAHMYRLGILPEGYIYPKEHRAVRDLLRRRLLFVRQRTSQILSLQSMISRNLGFKMSNNEIKKMKPEDIVQLFDCSNLVLMATNSWATIEFLKHIIKGIEKRVKSQVKLRKEFEMLLTIPGIGNTLGLTIMLEVGDIGRFPKVGDYSSYCRCVDSKRLSNGKKKGENNKKNGNRYLAWAYVEAAQFARRYCVKAQSFYQSKEAKTKAVVAIKALSNKLSKASYYIMRDRVAFDEDKLFS

SEQ ID NO: 351136 - protein, 346 aa, unidentified
MEWIALDVHKNYTWARVESPQGERLYESRLAHSHGTIKNFVQRWSAGSVVAVETVGNWYWVVDEIESGGGKPQLVNARLAKLMMGNANKSDKLDCKGMNRLQRTGTLPMVWIPPSGVRDARELPRTRMVLRAQRTQLKNRVHATLGKYGYRVQEVSDAFGKRGRQIVEQLVSKLPPHTEQALRRILDQLDHVSENLKGIEGQMIEVFSPSPQAQWLKSLPGVGDILAVVIWTEIGTIERFGSAEQFASYCGLVPRENSSGGKIRFGAVRRDVNVYLKWAFVEAANSSVLNRERCGYGHISRLYQRIRSRRGHGKAKVAVARHLSEACFWMLKKGESYREPMSSTQR

SEQ ID NO: 351137 - protein, 420 aa, unidentified
MKAYSVENFAVLIGIDWADKKHDICEHPIDSEKYHYSIIKSKPEALHDWAMDLKKRYPNQKIAVVCELKKGPLIYALTKYDHLTLFTVNPSTVAKYRKAFTPSGAKDDPSDAFVQVEILTLHMDKLSVIEPESASVRSLAQLVEYRRSLVQDNVDLSNKITAALKNYYPQALEWFKEKDTFIFCDFITKWPSLAHAKRAKKQTLLDFFNSHNSHYVHVNEARISSIKSAMPLTGDMGVIEPNQMLVEVLIKQFKVLLKGIETLDKAIKLAYKAQPDKVIFDSLPGAGPQLSPRLLVAFGSNRNRYDNAAELQKYAGIAPVIERSGKKMWTHWRYSCPTFLRQTFVEWAGFTIRYSFWAKAYYEQQKSKGKPHNSIIRSLAFKWIRILFRCWKTNTPYDETKYLEALKRRGSPLLKFAINS

SEQ ID NO: 351138 - protein, 387 aa, unidentified
MRTVSGLDIHKDSIFMCILDEQGKKTEEKFGVTTREIKRLGSVMRSHFVSEVCMESTGIYWIPVWRLLENDFQLRLVNAQFLKQLPGRKSDVKDAEWIATVLLKELVRDSFVPDGNIQSLRQYGRRINEINKDLVRCQQRIDMILQRCNIRLSNYVSNEDSKSYRKVVDALIKGESSSCELVKLVHGRTINRFSKSIIEDALEGDVKQSDRDLLEQYTQMLDLYQLQKQQCVDSMIQKCRELYPKAFSILLGICGIDKLSAAIIISEIGDNMKLFATAAALVSWAGLRPRNDESAGKIHSRKITHGNKYLRKALMECAWGASRNIGSVFYCRFWHLKEMKKHHNAIIVAIARQLLTIIWALLSKEEKFDNQYHLKKNIPSITSIKVG

SEQ ID NO: 351139 - protein, 425 aa, unidentified
MLGIGIDWSEEFHLVALGRPGEGVIEVTRVEHSPTAVDALVARVAGFEPDPGEVRVVIETRHGLLVERLVDAGYVVVPVNPDLVARRRGPAKKKDDAEDARIACLIALDRHERLRPLIPHGEIAGELRAIARDDERAARDERRLLNRLRQDLISTFPAALAIGGEDLGAPTFLRMLERWPTADTLAAAPRTELVAFARSCRHGWPERLADRVQASLAAEHFRPKDYLVRAKADTIRLAATQLLAIGAQRRTWERRMGELLLGAPRQGRDKRPRGDGLGKGFPGGEIYLSFPGLGDRLAARIAGEIGDHPEQFDTPNSLQCYAGKAPVTRRSGKSELVVACRLAHNRYLGGAVQQWAFCSLRRSGWAREFYDSQRARGKGHQAALRALGNRWLEILWHCLHRGVPYDEAVHVANRNRALGRTTQAA

SEQ ID NO: 351140 - protein, 385 aa, unidentified
MMLIGIDPHKSTHTATAIAPDTNHEVASIRIEATLREYRRMLTWARQWPQRRWAVENAEGLGRHLTSWLLARGEDVVDVPTTATARVRQLSRGGGRKNDRIDAAAAACVAALQGDARPLQAEGYADAMAVLDERRVNLAQSRVRAVNQLHALLRALIAGGAPRDLSATTAAALLRTVRPNGAVEQARKAIAKDLITEIRTLDTQLKANAQAIARLVAATGSTLTEVVGVGPIMAGRLISRTGRASRFPSAAAFANYAGAAPVEIASAEKSRHRLSRHGDRQLNSALHTIAITQIRIPSSRGHRYYESKIAEGKTPREAARCLKRRLADHLWRTMINDEQRAAGPGGQLGTTLQSSVAGPTPTTNSSDKSLPRPANHDFTTTKPAA

SEQ ID NO: 351141 - protein, 384 aa, unidentified
MQASSVATPTVEHCGTVFVAIELSQKSWLVTLHSPDRDRISRHKLDGGDHAGLLALIDRERDRASRTAGGVPAVASCYEAGYDGFWLHRLLLAAGITNYVFDPSSIAVDQRARRVKTDRIDGERMLRTLMAYLRGEPRVVRIVRVPTPEQEDARRASRERDRLTKEQTAHTTRIKALLRLLGMAVGNPRRRDWLTWLVKQRDWQGQAVPPQIMAEIKREHARLMLVREQLDALAQAPADLTPAAAQMAQRSELLLRLKSLGPAFATTLTNEVFYKDFRNRREVASYFGLTPSPWQSGGTDRDQGISKAGNPRARCAAIEMAWLWLRHQPDSKLTQEYRRRTLNASKRIKRVAIVALARKLIVALWRYLTTGLVPEGAMLKTAEV

SEQ ID NO: 351142 - protein, 340 aa, unidentified
MGYYVGLDVSLKSTHICVLAGERRVVWRGVSDTQIAMIAEHLARWSKQIVLVGLETGSLTPWLYHGLSNLGLPMVCMDARRASDALKARAEKTDKADARALAEMLASGWYSAVHVKSLESHQLKALLGARDQLVRVKRQLYGQVRGLLRPFGIKISQRVGAKSFDEAVRMACNKEDVLYIAVGALLDTLANVASQIAVLDKQVRTLAQKRKACWHLMSVPGVGPITALAFTAAIEDPHRFSSNRDVGAYLGLTPKRYQSGERDVSLSISRQGDEMVRHYLYEAANCLLTTVTGASALKSWGLKMVKRCGAKRARTAVARKLAVLLLRLWKQESHFEAQSA

SEQ ID NO: 351143 - protein, 347 aa, unidentified
MNLYNNMHPYYCGIDLHARILYVCILDQDGKTCVHKEIPADPVKLKELLNPYIGDIVVGVECMHCWYWVSDFCNELGVDFILGHALYMKAIHGGKAKNDRIDSFKIANLIRGGNFPLAYVYPKDMRATRDLLRRRTKIVQHGADLKAHVVNTTSQYNLPPNKLNLKNVSAREQLKSTFTDISVQKNINLDMVILDCYAEQLSKVEWFIEQQAKQHKPVHLHVLKSIAGVGRILSLTIIYEIGNIDRFESVQDFASYARLVKCKAESAGKSYGTQGNKIGNAHLKWAFSEAAVLYLRGNDKAKRYLVKLQKRMSKAKALSALAHKLGRCIYFMLKNETVFDEMKFLKS

SEQ ID NO: 351144 - protein, 373 aa, unidentified
MTDYSAFVGLDVHKETIAVGVADAGRTGEVRFWGEIANTPDAVANMVRKLSGRHPRIHFVYEAGPCGYGLYRQIMATDHHCEVVSPAQTPRKPGDRIKTDRRDAIILARLSRAGELTPVWVPDETHEAMRDLIRLRQAMVKDLRAARQRVKSFLLRHGRVFKGTSWKRSHRVWLGNQSFAHPAQQIAFQSYLNAADQAQARRDAVDVQIRQFASEWSMAPVVEALQALRGVAFVTAVTVVCEVGDIRRFAKPRQLMAFLGLVPGERSSGETRRQGGITKAGNVLARAVLVEAAWSYRTPAKIGAQMMLRQEGIPQAAKEIGWKAQVRLCGRYRRLMARGKKSPLAITAVARELVGFIWAIAHTTEPVETEGAA

SEQ ID NO: 351145 - protein, 320 aa, unidentified
MTSRGMEKMKHDTIGVDVSKDHLDAHRLADAATRRFANDKGSHKALIKWLAETPLNRVVFEPTRPDHRAVERALGASGVPFVKVNPRQARRFAEATGKLAKTDRLDAAILARMGSLLELEARPARSEVLFELKELYLAREVVVKDRTAARNRGKALTRSLLKRQNAQRLEQIDRQIATVEAAILQIFEAYESLADRFAILISIPGLSNITAFALLIAMPELGSLEAGQAANLAGLAPIARQSGRWTGRSFIRGGRADVRQALYMPALVAVRFNPDMKAKYAHLIKTGKPAKVALTAIMRKLVVLANALLKANRTWTPKTA

SEQ ID NO: 351146 - protein, 438 aa, unidentified
MSNKVFFNLDDLFISVGIDIGADFSWMSIALPNQQFVGKPYKILHNSIDSITTAVSKIKEAEELYSLESHIFLESTGIYHYPLFCYLRDKGFNCSVINPIITKNSTNINIRKVHNDRFDSKKAALVGLKPDLKVSLMPSDLALNCRNLCREYYDLMDNRSAYVNKLQGELRMVFPQYLDIFSKVTINTSLTLLETYTSPSAFLKADKQEIIDIIKSTARFGLTYAQNKYNAIIQAATDANQFGYIIDSNIKRIRLYISFIRKYDEEINNILESLHELVDANEDADFVKQIHLIETFKGAGFLSAVSIMGEIGDFSAFSKPKQLFAYFGLDPAVKQSGKFEGTKVQMSKRGSAIARRVIHTLTLQSISISRNGEAKNPVLREYYLKKCDSKPKLVAMGAVSHKVCNMIFAILRDNKPFKIIAPQEHIKQYNAAKCDIAA

SEQ ID NO: 351147 - protein, 411 aa, unidentified
MEVIYKRCCGLDVHKEIVVACLLIREGGKVLKEIRTFLTMTVDLVVLHDWLKAHQVTHVAMESTGIYWKPVFNLLEEDFTVLLVNAVHIKTVPGRKTDVKDCEWIADLLSHGLLRGSFIPPEPIRDLRDLTRYRKSLTDERVRQVQRLQKFLEGANIKLASVATNVMGVSGRAMLEALIAGSTDPQVLSELAKGRLRKKLPELKKALEGRFRSHHGFMVAEILTHLDFLDEAIERVSQEVSSRIIPFSKIVELMDLVPGINQRVAEGVLSEMGVDMSCFPSHRHAASWTGLCPGNNESAGKRKSGRVRKGNQWLRRYLIEASWAAVQKRGTYLSALYYRLVPRRGKKKAIIAVAHSLLVMIYHILKDQVPYHELGSDYFNKLNAAYVQRHHVRRLESLGFKVILEPLSKAA

SEQ ID NO: 351148 - protein, 372 aa, unidentified
MTKSNILFIGLDVHKESIEVAIAEDGIGGEVRHYGKIGGTIAAVDKLLRKLVSLGKTLHFCYEAGPTGYELYRHLTQKGHICIIIAPSLIPTKPGDKVKTDKRDAIQLARLFRAGELTPVYIPEREDEAIRDLSRAREDAMLIQKSARQRLKSFLLRHNIRYTGSARWSEKHLRWLADEVRLSNPVQQVVFQEYVNTVTEAALRMERILKEIHHYVKLWRMYPVVKALMAMRGVQMIVAVTMVSELGDITRFESPKQLMSYLGLTPSESSSGERQRRGGITKTGNRHARRILIEAAWAYRYLAKVTPEIQKRQEDVPYAVRTIAWKAQVRLCKRYRIMTKKDKPKNVITVSVARELAGFMWAVAQEIKIPEK

SEQ ID NO: 351149 - protein, 357 aa, unidentified
MEGLDEERRDAPVFLGVDTHSEAHVAVALDGAGGRLGELVVPNDRAGYARLWDWAMSLGILVAAGVEGTGSYGAGLSRFLRARGASVQEVNRTSRQHRRRHGKHDAGDAETAARQVLSGTAAGEPKGADGVAESLRALRVARRSAVKAKTQAANQLHALLSTAPDELREGLRGLPTKHLAAKASRFRCGAGPVDPARATKLAMRSVARRHQALSGEIAELDAHIEALVEEAAPELVALEGVGPDTAAALLIAAGDNPERLKSEASFAHLCGTAPVPASSGKVVRHRLNPGGNRDANRALHVVALNRLRRDPRTQEYLARRTAEGKSKKEALRCLKRYIARETYRAVLLDAGARRPPG

SEQ ID NO: 351150 - protein, 341 aa, unidentified
MSDFSYFCGIDLAKNHFSLHAVDQNGKVILHKSVTRSKLLTTIANMPLMRIGVEACGGAHYWARTLNKLGHDARIMAVKYVIPYRTKGKNDLNDAVAICEAVQRPSTRFVPVKSPEQQAILSVHRMREHWVRERTALMNRMRALLSEFGLIIPVGRSSLMKQVPLMLEDAENELPYLARTVIADAYHHLGELNQRIADTEQVFDSFAKVSANVQRVMKVRGIGPQTATAILASIGNGSQFDKSRDFSAWLGLVPKQYSTGGKPRLGRITKHGDKYLRTLLVHGARTVIANLGDKQDKLSQWCRGVLERRGMNRAIVALAAKNARIIWSLLHNQTEYENYAA

SEQ ID NO: 351151 - protein, 315 aa, unidentified
MEHLPAAPSFVGIDVSKDRLDVHILPTRQTLVVQRNEKGFEDLVSELRKLAPALIALEATGGLEVTVAAALASANLPVAVVNPRQIRDFARAVGRLAKTDALDAQAIALFAERVRPEPRPLADADSQSLAELVARRRQVVEMIGMETNRLHQARNPRIQRMLRATLKTLTAQLAQLDRDIDDLIKRSSLWRAADDLLTSVPGVGDVTAHTLIADLPELGQLDRRRVAALVGVAPVNRDSGQLRGRRTIAGGRIGVRNTLYMATLSAIQWNPVISTHYHSLVNRGRPKKIALVACMRRLLGILNAIMRTKTPWQCA

SEQ ID NO: 351152 - protein, 479 aa, unidentified
MNSNGKKAKKQAVIKNSTANVLSQEELARRIATVQEGMKASTWRELETRGRFTKNDKLTFISDDMLILGCDIGSEMHYARAIDSRGRELSRGAFSFSNSEGGFRSAKDWALELAAANDKRQIVLGLEPTGHYWFCLAAWMVSNGISVVQVNPYAVKQTKELEDNSQLKDDRKDPKLIANLVKDGNYGMPYLPEGLYADLRRLSMLRDQLTEDRIRNTNRLHREMKIYFPEYMDAFGKLDGAFTLEVLKAAPFPEDILKLGADGLKGIWHEAKLRGRGYSRADRIVRYAKESVGLKQGTRGGKKAVKIFAEQMTDLAAKRDEIEAELHQKCLEIPYAENILEIDGVGENILAGVLAEMGDITRFDDVKEIQKLSGLGLVACSSGKHKGETKISHRGRKRLRYWLFQAAKSAVSHAEEFKTLHVYYTARANNPLKKMQSLIVIACKILRVIYTILNTGQKYDPARMLKDIRHMSPEAAEAA

SEQ ID NO: 351153 - protein, 310 aa, unidentified
MTAYVGIDVAKATLVLCLQPEGRTWKRPNTPAGQAQVVAELQAVQPERIALEATGGYERAIWQQLQAAGLTVVRLQPRRVKALARALGWQAKTDPLDAALLAEAARILVVPVTVAPDAATEALRALVDLRRQLVSQRDDNQRRLKQSSAVVAQRVLNRINASLQREIHQLDRKIKAQLAVTAAPDLATAPGVGPVLQATLAARLPELGRLDRRQIAALVGIAPYNADSGAHQGKRHIRGGRADLRRVLYMATLASIRANSIIATTYRQLLARGKLKKVAIVACMRKLLIMLNAMARDHTTWAPPTLSGAA

SEQ ID NO: 351154 - protein, 337 aa, unidentified
MEARIGEYPVPYYVGIDLHKRYSYVVVLNEVGEVVEERKVSNEELKEFAEKYRGSKAVIESTGSYRFAYDILDRYMDVKLVHPSKTRIIAEARIKNDSLDAKMLAHLLRTNLIAESYVPPKEVRELRDLTRARRALIEDRNRIKNRVHAILIRNGINDYPNPFTKKGREFLKELQLPELDKALLESNLSIIDKINEEIKKIDKIIQEKAKEDNEAILLMTIPGVSYYSALLIKAEIGDINRFPNHEKLVSYAGLCPSIRQSGEKEIRGRITKQGSKLLRWILVQCANAAVRNDEYLRNFYLRIRRRKGHNVAIVATARKMLVCIYHMLKKRETYNPR

SEQ ID NO: 351155 - protein, 366 aa, unidentified
MKKITTRTICGSSRLQDRQLTIGLDVGDRSSFYCVIDGKGKVILEAKVATRLEALRETFGRMPRSRIALETGTHSPWISRLLSELGHEAIVAHARDVRLIGESRRKDDKIDAQVLARLARIDPQLLSPIQHRSAEAQADLSVIRARYALVRARTGLICAARGLTKSFGERIRGRNPKVFRPEMGETLSPQLRVALTPLLHALETITERIREYDDQIEKLAEEKYPEVALLKQVKGIGTLIALTYILTLEDPLRFRKSRDAACYVGLQPGRRNSGQSEPQLHITREGDSYLRMVLVQGAQHILGPFGEDSDLRRWGLKLAERGGKNAKKRAIVAVARKLAVLLHHLWISCEAYEPLHNTRKRRPAAA

SEQ ID NO: 351156 - protein, 411 aa, unidentified
MRRKVAQIGLDCHRTFSNATARDGDGRVLWRERLEHADRPVLAGQLQRWPAGTPVLLEATFGWGWMSDELAQAELEPHLVSSKKVAAWRDARGIAKSNRTDADLLSELEMNRRWWEVWLAPVEVRDQREWMRYRMTLVALCAGVKNRIHAVLHRHGIVSQESDLFGVSGRQFLKALVAPGDATLRDSARAVLSGYLRLLDQLRGQIAAVTRELRRQLQRHPAAARLRSLPGIAWILAYTIVAEVGRIERFPSAKHLASYSLLVPRSYDSGDDDGSDPKGRHVGHAGRRTLKWAWIVAAHGAVKSGGRFRAIFDRHSDGGKKNRGRSYIAVAHELCRVAYALWKQDRNWSEQAPERPGRRPAQRSGPRRRLQEKQVEEPGRKERKRQRQPYRTRPGTGQPDHPMVAAATRTS

SEQ ID NO: 351157 - protein, 369 aa, unidentified
MKKHSNSRQNPQRANRARQTKGSDTIGMDLGDKTSRVCVLDHSGDVVKETSVATTKKALVAMFGAMKHCRIAIEVGTHSPWVSRLLKSLGHEAIVANARQVKLISQSSRKNDKLDAQMLARLARMDPALLRPIRHRSEEAQKDLVTIRIRAALVEARTGLVNAARGLTKAFGERLRSCDADQMGVEKLEELPVDLREKLKPLLAEVKSLTEKIQECDGKIEQIARDRYPETKLLRQVSGVGPLIALTYILTIEDKQRFPKSRDVGCYIGLRPKQSESGERQPELRITKEGDVYLRKLLVQGAHCIMAKRAPDTDLKRWGTKLAGRGGKNARKRAIVAVARKLAILLHHLWATGEVYEPLRHGNALAKAA

SEQ ID NO: 351158 - protein, 344 aa, unidentified
MTEYVGLDVSKEETSFCVMDSVGHILSHGKALSDPQSLFEAMRAHTLCPERIVLETGTLSNWLARGLREYGLPVDVIDARQAHAVMKLQHNKTDANDAALLATIARTGFCRPVAVNSEAAQKARILIKVRRHLVCQRVDSLNAMRGFLATLGLRFPKGSAKLVCLVREALAEQPDLKVMIEPLFASVETLDIEIKRLDQEIKVQAEASPAARLLATIPSVGSVTALAYAATLDDAGRFASSRAVGAYLGLTPRRNQSGEMDYNGRISKFGDAMLRALLYSAANNLLTVSRKAHPLKDWARRIRKRSGHKKACVALARKLAVIMHRMLITGEAFRWPEEKKEMAA

SEQ ID NO: 351159 - protein, 355 aa, unidentified
MSQEKYIGMDVHQATISVAVMDGSGKLIMECLLETKAATIVEFIQGLHGTLSLTFEEGTSAAWLHDLLKPHVSQLVVCDPRKAALLKEGNKSDRIDARKLAEMLRTNQLHSVYHGEHGMRTLKELGRSYLTVTKDVTRVMNRIKALYRSWAIPCSGTTVYASRHRAEWLAKIVEPGVRVRAEHLYQQLDSLQPLRLEARRELLQESHKHPAVKLLRQIPSIGPIRAALLVALLQTPHRFRTKRQLWAYSGFAVETHDSGEYRYVRGKAQRNRERITVRGLNDNYNKDLKNLFKGAAISASTSPGSLHDFYVARVEKGMRPTMARLTLARKIAAISLTLWKKGVKFDPKQLHRQAA

SEQ ID NO: 351160 - protein, 324 aa, unidentified
MIDGILGIDVSKNTLDVSISSCGKVRTKSFANTSDGWHHLLDWLVAQKIRRVHACLESTGRYSLGIACALYEAGHIVSIINPAQVRDFVRTKLGRNKTDGIDASRIREYCELFKPLPWAPPSEAHRRLGELQTIRSGIIAGLTEWKNRKNSGIVDAEAQALADATILHFTSQIGAVDKAIALAIENDSDLRSKRDLLLSISGVGDTLAGIVLAELPGPNVLHSSGEVVAYAGLNPRQHQSGTSVDRATRISKIGNAVLRAALYMPALSAMRYNPAIVALVTRLKSRGRLKPKQIVVAAMRKLLVLCFGVLKTGKPFDPAIAMGC

SEQ ID NO: 351161 - protein, 349 aa, unidentified
MLRNKPRDAAVYGVDIGKNIFHVVGVDATGKPIQRVRFRRDTLLQFFGRAEPALVGMEACPGSQWLARTIRSFGHTVRIIPAQFVKPYLKSNKNDTLDAEAIAEAVTRPTMRFVDIKSVEQVDVQALHRARDMMVMQRTRMISQMRAFCLEYGVAIRQGAGVFKLDLPRVVEDESNELSALIRRLLAELFEDLRQLEGRIADVTREIQALVDQHDVARRLLTVPGIGPLGASALLAAVGQGHQFKKARDLAAWLGLVLRQYSTGGKSTLMGISKRGNGYVRRLLIHGARSCVMHLDRTKNRLGAWLDQLQRRMHVNKVVVALANKIARIAWVILNRPGTLYERVDPAFA

SEQ ID NO: 351162 - protein, 376 aa, unidentified
MSKIRFVGLDVHADTIAVAVAEPGREVRSHGVIPNRIESVRKLIGKLGPARQLKACYEAGPTGYVLYWQLTQLGVACEVIAPSLVPTKAGDRVKTDRRDAEKLARCYRAGELTAVWVPDAAHEALRDLVRAREAAKKDQLKARHRLGKFLLRHGRRPEGMKAWTKQHLEWIKTHVRFDQPALEATLLDYLHEVEHVAMRIVKLEKAIDEAVQTAPMEIRTVIEALQALRGVAQTTAATIVSELGSLSRFQSPRQLMGYSGLVAREHSSGNRVQRGSITKTGNAHLRRVLVEAAWAYQHRPNVTGFLLRRQKSLSLSDEVKQIAWKAQHRLHKRYKTFAARGKNKNQIVTALGRELLGFIWAIALHTEQKHKLALAA

SEQ ID NO: 351163 - protein, 408 aa, unidentified
MDVRHARCAGLDVHKKTVVACVRITEPGAVRHEVRTFATTTRGLLALADWLRAEGCTHAVLESTGVYWRPVWHVLEGAVTLALAHAAAVRNIPGRKSDVSDARWLADLLAHGLLRASFVPPAPIQALRELTRTRKQLVREVTAHTQRIHKLLESANVKLASVLTDVLGVSGRAIIEALAAGETDPERLADRLHPCVRSKRAAVIEALQGQVRDHQRFLLRQHLHLIATLEETIGALEGEIAGALAPFRGAVARLVTIPGVRDTVAAVLVAEIGTDMTRFPTAGHLVSWAGLCPRMDESAGKHRSRRIRKGAPWLKPVLVQSAWAAVRVRDTYLRAQYFRLRSRAGAKKAIVAVAASLLTAAYHMLRNDQDYRDLGPTHLTEADRHRMAHRLTRRLQHLGYAVDIRPAA

SEQ ID NO: 351164 - protein, 319 aa, unidentified
MTANAVVVGVDVAKDRLDVAVRPTGETWSAANDEAGITALVTRLRPLGPALIVCEATGGFERAAIAALAAAGFPVVVANPRQIRDFARATGQLAKTDQIDAAILALFAERVRPTPRPLPDEAAQLLDALLTRRRQLLEMLVAEKNRLGFAPRPLHKGIQQHIRWLERQLDDVTKDLADQIERSPVWRAKDDLLQSVPGVGPIVSAVLLAELPELGALTHKQLATLAGVAPLARDSGTLRGKRMVWGGRAGVRTALYLAALCGRRWNPQLRVFYERLLAAGKPKKVALIACARKLLTILNAMLRDNTRWEAPVPASQHSC

SEQ ID NO: 351165 - protein, 355 aa, unidentified
MTSAKYIGMDVHTATISVAVRDAAGKLIMETVLETKASTILQFIQGLRGELHVTFEEGTWAAWLYDLLKPYVTNVVVCDSRRNALLKEGSKSDRIDGRKLSELLRANLLRPVYHGENGLRPLKELVRAYLTISKDLTRVMNRVKAIYRGWGIPCAGQSVYHPRHRDEWLSKITQASVRRRAQLCYLQLDMLVGLRQQARQELLVEAKKHRAWKFLRSIPALGPIRAAVLMAMVQTPLRFRSKRPLWKYVGFGVVTHSSADHRYVEGQLQRAKKPVSVRGLDSSHNHYLKDLFKSAAIQASTREGPFREFYEALVGKGMRPEMARLTLARKIATIAFTVWKKGVVFDAKYLKPQTT

SEQ ID NO: 351166 - protein, 453 aa, unidentified
MCLEDRPVLEPNAAGIDVGAREMFVAVPPGRDENPVRVFATFTEDLERLTDWLEQCGVTTVALECTGVYWIPLFEILEQRGIRPCLVNARHMKNVPGRRTDWHECQWLQFLHSVGLLRAAFRPGQDVCAVRTILRHRNELVAAASQHVQHMHKALTQMNLQIHHVISDITGLTGRTIVDAILAGQRDGAELAKLRDPRIKADTETIRQSLEGNWRPEHLFTLGQSRDLYRIYQQQIVNCDLEIEKMLQGFAPRIDPGEKPLPPDRKRNRAGSKRRRKNGHPHPEFDLRTEAYKLFGVDVSQIPGLEENALPLFSEVGRDMSRWPSAAHFVSWLALCPDNDISGGKLLWRGARRVKNRAGHLFRMAAYALHRSLTPLGNYLRRMKAKLGPQAATMATAHKIAVIFYTMIKNQVEYDETIWDARDAQREKKLQAKLKRQAKQLGYELVPIEPQAA

SEQ ID NO: 351167 - protein, 356 aa, unidentified
MQGEGFWVGLDVGADELVACMVDAEGRVRAEEAMPTCPLRVSAFMEKHATDKAPIGLEAGSSCLALTRKLRQAGFRVHAFDTRQVSKFLAIRQNKTDANDARGIADVVRMGRGVVAEVYIKSAECQQLRSKLAIRQKLVRHRMAGESAIRSAFRLNSGRLDRCFSAVDLRRKVTAELERIRDVEGVDLIDDVMPLLSICEATRKHLEVSDRKLNKLAQRHPICGRFMEIPGVGFLTALSVYSAIENPSRFVRNEDAGAYFGLVPRVRQSGQSIQRLGISKMGNTMTRSHLITAASVLMRLKDADCDLQDWAKALAARADSRRARTALARKLAVTMLSMWRSGNPFKARALSEPLDP

SEQ ID NO: 351168 - protein, 411 aa, unidentified
MDVLYPVCCGLDVHKKTITACLRFASARARAEEVRTFGTTTRELLRLADWLTAAGCTHVAMESTGVYWRPVYHILEASFEVLLVNAQHVKAVPGRKTDVKDCQWLAQLLEHGLLRGSFVPPAPLRELRELTRYRRQLVQEHAREANRVQKVLETANIKLGDVATDVLGVSGRAMLQALIAGERDPERLADLARGALRQKAEALREALVGRFTLHHAFMLQGLLDHIEFLDQQIARFDERIEEQTRPFGPAIERLDTIPGVGRRSAEQILAELGDDMRRFPTAAQAASWSGICPGNHESAGKRRSGRTRKGNAWLRSTLVESARAAVRNRGCYLSAQYHALARRRGDKKAIVAVGHSILVAAWHILRDGVEYRDLGPDHFDRLNRERLVQYHTRRLAELGLTVQLPGAQATA

SEQ ID NO: 351169 - protein, 354 aa, unidentified
MKNQAVQYLAFDVHQATSVASLRDEHGKVLMRATVPTEAKAILTLVRSAGPRVHVAFEEGTQAQWLHDLLIDHAERVVVCNVRGRSETTNKNDRIDADGLSELLRLGALKPVFHGVPEVLTLKELVRCYIALVQDSTRVMLRLKAIFRARAIPTPGVSVYRASQRKQWLAKLEGGARIRAASLLTQLDTLLELRPKAKAAMIAAARRLPGWKVLRSIPFLGPVRVALILAIMRTPFRFRTKRNIWPYAGLAVVQRSSADQEYRNGKLQRSRKAPITRGLNRNHNPLLKSVFKGAATAAAAKGGPLRDYYEASLARGVKDDMAKVTLARKIAAVVLRLWKKGELWDPKKLMIQAT

SEQ ID NO: 351170 - protein, 344 aa, unidentified
MNVTHYIGFDVHKKSVSFCAKTADGEIVEEGKLIAQRATLRQWASARTQPWPGAMEATLFSGWIYDTLKPYSERLDMAHPAMMKAITAGKKKDDRVDARKISDMVRCNWLPVCYVAPPEIRDLRRLLRYRSLVVRQSVRMKNKIAGLLMETGTPYNKEKLHGKKYFAELLKHLEEVPESVHDLLRMSRGTMEMFEAAQRRLIKQLLANPPLGRRVELLASIPGVGEITALTWALEIADPRRFSSSSRVLSYCGLTAALQSSAGQQQRGPLSKQRNAWLQTALIEAAKLAPRWNPQLAAVHARELARGHRNRATLAVARKLAAYLLAVDKSGQRFQLRATPAEAA

SEQ ID NO: 351171 - protein, 464 aa, unidentified
MNKAQLNTEFSTEEIIAIGKKAYEEATAITWRQAEVGRTLTQNDKIALVDDKTLVIGADVGSVKHDIRAFDNRGREFSKKPLEFENNEAGFALAKAWILMIRDEQHLEKIMVGMEPTGHYWINLASWLMAEGITVVLVNPHHVKKSKELDDNLNRKTDKKDPKVIAGLVHEGRYSMPYLPDGIYANLRNLNNLRLMNTEEKTRCMNRLNRWLSIYFPEYGTVFKDVSGVGSLLLLEQAALPVDIVKLGADGINRIWRTAKLRGVGYAKALKIISAAEHSIGSTEGLDIARDEIQWILENLKTLIKWDEDLLAKIGTIAKEIPCIDNILEIKGLGVRTVAGILAEIGDISRFGSVKPIQKLAGLALVEDSSGKHEGRTIISKRGRKRLRYHLYQASLVLIGQNDEFREVYDYYRTREDNPLKKMQALMAVACKLLRVLYAMVTKGIKYDPEKLLSDIHRPQKKVA

SEQ ID NO: 351172 - protein, 413 aa, unidentified
MDVLHPRCCGLDVHKSSISACILLREAGRVQKHQRRFGAMSQELQELAEWLRQFGVSQVAMESSGVYWKPVWNILEGQFTIVLANAQHIKNVPGRKTDQKDAEWIAQLLQYGLLRASYIPCEIIRDLRDLTRMRTSLSQEASRISSRIQKVLEDANIKLASVATNVLGKSGRAMLEDIISGEDNPEHLASLALGHLRVKIPQLRLALEGNIRSHHRFLLGRLLDQIQFVEHEIALLDERLEDIGRQRPDLAQAVARWDTTPGIDRVAAWALLAEIGDNMAQFPTAEHLASWAALCPGNHESAGKRLRGTTRQGSPWLRRMACQCAWAAARTKNTYLSSQFRRLAARRGKKRAIIAVAHTIIVIGYHLQKNQSNYEDLGGNYFDRIHSDGLKRYLVKRLQQLGHKVTLEPMEAA

SEQ ID NO: 351173 - protein, 422 aa, unidentified
MLRDSEDTEEIIERVAALDIGKAELVACIRVPNPDKPGRRAQEITTYSTMTRSLLGLADRLRELRVTRVVMEATSDYWKPVFYILEAQGLDPWLVNAKDVKHLPGRPKTDKLDAIWLCKVAERQMLRPSFVPPPEIRLLRDLTRYRIDLVRSRTAEKQRVEKLLEDAQIKLSVVASDIFGVSGREMLAALIAGERDPKALAQLARTRMRAKIPMLEEAFVGHFTNHHRFLLGRMLARVDQTSADIAAVEARIEELIVPFARAVAQLDEIPGVGITAAHVMVAEIGVDMSRFPTPAHLCSWARFAPGIKESAGKNKGRGATGHGNPYLAAVLGEVAVTAAKTDTFLGERYRRLARGRGKKKAIVAVGRSVLVIVWHLLSDPEARFHDLGSDFYDSRNSPDRRKRNHVRQLEALGYKVTLEPAA

SEQ ID NO: 351174 - protein, 409 aa, unidentified
MDVLFDRVAGLDIGKASVTVCVRTPGPQGKRVSQTRTFKTMTRSLEVMRDWLLDEGVELAGMESTATYWKPVFYALEDHMDVWLLNASHMKAVPGRKSDVRDAEWIAQLIEHGLVRPSFVPPPEIRRLRNMTRYRVQLTGDRTRDITRLEKLLEDASIKLSVVASSVDTVSAMAMLSALVGGERDAEAMAQLARGRMRSKIPDLAEALRGRFDDHHALLVGQMLARIELVNTALDTLNVQIETAMSPWADKLDLLQTMPGIGPKTAQVFIAETGGDMTPWPTAAQLAAWVGLAPAMHESAGKRIPAGSRHGNKFLASMLVEAAGSVGRTKNTYLGAQYARLVSRRGQKRAAVAVAHSMLVSAYHMLTRGEPYHDLGPDWLGKRNDAAHTRRLVAQLERLGHTVVLDSVA

SEQ ID NO: 351175 - protein, 499 aa, unidentified
MSRVAPKAPTGELLPSPKPDGTGQPSLTLHRYGVGVDCHSRFFQVCVLIPNGTEIVRFERNVPALWPELRAAQAWILATLRDHDIDVSPSDLRYTCESTGQYHMPLCLAWRGHPAIINPSDTGHLRRKTDRLDARKLAQHSLHGLWRESWMAPDEIQELRVLALQRSKLVAERSRLTNRINSDMLRFGHVVGQLGKINGPVVRALIEDFCQNGSVGLHDDHFSDIRIPPGVVLVFDQRWKRVDVLDQEVKVIEDLCMKQVDTLTWRIGEGRTASGRQLRSSLESIPGVGTQTVITWLAEVGDITRFGSVNKLLAYAGLDPSKDISAGKVTGTKPRKGNARLQGALRNAARAMLGRAPSCKFSMWARGYMGRHSRAGKAKAIHALARRVGKALYYCHLKNEPFDDSGYQALLSESSYPLCPVEEMGLSPGVVRKLKDHGLRTSRQVVDAFYSDLGRRPGCGKVTVQAVATWIDSHRNRSPDRIRKPRGPEASGGRPPAEG

SEQ ID NO: 351176 - protein, 393 aa, unidentified
MFFMFFLGIDIAKHNHVASLIDDNGNSIFKACSFSNSSNGADSLIDKLKKYSTDDIIIGMEATGHYWLALYSYLSEKDFNIIVINPIQTDAWHHATEIRKRKTDSSDSVLIADFIRFGNFQTSSIADEKYLNFRNMTRFRHSLIKQIGDLKRKIIANLDLVFPEYSSYFSDIFGQTSKEILLNFNTAEDFKNLKTRDFEKVLRNITLKKSATIKLNSLKQMSQSSFGVKFALSSYSIQIKCLIEQIKVIEDQAKLIENEIESIVKDLNTPIFTIPGIGYVTGAVILAELGDINKFSSDKKIVAYAGLDATVNQSGQSDGQHGHLSKRGSTHLRKALFQAAFVASTNDTIFKDFYDKKRKEGKHHLVAVNAVARKMCHVIYAVLKKNEPYVEQK

SEQ ID NO: 351177 - protein, 402 aa, unidentified
MAVMIGIDPHKGSHTAVAVGVAEQPLGTIRIRACPAQAEQLVAWAAAWPERTWAVEGAPGLGRLLGQQLVAAGERVLDVQPKLAARVRLLHTGNTGKSDPNDALSVAVTALRSTANREVIADDHAVVLKVWAKRHRDLSRAYNQVACRLHAVLCELVPGGVPEEITAGRAEKLLAQIRPAGVAGKARRELAAELLADMRHLDGQRREVKKKLAVAVKATGTTVTSVFGVGPVIAATIIGDVVTVARFPARDHFAAYNGTAPVEVSSGEKKIYRLSLRRNRRLNHAIHMAAITQISHAHSDGRSYYERKIAGGKTHKEALRCLKRRISDAIYARLRADARQAAAAASKDPGGQPGNDSDSSAAGSHPGHRLFGQATPGPDTSLRATAALTPAMPPAKKTRRTT

SEQ ID NO: 351178 - protein, 349 aa, unidentified
MRFYNQQHRFYCGVDLHAGTLALHVLDAEGNSALAKTVPASPKAFLQAVAPFRDGLAVACECMFAWYWLADLCLEEKIPFVLGHALYMKAIHGGKAKTDKIDAKKIAVLLRGGMLPQAYVYPKGMREARDLLRRRTFLVRKRAEALVHLQNTNSQYNHPPLTKKLSYAKNRAELDFPARFADASVRKNVEVDLALLDTYDRHIGELELYLARTAKVDDPQAFHRLRSIPGVGKVLALVLLYEIHDICRFPEVGQFLSYARLVRCSHESAGKKQGTGGNKIGNAHLKWAFSEAAALLLRESDQAKRWLARREKKHGKARALGALAARLGRAVYHLLRKQQAFDVGRFFAS

SEQ ID NO: 351179 - protein, 387 aa, unidentified
MPLNIAPGFQSETAVAPDHATAFVSLELSRSKWVITSLSPCSNKMSKYSIDGGNGTALLDCLARLRVKAESRIGTAVKIVVIQEAGLDGFWIHRLLESNGIESHVVEPASIAVPRRHRRAKTDAIDGEMLVRTLMAYKRGEPRVCSMVVAPTPEEEDRRRISRERRTLIKERIEHVNRVKGLLASQGIFEYEPMRKDFRNRIESLRTGDGRPLLPQLKAEIIRELDRIDLVLRQIAAIEAERDALVKSDSTDEAPAALLMKLKGIGPEFAAVLWLEGLFRRFANRRQLAAYAGLVPSPWQSGSVNRDQGISKSGNPRLRTIMVELAWLWLRYQPASALSCWFRERVGSERGRIRRITIVALARKLLVALWRYTTHGELPNGAELKTA

SEQ ID NO: 351180 - protein, 254 aa, unidentified
MGNFYFIGVDVSKKKLDFCVMFNGKVVHEEETANHQSFITSLTRHLEEDFGIDNTRIFVCAEHTGQYTFPLACACKAAKCRLWLENPSQINYSSGVQRGKNDKVDAKRIAVYASRFQDKVHYYERPSEDIERLKQLESERTLYVTDLAKYKGQLKDQKDYIPEVLYERKMNRLKALMVDLEEAVKAITDEMDEVISSCAVLSRQMEPLISIDGIGRVVATNMIIATEAFTRFDDPRKFNCYAGVAPFSYTSGSS

SEQ ID NO: 351181 - protein, 374 aa, unidentified
MKSLEEKTERSKHLFCAIDLHLRSMLTGLCLERGEIVYESFNTEDEGGVADLIEQLHQLRAQHKGSEVHVSYEASGCGFRLADRLEDAGFEVSVLAPSHLPQSQKHRSEKTDAKDVLRIMEVLRGSVLAGNRLPKVWIPPEHLRDDRELVRRRLDLGDSLGQVKNRIHGLLQRWGIRCPDHLKSLWTKKYLSWLDGVAVGCGHGLGEHLKSLLRELRFWLSELDQLEQELLSLSSQSKYDRQVSRLTSLKGVGLLTAMVFLTELGDLKRFGNRRALASYLGLTPRSYESGEHNDRKGHISRLGPSRVRKVLNQAALAVINFSPEWGRWYRARTRDSKKTYKKKMIVAVMRRLGIWMWHQGLKAESGIQLSQAVI

SEQ ID NO: 351182 - protein, 386 aa, unidentified
MRQPNDLSRSLATFDPESTLVAVIEMSQSSWLVAGIVPGLDRQPLKKLTVDEGALLRLLQRWRDEVIRLGGKVECIAVAFEAGRDGFWLARWLRAYDIEAYVIHPTSIAVPRQHRRAKTDRLDTELLKRAFLGWLRGEREHCSMAAIPTLEEEDSKRPHRERESLVAERTRIINRMKGCLARLGIRGYKPNLQRATKLLPALRTPEGTPLPPNALAEMGRDLARLHFVEGQIREIEAARLERLHQDPTEKSHSMVRLLTRIIGVGVETADMLVREVLSRNLRDRRAVARYAGLTGAPDESGSKRREKGLARASNARVRRGMIQLAWRFLMFQKESALVQWYRSRTADSRQGARKSLIVAMARKLLIDLWRFVSTGETLVGVAMRPA

SEQ ID NO: 351183 - protein, 364 aa, unidentified
MEVYVGMDVHCKESVFVAEDGEGKVVCEGRIPTTPEGFRLLRTQYGLEPGTSVALETGTSAFFAVRHLARLEFEPVVVNAHEVRKQASRPNQKSDRRDAIELCEGLRRGSYRSIIHVPDANVQRLRQTLSRRRHFIRLMTRETNAVKHLLRSEGLGDLARSLKTEVAWDRLHKRLAFAAELQGLFSCHHEVWSCCRKQVEHLDGELEELAKFFPEAMRHLRTIPGVGTIVGLTLIAVLSDVERFPSAKHVASYAGLIPSTYQTGERNYQGRITKKGSGELRAMLCEAAHQAAKARSPLHPYFAKLCAKRGYKMAVVAIAHRLLRISWAMLRHGTEFQVERLGVEEGPFEVKSTRYYRFKETSAA

SEQ ID NO: 351184 - protein, 412 aa, unidentified
MLFVGDDWAEDHHDIEVQDEHGHRLARARLPEGIAGLSKLHELIAEHLTDEDVDPETGFVAQSVMLGIETDRGTWVSALVAAGYQVFPLNPVQVARYRERHGASGAKSDRGDAHVLAEIVRLDRSHHRPIAGDSPEVEGLKLVARSHQAFIWDRTRHFQRLRSALREFFPAAIEAFPDLMAPDALELLERAPDPARAARLSRSKITAALTRARRREPAARAEAIQATLRAPALRQDPAIEAAYAVIVASAVRLIAQLNIQIGELQAVVAEGFGRHPDADIVTSQPGLGAILGARVLAEFGDDHVRYSDAKARKNYAGTSPITRASGTRRVVLARYARNKHLADATHQWAFCALTASPGARAYYDTIRARGASHHAALRQLGNRLVGILHGCLKTHTHYDEDTAWPRITEAAA

SEQ ID NO: 351185 - protein, 423 aa, unidentified
MSVVTGHVCDIGEAAKAVIPFERVSITTYPNRCGIPNEMMEEDMAQRKRTALELAHPNAAGIDIGSASHFVAVSPDRDDEPVREFKSFTEDLEELADWLVCCGVDTVAMESTGVYWIPLYEILEARGFAVNLVNARHVKNVSGRKSDVLDCQWLQQLMSYGLLSGAFRPADEICMLRAVSRQRDMLLASQSRHIQHMQKALTQMNVQLANVISDIVGETGQKIVRGIIAGERDGHVLAKMKNARIRASEEEIAKSLQGNWREEHLFALKQAMALYDNYGTLLAECDTKLESMLATLVGDNDSDPGRGRRASNSKNAPQFDVRTYLFRLCGVDLTRINGINPTTALKVIAEVGPDMSRFKSAKHFASWLGLCPGTKISGGKVLSGASKRTTNRAAQSLRLAAAALHKSQSALGAYFRRLAARLD

SEQ ID NO: 351186 - protein, 418 aa, unidentified
MKVEYPICCGVDVHKTFLVATIITSQGFTPHYSKRRFSTFNNSILQLKQWLTDNDCFDLCMESTGKYYIPVLNLLEDVIRVTVANPKWVRAVNGNKDDVKDSKWIGDLFRLGLVPGSFIPDKPIRILREYTRYRSKLVSCKSSEKNRFQNAFTVCNVALDAVVSDMFGKSASSITDYLITSDSFDPEHCSSLLQRSLKKKAATVVESIEGYQMTKEQKERMVMVRSHLDFLHQSLEKIDEKLDKMVAPYENAITLYCTIPGVARASAITIISEVGTSMSRFANSKRLCCWAGLTPSNNESAGKKKSVRITRAGVYLKPALVQVAHAAVKSNISPYYKIKYESISKRRGKKRAIIAIARMILTAIYNIFINGEEWNPSDLYKIDMPQEMLEKQKEKAIKQAIKLLTAEGIIKPSNIPVD

SEQ ID NO: 351187 - protein, 374 aa, unidentified
MFSQRVANDESELLELIGGVVGLGDGGEVVWAVDLNHGGAALLIALLAAHDQNLLYIAGRTVHHASRTYRGDGKTDAKDAAVIADQARMRRDLRPVRTGDDISVDLRILTARRTDKACDRTRAINRLRAQMLEFFPALEQAFDYSRSKAALLLLTRYQTPDALRRLGQKRLHTWLRSQGARSGADVAERALMAAKSQYTTVPAQRIGALIVADIAREVLELQNQIDALDTQIAERFREHHQAEIMLSMPGFGPLLSAEFLGATGGDLTVFESANRLAGVAGLAPVPKDSGRIRGNHHRPRRYDRRLLRACYMAAMSSLRSSTASRTYYDRKRAEGKTHTQSVLSLARRRLNVLWAMLRDGTTYEHQRVTSVRAA

SEQ ID NO: 351188 - protein, 448 aa, unidentified
MKKQTEKLPIVNPRSAGIDVGSRSHMVAVGQNADEVKEFGVYTQDIESICNWLSEHAIETIAMESTGSYWKILFDTLQSKGFEVILVNGLQTKNIKGKKTDIQDSQWIQKLHSLGLLSGSFLPDFFTEQLRTYYRHRQYLLEEGACYIKKMQKSLRLLNIRLDIAINDITGTTGKTIIEAILNGERDAEKLSTLTNYRIKKSKEELVKALTGNWRDDHLYELKDSFEMYHILHKKIDDCDKVIEEFLQKALANKDVLGLGNPSEKSKKKINKNTPKIDVHTLGYYLHDGVDLMAIEGMSHSTVLCFMSEIGNNIIKFPTANQFACWLRLHPNRKVSGGKVLSSHTPKGGNIFSAALKRAANVIGNLKEGALAIFFKRIAYRKGRMAAITATARKLAVIIWNMMIKKQAYNPLGTEDYQKHLRLKQIKMLQQKISKLGIKPHEINFATL

SEQ ID NO: 351189 - protein, 396 aa, unidentified
MRFAGIDVGGERHMVAMVGEEGEVLCRSSPFGEDASGYAHLFELLGPPEGCLLALEATGHYWRNLFVALVAKGYAVAVLNPLRTRRFAEEELQRTKTDAIDALGIARFAAQKRPPATELLDIATVELRELARLRERLQEDFASRLRQLHRAVDLGFPEFTRYVRTLESQLAATILSRYPTAVAFRGVSVKALARIVYDGSHKIGEELARALIEAAAKSVGSHHSEPYRLRIKYLCEDLEVLRRRLKDLARDIERKLDDHEVGKLLTTIDGVGPLTAACLIAELGDPARFRSAGAIASYVGVAPRLRQSGKKRFSGSPTIPFGNARLRKALWMVVLNAVRCNPWLRQYYERLRAAGKPGKVAVIAAMRKLLAAVWSVATHRRPFVPIMPAVPVTKNA

SEQ ID NO: 351190 - protein, 437 aa, unidentified
MTTRAFVGVDVSQADAHVCFLLADGSEPAPRWSIPNTQPGAEALSQTLAQLAHQHAITELRIGMEATGLLWWHLAQHLRATPRLAPYAPQVYALNPHLVTTFRANYGALPKTDRADAFLIAERIRFGRQLPAPFQRDARYAPLQRLTRFRLHLVQNLAREKNYCLSFLFLTFSRFGQVSPFGDPFGATSSAVREAFTTEELAQQPLEALTAYLQAKGHGRFADPTAVATTLQRAARDSYRLDQVLQEPLRVVLATTLASIRGLHAQLKTLDVTIARELAGLPQTLDTVPGLGPVWTAGLVAELGAISRFDDEAAIAQYAGLTWETYQSADYQAEDTALTKRGTPYLRYYLVEAANSVRQHCPEYGQYYAAKAAETPRHAHKRALVLTARKLVRLIDALLHTGARYQTPAERQARAGTLPHAAHPRPPRRYKRARAIA

SEQ ID NO: 351191 - protein, 320 aa, unidentified
MTILTSQTVVGVDVAKAEVLVYRADLQTTQAIPNNRTALKRWLKTLPAQSGIAVEATNIYHLDTVELAHELGHQVYVVDGYRLSHYRRGVGQRAKNDPCDARLLARYLAHEQGGLRAWSPPPKAYKALQSLLHRRAALIKARVSLAQSWADEPRLEEELKCLMETFKHSDLAIQKKLRDLSKEAGVAENIERCKAIEGVGVLTATGFATAFLRGEFKDSDAFIAFLGMDLRVNDSGKKTGSRSLTKKGDPEIRRLAHNSAMAACRSATWKPFYEGYLARGFKKTQALVILARKLARVAFALMKNQSEYQPNRPLQGCPAT

SEQ ID NO: 351192 - protein, 340 aa, unidentified
MYYVGLDIHTKRISICVLNETGQAVRRCQVRGIEEMLAVLQGLPDRFEVCYEASCGYGHYHDLLQPLAARVLVAHPGRLRLIFRSRDKNDRKDAERLAKLLYLGEAPAVHVPSLDVRTWRELINCRGQVIAKRTRAKNALRALLRGAGVVPPRHPDLWTKAGLAWLRRLELPTVSQQLRRDLLLEEVEALHRQVRRIEQQLGRRARQLPAVARLRSIPGVGIRTAEAVAAFVDDPDRFRSAKAVGRYFGLVPCQDQSGDRNRLGHITREGAPVVRQLLAEAAWQARRRSPAVRAYFERVQRGDPQRKKIALVATAHYLARVMWSMLKHGTAWEENPAQAN

SEQ ID NO: 351193 - protein, 519 aa, unidentified
MSEPITYVGIDAHKVELHVALLAPDASAPVIWKVQNEARAVERLRRKLEKAAAGPVACCYEAGPCGYVLQRQLERGRVQCQVIAPALVPRKPGERIKTDRRDARKLAELHRAGLLTEVRPPTPAEEAVRDLCRARDDARADRQRCRHRLGKLLLRRGLHYPGRAWTQAHRRWVNGLTWPHPADRVVLDDYLLAIDQLDARLAELDAQLATVATTDPYREPVGWLRCFRGIDTLTAMLLLAELHDVQRFPTARALMAYLGLVPGEHSSGERHRRGPITKTGNTLARRLVVEAAWHYRHRPGVSRTLAQRRSGQPPRVIALADKAQQRRSFCLVVIGARAGTPGLAQCPATRSDFACAASMRVPPGVRRPNAPPTAGLAHWSTTGSPRPSAASNQRAVRRRQPHRRPRRRKLLRGSPGVRPRDGTVARRGPSVAAVRRLSTAAVVGGRPGPSLAAGGAFVPPGRAGDRCPGRRGCTAPGLAGRRAASATAAEFTPAQADAITNAVNLAAERRRRPGRVKGG

SEQ ID NO: 351194 - protein, 452 aa, unidentified
MAQAKPQVIDDEEHERVHERVAAVDVAKDSGMVCTRTPHRSRPGARQSTVWTVKARMTAIRALGRQLTKDGIEMVTLESTSDYWRIWLYVLEACGLAVQLVNAAQARNLPGRPKTDKLDAMWLARLTEMGLLRPSFVPPAAIRALRDYTRARTRLVQERTRCFQRLEKLLEGALVKLSSVASKLTTESAKDMIKAMIAGERDPHTLAALARTRMKAKHDQLVEALAGMFDDHHGELAQILLDQAAFCDARIAQLTARITAAVAAMPAAWGVDADGTTGPDAGTGPDAAALPAVQRLAEIPGVSPDLARSIIAEVGLDMSRFPTAAHLVSWAGLCPRARQSGPRTRAGKKNQGDSWLRNSLGQAAIGAARTTTTFLGERYGRIARRRGKAKAQVAVARSILTIIWHLLADPAVRYADLGAGYYQTRTDTDRKLRNHIRQIQALGFEVTLTKAV

SEQ ID NO: 351195 - protein, 391 aa, unidentified
MSMYFAGIDISKYKHDCCIIAAADQSVVAKFTFKNNKEGFDQLLTTINSLSSPEDIRIGFESTSHYALNLELFLENASLTFMEVNPVLISEYKKSTTLRRTKTDSVDCESIARWLMTVEYKPHSKGFYHAYSLKSLTRLRDRLVRQRSLYLVKLTNVLDHTFPEFKPFFNERFSKTALYLLENYGSAENMSAMNETDYNEIRCVSHGKFSPQQFLELKRLATDTVGINNSIFDVELESLLSLYKSLVKEINTLESEIIRLINEVHPHFMTIPGIGPISAAVIYAEYGDISNFSSPAQMLAFAGIEPSVNDSGTESHGGKMVRHGSSPLRYVLLNCCLPLIRFDMTFATYYAKKRHEGKPHRVAITHVAKKLLRVIFALEKQNIDFNSQKLR

SEQ ID NO: 351196 - protein, 361 aa, unidentified
MSESMALVGLDVHKSRTVAAVLDPGTGELRMERLRGEPERVVPSFLEELDRPVEAVYEAGPTGFVLAREAERRGLDIRVVAPGSIPRAPGDRVKTDRRDAKRLVRLFAAGELRFAFVPSEADERFRDLVRCIDDVRRDLMRARHRLSKFLLRRGVRFQGKTWTQQHERWLCTLHFEDPLSQAVFVDYFAAVQGLAQRRKTLGGVLEQAVPNSSHVETVKRLRCFRSIDTLTAAGLCAEVGDFTRFAKPALLSGFLGIVPSEYSSDEKRTQGQITKAGPTNARRLLVEAAHNYRHRPAIGENLKARQLGQDPRVVEIAWRCQQRLHQRWMHLGGKRGKPTGKVAIAVARELAAFCWEAATLN

SEQ ID NO: 351197 - protein, 410 aa, unidentified
METLLEHACGLDVHQATVVACLLIILKNGKVQKQVRTFGTTTRELVGLREWLLSEGCTHVAMESTGVYWKPVYAILEGTFEIVVANAQHVKKVPGRKTDVKDAEWIADLLCHGLLRSSFVPPPPIRELRDLTRYRRKLVESQTAERNRLLKLLETANIKLASVATDVFGVSGRLMLEALVKAEASPQEMAEMAKGRLREKIPELTPALEGKLEEHHRFLLKLQLDRLEAAENDLAVLEQRIQEKLKPYATQVALLDQIPGVDWTLAAVIIAEMGVDMRVFQNVAQLASWVGVCPGNNESAGKRKSSRIPKGNVYLKTALVEAAQSAARAKGTYLRDKFYRLKARRGYKRAAVAVAHKILVAIYHMLSNQANYNELGDVYLDTLKKHDVTRNLVHRLQRLGYIVTLEEKLA

SEQ ID NO: 351198 - protein, 344 aa, unidentified
MDHFAGLDVSVKETSVCIVDDTGKIIREVKVASEPEALLAVLKNPAYHFKRIGLEAGPLSQWLFSALAEAGLPVICVETRHMRAVLKAQINKTDRNDARGMAQMMRVGLYRPVHVKTLRSQKLRMLLTHRQLLLSKAIALENDLRGTLRNFGLKVGMVGKVKFEARIRELVESLPDLAVLVEPMLIVRRVLREQIIILHRRLLAIVRDDEVCQRLMTTPGVGPVVSLTYRATVDIPARFRKSKSVGAVFGLTCAKYQSGEVDWDGRISRCGDGMMRTMLYEAAQAMMRSKKWSWLKAWAMQIARRRGMKKAIVALARRLAVIMHRIWVDGTEFRWTREKAAVAA

SEQ ID NO: 351199 - protein, 334 aa, unidentified
MNYIGMDVHKQFIVAVAKDKEGNKLAEDKFDNNKSNFEKFLSKFKPEETKIVIESTSVWEYIYDMLEEMKYETKLANPVKTRAIAEARMKTDSVDADTLADLLRANLVAESYIPPKEIRNLRNIMRQRKTIVKGRTQIKNKLHAVLLMNGIKLPYVTLCGKAMQWMIDEINTTSIKSILVSYIHLLEQYNFELEKLEERIVKIAASNKQAQLLSTIPGIAEIRAMEIITEIGDIERFDSSNKLCSYAGLVPGIKQSGTTLRFGKLVKQSNRNLKCVFVEASWSLVRVKESNLFREFYLKLSKKKGKQKAICAVARKLCCAVYAMLKKNQEFMLL

SEQ ID NO: 351200 - protein, 334 aa, unidentified
MLQGGDLTNAREPTSRPLQFIGVDRAQQRFEWALHGVQGTQTVDNHEAGLETLCETLKDLRVGRIVMEATGGLERPLAAFLWQQGLTVAVVNPRAAREFARSMGPLAKTDAIDAVALAHLAQTLAAKADQAGVAFRPPPAEIEQLPVMMTRRAQLIGMRTAEKNRLVSAGRVLHRSLTTVLQTLDKELARLERDIDAHVQRHFKEQAARFRAVKGLGPMTGAVMLAFMPELGTVRSARAAKRAGLAPLNRDSGKQRGKRHIWGGRSVVRSALYMATLSATRFNPVLKTFYDRLIAAGKPRKVALTACSHKMLRILNAMARTGQPWNESLHAIAP

SEQ ID NO: 351201 - protein, 351 aa, unidentified
MSDKLNSAIAVIGIDIGKNSFHVVGHDKRGTIMLRQKWSRGQVETRLANLAPCLIGMEACVGAHHLSRKLRTLGHDARLMPAKYVRPYSKGQKNDFRDAEAIAEAVQRPTMKFVATKTAEQLDLQALHRVRERLVSQRTGTINQIRAFLLERGVAVRQGLRFLRTELPRILAAPCDALSPRMLRVIEELACDWRRLDERIEGLSSEIEALARQDKGCERLMTVPGIGPIISSAMVAAIGTGDAFSKGRDFGAWLGLVPKQISTGDRTILGSISKRGNRYLRALFVQAAWVVLVKVGPKHWERYGLKSWIEAAKKRLHHNVLAVALANKLARIAWSVLAHGRTFEASKIQPA

SEQ ID NO: 351202 - protein, 448 aa, unidentified
MSKPQVIDDQEHERAYQKVAAVDVAKKEGVVCVRGPHRSRPGARCSTVWTVPATMSAVRQLGAQLAADGIEKVTLESTSDYWRIWYYLLEAAGLDVQLVTATQARQLSGRPKTDRLDAQWLARLTENGMLRPSFVPPAEIRALRHYARARTHLTQDRTRCWQRLEKLLEDALIKVSAVASKLTTASARDMIGALIAGERDPQVLAGLARTRMKAKHAALAEALEGMFASHHAELAQILLDQIAFLDARISQLTGSIENLIDAIPAAWGADGDGVTGTGAGTGPGAAALPAVMRLEEIPGVSAELACSIIAETGLDMSRFPTPGHLVAWAGLCPRTLQSGLRTRQAKGHGNTYLRGYLGQAAIGAARTATFLGERHARIARRRGAAKAQVAVARSIAVITWHLLADRGTRFRDLGPSHYQHHIDKNRSTRNHIRQLQALGYQVTLTPAA

SEQ ID NO: 351203 - protein, 353 aa, unidentified
MVILSQLWRRATDMTSVAQFQAFVGIDYHDSVVQVCVLDAAGEILGNEGLPNEVAAILEYVGRVAEGRIVAAAAIEACCGAANLAQRLREEGWEIDLAHAGICARMKQNPDKTDYSDAHLLADLVRIGYLPRVWLPPEAIRDLRRLVRYRQQLVDRRRNIKLRIRAMLREERIVAPQEAGNVWTKAWKAWLKTRLALGPHSRWIMYEHLADLEHVAAKIREVESRMEEATQDDRVVAKLREERGVGLVTAVVMRAEIGSFGRFRNGKQLARYCAVTPKNASSGKRQADGGLIKAGNLYLRGMLIEAAHRLARYVPKWRSLKEQLKSRGKPAAVAAAAVANRWIRQLYWQMIAV

SEQ ID NO: 351204 - protein, 392 aa, unidentified
MKSLIYIGMDVHSKTFSLCAYNPKTRIYSNRIEIENNMKLVKKYAYNLLSEAEDLDTELIFGYEAGCLGFTLADDIKKMGFECRVMAPSTIRIASTDRIRKTDRRDAKSLAEALANDAYSQVHIPDQEDREVQAYIRMREDVQDMVKQTKQRINAFLLKQGKQYDQGKSKWTICHRKWLKEVELTPLYREVLDEYLITLEELEIKVDRYDTRIVEISNQERYQEFVDKLSCFKGFTRPIAMRIVSEIGDFSRFQTAGQFASYLGLTPSEHSSSESENKGTITKMGNSHVRKTLIEAAQSMVRGIPGRKSKILKKRQEGNSSKVIHYADKGNMRIQSKFKRMMNSGKNRNTAITACAREMACFIWGMATGHIEERVDTPIPVINPETGEILVG

SEQ ID NO: 351205 - protein, 353 aa, unidentified
MFHQPGEATEMKSTTIGIDLAKNVFQVHGVDERGKTVLKKQFKRDQVMVFFANLPPCLIGMEACASAHHWARKLEKLGHTVKLMAPQFVKPYVKTNKNDVADAEAICEAVSRPTMRFVPIKNAEQQAVLALHRARQGFVKARTAQANQIRGLLAEYGIIIPQGIGHIAKRLPEILEDGENELPGVFRQLLQRLGDHLKELDRQVGELEVQIQIWHREHEASQKLAQIPGIGPITASALVASIGDAKSFENGRQFAAWLGLVPRQHSSGGKQVLLGISKRGDTYLRTLLIHGARAVIRVAERKAGYADSWLARLMGRRNKNVAAVALANKNARTVWALLAHGRAYEADYEPAAA

SEQ ID NO: 351206 - protein, 388 aa, unidentified
MTQAPGALPTSTVLDYERTLILAIELSNTSWVLAAQIPGLPGVKAKRSIEPTPEALMAAIEDYRTRAVKAGQNVERVVAIYEAGWSGFWLARWLAQYGIETHVIQPSSVPVDRRARRAKSDGIDAELLLRTLLAWLRGEPRVCSMVPIPAEADEDARHRVRERAELVAERVGLVNRIGAVLATLGVGEYNPLRRDRRQRLDELRTALGGSLPTHARAKIVRMLDRLELLLIQITELEKSRDAVLEDENPDKAASMIQQLAKLRGVGVQSATVLVREGFVREFANGKALGSYAGLTSTPYSSGGTEREQGIGKAGNVRLRTLMVELAWLWQRYQPDSAQVSWFRERVSGTGRRMRKVMVVALARKLLIALWRFATQGVVPEGAVMKPAT

SEQ ID NO: 351207 - protein, 398 aa, unidentified
MQTPNDLSQSRIVLKQDSTLIAVIEMSLSSWLVAGIVPGVERQPLKKLAVDESALLKLLNRWREEAEKAGRKIERIAVAFEAGRDGFWLARWLRARGIEAHVIHASSVAVSREHRRAKTDRLDTELLKRAFLGWLRGEREHCKMVAIPTIEDEDAKRPNRERESLAGERTRIVNRMKAALTRLGIRGFNPKLKKAAGRLEDLRTPEGEPIPPNTLAELRRDMERRQLIRDQIRQIEDARLERIERAPSDRPHAMVRLLARVIGIGIETADMLVQEVLSRTMRDRRAVARYAGLTGAPDESGTKRREKGLARSGNDRVRRGIDPIGVAISHVPEGQRLGAVVSSPHRERPWHSQDHDRGPGAQVADCPVAPGDHWRGPGWRRNAGSMIRRTRTRQALGA

SEQ ID NO: 351208 - protein, 374 aa, unidentified
MRDYSEAFVAFDTSKLRNAVAIADAGRGGEVRFLGEIENSGPATEKLVRKLAARYERLTFCYEAGPTGYGLYRQIEGLDHACIVVAPSLIPKKPGDRVKTNRRDAVNLVKLLRAGELTAVWVPDPRHEAMRDLTRARGAAVEDLRGKRQQVSSFLLRQGRHYPGQKTWTKTHLSWLASQKLEYPEQRIAFEEMLLAVRQAQERIERLEEAIRTAVPDWSLAELVTALMAMRGIDLISATAFLAEIGDLSRFQTPRELMAYLGLVPSEESTGDTIKRGPITKAGNRRARRILVECSWSYQHPPRVGKKKQEKVAAAPRAVREIAWKAQSRLCARYRALTRRGKPKTIAVTAVARELSAFIWAINREIVTARAAAM

SEQ ID NO: 351209 - protein, 350 aa, unidentified
MKTIIKQVVGIDVAHKELVVSLGKMHDDWSPEVYANKKFANTQKGFMTLVAWVRKLSYPGCPVRFVMEATGVYHESLAYFLDEKGYELTIVLPNKISNYFRTLEVKTITDKTSADAIAMFGLEKKLESWKRPKKIYRDLRQLTRERDQIVQERTMVKNQLHAEQAEANPNPSSIQRISKRIAFLNNQEKEIRQEIAALAKTDQQVSSAVEITSSLPGVGCLTAVIVLAETNGFELIRNKRQLSSYAGYDIREKQSGTSVKGKPRISKRGNKYLRKAMHLPALAAIRHDERFKAIFVRLVSSHGIKMKAAVAVQRKLLELMYIVYKTNVPYDKNYLENQQPAGPQCKAKKN

SEQ ID NO: 351210 - protein, 391 aa, unidentified
MYYCGIDVAKRKHAVAVLDEHGHPQVAVFATENTQAGMNVLLEQLKPLGTEVSIGLEATGHYWLSLYDVLTRHGYPVSVINPMQVAAYRKSGIRKVKNDRTDAVWIADFLRISNLPATKQDIPTLMQLRELTRFRFWLSDQIGDCKRKLLTILDRVFPEYEKLFSDVFVSSSRALLREAVSAQEFSDFDLQELTDLLSKTSRKRFGAEKAKQIQEQAQKSIGVGFLADAVHVEMRCLLAQIDLLEEQREEVEKSLEELMALLPQHITSIPGVGLASGAAILAEIGDIQRFESPEKLVAYAGIDATVHQSGQFQAQQMHMSKRGSAYLRLALWQAASMSLLHNEELKSYYDKKRKEGKAHRVALGAVCRKLLIRVYVILKENRPYVPHYSLS

SEQ ID NO: 351211 - protein, 476 aa, unidentified
MKPKKTASRPTRINWQQMNRKQRREMTRTLQSGDLSLEVVHPDAAGIDIGNESHYVAVPPTRDSQPIRRFGCTTAELKQMANWLKQCAIRTIAMQSTGVYWIAVYDILEEAGFEVYLVNARETKNLPGRKSDVQESQWLMKLHTYGLLRNSFRPSQEIRTLRTYWRQRNDLVRAAARHIQRMQKAMTQMNIQLANVLSDVSGVTGQAIIKAILAGERDPQKLARFRDWRVKASQEEIARSLEGNWQEDLLFVLKQEQDNYDFCQKQMAECDQQLQQYLQQRQDRSVGINLREEKRKARLKKQRGNAPQFDLRAELFRMTGTDLTQIDGIDIMTAMTILSEAGSDMSKWKTEHHFVSWLRLCPDNKISADKVIGKGRLPTKNRVTSALRMAASTLRLSNTYLGAQFRRLRTRLGPPIATKAMAAKLARLVYRMLRYGMQFVDKGTEFYEAQHRKQQVNYLKWKAANLGLQIIEVPAA

SEQ ID NO: 351212 - protein, 394 aa, unidentified
MKLIGIDIGKNKHFFCVMDQQTGEIISQPVSFSNDKEGFDFLVQKIKSYPKDSILIGMEDTGHYHFALLKYLLDLQYTVALINPKTTDFNRKMQGGITKNDKLDTINICDVLDTPERKKQYRITKVNSFDLYEQKQLTRHHHNLKEEENVYKNRLQKCIDIVFPEFNKLFNSKYGIVYMNILKMFGSAENIANTDIRTIRKCFEIEGRGNRISLTPERLKECARSSIGISSSAEVIQIKHLTAQIELIEEQLTEIDKKIEEFSIQNNSPILSIPGISHFSGTSILAELGDISNYSKPFQIIKFAGVAPLHYESSQFNAQHTSITKKGSKYLRKTLYQIILPVIKHNPVFYKYYQLKIFQGKGHRCAQGHCVRKLLRIIYHLLKTNQQFDPQLLR

SEQ ID NO: 351213 - protein, 334 aa, unidentified
MQNITLIGIDLGKHSFHIHCQDKSGKALLRKKFTRTKLMQFLATCPPSVVVMEACAGAHFMARCISDFGHETKLISPQFVRPFVKSNKNDFVDAEAICEAASRPSMRFVQPRTETQQAMRALHRVRESLIRDKVKTTNQIHGFLLEFGISLPIGDAVIKRLSLVLAEHEIPEYLSRLLVRLHTHYFYLVEQIAELESELSQSINADDTAQRIMTIPGVGPITASLLSSQLGDGKQFSCSRDFTASTGLVPRQYSTGGKSTLLGISKRGDKNLRRLLVQCARSFIMRLERKHGKLAEWVREQLNKKHSNVVTCALANKLARIAWAITTQKKEYQA

SEQ ID NO: 351214 - protein, 420 aa, unidentified
MSKRRYGSVEFKRVDWSGLAEGFGGGRAVLAVDVAKEDFVAAVLGPDAGVRVTFKWRHPGQTLEVLECLEGLAGAVALEVVLEPSGTYGDALVGQLRRRGVAVYRVSPKRVHDAAEVYDGVPSLHDAKACELIGRLHLQGVSRVWEALGQERRELNAWLRRLEVSKGRLHAGLNRLEAHLSRHWPEVLGLLELSSVTLSELVAAYGGPAAVAADPVGAEALMRRVGRAGLSEEAIAAVLASAHENLGLPCVVAESDLLQWLAADNNATRRELHAIEQEIQRRVAASAVPARLGNVVGKVSAAVLVAAVGDPQDYPDAASYTKAIGLNLKERSSGKHKGQLKITKRGPAVARFYLYFAALRLIARDPEVRRWYDRQNARPGALKGKTIVTLMRKLAQALWHVGRGATFAVPRLFAPEPRPA

SEQ ID NO: 351215 - protein, 416 aa, unidentified
MNAVGIDVSSRKSTVAVLRPLGEVVCLPFDVTHDIAGLASLVEKLKALDGETRVVMEHTGRYYEAVEKALHEAGLFVCAVNPLLIKEYGANSLRRVKTDKADAVKIARYALDNWADLRDFTPMDAIRYDLKTLNRQFQLASKQRTASANNLIALLEQSFPGIRKCFDSPVRSDGTQKWVDFAHSFWHVDCVRKQPFAAFCERYRKWCKRHAYFFKLSNAEEVYALAKSAVVLTPKSKVVKVLVQEAANQLISISRSVEVYRAEMDRLAAMLPEYPVVMAMYGVGKSYGPQLMAEIGDVRRFERKQALVAFAGIDPMPNQSGDKNVRSNKSSKRGSPYLRKTLFNVIRTYLQCAPQDEPVFQFLNRKRAEGKPFYVYMLAAANKFLRRYYAKLRDYFASLDTLQPVAPIPTILKATL

SEQ ID NO: 351216 - protein, 307 aa, unidentified
MFAGIDVSKDDLEAQLDSKDAGINCPNTANGFPLLIDWLKSHQVRCVLLEATGGYERQVMKALQTDGFEVIRVNPSRARSFAKAMGQQAKTDPIDARLLAQFAAAIKPPKTQPTSPDQDDLRALVHQRENFVQQRSDDERRLKTAGSDAVKPLLKGHIDYLNKVIVLLDAQIRQSAESLDRKRVLRLCSVKGIGLITAASLMAYLPELGKVGRHEIAALAGLAPYNNDSGKQKGKRYISGGRFSVRRSLYMACWSVIRFQPEFNARYKALLDKGKCAKVALIACMRVLLIRLNAMIRDDSEWRDRVA

SEQ ID NO: 351217 - protein, 339 aa, unidentified
MEIKRIAVDTSKHFFTIVGVDDRGQVVMRRELKRHQVEPFFQKQPPVEVVLEACGGSHHWGRTFLALGHRVQLLPPQYVKPFVKRGKNDRHDAMAIAEASARPGIHPVPVKSAQQQAEAMLLSVRELLVKQRTQLANAMRGHASEFGVIVGKGLSNADALVERAGNDPSVPEPAKAMMALLAAQFNALLLQIADLDRKLLAEHKANPVSRRLAEVPGVGPLGALTLALTIDPKQFHSGRHFAAWIGLTPKEASTGGKPRLGGISRQGNERLRQLLVLGATAVIRTAAKPGSRLASPWLVQLLARKPRKLAAVALANKMARTVWAMMRSGEAYRHRPVVG

SEQ ID NO: 351218 - protein, 370 aa, unidentified
MRFYTQQHRFYCGIDLHARTMHLCILDHAGQVVFDRNLACRPETLLRAIEPFRDGLVIGAECMFAWYWVADLCVAQDIPFVLGHALYMKAIHGGKAKNDRIDAGKIARLLRGGNFPLAYAYPKGMRETRDLLRRRTYLVRKRAELLTHLQILNAQYNLAPFPKKLSFAANRTEMNVAERFTDPSVQKSAAVNLALIDRLDELIGDLELYLVRTAKVDDLQTFYRLRSIPGVGKVLALILLYEMHDAQRFETAGQFLSYARLVRCAHDSAGKKLGTGGKKIGNAHLRWAFAEAACLLLRSSARAKKWKQKQAAQRGEGKALAILAARLGRAVYHMVRKGEAFDEERFWGGAGRAGTGSSSLSRKEACHAGD

SEQ ID NO: 351219 - protein, 354 aa, unidentified
MRILGKEEKGSVAGKRVYVGIDVHKENWQVTVRTEGEEIFSGRIPGQYPSLKKLLERYEGSLMKVAYEAGPFGFWLSDKLSEDNVEVMVVSPSLIPVESGNRVKTDIRDSRKLAKLLESNMLKQVYVLTPEEREHRDLLRTRRQIVDHRKDVARQIKSKLLFYGIVSPFPATHYWSLGYIEWLKALRFDTDCLKESFDLLIDLYEYLTRQIARINKKVALLCHDKKYHDRIKLLCTAPGIGRLTAIEILVELQDISRFKNAEELSSYIGLTPSEYSTGEKTRQGRITRCGNKRVRTYLVESTWMLITKDPAIRLKYLKLKAARGGKRATIAIARKFLVMIRRILLDNVPYRMAA

SEQ ID NO: 351220 - protein, 430 aa, unidentified
MKSNTQNAKIEAITEKTLVLGIDVGSEMHYARAFDYRVIEYSKKPFKFSNTEAGFATFKEWVLDLKERHEKDKVVPGMEPTGHYWFNLGKFLQDNEMKPVLVNPHHVKKSKELDDNNPTKNDRKDPKVIAGLVREGRYMIPYLPEGVYADLRTASNIRFQLQAELTRIQNRISRWFNIYFPEYKTVYGKPDAKSGMLILKAAPLPEDILTLGIDGVNQIWRDAKLRAVGKARAKTLIEAAEHSVGSKEGAVSARMEIRMLLEDYESRNIRLQEVMTLIEGLVKQIPMAEKLLEIKGVGIRTVSGFLAEVGDISRFNNPKELQKLAGLALVENSSGKHKGETTISRRGRKRLRYLLFEVAMSLVAKNPEFRELHNYYTTRRLNPLKKMQSLMAIAAKLIRVFYAMLTKGVDYDPKKMVSDIKRPAVYLQAA

SEQ ID NO: 351221 - protein, 455 aa, unidentified
MQVTYTHCAGLDVHKKTVVACASVPGPGDQPHPVIRTFGTMTADLLALGDWLHSLNVKAVAMESTGEFWKPVYNLLEGQFELLVVNAQHIKNVPGRKTDVKDAEWLADLLRHGLLHSSFIPPRSQRDLRDLTRQRTNLVQDRATVVNRLQKALEWANLKLSAVVSDVTGVSARAMLAAIVAGETAPAELAELARGRLRAKRDLLEQALTGRVREHHRFIIAEHLIQFDNLDEQIGRFDAQISAYLDQLSAPPPASGGASDAAPASSPPAADPASPAPAAEPPSPAPAALTWNAALVFADAVPGIGLRLAQDILAETGIDMRRFPSAGHFASWTKICPGHNESAGKRFSGATGHGNRWLRTKLVQAAWAAVKVRDSYFAACFHRLAGRRGVKRAIIAVAHRILIALYHVLAKQEAFRDLGATYYDARSQAQLIKRTERRFAQLGLKVTVEPWPPAA

SEQ ID NO: 351222 - protein, 381 aa, unidentified
MKRNKKLTPTSHQQTEATAEVIKLGIDIHKSKYVAIRQIDNQPPQSPQSFTPDEFLVWVQRQRLLAKRVVSCYEAGCFGFVLHRKLEEVGVENFVVRPRNWDEYGSSVKTDARDARELCGHLDRYLAGNDRALCVVRVPSLEQEQERSLSRQRETLAKERKRLQNVGTSSGLYHGVDVPSNWWKPKVFAKLCAEIPDFLKRILEPFQQILEVIDKQLRETTAREERKANRKIPVGLGALTASILDQEFVDYTRFNNRGQVSSFTGLCPRESSSGNKRQQGSINKHGNPRIRHMLLEAVWRMIQFQPDYKPIIHWKDRMANESFGAAKKKKMAVAIARQFSVDWWRIQTGRIQPEDVGLRIEYPSAYSTRALREGRISKVYA

SEQ ID NO: 351223 - protein, 421 aa, unidentified
MAEEQFELFVGIDWASESHEICVLDAERRVIDRKTIEHSGAGMTQLCELLLKLSSHQPSRVAVAIETPRGAVVETLVERQFKVFAINPKQMDRFRDRHTVAGAKDDRKDAFVLADSLRTDLHLFHPIQLDEARVIRIRELSRTEEDIVQEQTRAGNQLRELLRRYYPQMLQLCPGMDEGWFLELIELAPTPEAAQKLTRSKVEQLLKEHRIRRLSAEEILTELKAPPLQLAPGAVEAASEHVLLQLPRIRLLQQQRSDVAGRIQSILDEMSQPGQNGEHRDVAIILSLPGVGRVVAATMLAEASQALAQRDYHALRSYAGAAPITRQSGKKKIVLMRQSCNLRMRNALYHWSRVSVQRDDQSREHYTQLRKVGHKHGRALRGVVDRLLPVLMAMLKSGTLYDPQRRANRRTPTIGSPTAQS

SEQ ID NO: 351224 - protein, 411 aa, unidentified
MEVVYACCAGLDVHKATVVACGRVPGPRPGERRGETKTFATTTGGLAELGDWLRGHGVTEVAMESTGVYWRPVYAGLETRVRVMLVNARHVKMIPGRKTDVRDCEWLAQLLECGLLRASFVPPRAVRDLRDLTRLRKALIRERGHHVNRIEKTLELAQIKLGCVVTDLMGKTGRAILPALSTGIDDPDQLADYAQGLLRKKRAALREALAGRLTPHYAFLLQQHLALIDTLDAHIATLDARIDEAMRPFADAAALVQTMPGVAIRAAQAILAETGMDMVAFPTSAHFASWARLCPGNHESAGKRQPVSTGQGATWLRATRQESAWAAIRTKKSYYRALYHRLKGRGGAKKAVVAVQHAMLIALWHMLKHRVPHADLGADYFDRRNTERARRHHVRRLERLGYNVVLVESVA

SEQ ID NO: 351225 - protein, 294 aa, unidentified
MRNRSMFVGLDVHKETIDVSVADGERQGEVRHYGVIVSDLEPLDKVVRALRAPNRTLHFVYEAGPCGFGIYRHLTGRGEDCVVVSPSMIPKRSGDHVKTDRRDSQMLARLHRAGELRAIYVPDDTDEAMRDLVRAREDAVVVGTQAKYRLKAFLLRQGRRYAGRDGWTLPYRRWLSDLSFPNAAQHIALQEYRDAIAETEQRIVRLTEQLRQLAPTWRWAPVVAALQALRGVSFITAVALVAELGDLTRFRHPRELMAYLGLVPSEYSSGPQVRRGAITKAGNPHVRRLLAESA

SEQ ID NO: 351226 - protein, 455 aa, unidentified
MPKTTTDNRPELKLVNFGAAAIDIGSKMHTAAVNPASADIPVRMFGTFTSDLHDLADWFKACGVTSVAMESTGVYWIPVYEILEQRGFNVILVNARYAKNVPGRKTDVSDAAWLRQLHSYGLLRGSFRPDAEIATLRAYLRQRERLVEYAAAHIQHMQKALMEMNLQLHHVVSDITGATGMRIIRAIIGGERNPDVLATYRDVRCHSSTETIRAALVGNDREEHVFALTQSLELYDTYQAKMLDCDRKLEVLVTALSRKVEKPVGKLSRARIKTKQVNSPTFDVRTALYGVLGVDLTEIHGLGPSLALKLIGECGTDLKAWPSAKHFTSWLCLAPGNKISGGKVLSSRTRRSSSRAAALLRLAATTVGRSDTALGAFYRRLSSRAGKAKAVTATARKIAVLFYNTLRHGMSYKDPGADHYEQQYRSRVLANLQRRAKSLGFVLQAIPGDAHPAVS

SEQ ID NO: 351227 - protein, 365 aa, unidentified
MTTRQRSIPSSTDPPVRSEVVLGVDTHGEVHVAAVISTLGKMLGTETFPATAAGYRRLLVRARRRGTVRRAGVEGTGTFGAALSRYLLAQLVEVYEVNRPDRSARRLLGKSDPLDAQAAARAVLSGRVRARAKSGDGPVHSARILKLAKDSAVKARTQAVNQLKAVLVIADPALRERLSRLGNRELFRTCRRLGPDDGEDGESAVAQATHMTLSMLAERIEQLTGQIDELNQRLTQLVEHHSPQLLVPVGIGPDSAVTLLITMGDNPERLNTEASFAALCGVSPIEYSSGRWSTRRLNNGGDRQANAALHRIVSTRLRHDPRTQAYYERRTQEGKTRRENIRCLRRYAAREVFNLVRTVPAVPPL

SEQ ID NO: 351228 - protein, 326 aa, unidentified
MQTMQTPSVVLNVGADVAKDAIVVACSEGSFPVRKIANQRTALLAFLKGLPAGSRIGVESTGSYHELFAEAAYQLGFLVFVLNPKDTRHYAKAVGLRGKTDRVDAELIARMIAHEHAKLHAWIPPTPQQRELDRLIKRRATLISLREAVAMSLHDLGGFTDELKALRTRFNQLIARIDLRVKALVEASPERKQNFTRLCTISGVGPVVGSALVNTLERVPLKSADAFVAFTGLDPRPDDSGQHRGKRRLSKRGPAELRRLLYLGAMSARKTKTWRPLYEHYRAKGLSSTATLVILARRIARTAWSMYAHKTTFDVERLTKQSSPAR

SEQ ID NO: 351229 - protein, 343 aa, unidentified
MSEVTTIGLNIAKNVFHAHGADAGGRALFSRKISRTRVLEFFAKQPLCLVALEACGGAHHWARELTLLGHEVKLIPPAYVKPFVKRHKNDAIDAEAICEAVQRPNMRFVAIKSEEQQASALVFRTRDLLVRQRTQLINAIRGHLTEYGWVAPKGPSHVAMLSDLLDAEMGSSLPEAARPMFRTMLDLLDVLNSKISELDKEIARRAREDVIARRLMTIPGVGPITATAIAALAPPPETFTKGRDFAAWLGLAPRQLSTGGKQKLGSITKMGERTLRRLIIIGCSAVVLQASKRGAPVGSWLEQMMARKPRMLVTVALANKTARIIWALLMKQEEYKAPVAAAA

SEQ ID NO: 351230 - protein, 400 aa, unidentified
MISVGIDVSKGKSTVCILKPYGEIVSKPFNITHTQKDLSELSSMLFRLNDEVKIVMEATGIYHLPVLTYLQEKGFFVSVINPYLMKSYRNESLRKAKTDKIDSRIIANYGIDHWFKMKEFQTSGEIYEELKLLGQQYRHYMKLHLLSLAELTHLLDLTMPGIKNLLASWNETNRKDKRSDFVERFWHYDVITSMSEQEFTEEYILWAKEKKYVPSQEKAKVIYALAQESIPTLPSETSSIKMLVTEAVRVLKEVDATLGLILSRMQEIAKTLPEYSVVREMGGVGNTLAPKLIAEIGDVRRFRNGKALVAFAGIDPPPYESGQFVGCNRKISKRGSASLRKVGYETMRSLKMRSRPEDPVYRYVVKKESEGKSKKSAKIAGLNKFLRIYYARVTELYKNI

SEQ ID NO: 351231 - protein, 429 aa, unidentified
MNYNTQNAKIASITEKTLIVGIDVGSETHYARAFNWRNYEYSKKPFAFSNDEAGFASFKAWMNDMAEKHGMETIIPGMEPTGHYWLNLGAYLQEQGMKPVHVNPHHVKKSKELDDNNPSKNDRKDPKTIAGLVNEGRFSYPYIPTGIYAEIRNLSNLRIQTQEEITRIKNRIARWFSIYFPEIKDVYRNPDAVSGLMVIKQAPLPCDIKGLGVDGVNKIWRDARLKGAGIKRAKTLVTAAEHSIGNTEAPRSARKEIRNLLNDYEIYKSRMDELMEEIEELLSEIPYIDKLMGICGIGIKTVSCFIAEVGDIERFDNPKQVQKLAGYAIVADSSGKHNGESRISHRGRKRLRYALYEAAISVIGKNKEFKEIHHYYRTREKNPLKKMQSVIAVSCKLIRIFYTILTKGIDYDGQKMLRDIVRPGMQSAA

SEQ ID NO: 351232 - protein, 423 aa, unidentified
MDKNDDSRLEEFRQLKREIRGSTQHLVVGIDVAKERHYAFFGTPAGKTLLRRLVFDNSKEGFEKLCFQAEILKTQHGLTKVVFGVEPTADYHKPLGEYLIRQGHPVVLVSGNAVKNNRELLDSRWDKNDMKDAANLADLITQGKCLFYEYASPPLRELRSLLSLQRRLKKQEQGYRVRTRNHLIAQYFPELDPYFGYCEGPAIVKWCLDPKELVSLPFEEFVRMVSSRTGGQKQRRRLEEIRKKAASSIGCEVHPSAAFEGRMLVEEVRHLQDLLRETHANIRAVCLHFPEYFFLLTIPGFGPDISAKVLGAIGNPHRFENHRQVLKLAGLDLSADRSGKKQDVAPVISKKGKADLRYGLYQAAFIASTRNKQFMTYFTNKLKGREREKGIGTIMRVKLAAKMLVIAWTLMKKQEKFDPGCIA

SEQ ID NO: 351233 - protein, 357 aa, unidentified
MRIIGCDLHTRQETMAMLDTETGEVVEKTLQHEGEKVREFYSALPRPVQVGIEATGSMLWFLNLMEELGIDSQVGHPAKIRAAEPRKQKHDRRDADLLLKLLMENRFPSIWMPSKELRDLRALLCHRHQWVRTRTRVQNALQAMALTNGLRRGKSLWSQEGQHAIASLPLGPHAAHRRTALQALYKQLDADIKALDKRVLEQALERPEARRLMTHPGVGPVTALATDVFLGDPVRFEDAKALASYVGMIPSEYSSAGRQRLGGLSKQGNPLLRFLWCEAAVHAVRRDPLLQRFYRRKLVQKGMGKARVAVARKLGIRLYIMLRDQIDYEEFCRRGQMRQKNGAARAGIPEVGYGPSL

SEQ ID NO: 351234 - protein, 409 aa, unidentified
MDVIHPRCAGLDVHKDSVVACARAVAGGKVQQEVRTFSTTTQGLLELADWLRERECTHAAMESTGVYWKPVWHVLEDSVELVLANAMHIKNVPGRKTDVNDATWIADLLAHGLIRGSFVPPQPVQEMRDLTRTRKQLVREAAQHSQRLQKTLEDANIKVASYVTDILGKSGRAILDALAKGETDPEKLADLTGGRLKASRKELVEALRGRLRPHHRFLLKLHLQQIDTLDKAVREVEARLGEALQPFRDLEGLLTTIPGVSATTAQVILSEIGTDMSRFPTAAHLISWAGLCPGNDESAGKRRSTRLRKGGQWLKATLVQSAWPAAKKKGSYLKALFHRIKSRRGPKKAAIAVAASMLTAAYHMLKNGVEYEDLTESYFDRRDSTKLAKRLIKRLEGLGLAVTTSPLAA

SEQ ID NO: 351235 - protein, 379 aa, unidentified
MQKEEHYMESILYVGMDVHNSNYTLCTYSIETDKEFGLVKFGPDYLNIVRYVRRLKEHHGQDIRIVCGYEAGGLGYSLYRSLTANNIECVIMAPSTMPKAPNERKTDYRDAAKIARCLAYNSYRSVYIPDTEDEAVKEYIRMRDNTKDHIKQLKQRILALCTRWRKEYTETKKFWTVAHMKWLQHLEFENLIAQEAFDEYVIQLNEANARLKRYDERIEKWAQLPRYTEKVSKLTCFCGIKTHVALATIAEVSDFNRFPNANRFASYLGLVPGEYSSGNNVNRLGITKQGNSHIRKLLTEAAQCYSRALPGKPSAGLLKRQQGNDPKVIAYANKGNERLKKKYRSLALRKPRPLAVTATARELACFIWGMMTDHLEQVY

SEQ ID NO: 351236 - protein, 331 aa, unidentified
MDVHNRYCQVAILDDDSTDPEECRIKAERDELEEFAREHQGAQAAIEATRNYWFVYDCLEPNLDVSVANPHETSLIGDQKVKSDRLDAKRLAVLIRVDALSASYIPPDEFREARKLVRRRKALVDDRTSAKNRVRAALADRGITYDGDLFGEEGREFLADEELPLSSADRHIIEADLEVIQSLDEQIDRLQQEMDEIAATWSETQLLMTVPGIGPCLAVTIAAEIGEIERFDNKKQVVSYAGLDPRVRQSGEKETTDAITKEGPPVLRWALGQAALNVVKYDSHLGNYYSRMKDRKHNQKALVATARKLLVWIYAMLTKEEEYDPPKVTHG

SEQ ID NO: 351237 - protein, 343 aa, unidentified
MDHFAGLDVSIKETSICIVDDTGRIVREVKVASEPEPLLQVLTNPAYHFKRIGLEAGPLSQWLFSVLAEAGLPVICVETRHMRAVLKAQINKTDRNDARGIAQMMRAGLYRPVHVKTLRSQKVRILLTHRKLLQSKAIAIENDLRATLRNFGLKVGMVGTVKFEARIKELVENLPDLAMLVEPLLIVRRVLREQIGILHRRLLAIVRDDDVCRRLMTVPGVGPVVALTYRVTVDVPARFRTSKAVGAVFGLTPSKHQSGESNRTGGISRCGDEMMRMMLYEAAQSMLVRSAKWSWLKACPMKIARHRGLKKAIVALARRLAVIMHRIWVDGTEFWWTREVAAA

SEQ ID NO: 351238 - protein, 318 aa, unidentified
MAETTNSTNIGIDVSKEWLDIVVIPSGETWRTQNTEEKISVLVQKLETLKPERIVIEATGGYERLVTTKIYLAGLPVCRVNPKRVRYFARSIGQLAKTDKLDAKILARFGELVKPDLTELPSEQEQHLSALLARREQLLAILVAEKSRMDTAPVKIRSSLNEHITWLKNQIKELDTEIDEFINSTPDLKEKDELLQEVEGIGKKTSAKLIADVPELGSCDRKQIAALIGIAPYNHDSGNKKGQRSISGGRPDVRSVLYMATLAATRFNPVIKVFYQRLLSQGKKKKVAIIACMRKLLTILNAIIRDNKHWNSSLNAVS

SEQ ID NO: 351239 - protein, 335 aa, unidentified
MKFYVGIDAGAKSFTACVVTPEEVIRSAQSFENNAEGIASLHEWMEQTRLSKGETLVAVENTGVFTEALCYELDRRGYQLVLLDPHKVWKAFAEGAKTDPLDSRKIAEYAYRYLDRLVLWGPREAIVEQVKVLLRTREQFVEQKTAAQNSLTTLRRKYIQTPAANAALERTLLHLKAEIRDIEAEIHRLIRSNPTAAQMIALLMTAPGVGHLLASHLFVLTGGFAETPSYRSLAQYLGIAPNAQQSGSWTGPSRSRGYGPSTMRKLLYLAACSLRTHNDRYRQYYLRKVAEGKPKRLVLNNVANRLLRVLCAMITSRQPYIENHLSVQPMLLTKS

SEQ ID NO: 351240 - protein, 358 aa, unidentified
MEQKRFVGIDLGKRTFEIKFITSNGSVTGTNGKTCPSGRKELYKKLLPTDRIAIEVCSLGMVMAKEIIQQVGAEVVLLNPSQIALIYRSVKKNDKEDALKLARLVQKFTNEELPKVELPTEHEENLRQILTELRQLKNDRTKEINRVHAIFVECGITEIKKSNLATHKNRSECIRILKGIFLSQAERSLKKLELIEDQILEVEELLDKEIDGDKNIDTLITVPGVGKQLAASFVAFLGDGSRYPNVSSIGAATGLVPRLDMSSTSLRLGHITKKGNSNLRSLLILAAWSHVRAKNGGALKEKYLYMTIAQSKSKKVAIVAIARKIAELMYSLLKNNTQYEKRAPVSIKKLATEALCSS

SEQ ID NO: 351241 - protein, 322 aa, unidentified
MNTAAMPLGIDVSKAKLDGALWLGSKYRSKAFADTPEGFARLSEWLHHHGADQVHVCMEATGTYWEAAALYLADAGQRVSVINPALAKAHGQSLGLRSKTDALDAKLLADFCREKQPPMWTPPSEAERRLRALVLRHQSLVEMQTQEKNRCESLREDVRTSVETHLAWLASELARIEQAIARLLDDDDHLRGQRALLDSIPGLGERTIAVLLAYGLSSERFQSARQFVAFAGLSPRLHQSGSSVRGKPRLSKIGHAFLRRALYMPAMVTLYKTAWGKRFQQRLAAHGKPPKLIIGAMMRKLAQVAFGVIKSGKPFNPALHGA

SEQ ID NO: 351242 - protein, 326 aa, unidentified
MTEWVDTETGEIARSRVAPAYRMSVRQFLGRFRGRRLEAALEATTGWRFVVEELERIGATAYPAEPAETSALRGNKKRPKTDRADAKHLRELLLAGRLPLCWIPPDHLLDLRARVRLRHTLVVDRGEWQQRIRAVLYHHGVAHRAELNLMRAAGREWLGRLRLPVTAREQIAVYLEVIDALDAQVPPVDRELRAYARRQTGCQALQAHYGIGPLTAVALVAELGDCRRFSSSRHAVRYSGFDVTVHQSDQRRAPGHLSRQGPAILRWALYEAAQTACRATSPDHAYYKQTAERLGHKRACLAIARKLLKRAYHTLKDLGDQALQPA

SEQ ID NO: 351243 - protein, 374 aa, unidentified
MNRLLLQPTLRQGKPARSAPSQPPAAGTAVTIAVDLARSKWVYACRWDGAERRRLSTPAGLCHLQALVGEYLPQSGTVTVVYEACGFGHQIAWWVAAQPGATVLVVAPSTVEQAPGTRVKTDGHDAGALAFKAERGLLRSVYIPPPALHQDRQLARTYAQVCGDRRRAQVRLRLTFQEQGALDAPARTAGWTALERWIALQQATLPPPVRACVAELLHQRAAAAASAQRLRTQLLALGRTAPYRAVVDALSAQPGVGRFTAGRVVLELGDITRFPTAPSLAHYLGLTPAEASSGATIRRGHTRKCGPGAVRGWLLQCAWVAIRPGGDAALRAGFERLAPRLGRKRAIVAVARRLALRLRARWRAVLAAPPAAAP

SEQ ID NO: 351244 - protein, 346 aa, unidentified
MNYCGIDLGGVSSYVYVTTDRGRKLWSGPVETSKEALKARLRRFRREGLSVAIEAGNQTAWVYEVLVAMGAKVTVVNPNKVKLIAASRRKTDKVDARILCELLRIDALPHPVHMPGRQTRALRGLLVARRQLVAARTKLSNVVRGMLRQEGIRLSAGALSSLAGWERVFVNSFSCEHVMTVVRAYYQSFKALRQSIHVLERKLAERERTSPEAKRLQTMPRVGRIASLTFLAAVDDVNRFPSSRKLVGYSGLAPIVRQSSERTQYGPISREGRRELRAVWVQIAHLVAIDRHRETQPLRSWFNRVAKRRGKKTAVVALARRLLVIAYHLLREESDFDAARLKRRAA

SEQ ID NO: 351245 - protein, 461 aa, unidentified
MAKKAKKVKTAKGAELRIVNPDAAGIDIADGIMQVCVPADRSKDNNRAFGAYTSDLHAISAWLRECGIKTVAMESTGVYWIPLFCRLQEDGLDVVLTNARDVKNITERKTDESDAEWLMLLHQYGLLKASFQPHNDAKRMRTLTRHRDTLSREASSIVLRMQKAMQQMNIKLTLVLSDITGKSGIRIIEAILAGERDPKRLADLADIQCKTPKEEIAKALEGNWEEDLMFVLRQNYDTFKHYCTQLGECDAELEKLMENYRAEVAKVEDTSYCPAKKRRDYKKTRHTVGFDVERKAYEMWGVNVFEIPGISHLTALELMSELGHDFTRKFPSSKQFCCWCNISPNTKISGGKRISSHVPHRRNNVGLIFRSIASSLANAKNQLGNFYRRIRSRAGGKAAVIATAHKVAEIFFAMVANQTTYNPERVGIDEKVLLEKRITRYKRELERITGTHIEIGNACVP

SEQ ID NO: 351246 - protein, 426 aa, unidentified
MPFAALDLHKKIVEAVLLDEHGAPAWRGRFPATRTALENFARAHLTPQHHLALEATTNTWAVVAILEPFVAEVVVSNPLRTRAIASAKIKTDRVDALVLAQLLRSDFLPRVWQPDADTRHRRSVSTERANLVADQTRLKNRVHAVLHQRLIEPPAGDLFQPASRRWLERLELDALGRQTLDRHLRQLARLQEELSALTDELAIEAHADPRVRLLMTLPGVDFPVAQTLLAALGEVDRFCDGNRAAAYLGLVPSTHQSAEHCYHGRITKQGNSHARWMMVQAAQSLARHPGPLGVFFRRIQKKKNRNVAVVATARKLVTIAWRMLHANEPYRYAQPATLEAKFSRLRIRATGQRKRTAPAKGTPRAAAYGTGKPTRAVPSLDQVCAAAELPALPAAAPGELRMLDESGTAPFAEQIRKPKRVARRSA

SEQ ID NO: 351247 - protein, 412 aa, unidentified
MQIIHECCSGLDVHAKTVVACLIRRGKKQTRTFSTMTDDLLRLSDWLVEEGCTHVAIESTGVYWKAVFNILEGVLEVILVNAQHVKAVPGRKTDVKDSEWLADLLRHGLLRASFIPPLEIRELRELTRYRQSLIREQTALSNRVQKLAESGNIKLSQVASDALGVSGKLMLRAVASGETDAEKMAELARRRMRSKIPELRRALEGRMTKAQRWVLGELLTRYEEIERAVERVERQIDEEVSQGPDPFVEEAVTLLQTIPGIGESVAETIVSEIGVDMGRFATDGHLASWAGMCPGNNESAGKRKSGKTTKGNTYLRAALTQAAWAASHTKGTYLQAQYQRLAKRMGKKKALVAVGHSILVIVYHVLANRASYKELGGDYFDRQNVVQQRTRLIRKLEKLGLKVTVEELPVAA

SEQ ID NO: 351248 - protein, 428 aa, unidentified
MDGVDTTRVERFRQLRKEIRGSNEHLIVGIDVAKDKHYAFLGTATGRTLLKRLIFPNNLQGYEKLYTYVEAAKVKNNLNKVVFGLEPTANYHKPLGEHLIESGFDVVLVAGTAVKRNRELLDGRWDKHDTKDAANVADLVSQGKCLFYEYPIMPLRELRNLLSFKRRLKKQEHGTKVRIRNHLLAQFFPELDPHFSRMSSCSLSVVKWCLEPSVIAGLEYDEFLKLVAPGKRTINQQEHVKLIWKKAFESIGCNAGETVQFEAKMMVEELQHVRESISGVEEKIEEICLNFPEYKYLLSIPGFGKDISSKVLGAIGNPFRFDNAKQVIKLSGWDLNANRSGKSSGNATAVISKKGKADLRYALYQAALVASSRNQHFVAYFTEKLRQRSREKGIKTKMRVKLAAKLLVVAWTLMKKQEPFNPEYLKVT

SEQ ID NO: 351249 - protein, 407 aa, unidentified
MEVIYPRCAGLDVHKQTVVACVRIAGNGSALQEVRTFATSTSGLLALADWLDSFAVEYVGMEATGVYWKPVWHVLEGHFELVLANAAHVKNVPGRKTDVNDAMWLADLLAHGLIRASFVPPVTVQELRTLTRTRKQFVRERTAHVQRIEKVLEDANLKLSVVLTDILGKSGRAVLQAIVDGHTDPEHLASCITTRVKASRAERLEALRGHISAHHRFMLKLHLGHIDALDKAITDIEKEVGLGLQPFRQAAKLLSSMPGLSEVSAHVIVAEVGIDMSRFATPGHLLSWACLCPRNDESAGKRRSTRLRPGGKWLKTTLVQAAWAAVRVKGGYLQAQFHRLRARRGAKKAIIGVAASMLTAAWHMLRNGMEWHDLGATHFDRTDTHKTATRLVRRLQQIGYVVQLTPV

SEQ ID NO: 351250 - protein, 475 aa, unidentified
MNIKGTKKKNQVVTVNIFEQQELLKKAEVIRENLTASTWRELETNGKFGKNEKLSFVSDDMLILGCDVGSDTHYVRAIDTRGRELSKSAFPFSNTLEGFQSLMDWATKIAASNDKKQIILGLEPTGHYWFCLATWLIGNGISVVQVNPYAVKQTKEVEDNSQLKDDRKDPKLIANLVKDGNFGMPYLPEKLYADIRRLSMLRDQINEDRIRDLNRLHREMKIYFPEYKDAFGKIDGTFCLEVLKVAPFPEELVTLGVEGIRQIWHEAKLRGRGYVNATSIFENAKKSIGIQDGAESGKLAVKWFVHRMMESNEQLAEIESRLHQMCMEIPYAENILAISGIGENTLSGILAEMGDISRFDDVKEIQKLSGLGLVACSSGKHKGETKISHRGRKRLRYWLFQAAKSAVAHANEFKELHAYYTTRKDNPLKKKQSLVVIACKILRVIFAILTKGTPYDPKKMLGDIVRPNEQSVQVA

SEQ ID NO: 351251 - protein, 318 aa, unidentified
MNMKTNQSINVGVDTGKYQLDIYIRPLDIYFTVENNEKGIKEAVKIIKKHKPERIVIEATGRLEMPFILACANANLPFTIANPIHVKRFAGALGQRAKTDKLDAQLIAHYSEAIKPPLSKLKPDTMQAMSDLVTRRNQLLNLQTMEKNRLQIMPKELAMTIKPVLTLFKNQIIKIEDKIVKLIESCPEYQTKNMILQSMTGIGKIAAASLISNLPELGYINSKQASALIGVAPMNRESGRFKGHRKIQGGRPQVRTVLYMAMMSAMQSNPVFKETYQRLLAAGKPKKVAIIACIRKMIVILNSMLRDGTMWEAPKVNN

SEQ ID NO: 351252 - protein, 372 aa, unidentified
MNQNILYVGLDVDDTQYHGSAFNKSTGEVIDFKCRPTLKGLLTQLDRLQRQFRRCSIQLCYEASYVGYCLQRDLRSHGVHCDVVAPSSIPSPRGKAIKTDRIDAGYLAQFYANELLTIVQPPEVQQEQDRDLLRSRQKVLLQRTQLRKHVHAVLRRHGLHYKAQTGYKSHWTKHHYAWLRRTIEESSGSLRVNLALLLRQISGLDQILAEYGQQIEKLANTPHYRKAVQSLTCYKGIKHVFALTMITEIGDIKRFGHPRQLMSWIGMDVREYSSGGKHNRMGITKQGNRYLRTAFVEANQRGYRSTCVSKDLKSRRKDTPPELIQIADRCLRRLYKKGTHLLFAGKHPNKVKVACAREMVGFVWESLNAVAT

SEQ ID NO: 351253 - protein, 446 aa, unidentified
MICAAVERCAGIDVGKKWLSVCVMIGPLEGEPRVARRRFDTTVAELEQLRDWLQKEAVSHVVMESTGSYWKPVFNVLEDTVKVYLANAQEVKARKGHKTDDKDGWWLAHLLRHAMIHPSFIPPRSVRELRDLTRRRERLNGDGTSEKNRVQKILEDANVKLGNVLSDVFGVSGQLMLEALLKGEAQPVEIARFAQGRAKKKIPEITAALEGHQMSEHHRKMIRYSLDHMRFLEEQLEELDQDIAEKIRAAGLDREWRLLQTVPGIQERSAAKILAETGPDMAQFPSERQISSWAGVCPGNNRSAGKNRSSRTTGGNPWLRGALTECAWAAAAKKDSFLKEKFWRMVTKSGGKKPPALVAVAHTLLILIYEVLRSGEPYRERQRAPLPDTQTERLIRHHVRRLGKLGVRVYSDRPAPAPAKGRSQGQGTPAQTKRTQQTAKNKGPHI

SEQ ID NO: 351254 - protein, 385 aa, unidentified
MTVRTVSRAATHGETVRCLFAIELSKQSWVIGFITPLSSRISRRILSGGDWKGLLELIEEVRARVSREMGRTVEVMSCYEAGYDGFWLHRQLEAHGVRNYVIDPASLQVDRRVRRVKTDRIDTERLLRSLMAYLRGEPKVWSVVRVPSVAEEDARRLHRERDRLICERVQHVNRIKGLCALQGIYDYHPLRPQAVARLEQLRTAQGGALPPRLKSEIKRELHRLEVVVEMITTLEAERDAIVEDEASTHVNAEKIQALHKLKAIGPEFATVLVGEIFHRDFNNRRQLASYVGYAPSPFQSGNVAHDQGISKAGNRKGRTTGIELAWLWLRYQPDSDLSVWFRARVGTVKGRIRRIAIVALARKLLVALWRYLETGLVPRGAVLKG

SEQ ID NO: 351255 - protein, 348 aa, unidentified
MTHFVGLDVSVKETSVCVVDAAGTVILEQKVTTEPADIITLLTSLGVSFCRIGIEAGPLSQWLVNALTAADLPVICVETRHMKALLTAQQINKTDRNDARGIAQMMRVGLFKPVHVKTLVAQEQRMLLTSRKLLQRKLLDLESDLRGTLRNFGLKIGAVSGSRYEARVRELVAGFPRLAAIAEPLLNVRRVMRQQFAVLHKMLLDTVRGDPVCRRLMTAPGVGAVVALTYRATVDQPQRFAHSRAVGAHVGLTPKRYQSGETDYDGGVSKCGDALLRTMLYEAAQVLLTHGSKWSWLKAWGLRVAQRRGMRRAIVAVARRLAVVLHRMWVDGSEFRWSKDSAAVPAVA

SEQ ID NO: 351256 - protein, 340 aa, unidentified
MEAEKWIGIDIHKKQITVCIIIQNGKKSIKQYERNEKELAEFEKEIDRETVIGIESTNWTWDLIKRLKEKAKDTVIFNTIDLKKLMDRFKKTDKEDAERMAIILQRFEKDELSTCQIRSDEEAEIRGLLSIREEMVSNKKSYKTKIIAMLEYWGIKTSDRMFNDLEKNTKWVDEQKIPESIKKGVIQMYVMLENLKESIRVLDKDIELLSSERPGYNEIKEIIGIGNTTGAYIITKVGNIDRFKASKKFVSYMGLAPRVSESDGKGTNGKITRKVDGAFLRVIVQAAWIRIRYDKDMKAFYENVRIRRGKQKAIIAVARKMVVEVYYKLLNLKNDLKNEA

SEQ ID NO: 351257 - protein, 288 aa, unidentified
MTSEVFVGIDVSKRWLEVRGHGEAESRKIGNDPDGFTTLIEQMKAVGSALIVFEATGGYESRAVKALSEAGFAVAVVNPTRVRRFAEALGILAKTDKIDAQVIAHFASVVQPAANGRQTALEEQLAACVERRRQLLVELVAEKNRLSTCPACVRKGIEEHIAWLEDHIESLEAEIQTYILQKPEWQERAEIIDSVPGVGLVTATTMVAELPELGQLNRQKIAALVGVAPFNRDSGPKQRKRRIFGGRSGVRRTLYMAALSASKHNPVIRAFYESLLRRGKEKKVALTA

SEQ ID NO: 351258 - protein, 349 aa, unidentified
MTIVEDRPVITGGVDTHADLHVAAALDPLGGLLGVQEFPATATGYAQLLGWLGGFGGIALVGVEGTGSYGAGLARHLAAAGVRVVEVDRADRQDRHRQGKSDPLDAVSAARAAQSGRASGAPKGRDGAVEAIRALMVAKRSARAGRTQAINQARALIVTGPDELRARFAGHRPAQLVEAIAALRPRPGDVPGYATRVALRELGRRAQFLDAQLDRLDEVIGPLVTGRAPGLLRLHGVGPDTAALLLIAAGDHPERLRSESSWAHLCGVAPIPASSGKVSRNRLNRGGDRQANHALWRIVITRLGSRPGHPATRAYVTRRTKEGLSKKEIIRCLKRYVAREVYHQLRAGA

SEQ ID NO: 351259 - protein, 411 aa, unidentified
MHNRQNYLYVGVDLHKEHHTAVIINCWQEKLGEIQFENKPSAFSKFLLEVETYVCDGITVVFGLEDVGGYGRALAKYLVDHEQVVKEVNPALSFLERKSEVMIKKNDSWDAECVARILVNKFNQLPDAKPNDLFWSIQQLVSRRNALVKAQSALKNQLHIQLNHHYPSYKKFFSELDGKTALAFWQQYPSPSCLEGANIKQLTAFLLDVSNNTCSVKKASDILKLVKEDGHTMKEYQETRDFLVRSIVRDIEFKKTEMKYIERELKQLVKLLDYQLDTMPGIELVTASALITEIGDVRRFLNANKLARFAGIAPVYFGSGGKGKVHKSKQGNRALHALFYNLAVQQVQVAKGSKTPRNPVFHAYYQKKLKEGKTKGQALVCIMRRLVNIVYAMMKYKTAYELPVVEEKEVV

SEQ ID NO: 351260 - protein, 390 aa, unidentified
MRAGASLAQHRGLPSRALFGSAYMCEEAPVFTERTSVGLDVHARSVVAAAIDGDTGEVFRKRLTSVSDDVIGWVRSLPGPVAVAYEAGPTGFGLSRAFTTAGIRCEVAAPSKLQRPAGDRVKTDARDAMHLAKLLRLDEIVSVTVPSVQREAARDLVRAREDVRGDLMRSRHRVSKLLLRQGIVYYGGQAWTGTHLRWLRQQHFDAPGLQLAFDAEHEAVLAAEARRDRLDAAIEAMAADSEYTPVVHRLGCLRGIATLTAFGLAVEVGDWDRLTGSSIGAYLGLVPTESSSGQSRSQGSITKTGNTHARRLLVEAGWQHLKPYRTPGATMRARWELAPAAARARGHAGNQRLHQRWLHFNDRRKAPVIANVAIARELAGWCWSLAVMDD

SEQ ID NO: 351261 - protein, 346 aa, unidentified
MEHFVGLDVSLKLTAICVVDGTGKIVREGAVASNPEAIAAFVKSHAPHVARIGLESGATSTWLWTELNKMRLPVICIDARHAKAALKMQINKSDRNDAVGIARIMQCGWYKEVRVKDLDSHAIKALLVSRALLVKIKRDLENQIRGLLKNLGLVIGRAKMNVFAVRAAELIDDRPELGAAVKPLLKAREAIEQQIADFDRKVMRLARDDAQVRRFMTTPGVGAITALCFLATIDDPARFERSRSVGAYVGLTTRRYASGEIDWTGRISKCGDAMLRSYLYEAANVLLTRVARWSALKAWGVRLAKRSGLRKAKVAVARKLAVILHRMWVDGTEFNWSSKEVAVQSA

SEQ ID NO: 351262 - protein, 254 aa, unidentified
MNYIGVDVDSQYLVCKACFGEEHQLIRQFDNNPVGYRQFIKWARYRGADARVCMEATGVYSLPFALALNIADGIEVSVVNPKAIKRFADASMQRGKTDALDAERILEFLRRMEFRPWQPPSEEVLELQHITRRIVQLKKELTRENNRHLAAKRLGLMGRVVTNDTAVNMRHLERRIAVMQTEAEGLAMATPLLKDQLDLLHTVTGIADKTGVRILAELAALPADMTGPQWVAHSGLDPRPHESGSSTHKPRRIT

SEQ ID NO: 351263 - protein, 337 aa, unidentified
MIVIGVDVHKRSLTAVAVDEVGRPLAEQTAVDGAGLLEWADSLPAERLWALEDCRQLTRGIERTLLSVGERLVRVPPKLMAPQRRAGRERGKSDPIDALAVARAALREPRLDHPRPGEERLRELKLLVDHRDDLVDERRRAQQRLRWHLHDLDPELAVPLGALDRRVWLDRLARRLARGKQSVQVRIARELLGRCRSLTRTILALDRELEQQVHATAPGLLELPGCGAVSAAKLLGEIGPIERFDRDAQLARHAGVAPLEASSGKHRRHRLDRGGNRQLNCALHRIAITQARAHPPARAYLARKQAEGKSRREAVRCLKRQLARTVYTTLKNEPLLT

SEQ ID NO: 351264 - protein, 344 aa, unidentified
MTKTPIAVLGIDLGKNSCSLAGLDATGAVVLRRRMTREGVLAFAAALPTCIIAMEACCGAHFLGRTLAGQGHEIRLMSPEYVQPYVKAQKTDDRDAEAIAEAATRPTMRFVTLKSEAQLDLQVLHRARERLVQDRTALINQLRAVVLERGVILPKGRSALMRRLDELMADGLAFSARADRLLEELREEWAGIDQRIKAYDDEFASMTREDAQARRLATIPGIGAINATALLAAVGDGSAFAKGRDLAAWLGLTPRQHSTGGKTKMLGISKRGNRYLRKQLIHGARAALPHLAAKPNALGAWLQHLLARAHPNVVVVALAAKLARIAWAVLRNEKDFDQQALVAA

SEQ ID NO: 351265 - protein, 398 aa, unidentified
MTKKNTLKSLPTDTEFRVVGLDLVKSDVSVAAIPVDDNTPSLVDRITYADLLDWAGKISPTLFAMEPCNGYSLLCLQLENLGHEIKVISGWTVSMWINPHLSGQKTDLNDAIALARLAVSDAELTPIRHKSITEIRIQTVQAVRQQLMSQRSKSIVSFKALAQQWGIPCAAGHRNLKKLRESIEAKVDLITRPVANAMLFLLDAVKSLDRQIGQLNQTLQELVMSDERGRLLQSVLGVGTQISARVITVVGNVERFNSPRSLVAYVGVAPRNFITGHKNLTKKKHGNCPDLSHKGQGKISRRGDKLLRSLFIQGAACLYMQFCKDQLPECQLKRWILKQLASQKPYGKLIVSLAAKLIRIVWAVLTYGEKFNIQKAGMTRSMWSEMALETPLNKEVPA

SEQ ID NO: 351266 - protein, 499 aa, unidentified
MPSRRKGKNTMTTAGKQPSKKEGFDPQRSALKRKARGSCCFEGKGKRRKSKLSVINPDAAGVDVGAQAHYVAVPEDRAAVSVRSFGTCTAQLDEIVQWLKDCGIKTVAMESTGVYWIPLFQKLEEAGFEVLLVDARQAKHVPGRKSDVQDCRWLQQLHSYGLLRAAFRPEDGICRLRTFQRHRKNLVECAGMWIQRMEKALNEMNLQLHHVLSDITGQSGLAILDAIVAGERDPSKLASLAHYRVKKSQAQIEAALRGDYRPELLFVLRQSLENYRQMQQQILQCDLSVEKQLAAMSHQSKPSEHLESKAQAEDSAHCRPGKEKPKNGLESTLAAHLKRILGVDLTTLPGLNVLASLTLLSEIGTNMTKWRNYKAFVSWLGLSPNNKISGQRVLSSRTRKVVNRAATTLRLAAMLVGKTDTALGSFYRRKRAQLGAPKAITATARKLACLIYHLIKNGQAYKEPDLRTYELKYQEQILQSLRKRAKSMGFDLVELPKAA

SEQ ID NO: 351267 - protein, 414 aa, unidentified
MGVIRWVGRAVGLDVHRDFCEVAICEDGVVRSAGRVPSTPEGIEALVESLLPSDRVALEVTGSCWEVARILEPHVNRVVVVSPDDTGITSARAKTDRLDARALARLLWRGELEAVWMPDERCRILRRRLARREQLVRSRTRVKNEIHAVLQRRLQAKPPVSDLFGVKGRRWLESLELPLEERESVDAGIRQIEFLDQEIAQVERLIAKQALSWPEIRRLMTVPGVNLVCAATFIAAIGNSSRFLSSRKLVAYLGLDPRVKQSGEAPARSGRISKRGSPAARWALVEAAWTAVLQPGPLHAFYERTKARRGHGKAIVATARKLSVLFWCILTRGEDYAHQQPSLTRKKLRRLEITAGAPKYTRRAAGIWSTNDLMRQAELELAQQAEASYKRMVKDQLAGAPARKAGASVTLERA

SEQ ID NO: 351268 - protein, 342 aa, unidentified
MDYFAGLDVSVKETSICIVDDTGKIAREVKVVSEPEALLAVLKNPAYHFKRIGLEAGPLSQWLYSAFAEAGLPVICVETRHMQAVLKAQINKTDRNDARGIAQMMRVGLYRPVHVKTLRSQKLRMLLTHRKLLQSKAIAIENDLRGTLRNFGLKVGMVGKARFEARIKELVENLPDLAILIEPLLIVRRALREQIVILHRRLLAIVRDDAVCRRLMTTPGVGPVVALTYRATVDVPARFRKSKSVGAVFGLTCSKYQSGEIDRNGRISRCGDEMMRVMLYEAAQSMLRSKKWSWLKAWAMQIARRRGMKKAIVALARRLAVIMHRIWVDGTEFRWTREAAAA

SEQ ID NO: 351269 - protein, 337 aa, unidentified
MKYSGIDLHSNNSVVVVTNENDRVIVSKRMPNQLPGIIELLRPHQDELVGVVVESTYNWYWLVDGLQEAGFVVHLANTAAMTTYEGLKHGNDESDAVNLARTLRLGILPTGHIMEKQMRAVRDLARKRMRLVQNRTRHVIAVENILARETGGHMNANAVKRLTPAAVETLPLPDDVRLAIRSDVAVINRIDEEIERIETRLQERVAARPELELLKTAPGIGRVLATTIVLEMGPVHRFAQVGNFASYCRCVDSKRLSNGKKKGEGNTKNGNKYLAWAFVEAANFALRYCPEAKRFYERKKARTNGIVAIKALAHKLARACYHMLKEGKPFDVHRCFA

SEQ ID NO: 351270 - protein, 748 aa, unidentified
MSSSRFAAVRVLRLRVKDKHAKWLCGLAREVNTVFNYCNELSVKVFERERRFLSGFDFWPFLKGVTRGDCALHLPVQAVQEIAEEYARRRRQHRKIRLAWRKSGGARRSLGWIPFKVRTIRYRGGQIYFAGRWLSLWDSYGLGNFELRAGNFSEDSRGRWYLNVCVPREQRAGDERNKPTAQSILDRSVPSLGIDLGLRTFAAFSDEALPPIEAERFYRDLEPVLARAQRARHRNRSRAIHAKIANRRKDFLHKLSTRLVKANGAIFVGNVNASALAKTRQAKSVLDAGWSAFRTMLLYKCDDAGVWFAEVDEAFSTQDCSVCNSRAGPKGRKDLGISHHGTTGSRYVAPWITLRIGCEPWRRATYEWEPAMKNVRFIGLDVHAETIAVAVAEPDGEVRSLGTIPNRSESVRRLIGKLGKPESLKVCYEAGPTGYVLYWQLAELGVTCEVVAPTLVPVKTGDRVKTDRRDAEKLARCYRSGDLTAVWVPDAAHEALRDLVRARLAAKRDQLRARNRLSKFLMRQGRRAPEGATAWTVKYMDWVKQQQFEHAAQEATLVDYLHEVEHVAERIVRLDRDIDAAVERTPETLRAVIAGLQSLRGIAKISAVTLVAELGQLSRFAHPRQLMGYSGAVSRERTSGPLVRRGSISKAGNAHLRRIVTESAWAYRHRPSIGRALAARNREQSEAVKAIAWRAQHRLHARYCALLARNKTKQKVIMAIGRELLGFIWAIGVEIERGHTAPEVKRAA

SEQ ID NO: 351271 - protein, 350 aa, unidentified
MEYIAFDAHKHYTLASVARPDGQLVREQRIVHERGALQQFLERCERGSPVAVETVGNWYWIVDEIEAAGCIPRLVHARKAKLMMGQINKTDKLDVRGLNQLQRTGTLPTVWIPPGELRDQRDLPRTRMVLVRQRTQLKNRIHATLAKYALHDLEVSDLFGARGRVLLRQRLELLPPCTAYTTQHLLEQVERLDHQLREFQQRIRALFKPTPAIQRLLTLPGVGLTLAAVIALEVGDVARFHTAEKLAAYAGTTPRVHASGGKTRFGPARPDVNRYLKWAFVEAANAICLTRGRAPRRHVSRLYERLGRRKGHAKAIGAVARHLAEATYWILSKGEGYREPKASGRFVHGG

SEQ ID NO: 351272 - protein, 369 aa, unidentified
MNECITYIGLDVHKETIAVALAEGSMRGEVREYGQISNTPAALTRLSIKLSRPGSVLRFCYEAGPCGYGIQRQLAAAGHDCVVVAPSLIPRKPGDRIKTDRRDAINLAGLHRAGALTAVWVPGPAHEAARDLVRARLAAVRSLRQARQQLSGFLLRHGRHYSRPGWTLMHRRWLAGLRFEQPAHHIVLEDCIATIEAATARRDRLTAQIEAMLADWALAPVVHALQSLRGMALVSAATVIAELGDITRFANPRQLMAYLGLVPSEHSSGGTRRQGGVTKAGNSTARRMLIEAAWSYRFPARISREQLLRQEALPKPIRDTAWKAQVRLCGRYRKLSRAGKPATTVTTAIARELAGFVWAIACQLPRPTN

SEQ ID NO: 351273 - protein, 427 aa, unidentified
MKYTQNEKILQVTEDTLIAGVDIAKESHYARAFDYRGVEYGKYLRFENNREGMTKFLNWAKDLMERHKKNKLIVGIEPTGQYWLCFAQYLKDNNIKVVLVNPFHVKMSKELDDNSPTKSDKKDPKTIAMLVKDGRYVEPIIPEGVYAELRVAMDIKERLNKQIGMTKNQITRWLDIYFPEFNTVFSDWEGKAALITLREFPTPEKIAKKSAEEIISIWKKEVQRGVGEKRAIKLIETAKESIGKKQGIKMAEYEIKTLIEQYEFLKKQIEEIEKKMEELIVEIPGVKELLEIKGIGMNTVAGFIAEVGDIEKYEHPKQIQKLGGLNLVENSSGKYKGETTISKRGRKRLRSVLFNAVMALVAKNEEFRELHKYYTTRAQNPLKKKQSLIVLCNKLIRIFYVILKKGVKYDPIKMMKDIKRPGLQEAA

SEQ ID NO: 351274 - protein, 370 aa, unidentified
MAQSTPLFVGLDVHKDSIAVAHAAGGGTAPPVYVGAIGTRQADLDRLIHRLQSKASTLVFAYEAGPCGYGLYRYLTGKGLTCQVVAPSLIPKKPGDKVKTDRRDAVELARLLRSGDLTAVYVPSVEDEAVRDLCRARDAARVTGKDAKLRLKAFLLRLGLHYVGRATWNDAHRRYLAKVVCPTPTQQIVFQESVRAVDEQVDRRQRLDAELLERAPAWRLSPVVDALQALRGVQFLVAITVVAELGDLTRFDNPRQLAAFVGLIPSEYSSGGSRRQGGITKAGNGRARRALIEAAWAYRHPAKVSLHIQQRIDQLPKALQDLGWKAQVRLCKRFRRLVARGKHPNIAVTAVARELIGFMWAIAKAVPVPA

SEQ ID NO: 351275 - protein, 401 aa, unidentified
MDAETLQVAVDVGCRRHHAAIATAQGRVLAEFDVEHTPAGFEEFFGHIEAQRHGQQPVCVAMEGYNGYARPLDQQVRARGYRLLNVNNLKLARFKELFPGPAKTDALDTHRMLELLRVQAHVPLAKRIVREVSEVPAANAKLQRLTRRRRQLIADKVRIVNRMQAELHAVCPGLLAITRSACGRWFLGLLACRDDLRQLARLRLTTLRSIRRVGVKHAAIIAAWQRTADFSEDVEWVGPMIIADARRILVLLDDIKLLEQQIAATAPASRLYQRMTSIPGFGKVSCAELAGEIGEHERFDGEASLALYLGATSLDNTSGTKQGTKPARQVNRRAKTALMNAVDHHRRHVSASRAYYEKKRAQGKTHNQAIRALARHLVRVLWSMFVHDRDYELRENPSRPT

SEQ ID NO: 351276 - protein, 339 aa, unidentified
MKLYVGIDLHSNNSVLVILDENDKVVHERRHPNELEIILEQLAPHRESIQAIAVESTFNWYWLVDGLKEAGYTVKLVNTVAVKTYDGLKYTGDEHDARHLAHLLRLGLLPTGYIYPKEERAVRDLLRKRAQLVRNRTMHILSIQNLVIRNSGKGIAAKMVRKLDTEAMGRICGGNSTLVLAIQSSLAVLRCLDEQIDTLERAVLKQAKLRPEFKKLLTINGIGPIFGMTIMYEAGTMERFEKVGQFASYARCVASSRWSNGKKKGEGNRKNGNKYLAWAFIEAANHVVRYNERISRFYQRKKAKTNGIIARKAVAHKLARACYHMVKDQAPFDEERAFA

SEQ ID NO: 351277 - protein, 481 aa, unidentified
MSQQEKRSKPLGEEKTRAGKGKRGRKRKGMCLEDRPILEVNAAGIDIGAREIFVAVPPDRDEHPVRVFSTFTEDLEKMAQWLASCGITTVAMESTGVYWIPLYDVVEKHGVKACLVDARGMKNVPGRRTDWHECQWLQFLHSVGLLRAAFRPEGDVCAVRSMMRHRTELVEMTNQHIQHMHKALTQMNVQIQHVISDLTGLTGLAIVDAIIAGQRDPAALAKLRDPHIKASEETIRKSLVGNWRAEHLFTLQQSRESYQHYQEQISECDEAIEKMLMAFAPRVDPAARPLPPDRKRKQRGRKKKNVNPKTGFDLRTESYKLFGVDLTQIPGLMAMVLMLFSEVGRDMSRWPTAAQFVSWLALCPDNDISGGRVLWRGMRRVHNRAGDLFRMAAYSLHHDQTPLGDYLRRMKSKLGPAGATTATAHKIAIIFYTMVNKQIEYDATLWAQRDAQREKRFEAKLKRQAQQLGYKLVPIEEKPAA

SEQ ID NO: 351278 - protein, 322 aa, unidentified
MNEYKETFGVDISKDVFDVHGSTTGHHQYKNDEPGFKKFLKRLPDDCLVAMEATGYYHYRLAQFLYKNEVVVSVINPLIIKRFIQMKLAKIKTDKSDAKMICEFALINEIPLYTALTDVQSECLQLFRVLDNFIKHRTATKNKMHGEEVLGIPSKFTYRSLRRNKKHYDSEIKAIEEKILSLVKEDQQQQLTLLISVPGIGQKTALFLIIVTDGFSKFETASQLCSYVGITPTTRESGSSVRGRPRISKVGNKKLRNLLFLCSFNACKHNKACRELYERIVNKGKSNKITLIAVANKHLKQCFAITKSGRPYDESYVLVLPK

SEQ ID NO: 351279 - protein, 411 aa, unidentified
MEDTFVEVGCGLDVHQGSIMACLLSGPPSTTRRKEIRRFGTMPADLVTLREWLRAAGCTAVAMESTGVYWIPVYAALEGHFELKVANPQRIKQIPGRKTDVKDCDWMAGLLREGRMPKSFVPPKPIRQLRELVRFRRRLVETVAGVRNRAIKELELAGIKLASILSDVFGASGRAMLKALAKGKASPVEMAALAKGALRRRVPELEQALSVQLEEHQRLMVDSALALLEFGEAEVTRIDRKIDQHLRPYQAQMELLMRIPGVDRLIAASLIAELGVDMNAFEDVIHLSSWAGICPGNNQSAGKRFSSHIGHGNPYLKTALVQAAVCAARKRGSYLKDKFFRLKARRGYRRAAVAMAHKILVIAYHMLKFGRPYQDLGEAYLDRLSHSRTKRNLVQRLERLGYKVTLHAIAA

SEQ ID NO: 351280 - protein, 391 aa, unidentified
MSMYFIGIDISKYKHDCCIISAADQKVVSKVTIKNNKAGFNELLTIIHSLANPADIRIGFESTAHYALNLELFLENSLLTFMEVNPVLISEYKKSKTLRRTKNDSVDCESIARWLMTVEYNPHSKGFYHAYSLKSLTRLRDKLIRQRSFYLVKITNVLDHTFPEFKPFFNERLSKTALYLLENYGSAEKMARMNSASYEKLRSVSRGKFSPQQFLRLKELAANTVGVNNSIFDVELNSLLSLYKSLVKEIDTIEKEINKLIEEVHPHYMSVPGIGPLSAAVIYSEYGDISNFTNPGQMLAFAGIEPGINESGTESHGGKMVKRGSSQLRYTLINCCLPLIRFDMTFATYYAKKRGEGKPHRVAITHVAKKLIRVIYALESQDIDFNAQKLR

SEQ ID NO: 351281 - protein, 425 aa, unidentified
METVAELEPIAYVGVDWASEEHAVCVLKLDGRMASSFPVKHSRQGMEGLVKKLAALGPVGRVPVAIERPDGRLVDALLEAGHPVVPVSGKAIKAWRESEVVSGAKDDPGDAEVIAEYLRLRSHKLTVLAPFSDKTRALRALVRARDDLVDQRVAAHNQLEACLDAFWPGAKAVFADVTSEIALTFLERYPTPASARTLGEKRMAAFLAKHGYSGRRPAGELLKRLREAPEGIADGPEADARRDAVLGYVRVIRALNISIKNLDRSVAAHLGEHPDGEIFASLPRSGRINAAQMLAEWGDCRQAYDSPEAVAALAGQSPVTKKSGKYESIEFRWACNKRFRKAIGTFADNSRHASPWAANIYRRAIARGCDHPHAVRVLARAWIRVIWRCWQDGIAYDPCRHGAAARLAALTAPGSGNTNVDQEAA

SEQ ID NO: 351282 - protein, 359 aa, unidentified
MIVIGIDPHMKSHTAVAVDAASGRTLAETTVGADAQGHEQLLLWARSLGPERCFALEDCRHLTGRLERHLLPRGGRLVRVPPKLMAAARSSARSYGKSDPIDAAAVARAALREPDLPVAVLVGPEQEVRLLADHRDDLVGERGHIQKRLRWHLHDLECGLELPPRVLDRYVWLERVEAALHGLPPSTRRRIALEQVQRCRELTAEVRALEREIRSLMGALAPELLALPGCSALLAAQLVGQVAGAARFSSEAAFAMHSGTAPLPVCSGNSTRHRLNRCGNRRLNAAIHMIAITQARMHPPAIAFMERKQSAGMSSRDARRCLKRYIARTVFRTLLRSEQARAGEVVQAEFAAKELAVAV

SEQ ID NO: 351283 - protein, 351 aa, unidentified
MRSQAYFVGIDLHKELIQVCVLDAQGQVIHEQRFEGKTLEQGLAVVKFLGQWKRSGRYAVEAVGMNRWLVNAMRERGMEVVVVDAVKLNLRMSGKKTDRRDAYEIARRLRLGDIDSNAKTYYPSEEEYGCRKLLRTRHKLVGIRQQLVNQVRGLLNAYRMAAPKGELASSKNLEQLSRIELSSMNMTACLRSLVQALREVQGSIGTLTCRIEEEASKEEVVGLQDNLESVGPQTALSLVRELGDVRRFTSTRAVASYAGLAPRVANSADKAHHGHITKRGNSELRWILSEWAVRLLAKNPLVQRWANPLLRRMHKNKVRIALARRLLIGVYFMLRRGEPFSLERCLATKAA

SEQ ID NO: 351284 - protein, 396 aa, unidentified
MRNDVTIYVGIDFSKEKFNACLLMEQGVMGESEFPNTKTGYLKLTKWVKNTSELGRSFDSSLVLFCGEHTGTCSIGLCEYLYTKGMKIWLESALKIKYGSGLKRIKDDKADAEMIAYYAKRFYEPGSCALFEPDSADLKTLRTLYQFRNRVVCDRVAIGNRISSGAFDCSTLVRNRMVKHHKEAQKDEKDIEKEMVKLMETSEELASNYQILISFKGIGPITAAALIIYTSNFKKFDNPRKFACYCGIAPFGKQSGTSINTKPHVSRFAHIGIKAAIVQACKSAMQHNAVIKAYAQRLYAKGKHEGIVMNNVKNKVMHIIFKMIQTQTLWEQEYQQKHTKECKPIPGKNGIGATEAAPIINATLKTSSSVVECTFLEKHSFQKNSKKTSSFSCVET

SEQ ID NO: 351285 - protein, 435 aa, unidentified
MERIRTNVGGIDIGAKKVFTSIEGHPVVSHFTFTEDFLRLRDFLLENHVDSVAMEATGVYWVILYEILEEAGIDVWLVDGRQTKQVPGRKTDVKDCQWIQELHSYGLLNRCLVVDADIKELRSYLRLREDHIESSSRHINQMQKALTLMNIRLKEVLSQIHGASGMAIIEAILNGERDKQVLVGLCHKSVLKNKKELVFKALEGRYTEAGLFALKQAYDGYMFYLQQISECDQKISVVINRIGRFGDGQQLKTKRKAIRHHRPVVENLGPNLLNIFDSKDATLIAGITDYTWMQLLAETGPDLTRWQSEKHFTSWLALSPGQHNSGKMRRNARRKGKPKAGQIFRLIAQGLINSKDVAIGSFGRRLRGRKGPRVAIKAMARKVAVLYWRVMVKGLDYAEKGIKNYEEQLILNKMKSFTRLAKELNINTLELQHVT

SEQ ID NO: 351286 - protein, 355 aa, unidentified
MSQEKYIGMDVHQATISVAVMDAGGKLIMECLLETKAGTIVEFLRGLHGTLWLTFEEGTSAAWLHDLLKPHVNRLVVCDPRKNALLKDGNKSDRVDARKLAELLRGNQLHAVYHGEHGVRTLKELGRSYLTITQDVTRVMNRIKALYRSWAIPCAGTTVYAARHRAEWLAKIAEPGVRVRAQRLYQQLDLLQPVRLEARREFLAESHKHSAVKLLRQIPSIGPIRSALLVALLQTPHRFRTKRQLWAYSGFAVETHDSGEYRSVRGKLQRNRERMTVRGLNDNHNRDLKNLFKSAAISASTRPGPLRDFYVARVEKGMRPTMARLTLARKMAAISLTIWKKGVEFDAQQLQRQTA

SEQ ID NO: 351287 - protein, 360 aa, unidentified
MTLAVVADAEVAVTLGVDTHADVHVAVALDQLGRRLGACTVATTPAGARQLLDWASQFGPVQRVGCEGTSSWGLGLARFLRGQGLAVLEVNRPSRQTRRRRGKSDSLDAEAAARAVQAGTATTVAKTADGQVEMIRALRVVRRSAVKARTQAANQLQSLLVTAPDELREQLRGLPGDRLVTAAAQLEASGQVATILAASRLALRSVAVRYQQLTAEMRALDQQLGRLVTQAAPALLALPGVGIDTAAALLITAGDNPDRLTSEAAFAHLCGVAPIPASSGKTTRHRLHRGGNRDANRALWVVAMGRLRWDARTRAYVARRTAQGRTKREIIRCLKRFIAREVYHVLVATSPAGGKDHPAG

SEQ ID NO: 351288 - protein, 341 aa, unidentified
MTVYIGVDIHARQQTVSYLDTEDGTTGLVELQHERDDVKGFYSQFQGEVVVGIEACGYTNWFEELMEQLHHKLLVGDAAEIRRLARRRQKNDRRDAALLLDLLVHNEFPALFRYSPESREVLRQLRYRHKLVKLRTMVVNTLHDLAINAGLSLRAKLLTKGGRRQLRALQLSAISQEQRDELLSLADELSRRIQTVEQWLQTQAKSDARVQRLQTHPGVGLLTSLCLVHTLGDLSRFSSTRKVAAYVGFDPMEDSSAERKAYGGISKAGSRLLRYLLVEAGQTAAKDDQHLRQFYRRLLPRRGKARAKVAVARKLLIRCFIMGRAEIDYAEFLRRGQKEAE

SEQ ID NO: 351289 - protein, 370 aa, unidentified
MKKDTLFVGLDTDKKHIDVAVAEPLPRGEVRYWGRTANMPASVDRMVKKLGHGGRELVVCYEAGPCGYGLYRQLTGKRGVRCLVVAPSMTPQRPGDRVKTNRRDALKLAKLLRAEELTEVWVPDAAHEAMRDLVRARSSVVSALTRCRQHISSFLLRQGIPYAGKPWTNKHRAWLGTLKFEHAAHRLLLAELLLALDQAQARRDRLTDHIRELVPTWSLAWLVEALQALRGYDLINAAVMVAELGDPRRFAKPRQLMGFVGLNVSEASSGETVRRGRLTKTGNKRARKALIEAAWTYSRPAATTSKPAAARLPAAVQQIADKARHRLSRRYRHLVRRGKLKQVAIAAVARESLGFIWAIAHAAAPGPAQS

SEQ ID NO: 351290 - protein, 314 aa, unidentified
MNTNTLQNINVGVDTGKTQLDIYIRPLDIYFNVTNDEKGIKQAVRTIAKYHPERIVIEATGRLEMPFILACEKANLPYVIANPLHIKKFSGALGNKAKNDRLDAALIAHYAEAIKPKLTQLKSENIRLMSDLVTRRNQLLSMQTMEKNRHQILPQSLASSIKPILTALKNQIAKVENRIEKLIETCPDYQAKNEILQSVPGIGKIAAASLISNVPELGYITNKQAASLIGVAPITRESGSFKGKRMIKGGRMQVRTVLYMAMMSAMQCNPVFKETYQRLLAAGKPKKVALIACIRKMVVILNSMLRDGCMWNGR

SEQ ID NO: 351291 - protein, 354 aa, unidentified
MNYIAMDCHISTLEFAVVNESGRITQEKRVNTGVKELIEFVKSVPKPRKIIMEEGTLASWALEMCTDFGEELIITDPKTNRWIGQSGQKNDAFDARRLGQLARGGYIKEIHHPKGNRRRFRELVLSYHDTVKSETRIKNKLKAKFRQNGISCNGETVYLDKHREEWKKKLPKDKVVHLVVEGLWSQLDKIQEVKDGILQLIRTQGRHYPEIKRFKEVPGIGPIHAATISAILETPNRFANKKKVWTYAGLGIVEKSSGGKLYSRKLTRDYNRLLKYSLKQAAESAISASDNPFRRHYLQMTLEKGIPPHRARLTVARSIVATLYGMWKSGGEYDPDIKEKIAGKKQTDSSNPSC

SEQ ID NO: 351292 - protein, 370 aa, unidentified
MKETITSFVGLDVHKESIAIAVAEAGRQAPRFIGTVIPSLRSLQSALRKINSASRTLVVYEAGPCGYGLARRLNAQGYACEVVSPAHIARSPIEQRVKTDRRDALLLARESRAGNLIAVVVPDERDEAIRDLSRTREDVLAARLRAHQQMKALLLRHGRTCPGRIAFSAAHERTLSSIRLSHPAQEIAFVEYRNAIKDAHERLERVTEALRLQSNQWRMNPLVRALMCLRGFDFIAAITFVAEIGDPRRFARPTALMAYLGLVPSEFSSGQSRHHGSITKAGNKHARRILIESAWAYCHSPRVSRDLEVRQQGQPKAVRDISWRAQLRLTKRFRHLRMARHLPQNKVCVAIARELCGFIWDIARQVNPLP

SEQ ID NO: 351293 - protein, 424 aa, unidentified
MKRTQNEKILQIKNETLVVGIDIGKETHYARAFDFRGIELSKLLRFSNTNQGYEALENWMQEIMKEKGKTEATVGFEPTGHYWFTLGDHLQRKGHRLAIVNPFHVKCTRELDDNSQTKNDKKDPKTIAMLVKDGRFREVYIPEEMYQELREAVSERERLVEQMISLSNQVIRWLDIRFPEFSGVFKRWSGLAALLTLKNFPTPAKVVETGVSGIVSTWRKGMKKPSRKKAEKLFKLASESIGRTAGSEAAEAALQNLLKQYEMVMQQIQEIEKLMQELLLKVPNASKLVDIKGIGMVTAAVIVSEIGNISRFKDPRQIQKMAGLSLRKNSSGKHKGKTTISKRGRKRLREGLFKAIITMLATNQEFRMLHKRNLSREKNPLNKMESIIALCGKLIRVIFAILTKGNDYDANRMISDMNRSMKAA

SEQ ID NO: 351294 - protein, 346 aa, unidentified
MLHVGLDLSRKQVEVCLISDHGELIDRLEAIPDRDGLHGLACRVAVYGEPVRAVVESMNGARFVHDELVAHGWEVLVADAQKVKGLAPLACKTDKIDSRVLAELSFRDLVPAIWLPTLELRREREISRWRLHLVKHRSTLKNRVHSTLITFGHQRHMSDLFGVAGRRLLTELDIPEPWRSHVDASLVLIDDLEARIAAIAKDLRRSGADHRYVPILMTAPGFGWITSYTVAGELGDISRFSTPMKLVGYTGLCPRVKQSGQMDQRGPLSKHGPKYLRWGLMEAAIAASTHPLYRERYQRTKRRLGKQRGPKVAQIDLARQLTEAIWYMLTRDQPFAPAGAIIRLAA

SEQ ID NO: 351295 - protein, 387 aa, unidentified
MYFVGIDISKFKHDCAIVDEFGDVITPSWSFQNDREGFSLLKELLDALDGEKKIGLEATGHYGQNLKLFLENNDFSFMEFNPLLINRFVHSKSLRKTKTDSIDALMIAQYLMTVEYKPYPPSFYTFEKLKSLTRFRDSLIRQRSRQLVELTNILDKVFPEFKPFFKGRFSATALYILSHYASPEKISNMNSKSYEPLRRLSRGRFSMVDFVELKTLVRNTVGSTCDYLLQEMEITIDIYNQLQSKVEEIELQIHDCVLALAPPILTIPGIGAASAAVILSEFGDLSKFNNPSKLLSFAGMEPGYFQSGTSESTGKMVKHGSSHLRYAMMNCAQTVINNEPTFAAYYAKKRAEGKEHRVALTHVAKKLLRVIYTLQTKELSYNPDLVR

SEQ ID NO: 351296 - protein, 345 aa, unidentified
MDKMAACGIEVSAQELVVALTGKKGEAVLHRFANTAVGHGQLLRVLTRGGKRVSVCLEATGMYGLDVAVLLSAQEGIEVMVANPRAVRHFAQAMMQRSKNDQLDAVVLWEFVARMPFTAWARPEKNTLALWALARRLEALTKQCTAEKNRQHAAGASQASPECVRRSIARTLRFLQREIKQLRAEALRCIAAEARLQKRYDLLRSVPGIGEVSAMHILAELLLLPGDRDVRQWVAYAGLDPREYSSGTSVRKYTRISKVGNRHLRSSLYMPALVASRREPHLRGFYQHLLARGKKKKPALTAVARKLLHAIYGMFRSGRAYDGALSYALPASARFPTVAPVQSST

SEQ ID NO: 351297 - protein, 398 aa, unidentified
MPCRKTCRLALRPPRAPPPGDRDLIRACCTRPATARSEKGDGITTIAQLQRPRVTVGVDTHLDVHVAHAKDALGRRLATVSSPTTPAGYRDLLAWARGLGEVDAWGVEGTGCYGAALARFLRDHGQVVLEVNRPDRQARRRRGKSDPVDAEAAARAVQAGEVTAVPKASSGYVEMLRSLRVARATAIKARTQTINALKALVVTAPAELREQLRGRSAAMLVREAAGLRPGPLDDPTAAAKLALRTLARRYQALNAEITTLDTELDRLVAKAAPGLVALFGVGPDSAGALLVAAGDNPDRLRSDAAFSMLCGSSPIEASSGKTIRHRLNRGGDRQANAALYRIVVVRLRWHQPTKDYLARRLTEGKSKKEIIRCLKRYVAREVFAVLNQMGQDALTPAA

SEQ ID NO: 351298 - protein, 322 aa, unidentified
MLVSVLGIDIAKQKFDVALLVDGKTKHKSCKNSVEGFETLKLWLEKQGTQKVHACLEATGNYGEDLASYLHEAGHMVSIVNPARIKGFGQSELIRTKTDKIDAALIARFCMAMNPEPWIPPAPEIRSLRALVRRVDSLIDMRSQEKNRISTAHESVIALIREHIAYLDKEIEKIRRQIADLIDQNPDLKQKKDLLDSIPGLGKATIPHLLAELNDLEKFRHVREVVAFIGLAPKETLSGSSIKGKPRLCKIGHARLRKALYMPALVSIQCNPVMIAFYNRLKDKGKNGKVIVCAIMRKLVHVIFGVLKSGKKYDPDYKPAFT

SEQ ID NO: 351299 - protein, 321 aa, unidentified
MANCAKAFQIGVDVSKHELVISVEAQAPFTLENSSKAIKAWLKSLPEHCQIAMEATNDFHMALTEQAHGLGHRVYLLNGYRLNRYREGIGGRAKTDSADALLIVRYLQREVDELRPWEPAAPGYRELQMLLHRRATVVRARTQIQQSLQGLSLLDNALKRLMKEIDKVDRQIARLIQTTLQQAQWEADWQRCQQVEGIGPITAAALTMAYKRGPFKDSDAFVAFIGMDVRVRDSGQKQGKRKLTKQGDPELRRLLFLAAMQAKRHAAWEGFYQAYIARGMAAVQALTALARKLARVVFALLRNQSDYDPQRRLQVQALMHC

SEQ ID NO: 351300 - protein, 351 aa, unidentified
MDRYIGIDAHKESCTMAVMGPTGRRLQELQLETNAKAVKAALKSVAGERHVCLEEGELSAWLYELCEPLSKRVVVTQPEKRAGAKSDSIDAWARADEMRRGELDRLVYKAPSTYRPLREAVRCYEGVIRDSVSIKNRFLAVFRTRGIPAQPAEIYSGSDRSKWLAKLPAGVRRRATLLGDELDGVAAVRAEAESWLREEAGKVSAVKLLSTAPGIGTIRAAQIVATVVSPERFRTSRQFWAYCGLGIVMRSSSDWVKDSREGWLRKEVMQTRGLNRNRNSMMKRVFKSAAMTVVQRQGDHPLARHYAELTKRTKPNLARLTIARQIAAAVLAMWKNKEAYDPTRHERPARS

SEQ ID NO: 351301 - protein, 384 aa, unidentified
MRFIGLDVHQKYAEGCEIGPNKQKRRFRIANTRESWEEFAKTLDPNTRVVMEATSNAFWIHDILSDYPGQVVVANPLKTRAIAEARVKTDALDAQILAQLLAADFIPESWVPSKEEYQLRILLNHRIRLAKIRTMLKNKIHAALIRNGIQSPWSDLFGVNGRKYLEKVSLPETEQIVVCSSLKLLDFVQQEMNSLEGDLFARARTNPNVPLLMGIPGISVLSALTILAEIGDINRFQSPKKLACYAGLVPSVHQSGKTRYTGNITKEGRTTLRWILVQCAQRAIQSKGKLRNFYLGLKEKKGHKIAIVATARKLLHIVWAVLVRQEEYRDIRKDLLERKLKKMNKQALVYDTSLYELFSTIEDLDLEESLDEHSQRWLEGISTG

SEQ ID NO: 351302 - protein, 405 aa, unidentified
MPYILALDVSMGHSYSVLYKDDTCLFEDEIEHTQRGFHALLEEIQHLPERPLIVFEATGIYSRPVEKFFQDHHFSYCLLNPLEAKKQMEESTLRSWKTDKSDAHRLAQTHLKSQRQPKEVQSNFYLEMRDLARFYQEIEKKITRLRMDLHNCLQLTFPELEQFFSNRLTPYALTLIRLFPHPDFVLASTRTKIKNKLINETRKKISANRAEQKADQIIHYAQCAYPAVEKDSIHCQKTIYYAELLQDLLEQKEALATQMIKKAEGSPCFLLYQTFPGIGALTAALLLGELGDITRFKTHKQLNAFVGIDIRRYHSGKYTGQDRINKRGNPKARKIIFFTIRNMIRQQRAAPNHIVDYYYKLKKQPIPKKEKVATVACMNKLLKCMHAMVRAHTEYDYAYAVSVDH

SEQ ID NO: 351303 - protein, 349 aa, unidentified
MNNIITIGMDLGDKFHMAVVFDSDGNELETTKVTNTKIGVSKFFKPYSSAQVAIEASTHSPWISRLLNEMGLTVYVGNPRKLRCIWDSIDKSDAKDARMLGMVCRLEPRLLHPIHHRSSQAQADLTTIKSRDMLVKSRTQLINHVRGIVKANGDRLPKCSATSFANRCCTQISKELWSALAPLFEIITQLNKQIKELEREIEQLSIKKYPETKYLRQVPGVGPITALSYVLYIEDPVRFTKSRQVGPFLGLTPRRDQSGDVDKQLSITKAGNKYLRHLLVGCAQYIMGPFAPESSLRLHGLAIAARGGKNAKKRAAVAVARKLAVVLHQLWVTGNEYEPFYNIQNKEAA

SEQ ID NO: 351304 - protein, 352 aa, unidentified
MQHFIGCDVHTRNQVVAWIDEETGEIKKRRLEHEGKEVREFYAQFPRGTVVGIEATFPAYWFERLMGELGHELWVGDAARIRASEVRYQKTDSRDAEHILDLLRTDRFPRIWVPSLGERDLRQLLVHRMKQVRARTQVKNQLHALAISQGVCRKSKLWSAQGRKELDSLALLPWAARRRKELLETLDRLDEQVRELDRAVEEAGRERAEVALLRTHPGVGMVVSLAFVLTVGPVERFRNSRKLVSYWGLNPRENSSGGRQRLGSISKQGNTMMRWLLVEAAQTAARLDPQLRRTYQRLKKQKTSGVAKVAVARRLAVRLFWMLRTRNNYAQLVHMSGSPSSAVVPPKAEPTV

SEQ ID NO: 351305 - protein, 407 aa, unidentified
MQEATQHDAVDVFVDVDVDVGVDVGKGQHHAVALDRNGKRLYNKALPNDEVKLRALIAELKTHRRLLFVVDQPSTIGALPVAVARAEGVLVAYLPGLAMRRIADLHAGEAKTDARDAAIIAEAARSMPHTLRSLRLADEQLAELTMLRGFDDDLAAQLTQTSNRIRGLLTQIHPALERVLGPRLDHPAVLDLLERYPSPSALAAANEKTLANRLTKLAPRLGKNWAAEIVQALNEQAVIVPGTQAAAIVMPRLAQQLAALRKQRDEIAAEVERLVLAHPLWPVLTSMPGVGVRTAARRLTEATQKAFATAAHLAAYAGLAPVTRRSGSSIRGEHPSRRGNKVLKRALFLSAFAALRDPVSRAYSSRKIQQGKRHNQALIALARRRCDVLFAMLRDGTIYPPKSAPDA

SEQ ID NO: 351306 - protein, 471 aa, unidentified
MLTGYLIMVSKMKNKEQSQQIKNKRISKHLEQVNLFAAGIDIGSQSHYVSVPEELAAESVREFPCFTGDLNRMADWLVEIGIQTVAMESTGIYWIPAYEILEERGLVVLLVNARHIKNVPGRKTDVLDCQWIQQLHTYGLLEGAFRPEEETVALRTYMRQRETLTQQASDQIRRMQKALRQMNLLLDNVVSDIDGVTGMKIIRAILEGEREATVLAKLRDGRCKKDEKTIASSLEGHYREEHVFSLRQSVELYDTYQAKIIDCDEAIQSQLNKMDSKGDKKDLPPSKKAKSKNTPKFDVRGELYQMTGVDLTCIDGLNESSVLKILSETGSDISAWPTEKHFSSWLGLSPGNKVTGGKSLSGKTKPSANRAAASFRLAAFGLLNSQSALGAYCRRQRTRLGAPKAITATAHKLARTFYSMLKNGTEYVDKGQDYYEKQYHDRVVINLKKRADNMGFELIAKDISMLEISKA

SEQ ID NO: 351307 - protein, 417 aa, unidentified
MAEEIEWFVGIDWASQSHQVCLIDAHGECLGERAVAHGGAGIEELCDWLIARTGATPEVIGVAIEITHGPVVEALLERGFSVYGINPKQLDRFRDRFTVAGAKDDRRDAHVLADSLRTDRHAFRRLSNDEPVIVQLREWSRMADDLQQERARLASRMREQLWRYYPQMLELADDLAADWFLDLWSHAPTPAKAVRLRETTIERFVKAHRLRRWQAPEVLRILKQKPLSVAPGVVEAASDHIRVLTVRIRLVNQQLKAAHHKLDELCAQLVPSEENEPGQQCEQRDVVILRSMPGLGRIILAVLLAEVWQPLRRRDYHALRSLSGVAPVTRRSGKTCVVVRRYACNKRLANALYHWARLATQHDELSRRRYAALRQRGHSHGRALRTVADRLLSVACTLLEQQTLFDPSYQVRDAAGA

SEQ ID NO: 351308 - protein, 444 aa, unidentified
MICAAVERCAGIDVGKTFLAVCVMIGPLNGEARIERRRFGTITSQLEALRNWLKQEEVTHVVMESTGSYWKPVFNVLESSVKVYLANPQEVKIRKGHKTDDKDGWWLAHLLRHAMIQPSFIPPKAIRELRDLTRRRKRLLGNGTSEKNRVQKILEDANVKLSNVLTDVFGVSGQLMLDALLEGTTDLAEVAQFAKGPAKKKVPEILAALEGHQMNDHHRRMIRYSLLHLKFLEEQIAELDRDIAEKIREAGLEREWELLQSVPGIQERSAASVLAETGADMQVFPSEKDLSSWAGVCPGNNRSAGKNKSSHTTGGNKWVRSALTECAWAAAATKDCFLKDKFWRIVGRNGGHKGAALIAIAHTMLVLIYHLLRTGEPYKDKQSPPLDERQKQRLIHHHFNRLGKLGIAIPRTLQIPANSGTAAPLNVARRSCAAKPGSQIIDNA

SEQ ID NO: 351309 - protein, 349 aa, unidentified
MGEVSTIGVDIAKSVFQVHGVDAEGTVVIRKRVGRARVLEFFADLPPCRVGMEACATAHQWARELKKLGHDTRLMPPTYVKAYVKRGKNDAADAAAICEAVTRPSMRFVPIKSVEQQSALMLHRTRDLLIRQRTQLINALRAHLAELGLVAAKGREGVHQLVAVVMECGDERLPSNARFACQAIVTQLHAVQIEISGLDKRITQIHRVNVDSRRLDSIPGFGVLLSTAVVATMTEPKAFKTGREFAAWIGLVPRQNSTGGKERLGSITKQGDRYLRRLLVVGATSVINSARARPYKYPWVIELLGRRPTKVVAVALANKMARIAWAVLAKGEPYRAPTRPWNAVVPGAA

SEQ ID NO: 351310 - protein, 371 aa, unidentified
MEQSSKSLYVGLDVHKDTIAVAYAAEDRGTDVVALGMIGTRQYDIDKLVRQLEAKGATLLFAYEAGPCGYWLYRYLTRRGLSCTVVAPSLIPRKPGDRVKTDRRDAVTLARLLRSGDLSSIYVPTVDDEAIRDLSRGREDAMRDLKATKYRLKAFLLRQDIRYEGRANWNAAHLRWLSEVVCPTPAQQIVFQEYVRAVTEQHARVQRLETELHEHVKTWRLYPVVEAIQALRGVELTGAVILIAELGDLTRFDTPRQLMSYLGLTPSEYSSGERRRQGGITKAGNTHARRALVEGAWAYRYPAKVSRHLQLRLEKLPAEVQAIGWKAQVRLCKRYRQLIARGKHANQVVVAIAREMAAFAWAIARTVPLAP

SEQ ID NO: 351311 - protein, 343 aa, unidentified
MQVTTIGLDIAKNVFQVHGVDAAGKTVVTRQLRRGQVIGYFAKLPLCLIGMEACATAHHWARELTKIGHTVRLMPASYVKAYVKRSKHDAADAAAVCEAVTRPSMRFVPAKTIDQQAALMLHRCRDLLIRQRTQLINALRAHLAELGMIAAKGKEGVKDLTAIITDAVKATVLPEPMRQALQALAKQLAALQQQIGELERNIQAQHRASDRSRRLETIPGIGVLGATAIAATITDPSVFKSGRECAAWIGLVPRQNSTGGKERLGGMSKQGDRYLRRLLVMGATAVIRHARTHPDKHPWVTKLLAKKPYKVVAVALANKMARIAWAILAKGEIFRAPALAATV

SEQ ID NO: 351312 - protein, 315 aa, unidentified
MAMRVSLSKPIVGVDVAKNELVIYQADNDLLKEIPNTKTSIKQWLNTLPGTVAIAIEATNIYHLDFADLAYEAGCAIYMVGGYELKHYREGVKIRAKTDALDAKLLARYLKNEAEELRPWTPPSPLYRQLLSLFRRRAALVQARVGLVQSWSNEPLLKAAFAEQVKSMQQLETLIEKTINDQLKEAGLLGQLKRCLKVEGIGFLTGARLITAFQRGDFRNADAFIAFLGMDLRVSKSGQKDGRRSLTKRGDPEARRLLHNAAMSASRTKAWKGFYEAQRARGFSTTEALVMLARKLARVAFALLKGQSEYQSKVS

SEQ ID NO: 351313 - protein, 431 aa, unidentified
MNRSVGFLSVGIDVGADFSLMAFALPSQELLGKPYKIIHSSQHSLNGAVEKIKTLSQKYQLPARVFMESTGIYHYPLYHKMKDAGFDVFVLNPLVTHAGRDLNVRNIHNDKYDSQKIALLGLRPGLKTSLIPSDQVISMKVILREYYAVKKEISMYICRLKNQLRQAFPQFLPLFSKVNGVTAMAILCEYPNPESLLNAGEHAVADFMKSVSHNGPLKVQKKAAALIQAAQDARSFGHWNHGISILIRHYIEMIRLLDIRAKTLLAQAKALLAEQDSKTLAHQTELLQTIPGIGFLSALTLICELGDFSAFKRPKQLFSYFGLDPIVRQSGNYNGINLKLSKRGSPFARRCIFVIALQSISLNIHKEPKNPVLRTFYEEKCMCKAKMTAIGAVMHKICNLIFAVLRNDAPFVLQTPEQHNAAYLSKTHSVA

SEQ ID NO: 351314 - protein, 341 aa, unidentified
MNLYQTQHPFYCGIDLHANEMYACVIDQLGKKLLHRNFKTRQSEKLFEQLEPYGSDVVVGCESTFNWYWLCDTCEERKIPFLLGHALYLKAIHGGKVKSDKIDSEKLARLLRGGNFAVSYAYPSQWLRRRGHFVSRRGETLAHLQIVNHQQNLPPFPKKLQYKSNRQGIAERFSDPAVAFSVETDVAMLDAYDQIIRDLERFLEQSAKVHDAQNFYLLKTIPGVGKIIAMTMLYEIHDIKRFPEVGDFLSYARLVRGSHTSAGKNYGSPGKKIGNRYLKWAFSEIVPLIKRESPEVKKFLERIEKKHGKARAHSTLATKLGRAIYFMLRRGETFDIAKLLR

SEQ ID NO: 351315 - protein, 327 aa, unidentified
MAQKMDVVGIDVSKATLDAYALTSQQARQFANDPAGHQGLVAWLQELGVGVAVFEASGGYERAAAQSLRRAGLVAHVVDPKRVRHYAQAAGQLAKTDRIDARMIAAFGAAFLLGKPSGVAGGDDPARQDLAELVGTRQVLVDHRTSLQQQADAVTSAIAKKLLLATLKQFDRQIETSDLQIAAAIARHEPFAALARRLDTVPGLGPVSIAALIAWLPELGQLDRRQLAALVGVAPFADDSGKRTGQRHIQGGRMKLRNVLYMATVGAATRHNPVLHARYRRLLENGKKPKVALIACLRTLLTILNAMVAHQQDWNPTKLPATEPVAA

SEQ ID NO: 351316 - protein, 339 aa, unidentified
MEYFAGLDVSMEETHVCVVDRDGKIILEARTPTAPKTIAAALAKGPSVDRVLFETGRMAPTLFHGLTALGLPVVCVESRQAYQALRSLAAHKTDRNDARGLAHLARTGFFKPVHVKSLPSHAVRALLIARKKLVGQRVTLENQIRGLAVAFGVRLPRGLSSGFAEKAMAAGHGIAGLDGAMRGLLAARDAILKAVVAINADMKRLERSSAACRCLMTIPGVGRLTALAFVAAIDDPDRFRRSRDVGAYLGLVPRRYQSGEIDYTGGISKCGDGRLRTLLYEAANVMLTRYRGSLALKNWALDIARRSTMRKARVALARRLAVIMFAMLKHSSRCSPNAA

SEQ ID NO: 351317 - protein, 327 aa, unidentified
MNQSASNLSILGIDVSKGKFDVALLREEKYKHKRFLNNLEGFKKLGEWLAEYKVERLHACMESTSTYGEALAEYLHDRGFMMSIVNPARIKGFAQSELIRSKTDKVDASLIARFCAAMKPSLWTPESKEIRELRSLVRRVDALIEMRQQEINRLDVSDAVIKKTIENHIDYLTKQTDSIKEQINKHIDRHPQLRDKQKLLQSIPGVGEATIHLVLANFANTEKFSNAKRLSAFLGIAPREYQSGHSVRGRRRMSKVGRSSLRKAFFMPALVALRYNPIIVEMKRRLTEAGKPKMLIVGAAMRKLIHIIYGVLKHGKPFDSNFALKIT

SEQ ID NO: 351318 - protein, 421 aa, unidentified
MNTELQAWIGIDWADEKHDVSLYEVATGRQERLELRQSPEALQEWIGQLRSRYANSGEVAVVLEQGRGALLNVLMGCEFLVLYVINPKALSRYREAFYGSGAKSDPVDAVLMREMVQQNPDRFRAWRPEDVLTRSLRLMTEGRRDLVSQTTALTNQLTALLKSYYPQALRWIGALDSPWACDFLEQWPTLQALQHSSRRQILRFYEKHPRPSLDMEQQLKQFDQAMPLTGDEAVLEYSTLMVQALIPQLRALLHSIDEFDRKIAEVFRKHPDRPIFESFPGAGSALAPRLLAAFGADRDRYAAASEMQKFSGIAPVTEKSGKQHWVHWRMACPKFIRQTFHEFADHSRRWSTWAKAYYQLQVQRGKKHHAAIRALAYKWIRILFRCWKKHEAYQEATYMASLVKHQSPLLLQTTAVVVEKL

SEQ ID NO: 351319 - protein, 465 aa, unidentified
MPLLIMKDVPMKRKISTKNKAKRIKKHLEEINLYAAGIDIGSREHFVSVPESLDDQPVRNFGCFTIDLENMADWLVRIGITTVAMESTGVYWIPVFEILEARGLEVILVNAHHVKNVSGRKTDVKDCQWLQQLHTYGLLAGAFRPEDEYCVLRAYMRQRGTLVSTLSTHIQHMQKALRQMNILLDNVVSDITSKTGMSILRAILLGERNAEKLASYRDRRCKNSVEVIAKSLMGNYRKEHLFSLKQSIELYDVYHEKLSDCDQEIEQQLTQFEKQPDLTEGQRPTKKRNKKHERNAIQFDVASYLYDLCGTDLTDIDGLDEGSVLKVLSETGTDMTKWKTASHFVSWMGLSPNNKISGGKVLSSKTVKTRNRAKQAFKLAAWGLSNSKSGLAAHYRRLRARIGAPKAINATARKIAVIFYNMLKNKTVYISQSQEEYDKAHQQRTLKLLQQKAVQFGFQLIPVSG

SEQ ID NO: 351320 - protein, 491 aa, unidentified
MAEHSMAYVAFDTSKLHNAVAIAAAGRAGEVRYLGEFENTPAATAKLVRKLAAKHAALSCCYEAGPTGYGLYRQIKQLGHDCIVVAPSLIPRKPGKRVKTNRLDALSLVQQLRAGDLTAVWVPDERHEAMRELTRGRGAAVLDWRAKCQQVSSMLLRLGRHYPGKKTWGKTHMAWLAGQQLEHLEQRIALEERLVAVRQAQERIERLERAIREAVPAWSLAPLVTALMALRGIDFIAATALLAEIGDLGRFRTPRELMAWLGLVPSECSTGEDTRRGPITKAGNRRARQLLIECAWSYRHPPRVGRDKLARVSAAPPAVRDIAWKAQVRLTGRYRSLCRAGKPDVVAITAVARELSGFIWAIARALAPNAAVVAADAVAAADAAPTDADNRSGGTRSASHRSAISSRNGIPGKPAHGTQATGRPRTDRRRAPGALPDTAKPVAGATADVPPPAQTPTQRQPGTALARGGRRDRRLAGGVCRMAAGPAGGNP

SEQ ID NO: 351321 - protein, 394 aa, unidentified
MKLVGIDVGKNSHHFCVMDKETGEFNVTPTSFSNNKEGFDFLINSLKPYSKKSILLGMEDTGHYHVALLKFLLSNGYTVALINPKTTDLTRKMEGGITKNDKLDTITICDVLDTPERKKQYRITKVDRFDLYEQRQLTRHHHNLKEELNVYCNRLQKSIDLVFPEFNTLFSSKYSIVYMNLLKTFGSAEAIASTDIRTIRKCFEIKGRGNRISLTPEKLKECAKNSIGISSEVETIQIKHLVSQITLIKEQIAEIDKKIEEFSITNNSPILSIPGISHFSGTSILAELGDIGNYSKPSQIIKFAGVAPYHYESSQYNAQHTAITKKGSKYLRKTLYQIILPVINNNPVFKKYYLLKISQGKGHRCAQGHCIRKLLRIIYHLLETGQSFDPALLR

SEQ ID NO: 351322 - protein, 346 aa, unidentified
MKKQASRMWSLGVDLAGDSFEAALAPDGAEARDWKGFERRGFALAPASSEGAKELAAWARQRIGAGRCVRVVVESTGKISARFASALRGLGLPEVLVANPARIKMFAASQGVRDKTDPIDAAMIALWAAMNRPEPPEPPSETQGALREKTRLREAYVRDLNAWENRLGEMDNEDDQNVVTLTIEHLKKQIEKLESEIQRTIKHDRDMLRQARFIKRVKGLKDVAASTITAELGDLKTYTRTEAVSAVGLCPRQFTSGKQVLRPPRLAKGPGAEVRRVLYMSATSLYRSKGAFRAWIDQREAAGWKKMKIITALMRKLLLVARAVVVNDGHYDESLIGRAPAQESSA

SEQ ID NO: 351323 - protein, 426 aa, unidentified
MIVVGLDLHVRNSFLHVEDGDGRRLKRGRVGNSLAELAQFLGALEPRLTQAPREPVRVVMESTTNSRAMYGLLNDYARAAGVELSAQVLDARRLRVIAQSVSKCDKLDAAVLAELARSNLTLPACYVPDDAVFALREHLRARADLVRIRTMLKNRVHALLHRRGLPPAGDPFGRAGRAALAGLALDAAGRAILDRYLAQLDAIERAVRESTRELRELSCDGGDGDGGGGGGGRWCKPLALLCTMPGVGLIHGLTILAELGDIDRFRSRAAVSNWAGLVPVVRDSNHKRFAGHITRRGSAHLRATMTEAAWSAVRTGGRTGGRTRCRRYGAIFHRIGRAKCKQVAIIAVARRMLEDAWMMLKRDEEFRDEVSRDDVFRNDDERRDDDDDDECRDRSSTQMPATASAAQAADEIATRRTPQAEPAVWA

SEQ ID NO: 351324 - protein, 326 aa, unidentified
MQTIHHICCGLDVHKDSIVACILKTSKLSEKSSRKEQIEKEIRSFDTFSDNLKELRNWLVANDCHHVAMESTGVYWMPVYDVLEDAYDGDIEILVVNARHMKNVPGKKTDIKDAEWIADLLRCGLLKGSFIPPQNIRELRELTRYRKNIVQDICSQKNRIEKTLQTAGFKLSTFLSDIFGVTGRNLIKVLIKKGYLTKDDLEDLTQHITVEKRNEMKRVLTNRLSIHHRKVLEIKLKYLDDQISHLKTVEESIAELSIQFEKEIKALDTIPGVGVTAATAIVAEIGTDMSKFPTAEHLCSWAGLSPGNNESAGKKKRPESPTVTRT

SEQ ID NO: 351325 - protein, 447 aa, unidentified
MKKVFVGIDVGKFKNSISIIDTEGNPIIKKGLSIENDYYGFARLEEQIDLIINNYGFTYDDCIAGVESTGHYWFNLRDYLKDIGIETVMIKTDSVKHRRALEEGQKGKNDTLDARVIASCLRNGNYVYIRENERELRALQKLTRMRNDISDELVALKNKIHRCIDICNPVFFKIFENLNSKTGVALIKLYPSPEDIINVDLDNIKKELGEIVDKPNMRMVSLYKEECEIWGRLIKEPSYAEKVEMVAYIDKFLLQNKSKEHLDKQIKEIAKNIIPLYSEFEQIKGIPLIQLISVLSEIGDIRNFKNTRAILAFLGLSLKGNASGKYIGERRINKAGSRIVRKHLFNIMDTLVKHNEYFRIAYCYYKSYNHKNPTKKRSMQIAVMCKFVRVMYGMLKHNTNFDYKEMLKGYYFGDCNMKVFKEEFEGEKRTKKIENYKLAYSIFVNYS

SEQ ID NO: 351326 - protein, 318 aa, unidentified
MQIPGCFIGVDVGKFELQVAGHEGAIVSGSLANSRSSIVGWLKRLPAGSVIAMEATGGYQELLARLAHERGFAVYVLNPTHVHHYAISLGNRGKTDRLDAEVIAQYIAQRHATLHRYEPISPELQQVRALQALRSTVVRVGTSLRLSAQRHGCSSGHQKKALASLSSWAEQLERELIAQIKARSEWAKTYGLLTGICGIGPINGAALTTLFNRVHFASSDAAVAFCGLDPRPNESGRKVGRRRLSKQGDKAARTLLYNAASSAARTAHFKDYYAMLRARGLASTAALVVIARKLLRIAYGVWRTGQAFDPGRLNLKTA

SEQ ID NO: 351327 - protein, 403 aa, unidentified
MFFLGIDIGKQHHEVGLIDQHGKSIGKTIRISNTKFGSEQLLAFFNKHALLPENTMVGMEATGHYWLSIYTFVHKLGFHTTVFNPIQSDVLRDFYIRKTKTDTIDALLIAQVIRLDLPDKTELPAEDIFRLKQLERFRYGLVDRCSDLKRKILACLDQVFPEYDQIFSDVFGCSSTQVLLNSPIPEDLLEIDAERLIETINTASEKRLGIARSEEKVMKLNEAAAHSFGISIASDVFKLEIQIMLEQIQLLDSQIKIIEAEIQEIVSKQENYLTTITGIGDITAAVLMAEAGDIKRFERPNQLLAFFAGLDASVHQSGDFTGTKNRLSKRGSPYLRRAIWQAAFVAAFKDPALSLYYQKLRKRGKSHGTAIGAVARKLVNIIFAVWTQNKPYEVHFPEDISEK

SEQ ID NO: 351328 - protein, 419 aa, unidentified
MSFKILKFNCCGLDVHKTWIYACIGITDSNNRTEYKQARFSSFTKGLNELCDWLAKYNCKDVCMESTGKYWIPVFNILEQHEIWVTLSHPKYTKPMKGNKTDRKDAKWICDLYMCGMVKPSFIPPADIRALRDLVRYRFKLTCMITSEKNRAQNCLTVSNLKLDDVFSDVFGKSSRSITEQILQHPGEKFDVSPFVDGRCKTPVEEIQAAVDGAISKEQAVKLRQCLDHIDELQKHISEVEQEILCLSDKYAAALNLIRTVPGFDKNPMTAIQVLSEIGGDMSVFPTAKHLVSWAGCCPRNDKSDRKIKSTRISRAGSYFKPVLVQVANALIKSKKHPEFTTRYKRIKTRRGHKKALIAICRMILTAIWHILTDLKPYTPEGFLESRPVNKEKVLTTSQALNLLKQRGYLIKDDPSPAS

SEQ ID NO: 351329 - protein, 391 aa, unidentified
MDSLTTAVSKIKEAEELYSLESRIFLESTGIYHYPLFCYLRDKGFNCSVINPIITKNSTNMNIRKVHNDRFDSKKAALVGLKPDLKVSLMPSDLALNCRNLCREYYDLMDNRSVYVNKLQGELRMAFPQYLGIFSKVTINTSLTLLETYTSPNAFIEADKQEIIDTIKSTARFGLTYAEKKYNAIIQAAHDANEFGYIIDSNIKRIRLYISFIRKYDEEIAGIMDALHDLVDSNEDTDFVKQIHLIETFKGAGFLSAVSLMGEIGDFSAFTKPKQLFAYFGLDPAVKQSGKFEGTKVQMSKRGSAIARRVIHVLTLQSISTSRTGEAKNPVLRDYYLKKCESKPKLVAMGAVSHKVCNMIFAILRDNKPFEIITPQEHIKQYNAAKCDEAA

SEQ ID NO: 351330 - protein, 562 aa, unidentified
MPPNGPELTCGDVQPVQCRLLRGRDGHSYQFLLSFARRKADGWLRQVEVVFLTSSRIFISNDIKSSSRKLWQSTSRDAFFCSWLRFASLAVNYHLVHLVSCPFSSLLFIPYTQRARSINFTLSGIHPMPSLSKINPHCAGIDIGSESIFVGIEDYDVASFGTFTDDYLKAIAYLKEHHITAVAMEATGVYWITFFDMLEAAGITVTLVNGKQVKYLPGRKSDVADCQWLQQLHCFGLLRACFIPDDVTRQLRTYTRLRADHLSMASSHIQHMHKALTLMNIKVQNVISQLHGASGMRIISAIVQGERDPECLADLCENSILKTKRTRVIASLKGNYKPEHIFALKQALSAYTFYQTQIGECDKQIEALLNTYTDDMPTPSKIAPPKDIRHNAPKIDDLHTKLMKMTGGNDPSQITGLSDKTLLELIAETGTNLKDHWGTEKQFSSWAALAPSMHQSGKSNKRKKFKKNSRAGQIFREAALSISASKHSALSAFFKRMKAKKGFLHAMKATARKIAVIYYRVMTKGIAFVERGIEIYQQRFKEQQLRLLQKKARSLGLQLIPA

SEQ ID NO: 351331 - protein, 344 aa, unidentified
MGEVSTIGLDIAKSVFQVHGVDVAGAVVIRKRISRAKVLEYFGELPPCLVGIEACPSAHHWGRELQKLGHVIRLIPPSYVKAYLKRSKNDANDAAAICEAVTRPSMRFVPIKTKEQQTALMLHRTRQLLVRQRTMLSNALRGHLAELGIVSAKGRSGTAELLRIIRDGEDSRVAPAVRGILDVLARQYGAIGTEIASIDKRIMALHRACEASRRLAEIPGIGPVGATALVAEIGDWNSFSSGRSLAAWIGLVPKQHSTGGKDRLGSITKQGNRYLRWLLVVGAMAVIRYARKHGTERRPWLGRLMERRPTKVAAVALANKIARMAWAIMVRGERYKEPKLSLAA

SEQ ID NO: 351332 - protein, 370 aa, unidentified
MIRLAHAMQYLINTELSSHEETRFEFNRSTGAIKLGIDVHQDFYVVVEQVEGGNPKPPQRFDKQAFLHWASKLKQRGAEVHAVYEACGFGFSLQRNLTALGIKCHVVCPQKLDERNKRVKTDGLDAKALCLKLDRFVQGNRDALALVRVPTEEEERSRAIHRQREQLVGARKRLEAQGRSLMVNHGVDPVQNWWKPRTFATLPVPHWMRELLLNSQPILLALQEKIAVLTLQLQNAAAPNQARGLGKMTSVVIDREIGDWHRFNNRRQIASYTGLCPGEYSSGNTRLQSCVTKHGNPRLRAALVELAWRLVRFQPNYKPIVKWRQILAKGALATGAARKKAIVAVARQLAVDLWRIKTGRLRAQELGLIT

SEQ ID NO: 351333 - protein, 408 aa, unidentified
MQTVIERSAALDVHKASVTACVRVPGEQHVEEFASTVRGLLSLRDWLAGFGVTHVAMEASGVYWKSPWAILEDEFECLLVNARHVKQVPGRKTDVGDAEWLCRLVEAGLLRANFVPPKPIRQLRNLTRYRKTQIQERSREVNRLHKALEDAGIKLDCVAADIMGKSGRDMLDALVAGERDPEVLANLARRQMRKKIPALREALEGRFEQHHALWIGTILAHIDFLDQQIERLTEAIGEQIAPLAPAVELLCTITGVQSRAAEVILSEIGGDMSRFPTPRHLASWAGQCPGNDQSAGKRRSGKTRNGSKWLDWTLEEVAIAAIRVKGTYLQAQYQRLRPRRGHKKALGAVKHTVICAVWHMLSTGEVWRDLGGDYFTRRDPERRTKRLIQQLEQLGHTVTLTTTHAPQT

SEQ ID NO: 351334 - protein, 404 aa, unidentified
MYNAVGIDVSKGKSTVAILQPGGTVIRKPFDVSHTSQNLHELAKYLDTLNGDTRIVMECTGRYHEPILKTLSEAGLFVSVVNPHLIKNFGSNSLRKVKSDPADARKIVRYTLDNWANLRQYSGMDNMRTQLKTLNSQFSFFMKQKVAAKANLIALLDNTYPGVNKLFDSPTRDDRSEKWVDYAYSFWHVDCVRGIGLKAYTERYQAFCKRHHYIFQADKPEKLFNASKELTAVFPKEKTYKLLIQQSIQQLNLASAHVERLRREMNELASTLPEYNTVMSIYGVGKTYGPQLIAEIGDVSRFTHREALTAFAGVDPGVDESGQHKSKSNRASKVGSARLRKTLFQIMTTLLQNAPEDDPVYRFLDKKRSQEKPYYVYMTAGANKFLRIYYGKVKECLRNIEQES

SEQ ID NO: 351335 - protein, 489 aa, unidentified
MRFGSKTNPQKTSVARLYYKAFAESKSCRHALHQAAPKGNSTNVSTLNSAEEKPSYAARIGLDWADQKHFWTMLTAEGKRTRGELKHTPEAIEIWAVELARSFGGRPIALALEQKRGALVAILSKYAHLHLFPLHPTNLSHYRSSVCTSGAKSDPSDADLILDYLVKHPEWLRSLMPDTVETRSLQFLVEERRKLVNQHTSQLQILIYWLKQIFPQMLLWFDDMSTPLVGDLLQRWPQLPALQKASKKTLDKFFRRHNCRSEERIQERLDEIGRAVPATTDAALLNTADLCIRLAVQVLAAQRAGIAEFDRQIEAIYETHPDRFIMASLPGAGPALEPRLIAALGTNRERFESASGMACCFGIAPVTESSGKSRWVHWRWACSKFVRQTLHEWANCSMRSCQWAREHYDKQRAQGKGHHASVRSVAFKWIRILYRCWSDRVAYCEERYLKALRKHGGAVAAVVGKPMPVPPAVQWESCGGFSKIVELSS

SEQ ID NO: 351336 - protein, 316 aa, unidentified
MSGQEVYVGVDVSKERLDIAVRPSGEFFSEANDKRAVSRLVKRLTALDCTRLVVEATGGYETVMVAALCAAGLPVVVVNPRWVRDFAKGIGWLEKTDRIDAKLLALYAERAELKVQHLPDEATRQLRELCARRLDLLEMIDTERNRLEHTTSAVRREIASHIDYLRKRLKRIERDIDGAVRGSQLWRHQDQLMDSVPGVGPTLRACALAWLLELGQLNRGEAGKLVGVAPLPDDSGKTRGYRRIAGGRGPLRKVLFMATMGAMLHNPHLRAYYDGLRARGKLHKVALVATMRKLLLILNAIIKTDTPWNESCLKSL

SEQ ID NO: 351337 - protein, 414 aa, unidentified
MGIEPLVFVGIDWASTEHQVCLIGADGPVQRAFAHDGDGIGTMVDWLVAKADQPGQVAVTIETPHGPIVEALMDRGIAVFAINPKQLDRFRDRFSPAGAKDDRRDALVLASSLRTGSHWFRRVEALDPVVVELREWSRMAEELKQECVRLTNGVRQQLWRYYPQMLDLTEDVGADWFLALWTKAPTPAEAMRLTETKIAKVLAAHRIRRVTAHDALAILRRPALTVAPGTADAARVHITAVAERLNLVNRQIKTVLQRIDGLVEQLAGPETEPGQDTEQRDAAILRSLPGVGRIVLATLLAEAHQALQARDYQALRTLTGVAPVTKRSGRSCRVEMRQACSGRLRTVVYHWACVTTQHDARSRSRYAALRGRGHSHRRALRTVADRLLGIACVMLTNRTMFDPEKMPTDRPKSA

SEQ ID NO: 351338 - protein, 339 aa, unidentified
MKYTPVGVDIAKHLMQLHFIDEHTGEVIDKQIKRDALLKYFSNREPCLIGMEACGGSQYWARELEKLGHKVRLLQGKFVKAFVMGNKNDVMDARAIWMAVQQPAKAVAVKTEEQQAVLSLHKIRRQLVKFRTAQINALHGLLLEFGETVRKGRASLDKAMPEVLERLKEKLPPFLIDQVKDQHRRLSDLDMQIDGIEKQLTAWAKQNEACKRIMDIPGVGPLVATAAVAIMGDAGTFRSGREFAAYIGLVPKQTGTGGKVRLLGISKRGDAYMRTLFIHGARSAALQAKEPNPWVTELMKRRPTSVAVVGMANKIARTVWALIAHNRTYDKKHISVRPF

SEQ ID NO: 351339 - protein, 387 aa, unidentified
MPDTTALSRSCIALDEDNTLIAVVEMSQSSWLVAGLLPGVERDPLKKLAVEEKALLSLLHRWRDEAEEAGHRIARICVAFEAGRDGFWLARWLTAQGIEAHVMHATSIPVKRDHRRAKTDRLDCRLLMRAFVGWLRGEAEHCRMVAIPSIEEEDARCPHRERENLVGERTRVINRMKATLVRLGIRDFNPKLRKAEERLAGLCTPEGAPIPPNTLAGLRRDMARLRNVNDQIKEIEVARIQRLEAAPDETHHKMVRLLSRVHGLGIETADMLVGEVLSRDVRDRRALARYGGLTGSPDESGRKRREKGLARAGNARVRRGMIQFAWRFLMFQKNSALAQWYRERTADGRGDVRKTMIVALARKLLIALWRLATQGEVPDGVILRPAA

SEQ ID NO: 351340 - protein, 366 aa, unidentified
MKKYTICHSATAAPATAKSKVKRDGSLLKVGLDIHQEKFVAVVQYDHATPRPPQRFAPAEFVPWVEGRLREGFEVHVVYEACGFGYGLYRALLQAGAYCYVIAPQKLDEGNTRVKTDGRDGHALCLRLDRYLAGNKNSLAMIRVPSEEEERARHWGRQREQLVHHRQKLEAQGRSLLIDHGLPAPARWWRPQSWSRLDKLLPVWILSHLELYRPMLLALDQQIRTLTAELEKAAPVALPKGMGALSTVVISREICDWQRFNNRRQVSSYTGLCPGEYSSGAKRVGRSITRHGNSRLRAALVELAWRLVRYQPGYHAVQKRLTVLAKGARATRAHRKKAIVAVARQLAVDLWRLHTGRCTPAVLGFK

SEQ ID NO: 351341 - protein, 352 aa, unidentified
MPKTANPAPKTYAGLDVSLKETAVCIVDDAGKILFERMVPTDPQVIAGFLSKYAPNLVRVGLESGSTSAWLWRELSALGQPVVCLDSRHAHRVLSMKRNKNDRNDARGLADLVRMGWYREARVRSIDAQFVRSMLLSRQQLLQSRRAVENQIRGALKTLGVMTSSTKGRGFIPRVVELRAENDWLGPVLDPLIAARAAIATPIKTVSESVLNAAREDADVRRMMTVPGIGAMTALAFKAAIDDPKRFTSSTKVGPYLGLTPRQYQSGESEWIGGIGKTNDPLLRAYLYEAAGVLMTRVRRNCPLKDWAVRLAKRVGWKRASIAVARKLAVILHAIWRDGTEFDWRAAKAEAA

SEQ ID NO: 351342 - protein, 388 aa, unidentified
MIYVGIDIAKLNHFAAAISSDGEILIEPFKFTNDYDGFYLLLSKLAPLDQNSIIIGLESTAHYGDNLVRFLISKDFKVCVLNPIQTSSMRKNNVRKTKTDKVDTFVIAKTLMMQDSLRFMTLDDLDYIELKELGRFRQKLVKQRTRLKIQLTSYVDQVFPELQYFFKSGLHQNSVYALLKEAPTPTAIASMHMTHLAHLLEVASHGHFGKEKARELRVLAQKSVGVNDSSLSIQITHTIEQIELLDSQLFHTELEMANLVTCLHSVIMTIPGIGFINGGMILGEIGDIHRFSEPKKLLAFAGLDPSVHQSGNFQAQRTRMSKRGSRVLRYALINAAHNVVKNNATFKAYYEAKMVEGRTHYNALGHCAGKLVRIIWKMMTDNVEFNLD

SEQ ID NO: 351343 - protein, 317 aa, unidentified
MSAAAIFCGIDVSKARLDVSLLPSGESWSTGNDAAGIELLLRRLQEQAPTLIVLEATGGYEATLAASLAHAGFAVVVANPRQVRHFAKATGQLAKTDRIDARVLALFAERVRPEPRALPDEKAQLLDALLTRRRQVLEMLTAEKNRHAMAPAPLKRSITQHIRWLERELEGVGRDIERMIKESPLWRTKDDLLQSVPGVGPVLSRTLIGQLPELGRLSRKEIAALVGVAPLARDSGTLRGRRTVWGGRAPVRSALYMGALVASRHNPVIRDFYLRLLAAGKPRKVALTACMRKLLTILNAMARTQTPWNPALPEYSC

SEQ ID NO: 351344 - protein, 405 aa, unidentified
MGKVFVGHDWAEAHHDVYVEDEEGKRLARARLPEGVEGVARFHELVGPFAEDPGEVVVATETDRGLFVAALVAAGYQVLAVNPMSTSRYRERHSTSGAKSDPGDAKVLAELARTDAHNHRPIAGDSDLAEAVKVLARAHQSMIWTRQRQANQLRSTLREFYPAAVEAFDELTSGDAVAVLAIGPTPALGRGLSRSKIASALRRGGRQRRIEDRADEIQGALRSPQLEAPTLLAEAMGASVKALVAVIGELSEQISCLEAELAERFEQHPDAKVIRSLPGLGTILGARVLGEFGDDPNRYGDAKSRKNYAGTSPITKASGTRRVVLARYARNRRLADACYMWAFAALNTSPGARAFYDQRRAAGDTHHRALRALGNRLVGVLHGCLRHNTPYDEHTAWDHRIANAA

SEQ ID NO: 351345 - protein, 408 aa, unidentified
MTVVGIDVSKGKSMVAAMKPGGELVAAPYEVRHSDIELSHLALDVLCMEPDTRVVMEATGRYHEPVAALLHSEGIFVSILNPLLIKQSGAGSLRKVKSDPKDALKIAKYGLDNWSTLREYTPMEAIRQQLKLCARQCDLYNKNIVMLTNNLISLSDKTFPGVNELFSSPEKADGHLKWVDFYRSFWHCDCINRMSPDAFEERYKKWCKRKGYHFSTDAADALYAASCGPYTTLPRDNNAKLLVTVAADQLIALRENQSKLEAEMLNLCKQLPEYETVMAMYGVGKSTGPHLMSELGDVRRFPHRSSIVAFAGVDPGVVGSGKMQLSSVTTSKRGSPQLRKALFQVVSTYVKCKPENEAVYQFYAKKRDEGKPFFVCTTAAANKFLRIYYARVKECLNAAESATQVEEG

SEQ ID NO: 351346 - protein, 350 aa, unidentified
MSVIHYIGFDVHKKSVSYCVKDAAGKIIEEGKLRATCQVLRQWAGDRTQPWHGAMEATLFSGWIYDTLKPFATVLEMGHPAMMKAIGASKKKNDKIDARKTADLVRCNLLPACYVAPVEIRELRRMLRYRNVVVAQAVRMKNKMSGLLMEVGAEYNKQRLHGKNYFTELLGSLEEVPESVKDLLRLSRGALELFETTQKQILDRLQKEPRLVRRLEVLQSIRGVGDVTALSWALEICDPHRFASIGDAVSYCGLTSALVSSADKQQRGPLSKQRNAHLQTVLIEAAKLAPRWNPQLAAVHEREANRGNRNRATLAVARKLVAYLLAVDKSGKPFQVQTPPATKTEVPAVA

SEQ ID NO: 351347 - protein, 413 aa, unidentified
MEGLQPIYRRVAGIDVHRMLHVVTVVIEHPDGSIEQISKEFGGFKRDCRALAAWLVEWNVELVVMESTGIYWKSIYAHIERAGIQAWVVNAHFIKHVPGRKTDMNDSQWLAVLARFGLVRGSFIPPQDLRELRLLSRYRRKLNAMRASEVNRLHKMLDDGGIKLGGVVSDINGVSARAMVAGLINGVGIEQLLDMARGALKGKREDLQAALDGDLTLRHMFVLKHLHEHIDTLQRELAELDAYILGAMTPYQWAHRLLQTIPGIDQIASALILIEIGDDMTRFGCADRLAAWAALCPGNNESAGKRKSGRTRKGNGIIRYILCECANAARMTKSSLAAKYKSLMVRKTHKKSIVSIAHKMIRLIYVLLSRKEAYHDPKIDYNAMSARKNAPRWIKQLKLIGKWPDNKSATASA

SEQ ID NO: 351348 - protein, 340 aa, unidentified
MNITRIGIDLAKQVFQLHGVDRFGKVMVRKQLRRSQMPAYFKGLAPCLIGMEACASSHYWARELANYGHEVKLMAPQFVKPYVKSGKNDANDAEAICEAVGRPSMRFVAIKTVEQQVMQAEHRIRSRLVRARTALSNEIRGLLGEFGIVVPLGIAQLRQALPVLLEQEENVLTARFMQLLAELAEELRQIDDRITLHDKRIQVAAREDGRIRRLLDIEGIGPISASALVAAVGDAKQFASGRDMAAWLGLVPSQHSSGGKERLGHISKRGDTYLRTLLIHGARAALNASGNKEDARSRWVQALAARRNGNIATVALANKNARIAWAVLSREETYRGAHGQ

SEQ ID NO: 351349 - protein, 321 aa, unidentified
MQTPSIAMDIGADVGKDEIVIACAEGAFSRRKVRNRRTELSALLKSLPAGSRIGMESTGSYHELLAETGHKLGLVIFVLNPKDVRHYAKGVGLRGKTDRVDAELIARMVAREHEKLHPWIPSTSEQRQIDRLLKRRAKVSRIRVALNQSLKGLSGFGADLKMVNERLDRLIKRIDAKVKALIEANKDRKQQYARLRKIAGLGGVVVRSSVLNTLERVPLHSADAFIAFTGLDPRPEDSGHHVGRRRLSKRGPSELRRLLYIAAMAAVKTKLWKPIYEHYRAKGLSTTAALVVIARRIARTAWSVYTHKTDFDPKRVALALT

SEQ ID NO: 351350 - protein, 341 aa, unidentified
MGEYIGLDVSLKETAISVRRDGKRIWRGKCPSDPSLIAEVVRKHAPEPKRVVFETGPLSVWFYHALSAEGLPAICIDARHAKAALDMAPNKTDANDADGLAHLAEVGFYREVRVKGYDSMLVRTLVAARSRLVQITTELSNQIRGLMKTFGLVVPRGKGGTFEAEVQRLLVGQDELARIILPMLEAWRSVRTRASALGRQLLACARQSAACQQLMSIPGVGAITATSFTAAIEDPANFKTSRSVGAWLGLTTRRYQSGEVDYDGHISRRGDAHLRGLLYEAATVILTRTHADSDLRRWGLMLRERIGFKRAAVAVARKLAVIMHAMLKSGEVFNRAVSAPA

SEQ ID NO: 351351 - protein, 335 aa, unidentified
MDRQYVGIDFHRRRSVIVRKNAAGEKLGSVRVANDPLALAGAIADAGPEPEVVIEATYGWYWIVDWLQAQGATVHLANPSGLNWGTRRVKNDERDATDLIDMLRLGRLPGAWIAPPATRELRELVRYRAKLVALRSGLKAQVHAVLAKEGVLPAARDQFGRGGNAQLDTLELADAYAQRVRSLRELIDAYDEQVVTLERTIHDRLCDDRGYRTIQQINGIGPTMAAILVAEIGDVSRFRNAAALCSWAGLTPKHHESDTTVRRGGVTKQGSRLVRWAVVEGTVRYHGGGKLAADWHQIAERRGKHKATVAIARKVLTLVYYGLRDGEIRCLANTA

SEQ ID NO: 351352 - protein, 385 aa, unidentified
MQQNDLSRSYVPFKQDNTLATVLEMGSKSWLLAGLVPGVKRQPRKQLSIDPERLLAQLHRWRDEAIKAGHAIERIVVGFEAGRDGFWLARWLRARGIEAYVIHASSIPVPREHRRAKTDRLDTEMLMRALLGWLRGEPRHCHMVAIPTLAQEDAKRASRERESLVDEKTRLTNRLQSILVASGLPKVNIKLRKTAKLLADLRTPEGEPIPPHTLAELRRGLERLAVIKAQIDAIEKARLEQLKAEPTKGTHPMMLMLAKVLGVGIETADRLVHEVLSRNLRDHRAVARYAGLTGSPDESGTKRREQGLAKAGNARVRRSMLQLAWRWLLHQKNSDLAKWYRARTADGRKDTRKIMIVALARKLLIALWRYVHTGEVPGGVVLKAA

SEQ ID NO: 351353 - protein, 466 aa, unidentified
MGKGSGNGTTRGDRKRNARRERLRGLLPRDGAVIGIDLAEDKQAIAVVDHDVRVLARKTVRVKAFRLGEALDWAAAQATVKGFTHVTVACEPTGPRWMQVQRLCAERCLPLVCIQPLVSHIAREQQDYTPHKTDESDCVLIGRLATELHCYIPEELDETWAQLRHLGRRRAQLITAATASVQRIRDFLSVAWPVVTEACAGPFESVTWLAALQVVTARCGGDPARLAAMGPEEFTALVRGAVPGWGGKKGWGRICGRVFAALTDTEGVVTWSRRGLLRRVADELGDLQRTRAQLRATEADMVMVLGELGLSRLGDIPGLTAVGAAAILAETGDPRRYDSSSSLVKHAGLSPAGNASGAFEGQAHISRRGRPGLRLTVWRAVWPMLQFNPVMAAKYAALTQAAAAAAADAGSQPARAAAAAARARRAKARVACAASLLRWIYSMVVHGTSWDATVASGAAACQPEAA

SEQ ID NO: 351354 - protein, 406 aa, unidentified
MNMNAVGIDVSKRKSTVAILRPGGEIVKKPFDVPHLSSDFRSLTRLIQDLDGETRIVMECTGHYYEPIARRLSQAGFFVSAVNPHIIRNFQGHDNPLRKVKTDKADSVKIARYTLDSWGNLKQYTLMDELRSQLKTMNRQFSFYTKHKTAMKNNLIGLIDQTYPGANTYFNSPVREDGCQKWVDFVDTYWHVDCVRKMSLTAFINHYQKWCHRRRYIFSKSKAEEIYGKAKELVPVLPKDNFTKRIIKQAIAQLNTTSKTVEELRNLMNETASKLPEYPVVMAMEGVGPSLGPQLMAEIGDVMRFTHKGAITAFAGVDPGVNTSGEYSQKSVHASKHGSPVLRKTLFQIMEVLIKNKPDDAVYLFMDKKRAQGKPYYVYMTAGANKFLRIYYGRVKEYLLNLSELN

SEQ ID NO: 351355 - protein, 410 aa, unidentified
MNITTLFVGIDVDKVTNTVRLMDGSGETLSLFSVRNNADGADELQSKLRRTLLDTDYSRITIGMESTSVYSDHLAAYLRNDEFLRKWECTVYVINAKNINNFKKSYPELPKTDNIDTLIIADYLRFGRLTKSVAHDEKHLALRNLTRARFQAAQNLSREKTRFLETLYKKFSTLDSSKVFSDTFGATALAAACDFLTVDEIIYTPIDELADFVNTKGKGKFTDPNAVAAALQSAARSSYRIPKTVNDSLNQLLAIRLVGIRAIETQIKSLDKAIELFMGAFQNVLISVPGIGPVYSAGLMAEIGNIDRFEKGQISLAKYAGLAWSRHQSGGFEAANTKMIVSGNKYLKYYLLEAANKVRMHDAEFARYYQTKYREVPKYQHKRALALTARKLVRLVYSLLSTNRLYTPQR

SEQ ID NO: 351356 - protein, 353 aa, unidentified
MNDTSSIAWLGLDAHSKNCVLGQLDDHGTEVKWWQFATQPQLLIKYIQAIPATDKRLMLEESNLARWLSQLLKPHVQQLVVCDARRNRLISQDHHKHDKRDAFALARLLRLNEFKPVWQPTEDQRVLFKRIAKSYEHAVQRQTRLKLQLKSLFQHWGLFPAGSTVFTKSGRNDWLKKLPHDTLRSQALLIYELLDQALIGQAQFRRLMCQTGRQFPEVQRLSTTPGVGVVGSHLFVAYIQDPKRFAKFSRLSRYCRLGIRKRTSDDKPLGYQQLDRQGIGTLKAISYRAYLQAAKRRTGPVWEFYQLSLRQTGSTTHARLNTQRKILLTLWTLWLTGREFDPKQFFRAQPIDV

SEQ ID NO: 351357 - protein, 477 aa, unidentified
MKSKKELLAKKKHIKRKSAKAKHNRVLGIHNPHAAGADIGATEIYIAVPPDRLEMNVRCFGTFTQDLRAIVQWLREYKVTSVAMESTGVYWIPLYELLEQEGFEIYLVNARHVKNVPGRKSDVQDCQWLQYLHSVGLLRGSYRPAQDICAMRAISRYRDNLLHFGAQHLQHMQAALDQMNLRLHHVIADLSGLTGMAIIEAILAGERDPRQLAKLRDPRIKASEETIAKALEGNWRVEHLFVLGQALQSWKQVQQQLGQCDQKLQELSSQLEGKIDLANSPLPPSAKYCGREPRSKNQPNGRWREELYRHFGVDLTEVPGLSLGVVQTLFVELGADLSAFPTPRHFAAWMGLCPDNAITGGKVIRRGTRRNRQRIRLALRLAATSLHHNKTQLGECFRRLRARLGAPKAITAMAHKLARIIWHLVTHRVGYDESIFAEREEQLLRRKQRQLRNLAHSLGFTLVPNPRPAATSNAEVS

SEQ ID NO: 351358 - protein, 348 aa, unidentified
MYIGVDTHKIQHVLVALDAQGRSLGTRTCTNTPEGWANGLAWARSWEGRVWGIENSGSLGKGFAQSLLVQGEDTVHEVSPHRTAQYRRRGRTQDKTDETDALAIARLLLAEGDTLPEVQRDDLSTELRLLSDHRDNLLAEKTRLINQLHGQMLQVDPSYKEKSGRLTDARGVAYCRDVALPQDDRLLRTRLLIVHQLAEQILRLDAEVAAVAAELTARVQESQTPILALRGVGTIVAARIIGEIGVAPRIRSAAALAALAGISPVAVSSGGRGGYRLNRGGNRQLNRAIHVIALTQRRCDPRGRAYYMKKRAEGKTPRAALRCLKRRLVDVLFRAFSRHVEPSPCAAA

SEQ ID NO: 351359 - protein, 351 aa, unidentified
MEKITVIGLDLAKSVFQAHGANAAGARVFSRRLSRTQLAAFFAKQPPCIVAMEACGGAHHWGRLIAGFGHEVRMLPAAEVTPFVREPKTDASDAAAIAEAAVRPALRTVPLKTPEAQALCSAHALRDRLIAMRTMQINMLRSHLSEYGMVAATGREGQAELKELVRTGLAGQPATLAGALLALVEAMDAGEAAIAAVDYEIAAAAKPMEAVARLREVDGIGLLSASALVAFGGDLARFKSSRAFVSWLGLAPKVEKSANTVRIGSITKKGNEYLRRLLVHGARSLLHWSSLGKAGGRRPWLEDMLKRRPKPVVIVALAAKLARIAWVILVRGGRYRPPAAAVAPPREAAAA

SEQ ID NO: 351360 - protein, 370 aa, unidentified
MLDTTTFVGLDVHARSIKAVSLDVMTGEVRCATFGYDAGAVAEWVRSVDPRARCVYESGVTGFDLQKRLSGLGVDCAVGAVSKMIKPSADRRRKNDRNDAEFLARMLSVGNVVEVWVPDDECEAARDLTRALEDARDDLSRSKQRLSKFLLRHGLAFDERTPTGRRKGNWTRAHWSWIESIRFAEGADNDVLAYYVDAVRRAAEEKARLEGLVEAEARKPRWRRRVDSLRCLKGVDTASAADLVFEAGAFSRFRNARSFAAWVGLTPSEHSSGESDRRGAITKAGNKHLRKALVEAAWHYLTCSGRPKGLAKGQAPDRVARRHAAKGVRRLVERREALLARGVHGNKANVATARELACWVWAVGLMAEEA

SEQ ID NO: 351361 - protein, 411 aa, unidentified
MDKVYDKCCGIDLHKKLIVACFKQGNRQEIRDFGATTRELLEMADWLKEGGCEMVAMESTASYWKPLYNILETCGLKAMVVNAQHMKAVPGRKTDVKDAEWIADLLQHGLLTASYIPDKDQRELRELVRYRKSLVGERARELNRLQKMLEGANIKISGTIRDINGKSARNILEHLLSGRQIDSAEYDILYEKKVIAHNLKATKEQIIDDLNGVMSALQKKMMRIILNHLDELNAHIRELDDDIDNFMKPEEKEAAKVIQDIPGIGNTSAQAIISVIGADMSRFPTDAHIASWAGLCPGNNKSANKRKSGKTRKGNGLLRDTLIVCAHSAVKNKSSYFHAQFARISAHRGSKRAYVAVAHSMLVAIYHILKEGVVFKDLGADYYNQFNRERKISAYLKRLKALGWEAPVVVA

SEQ ID NO: 351362 - protein, 319 aa, unidentified
MAQNDSVVVGIDVAKDKVDACIRALALRQTFTSTVQGHRKLVRWLRKHRVNKAVMEASGGYERVWARVLREADIEVRIVDPKRVRNFALSAGRLAKNDAIDAEMIAWFAEIFSEAPSQRHDAAREELQALVKARLSLIDSRMRLVSQSEHVAPGLVQKAHGRILKSLASEIARLEAAISIKIKSTPDFAERAEIIESVPGFAKTSSANLVAGMPELGQVSDEIAAALIGVAPYDDDSGKRRGERHIKGGRRWVRNAVYMPCVGAATQNNPVLQAYYQRLIAKGKEPKVAIIACMRKLIVILNTMIARRQKWDPGRYALN

SEQ ID NO: 351363 - protein, 451 aa, unidentified
MAKRAEKRERRSMVLQPDAAGIDIGAEEIFVAVPPDRDEESTRRFSSFTCDLHALADWLGRCRIQTVAMESTGVYWIPLFQILEERGFKVYLVNAHYLKSVPGRKRDVSDCQWIQYLHSVGLLRASFRPPDAICAVRTLWRHRGSLLEMAAEHILHMQKALSQMNLQLHHVLSDITGTSGQAILDAILSGQRDPVELAQLCHSRVKSPRDKVAQALVGDYRPEHLFTLKQSLEGYRYYQKLILELDQETARLMQALPSATEHPMPPRTKATAYHRQGNDPQFDLRSELYRIAGVDLTDIPGVSAATAQVILTEIGTDVSRFRHASAFASWLGLCPEKRVSGGKVLSCKTRQVKHRAATALRMGANSLRCAKGYFGEFFRRMRAKLGTAQAITATAHKIARILYHVLSTKEPYAETVFHRCDEQAQRRAEMRLRKQATLLGFQLLPITTTGE

SEQ ID NO: 351364 - protein, 349 aa, unidentified
MILVGCDLHARDQQVAVLDTATGEIQEQRLTHDGPSVEQFYAALPGPVTVGIESTGYALWFHALLHRLGHEVIVGDAAKIRAMVVRKTKTDRRDAAHLLDLLRHDRFPTVWLPDPAVRDQRTLVAHRMRLVRMRTMVKNGVHAIALNYRLALGPSLFTRAGVAQLQALSLPPHTSCRRSESLELLRWLDTHIKGLDDQIEEAAHAHPEAQRLMTHPGVGPLSALATVLVLGSVIRFPTSKHVVSYVGLAPAIESSAGKHRLGRITKQGNALLRYVLGQAGQAAIKRDPDLRRLYYAVLHRRGRSRAKIAVARKLLVRLYVMLRDQIDYQTFLYRAPAAARRKELMPTTP

SEQ ID NO: 351365 - protein, 325 aa, unidentified
MSSFSNYVGIDVAKKDFYACFAENSESRKFNNTAIGINSFIRHLSKNNFQIQNTVIGLESTGSYHLRLCVQCTTLGFQVKVINPLIVKKQNQTNLRRVKNDPQDASLVRYCLTTGAGYVFAETADTLLLKSLVRQRNSLATMLFKNKRQQDDIGYKEECLKSKFNPVYQEIGVILSEKIKELERQLKTFRKPEQKLLQTIPGVGPITAISFIAEVGDVRRFNHSKQLVAFVGLDSRVHQSGTSVRGKGYISKRGNKILRTRLYNAASVAVLHPNLFQKFFQKKRSEGKPYKVALVATMHKMTNVIHSVWTNNKPFTDHTNKPKKD

SEQ ID NO: 351366 - protein, 400 aa, unidentified
MNKLFVGIDVSKDSSSARGLDPGGRSCFSLLFPMDSAGFSHLSESIRSHARDFSEVMVAMESTGCYHLNLYTFLISQGIKTVVINPLIIANFAKLSLRKTKTDKKDALTIAQFLLVHKDAMSQIALSQDVQDLRDLARERESLTVLIASLKNDIKRILQSTFPELESLGEIFSETMLQFLREFPSARLIQAAPPQRIAKALCHSDRRKRISVSAKELIEASKDSVASVSAAKEVILPEKISTLFHLIEKQEKITKALIELCKSTRVEDLEIITSIKGISDKMGATFLAEIGRFNDFDSSKKIIAFAGIDPTIHQSGKFIGMSKLSKRGNRHLRRVIFLMVKHVSREDTLFKRYYLRRRWKAYHSRRLFLLQPINLSDLFSLCCRTEPISALTRIKKINSS

SEQ ID NO: 351367 - protein, 344 aa, unidentified
MDEVSTIGLDIAKAVFQVHGVDDAGAVVLRKRISRSRMLEFFAALAPCLVGIEACPSAHHWGRELQGFGHTVKLMPPSYVKAYLKRSKNDANDAAAICEAVTRPSMRFVPIKTKEQQTALMLHRTRQLLVRQRTMLSNALRGHLAELGVVSAKGRNGTAELLRIIADGADQRVPSSARAILDVLARQYNAIGAEIGLIDKSILAWHRSCEASRRLEEIPGIGPIVATALVAEIGDWKAFSSGRNLAAWIGLVPKQHTTGGKDRLGSITKQGNRYLRWLLVAGAMAVIRCAKKHGTKNRPWLGRLMERRPTRVAAVALANKIARIAWAIMAHGDRYKEPKVLMAA

SEQ ID NO: 351368 - protein, 388 aa, unidentified
MHVYVGVDIAKELHYAAIMDSDGVVSKPFSFENNDKGFNLLLSHLAPYNKESILIGYESTAHYQENLAYFLKSLGYRTAEINPLQTAALRKANIRNTKTDSVDARLICLALMNHHIQGDQRDSVRLDDLYQLCKMRMDTMKKRTTCKIQLVATMDRIFPELASFFDNNLHTNTIYRLIESFPLPSQIKKTRIDILTKLLHKASRGHFKKEKAQKLKDLADISVGIPSDIFAFQAQQLVHQIEFYTDQIQTIEERINTNPDVMSSPLMTIPGIGTFCVACILSAIKNINDFDAPCKILAYAGLDPVIRQSGKFTASHTRMSKRGNSLLRYALVWSAGNVVKNNHTFAEYYRHKTEDQGKSHYQALGHCAKKLVKSIYHMLKYNESFNLD

SEQ ID NO: 351369 - protein, 408 aa, unidentified
MRVVGLDIHRVFAEAVMLENGAVRRLGRIGMTRDHLTAFAKTLTHHDHVVVEATGNASAVAEVIRPHVGRVVIANPRQVRLIAEARIKTDVIDATVLARLYASGFLPEVWIPDEATLGLRRQVTRRTQIVRQRTRLKTIVQSILHAHLVPPCPNADLFGPRGRTWLLAQPLPADETDAVARHLREYDRLSEDLKVVERELAREARADANVTRLMTIPGIDMVVAVGLIAAIGPVARFSGPDRLVAYLGLNPSVHQSGSGKPRHGRITKQGRTHARTMLVEAAWQAVRGPGPLRAFFQRVSARRGPHVAAVAVARKLAVIIWHLLTRGEDYAWVRPALHAKKLRELELRSGEPARRGQRGAAYAYNLTRVRQEERRRIEQAEVAYRRLTEGWSRRGRRVPTGAAKEERL

SEQ ID NO: 351370 - protein, 482 aa, unidentified
MKKRNIYQNRSQELLSLFEDAGSSATVMCVPMDFAKKDHVVMFCNGYGDIVRKPFSVKNSLEGVKYMVDQVTRSCRHRGIKKKHVFFGGEDVNSYAENFVNTLRSKGWLVAGVNAHDAKKQRANLQASTDRLDLMGIATMLLNCRANCCPAQSGIYRNLRTIVRHRRKLVVMSTEVRNRIHGVVDRLFPGFLDESRTGIVPFTQSSLYLMEDRFSARQIRRRKAQTLIEILRRFGTKEPETTALKLRQYAKHALNTPVEYVSTLQLSLAQHVKHLKCLNESINQLEKEIAVNLAQTQGAFLTSFRGIGIVLAAGVTAEIGDPHEQKPLNNLVSYSGIIPRVKQTGGPDGKTYTFSVGKRCNRILKDYVVKSALHLGLHGPDDLMIDYKRRDASGQHANFGIGRRYLRTAISLMRSSQIYLPPQLRKAGTKPQERASYYLTIWPYLREKWQKYGALKAAFDKNRPLGQWRSIVQDLYGLKLKI

SEQ ID NO: 351371 - protein, 371 aa, unidentified
MEHTRFVGLDIHKERISIAVAESGRSCAVEYLGEISNDPVAISKLCDRLERPSKTLAFCYEAGPCGYGVHRQLISLGHRCDVVAPSLIPTRPGDRVKTNRRDATMLARLHRAGELTPVWVPDADHEAMRDLIRLRSVVRQIVSRARQHLQGFLLRHGRKHGRGTAWRMAYRRWLSTLAFEHPAQQIAFQDYVDAVMDAERRLQRVEEQISGLLPEWNLRPVVDALQAMRGIALITAVVLVAEVGDFTRFANPRQLMAYFGLIPGEQSSGETIRRGGITKTGNAHARRALVEGAWAYRMKARIGRHKVDRIEALPKVVRDIGWKAQVRLCTRYRRLSARGKTANVVNVAIAREMVGFIWSIACTVQSAPKTA

SEQ ID NO: 351372 - protein, 312 aa, unidentified
MEKLSYGGIDVSKDRLDVVVLPEGWFFSVSNDTAGWAELVARLRPLAVCAIGLEASGGYERGIIRALLAAGLSVRRINPNKLRQFARARGVLAKNDRLDARLIAEYVAIMPTRVVQRDGAVERLAEVVTMRRQLCDEHVAVENQAAHLQDAMLRRLSKRRLVRLEADIRLLDKRLAEMVATNAAFAQLYELLTSMPGVGPVLAFTLIALLPELGKMSRKQIAALVGLAPYDFDSGKLRGHRSIYGGRMPIRNVLYMAALSASRYNPALKTFSNRLAHANKKSKVIIVAVMRKMITILNAMLRDNAAWQPRSA

SEQ ID NO: 351373 - protein, 456 aa, unidentified
MSKLSRPNVGMEEARPFGGMSQVHAHAAGVDIGAHEIMVCVSGEDATQIVRSFGSYTIDLQAIGMWLEEHEVQTVAMESTGVYWIPLFEELERRGFHCHLISSRSLHRVAGRKSDVVDCQWIQTLHAYGLLESSFRPEADLVGLRTLLRHRAQLIQHRAPHILHMQKALLQMNIQLSQALSDISGTTGQAVIRAMVAGERDPHKLATLRNYRCKKDEAEIAKALTGTWRTEHLFILKQSLELYDFYTRQLEACDAEIEPIYSLVRPDWEQLDPNQPPDGKRNSHSKNAPREVQVRKHLKRICGVDLTAVHGVSASLAQTIVMEVGTEMSKFPNEKHFCSWLGLAPKHEISGGKVLKNKTLKTKNRAGQAFRMAAGSVMRADCSLGVFYRRQKARLGPAQAAVATAHLIARTVYRMLKYKVAYEPRSVAEYEQHYREQQLKYLQNKAAKFGFQLIPT

SEQ ID NO: 351374 - protein, 402 aa, unidentified
MNAVGIDVSKGKSMVAIMRPFGEIVSAPFEIKHTAGDIHSLVELINSVEGESRIVMEHTGRYYEALAHQLSEANLFVSAINPKLIKDFDNDSLRKVKSDKADAVKIARYALDKWQNLKQYNVMDELRNQLKTMNRQFGFYMKHKTAMKNNLIGILDQTYPGVNTYFDSPARSDGSQKWVDFASTYWHVDCVRKMSLNAFIDHYQNWCKRKKYNFSQSKAEEIYGKAKELVPVLPKDAITKLIIKQAVYQLNSASTTVESLRTLMNETASKLPEYPVVMAMKGVGTSLGSQLMAEIGDVSRFTHKSAITAFAGVDPGVNESGSYEQKSVPTSKRGSSDLRKTLFQVMDVLIKTHPQDDPVYQFLDKKRAQGKPYYVYMTAGANKFLRIYYGRVKEYLSSLPES

SEQ ID NO: 351375 - protein, 343 aa, unidentified
MKKVSIIGVDLAKNVFQLHGAAADGTVLFRKKLSRPQFQRFISEHPRCLVAMEACGGAHHWAREMERAGHEVKLIAPRYVKPFIKRQKNDAADAEAIVEAALRPTMRYVEPKTAEQQARSILFRTREQFVKQRTEAINALRSHLYEFGYVAPEGIGYLPRLEAVVDDPSTDLPPLAREICRELLDQIAHLTGRINAMKKRIDAIAREGETSRRLQTMPGVGPISALAVETFAPPMDQFKRGRDFAAWLGLVPRQASTGGKQRLGKTSKMGQRDIRRLLITGAMAVVRWALRHGAPQNPWLARLLERKPPMVAASALANKMARGIWAMLTRGEDYRGPAIGSAA

SEQ ID NO: 351376 - protein, 401 aa, unidentified
MLQEPLNRATVKGDKAMKDFITHVGLDTDSHGIDVAIAEGFGSENWEVRSWGRIAADLEAIDKLIKQLKRKGYRRLRFSYEAGPTGYGIYRHLQKCDDVECIVAAPSMIPSKPGDKIKTNRRDAMKLARLDRAGDLTAVHVPDEEDEAMRDLSRSRTTGVDGVTRIKLQIKSMLLRHGIKYNGVGKNWSYRYRTWLRSVKFGHQAQNQVLQEWLVALEEAEARVKRFTDQIEELLPQWKMNEVVLALQALRGVAMITAVEMVAEVGDLTRFKNPREIMSYLGLVPREHSTGEKRRQGSITKTGNGNVRRALVESAWAYSRGPCLTRALQKRQQGLPKEVKEISWRAQVRLTSRYRKLVSRGKSTRNAVVAVARELCAFMWAIAMAVEESKNSAGREKQAIA

SEQ ID NO: 351377 - protein, 420 aa, unidentified
MAKKGTKVRIEDLQDIYEFCAGIDVHKAGVTVCAICGRGAELEAEVVEYGTTTAELRQLGEWLREQGVTHVVMESTGVYWRPVWQILESAGFHLLLANAKKVRNVPGRKTDQSDSIWLATLLRKGLIQGSFIPPQEIRALRDLCRSRASLVRDRTRVIQRIEKVLEEGNVKLDVVASDLMGVSGLRMLERLAEGETDTTAMAELALGRLRSKIPQLIEALEGSFRPHQLFLLKELLEQYDYLCKKIERFERQIEDYAHPFDTQIQRLDAIPGVNRLSATAILSEIGVDMSRFPTPQQLCKWATICPGNRESAGRKKPAKTGRGNHWLRGTLTQCSWAASHDKNTYLAVQYRRLLHRGKQRALVGVAHSVLNIIWHLLQHQIEYQDLGVDYFERQNLEGQKRAYVKKLEKLGFTVKIEPAA

SEQ ID NO: 351378 - protein, 349 aa, unidentified
MEHAGIDLGKRESQIAIITDAGELVEKRLRTERERLRRFFVDRPKSRILMEASTISEWVARVLEDLGHEVVVADPNYAPMYAQRSRRVKTDKRDAQALAEACRLGAYRPAHRTSDEQRHVRALLAVRESLVRSRVRFVALVQAILSREGFRVPTGTTRLFAARVRDLDLPEHLVTEIAPLLAMFEPLKDQIDDVDDQLVEMARRDERVKRLMTMPQIGPVTAVSFVATLDDVGRFRGAHQVEAYLGLVPREWSSSEVQRRGRITKAGNARMRWLLVEAAWRVATHKKTPETEALREWADRISRRRGRRVAMVALARKLSGILYAMWRDGSAYDPAKLGGAQGTSATKAA

SEQ ID NO: 351379 - protein, 411 aa, unidentified
MSKTLLVGCDVSSQLNTVCLMDPEGKTIGHQTFSNTLSGAETLEGWLLKTLRENDFSELKIATEATSFLDLHLVDFLASSRELAPFNPSIYQLNPKLVRNFKRVYPDKEKTDKVDAFVIADRLRFGRLPEPYESHQPYLPLRRLTRYRFHLIKTIAREKAYFLTHLYLKFSAFSLEKPFASLFGATSLALITDFSPDELVRLPLEELTQFVIDNGKNRFKDPQKVVKTLQRAARESYRLRPALASSIDLILGSILQTLRALQQALKEVDRAIEKEFGAFPNTLQSIKGIGPVYSAGIFSEIGEIRRFPREDALAKFSGLYWKKYQSGNFEAEETRMSKSGNEYLRYYLIEASNALRVHNAEYRAYYETKFKEVTKHQHKRALALTARKLVRLIYALLKKGQLYRANYQQEA

SEQ ID NO: 351380 - protein, 391 aa, unidentified
MEKAWLGVDAGKESHWAHMLDTFGTVLLSRRVKNEEADLSNLIDDALLLAEEVVWAVDQPGGGAALLLALLWERNQRVLYVPGLTVDRARDAYRGESKTDARDAHVIADQARMRPDLGKLEPGEQEIAELQLLLARRRDLITDQSRTITRLREALLSLFPALERALDLNSKGSLTLLTHYQSPAQLRRAGHKRVATYLRNRSVKGSNKVAHKALAAAQDQSVSLPAQELASRIVAELAKDVLSLKERIESIDEELEKRFFARPEARILISLPGMGAILGAEFLVAVGDIRTFESADRLAAYAGLVPAARDSGKRVGYHRRMRGGNKTLKRVFYQSAFSSLRGCAESRAFYDRKRAEGKRHTQALIALARRRVNVVWAMLRDETTFESRSVA

SEQ ID NO: 351381 - protein, 329 aa, unidentified
MNRAAVGIDVSKKTLDVALTVDGKEIVSSGQFANDAKGHKALLKWVNKQSRKHSAGEVHYTMEATGIYSEDLHEFLSEAGELVSVENPMKVKSFSQMQMMRTKTDAVDAAVIARYAWITKPDVTPPAEPAIKRLRALVRHVEHLTGHRAQEANRLEGARDKLVIKSIKAIVKRYDQEIEKTMEEINKHVDDNPDLKKKRDLLTSIPGIGEKLSSQILCEIKSDAMSVKAQVAHAGLAPRQRVSGTSVRGKTQICKMGNARLRKALYMPTMSAIQYNPHIREFYLKKVGQGKHKMVALCACMRKLLVIALGVLRNGVPYQEDWVSRRPVG

SEQ ID NO: 351382 - protein, 350 aa, unidentified
MIIIGCDYHPGFQQIAFVDTETGDYGEQRLEHSEGAEKFYRDLAAQGKKVRVGMEASGHARWFERLLGELSFELWIGDASEIRAKRVRKQKTDRQDAQHILQLLMENRFPKIWVPSGENRDLRQLLWHRHRMVQMRTRIMNQLQAVALNEGLRCKKRLWRQHGREQLESFRLAPWASRRREDLLQLLDRLNPTIADLTQVIEQEVEKCPEARRLRTHPGVGALTALAFVLIIGRAERFQCGKQIAAYLGLVPLEDSSGNRRRLGHITKQGSSMLRFLLVEAAQVTARSIPEWRSKYFHLAMRRGRKIAKVAMARRLAIALYWMWRKGWNYEQSRKVGSHAGKLGTGDVVQ

SEQ ID NO: 351383 - protein, 475 aa, unidentified
MNLKGKKTKNQVVTANIFEQQELLKKAEVIREKLTASTWHELETNGKFDKNAKLSFISDDMLILGCDVGSETHYLRAIDPRGRELSKSAYSFRNNCEGFQSAKEWAVELAAKNEKKQIVLGLEPTGHYWFCLATWMIANGISVVQVNPYAVKQTKEVEDNSQLKDDTKDPKLIANLVKDGNFGMPYLPEKVYAELRRLSMFREQLNEDRIRAINRMHREMKIYFPEYKEALGRVEGAFSLELLKQTPFPEEIQTLGEEGIRQIWHDAKLRGRGYSRVREIVGYAKTSVGMKDGAEASAMAVKWFVKEIRELDEKLAEIEKLMREKYQEIPYAKNILEISGIGENTLSGILAEMGDISRFDDVKEIQKLSGLGLVACSSGKHKGETKISHRGRKRLRYWLVQAAKSAVAHAEEFKELHVYYTTRADNPLKKMQSLIVIACKLLRIIYGILKNGTVYDPKKMLRDIRRPEKKEVIAA

SEQ ID NO: 351384 - protein, 400 aa, unidentified
MMTPDDIDVWVGLDVGKSAHHAHALDHDGNTLYDKPLKQDEKAIRTMLGKLSKHGRVLLVVDQPNTIGSLPLTVARNMGIAVAYLPGTAMRRTAQLLPGDAKTDRRDAHVIAWAALKLPETLRDAGPDDETLAALKLLAGHDEDLAHESTRHVNRLRSLLLQTHPAFERALKGERITRDATLALLERYGGPMGVKRAGIEDVKDWAKSNGLRAGRIIDDMFKAIGEQTVTVPGTLMAETIIPSIARDIKTIRDRRREVGRQVEKLLEDHPLLTVPASMPGIGVRTASNILLGIGGDIANFKSSAHLAAYAGISPVTGQSGTSIKGERPSRRGNKRLKNALWQTAFVASTKHPPSVAYYKRKREQGKHHNAAIICLARRRCDVIYSMLKNGTLYQEPALVA

SEQ ID NO: 351385 - protein, 345 aa, unidentified
MAIVEVTRPVTGGVDTHLDAHVAAVLDGTGGVLGVESFPTTPAGFTELHDWMIRFGDIERVGVEGTGAYGAGLARFLRGCGLEVIEVDRPNRQARRQAGKSDPADAVEAARAVLSGRATGIAKTGDGAVEAMRALLIAKRSGREARISCLNQLRHLGFCGPDDLREAFRGVPRTALGARAAALRPRVGGDDVAHATKIAMRTLGRRVLALDADNDELDALLAGLVHTTAPDLLGVYGVGVDTAAILLVAAGDNADRIRSEAAWAHLCGVAPLPASSGKITRHRLNRGGNRQANHALWRIVFTRLGSQPRTRDYLERRLTEGLSKREIIRILKRYVAREVYRHLPR

SEQ ID NO: 351386 - protein, 351 aa, unidentified
MSHKTAATVAHTIGIDTGKNTLHLIGLDDQGAIVLREKVARGRIAARLANVPQCLIGIEAGMATHYVARELSALGHDVKQVPPAYAKPFRQGHKNDFRDAHAIAEAVQRPSTRCVPVKTDDQLDLQALHRVRSRLVGQRTAVINQIRGFLLEHGIAVRQGLRFLRQQLPDILAKRNDVLSPRMIRIMEDLSGDWRRLDERIEHVTEEIEVLAHGSESCRQLMTVPGIGPLIASAMVAAIGNGIAFARGRDFAAWLGLVPKQMSTGDRTILGRITKRGNRYLRMLFMQGARVILLRPANWAKHSFGAWLTAAAKRLHHNVLATALANKLARITWTVLAQGRSYEARVEPRTV

SEQ ID NO: 351387 - protein, 418 aa, unidentified
MTKSFDNTFIQIIHPVCCGLDVHKDKISACLITLDDNGKEQSEIMEFSTFTKDLLKMKKWLSENDCPILAMESTGVYWHPIHNVISDSMEVILVNARHIKNVPGRKTDISDSKWLAGLLRHGLLKGSFIPPENIREWRELTRLRKTYTESFADYKRRIHKLFITANIKIDSVVSDLFGLTGRNLIDLLCNEADLTLANIEKCTKGSLKKKSLELHESLQGFFKEHHRFQLIGMMDTIITFEKRVTEINERLQHLTKGHQDLLDRLDEIPGIDKKSAQSIVSEIGVTLDEFMTMSALVSWAGLCPGNNESAGKRKNGRNSVRNHPFKTILVQVAWAAVKTKGSYYKAKYYKLKARRGAKKAIVAIAHRIAKAIYKIIKHGDTYRDLGEDYLAAPSRQKVLMNLNKKAKEMGFKLVPCEA

SEQ ID NO: 351388 - protein, 267 aa, unidentified
MYSFYLGLDLHLKKTYAVLLDAQGDTRDERHIANEELPTYLHEVVPPKTYAVLEATRNWPFVYDLLIGHVDRVELAHPKELKAISSAAVKTDRIDARVLAQLARLNYLPIAYAAPATTRDLRLLMRHRSQLVWARTRAKNRIHALLAMYNLDAAVTDLFGTRGREILEQELCPQLRPAARKGLENHLGFIDALNAQIAATEAAIELTPEQRQAVHLLTSMPGVGKTIAHTIVAEIGEIQRFHSPKALCNWAGLTPRVRQSAAITQHG

SEQ ID NO: 351389 - protein, 419 aa, unidentified
MSFKILKNNCCGLDVHKTWIYACIGITDSHGRTEYKQARFSSFSNGLQKLCDWLAKYHCTDVCMESTGKYWIPVFNILEKNNICITLSHPKYTKPQKGNKTDRKDAKWICDLYMCGMVKPSFIPPADIRELRDLVRYRYKLTCMITGEKNRAQNCLTVSNLKLDDVFSDVFGKSSRSITEQILQRPGETFDVAPFVDSRCKTPIEEIQAAVDGTISTEQAVKLRHCLNHIDELEMHKAEIEREIFRLSDKYEDALSLIRTVPGFDKNPMTAIQVLSEIRGDMSVFPTAKNLVSWAGCCPRNDQSNRKIKSTRISRAGSYFKPILVQVANALIKSKKHPEITNRYRRIKARRGHKKAVIAICRMLLTAIWHILTDLKPYTPEGFLEQRPVNGAKVLTTSQALNLLKQRGYIIKDDVIPVS

SEQ ID NO: 351390 - protein, 340 aa, unidentified
MPLYGGIDLHANNSVVVLLNEQDQVVYQKRLPNDLPTILEVLAPYHAEIKGLVVESTYNWYWLVDGFMEAGYRVHLANPAAMQQYSGLKYSDDHSDARWLAHMLRLGVLPEGYIYPKAARAVRDLLRKRAHWVRQHTANVLSVQNIMVRNTGARLSVKRIRELPKKELEGLLPEADQVLAITSSLAILDCLSQQIKALEKIVHQRLHHTPSYEQLLTVNGIGTILAQTITLETGDIHRFPTVGNYASYCRCVDSNKISNGKRKGQGNVKNGNPYLGWAYMEAAQYALRFHPSAQRFYQRKLAKSNNNTTLARKAVAHKLARACYDVMRDLVPFEATKAFG

SEQ ID NO: 351391 - protein, 409 aa, unidentified
MTAVMIGVDPHKGSHTAVVIGPAEEPLGEIRVRASAAQAEKLAEWAAAWPERTWAVEGAAGLGRLLARQLVAAGERVLDVQPKLASRVRLLQAGDTNKNDPNDALSVAIAALRSRTCRQVAAEDHPAVLKVWSKRHRDLARLRNQVACRLHAVLCDLVPGGTSKQISAAQAARILGQVTPSGAVELARAELAAEFLEDMRHLDAQLRGTRTKLAAAVKVSGTTLTEVFGVGPVIAGTIIGDIADVSRFPGRDHFAAYNGTAPVEVSSGNRKIHRLSLRGNRRINHAIHMAAITQIRHKHSEGRTYYEKKLAEGKTHKEALRSLKRKISDAIFARLQADARQAAATRAKGPGGHPGNDSASSAAGSHPARQLFGQATPGPGTSLRPGTTTGTPSKRVSKGCIFLKGMILC

SEQ ID NO: 351392 - protein, 375 aa, unidentified
MGDCNEAFVAFDTSKLRNAVAIAEGGRGGEVRFLGEIENSEAATAKLVRKLERQYQRLTFCYEAGPTGYGLHRQITELGHECIVAAPSLIPKRPGDRVKTNRRDGVSLAKLLRAGELTAVWVPDRGHEAMRDLTRARETAMLDLRGKRQQITSLLLRQGRHYQEGRKPWTKIHKAWLMRQKFDHPERRLVFEEMMLAMRQAEERLVRLEQAIRIAVPEWSLAEAVIGLMAMRGIDLISAASFLAEMGDLSRFPTPSELMANLGMVPSERSSGERIKRGPITKAGNRRARRLLVECAWAYRHPPRVGVTKQAKVAAAPRAVGEIAWKAQHRLYGRYRTLIRRGKLKNVAITAVARELAGFIWAVSREITVAGAAAT

SEQ ID NO: 351393 - protein, 327 aa, unidentified
MDQEGKVLAKSRVSTDRPAIQNYLKSLDGLKPTKAVIEAGFNWSYFYDQLAEEIEEVCLAHPLKTRLIAEARIKTDSLDSETLAHLLRSDLIARAYAPSWETREVKNLLRFRISLVRIRTSLKNKVHSVLDRHQVEDNVFRGLTDKFGKTGMKIMRSLELRGNDRAILNGYLDLIEELSRRIAALNKQIKALVKEDEISSYLKTVPGFGDLLGLLLRYEIDNMERFASAKKLCSYVGIVPSTYSSGGKTWHGRITKEGNKWRRWVVIEAVHGAIITSPSLRRYYNSVKQRRGDKAATIALARKLLEIIYHVWKEKRPYYEKELAYTV

SEQ ID NO: 351394 - protein, 342 aa, unidentified
MPSLAVLHAFVGLDYHDSVVQVCVLDREGAVLGNDRVDNQLGAIVEFVDQVLEGRLVAGVAIESCCGAANLAEQLRHHGWTVELSHAGICSRMKQNPDKTDFSDAHLLADLVRVGYLPRVWLPPEQIRDLRRLTRHRQQLVEERRRIKLRIRAMLREERITPTADVGTVWTNSWKQWLKASSALSGHSRWVMDSHLANLDRVNEQIRNVEQRMEESTKDDAVVQKLLAQKGVGLVTAVTMRAEIGCFRRFRCGKQLARYCAVTPKNVSSGKRQADGGLIQAGNLHLRNMLIEAAHRLARYVPKWKTLKDRLKSAGKPGSVAAAAVANRWIRHLYWEMQTTAA

SEQ ID NO: 351395 - protein, 343 aa, unidentified
MQVSTIGVDLAKNVFQVHGVDSAGKVVITRQLRRKQIIDFFSKFPPCLVGMEACGTAHHWAREVSKLGHTVRLMPPSYVKGYVKRSKNDAADAAAICEAVTRPSMRFVPIKSTDQQALLMLHRTRDLLIRQRTQLINALRAHLAEFGLIAETGREGLAQLAAVITDESNREALPSAMKQALQAIVDQLAALELQIGTLDRAIHAQHRANDMSCRLETVPGIGVIGATAIASTVTDPSDFKSGRDFAAWIGLVPRQHSTGGKERLGGISKQGDRYLRRLLVIGATAVVRHARQHPQKHPWVMRLLAKKPAKLVAVAVANKMARIAWAIMAKGGYYRAPELAAAA

SEQ ID NO: 351396 - protein, 453 aa, unidentified
MKEKNQISMEIINPKAAGIDIGSRSHFVAIGQKETDVREFGVYNEDLKSISNWLKDNNIQSVAMESTGTYWQALYAVLIADGFQVILCNGKFTKNIKGRKTDVQDCQWIQKLHAIGLLSGSFLPDLQTEQLRTYCRHRASLIDVAADTSKKMQKYLRLLNLRLDVIVKDICGLTGLKMIEAICNGETNPEKLAELRNGNCKKSEEEMAKALQSNGRKDFLFGLKQEFKMYQNLQSQIKECDIEIEKLLQEQIDNDPNKKQHYTDPKTHKRINKNTPKNIDLNLIGYQYFEGVDLLKIEGFSHQTLLTLMSEVGLDGIKKFGTAKQFASWLRLTPNNKISGGKVLSSRIPKGSNRLKIALRNAANAIGNLKESTPLRDFFHRINFRKGRVSAISATARKLGVIIWNMVVKNIPYENPENYLYLDQKRKLAVQKRLQKQVENYQFKPEDFNFTTT

SEQ ID NO: 351397 - protein, 437 aa, unidentified
MRFVGLDIHKKETEAVILDEDGRILHRQRIATSRAALEAFARRHLGGDAQVALEATTNTWGVVDILEPFAAEVVPSNPLRTRAIAEAKVKTDKVDALVLAQLLRCQYLPRVWRPDQPTRAMRHQTTRRAVLVSERTRLKNRIHAVLHQRLIHVPVPDLFSPKGRVWLGQLGLDPSGRAALDSDLRLLAAVDDELLAHTQELSRTGHGDARIKLLMTLPGVDLAVASALVGALGDIHRFPDADRAAGYLGLVPSTRQSANHCYHGPITKQGNSHARWLLVQAAQHLDKHPGPLGVFFRRLAARKNRNVAVVATARKLVLIAWHMLKNNEPYRYAQPKTVQAKLARLRVAATGQRRKGGIPKGSARPAAYGSGRRTRAIPALDDACTAEGLPHTRPLRPGEQRIVHERGLDDFVSQIHTSTRQLRHSEPRDKSQEDRIK

SEQ ID NO: 351398 - protein, 431 aa, unidentified
MCFAPAFGDEEESMGKINERCGGIDVGKRFLLCCVLTGAAHEEPRSQTRRFDATVSDLVRLREWLAAERITHVVMESTGSYWVPVFNILEGHFIIVLANPEEVKNRKGHKTDRKDAEHLADLLRHDHIRASFIPPKPIRDLRDLTRRRLQLIQDATRERNRVEKLLEHVNVKIGNVLSDVFGVSGQSMLLALLDGKTTAEQIAHLARGQAKRKIPQLTEALEGHGMRDHERFLIRSCLRHLACLEEEVEQIDGEILQRMQEPPFQGAFQRLQTIPGVGQLAAASILAETGVDLTTFPTAEKMASWAGLCPGNRESAGIKKGSQTTQGNSYLRTTLVQCAWSATRKTGCIFQTRFRELSPRRGQKRAIVAIAHQMLTVLHFMLKNDVPFNGAANAPTQRRRQRRAHHHLRCLRRLGISVQIVEPTESAPQTG

SEQ ID NO: 351399 - protein, 345 aa, unidentified
MQAVTIGIDLAKHVFQVHGVSAGDKVVFSKPLRRAQMLPFFARLKPCLIGMEACASAHYWARELKKIGHEVRLMPAKDVKAYVKRNKNDAIDAAACCEAVRRPVVRTVPVKTPEQQARLMQHRVRDLLIRQRTQAINALRSHLAELGIVAAQGYDGLKTLLSIVADESDARLPEDGRASLSALVNQIAACQAEISAIEKRLLAQHRKNEDSKRLETIPGIGIIGASAIVATVPDASVFKTGRDFAAWIGIVSREDSTGGKQRLGPISKQGNRYLRRILILGALSVVKRARCCPENYPWLTKLLARKPAKVAAVALANKMARIAWAVLTKKDTYHVPQITAALIPA

SEQ ID NO: 351400 - protein, 358 aa, unidentified
MNQATAARWIGIDVSKATLDVALLPETSTFQVANNATGWRQLVDRLDLPTVAGIVLEATGSYHRGVTGALAAAGLAPAVINPQRTHAFIVSAGKRGKTDRGDALLLARFGQQKQPTPTPVETETARQLTDLVACRDDLVTTLVREKNRLTVAGDGVRDIHQTTIAFLTTQIAAVEDRIATLIAADAELRERDRQLQSVPGLGPVLSPVLLARLAQLGTTDAKSLAALAGVAPHPQDSGTKHGYRAIGGGRPAVCKALFQMARTAVRGNPVMKAHYRQLVARGKPDRVAVIACARRMLGILNAMLRDGLTWQQTTVGQGQFLPDPARLPTRLLHQCGVADQLPSNYRRRGGPRSTVRGG

SEQ ID NO: 351401 - protein, 375 aa, unidentified
MKNVRFVGLDVHAETIAVAVAEGGGEVRSLGVIPNRTESVSRLIRKLGKPEQLRVCYEAGPTGYPLYWQLTQLGVKCEVVAPTLVPVKAGDRVKTDRRDAERLARCYRAGDLTAVWVPDAAHEALRDLVRAREAAKADQLRARHRLSKFLLRHGRRASEGVQAWTGKYWDWIKSAVHFEQPAQTATFIDYVHEVEHAAARIERLEQAIDAAVETVPPKMRAVIQALQALRGVAQVSAVTVVAELGQISRFARARQLMGYSGAVSREHSSGARIRRGAISKAGNAHLRRVVIEAAWSYRHRPNLGKALAARQRGQSEAVKEIAWKAQHRLFHRYRKLMGAGKAKQQVVTAIARELLGFIWAIGVHVERTQPRLVAA

SEQ ID NO: 351402 - protein, 354 aa, unidentified
MNDTKYIGLDVHQATISVAVRDSAGKLVLEAVLETKAETIIQFLRGVRGSLYVTLEEGTWAAWLHDLLLPHVTRVVVCDPRRNALLKAGNHNDRVDARKLAELLYLNELNPVYHGEHGLRTLRELGRSYIAITRDLTRVMTRLKAIYRSWAIPCAGEQVYAPRYRAEWLAKISEGGVRRRAEHYYQQFDALAVLRQGVRRELLAESRKHGATSLLRQIPSIGPIRAALLIAIMQTPNRFRTKRQLWGYCGLALRTYTSGEYRFDKGQLKRAKKVLAIRGLNLNHNHDLKNIFKGAATRAAAVGPFKNFYEACLARGMKPHLARLTLARKIAAITLLVWKKGVRFDAKHLKQQAA

SEQ ID NO: 351403 - protein, 343 aa, unidentified
MKYIGLDLHKKSIFATVLGEDGKILSKVKIGPTTRDIRYYLKSQGKREELSVAMEASYNWPYYYRAVEEAADTIVLAHPLKTRIIGEAKIKTDKIDSGVLAYMLKADMLPRAYVPSRDTMENKMLLRARISLVRIRTQVKNKIHAIVARNRDSYCGLENLADIFGRTGKHILRDTKICPTDHKILTGYLDLMDEINKKIKDTESQIDKRSIKDPDIELLKTIPGIGTFTAFLVKSEIDDISRFASKGKLSSYAGLIPSTHGSGERLHHGRIVKQGNKFLRWALTEAAQTSIRCSEYFRYHYSRIRSRKSGNSATIAVARRMLEIIYVMLKEGREYIEKPVDIK

SEQ ID NO: 351404 - protein, 353 aa, unidentified
MKKVLKEVAGIDVAQKELVVSLGRLYENLDIEIISYKVFKNTDNGIKSLINWVASNGNNANSVRYVMEATGVYHEKLAYALDESGFDLSIVLPNKISNFFRTLDINTITDKTASQAIMRFGLERKLDNWNRPKEAYRQLKQLTRERDQIVDQRSMVKNQLHAEKAEAVPNERSLKRIAERIKFLNRQEKEIKMDIATLLKDYPDIMERVKNICTIPGVGELTAVIVLAETNGFELIRNKKQLTGYAGLDVREKQSGTSVKGKPRISKKGNRHLRKSLHLPSLSSVKYNKSHRDLYARIVAKSGIKMKALIAVQRKMLELIYVIDKNRVGYENDYQQKRIPYTKVESTLLQTSL

SEQ ID NO: 351405 - protein, 375 aa, unidentified
MKHHETLVVGGVDAHADTHHAAALDQRGALIGSARFPTTPDGYRELFRWLSSFGQLELVAVESTGSYAAGLVRYLRSQAVRVREVNEPHAHTRRRLGKSDPLDAELAARAALSGKASAIPKQTDGIVESIRQLRVARQSAVKARSAALAQLQDLLVTAPEPLRAQLSGHKTTRGMASRCRRLRPALRELERPAHSARFALRSIALRIKILDEEIAALDRQLEWLVHRAAPRTTGLLGISTGHAGQLLVSAGQNIERLRGEASFAALCGASPLPASSGKTTRHRLNYGGDRDANRALHLIAVCRLRYCPRTRAYARRRATEGKGKAEILRCLKRYIARETYRTLSADLTDLDRHQPARSTTIYCGAGPIGITRCRT

SEQ ID NO: 351406 - protein, 345 aa, unidentified
MQITTIGLDLAENVFQVHGVDAEGRVVVRRKLRRAKVREFFAGLAPCLIGMEACGTAHFWARELIAMGHQVKIMPPSYVKAYVRRGKTDAADAAAICEAVMRPHMRFVPIKTEDQQAALMLHKARELLVRQQTMLTNAIRGHMAELGMVAPQGSAKIKDLIAVIQDSEDQSIPVLARAALQPLVHQMQTLDGQVEVLDREIMAWHKTNETSRRLATIPGVGVITASAIAATVPDPSFFSSGREFAAWLGLTPKQNSSGGKERLGRISKKGNTYIRRLLVTGATSMLRYARAKTAAAADWVNGLLQRRPARLVTVAMANKVARIAWAVMVKGENFRVPVRPVTEAA

SEQ ID NO: 351407 - protein, 370 aa, unidentified
MNRGITYVGMDVHKATIRVAMFLPGEQEPVEWKLDNRSTAVARLAKRLKKDSKGEVAACYEAGPTGYALMRQLESLGVPCKVIAPALIPKQAGDRVKTDRRDARKLGSMFRADLLTEVHPPTPEQEAVRDLCRARDDARDDRQRARHRLGKFLLRRGLSFDGSAWTKRHRSWLSTLRFDHDAAQATFEDYLRAVDAADERLLDLDRSIAAIADSDPYREVVGLLRCFRGIDTTSAMIFVSELGDITRFASPRQLMAYLGMTPSEYSSGAKQKRGGITKAGNAHVRRILIEAAWHYRHPARVGVGLRRRREGQPGWAIALADKAQKRLARRHRHLFSNGKTSTKANVAVGRELVGFIWATMMAQATGTTAA

SEQ ID NO: 351408 - protein, 418 aa, unidentified
MSRVDSNAVLSVVHHHCCGLDIHKDKVSAALITTHEDGMVEESIYEFGTFTEDLYRLKDWVLEHGCHVVAMESTGVYWRPVHNVLEDSCQVILVNARHVKHLPGRKTDVSDSRWLAGLLRHGLLKGSFIPERHVRQWRDLSRLRKTFVESLADYKRRVHKLLECANIKIDSVASDLFGVTGRNLMDLLVSGEEITLEAVLRCTRGRLKGKEDELFKSIKGFFTEHHRFQLESIRTLIEGVEAQIRRVHERLSSLLSDRREKIHRLMEIPGINDVSAHALLSEIGDTLDQFETAASLASWAGLCPGNNESAGKRHSGRSPVKGGHLKTIMIEVAWGAIKKKGSYHREKYYGLRARKGAKKAIVAVAHRILKAVFHVLKFDRPYQELGEAYLIQLNNKARLHSLHKQAAKLGYTLVPAEV

SEQ ID NO: 351409 - protein, 500 aa, unidentified
MKTKRSKAKIRVGQKRRSAICSKPEQKLEVLRPDAAGIDCGAEEHYIAVPPDRVGAGEPTVRCFSAFTEGLDAAVDWLKDCRITTVAMESTGVYWIPLHQKLEAAGIEVYLVNARHVRHVPGRKTDVQDSQWLRQLHRFGLLNASFRPQDIVCRLRSLHRHRDNLVSSSGSEIQHMQKALQQMNLHLHHVVSDITGLTGLRIIDAMLSGQRDPEQLVKLRDKRVYKSTPRQMQAALVGDYRAEHLFVLSQSLQAYRFYQARIEECDREIEPLLEKLALQVEAASAKLELGVLKPASAKDGAMTPELSNESKAGYGLKAKRKRKPIANEPKIDLAGLLERICGIDLTKVVGLHVLNALLIVSEIGVDMSKWRSAKAFCSWLGLCPGNKISGGKVLDSRTRQVVNRVADALRLAAQSVGRTETCLGIFYRRKLAHLGAPKATTATARKLACLIYHLLKYKQPYQEPDPAIYQLRLQKSALAKLQRQATALGYTLQPTSPLPA

SEQ ID NO: 351410 - protein, 332 aa, unidentified
MKEEYIGIDLHKAFFQACAVRTSGERLWEGRFPRTTEGVARFIARGVGVQQAIAVEASGPTWAFVDALTPTGATICVVDPRKTKLKAGFAAKTDRLDARRLADALRRESVVSIYVPPPAIRELRELCRGRHQLVRLRTRLAQMIRSLLLRCDAGEPPGTRLYAAPALMWLAQVQLAPDADRSLHRLERLYREVHRDADAADREVKQRAAADPIAVALDGLVGIGPVMALTIRAEIGDITRFRRGPELASYAGLVPSVDRSAGHVYHGRITRAGSPWLRWALVEAAVHALKRADATGGWARRLAVRKGVAKARVALARVLCDEVIATWRPRMV

SEQ ID NO: 351411 - protein, 317 aa, unidentified
MSTAMHTFIGVDIAQKHLDIAVEPTGQVWTESYDAEGLSRAIERIKQTTPDLVALEPTGNLEKPCMNAFLAADLPVILVNPQRIRNFARSIGQAAKTDRLDARIIARYAQAVRPPRRKLPDQDRQQLAELVVRRDQLSAMHAAETYRLSRVSPAMQREIQPHIAYLEACLDDLNRRIDQRIATHPIWAVHRNLLTSVPGVGPTVSAYLIACLPELGGCSHRQIAALVGVAPFAQDSGSRRAQRSIRGGRSRIRRALYMATLVALRYNQVLPRHYERLLAAGKRKKVALVACMRKLIVILNAMMKSLTPWRTQPTPQT

SEQ ID NO: 351412 - protein, 361 aa, unidentified
MNATTVAVDLAKSVFQLAVADEHWRVVETQRLTRAQFERWFLNREVSLVIMEACGSAHHWGRWFNALGIEVRLLPAQYIRAYVKRNKTDAADAAALLEAARASDMRPVRIKSVEQQALQGMHRIRSLWMGTRTSRINALRGFCREFGIAIPVGARTGIEAIGRVLADPNAAIPDLIRGTAKLLLEEIRLLEARIAQLERELAALARLSPACTTLLSIPGIGLLTATAMVAATSGDVSHFKDARHFSSWFGLTPKEYSSGSSRYLGRISKKGDRYLRMLLTHGARSVLRAAKVADNAGREVCGVRRWALDVQARSNHNKAACALANKLARICYATLRDRQPFGEPTVRLGKKINRESFVMPA

SEQ ID NO: 351413 - protein, 410 aa, unidentified
MERQVERCCGLDVHRDTVAACVRIGGGPGQRTQQHVQTFRTTAGDLVVLRDWLAAHEVTHVAMESTGVYWKPVYYALEADFTCLLVNAAHIKQLPGRKTDVKDCAWIAQLLEHGLLRGSFVPPAPIRELRDLTRYRKAVIQDRTRVVNRLHKTLEDAGIKLASVASDVLGISGRAMLEALVQGTTDPAMLAELARGRLRGKLPALRQALAGRFRGHHAFLIGQLLAHLDYLDEAIGILSGQVETVIAPFADALTRLDSIPGINQRTAEVIIAEIGVDMSAFPSAGHLASWAALCPGNNESAGKHKSGKMRKGNRWLRTALIEAAAGASRAKNSALQARFRRVLRHRGPKRAVVAVAHALLRAAYHVLADHAVYRELGADYYDRQHGQRVTRRAIQLLERQGYRVTLEPAA

SEQ ID NO: 351414 - protein, 435 aa, unidentified
MEEVEDEPLFCDRVAGIDIGKATVMVTIRVPSEARAKGRQQEAREFGTTRRELLALADWLRGWQVERAGMEATSDYWKPVLFTLEQEGFDCLLYQASQVKALPGRPKTDKLDSVWLARITEQGSLAGSFVPPEEIRRLRTHTRYRRKLVQMRTAQKERCEKLLEDAHLKLSSVISDIHGVSGRDMLRAIAAGERNPKVLAQMARGVMRSKIARLEQALDCSFFTGEHAFILTMMLDSIDSLTAQAGVLDARIADMCQPYQRQLEQLDEIPGFGITTAQDLIAEIGTDMNVFPTAGHLASYARQAPRVKESAGKRKGKNATGRGNPYIGGALGEASISAGRTQTFIGEKYRRLTRRMPKRKAQVAIMRSQLVIAHALLSDPDARYQDLGPDYYERKADIRRRARNHARALERLGYKVTLEAIDPGTGELHLVATAG

SEQ ID NO: 351415 - protein, 352 aa, unidentified
MDITTAGADLAKNVITVCAQDRSGRTMERRDLRRDAFLAWLRRLPAGCIVGMEACSASHYWAREMGAIGLQPRIMAAEFVQPYRKSRAGKNDRNDAEAIAIAVRDPNMRFVAVKSVEQQARLARHRVREGWKEERTALGNRIRGLLGEFGLVIPKSRAALAKALVEALHDERVPEPVRELVRATREHLDLLGKRIADCDRAIGLACRGDPAAKRLQEMFGVGPTSADAAVATVGDARAFRNGRQFAAWLGLTPRQFSSGGKTRLGAITRRGDAYLRTLLVQGARSALKAAQRCAPERASRLQQWIVQLHARVGFQKTLVAIANKNARVIWALLAREETYNPEAWKAYAPAKG

SEQ ID NO: 351416 - protein, 320 aa, unidentified
MLSFCGIDVSKDRLDVMVLPEQQCSSVRNDVVGWSELIERLRGFSIAAIGLEASGGYERGVMRALLAAGMSVRQINPFKLRQFAKASGVLAKNDRLDARMIASFVAIMPTHPAQRRSPAVEQLAEMVTVRRQLSDAKISVENASRMLENAMLQRLSRHRIARLAADIAAIDERLVEIVVSDAALAHRYRLLTSMPGVGAVLACSLIAFLPELGQLSRTKIAALVGVAPYDFDSGKLKGMRCIWGGRASVRSVLYMAALSASNWNPTLKAFHDRLAATGKKPKVVIVAVMRKMITVLNAMVRDGIVWVDRQNGRHSVPTAR

SEQ ID NO: 351417 - protein, 487 aa, unidentified
MRPRTTNSSTQTFDVYRFSFESAGALAFVNEYSGFAVQPAHYIAFAERKLARPGSPIYHCRRCSVKPLSERPFTAHVGIDWADAKHDVCLQAADSEQREFDRFAHQVGSIDQWAKSLHQRFGGPIAVALELAKGPIVYALQKYDFFVLFPINPATLAKYREAFKPSGAKDDPTDAELALDLLLRHPERFAPLKPQSVAMRTLLSLIEQRRELVDDKTRVTNRLGNALKQYYPQALDWFEQRDTILFCDFLSRWPTLSAVKRARKAGLQAFFYAHNGRRPKLIDDRIDSIRAATPLTDDMGVIAPYRLQVQVLVEQLRVTLQAIDRFDRQIAVVAATLPDYALFSPLPGAGPHLAPRLLAAFGEQRERFMSADELQKYSGIAPVTERSGKKRWVHWRWQCPTFVRQTFVEWAGQTINKSFWAGVYYRQQRDKGSSHQAAVRALAFKWIRILYRCWQAGTPYNESTYLNALRQRGSPLLKRFHPTAQNA

SEQ ID NO: 351418 - protein, 449 aa, unidentified
MREPQELQDEEYEQVVGRVAAVDVAKASGMVCTRVPHPSRPGRRLSRVWEVAATTGAIIGLAEQLVGQGIEKVTVESTSDYWRPFLYLLQAGGLSVQLVNARDVKNVPGRPKTDRLDAVWLAKLTERGMLRPSFVPPAEIRQLRDYTRLRVDLTHERARYWQRLEKLLEDALIKVSSVASTLDTASTRDMVEALIQGQRDPRVLAGLARGKMKAKHAALVEALTGRFDDHHAELARMLLDQIDALGAQITKLTARIQQLLGAIPAAQGVDADGTTGPGAGSGTDAAVLPAAARLDEITGIGPGAAQVVIAELGLDMGVFPTPGHLVSWAKLCPRTIQSGAKTRAGKTGKGNPYLKGVLGEAAAAAAKTDTFLGERYRRLVKRRGKLKALVAVARSILVIVWHLLADPAARYHDLGAGYWADRIDKGKKARNHIRQLEALGFTVTLAPAA

SEQ ID NO: 351419 - protein, 418 aa, unidentified
MSLKIVYPICCGIDVHKTFVVACIAATNNKGATTYKRHRFSTFTKGLRELSQWLCKNNCKDVCMESTGKYWIPVFNVLEDSCNITLAHPKYVKAIRGKKTDKKDAKWIADLFKHELVAGSFMPPLAIRQLRDLMRYRFKLTNFTSSEKNRFQNSLTVSNIQIASVVSDTFGKSSMKIIDKFLEDPTNTTFDIKPLIHGSMKDKVTDLELAIGGFITPEQAGKLSVIKHHYENLNARKSDLEQWILSLAEPYTEEINLILTVPSFKNIFSAIAVVSEIGVTMDVFPTAKHLCSWAGLTPTNNESAGKKKSVRVSRAGVYIKPLLVQCATAVVKSEKHPEIRTRYLRLKKRRGHKRAIIAIARMLLIAIYHILKKKEPYNPELYQKSDVFPFSREITVDQAILLAKSQGFKIMMPETSVT

SEQ ID NO: 351420 - protein, 355 aa, unidentified
MTNTKYIGMDVHKESISIAVMNSTGKFVMECVIETKGSMLLQFIDGLRGDVRITFEEGTWAAWLYDLLKPHVSEIVVCNPRKNALLKDGSKSDRIDARKLAELLRGNHLKPVYHGEQGLRTLKELARSYLNISKDVTRVMNRLKALYRSWGVACAGTQVYARRHRSEWLGRISEAGVRQRAEHCYQQLDVLRLLHQQVRRDLLLESKKHQAWRLLGLIPGIGPIRAALLIAQIQTPHRFRSKRQLWTYSGLGLETHDSAQYRVVEGQLQRSKKPVKLRGLNQDHNHDLKDIFKGAATTASSSSGPFHDFYEHLLAQGRKPTMARLTLARKIAAITLIVWKKEVRFDASYLKSQAA

SEQ ID NO: 351421 - protein, 399 aa, unidentified
MFVGWDWASTTHDVTVLNDAGAVVDRWAFRHTEQDLVAALDRLARLAEPAALPVIIERASGLVVERLLAAGHPVVPVHPTAFWAARPRWGASGAKSDPGDSDKLADYLRTDGHRLRRLDPPDLGLQELQALVRLREDHVRARTAASMKLGALLEAHWPGPKAVFFRLASPIALAFLTDYPTPQAAARLGQARRASFCRRHSYRGGKTPAELLARLQSAPTAPVGIPAATLAILVGAQVQLLRTLLGTIAELDVAIAKRVVLHPRAKLLASLPGVGIINLAQLLAEVGPVLDRVANAEQAAAECGAAPVTRASGKTSGVYFRWAANRRARKALTAFAHNARMQSPWAGRLYADARARGKRNPHATRIVARAWLRVIWTCWHTSTPYDPGAHLAEQRLVAT

SEQ ID NO: 351422 - protein, 350 aa, unidentified
MKKISVGIDFAKEKFDMTAINVTNGAIVHAQFKNAPCGARDMIRTVKKIARGIETTQWIFCGEDTGYYSQCVTRYLAEKGFFMWLQNAYSIKKSEGCIRRGKNDKADSKAIAEYANRFQDKAVEYKLPQKELEELKMLLSQRDLYVSAKTKLQNSTSEIPTSKSGGEAVRLIKATNKRLCRQLEQEIKRIEDKMDDIIGTDESINENYDILTSFTGVARINAITFIVYTDNFKKFQLNARKIATFWGVAPFSRESGTSVHSAPHVSGFCNKQFKALISNAATVAIKFNPVIKAYYNRAIEKGKCPMIAKNNVKNKIIHILTAMIRNKQKFNPEKIFTTEENVKSVNLLAS

SEQ ID NO: 351423 - protein, 493 aa, unidentified
MNIGEALVALPQVRFRVTANLGGRARKGGLQVLDQQGDERRGSSRRKPLEGLPVIRRGVAGIDLGSERHWACAPTADGSGREIADFGATTPELVRLAKWLQDRQVKSVAMESTGVYWIAPHEVLEAAGMEVLLVDTRQLARVPGRDKKTDPSDCEWIQRLHSCGLLRGSFRPKEAVCMLRTLVRDKANLVAASGDWVRRMQKSLDQMNVRVHRAVSDLDGVTGMAILRAIVGGERDAGKLAELRDPRCRKSEKEITEQLSGHWREDHLFSLRQSLHMYDAIQQRLADYDREILRKLAVLQREEYRQQPPPKVKNPQKAQAIKQRGEEPMREALYRMSGVDLTSIDAIGVETVQVVLSEYGPDLSRFSTEKEFVSHVTLAPRRPMSGGKPVRKKRRNTASTRVASALRMAALSLRNSGTALGAYYRKIARRIGGSVAVFATARKLAILIYRLLRWGQRYVDEGAEAFEQRYQEARMRALKAKANELGLALIPKA

SEQ ID NO: 351424 - protein, 465 aa, unidentified
MTTAKLWRNRKERKDWARRLRSEDPGLEVVHPHAAGIDVGNSAHYVAVRPDRDPEPVRRFECFTADLYRLAEWLESCGVKTVAMQSTGVYWIPLYEILEEHGFEVYLVNARHTKNLPGCKSDVQESQWLLKLHTYGLLNNSFQPSAEIRVLRTYWRQRAEHVSGAATCIQRMQKALTQMNLQLANVISDLSGVTGQAIVRAIVAGERNPQKLAELSDPRIQASREEVAKSLEGNWRPELVFVLRQEVEMYDAYQRRIAECDQQLQKHLASFADTELPQSPKAESKEKRAKSTKNAPRFDLSSELKRITGVDLTRIVGIDVMVAQTLLSEVGMDMSRWNTEAHFSSWLGLCPDNRISGDKLLGKGTRHVVNRAATALRLAARNLIRSRSYLGAQYRRLRTRLGAPKAITAMAHRLARLVYRMLKYGQQYVDKGTEFYENRYRQQQIHLLQKKAAKLGLQITVAVQS

SEQ ID NO: 351425 - protein, 320 aa, unidentified
MSDSLVIGLDVDSKEFVPAVADCKAGERTPNTRAGIAKWLKTLPPRCRIGMEATGKHHELVARMAGQVGHVVYVINPRLIKNYAKATGARGKTDAMDAQVIARYVKKESDRLREYVPRSNEQQQMHDLLRKRQTLVEARARLEQSFDVTKSDPRELADIFRALASTLSALESDLQRLGRDGEQGPLYKRLLTIPGIGPAVAAHLVYYMTRWPLANANAWIACTGLDPRPNESGGRTGRRRLSKQGAPILRQMLYMAAMGLKRCRNGQPLYEALSKRGHPSTAVFNILARKLARIAWGVFKSGRDFDPAMLKVGQACFQQA

SEQ ID NO: 351426 - protein, 400 aa, unidentified
MLSIGIDVSKGKSTVCGMKPGGEIVYAPFEVQHTREGMSELVLLLHNSGEEVRAVLESTGSYHCPVVAALLENGIFVSVVNSLRMKRFCSQSIRKVKTDRIDAMQIALYGLAYWQELQPTKLPEDTYRELQLLARQYYQMTSLLIKAKVDFNAICDQVLPGMQELMNDHAGRHKLSDFVLRYRHTTHILEMGETRFRKDYCKWAEKKGYRNCERMAVLIFATAQNGIPVLPNAPSTQIVITEAIRVLHTVEASRDAILTQMQALAKTLPEYSLVREMPCIGDTLAPRLIAEIGDVRRFHSKRALIAYAGIDAPPYQSGKFCANNRHISKRGNRYLRKTGYEVMQSYVMHKPANDPIFTFIEKKRGEGKSGKLAMVAGLNKFLRVYYGKVTELYRSLPAIE

SEQ ID NO: 351427 - protein, 353 aa, unidentified
MKCDKYIGCDLHQATTVVTVLDAEGKVAMETIIATEAAAMIRFLKSLSGPLHITFEETTQARWMYDVVRGYVSEAIVCDPRRNKLLAEGSKADKPDARKLAELLRAGLLRPVYHGHEATRQLKELVRGYETLSVDTRRVMVRIKSIYRAHGIRTSGTAVYQQKQREQWLPLLSEPGTRQRVSWLYEELDHLRPLRKQAKMAMVTEGRKHQAFRLLRTIPQLGPIRCAMLVATVDTPYRFRTKRQLWAYSGLAIVTYMSSGYEIKAGRVVRSRKPVATRGLNRNCNRRLKDLFIGAAVAGSRSEPYRSYVEGLQQKGIRAEMARLTLARKIAAVALRVWKKGEAFDPKKLNSTT

SEQ ID NO: 351428 - protein, 344 aa, unidentified
MKKVLIGIDFSKEKFDVAIIVKSTSTQEHALFDNKVSGYRKMIKWINSVVEDIPCSSWLFCGETTGGYSRMMSDWLYAQGYDVWIENALVIKRTFPLKRLKNDTVDAFMIAEYALRFEDRVQLYEPMNQALTELREIFLYRHHLVRHRCSFEVRRIEKRFTQQKSVNKNVISQSARHIITEINKEIAKCDEKIKEYIESDDQLSSIFAIVTSMPGIGTINAVSLMVYTNNFTKFAYNPRKIACYYGIAPFGRDSGTSVHTDPRVGFIANKMLKSLLTQAALTSVRTCPQIAKNYQRLIERGKKPMVALNNVKNKMIAIITAMVRTGCMYQPDNICLATQSVNVK

SEQ ID NO: 351429 - protein, 415 aa, unidentified
MALKIVYKICCGIDVHKTFVVACIASTNDKGVTSYESHRFSTYTSGLKTLLQWLLDRDCKDVCMESTGKYWIPVYNILESDCSIVLAHPKYVKAIRGKKTDKKDAKWIADLFKHDLVAGSFMPPADIRQLRDLMRYRFKLTCFKSSEKNRLQNCLTVSNIQLGNVVSDTFGKSAQAILDKLLENPADTTFDLEPLVYKSLKKKLPELRDAIDGYITPEQAGKLKVIKAHYENLESRKAELEELILALAAPYQQELTILQTAPGISSPFTAIGIISEIGTNMEAFPSAKHLCSWAGLTPTNNESAGKKKSVRVSKAGCYIKPLLVQCANAVVKSTKHPEMRNRYLRLKKRRGHKKAIIAIARMLLTALYHMLKNGENYNAELYQKSDLLPVDREITVEQALMIARNQGYKIKSATA

SEQ ID NO: 351430 - protein, 347 aa, unidentified
MVHVGLDLSRTRLDVHVMDESGAPLAVTTALPEAGGLAALVGRIGAEFGGPVYAAIESMNGARFVHDQLELAGWQVEIADAQKVKGLAPLACKTDKIDSWVLAELSRRDLVPAIWLPTPTVRAERERARWRLHLVRHRTALKNRIHATLLAFGHPCPVSDLFGTGGRELLARLALPEPWAADTTAALHLIDELDHEIAECERVLRQVGADHRYVPLLMTTPGIGWVLGYTVAAEIGDISRFASPTKLAGYTGLCPRVYQSGGKDHRGPLAKNGPKYLRWALIEAAVHAARHPIYADRYRRTKTRLGRQRGPKVAQVDLARRLAEAIWHMLTTNRPFAPAGAVQSLAS

SEQ ID NO: 351431 - protein, 339 aa, unidentified
MTVKTVGLDLAKDVFQVHGISENGRVIFNKAIKRAKLLAFFETLPPCTVGMEACGSSHHWGRQLRQLGHDVKLMPAGYVKPYVKRGKNDAVDAEAICEAVRRPTMRFVDIKTEDQQAILAIHRTRDLAVRQRTQLANMIRSLLREFGHILPIGIEAVTAFAKRHLSGDHPDIPEIANGMLGIQCYQFIGLNERIDGYSKMIEQHALLNADARRLMRMPGIGPITASAIVATIGDAHQFRTGRDLAAWLGLTPLNKSSGGKERLGKITKQGDRYIRKLLVVGMTSRAVMAKRSPEKVDLWTAKIIADKPFRLATVAMANKAARAVWAMLTKKQEYRQPAF

SEQ ID NO: 351432 - protein, 424 aa, unidentified
MSKKKSRVAGLGALYARACGLDVHKKLVVACVRILDSKDGTVQSTLRKFGTMTADLLELRQWLAELRVTHVAMESTGVYWQPVFNLLEGHFKVWVVNAQHIKKVPGRKTDMKDAEWIAQLLQCGLLRPSFVPERQQRELRDLTRQQTKLVQQRNAVDNRIQKVLETANIKLGSVASDVLGVSGRKMIEALMAGEKDVTVLAELAQRKLREKIPQLQRALEGELTEHHRFLLRQLLRQYDFLEKEIASVSERLGAVAPPSFRAAVEQLDAIAGVGERGARALLAETGTDMSRFPTHKHFASWAGRCPGNHESAGKRRSGKTPAANRHLDAVLTEMAHAAVRTKNSYFKAQYHRLAGRRGKKRAIGAVKHSLLVTVYFMLRDNRPYKDLGVDYFDKLNPQQRIRYHVRRLRELGQGVELSPIADAA

SEQ ID NO: 351433 - protein, 344 aa, unidentified
MIYLGMDVSSKSFVGYAINEKKKVVFEGEVEPTRLGLRRLIGKLGKETKLVVFEAGNQLKWIALTLKKMGGVEIHVVHPNEIKWISESSGKTDKIDAKKLAHLARGDMLPRKVHIVEGKIRELRELISARDTLQSKRIALISSLRGYMKQEGYRLPVKFFQRVDWEGTLLKLKVGQIQKSIIENFMKAIESLEAAEGELTERMVEIKDERIDLVETIPGIGKLTSRVLVSAIDNADRFDNKKSVAKYGAVTPRIYQSGGITHLGRINRNGRHEVRRVLLQCAHTVARMKSYEAWPLRAFFERIKNRRGKKIAIVAVARKLLTIAYGVLKSKIAYNPARLAVQAV

SEQ ID NO: 351434 - protein, 369 aa, unidentified
MADRITYVGLDVHKDSIVVAVAAGGLRGEVREYGRIANTPTALDRLLRKLGGDGMRLRFCYEAGPCGYGIQRRLSTRGHECVVVAPSLIPKRAGDRVKTDRRDAASLAKLHRAGELTAVWVPDVGHEAMRDLVRARLDAVHSLRRARQQLSGFLLRHGCHYGRPAWTKLHRRWLAGLKFEQAVHHIVLEDYIAAVEAAEARRNRLTAQIEAMLPDWTLAPVVAALQTLRGMALVNAASLIAELGDLSRFANPRQLMAYLGLVPSEHSSGATVKRGGITKAGNAAARRLLIEAAWSYRFPARLSRELLLRQERQPRLIREIAWKGQLRLCARYRRLARTGKPANIVTTAIARELSGFVWAIARQVAVTTD

SEQ ID NO: 351435 - protein, 368 aa, unidentified
MKKYDTFIGLDVHARSISACALDPLTGEVTEGRFGAEAGPLAEWALAFDGPLCVYESGPTGWHLARELKALGVDCVVGASSKMLRPPADRGRKTDRRDAEFPARLLATRNVTEVWVPDEECEAARDLSRALEDARCDLQRARQRLSKFLLRHGYVYDELTPTGARRGAWTAAHTRWLDGIGFEQADDAATYEYYRDCVRRCTEAKGDLERRVARSAGAPRWKPAVDAVRCLKGIDVATAHALVVEVGDFSRFRNASGMEAWTGLVPSEHSSGETVSRGGVTKTGNAHVRRLLIEAAWHVPTAGRDPKGLARGQVVSPEVRRHATKGNRRLKERRLALEGAGKKPVVANCATAREMAGWVWALGRMAEG

SEQ ID NO: 351436 - protein, 408 aa, unidentified
MNPLYVGIDVSSKSNVVYLMLPNGDKHSNFELKNSHDGSTQLVKRILSAMTSRSLDTVLIGLEATSVYGDNLVYFLREDATLAPFNRKIHVLNPKQVNKFKESYNDLPKNDYVDSFVIADCLRFGRINKEVYIGDYRYKALQNLTRARYYAVCNLIKEKQRFMNVLFKKYSTMTQEKVFSDTFSTTALAVYEEFESAEALANMDLQELTDFIMEKGKNRFPDPDSVAKAIQKAARSSYRLPKTVNDSVNQVLSISITSMKALESQIKEFDKAIAAQMELLPNVLISIPGIGPVFSAGIMAEIGDINRFGNHAQLAKYAGLAWKQHQSGGFEAQTTRLINSGNRFLKYYLCEAAFSLVRCDKEYSDFYHLKYKEVNRYQHKRALALTARKFVRLVFVLLKDNRLYRPAK

SEQ ID NO: 351437 - protein, 334 aa, unidentified
MLVKQYIGVDMAKHTFDACFTDGGAVKTFKNTEPGIRSFFRAISSHHPTSTEGSSQHNNQIHIGIESTSHYHMLLCMRATEMNFTPILINPLITNKYSQRNIRKTKTDKIDARIIRYSAMQGEGYEWKETAQTLTLKHLVREREYLAKLEWIMRARGMSIRDKSTAIREQLPTSTKDILDCIEQSMKGVERQIRQYRKEEQTLLQTIPGIGPLTAAACISEIQDIRRFKQSKHLIAFMGIDPKVHQSGSSIDKYRKISKRGNTILRTRLYNACSVAVLHDNQFQDYFKQKKDQGKPYRVALVATMNKMARVIHSVWTNGIPYREPTNRIISKEA

SEQ ID NO: 351438 - protein, 402 aa, unidentified
MIFVGIDWADKEHEVCVLDQDGTELAHFRIPHTCHGLETLKKQLLRYVTSPEEAPCFLETSQGLLVQFLLEAGFPVYPLNPKVVDYRRKPSGAKSDTIDARLLADIGRSDLRRLRRLNPDSELIQELKTLCRDQDILLEEVTRLTNRLTACLKEYYPVALELFSRLTLPVTLNFLKTYPTLEAARSASVPELAAFLKAHRHPKPNLTAQRIYAQLHAPQLEARPAVVRAKSRFMPVLIAQLEPLLEAIKKYDEEITRLFKSHPDSLIFASLPGAGTRLGPRLLAGWGDDRGRYESAAAVQALAGTSPVLYQSGKYRFARQRRACIKFLRLALQLFAYQSVLKVSWARDYYQRKRAAGKTHHEALRALANIWVRIIFAMWLNRRPYDESVFLAARARHAPSVA

SEQ ID NO: 351439 - protein, 424 aa, unidentified
MNLTQNDRICQVTNDTLVVGVDIGSQTHFSRAFDYRGVEYTRRAFKFSNTKAGFDSFLGWLNEMMGKATKKKVIVGCEPTGCYWLTFQNYLKQHKITLVTVNPFSVKKFKELDDNSPEKSDLKDPKTIAMLVKDGRFSTSYLPEGIYAEIREASVCRDQIMKQHVRLSNQIQGWLQKYFPEYFECYTDFDSTSGLLVLLNAPLPQDIIKLGAGGINQIWREEKLRGAGIKRAETLYEAAQNSVGLPGGEAARFEIKCIVEDYLSKKKQLARIDEYLEGKVLEVENVDKLLAVKGVGKSTVIGFIAEVGDIGRFTDPKQIQKLAGLEITKISSGKKKGQPGISKRGRRKLRRTLYESARALINWNPAFADVFLYYRNRERKPLGGMQSKIAVACKAIRVFYMILKTGSEFDEDRFRSDIIRPATA

SEQ ID NO: 351440 - protein, 348 aa, unidentified
MASLPGVAPQVTVGVDSHKDVHVAAAVDHLGRVLGTTWVPTTTRGAAQLLRWATRLGTVQRFGIEGTGSFGAGLSRWLQQQGHEVLEVTRPNRQARRRRGKSDPVDAEAAARAVLAGEATTPKTANGTVEMLRVLRVARRSAIKARSQAANQLHSLLVTAPDPLRQQLRELPVARLVQVAATVRPGSLTDPLAATKFTLRELARRYQLLTAELDRLDAQLAVLAPKAAPRLLARRGVGAQVAGALLVVAGDNPGRLHSEAAFSMLCGSSPLEASSGRTVRHRLNRGGDRDANNALWTIAMTRLSCDERTQRYLARRTTEGKSKREIIRCLKRYIAREIYRDITAAVGS

SEQ ID NO: 351441 - protein, 309 aa, unidentified
MTNSAKYNTFIGIDVSKDKLDLFNSATGELATVENSKAAISQYIKALEFSKQTLVIIDLTGGYEAECVRAFALKGFDVVRAEGLKVKGFAKAVGQKAKTDGIDARLLAKYGEKCYEDLFLYDPYPNAIKPLVVRLADVKQMCQQEKNRVQAPDLNKTIKRGIERTIRFFESQIKELEELIMAEIGRDEQLSARYKLLTSHKGIAQKTAIILLGLLPELGLMNRRAIAALVGLAPFAKDSGTLAGYRFTRTGRKDVKKAVFIIALGAVRYDKKWKTVYENFQLRGKKKMVALTAVMRRILVTLNAQCKEL

SEQ ID NO: 351442 - protein, 358 aa, unidentified
MTETIQQSIGIDVAQKELVCSLAQKNETGEIKIIAHKTFVNSEKGFKELVKWVKKLKEENATIQFVMEVTGVYHEKAALFLHTNGYDVALVLPNKAMHFQKTLDIKTITDKTSANSLAQMGIEKQLKNWEPPLPVYNLLKQLSRERNQLIEERTGIKNQIHAENAGAWANKSSISRMNKRVVLINNQIKEIEKEMQQVVNTAPELKRKLKFVCSIPGVAFITAIAVIAETNGFHLIKNKRQLVSYAGMDVIVKDSGTSVRSKPRISKRGNKYLRKAVHLPALSAIRHDPKMKNIFVRLVGKHGIKMKAAVAVQRKLLEMIYTLWKKEEMYDIEFELKEQNHKNVEQATEALALPKLVL

SEQ ID NO: 351443 - protein, 402 aa, unidentified
MNSVGIDISKGRSTIAVMRPFGEVAISPFEVRHTDSELSELARRLKSLNGETRVVMEATGNYHAPVAKQLHDAGLYVSVVNAKLVHGYGNNDLRRVKTDRKDAIKLANYGLDRWLTLPRYIPEENTRLLLKNCYRQYRQYSKVQTVLKNNLISLLDMTFPNANRLFNSPARADGSEKWVDFVAEFWHCECVSERPLKSFVNKYWRWCRKHGYNFSEEKAHAIYDEASGHIGVMPKSETTKLLVEQAVSQLRTTSAALAALKQEMHSLASQLPEYPVVMEMFGIGPTLGPQLMAEIGDVRRFYSKKALVAYAGIDAPPNDSGDVIGRHKSMSKVGASSLRRTLFLVMSVYLQNSPPNEPIYQFMNRKRAEGKPYRVYMMASANKFLRIYYATVKAYLEILEQI

SEQ ID NO: 351444 - protein, 362 aa, unidentified
MFVERTSVGLDVHARSVVASALDTVTGEVVEARLVPDNEIVTEWVRRLPGPWAVAYEAGPTGYGLARHLAAVGIRCEVAAPSKLQRPSGDRVKTDLRDARHLGKLLRLDEIVAVRVPSVEQEQARDLVRAREDARQDLMRARQRLSKLLLRHGHVYSGGNAWTLKHEAWLRSVRFTDPVGSITFDSDYDAVLTVTARRDRLDTAIETMAADSVFTPVVARLGCLRGVSTLTGFALAVEIGDWERFTGRSIGAYVGLVPTESSSGEHTARGSITKAGNGHARRLLVEAAWHHRKPYRPGVTLRRRWDAAPAAARARGDAGNRRLQRRWAAFDARSKKPTIACVAIARELAGWTWSLATLDPDT

SEQ ID NO: 351445 - protein, 343 aa, unidentified
MTHFVGLDVSQKMTAICVVDPAGNRIWRGVCASAPEQIDAAIRHHAGDDARVGLETGPMTPWLVHELRGRGFDVACLDARHARAALKMQINKTDQSDAEGLAQIMRTGWYRAVHVKSFDSHRARALLGARAQLVGMTTRLSNHIRGVLKTFGMLPGTMRGMRFDRRVETMLADRPDIAPIVAPMLNAWRQLREQISSFDKAVRLLIKQSPTCRLLMGVPGIGALSVLAYVSTVEDPARFARSRAVGAHMGLTPRKYQSGEIDRSGRISRCGDALARTLMYEAAVVILTRVKRGSRLKEWALAIARRSGSGKARVALARKLTVILHSIWRSGEPFRWASPTDAT

SEQ ID NO: 351446 - protein, 386 aa, unidentified
MGDWNALPIRLSAEKTEDIMTVNFGVDLHKTQFTVHARIGSRVEALSEIKQYPTTESGYAEFLKRIAGYRTSGYDVKIGVESTGNTRFFKNQVEKAGAAVTVINTLKFKVINESTKKTDRHDASTISEFLEKDMLPESHICNQETENLRRLMKSRERLVRSIVGQKNEVHALLVSLGLSDELRSLQSKKGRQKILDTLESNNDYVLEAQSVKLMFQIIDQMDSSVKTIEKQLSELTKDDEMVQRLMTIRGCGKITAWTIRAYTEDIGRFATAKKYAAFCGLVPWVQDSNETVHHGKITKRGPQELRTAFVQLVLGIRRCKDTSDWRLMQRYSYMKKNKGSGKSIVAAARKMAEIVWALLTERQDFDSKKMKGCYKSMTLQEQALTA

SEQ ID NO: 351447 - protein, 343 aa, unidentified
MKHYVGLDVSVKETSVCIVDETGRICRELKAPSHPEDLLQVLQDPAWRMERIGLEAGPLSQWLFDGLARAGLPVVCIETRHTKAFLKAQVNKTDRNDARGIAQMMRVNLFRPVHVKTLASQKRRALLTARKLLQEKAIAIENDLRGLLRNFGLKVGVVGALKFEERIHELVAGLPDLAEITKPLLDARRTLREHFASLHRKLLEIVRGDEVCRRLMTVPGVGPVVALAFVATIDIPARFRNSKAVGPALGLTPVQHQSGESKRVGRISLCGDGMMRTLLFEAAQTLLTRVTRWSWLKAWAMNVAKRRGARKAIIALARRLAVILHRVWSDGTEFRWAKAASAA

SEQ ID NO: 351448 - protein, 345 aa, unidentified
MKVTTIGIDLAKNVFQVHGVDERGKPVLRKQLKRKDVVAYFANLERCLIGMEACGSAHYWARKLSGLGHTTRLMAPQFVKPYVKTNKSDRNDAEAICEAVGRPNMRFVPVKTAEQQAVLALHRARQGFVKARTAQANQIRGLLAEFGIVIPQGIGHIAKRLPQILEDGENDLPGMLRQLLERLRENLTDMDRQVGEMEQQIKLWHRDNEQSRDLEAIPGIGPITASAFVATVGDAKSFKNARQVPAWLGMVPRQDGTGGKVTLGKISKRGDVYLRTMLIHGARSVIAQIERKPGQADAWLKKLLARRNKNIAAVALAAKNARVAWALLANGRNYQCDYIATRPAA

SEQ ID NO: 351449 - protein, 453 aa, unidentified
MRVVGIDTGVTSKHCAVVVDSEGTKDSKPILFGTSIQEYDRMIEEANKGGKTDIFAIETAGEAWYTLALHLHKKGYQVAIVSPEKSHDFRKSLRKHTKTNRIDASSIARSLIIDRTSITYFSPRSTKIEALRRLTRRYTSLQKEQAAHRTIIRAELRSLLPSWRQPEGIFTMPYKKWFKKGVDPWYWNETNKAELQELLKDPVETERIIEACEQTRKIYSNIHQEGLDSGVLAVQQEVAILELLEDQIKELKRKISQIYRELDEDRVLTSICGIGEFTAAVILGEVGDITRFRNNAGFSSYCGVVPKRNDTGDTHRQGQKMTKQGNRHLRRVLFLAALSGTRTDPELATIYYRQKEVLKKHHNKAMGFVMNALARRIYAVLKRNPHLFSGGKGEKAPYIIKIEGITVDKKVAREWIEKNKKTTSKKNGSRAGKYPPETVKDVSRISNGLPLIV

SEQ ID NO: 351450 - protein, 481 aa, unidentified
MGGKKQAQPRLKAVPMLLQESLYVGVDIGKHQHVAGFVSKTLLQRHERFEACPALAFEQSREGFRTLIDRIRELVPLEQAYILLESTGHYHRALVQYLQELDMPVYIMPVQKRPAGMIKTDKRDALGLANHLYNQLELGVQLADKTHLVRRLLPASEAALQLKGWIRHRYELMHESTQRKNKLTAICDELFPEFTWVLKDPNGMAALALREHFPTPHAMATAALTTLAQHRVRNHPSVQQLVELQRLASQTIGTKDVVRQRGLVLEQQQLIRELRMLQEHVQQLDVEIVKLVEQSREGQILTSMGIGSIQAAAIMAAIGNVLNFEKGAALKAYFGWAPKREQSGTTLDYDQLAHTGTRTMKQTMFLVVANAIQRKDGEWAKLYERLVPRMCSYDERKRAYRGKLKVLVRIAGQMTEMIYALLKQDAEILSKVPPGQEPPPPILYDPEIHQRHRNGQYRPLKNAPPPRKVIQLPQNTPARDS

SEQ ID NO: 351451 - protein, 439 aa, unidentified
MPRKANPKRSELPLIRLNAAGVDIGATQIFVAVPAGRDLENKDVRSFDTFTQDLYELAAWLSQCGVDTVAMESTGVYWIPLFQILEERGFEVFLVNARHVQNVPGRKTDVKDCQWIQFLHSVGLLQASYRPPQEICAIRSLLRHRDSLVKTSSRHIQHMQKSMDQMNLKLHHVISDIAGMSGLAIVQAILDGEREPEKLAALCSSRIKASKEVVAKSLVGDYRREHIFTLRQSLEAYRHCQHLINELDNELQNVLEELNPCKHDKDGSQPFSLTRELKEIFGVDLTRIPSVAQNTAQAILAEVGPNFTKFRSASAFASWLTLCPDNKISGGKVISKQTRKSKSRATTALRMAALSLHRSDSWLGNFYRRLRTKLGGPKAVTATAHKIARIIYHLVTTHQEYDESRFETCEIRNRKRRIRNVTIAAKRLGFDLIPSCQPV

SEQ ID NO: 351452 - protein, 437 aa, unidentified
MQQASASDAAGDFAALSHFAGFDWAKDKHHVAVVELSGRRVLEMGIEDTAEGWADLRRKLAAFPRLAVAIETSCGPAVERLLEMGLAVYPLNPKAAQRYRDRKSPAGAKDDALDAWSFADALRTDGQGWRRLSPLDQATHELRILCRDEITLIAQRTALVNQLRAALHEYYPVALEAFDDWTTPPAWRFAVAFPTPAELAAAGKRKWEKFLHANKLYRPQTQQTRLELFAKAMQFVNPNAAVTAAKSLLAVALAEQLLTLQRQMDKYRQRIQKLFADHPDHDLFGSLPGAGEKLAPRLLAELGTDRDTFATAQGLQCYAGTAPVTRQSGHRHAVFVRRACNKILRATVHLWADLSRPKCAWAQAYYQKKKEQGMGHAAALRCLGQRWLKILWRMWKDRVGYDEARHTLDQVKHGSWVVRLLPQPVPAAEARPLTTKV

SEQ ID NO: 351453 - protein, 343 aa, unidentified
MEKISTIGLDIAKNVFQVHGIDEVGNVVVQRRLRRRQVLPFFKRQLPCLVGLEACATAHHWAREIEKLGHEVRMMPPRYVKPYVKRNKNDAADAEAICEAVQRPTMRFVPIKTPQQQSVLMLHRTRQLFVRQRTTLINAIRAHLAEFGIVAGIGRNGVEVLLDLIVKGEDERIPEAARECLMALAAQLHLVKRQILEADRRVLAWHRSSKVSKRLEAIPGVGPLVATALVASVPDPTIFRSGRDLSAWIGLVPKQNSTGGKEKLGNISKAGNRYLRKLLVVGALSVIRRAKQLGYTRHPWLVRLMERRSTKIAAVALANKIARIAWAMMARGERYRTPLPTPA

SEQ ID NO: 351454 - protein, 425 aa, unidentified
MTWENNSMMGERVTVFCGIDWAERHHDIALVDESGELLAKRRISDDAAGYRMLLELLAEHGDSPESPIPVAIETSRGLLVAALRTGSRKVFSINPLAASRYRDRHGVSRKKSDPGDALVLANILRTDMAVHRPLPADSEQAQAIAVLARAQQDAVWNRQQIGNQIRSLLREYYPAALDAFLAKQGGLAREEARVILAKAPTPAEGSRLSLSQLRSALRRAGRVRGVEEEADRLRGVLRAEYARQPAVVENAFGRQLLALLKQFEAACQASDDLAEAVDAHFRAHPDAEILLSFPGLGVQLAARVLAETGDDRNRFADARGLKAYAGSAPITRASGKKHYVGRRMVKNNRLHHAGYLWAFSSLRSSPGAQAHYRHRRDLGDWHAQAQRHLFNRLLGQLFHCLQKRVLFDEERAFAPPSRSSLAAAA

SEQ ID NO: 351455 - protein, 418 aa, unidentified
MSMTNQLNIVCGADIHQRFLVATILCRDGRTWADRFLMNLNGLLDFKSWLVSYGCQKVAVESTGRFWIPVHMILEGTIEVIVANAYKIKHIPKKKTDLKDSEWLAELCLNDMIEPSRIFPKEDRELRNLTRTREAYVRDLSKEKNRIHNVLESCSIKLASVISDIFGKSGMHILKGLLSGTSIDEVLKGIPDKRIREKKSEELRDALMGKLEATDIFLIRQSLQIISQFEMRIEELDREIRSRIASRPMDIKILRSIPGIGMVSAYTILAEIGNYLDFKKPEQLAMWAGLVPSVYQSADKLITGGITKQGSKHLRWILVQVAHAIAHAKGGKLKKFFLKIRAKKGYLVAVVALARKVLCLIHHLLVNQEMYEEEGRLSKRDAPIPKNKNQGTLTIEDMIQCIAQAGYVVKRLNSGMHG

SEQ ID NO: 351456 - protein, 309 aa, unidentified
MPRNYIGVDVAKNWIDIFDAETGEHRRIETSKADLLSFARTLGDRIVVFEASGGYERPLMDVLSAAKVAFTRVNPRQARDFARATGLLAKTDKVDARMLSRMGSALELAPSTAPDPVRDRLASLMARRDDLTATIGRERNRHAQATDAWIRRQISSILRILARHLKRCDAEINIHIHQHERLIEDHARLQTIPGVGPVLAAVLIASLPELGKLDRRKIAALAGLAPHACDSGMFKGKRRIWGGRANVRRALYLAAFIASRHDPNFKAFRKQLQDAGKPVKLAVTACARKLLTIINAMLKAGQDYSKTPA

SEQ ID NO: 351457 - protein, 335 aa, unidentified
MTSVTVFVGLDYHDSGVQVSVLDPAGRVLWNRPCGNDAAAIADRVARFGDRVFAAIEACTGAAALADELAALPGWSVDLAHPGYVARLKQSPDKTDLQDAQLLADLERVGYLPKVWLAPPAVRELRRLVRYRQQLVNQRRDAKLRIRALLREARVAAPAGVRPWTKKWLAWLQALAGLGEQTRWVIDRHLARLEWLSGEIAAAERRLAEATADDPVVCRLLAQRGVGLVTAAALRAEIGRFDRFRTGKQLARFCGLSPRNASSGPRQADAGLVKAGNPELRAVLIELAWRLIRYEPRWRALAGGLRGRGKAGSLTAAAVANRFVRWLHHEMTLAA

SEQ ID NO: 351458 - protein, 421 aa, unidentified
MTPTSHNTFAAFVGIDWADAKHDVCLQTAGSAKRECCQIEHTPEAIDAWVTALRTRFNSQPVAICLELTKGPIVSALRKYDFLVLFPINPLTLARYREAFTPSRAKDDPTDAALQLELLLTHRDKLQSLQPQSPTMRTLAQLVEHRRRVVGDKVRITNRLTSALKNYFPHVLHWFQEKDTAIFCDFLSRWPTLKAVQLARRATLATFFREHHVRYAEVITQRIQAIKAATPLTTDEGVIAPNALLVQALVAQLRVTLQAITDFDTAIAQCAQSHPDFPLFQTLPGAGPVFAPRLLVAFGEQRARYASAADLQQYAGIAPVTERSGKKSWVHWRLQCPKFLRQTFVEWAAESIRHSFWAQAYYQQQRDKGKAHQAAVRALAFKWLRILYRCWQERTPYDESVYLQALQRRNAPLLRNLADVS

SEQ ID NO: 351459 - protein, 370 aa, unidentified
MDEGIKVFVGLDVHKDTIAMAVAETGRVAGRLIGQMPHDVAKLLKALARLGEPSALHVVYEAGPTGYGLQRALAARGYRCEVIAPSLIPKRAGERIKTDRRDCLRLAELSRAGQLRAVWIPDPADEAIRDLSRAREDAVNARTQARHQLKAFLLRHQIRYSGKSAWTKIFYRWLGELNFGAPSSQTAFTEYHLAVQAADQRVERLTQALQASIEGWRFAPVVAALQALRGLDVVAAIGLVAEIGDIARFDHPRKLMAYLGLVPSEHSSGDRVAKGSITKTGNAHARRLLTEAAWNYRFTPRIGRRAQQRQQDLDTPIREIAWKAQLRLHGRFSRLNTRGVHHNKVCVAVARELAGFVWAIAQASTSTQLH

SEQ ID NO: 351460 - protein, 456 aa, unidentified
MKSKSKDKKKGTNFVSMPVINTHAAGIDVGSRSHFAAVGQELSDVREFGVYDQDLRDCAAWLKSYGITTVAMESTGSYWQNLYDVLIESGFEVFLVAGRQTKNMEGKTDVKDCRWIQFLHSVGLLTSSFLPDLETEELRTIYRHRDFLLKQAAKYINKMQKCLRLMNFRLDVVLNDVTGKSGQAIIKAIIAGERDPQKLAALADWRVKKSTEEIAKALSYNGRTDYMYELSDSFDIYQSYVKKMEDCDKKMEELMRTQIVKLKKPQTLPPPLEKPKRSGKNAPKIPTHELSWQWNQEVDLLSIGGVGHSTVLAINSEVGQSIDKFPTAKAFASWLRLSPDNRISGGKVLSSHVRKGSNRVASALRHAAESIGKQKDAPLHPFFQRIMYRKGRCAAIIATARKLAVIIWNMLTKKVQFIPYDTTKIESQIREKQVKKINKLLKVFDVKAHEINFAYI

SEQ ID NO: 351461 - protein, 252 aa, unidentified
MNTKTDQNINVGVDTGKSQLDIYIRPLDIYFTVSNDGKGIREAIIKLKKFNPVRIVIEATGRLEFNFIVACAKADLPFVVANPIHVKRFAGAIGQRAKTDKLDAKLIAHYGEAIQPNLSALKPETMQAMSDLVTRRNQLLTMQTMEKNRLNIMPKYLAMTIKPILTAFKNQIEKIENKIAALITSCPDYQAKSDILQSMPGIGKIAAASIISNLPELGYINNKQAASLVGVAPMNRESGRYKGLRTIQGGRP

SEQ ID NO: 351462 - protein, 341 aa, unidentified
MEEISTVGLDIAKSVFQVHAISYAGEVVVRRQLKRRQVLQFFAGLRPCLIGMEACATAHHWARELIKLGHDVRLMPPRYVKPYVKRNKNDAADAEAICEAVTRPTMRFVPVKTVDQQSVLMLHRTRQLFIRQRTTLINSIRAHLAEFGIVAGIGRNGVEVLLELIAKGDEDIVPAEARACLLALAAQLELVKRQIVEMDRRVLAWHRASGLSRSLEAIPGVGPLISTALVASIPDPKVFRSGRDLSAWIGLVPKQNSTGGKERLGGISKAGNHYLRQLLVVGALAVIRRAKQLGYTRHPWLVRLMERRSVKVAAVALANKMARIAWAMMARNEPYRATLPA

SEQ ID NO: 351463 - protein, 454 aa, unidentified
MKKQDSYDYYVGIDCAQNKHDFAMKNNQDKFLIKRGHFSNTLQGYEKFLNTVLSKCLNKDKILFGMEVTGIYGTNLYERLKSDGYHVVMISPDSVKNYRDYKRLNKTDKIDSGCIAELLLNGDAQIVHVAKNGYTDLKAYIRRRNALKVTCTQETNRFLAKVCLYFPDLLKVFPSGRATLKAIFSIYPTPYSIIEADFDELVSVLQKASKNKFGVDKANELIHAARNSIVVRKSISDGELYNIHSLIDSIDSLESEIRNLEKIIDSKAEEFPAYHVLLTLTGCGKITVATIVAEIGDISRFHKASQIVSLAGLYGDNSKSGSSVNKRGKISKKGSRYLRHAIYMVAEFARRNNPIFKAYFTRKKNGDRTKHTLAVNAVANKLCKVIYSLMKNQSTYIIQYRDLVKLSESTQNEFFQNAETDFSAKTRRKKYLYEDEYGELHEFVFKSIKTALIE

SEQ ID NO: 351464 - protein, 384 aa, unidentified
MQKASDLSQSRIVLKQDSTLIAVIEMSLSSWLVAGIVPGVERQPLKKLAVDESALLKLLNRWREEAEKAGRRIERITVAFEAGRDGFWLARWLRARGIEAHVIHASSVAVSREHRRAKTDRLDTELLKRAFLGWLRGERDHCKMVAIPTTKDEDAKRPNRERQSLVGEQTRIVNRMKAALIRLGIRGFNPKLKKAAGRLEDLRTPEGEPIPPNTLAELHRDMERRRLVSDQIRQIEKARLERMEQAPGDGPHAMVRLIARVIGVGIETADMLVHEVLSRKLRDRRAVARYAGLTGAPDESGSKRREKGLAKAGNARVRGGMIQLAWRFLLFQKDSALAQWYRTRTEGGRNRKTIIVALARKLLIALWRLVTTGEVPAGVVLRAA

SEQ ID NO: 351465 - protein, 488 aa, unidentified
MPQPYRSFKLKYPGPAASSIRTPKSKRTRLQKGRAAQDPTAGLQIQNPNAAAIDVGGAEHWVALPPHRTSQPVRRFGCCTKDLQELADCLVEHGVDTVVMEATGNYWVALYEMLEERQRRPVLVNARYAKNMSGKKGDIPDCQWMQKLHSYGLFANSFRPAEPVRVLRAYMRQREMLVGEASRSIQHMQKALTEMNVQLANVISDISGETGLLIIDAILAGQRALHALARLRDRSIRASEKEITRALEGHWKEEQLFILEQARLSYAHTLEQIAACDQRLQEQTRALENRVVEASPAGAVAASPPTPLGQGLESKGQAAATPFRLGTELKRILGVDLTKIPGVGPLTAQVVLSEIGTDVNAWPSEKHFASWLGLSPDHRISGGKILGRSTRPVVHRVRTALRLSAYSLERSLSAMGAKYRRLKRRLGAPKAITAMAHYLARLIWRLIREGQEYVEKGMELYEARYRAQRIRWLEKQAAEFQMKLVANA

SEQ ID NO: 351466 - protein, 365 aa, unidentified
MSRLVLKEMRAQSPPQPGQVVIIGVDLSRAKWVYACRWGGQERRRFGSPGELKHLQAVVREYQDRGCAVHVVYEACGFGYEIAWWVEEQHAQVNVVPPSTVERAPGAQVKTDGLDAGSLALKYEQGALKHIYIPRRAEHEYRQLSRTYAQALKDRRRQQVRVRMLLQEHGYTPPRRGTGWCALQRWLQAQQLPAPVATCIAELVALRSAASASAQRLAKELRAVARLAHYAPLVKALAQQSGVGPFTAVRFVLEIGAIERFPTADSLPNYLGLTPREYSSGDLVHRGRIRKCGPGTVRAWLVQCAWVAVRRRKDQPLVDCFERLAPRDGSRDAAKKAIVAVARKLARRLRARWREFEATTRAQAA

SEQ ID NO: 351467 - protein, 452 aa, unidentified
MIMEEKEHGNYNLLRLVSVGNKNTLTGGVTAMHRKNDNRQVEKRQRITDATLVIGMDIGCEFNAMCLMSKEGTILGRYPKIYNSRKGFDYFHGIVESMKKKYGFTDVLIGMEPTGHYWRKIAYFAMDKQYEVRFIRTTALKHQRELDESSSAKNDIRDAYTIANIAREGKYIDTVIEDNIFRQLRTLAHTREKIQRISTGAKHALKGMLEDYFPELKHIFWSMKAKGLWALLEHYPFPEDVLKTDIDTVTELIAQSTRRKIQAHEKALQIYKAAQHSIGLQRVGDADRWRVAAYLSEIRHSETQLKEIEAQMEALLKKIPLAEYILSMPGIGALTCGVFLGELGNPCNFTNPKQIVKYAGYDPKEHDSGQRTGRRIISKKGRWLLRKYLYFMAMRVVHRSPFLKDYYENKQKTMTKKEALCAVVIKLIKVIFALLRDKRTFTEKQSCLKQAA

SEQ ID NO: 351468 - protein, 411 aa, unidentified
MYYVGIDIAKKTNVSSIINDKDVFIKKSFKFNNDEKGFKEFTNLLSSIDKNIDNFIIAMEATGLLFENLYLYLKGKGYNVILLNPYQTSKFREMNTMKKVKSDNIDAIMIASLIKSGRYSKAYVSEEVYASLRALHRHRASLEEELKKHKRQVSSLLAVVFPEFEQVVKNPFSVSGLALLEKYPTAKHYKHASPQRILNVFRKIKGNNFNIQKAEKLLELAKSSIYSGNAYDERAFVIQSHIRMIKTLQKEIESIDNEMLKLFNASPSFTKEEEQEVIDIIDNLRTIPGVSDKTLFTIMGECGNLDRFKNINAFIGYLGLYPTLEQSGNKTSYGKLAKRGSKLAKKALYQAAVAAIRHNDEMKKLYCDKVSQGKAKKEALVIVARKLAAIILAIYKNNTPYNPARVFNQNT

SEQ ID NO: 351469 - protein, 362 aa, unidentified
MSYRIAGVDVHKKMLAVVVSNVEIESEFQFERRVFGSNPEQLRSLAAWLVEQEAEEVVMESTAQYWKPVWGALERYWKPICEKREGARRKSGTLHLAQALSNRGRRGRKRDFVDAERLVKRLVARELVLSFVPDAEQRLWRTVTRKKYQLRCDRVRLQNQVESLLEEAHIKLSSLVADLLGVSARRMLKALADGETNPAALAALADERLRATPEQLCDALGACRELNPVYRQLLKMALEELRLIDERIGQLDQQMASLLSQHQDAVERLAEVPGLGVDSAQQITAEVGPTAATFPSEKCLSSWVGACPGDDESAGVNYSHRSPKGNRHMRRLLNQAANAAARTKGSIFEIVYRRSVPRLGHN

SEQ ID NO: 351470 - protein, 446 aa, unidentified
MVETQTEFVVGERRCIGLDVHREFAQVAVWQGGLVWQAGRFATTPQGVRAFAEQLGPTDEVALEATGNTWAIATLLASRAGRVVVSNPAKTRAIAEAKVKTDKVDAEILAQLLAADYLPAVWRPDPATAALRRQVLRRAHIVRQRTRLKNQVHAILHRNLIPRCPAADLFGHKGRRWLAAQDLPPDERGAATALLRQLDFHAQELREIDTDLGQVALGRPEVLRLMTVPGIDATVALSIVAAVGDFTRFRSPEKLVAYLGLNPRVRQSGGQPASHGRITKAGPAHARGMLVEAAWSACKAAGPLRAFYQRVQARRGMQVAVVATARKLTVLCWHLIIKGEDYAYAQPSLVAHKRRKLELRAGAPAARGQKGKAAGYSLKAVRAAERDLIAQAERAYQLTVAAWQPTRPTAAATPGRAGARRSGVDVAATNGARLSRPSRGNAARQG

SEQ ID NO: 351471 - protein, 363 aa, unidentified
MDVHTTNYTLSCYTVENDMSFATIQVEPDYKNILKYLENIKKNYDGPCEFLCGYEAGCLGFTLYENLKRHNVSCIILAPTSMPVYKKTEIKTDKRDAMKIAKCLAYNTYTAVHIPTKEDSDVKEYIRMRDAHKIALKKVKQQILAFCTRHGFRFSEGKNYWTQKHLKWLRGLNLDGLLREILDEYLATYTHTTDKLERFDKRIAELAAGETYAKKVQILSCMIGIRTHTALALLVETGDFHRFKKAEQYASFLGLVPGEHSSSDNQRRLGITKAGNSHLRRLLIEAAQCYNRGKVGYKSKALKARQYGNSPEIIAYADKANERLRRKFYRMVLKSNKKHNVAVTAVARELSCFIWGMMTEQTA

SEQ ID NO: 351472 - protein, 328 aa, unidentified
MTETVACEQPTAYIGIDISKGAWDIHLLEEKRAWSSATTAADLTKLLAQLKPFVGRSFVVMEATGGLEKPLAAGLIDAGHRVAIVNPRQARDFAKGMGMLAKTDRIDAKGLALFGEKVQPRLAMKPTEKQAELEALVVRRRQLVGIRAEELNRQKQTFSTTSKKSIAKILKALQAEIETIETAIAKLIQSDDDWKHKAELVDTAPGVGSVTANTLVAQVPELGQLNRQQIAALIGVAPLNNDSGKHQGKRPIYGGRIDVRSVLYMAAAAAVRATTRSSPIKDLFIRLRQRGKPFKVAIVACMRKLLITLNTMIKTNTAWKDADGVVVP

SEQ ID NO: 351473 - protein, 409 aa, unidentified
MSEQTPEVIYVGVDWAAAIHAVCVMTAAGKVLAQFTIEHTADGIASLIRRLAKYRDPEVVHIGIERPNGRLVDLLLEAGHPVIPVSPNAIKTWRESEVVSGAKSDAGDALVIAEYLRLRHHRLHPVQPYSAETKALRTVVRTREDVVDMRVRATNQLDALLDAYWPGAKEIFADTESRISLAFLRRYPTATAAAQLGEKRLAAFLTKHGYSGRRPASELLARLRGAPPGATDPVLIEAIHDAVLALVTMLEALNTAGKQLDRSVVAHLGKHPDAEVFTSLPRSGQINAAQVLAEWGDSRTAYDSAEAVAALAGVTPVTKASGKQHAVHFRWACNKRFRQAITIFADNSRHASPWAAEIYARARARGHDHPHAVRILARAWIRVIYRCWHTNTPYNSDLHGGARKVPFAA

SEQ ID NO: 351474 - protein, 351 aa, unidentified
MKEYIAFDSHKHYTLVEQEDQTTGRTRQCRLTHHRGVFVEYLKGCCSGSRVAVEATGNWYWIISEIEQAGLQPLLVHPRKAKLMMGLINKTDKLDVHGLNRLQRNGTLPTVWIPPAELRDLRELTRTRLVLVAQRTRLKNRLQATLAKYGLEIQEASDPFGAAARLQWPKLVAQLPPHTQWVSQGLLSQLEGLVEQIEQFEQRLERLLQISPDMQRLRSLPGVGLILATSIALEIGQIGRFASAEHLASYAGTTPRVQASGDKVRFGRLRPDINRYLRWAFVEAANAVAIHHQRRPERHVSQLYWRLKARKGHAKAIGAVARHLAEASFYVLSRQEDYLDPALSKGRARPV

SEQ ID NO: 351475 - protein, 357 aa, unidentified
MKILALDLGKYKTVACDYELATGEHEFETIATTPQRLHDLLVAREPDRVVIEICSIAGWVCDLTRALEIEIEVANSNDERWRWKRIKKKTDRTDALKLASLSALKQIEPVHVPVREVRQWRALINYRQYLLRRRNKMKNHIRDLLAREALLLPRGRSAWTQEGMLALEQLARPLAEVAGDALWRSELSIELGELRRAEEPLKQVEQKLDKLAKANQNVQLLQTIPGVGPRLAEALVALIDDPSRFAHGKEVGAYLGMVPKQLESGETSRLGHITHHGNRLVRALLVEVSWLGLRYNPWVREVYERTRAGKSARRKIAIVAVGRRLLIRSWAMLRDQQPWHGPVKQAPSKKEKLKRAA

SEQ ID NO: 351476 - protein, 343 aa, unidentified
MEHFAGLDVSVNETTVCIVDEAGRIVREVKVASEPDALLAVLKSGAYRFRRIGLEAGPLSQWLYSAFAEAGLPVICVETRHMRAVLKAQINKTDRNDARGIAQMMRAGLYRPVHVKTLRSQKLRMLLTHRKLLQSKAIAVENDLRGTLRNFGLKVGVAGAARFEARIKELVENLPDIAALVEPLLIVRRVLREQIAVLHRRLLVIVKDDEVCRRLMTVPGVGPVVALTYRATVDVPARFRNSRAVGAVLGLTPCKYQSGESDYTGAISKCGDEMMRVMLYEAAQILLMRSTRWSWLKAWAMQIARRRGMKKAIVALARRLAVIMHRIWVDGTEFCWTREAAVA

SEQ ID NO: 351477 - protein, 382 aa, unidentified
MITTTRTNESTAPTGGLLLAFELGQRSWKLGFTVGMGQRPRIRQIPAGAVSALVTEIERAKKRLGLSSDAPVTSCYEAGRDGFWLHRYLVAHGVTNHVVDSSSIEVNRRARRAKTDHLDLAGLLSLLARYVLGDRRAWRVVRVPTVAEEDARHLSRTLEALTQDRTRLMSRLNSLLTTQGVSLPIDAKFLHRLEAAHLWDGTPLPPGLQERLTRTWTPLQEVDGQIHDLRALRLTRPEHLTPATSHALTQLLTMRAIGPIGASVLATEIFGWRRIRNGRELGALVGLVPAPYQSGETDYDQGITRAGNAHVRRVIVQLAWGWIRHQPDSALTRWYQQRFGAGGKRLRKIGIVALARKLLIALWRYLETGVVPDGAQLKPMEV

SEQ ID NO: 351478 - protein, 304 aa, unidentified
MNGIGIDVSKRQLDVGTTDGEILQVSNNLTGFSELDLWLRKHPASQIVLEATGGYEQSVLNFLHNAGHPVVRANALRARRLAQGMGQLAKTDRLDAYALAQMAALVKLPSYQPLQPWQQKMREFVRARRQTMEALTIARQQQEMVGDRELRRLLQANITRLQRLVERLGKQIVEQVAQQPQLAVLKSMKGVGPGLQAVLASYLPELGSISGKRIASLVGVAPMSHDSGTMRGKRSIHGGRAEIRQVLYMASMSAMRHEPRLRDFYQSLRARGKEGKVAIVAVMRKMLVILNARVRDAQGGSIPA

SEQ ID NO: 351479 - protein, 285 aa, unidentified
MKQALRKNFLGIDVSKSWFDVSLMQVIDHVKQPIFTQRFDNTTSGMSAFKSWLKTSAVTLDSNSLLVIENTGVYHRLLWSFCSKHNLPLHIGNAAHIKWSLGITRGKNDVVDSVRLCQYCCKQSDELKASPVLNPVFMKLKDLMSSRSRLVTQLNSTRNYIKELQCSHDKILLATLEKAHKAALEGIKKSILQIEELINRIIQEDPVIYKNYLLIKSVPGIGHLTAVYIICCTNNFAAKVTGKQLASYAGVVPFEHSSGVSVKGRNRVHKMANKQLKKGDFRHAP

SEQ ID NO: 351480 - protein, 344 aa, unidentified
MQITTIGLDLAKRVFQVHGVDASGQIVVRKSLRRSQMLPFFAKLPPCLVGIEACGTSHYWARELIKLGHEVRLMPPAYVKPYVKRGKTDAADAEAVCEAVTRPTMRLVPVKSPEQQAALSMHRTRDLLVKQRTQLINMIRGLLAEFGVDIPKGLERALLMARQIVDGKAPEVPIEAARIVATLSQQALDIHVRLREIDRDLAVYLRGNDVARRLMAIPGIGPVGATALAASVTDPHQFRSGRQFAAWLGLTPLQKSSGGKERLGRISKMGDKYLRKLLIVGMTSLVRRAKYNPGKIDPRLADLLARKPARVATVAMANRTARIIWAIMARGETYRTGHQPALVA

SEQ ID NO: 351481 - protein, 405 aa, unidentified
MAVMIGVDPHKGSHTAAAIDTAETVLGEVRVRSGTSQLERLLAWAAEWPERTWAVEGAGGLGYLLAQQLVAAGERVVDVQPKLAARVRLLATGATNKNDPNDARSVAVAALRSPAVREVVAEDHAAVMKVWAKRHRDLGRSRTQVACRLHAVLCELVPGGISGEIYASRAATLLEEVEPVGAVATARYELALAFVEDLRRIDEQMRDTKKRIAAAVAASKTTTTEVFGVGPIVAAIVIGGVGDVARFASRDHFAAYNGTAPIEVSSGPRKIYRLSRRGNRRLNHAIHMAAVTQIRHRHSEGRAYYERKIAEGKTGKEALRALKRRISDALYLRLQGDARQAAKPTYEGPGGQTGNDSVASAAGSHPEHRLFGEATPGPAPRLRQPAPTPRPRRRSRTSETARKAS

SEQ ID NO: 351482 - protein, 338 aa, unidentified
MNTLSLLGIDIGKNTFHLHGQDARGNQILRKKLNRSQLLPYLAQLPNCKVAMESCGGSQWLARQIEGLGHRVQLIAAQHVKAYVTGNKNDYIDAEAICEAASRPRTRSVPVKTLEQQILSTEYKLRKSWMDNRTRIINQVHGFLLEFGIIFPVGQAALEQVPALMERHELPIRLRNAIERMLIDIQRLTRDIKAIDVEIKQQLSEDAAGMRLLSIPGIGPLTASALVADVGDASTYKSSRDFAASLGLVPRQYSTGGKTNLLGISKRGDKYLRCLLVQGAHALMIRIDKRNDTLGAWVRNLLSRKPANKVACALANKMARIVWAVLARGGSYNVQQIV

SEQ ID NO: 351483 - protein, 334 aa, unidentified
MEVMYRRVAGLDVHKETVVGCVRAMVGRKTTRECRTFATTTEGLLALLGWLTESQCRHIAMEATGVYWKPVWNILSDGAFELTVANAAHIKNVPGRKTDINDAMWIADLVACGLIKASFDPGQEIQELRSLLRAGKQLTREQTSHIQRIQKTLEEANIKLDSVISDILGVSGRRIIEAMIAGVRSPLRLAELADRRIKASPKALYDALHGRLTDHHRFMLELYLGQHDALAAAVAKIDQAVDALIARMDEEVAAGQATFLSLIMLLCTIPGVSVLSATVILAEIGRDMSRFPTAGHLLAWAGLCPGQNESAGKRKSSRLRKGAPWLKTVLVQCA

SEQ ID NO: 351484 - protein, 346 aa, unidentified
MTIVETTRPVTGGVDTHLDTHVAAALDGNGGVLGVETFPATRVGYRDLHAWLASFGELVRVGVEGTGAYGAGLNRFLHAAGVEVIEVDRPNRQARRRSGKSDPLDAVEAARAALSGRARAIAKTADGHMEAMRALLVAKRSARDVRVKTLNQIRHLSFTAPDRLRERLADVPSDALAAQVAALRPGAGGDVVVHATKLALRSLGRRVVDLDDQATTIDAVLAELVGATAPGLLEVYGVGVDTAAILLVAAGDNADRIRSEAAWAHLCGVAPVPASSGKVTRWRLNRGGNRQANHALWRIVFTRMGSDERTRLYVARRLDEGLTKPEIIRVLKRYVARETYRHLPRS

SEQ ID NO: 351485 - protein, 410 aa, unidentified
MEVLHPHCAGLDIHKDSVVACVRHMVDGKVTSPVKTFKTTTQELMALSDWLSAEGVTHVGMEATGVYWKPVWHILSDGEFELVLANAAHVKNVPGRKTDVNDATWLADLMAHGLIRPSFVPDEPTQQMRDLLRTRKQFVRERTGHTQRIQKTLEDANIKLDSVISNIVGISGRRMIEALIAGRTDPQALAALADGRLKATPAELEASLRGRVTAHHRFMLRLHLDQLDALEGAIGRIDKEVDSHVEPFRVAIEMLKTIPGVSSLSAEVIVSEIGIDMSRFPTEGDLISWAGLCPKNDESAGKRRSTRMKKGAPWLKTTLVQCAWAATRTKGTYLHAQYLRIRSRRGAKKAIGAVAASILTAAYHMLKNGTLYEDLGANHFDKRAQGKHVLQLVNRLKNLGFAVQITPLAA

SEQ ID NO: 351486 - protein, 410 aa, unidentified
MDAVRMCCAGLDVHQETVVACVLKGPIEQKPQCHLKTFGTTTKELLGLQDWLSEHGCREVVMESTGVLWKPVWNILEGSCDLVLANAQRVKNTPGRKSDMQDARWLAQLHRCGLIEGSMVPEQDIRDLRDLTRYRSKMVQAVTAEKNRIHKILQDANIKLTTFMSDLYGVSGRGLLQKIMDGEVIDEGTVKNLVKTRLKKKVPQLLDALNGKLRRHHREMIRDHWDHLVYLEKRITELEARIEAKAEPYLEKIEQIDSIPGIERTSAVTIFAEVGPHVAEMFPSDAQFASWAGVCPGNNESAGKRRKSKTMQGNKHLKGALCQAAWANSRSSNRIGQFFRRIRKRRGDKKANVATAHLLIRILHALMREKRSYQEIDVSLGDETSKKNTLDRYVKYIQQLGYSVQLNPIP

SEQ ID NO: 351487 - protein, 343 aa, unidentified
MKLSRVGVDLAKNVYQLHGVDRCGKTVWKRRLRHRQWMQALLDKTEPGCEIGMEACTGAHHWARELQSRGYTVRLIAPQFVKPYVKSNKNDANDAEAICEAMSRPHMRFVTVKGVEQQDIQATHRVRTTIKDHRNAKANQIRGLVAEYGLVAPQTLLALRRAIPEWLEDADNGLTDYFRSLLHGLWGDLLTLEGRLKELDKAIEKLARSNEVAKRLQQLRGVGPIVATALVATVGDGGQYNKGRQMAAALGLTPRQNSSGDKHRLFGISKRGDVYLRTQMIHGARAVVSQAKHRDDPLSRWVTDIAKRRHPNVAAVALANKTARMAWAMLRNDTDYDPGLGTC

SEQ ID NO: 351488 - protein, 387 aa, unidentified
MQKPHDNSKVCRAAFVQDSTLVVVIEMALTSWLVAGMIPGVDREPLKKIAPDPEELLQLLYRWRNEAIKAGKEITRIAVAYETGRDSFWLARWLRARGIDAHVIHATSVAISREHRRAKTDRIDTAMLRRGFLGWLRGEPGHCSLAIVPTVAEEDAKRPHRERESLVQERTSTVNRMKSILIQFGVRNFNPVLRKASEKLDAVRTPEGIPLPPNAAAALRRHMERLRVIKEQITAIERTRLQRLQRDPADKMNAMVFLLVRIIGFGVETAEQLVHEILFRDLRDRKAVARYAGLTGSPDESGSKRREKGLSRSGNGRVRTILIQLSWRLLKLQPGSELVLWYQKRTADAKGSRKPMIVAFARKLIIALWRYVNTGLLPEGFELKPAA

SEQ ID NO: 351489 - protein, 350 aa, unidentified
MENDSAKLVAGIDLGDSWSHIAVVDGVGELVREGRLKTTVAGLAGELGGRDRMRVIVEAGTHSPWVARTITELGHEVVVANPRRVELIARSIKKRDESDAETLARLGRMDVALLHPIVHRSREAQEALAVIRARRELVEARTGLVNHVRGASKALGVRLPACDTRYFVRQSRPHLEGGLGRAHGPLLELMTVVEQKVQGYDREIERLIGESYPAARLLQQVPGVGPLTALTFILVIDDPSRFRRSRDVAAYLGLVPRRRQSGERDPQLGITKSGDSYLRSLLVESANYILSSRCKETDLKRWGVAHLREGDANTRRRVKVALARKLAVLLHSLWVAGSVYQPCRQEAAIA

SEQ ID NO: 351490 - protein, 347 aa, unidentified
MAKRLLKQVAGIDVASKELVVSLGRMDEETNTDIYACKTFVNNEKGFTALISWVEKQTIAEYPLRFVMEPTGIYHEALAYFLSNKGYAVSIIMPNKITNFFKTLEIKTVTDKSMSAAIAMFGLEKKLDDWIQPKKAFRELRQLTREREQLITERTVLKNQLHAEQAEAWSGERTIGRIKDRIKFVNAQLKEILTEITTATKQDQELNQAVKTVTTIPGIGLLTAAVVLAETNGFELIRSKKQLTSYAGLDVKEKESGTSVKGKPRISKRGNKHLRRSMHLPALAAIRYSERYKAIYVRIVSRTGIKMKAAVAVQRKLLEMVYTIYKTNKSFEKDYLEEQIKAVTENS

SEQ ID NO: 351491 - protein, 346 aa, unidentified
MAYYVGLDVSVKETSICILDDEGCVVARTDVSTDPDLIARFIFKHAPDLERVVHESGILAIWLTRELEKRSLPIICIDARLAHKALSGRINKSDQGDAEGLAQLARTGWFTQVHIRSEASERVRVLIGARERLIRMRKDLEGHVRGVLKVFGVCMKSVGTGKLRKDFRDQLAAAADTDPAIELMAEMFIPLHKKLCIARDALDDEVRIMARDSDLARRLMTVPGVGPIVALAYIATLDDEKRFRRSIDVGAFLGLTPKRHQSGEVDWSGKISKCGDCDMRRLLYTAASTLISCTRKPSRLKEWATRLAERKGHKKAAVAASRKMAVIMHSVWRNGTVFEPGMEGAS

SEQ ID NO: 351492 - protein, 429 aa, unidentified
MQESASTAPVEGVAAYVGIDWADQKHDVALRSASEPGKVEHRLIAHEPEALMDWLGELQQRFGEKGKILVCLEQSRGALIYHLMGYEFLELYPVNPSQLASFRETFSPGGAKDDQPDAALLCELLYCHRDRLKAWKPDDELTRKLAFLNEGRRKAVDQRTQLANEIKSQLKVYFSLALQVLDNDTSTALAADLLLQWPTLDSLQKQSAHKLRKFFYAHNCRNEQKLLERLELIKVAKPLTRDPAVIEPAALRVQLLAQQLKSLLPYIARYEKWIAELFDAHPDSFLFRDLPGAGPALGPRLLTAFGTDRGRFEHSINFSSLSGIGPIRRASGKKTGKNASVHFRHACPKFLRQSLHEFGLHSIRSCPWAKALYQSLRARGKGHHAAVRAVTFKWIRILFCCWKNRVPYNPERYLQALQTRGSLYAEAAG

SEQ ID NO: 351493 - protein, 416 aa, unidentified
MPHILFVGIDVSSKNNVICCLPSGDGAKSLSRFTVSNDEPGVLSLHERILALMQKHNLTHIRFGLEATGCYSSHLARYLESVLDFAPFEHSVYMFNPSLIKMFKKTHFLDAPKNDRVDAWFIAAKLRSGHLPRAYTWSESLAALQRLTRTRYHIVQTLTRETNFLLTNLFLKFSSYASGPFGKKTSATSLAVIQEFASVEDIITMSVDDLVAFVAECGKNRFDNPQEVAKALQKAARSSYRLPKAMADAVNLAMASNIRIIRSLQEQAKSLQKAIEEHLATIPQTLTSVPGIGPIFAAGLLSEIGDIQRFPNQTALAKYAGLAWTENQSGDFKGVESRLIKSGNRYLKYYFTEAAKSVQVHDIVFAQYYAQKKAEPAKYAEKRALALTARKLVRLVDYLLRTNRLYEPREVIRQQA

SEQ ID NO: 351494 - protein, 408 aa, unidentified
MEVLYPRCAGLDVHKKTVVACVRWASGPRVRHEVRSFPTTTSGLFELRDWLEQEVCTHVAMESTGVYWKPVWHVLEGGFELVLGNAQQMRNVPGRKSDVSDATWIADLLAHGLIRGSFVPERPIQELRDLTRTRSQLLREVTRHRQRIAKALEDANVKLSTVVSDLLGATGRSVLKALIAGQQDARRLLELRHGGLKASAEEFSAALQGQLTDHHRFLLKLHLDQIEFLEAGVQKLEQRLEALLAPFHRLVELLVTIPGVSETTARVVLAEVGADMSRFPSSAHLVSWAGLCPGSNQSADKRGSTRLRSGNPWLRTALVQAAWAATHAKKTPLYARYVRIRQRRGSKKAVVAVAASILTSIYFMLQREEEYGESSPSLPSPSTRQKKVRQLVRKLEALGVSVEVKEAA

SEQ ID NO: 351495 - protein, 408 aa, unidentified
MKIVYRRCCGIDVHKKLIVACLDKGGKQELREFGTTTVEIRKLADWLLEAKCEMVAMESTGVYWKPLYNLFELMGLKAMIVNASHMKALPGRKTDVKDAEWIADLLRHGLLRGSFIPDREQRELREISRYRKSLIEERTREVCRLQKILEGANIKLDSVVSNINGKSARNLLDAIIADESLSEDEVSQMISVRMHSKLEQIMQSIDGITTPLQRKLIAQIMDHIDDMTKRIADMDDMIKGYMEEYETAISAIDELPGIAQRSAEVIIAEIGTDMSRFPSAAHLCSWAGVSPGNHQSAGKRKHGRTTKGNKTLKTILTQCAKAASHCKASYFSAQYQRLAARRGKSRATVAVAHSMLIAIFHVLKYGVAFKDLGSDYYDSYNKEHKIKGYLKRLVALGWTVPEPAVITA

SEQ ID NO: 351496 - protein, 323 aa, unidentified
MEHLGIDVHKVESQICILTESGEVVERRIRTQRERFAAVLGERPRAKVLIEASTESEWVARCLEELGHEVVVADPNFAAMYATRSRKVKTDLRDARTLAEACKLGAYRAAHRTSDRQRHVRTQLSVREALVQTRARYISLIGAVLRREGLRVASGSAASFVRRVAKLALPGQLKSEIAPLLAVFVSVDRQLVWIDTRLEHLARTDETVERLCTAPSVGPVTAAAFSSTVDDPRRFKSAHQVEAYLGLTPSEWSSGEKQSKGHITKAGDNRMRTLLVQVAISILRLRSPRTEALRKWATGIAVRRGKKIAIVAWRGGWPECSLR

SEQ ID NO: 351497 - protein, 345 aa, unidentified
MLIIGCDFHPGFQQVAIFDKQTGEISGKRLQHPQEARAFYAGLAGRARVGMEACGYTQWFERLLDELGHELWLGDAAQIRASVVRRQKTDRRDAEHLLELLLEERFPRLWVPTAEQRDVRQLLLHRHHLVRSRTQVKNQLQALALNQGVQKKRQLWSKAGRAELEKLALPAYTAGRRDECLQRLHYLDGQIRQLSQKVVAEAEKGEAARLLMTHPGVGPQTALAFVLTIGEVERFPNAKCVASYVGLIPTEYSSGGKQRLGRISKQGSPLLRFLLVEAAQSAARYDASLKRVYVRLCMRRSRGQAKVAVARRLATRLYWMLRSGKNYAQLTASGAGKPVSSRGAA

SEQ ID NO: 351498 - protein, 340 aa, unidentified
MGDKQSQYCVLNGKGEVAEEGALRTTPERFRQWLKGRKPCRIVVEAGGHSPWVSRLLETEGYPVLVANPCRLPMIYASQNKNDRMDARKLAQLARVDASLLAPIRHRSAPAQADLSVIRARESLVEARTKLINAVRGLVKTSGARVKKCASRSFPKQAAGQVPEILRPAVEPLLETIEGLSEQIKHYDQLLEEMAERRYPETELMTQVPGVGTLTALTFRLTIDDAERFRRSRDVGGYLGLRPRQQDSGEQTPQLRITKAGDRYLRSMLVNCAHHILGPFGADTDLRRWGLKLCARGGKNAKKRAIVAVARKLAVLLHHLWVCGEVYQPLRDRAVESMVA

SEQ ID NO: 351499 - protein, 340 aa, unidentified
MLVSVLGVDLGKNSCSAVGLDSAGKVVLRRRVSRDALAALLAKLPKCVVAMEACCGAHFVGRAARAHGHQVRLMPPEYVRPYVKAQKNDDRDAEAIAEAATRPTMRFVPLKAEEQLDMQALHRARDRLVAERTALINQLRALLLERGVVLPQRRRALLTWLDAPVAGEPDPLSPRLRLLVADMRAEWAELDRRIGVFDDEFAACARTDEAARRVATIPGIGPVNATALVAAIGDATAFARARDLAAWLGLVPKQATTGGKPKLLGITKRGSRYLRKNLIHGARAVMPRLAATETRLGCWLRALLARAHKNTVVVALANKLARIVWAVLARGDCYQTAAKG

SEQ ID NO: 351500 - protein, 343 aa, unidentified
MSIVGGLDIHRKQITFDYADTGSGEVRRGQVCPADREHLAKWLAQFAGQDAHFALEGCTGWRYVAEEIAAAGLTPHLADPAEAAHMRGPKRRAKTDRADARHQRVLLEQGRLPECWVPPSHILDCRALLETYLDLREQRTGWVQRIHAVLFHHGAPHLAGQRLGTAEGAAALRAAAAHCSPAGQLQLAIAAQMLSVYDERLHQVRHQLLDRARHLRGAAELTARLYGVGPVTGLALTCWLGGAGRFSSARKAVRFAGLDITVYSSDGKRSPGRLSRQGPEALRWCLFEAGKAHARAGAPGYAYYAQVKDRIDGKRAALSQARKIIRQAVHILAELGDDALTAC

SEQ ID NO: 351501 - protein, 334 aa, unidentified
MEQIKRVGVDTSKHVFTLHGVDEKDRPVLRRNLRRGGFLAFFAQLAPTKVVMEACGASHHWGRELRALGHEVALIPPQYVKPFVKRSKNDRNDAEAISEAAARPGMATVAVKSAEQQANAMLLSVRELLSRQRTQLVNALRGHAGEFGLVATKGDKGVRDLLAAAQESLPAPAVEALTLLGRQIDHVEAELAQADQKLQAQHRALPGSRLLETIPGVGWMTALTLTLRVDASQFETGRHLAAWLGLVPREKSTGGKQRLGAISRAGDERLRSLLVLGATAVIRHAKPGKTSPWLLSLLARKPRKLAAVALANKIARVVWAMMTSGDSYRPPQAV

SEQ ID NO: 351502 - protein, 332 aa, unidentified
MQMLAIDLGKQSFHIYGITGDGEVVSQKVSRAKLTDAVTKLQPQSVAMEACASSHHWGRVFEGQGYTVHLIHPRFVKPFVKGSKNDAVDAEAIFEAANRPTMRFVPLKSVEQQDLQALHRTRDRLIVQRTALINHTRGLLAEYGVVMPVGASRFRLLIDKMVETAELSELAKNLFLKLAEEYRGLDARVSALDDMLSEICRKDERCKRLTTLPGVGPIVATSLVAAIDDGRHFASGRALSAWIGLVPRQYTTGGKPRLGGIGNRANHYLRRQLIHGARSALLRIAKHDDRRSKWAQELQSRAGHNKTLVAMANKTARIAWAMLRSGENYKMA

SEQ ID NO: 351503 - protein, 355 aa, unidentified
MDSVKYIGMDVHQEAIWIAVLNFSGKLVMECVIETKAITILDFLKGLRGSLHVTLEEGTWAAWLYDLIKPHVTELVVCNPRRNALLKEGSKSDRIDARKLAELLRSNMVRSVYHGEQGVRKLKELARSYLAISKDLGRVMSRVKAIYRSWGIPCGGKQVYAPRYRSEWLGKIQEAGVRRRAEFYYQQLDALRPLRQQVRQELLAEAKKHSAWKWLRAIPFIGPIRAAVLMALIQTPHRFRTKRQLWSYSGFGIETHSSAEQRFINGELRRAKKPVSIRGLNRNHNHDLKNLFKGAATVAAAKAGPFQEYYDALVAKGIRPEMARLTLARKIAAITLIVWKKGVRFDAKHLKPQTA

SEQ ID NO: 351504 - protein, 343 aa, unidentified
MNTTTIAVDLAKNVFQVAISRHPGKVAEQRRLSRAQFLRFFAKRQPALVVMEACGGAHAWGREIEELGHQVRLLPPRHVSPYRRGNKTDQADTKTILEALRNEEIRPVPIRTVEQQTLAALHRIRSAWLADRTARLNLVRAILRELGFVIPVGARHVVPEAWGLLENADSPLPDPMRLALAELCLEIRELEERAAATEVQLRVLAQQIPLIRQLETIPGIGLLTATALVAFVGDVQRFPTARHFASFLGLTPREFSSGQSRSLGRISKRGNSYLRMMLIHGARAVLLGAKRLKAPDRLRSWALGLEKHRGHNKATVALANKAARIVWAVWRNGCSFESAAVAA

SEQ ID NO: 351505 - protein, 389 aa, unidentified
MLLDHPFDGPTAIRTHIAAIFISLELSRSNWLVTSLSPGKGEKMSKHSVAAGDTAELLALFAELRRKAEVRTGHNYPIVTIQEAGLDGFWLHRVLQQNGIESHVVDPASIATPRRRRRAKTDRLDGETLLRALLAYKRGEPRVCAMVVAPSPEEEDRRRLCRERRTLIEERITHVNRIKGLLFAQGISDYAPLRRDRRARLEALRTGDGRELPSHLKAQLGRALDRIELLVDQIKAVEAGQEALLAAARKPASEEAVPDPVTMLLALKGMGANFAAVLWSEAFYRQFANRRQVAAYAGLAATPWQSGGIRHEQGVSKAGNPRLRTTMIQLAWLWIRHQPQSALTRWFKERSQQGRKRAIVALARKLLVALWKYVTQGVVIEGAVMKPAA

SEQ ID NO: 351506 - protein, 350 aa, unidentified
MKKLSKPQKQMPKETIGIDLGDKMSRYCIVNQDGEAVEEGSFRNQVSSLEMHFAGEPRRIALEAGGQSAWISRELKRLGHEVIVANARELKWITASDTKNDPVDARKLALLARADVHLLAPVEHRTVEQQAELAVVRTRDAILRARTLLINSARGIAKGFGVRLPKSITSTFGKRALVDLPIMLRTPLEGLLGQIDALTQQIGNYDQQVNQLASQHPEVNRLISIPGVGALTAMTFVLTLGRPERFPHSRDVAGFLGLRPKQRQSGARDPQLGISKSGDPYLRKLLVQCAHHVLGHWGKDSALRRWGLAKTEGGKKATLRAIVAVARKLSVLLHRLWVSGEFYQPFPEMG

SEQ ID NO: 351507 - protein, 407 aa, unidentified
MDLRYPKCAGLDVHQQTVVACARVVAGSSVTHDRRTFGTTTGELLALSDWLTAHGCTHVAMESTGVYWKPIWQVLEGSFTLVLANAMHIRNIPGRKSDMNDATWIADLLAHGLIRGSFVPPAPVQELRDLTRTRKQLVREITQHTLQIQKTLENANLKLTGLLSNILGVSGRAILQALVAGETNPERLADLVHGRLKASRADLVAALHGRVTAHHRFLLQLHLTQVAALEQAVREVEARLGHALVPFRTALDRLITMPGVSETVARVLVAEIGFDMTRFPTAGHLVSWAGLCPRLDESAGKRLSTRTRPSNPWLKTTLVQAAWAATRKKDSYLRAQFLRLKSRRGPKKAILAVAASMLTAAYYMLKDDVEYRDLGADHFDRRDKAKLANRLIQRLHELGFAVEVRAA

SEQ ID NO: 351508 - protein, 425 aa, unidentified
MSEKIVVGIDVSKAFSDICILSPNNDIIKRLKISNDITGMKSLIYVLEKVEDEYKDTAVIIMEATAHYHQILANFFRKHNYEVIVINPIQSGALKNINIRKIKSDKTDAYNIALLYRIKNYNETITHSDTVNSIKKLCRQHKELTDEIVEHINRLIAFLDISFPDFKKVFTDLQGKTPLSLLEKYPTIQEVLSPENKQDIIQLIKENSHKSSSYAEAKYEKLLKAAKKSIEVCIVSLSSAVLIQTTVRVIFSLQEALKAIDDEIKRLSLLDEKFHKEIVLLQSIPGVGEYTACVVLSELGDISNFSKPKELVAFFGLDPGVSQSGTYNRKNNKISKRGSPHVRSILHMLAKSNVYPNRNLEYLNPVMRAYFDKKIAEKPYKVVMCAIMRKMVQIIFAVLRNQKSFELRTPEEHQKLIREKSKLVA

SEQ ID NO: 351509 - protein, 460 aa, unidentified
MPLGRTPRKQRLDELACVHPNAAGLDIGSEEIVVAVPPARDPQPVRLFQTFTPDLHALLAWLLECGITTVAMESTGVYWIAIYELLEQAGITCYLVNAQHVKIVPGRKSDWNDAQWLQKLHMLGLLQASFRPDAEIRSLRLLARHRAELIRHRAPHILHMQQALKLMNIQLSEVLSDITGLTGQAIVRAIVAGERDPAKLAELRHPGCKHTEAEIIKALTGTWHAAQIFILEQNLQLYDFYTAQLSACDREMERYYQAMVSRHDKDAPLPDLPKAKPGSRSKNEPNFNVRAQLARIVGVDLVGVMGLSASSAQTIITEIGTDMTRFPTVKHFCAWLGLAPRNDISGGKVLRSRTLKVRSRANQAFRQAAESVARSQSSFGRYFRAMRARLGPEQAIVATAHKIARVVYHLLTTKEPYREECAEEAERKRHERELKQLARRAQKLGYTLNPLAAPPSAPSP

SEQ ID NO: 351510 - protein, 411 aa, unidentified
MSVFCGIDWAEQHHDVALVNATGQLIAKARIPDDAAGYRQLLDLLAEHGDTEAEPMPVAIETSRGLLVAILRTGTRQVYAINPLAASRYRDRHGVSRKKSDPGDALVLANILRTDMHAHRPLPADSELARAVAVLARAQQDAVWHRQQAANQLRSLLREYYPTALNAFVTGRKGGLAHPEARAILAIAPTPATAAKLTKPQIRAALKRGGRQRYTEAETKRLQEAFRAECAHQPPLVEEAMGKQMLALLRQLDAAAEGAEDLARAVESSFQEHPDADLITSFPGLGTLLGARVLAEIGDDRDRFADARALKAYAGSAPITRASGKKRYVGRRFVKNNRLTHAGYLWAFAAITASPGANAHYRHRRERGDWHAAAQRNLFNRMLGMLHHCLQNRVPYNEQRAFAPFLEPAAA

SEQ ID NO: 351511 - protein, 321 aa, unidentified
MTYVGIDVSKATFVVAYSSAKGSRTNSFKNTIKGIHEFIQTISVAEHHCVLEATGNYSSLLVYLLSEAGIAVSLENPLKIKNFARVMLSVTKTDEIDARLIAMYGEKMQPAPYKLRSDTILVLKQKRTVIRQLKKQLVATGNLKGSMEALPFFDPKCKKTIEKTIIFLEKQIKELEEELASLVQSEYKKQMDLLTSIKGIGVTLAAALIMATGGFTYFDNAKQLTRYLGLSPTYQQSGTSVNVKGHINRNGDSSLRSQLYVAAFSSLRCNTECKACFDRLRSNGKPGKVVVIAVANKLVRQAFAVVTQGKPYVDGFKSEKP

SEQ ID NO: 351512 - protein, 413 aa, unidentified
MQTLFVGIDVSLHHNDVVDMLQDGTTVDRFRVTNDRPATQDLCGRLAATMSSRHLDHLVIGLEATGLYGWHLRRELAESPLLQPYRPVIHPFNPKLVAGFKKAYPELPKTDQVDAWVIADRLRFGRLPAPATVNDQYEGLRRLTRTRFHLVQDLTRAKQRFLSALFLKFSSFAQERPVDRLWGPTALAFTVEAASVEEIADTPIEELVQRVIRCSRNRIEDPEAVAAAVQKAARSSYRLPKALADPVNLELATQLGVIRALEAQVKALTEPIDRLLAAIPNTLASVKGIGRVFAAGILAEIADIRRFPDHHAVAKYAGLAWSRHQSGKFESENTHLLHTGNRYLRYYLVEAANSLAVHDAAFGRYYRRKKAEAKTHAHLRALALTARKLVRLVDCLLRSNRLYNPLGAPRQAR

SEQ ID NO: 351513 - protein, 443 aa, unidentified
MAEAEDIEEIEQAVELVERVAAIDIAKASGMVCVRLPHEDRPGFRIQRVFSTVATSGAILDLADHLVCQGVTRVVMEATSTYWKPFFFLLESRGLECWLVNARDVKNVPGRPKTDRLDAVWLAKLAERGMLRASFVPPKPVRELRDLTRARAVMTHERTRHKQRTEKLLEDAQIKLSTVIADIFGVSGRAMLEALIAGERSPKTLADLAHGTIKASHATLAEALTGRFEEHHAFMCRMLLDTVDYLTVQIDKLTARITIRLAELSTTEDDDGPGQGTLIPITDVERLDEIPGIGPSTAQVILTETGLDMSVFPTAGHLVSWAKLSPRTIQSGNMNTSGPTGKGNPWLRGALGEAAISAARTDTFLGARYRRIVKRRGHMKALVAVARSILVSVWHLMANPTARYRELGADFHVRNLDPARKARDLVRQLKALGHDVTLAPTTA

SEQ ID NO: 351514 - protein, 477 aa, unidentified
MVINRVEEILDEPYEQVVQRVCAIDVAKDSGKVCVRTPAESGSGRRVSRVWDVQARTNAIIELGDHLACQSIEKVTLESTSDYWRIWFYLLEARGLDVQLVNARDVKNVPGRPKTDKLDNVWLAKLTEKGLLRPSFVPPRQIRVLRDYTRLRVDLTAERVRHWQRLEKLLEDALIKITSVASRIDTLSVRDMIEALIAGQRNPKVLAGMARGRMRLKHADLVEALTGQFDDHHAELARMLLDQIDALTAQIDTLTERIDTVLADVPVSPPPDGPEPDPDDHQPGRRNRVEQAPQVRGNGSGTAPAPGAAPRPVTALSLVDILDEIPGIGRHNAQEIIAEIGLDMSRFPTPEHLVSWAKLCPRTIQSGSRSSAGKTGKGNRYLRAVLGDAAAGAAKTQTFLGDRYRRLIKRRGKIKTLVAVARSILVIIWHLLANPGMRYQDLGVDFHTKRIDIARRTRNYVRQLEAMGYTVTITAAA

SEQ ID NO: 351515 - protein, 410 aa, unidentified
MEPILISCAGMDVHEKKVDVCIAHGPFDKPPKFEIRTFSTMTSDLEELMALLKKYEVTTIGMESTGVYWKPIFNVMEGEFAIVLANAQRLKAIPRKKTDIIDCKRIANLLRYGLLPNSFIPPREIRELRDLNRTRRKLVGMMTSEKNRLIKVLEAANIKLSSVVSKIYGVSSLALIRSLLEKDKLSREEISQLAKGKLKKKVDQLEKALNGKLTDHHRFLLGMHLENIDYLAKQIKKIDEEIQRKMVPFQKEAKLIQTIPGISEVNASAILAEIGVDMSQFPDAAHISSWAGVCPGNNESAGKKKSGRTQKGNSFLKGALTESAWAASKTKDTSYSAFYRNIVRRRGKKRALVALAHRMLIDIYYVLKSGEPYQDTGAEMVCERTMKRRERSMIRSLEKAGYSVVKAEAA

SEQ ID NO: 351516 - protein, 381 aa, unidentified
MTKNKGRVVGLDVHPDSFAGAVVEGTDSGQARVLSTSTRVELEQLEQWALRHTSTEDKLVLEASGNAFAVAARLRAIGRKVEILDSHRAGKVGKVYCANDRVDAVKIARIYLSALSPIVWQPDAKTLERREIFSAYQAVVKESTRARQQLRSMLNEHCVRLEKGFRLCHPNAIRRLVALREWTPARTMLLQQLHGTLVAARRRRTLLRRHMAQEIVAEEALLRLTRLCGINLVTLYGVVAAVGDVHRFTHSKKLVAYFGLNPSVSQSGNFEGGGALKRHGRGALRALLIQSGKKLLEVNNPLQKWGLAVAARRGRNKAAVAVARKLCVALWHVLMGHAIGALERLDTLETKLSKFATEIGSAALTAFGYHNKADFVQKKLC

SEQ ID NO: 351517 - protein, 456 aa, unidentified
MARKRIKTIKKVTLPVMNPDAAGIDIGATEIYVAIPPDRDSESVRMFATFTRDLNALADWLQQTGIRTVAMESTGVYWIPLMQVLEARGLEVYLVNAKHVRNVPGRRTDVSDCQWLQYLHSVGLLRASFRPAQEICAIRSLWRHRNTLVEMGTCHVQHMQKALDQMNLQIHHVISDITGTTGLAIICAILDGERDRQKLALLRDPRIRASHDTIAKSLEGDYQQEHLFTLRQSVEMYQQYRKKILESEAEIQCLMEKLEGQADPSSLPPAKDSVKKCKVMNPAKALTLRSEGYRILGVDLTTIPGISVLHVQTIVAELGPDYSKFRSPAAFSSWMGLCPDNDISGGKVLWSGTRKVKNRIALALRMAAQSLQQSQSSLGEFYRRMRTRLGAPKAITAAAHKLARIVFHLLTTKEPYDDSVFVRSEERCKQRTKKRLSAQARELGFNLVPVHADITS

SEQ ID NO: 351518 - protein, 346 aa, unidentified
MTNNIQFSSVCGIDIAKSVMQVYKVTSDGVVSNKAVKRADFLNEFRNIPPALIGMEACGGSQHWARELQSLGHTVRLMPPKLVKPYVTGLKNDKNDARGIYTALVMGVREVPVKSAAIQDLALLQTMRTKRQREKVAKINHIRGILTEYGLIMGKSVNAFLAKAGSLIVELKERADVSPFIVSELNALFQKVKEAMAKIKELETNIESIAKTLKHYDLFQSAPGVGPITAATMLVLLCNPEVFKNGREFAAYIGLAPKSSGSGGKNFVTHIPKKYECNNEVRTLLVQCAHAICRSKHKSDWVSSILARKPKKVVIIAVANKLARQLWIMAKKGEKFERRFILAAAQ

SEQ ID NO: 351519 - protein, 318 aa, unidentified
MTHTTQTTALYVGIDVSQNTLTVAIYPTDEVWTLVNDPHSHTALVQHLAQLPVQRVLLESSGGYEKAVVSALQQAGLPVVVVPAQRARYFAKSMRGDLKTDRADARMLAYFACCYPVQPVAPCAPVQAELKELWARREQLVQELEREKKRLQTGMSEAVRASLERMIAVLKDEIAQLEARVAELIASDAALAQKAALLQTAVGVGRVVAYGLVAELSELGQVSHRAIAALAGLAPVRCESGAWVGRARVRGGRPRVRRLLYQAAVVAVSHDGRWRAVYEALVGRGKAKKVALCAVARQLLVVLNAMVRDGRAYERVQE

SEQ ID NO: 351520 - protein, 355 aa, unidentified
MNDVKYIGLDVHQATISAAVRDATGKLVMEAILETKTETILQFFHGLRGSLHVIFEEGTWSAWLHDLLQPHVARVVASDPRKNALLQDGNKNDRIDARKLSELLYLNKFNAVYHGEQGLRTLKELARSYLTITKDLTRVMARIKAIYRSWGIPCAGQQVYAPGHRREWVAKLSEAGVRRRAEIYYQQFDGLAPLRQQARRELLVESRKHAAVKLLRQIPAIGPIRAALLVALLQTPNRFRTKRQLWAYVGLALRTYTSGEYRFEGRQLKRSKKVLAIRGLNRNHNHDLKNIFKGAAIWAAGNTGPFQNFYEACLARGLKPHLARLTLARKIAAITLLVWKKGVCFDAKHLTQQAA

SEQ ID NO: 351521 - protein, 324 aa, unidentified
MIDGRLGIDVSKNKLDASLSNGNKVWAGCFVNSSEGWRQLLDWVTAQKIRRVHACLESTGRYSLGIACRLHEAGHVVSIVNPAQIRDFSRTKLGRNKTDWVDASHIREYCELFKPQPWTPPSRAYRRLGELQTIRAGIVAGLTQWKNRKNSGMIDAVAQSLVDMTISHFTSQLGAVDEAIAQTIDNDPGLRQKRDLLLTISGVGETLAGIVLAELPGPDVLRTSAEVVAYAGLNPRQHQSGTSIDRMTRISKIGNAVLRAALYMPALSAMRYNPAIVALVTRLKSRGRLSPKQIVVAAMRKLLVLCFGVLKTGKPFDPAMATGC

SEQ ID NO: 351522 - protein, 321 aa, unidentified
MAMLSFCGVDVSKQRLDVMVLPEQQRFSVRNDAAGWAELIARLRSFAIAAIGLEASGGYERGAMRALLAAGVPACRVNPFKLRQFARASGVLAKNDPLDTRMIASFVAIMPTRPARPRPPAIERLTEMLAIRRQLNAEKVAAENASRLLEDTMLQRLSRRRIARLAADIDMLDRRLVEITASDAALAHRYRLLTSMPGVGLVLACTLIALLPELGTISRKQVAALVGVAPYAFDSGKFKGRRCIWGGRAPVREVLYMAAMSASNWNPVFKAFHKRLKAAGKLPKVAIVAVMRKIITTLNAMVRDDVVWADHLHGRHIVPAA

SEQ ID NO: 351523 - protein, 358 aa, unidentified
MQIIGVDLHTRQQTVAMLNVETGEIVEKTLRHEGDAVREFYSTLAGPTRVGIEATGSMQWFLELMEELGIDCQVGHPAKIRAAEPRKQKHDRRDAALVLQLLIENRFPSIWMPSREQRDVRSLILYRHQWVRIRTRVQNALQAIALSHGLRRGSSLWSEAGQQAIASLPLTRYTAERRTALQSLYGHLEKRIDDLDRKVEELAWQRPQARRLMTHPGVGPITALATETFLGEPKRFVDGKAVASYVGLIPSEHSSGGRQRLGGLSKQGNPLLRFLWCEAVGHAVRKDAELQRFYQHKLVQKGLGKAKVAAARKLGIRLWILLRDQIDYQEFCRRGQLRQKHGGAHAGMPACEHDPAQQ

SEQ ID NO: 351524 - protein, 347 aa, unidentified
MDHIGIDLHKRESPICILAEGGELIERRIRTDPHRFAEVLGERAPACILLEASTESEGVARCLEGRGHDVVVADPNFAPMYATRTRKVKTERRDARALAEACRLGAYRPAHRLSDAQRHVRARLTVRDALVRTRTRYISLIPALLRQHGWLVPSGSAEGFPQRVMALPLPGRLRSEVAPLLAVMRHLQPSLAYSDERIAAVTATDERVRRLQSVPNVGPVTAAAFGAAIDEASRFHRGHELEASLGLGPRERSSGETQRRGRITKAGSRRVRWLLIQAAVSMLRLRDPRTATLRAWAGRLAARRGKGIAVVALARRLAGILFALWRDGTVYELRRRHACHVTQAVPA

SEQ ID NO: 351525 - protein, 378 aa, unidentified
MENYAGIDVSLELASVCVVDAKGKVVRETKVDSNPQALVAFFSGLGFPVTRIGLEAGPLSQWLHTGLTQAGFETVLLETRHVKAALSAMTVKTDRKDARGIAHLIRMGWFRPVHAKSVGSQEVRALLVARKQLQRKLKDVELSTRGILRGFGLKVGQVTRTKFECRIRELVAGQTMLEQVTAAMLSARATLLAEFNKLHKMILNIVRDDKVCRRFMTVPGVGALVAITFKSAVDDPHRIKKSKAAGALFGLTPKKYQSGELDRTGGITRIGDQMVRSTLYEAAHTLLSRLTRFSALKKWGLDVAKRRGLKRAKVAVARKLAVILHRMWIDGTTFRWSNAHPTTAGHEALHGPKDYRAGPAIRRQPLAPSAQPLRGVGG

SEQ ID NO: 351526 - protein, 359 aa, unidentified
MATSEGLGEGMIIGGVDTHKDVHAAAAMSETGRLLGAAEFPTTPDGYRRLLAWLRSFGSVERVGIEGTGSYGAGLCRYLRSKGVEVVEVNRPNRQWRRRRGKSDPADAEAAARAVLAGEAVGAPKSQDGGVEAIRMLRLARRSAIKARTQAANQLQGVVETAPGPLREKLRALDIPALVASARRFRCGAPTTPEAAARFTLKSLAGRWAALDAEVGRLDEQLGRLVATAAPALLAVHGVGVEVAGALLVAAGDNPARLADEASFAALCGVSPVDASSGRRQRHRLNRGGNRDANRALWVIVMVRMARDPRTRRYVERRTGEGLSKKEIIRCLKRYVAREIYKILLSGTATDTAQPVAAA

SEQ ID NO: 351527 - protein, 401 aa, unidentified
MNAVGIDVSKGKSMVCVMRPFGEVVLEPFEVLHTAQNLHDLAEKLKALDGETRVVLEATGNYHKPVAFVLHDAGLFVSVVNPVLIHDYDNNSLRRVKTDRKDAVKIANYTLDKWTRLRQYLPEDDTRLALKNCYRQYQQAVAIRTMLKNNLISSIDLTFPDANKLFTSPAKSNGCEKWVDFIGDFWHSECISSLSANAFAKKYLKWCQKHGYVFTRSKSDEIYACAVNSASLPKSPTSKLLIQQQVAQLKAVSQSVAAFRQEMLRLSQQLPEFDTVMEMYGVGPSLGPQLMAEIGDVRRFSSKKSLIAFAGIEPQPNDSGKVVGNDKGISKVGSAVLRRTLFLIMTVILQTQPQDEPVFQFMNKKRSEGKPYKVYMMASANKFLRIYYARVKAVMDSERSQ

SEQ ID NO: 351528 - protein, 418 aa, unidentified
MDRTKYIYIGMDIHKETHTAVLLNYLEEKLGEIKIKNTLQGFHKLEDYILKQKGELIPIFGLEDITHYGRNLSIFLLDRDYPVKEVNPSLSYMERMSYASTRKNDTWDAQCISAVLMRRSHLLPDANPQDYYWTMRHLVNRRNALVKASTKLMQQFHEQIQTAYPNYKGFFRELDCQTSLTFFEHYPSSKHLENISEEELGAFLRIPSNNSCSTNQARKILDLVAEETTKERDYQFARDTVIQSITRQLRAYQREIKELERTERQMYQELGYQLETMPGIDIVTACALVGHIGDIQRFFNGDKLANYAGVAPLRFSSAGKGKDLQNKSQGNRKLYSTLYFLAIQQIYLTNKGEPRNPVFRAYFERKVSEGKTKIQALICIMRKLIKIIYSMMKHKTAYDLPKIEEKMASDEKCAKMLV

SEQ ID NO: 351529 - protein, 388 aa, unidentified
MNVDDLLHQNCVRAKFEHDEVIAVGARNQMSATFQPSRNEANRRATMKQYVGLDVSQKETSVCVVDDAGRTVYEGRVKSDPGALTELLRKRAPHAERIGFETGAMASWLWHELRRVELPVVCIDARHAHAALSVRVNKSDRNDAKGLAELVRVGWYREVKVKSEESQRVGAILVARSRLVSIRRDIENQVRSIIKEYGFLFRRAIGLQFRNQVIELLGEDHHLRAVIDPLLSIHEQVCRQQDKFDDEVRHLAKSDETTRRLMTVPGVGVVTALTFRHTIDEPSRFRSASAVGAYLGLTPRRNQSGEADTNGRISRWGDRLLRTYLFEAATVLLYRTKKWSTLKAWGMKLARRIGMKKAKVAIARKIAVILHCIWVDGTSFEWGQSKAA

SEQ ID NO: 351530 - protein, 451 aa, unidentified
MDWINRLSGSPLPVNTSGNAGGILFPPKALCKTELVAASGLSKVSSAPPINPVTFCFFALSIVFSPVNPHLNAEPGAIELIDAEMDTPPSGIRCAKLEVRCLTQSTSNGVSTMKNSLVSIDLAKNVFQVCAMDEDQKIVFNKKVSRKKLLHTLNQFEPTTVIMEACYTSHPWGRAIQALGHTVKLIPPYQVKPFVVGHKNDHNDAIAIAEASRRPKTSFVPVKSLEQQDLQSLQRIRKRLMKHRTAIGNQLRGLFAEYGIVLPKGIRYLRAEVPLILEDIAQPLTTVARGFVHRLYRELADHEKQISEIEAEQSALVEQNDDYQRLLSIPGIGPVVATTLLASVGDANYFKNGRQMAAWIGLTLRQHASGEKSRMLGISKRGDRTLRKMLIHGARTVLNWCERKTDKLSLWLKALSTRAHPCKVIVALANKLARIAWAVLASGKPYQAQAI

SEQ ID NO: 351531 - protein, 369 aa, unidentified
MADRITYVGLDVHKEAIVVAVAAGGLRGEVREYGRIANTPTALDRLLRKLGGDGVKLRFCYEAGPCGYGIQRQVSATGHECIVVAPSLIPRRAGDRVKTDRRDAASLAKLHRAGELTAVWVPDVGHEAMRDLVRARLDAVHSLRRARQQLSGFLLRHGCHYGRPAWTKLHRRWLAGLKFEQAVHHIVLEDYIAAVETTETRRDRLTAQIEAMLPDWTLAPVVSALQTMRGMALVNAATLIAELGDLSRFANPRQLMAYLGLVPSEHSSGASVKRGGITKAGNGAARRLLIEAAWSYRFPARISRELLLRQENQPKPIRDIAWKGQVRLCARYRKLARTGKPANVVTTAIARELTGFVWAIARRVRVTAG

SEQ ID NO: 351532 - protein, 349 aa, unidentified
MGEAITIGIDIAKSVFQIHGVDADGTVVIRRRVGRAKVLELFAELPPCLVGMEACATAHLWARELKKLGHDTRLMPPTYVKAYVKRGKNDAADAAAICEAVTRPSMRFVPIKSVEQQSALMLHRTRDLLIRQRTQLINALRAHLAELGLVAAKGREGLQQLVAAVTDSSDERLPSDAGFACQTIVAQLQAVQAQVNGLDKRITQAHRANADSKRLDAIPGFGVILSTAVVATMTDPKAFKTGREFAAWIGLVPRQHSTGGKERLGSISKQGDRYLRRLLVVGAISIVRTARMRPDKYPWVIELLARRPAKVVAVALANKMARIAWAVLAKGETYRSPVRSSNATIAAAA

SEQ ID NO: 351533 - protein, 366 aa, unidentified
MGWMAPWRHQCAKMVVVKDHQQHEPSKGDITTIGLDQAKSVFQVHAVDEVGRIVLRKRLRRGQVLAFFAGIPPCLVGLEACATAHYWARELIALGHETRLMPPNYVKAYVKRNKHDVADAEAICEAVRRPSMRFVPVKAVQQQSALMMHRARDLLIRQRTMLVNALRGHLAEFGLIEAQGLHKVARLIAVVMDEEDGRVPDIARQVLKVIVNQIEDTQTRIAGLETQVLAWHKNNPVSQRLATIPGIGPIIATAIAATVADPNIFRSGREFAAWLGLVPRQSSTGGKARLGGISKRGDSYLRRLLVNSAHTVLLCSKQAKTDPWLTSLLSRKPRLVAAVALANKTARVAWAIMSRQDTYRHAAVAA

SEQ ID NO: 351534 - protein, 412 aa, unidentified
MQDILTVAMGLDVHRDIIVACLIKGQIGLEPETEIRTFGTLIPEMQKLRDWILETGCRNVAMESTGIYWQPIYEMLEPCFDSDISILVVNARHMKNVPGRKTDMRDAEWIATLLRAGLLKGSFIPAKPIRELRHLTRYRKSVVHDITAQKNRIDKFLQSSGFRFTAFLSDAFGASGRNIIRHLIEAGSIDRAALDKCLKTKTRNRIDEILVALNGSLSVHQRSFLRMIFEHLLALETHKAAVEGAITEEILKHEEAMNLLCSIPGIDITAAASIIAEIGTDMSSFPDAQHICSWAGLSPGNNESAGKRKSTHINKGNPYLKSMLCEVGWIISGKRTLYLSGWYWRVKQKKGAKRATIALARKLLSLIYSMLKTGVPYNEECFEERRKHSERKRAGRMINELQRLGYTVVAPE

SEQ ID NO: 351535 - protein, 441 aa, unidentified
MSTFAVPPAEPVFAAFAAIDWASKEHVVASVPAAGGGIEISKLKNTPEAVELWAASLRQHFAGAPVAVAVEQKRGAVIYMLGKYDHLVLYPVPPTMSSSYRHAFFPSGAKDDNGDTLLLLDLLRHHRDRLLPLQQDTPETRLLRFLTEDRRGLVEQKVSVVQQLTDCVAQYFPQVRAWFGPLDAPLTEALLEHWPSLQQLQRSHPGTLKRFLAEHRSWDNDRIAEQIRHIYAAVPATRDEIVLEACSRKTAACMAQIRVLRDQIAAFDKRIAAVTGDHPDAPIFSSLPGAGAALVPRLIAAFGTDRKQWRDAADLQRFSGIAPILVRSGNCSRVTMRRACPKFVRQTFHEFAAHSIRFCPWAKLLYEHHLKGDKKNHHPAVRAVAFQWIRIAYRCWVNREPYQERIFLAAQRRRNAPFDGTAHVEIEFQNRAGFQKLTAKP

SEQ ID NO: 351536 - protein, 418 aa, unidentified
MDRTKYIYIGMDIHKETHTAVLLNYLEEKLGEIKIKNTLQGFHKLEDYILKQKGELIPIFGLEDITHYGRNLSIFLLDRDYPVKEVNPSLSYMERMSYASTRKNDTWDAQCISAVLMRRSHLLPDANPQDYYWTMRHLVNRRNALVKASTKLMQQFHEQIQTAYPNYKGFFRELDCQTSLTFFEHYPSSKHLENISEEELGAFLRIPSNNSCSTNRARKILDLVAEETTKERDYQFARDTVIQSITRQLRAYQREIKELERTERQMYQELGYQLETMPGIDIVTACALVGHIGDIQRFFNGDKLANYAGVAPLRFSSAGKGKDLQNKSQGNRKLYSTLYFLAIQQIYLTNKGEPRNPVFRAYFERKVSEGKTKIQALICIMRKLIKIIYSMMKHKTAYDLPKIEEKMASDEKCAKMLV

SEQ ID NO: 351537 - protein, 366 aa, unidentified
MEATDERSEWNEQAGAGNPIWVWFGLDVSKDSFTAARFQGLTKETFRPKGKAFPLDKEGVADFLKWRKSFDNSILTDAVAMEATGAYTGKLCRLLLAAAPALRVSVCNPLSVSLYTKSHTATKTDGTDAVYIAMFACDRQPREWRMPDRDQAHLRDLENERKTLTELRTALSNLGGTIEFKDAAKINKEMIKEVDERLDRIEAIMREIVESRQDIADEIALLDTVPGIGFTSAAAIYAMLGSLRQYTRKELSALSGVCPANAQSGKSLKKSRIDKRGPSHLRQILFCDSRWATKIPSVKALKDRLDAQENSSKMRSRCACMRKLLLICRAVVVSGNAYDKEYNQEKSCQGSDEKYPKKSENTVQTA

SEQ ID NO: 351538 - protein, 400 aa, unidentified
MNAVGIDVSKGKSTVAVIQPFGVVIAEPFDVFHTDSGLKELVSFIKSFSGETKVVMEYTGIYYEPVANALHNAGIFVSVVNPLLIDDYDTNRVRKVKTDKLDALKIASYALDKWIKLRKYEPAETIRKTLQLMNHQCIKLNKILVMQKNSLIALLDCCFPNANTLFTSPRRASDGHEKWVDFVMKFPHMDSVATLSLSVFKAKYQSWCKKKNYKYSESKAEQIHEYARTIVSTLPMTDAVKKMVSEAAKHLNSTLEALGTLHSEMDTLASQLPEYETVMNLYGVGKVFCSQLIAEIGDITRLKSGKSLVALAGIDPPPDQSGKDDPKSRRISKRGSPALRRTLFLIMTIYLQQQPANEPIYQFLDKKRAEGKPYKVYMIAAAHKFLRIYYARAKEVMPKE

SEQ ID NO: 351539 - protein, 535 aa, unidentified
MAITSRRTARRHRRPDSVAKPSGSIHPRVQQAGPEHFGIVAVDCAKARSKWMLTDFYGNVLIGPTPVEHTRPGLDDFTARIRRALAEHDLRDTVVAIERTGHYHAPVRRAAVAAGLEARIVHPLASRQFRRPADPGTKTDDTDLFAIQRAAVNGFGLIEPALDEVHAPLRLLARHRRDLVRTNAALRNRIHVELDALLPGLAAALGDIFANEPAMVLARRLGSAAAIRTAGLGGLAALLEAERVRFHRRSLVKILAWADRAAEASDCTEIHKRIFLSLDDERRARLRSIRDLEGELAALLVRTPYVLLLSFPGINVVSAAEFAGEMGPIRNAPRDNAITGRAGLYPARYQSDATDHAGPLVGHGNRALRYVILLIGENLLKCNGHFRALGAAWREAGVDRRARMVRAAQRFCRIAYRMVAGREVYRHPSCRERHYILEKLCIFYGEHGTPAEQVLRDLRAAAGWIPEAEYAAEAGRLPAARPPRPTAGSRPAARPAVPDGRRTGPRPLSAILPELLLRLGVTMVQSSASGEADPT

SEQ ID NO: 351540 - protein, 342 aa, unidentified
MEQVSVVGLDLAKSVFQVHGVNAQGEAVLRRRLTRGQLLKLFEKLPPCLVGMEACASAHHWARELAALGHEVKLMPPQYVKPYVKRGKNDAADAEAICEAVTRPTMRFVGAKSPNQQATMMLHRVRKILTRQRTQISNALRAHMAEFGITAAIGRGGLDRLIAVIADQDDARLPDEARACLAVLSTQLEMVKDQILDNDRRILADARRTEAGRRLMKIPGIGPLLASAIVACVPDPATFGGGRSLSAWIGLTPRQNSSGGKERLGSITKAGNTYLRELLVVGAMAVVRRAKQGSTKRPWVTQLLARKKPKVAAVALANKNARVIWAMMATGEAYREAEMAAA

SEQ ID NO: 351541 - protein, 373 aa, unidentified
MPKYSTAFGMDVHLRSTTVCALDADTGEAVTRRFPGNPWGEIAGWMDGFPGPSLAAYESGYLGFAPQRELAGLGVECVVAAVSKIPRSAADSASKNDRNDAARMAKAILAHDISPVWIPSPEVEGIRDLAGAYDGATARLATAKQRLLAFLAKRGFVYGGTTPAGNPRKYWTYDFLRWLDKVRPEDDGGVRTLAALRNEVEAAAEARADLLSEYGAAVDASPIAAEVAALQSIKGCAFALAAAFSAEVGDFTRFRSGRQVTAYFGLAPSQRSSGDSVRLGGISGAGNALVRKLAVEGSWCYAAARHQPKLMPRDTGVPLEIRMHGRKGSERLLRRREEMLARGVPAAKANAATAAELVRWLWALGMMCREGAE

SEQ ID NO: 351542 - protein, 366 aa, unidentified
MDSIIAFDSHKRYTLASVETKDGQIIKDERISHSRGNIAGFLSGYQRGSPVAVETIGNWYWIIDEIERAGMVPRLVHARKAKLMLGSINKTDKLDVRGLNRLQRVGTLPTVWIPPGDLRDKRELPRTRMVFGRERTRLKNRIHSVLDKYGLQDQFEDISDTFGKAGREQIERCMELLPPETRYTTVLLLELLDVVQGHIDAIERRMREIFEETDQIRLLKTMPGVGFILAVVISLEVGDVGRFCDAQRLASYCGVTPRVHASGDKVRYGRLRPDVNRYLKWAFSEAGNSVAVNRERHPDRHVSRLYNRIRHQRGHAKAVGAVARHLAEATYWILSKRQVYSERGVLRVSSRGHKRGNVMSPVRLAQ

SEQ ID NO: 351543 - protein, 343 aa, unidentified
MTYYVGLDVGLKSSSICIIDDRGAVRLEHDAPSEIEEIAACIHSVAGEIEAVALETGNLTPWLTAGLRAEGFRVVVMEARQVKTTLSSMRNKTDRNDARGIAQILRTGWYREVHVKSLESQRLKTLLAARKALLRRRIDLENEVRGLLKVYGVKLPAQIYHARFDDMARQALAADPALAEALNPLLDARGHLYRAFLDIDRRVKGIAHADPVAQLLMSAPGVGYIAALTFKAAVDDPARFRRSKTVAAHFGLTPRRYQSGERDNPGRISKAGDVEVRSALFLAANTIMNGRGRSSPLRSFGARLSRAKGRKRAIVAVARKLAVVLHTMWTDGTMYCNEEEALA

SEQ ID NO: 351544 - protein, 327 aa, unidentified
MSTSEVAYRWLGIDVSKDTLDVYDPNQPSSTRYENDSEGVGQLWQALQDRSDWAVVCEASGGYETLMATTLAAHGCRVSVVNPRQVRDFAKASGILAKTDAIDARVIARFGGLLQPPATVFASEAAQQLQDWVRRRAHLVEILSGEKNRRQQLQGRNKAVLTDDVEAHIEWLQDRIAQLDQKIEQLSQQQSQWREDKALLTSVKGIGPVIATTLLADLPELGQLSSKQIAALVGLAPFNRDSGRYQGKRTTWGGRATVRSALYLATLVAVRHNSPLRTLYQHFLDQGKEKKVALIACARKLLTCLNAMLKSRTPWQDELVTARYTPT

SEQ ID NO: 351545 - protein, 449 aa, unidentified
MSRPQVIDDQEHERVHDRVAAVDVAKDSGMVCTRTPHPSRPGARRATVWTVKARTGAVRQLGRQLRKDGIEMVTLESTSDYWRIWFFVLEAAGLVVQLVSPAQARQLPGRPKTDKLDAQWLARLTEWGMLRASFVPPKAIRDLRDYTRARVLLVRERTRCWQRLEKLLEGALVKVSSVASKLTTVSAQDMIKAMIAGQRDPQVLAGLARARMKARHDDLVAALDGMFDEHHGELAQLLLDQIAFLSDRIEALAARAAQLTAAMPPAWGINADGTTGPGAGTGPDAPVLTAVARLAEIPGISEDLARSIIAETGLDMTRFRTAGHLVSWAGLCPSARQSGPRTRAGKKGRGDTWLRAALGQAVTGAARTPTFLGERYARIARRRGKAKAQVAVARSILIIIWHLLADPAARFTDLGPGYYQSRTDLDRKLRNHIRQIQALGFDITLTKTG

SEQ ID NO: 351546 - protein, 358 aa, unidentified
MAETAVTTQVVVLGVDTHQQTHHAAIVATDGRPLADREFPTTTAGYTQLWQWACGFGRVEDAAVESSASYGAGLTRMLTAEGVRVIEVNTPDLPRRYAHGKTDQLDAYAAAMAAITGRATAVAKDTRGAVESVRMLTVARASAVEEATRIGNQIRDLCTTAPAEYADQARQARTIAKRAAFIKDLPVPAEKADLSAPAAAFVRAARSLLDRHRLAQQQARSLARELTRLLSKLVPTLLSRPQIGPITAARLVITAGDNVERMGTEARFAKLVGAAPLPASSGKTSRHRLNRGGDRQANSALHMIAVGRMKSHAPTRAYVERRSAEHKTKKDILRCLKRYIAREVFRDLTTDLGALDKL

SEQ ID NO: 351547 - protein, 355 aa, unidentified
MTSSKYIGMDVHKESISIAVRNAAGKIVMESVIQTKASMILQFIEGLRGEVHVTFEEGTWSAWLYDLLKPHVTKLVVCDPRRNALLKEGNQNDRVDARKLAELLQNNQLRPVYHGDHGLRALQELVRSYLTITKDLSRVMTRVKAIYRSWAIPCSGTQVYSARHRAEWLEKIREPGVRRRAETYYQELDGLRSLRQEVRKELLAESKKHEVWKRLGGIPSIGPIRAALLLGIMQTAHRFRTKRQLWAYSGFGVEGHSSADHQVVKGQLQRKKKPIETRGLNKNCNHHLKNVFKSAAVVASTKPGPLQEFYAALVAKGMRPEMARLTLARKIATIVLIVWKKGVCFDANHLKPQTA

SEQ ID NO: 351548 - protein, 344 aa, unidentified
MNEYAGLDVSLEETAIAVVDESGRTVREGKVASEIEAIDGWLRASGAAIVRLGLEAGPLSSWLYAGLRACGWPVVCIETRRLRAVTQAMPVKSDRKDAEAIAQVMRTSWYRPVHVKSDDSQRLRVLLRHRQILQAKRQDIDNELRGTLKAFGLKLGKVGQAGFAARVTELVAGEPWLERLTQPMLAARAALRQSFAELHRLLLKIVREDTVCRRLMTAPGIGAVNALAYKTAIDDPTRFRHSADVGPHFGLTPRRYQSGETEYSGRISKCGDAMVRSLLFEAATALLHRVKAASPLKLWARRLAKKIGVRKATVALARRLAVIMHRMWVDGTDFNPELGRAAAQ

SEQ ID NO: 351549 - protein, 343 aa, unidentified
MQAVTTIGLDIAKSVFQVHGIDATGNVVIRRQLKRRHVLAFFQKLSPCLVGIEACASSHHWSRELKALGHIVRLMPPAYVKPYVKRQKNDAADAEAICEAVTRKNMRFVETKTPEQQSCLMLHRSRHLFIRQQTAVINAIRAHLAEFGVVAPVGRKGVADLLDIVADPSDRRLPEVARACLAALGVQLRLLKAQILEFDRRIMAWHRSNETSKRLDEIPGVGPALATALVASVADPKAFGSARNFSAWIGLVPKQHSSGGKDRLGSISKQGDRYLRSLFTAGALAVIRYAKIHGAKHRPWLTALLARRPAKVAAIALANKIARMAWAMMAKGERYREPAALAA

SEQ ID NO: 351550 - protein, 335 aa, unidentified
MKEITTVGIDLAKSVFTVHGVDAAGRTVLRKTVRRERLMELMAALPPCLIGMEACGGAHEWARKFQVHGHRVGIMMARFVAAYRKSSKNDGNDAEAICEAVGRPNMRFVPVKSAEQQAILALHRVRQGFIEQRTATVNRIRGLLAEFGMVLPQRADQVRRAAVVVAEALPVLAREAIADLRAHLSYLDERIARYERQLVELARQREAAVRIQRLPGVGPLTASAITASISDGHEFANGRQFAAWLGLVPRQYSTGGKARLGRITKRGDAYLRTLLMLGARAVLQSAAQKSDRLSRWAMALRARRGYHRAIIAVAAKNARIIWALLANQREFAMPA

SEQ ID NO: 351551 - protein, 346 aa, unidentified
MQYYINKHRHTCGVDLHGRNLYLCMLDPDRKVLLHRRVPCDTERLLTELKPFLDDLIIGVESMFKWYWLADFCADHDIPFVLGHALDMKAVHGAKSGNDKLDSERIARLLHGGLFPVAYVYPRGMRSTRDLMRRRSYLVQHRSALMNHIQITNSQYNLPALGKIDNATKREGIEARFLDPAVRSSIEADLSVIDILDVVIVRLEKTILKAARVHDRHALNLIKSVNGIGNIIGLTLLYEIHDIHRFDTVQGFMSYCRLVKCLKTSDGKPKGVGGSKRGNHHLKWAFSEAAVLFLRGNPEGQKLHSRLVKKHGKAKALGLLAAKIGRSLYYMLYRNRPFDLGLFVRT

SEQ ID NO: 351552 - protein, 334 aa, unidentified
MDKVTTVGIDLAKRVFALHGVDGAGRVVLRKTLRREQLVETVAGLPPCLIGMEACSGAHAWARRFQKLGHSVRLMAPAFVVPYRKSGKNDGNDAEAICEAVVRPNMRFVPVKSEEQQALLALHRVRQGWIAERTATINRIRAVLSEFGVVLPNRAEHVRRHALQAAQPLPAFAQRALSDLREHLRGLDERVAAYDRELTAQARASDPAQRLMQIRGIGPLTAQAIVATVGTARDFSSGRQFAAWLGLTPRQHSSGGRSRLGHITGRGDAYLRCLLVQGARSVLHTAMHHSDRLSRWVVSLQGRRGYHKALVAIAAKNARIAWALLSKDQTLRAA

SEQ ID NO: 351553 - protein, 403 aa, unidentified
MAGIRTAGVDWASEAHEVCVSEEGRVVARLSVTHDERGLQRLVRELAAHRVGRVAIERPDGILVERLLAAGLQVLAIHPNQLKAARPRYAVAHGKSDRFDAFVLAELARTDAHRFRALVPNSDETKALRALTRAREDLVAVRVGLANQLQAQLESFWPGALIFGAVDNRISLAFIARYPSPTDARGLGAERMAAFLARNHYTGRTEPAALVERVKTAPTGTAGGAERDARRAVVLGLVGALESVVCEIDELKAKIRAALVSHPDAAVFAPLFRSAKTTICPATLIAEIGDCRGRYPTEAALAADAGMSPVALESGKMRVATFRRACDKRLRKAVTVLADSTRHWHPWARDVYERARARGQDHPHATRTLGRAWIRVLWRCWQDGVPYDPSLHGNLSGLQTAGG

SEQ ID NO: 351554 - protein, 412 aa, unidentified
MEVLHACCCGLDVHKESVTACVLWAEGKGKKRKAKRQFGTMTRDLLELADWLQSCGVTHVAMESTGVYWKPVWNILEGHFEVLLVNAQPIKAVPGRKTDQNDAEWIADLLQHGLVRGSFVPPTPIRELRDLTRYRVSLVHECNRIVNRIQKVLEDGNIKLASVATDALGASGRAMLKAMIEGEEDSGKLAEMSCGLLRRKIPELQQALEGRLRSHHRFLLRELMEHLEFVESKIARLEQEIGEHLRPFEEEVERLCTIPGVDWVTASGLIAEIGVQMEQFGDAEHLSSWAGLCPGSHESAGKRKSGRTRKGSAWLRRCLCQAAWAVSTQRGNYLSALFRRLAARRGKKRAIIAVAHTLLQIAFYILRDRKCYQELGANYFDQLHPNRVKRYLVKRLERLGFQVRLVPAAQPA

SEQ ID NO: 351555 - protein, 361 aa, unidentified
MPNAKISSVSRQVVGGVDTHKDLHVAAVVDEQDRILASESFATTRQGYKQMLTWMRSFGEVVRVGIECTGTYGAGLLRYLEQAGITVLEVTAPDKSDRRKRGKDDTLDAGNAAHAAFAGVRTVTPKKRDGMVESLRVLKVCRKTAIQARRVTLQLIQNTIVSAPDDLRESLRTLTRMQLIRTLAAWRPDLSSYRQVTSAYRIALKSLGRRYLELHDEIADLDVMIAALVDDLAPELVARNAIGYESAAQLLLTAGDNSDRFRSESSFAALCGVSPVQASSGKVTRHRLNRGGDRAANSALHIIAIGRLRTDARTQAYVSRRLSEGHSKLEAIRCLKRYIVREVYGIIQRRNSVINQSTVST

SEQ ID NO: 351556 - protein, 399 aa, unidentified
MPYQTLYVGIDVSKYKHDIAIVNEQKQPVAKPFIITDDLEGYQDLIQQLDELLRRYDTHRFYIGLESTGDYWKNIYYYLKQQPQPVVVTVINPVQTRAYAKSELRRASTDAVNARDIARFMAEKRPAASFDRAPIFDNIKDIDRQIVQLKKQQTMTVNKLRIELTKVAPEIEKNVSHIQGKQILALLAEFPTAELIANSSADQLAEIRYGKNNWALSAAFIEKMRALCQKSVAYKTGLGAGYAVQSLVRCIGQFQREIQWLKSQLITLYQSVTDHESLLVTIPAISRETAILLEAYIGDVHRFANAKKLVAYFGLNPTVNTSGTMKRASYLQKKGNALVRQKLFMAVLTMIRQKIDPIYSYYQRLVDAGKPKLVAIGAAMRKLLVIIYYMLSKNEPFKT

SEQ ID NO: 351557 - protein, 458 aa, unidentified
MVTRRPKGNSISKGLPIVHRHAAGMDIGSTFHVVAVPADEDAEPVRKFSSFTGDLHRLADWLKRVGITTVAMESTGIYWVPVYEILEERGFEVVLVNARDAKNVPGRKTDVNDAQWLQRLHECGLLRASFRPQETIVALRTYLRHRERMIEFTASHIQHMQKALMQMNLQLHHVVSDITGLTGMQIIRAIVQGTRDPAILSKFRDVRCKASEATICQALTGNYRAEHLFSLRQAVELYDTYQEKIYDCDKEIECCLNQLNANREVPAVEVPKRRQSRPSKNEPAIDIQSSLFTLVGGIDLTQIHGLGPYSALRIVAECGTDMTRWPTVKHFTSWLTLAPGNKISGGKVLSSQTRRSSNRATSLFRIAAIGVGKTNTAMGAFFRRLAARVGKAKAVTATARKIAVLFYYTLRYGWAYQDPGVDYYEARYRQRTLDNLRRRADLLGFKLVESTPSQIGVS

SEQ ID NO: 351558 - protein, 474 aa, unidentified
MEAGPITIGGHPMKKRSYRSVKVKAVDWEQLGEAVRGERVGVAIDVAKERRVGSVVLASTEEVRLNVSWEHPGESAEVARLVTGLPALKLEVALEPSGTYGDPLRWLFLRRGVEVYRVSPKRSHDAAEVYDGVPSWHDVKSAGLIAKLHVHGASERWPLRSEGERELAAAVRTMGMYDKQAQCNLSRLEAQLARHWPELTTVLDLVSATVLEVVKEYGTPEAVVREEEAARRLMRRVGGALLREEKVLAVVEGARRSIGVPATEGERRAMQELAAEILRCRAAGRRAKAVVKALVEGDEAAQRMGAVIGKTTAAVVISSVGDPRRFESAGALEKAMGLNLKERSSGKHEGQLKITKRGPGECRFYLYLAALRLLMKDPVVAKWYERKVGRDGGKAKNKAVIAVTRKLAKALWHVARGARFDATLLFDAVKLGFKPKVSSAPSPPRCAPESPGESSRASGLHSVGEVLQHAGLVQ

SEQ ID NO: 351559 - protein, 344 aa, unidentified
MDHFGGLDVSVKETSICIVDGTGRIVREVKVGSEPEALLKVLGNPAYRFKRIGLEAGPLSQWLFSALAEAGLPVVCVETRHMRAVLKAQINKTDRNDARGIAQMMRVGLYRPVHVKTLRSQKLRMLLTHRKLLQSKAIAIDNDLRGTLRNFGLKVGMVGTVRFEARIRELVGDLPDLAELIEPLLIVRRTLREQVVILHRRLLAIVRDDEVCRRLMTIPGVGPVVSLTYRATVDVPARFRKSKSVGAVFGLTCSRYQSGELDLSGRISRCGDEMMRVMLYEAAQSMMHSKKWSWLKAWAMQIARRRGMKKAIVALARRLAVIMHRIWVDGTEFRWTREQAPTAV

SEQ ID NO: 351560 - protein, 345 aa, unidentified
MPIVGGLDIHRKQITFDYLDTVTGEVKRGQIAPADRGHLRAWLARVAGRGDVAFAVEGCTGWRYVTGELAAAGIAAHVAEPADTAAARGRKRHAKTDKTDSAHLRRLLAEGRLPECWIPPAQILEYRALLETYHDLRREHTAWVQRIHAVFFHQGAPALGEEALRTEPGLARLRAAAAAHLSPAGQQQVATALDMLAATEAQLGPLRHQLRDAAWHLTGARVLAERLYGVGPVTGLALTCWLAGQDRFSSSRKAVRFTGLDITVHSSDRKGPPGRLSRQGPPMLRWAVYEAGKTHARAAAPDHGYYAAVKDRSNGKLAALSEARKIVRQACHILAELGDDALTTA

SEQ ID NO: 351561 - protein, 418 aa, unidentified
MQIQKKFAATIGLDWADTHHDLWLQPADGGKPEHLIVEQQPEALHPWIAQLRARFKNQPVAFAIETSRGPVLSALLAYDFITIFPINSKALSSYRDAFRVSGAKDDRSDALLLEQYLRHYMDQLKALCPDTVLTRQLAGLVEKRRGLVDLRTQLVNQWHAELKMYYPLAPILLDKLTTPLAAAFPKKWPTLEALQKAGVHKVRAFFYGHHCRGAEKLQARLDALANAVALTTDPALLVPASLTVQTLAGLLEVLHDSIATLEQEIETAMDAHPDAPIFRSFPGAGPALAPRLLVAFGTQRDRFQSAKEVQQLYGIAPAIRASGQSHLVHMRFRCPKFGKQSFHENAGQACKKEPWARAYYDHQRQSKKHHAAVRAVAFKLMRIYFVCWRDRKTYDRNAYLSSLEKRGSTLLKEVSKAK

SEQ ID NO: 351562 - protein, 361 aa, unidentified
MITVGIDAHKDSYTLVAIDEVGKRIAALTVPARKAGHIRILEWLDEFGMVKVAVEDCRHLTRALEASLLLAGHQVLRVHTRLMAGMRRSSREPGKSDPIDAEAVARVALREDNLPTAHLAGPDRDLKLFSDHRKRLVEHRTGLQAKLRWFLHELVPDLEVPSRGIRRATVFDQITDAIAGIDGAVAEIARDLLADIITLTQRIAAIERQLTAIVRAEYPTLLAVPGMGVLGAAAIVGETAGVSRFRSRDAFARFNGTAPIPVWSGNNVKVRLSRGGNRRINTSLHMAAVTQQRLGGEGAVYFAKQVGAGKTRVEALRLLRRRISDRVFTALRQDEAARATSDHRTWITLNTTLNSILATAA

SEQ ID NO: 351563 - protein, 357 aa, unidentified
MTHSTVTKATPRFFGLDVGDRVTHLCCVDGRRAVVERLRFSTTPDGVRRVFADRRPARIVLEVGSQSPWMSDQLRSLGHEVTVADARRVAELTRAGRKTDRRDAETLARLLQGMPELLGAIHHRGREAQVDLAAIRARDLLVRTRTSLVQHVRGTLKAFGLRARSCSAQAFHKKARESVPEDLKPALTPLLDQLAELERRIRHFDREIERIAKERYPAAARLRQVCGVGPLTSLAFVLSVDDPNRFKKSRKVGSWVGLCPKVQASGDRDPQLSISKAGCTYLRRLLVQSAHYILGPFGKDGDLRRFGLRLCERGGRAAKRRAAVAVARKLAVLLHRLWISGQPYEPLRNSLRTAVAN

SEQ ID NO: 351564 - protein, 341 aa, unidentified
MGEVTTIGLDLAKSIFQAHGADASGGVVFRKKLRREQLLGFFASQPRCVVAMEACASAHFWAREIAALGHETRLIPPAYVKPFVKRQKNDMADAEAICEAAQRPTMRFVQPKSAEAQGAAVIFRTRDLLVRQRTQLINALRGHLGEFGFVVRQGAGHVGRLIDVVADPASALPAEARPVLAVVAQSLQAIQAHIADLDRAIAARAKADPVARRLMTVPGVGPVVATALVALAPSASSFRRGRDFAAWLGLTPKQHSSGGKERLGRTSKMGERSLRRLLILGASSAAKSAARGGSRASPWLLGLLARKPRMLATVALANKMARIVWALMAHGGAYRAPAAAI

SEQ ID NO: 351565 - protein, 350 aa, unidentified
MEPMYYIGLDVHKQKISYCVKDSGGRVHAEGSLPTTRADLDRWMKALPQPWSAAMEATMFTGWIYDHLKPHAAALKVAHPLMLRAIAAAKKKNDRIDASKICDCLRCDFLPECYMAPTAIRERRRTLRYRNLLVRQMVQMKIKISSLLMEAGVRYNKQRLHKAGYFRELLATNPDIDEGLRSLLRQCRETVVRLSKTESALIRSLEHDRLLAERVERLMSIPAIGPITELTWALEIGEVQRFSSIKKAISYCGLCGAEKSSGHMVQRTPLSKQRNKHLQTTLIEAAKMAPRYTPTLALLYDREKQKGNANRATLAVARKLVVYLMAVDRGQCHFLVIDQATCTARLGAAQ

SEQ ID NO: 351566 - protein, 344 aa, unidentified
MEVAIGVDPSKSSLAVAAVDPLGRVVGTAEFSNDPRGHRALLGWVGERGPDRVIGIECSLSYGATLSRVLLRSGEDVREVPTTLTHRQRRRRASQGKSDMVDSVAIARIVASGEVLPSAHRLEVLADLRALVEYRDQLVRARTQVANRTHADLVNVLPGYERQVPNLRAKAHRTTARSLLRGDRSVRGELVRKRLGELSRLEGEIAAMDRRIRATVQKTGTSLTSIPGVGPFIAAKILGEVGDPSRIRSKPAFAVLSGTAPLSASSGQVQRHRLNRGGNRQLNWALHYIALVQCRITPEAQAYMARQREAGKSHKEAMRCLKRQLSNVVYRHLVADARRAELAA

SEQ ID NO: 351567 - protein, 343 aa, unidentified
MQTVTTIGFDIAKSVFQVHGVDAAGQVVVRRQLKRRQVIAFFQRLPRCLVGIEACASSHYWSRELQALGHSVRLMPPAYVRPYVKRQKNDMADAEAICEAVTRANMRFVPTKTPEQQSGLMLHRTRHLFMRQQTSVINAIRAHFAEFGIVAPVGRGGVEELLRVAADPSDKRVPEVVRVCLAALGSQLLSLKKQILDFDRMIMAWHCSNQTSKRLNCIPGVGPLLATALVASVADPKTFRSGRNFSAWIGLVPKQHSSGGREKLGSISKQGDRYLRSLFVTGALAVIRYAKIHGAKHRPWLTALLARRPTKVAAIALANKLARMAWAMMATGARYNYPASLRV

SEQ ID NO: 351568 - protein, 344 aa, unidentified
MTTQQTLIGLDIAKNVFQAHAVDETGRCVFKRKLGRSEVASFFDALLPCRVVLEACATSHYWARIIRQHGHEVALVPPEAAKAFVRKGKKNDAIDAAAICAAALHPDTRYVPVKAEEQQSILSLHSARALLIKQQTMVVNALRALAAEFGIVAPRGTGKLDALMATIATAELPETMKQVAETLFQQFSTLRDKVSRLEARIEAHARTDEDARRLTSVPGIGPVTASMIVASVTDIGAFGSARQFAAWLGLVPRQHSTGGKPRLGRITKAGNREIRTLLVLGATSMIYRAPRWQSVAGAWLRGLLERRPARLATIALANKTARIVWALLSRKEVYSPRGRHAVPA

SEQ ID NO: 351569 - protein, 354 aa, unidentified
MEDYDGRQVVGMDLHRRRSVLVRMTEDGRRLGTAKITNSPAELRREIARAGTCPRVVLEATYGWYWAADTLAAAGAEVHLAHPLGVKAFTYRRVKNDERDSADLADLLRMGRLPEAWIAPHEVRELRELTRYRAKLVHLRTSCKDQVHGVLAKLGVPVTCTDIFGTAGSAWLDGLRLPQPYAGKVTSLRHLAGELTTEITMLGEVIADLLAGHRGYQVIQQLPGIGPVLAAVITAEIGDVTRFTNPGQLCSWAGLTPRHRESGTKVTRGHVSKQGSRLLRWALIEAIQRIPKDSVIGAARDGIIARRGKEAKNIAKVAAARRLLTLVFYGMRDHQIRCLARPATPPAAAPARAA

SEQ ID NO: 351570 - protein, 392 aa, unidentified
MYIVGIDIGKNHHEASIVSPEGKQIGPSLRFATTHKGADSLMSFIFKNIGNSPCVFGMEATGHYWYPIYSFLKAKGYTIYVINPIQSDSLRKMYIRQTKNDSIDSFLIAEVIRFGQFSTTSMADENILAMRQLCRYRDSVISSRTEIKLRISTIMEQIFPEYEKQFSSLWLSTSMGILEKYLTPENIQNAPLDELHGIIKDKSHNRLTMDKALSIKEAAADTFGIKIAQEAFSFQLKQLIDRMHFLDQQIEALDCQILGYYEKFDCYLHTIPGIGMIGAATILAEIGDTKRFKSSSALVAFAGIDPTVRQSGEFNSIHNHMSKRGSPYLRHAIFLAATTCSFHNSPLNAYYKKKRDQGKHHLTATGAVARKLTTVIYAVLRDGKPYEPKKFC

SEQ ID NO: 351571 - protein, 356 aa, unidentified
MAEIQQGVIGGVDTHKDLHVAAVVDHNNCVLGSKFFPTTRRGYCQMLSWMRSFGPLIRVGIECTGSYGAGLLRYFQIEGIKVLEVTAPDRMERRKRGKSDTIDAECAAHAAFSLIRTVTPKTRDGMVESLRVLKACRKTAIMARRVALQMLQMTLVSAPEKLREQLRKLTRMQLIRTLVTSKPDMTRYRHVEDAYRISLKSLARRYLELHDEISELDIMIAAIVDDLAPDLIKCKAVGYECASQLLITVGDNPERLRSESSFAALCGVSPVPASSGKNQRHRLNRGGDRAANSALHIIAIGRLRTDAKTQEYVARRVGEGHSKLEAIRCLKRYISREIFTYLRNRNRQINSVQITT

SEQ ID NO: 351572 - protein, 430 aa, unidentified
MKYSVNERLEEITAQTIIVGVDIAKTVHWARFVDYRGIEICKAISFKSDRQGFESIVSKIKEILNNKIVRKAYDNVLIGMEPTGHYWKTLANYLNNEGYRVVGVNPYHTKKAKELDDNSQTKSDKKDALTIARLVKDGRYFDPYLPQDIYAELRVLANARNSVMRRNNAVKNTITAVLDEYFPEIRTVFKNLFTGKASRQILKSCPFPSLILEMGETGVLAEIKKAVKRTVGIKKVRQLLEAAKESIGVEYGLASAKLRLSLLLDELGMIENHIEEVESSMERMLDATGYAEQLLSIKGIGIVTAASFLGEAGDPLRFQNARQIANYAGYNLIEDSSGNSKSGTCISKRGRSRLRSLLYNMAFTMVGQNDEMKALYKYLISRPQNPLKKKQALVVISKKIITVIYSLLKKQEVYNPALVLGPVRCEMMAA

SEQ ID NO: 351573 - protein, 382 aa, unidentified
MPAYADPTPKPISADTIFLAFELSGTSWLVALHAPDADKVERHRLPAGVAAEVLGLIARTKARVTRRLGTTPRVACCYEAGRDGFWLHRVLEAEGIASHVMDPTSLQVDRRARRAKTDRLDAQALLRALMAWSRGERQVCSMVRPPSPEHEDERRLSRERGTLLKERLRLSNRIKGLCAAQGIYDYEPLGADRRERLARLVTGDGRTLPGRLAAEIGRQLDCLELVLRHLAEVEAVRDARAAQARKEGGSKLAALLRLKGIGPEVATVLELEVFHRHFANRRDVAAYAGLTPSPYASGGTSREQGISKAGNRRARKALIELAWLWLRHQPESALARWYRDRVGTATGRVKRIAIVALARKLLVAIWRCVETGLVPAEAAVRT

SEQ ID NO: 351574 - protein, 316 aa, unidentified
MSKIICGIDVASDFLQVRIGREGAEGCFSNSENGIAELVGFCRQHQVELVAMEASGGYEKLPFALLWGQSLAVAILNPRAVRQFAEGMGLLEKTDRIDAGVIAWFAEVKHVVPTQPQSAQQQQLKALVVRLRQLTELQATQRNQRLLVEDAMVQKSFTCLLAVVKTQIRELEKAIAELIAADPLWQKLNEVFRSIKGVAQRTVSRLMAEMPEIGTLSNKAISKLAGLAPLAHDSGKREGKRVVRGGRRGIRAILFVVSLVVRRYNPDFAAFHQRLTAAGKAKKAVRIALAHKLLVRLNAKARAVRRELAAAAVLPV

SEQ ID NO: 351575 - protein, 484 aa, unidentified
MSKPKKHSKQLGEKKTVAGKGKRGLKRKGMCLEDRPILEANAAGIDIGAREIFLAVPPDRDEHPVRVFPTFTEDLEQMAQWLVSCGITTVAMESTGVYWIPLYDVLEKHGVRACLVDARGMKNVPGRRTDWHECQWLQFLHSVGLLRAAFRPEGAVCAVRSMMRHRTELVAMTSQHVQHMHKALTQMNVQIQHVISDLTGVTGLAIVDAIIAGQRDPMVLAKLRDPHIKADEETIRKSLVGNWQPEHLFTLKQSRQSYQHYREQIAACDEQIEKLLVAFQPRVNPEEKPLPPDRKKKQSGRRKKNVNPKTGFDLRTESYKLFGVDLTQIPGLMAIVLALFSEVGRDMSRWPTASHFISWLALCPDNDISGGRVLWRGMRRVQNRAGHLFRLAAHSLHHDQTPMGDYLRRMKSKLGPAGATTATAHKIAIIFYTMIKKQVEYDATIWAERDAEREKRFEAKLRRQAQQRGYKLVPIEENPARVSA

SEQ ID NO: 351576 - protein, 349 aa, unidentified
MSQNLNSAVAVIGIDIGKNSFHVVGLDDRGAIVLRQKWSRGQIEARLANIPPCLIGMEACVGAHHLSRKLKALGHDARLMPAKYVRPYSKGQKNDFRDAEAIAEAVQRPTMKFVATKTAEQLDLQALHRVRERLVSQRTGIINQIRAFLLERGVAVRQGLRFLRAELPRTLATPPEVLSPRMVRVISDLAEDWRRLDERIDQLSSEIGVLARQDSGCERLMSVPGIGPIISSAMVAAIGTGDAFAKGRDFAAWLGLVPKQMSTGDRTILGKISKRGNRYLRVLFVQAAWVVLIKPMSWERYGLKHWIEAAKKRLHRNVLAIALANKLARIAWGVLAGSRTFEASKLQAA

SEQ ID NO: 351577 - protein, 419 aa, unidentified
MGSMKKCCCGVDVHKSFIIAVIAVFKNEEVLFTKHMRFSTYTKGLRSFKEWLELNNCYEICMESTGKYYIPVYRIVSDSQFHVDVVHPKYVRAPRGKKNDKRDAKRIADMYMRDHIAEYSLIPPAEILAIRDVTRYRRKTINTITAEKNRMSNCLTVSCIKLDEVLSDVYGKTGQALIDQIIKNGGCNFNPEPFINKRVKAPLEAIKMALDGDVTQATLAKMKIIKERLNYLEKQKTELESTMESLSRDFNRQINLLVSAPGIDTLSATSIISEIGVDMNVFGSVKRYLSWVGLVPQNDESAGKKKSTRIGKGNKWLKPVVIQCANAAINDKKHPEIREKYLALKKRRGHGKAIVAIAKRIMTAVYYMLLRDEMYNPNTCVDRAPARGKISLQNLIKHFQSKGYTITTEDGEIIDPQAA

SEQ ID NO: 351578 - protein, 340 aa, unidentified
MDEYIALDVSLKETAVSIRRDGKRVWRGKCPSDPQLLAALIRKHAPAPKRVVFETGPLSVWFFHALAAEGVPAICIDARHAKAALDMATNKTDANDADGLAHLAEVGFYKEVRVKSFDSMLTRTLVAARTRLVRIGTELSNQIRGLMKTFGLVVPAVTGSKFEHHVHALLADNIDLGQIIRPLLEAWHAVRLRAAELGRKLLADARRNAACQLLMSIPGVGVVTATSFVSAIEEPANFKHSRSVGAFVGLTTRRYQSGEIDYDGHISRRGDSHLRGLLYEAATVLLTRSRSECDLRKWGLQLRERLGFKRATVAVARKLAVIMHSMLITGEPFREKSAAA

SEQ ID NO: 351579 - protein, 385 aa, unidentified
MSQFSGSPQAAIDYNSTIIGALELSEKKWVLAVQLPGVDRHSRHVLDGGGETLASFVERLKVRCVSAGRKIARVILTHEAGRDGFWLARFLARRGIEVHVMQPSSLPVDRRARRAKTDMIDVEMLLRTLMAWLRGEPRVCSMVPIPSEADEEARRAHREREDLTRERRSIVNKIDGILATLGVKGYKALRRDRREQLNYARQPGGDPIPQKARARIERLLDRLDLVLKLIDQVESARDAVLKKDAPADEAEEMIRSLTELRSIGPDVATLLVREAFVRQFRNRRALAGYVGLGGTPFSSGGSEREQGIGKDGNRRVRAAMVELAWMWLRWQPDSALSVWFRARVGTMGGRIRKIMIVALARKLLVALWRYVTDGVVPDGAKLKAA

SEQ ID NO: 351580 - protein, 340 aa, unidentified
MKLYTGIDLHSNNSYVGTIDETGKRVFKKKLPNDPGVILNALAQFKNDIVGIVVESTYNWYWLVDLLMAEKYTLHLANPTAMKKYSGLKYADDEHDAFWLAETLRLGILPEGYIYPKEDRPIRDLLRKRSHLVRLRSSLVISLQNIINRNNGFKLKKNKIMASTTNHVTPYLETNEDLALAGRVSKDSIDFLTRQIKTVEATIEGKVELREPYAKLLSIQGVGKILGLTIMLETGPISRFDKAGNYVSYCRKVSSKWISNDKGKGKGNRKNGNKYLAWAFSEAAELARRYYPEARAYYNRKLKKTNVAIAHAVLAHELARAAYYVMRDQVPFMPEKLYGS

SEQ ID NO: 351581 - protein, 408 aa, unidentified
MQVLYTRCAGLDVHKDTIVACVRCVSPPMHQEVRSFGTTTTQLLELADWLGEHGCTHVAMEATGVYWKPVWHVLEDEFELVLANAAHIRNVPGRKTDVNDAMWIADLLAHGLIRSSFVPPHAIQQLRDLTRTRKQLVREVSQHSLRIQKVLEDANLKLGSVLSDVLGKSGRAMLDAIVAGETDPARLAALAQGTARSKTAELREALRGRITEHHRTMLRLHLQVIDALHRTLGELDTAVGKALAPIQQRTRLLTSMPGVSDLTASVMVAEIGVDMSRFPNAGHLISWAGLCPRSDESAGKRRSTRVRKSGTWIKTTLVTAAWAAVRVKTSYLRAQFLRIKARRGAKKAILAVAASMLTAAFHMLRDGTEYNDLGSEHLDRQDRSKTIRRLLKRLQDLGCEVPQMAHET

SEQ ID NO: 351582 - protein, 337 aa, unidentified
MNRARIYKDGKPTVQTNSNAKCWVGIDVSQDWVDVVVLVEEQKAESLRCDRAVGELAQLALRLLPYRPQGVVLEATGGLEGAVITALASAGLPVMRMNPKRVRDFARAQGLLAKTDALDASALALFGARMQPPLRAWPEAERQQLAAWVARQQQLVVERARERTRLCQTTEPQLRKSVERVIAFLGKELALLEKQLAAWVAQSETWKAQEALLRTAPGVGPKTALRLLAQLPELGRLNRRQIAALVGLAPFACDSGKWRGKRRIRGGRGGVRAILYLASWTTVRAEGHLKQFYLRLLAAGKPKQLALIAIARKLLLALNEMMRLNQPWRTAKVPISA

SEQ ID NO: 351583 - protein, 343 aa, unidentified
MQVNTIGVDLAKNVFQIHGVDSAGKVVITRQLRRKQVLEFFSKLPGCLVGMEACGTGHHWAREISKLGHTVRLMPPSYVKGYVKRSKSDAADAAAICEGVTRPSMRFVPIKSTDQQALLMLHRTRDLLIRQRTQLINALRAHLAEFGLVAEKGREGLAQLSTIIADEMNREALPSAMKQALQAIVDQLAALELQVGALDRAIHAHHRANDMSCRLETVPGIGVIGATAIASTVTDPSGFKSGRDFAAWIGLVPRQHSTGGKERLGGISKQGDRYLRRLLVIGATAVVRQARLHPQKHPWIMRLLAKKPAKLVAVAVANKMARIAWAIMAKGGHYRAPELAAAA

SEQ ID NO: 351584 - protein, 343 aa, unidentified
MQTITTVGLDIAKSVFQVHCVDTADQVVIRRQLERRYVLAFFQKLSPCLIGIEACASSHHWSRELQALGHTVRLLPPAYVKPYVKRQKNDATDAEAICEAVTRANMRFVPTKTPEQQSGLILHRTRHLFIRQQTSVINAIRAHLTEFGIVAPVGRKGVEELLRVVADPNDKRVPEVARACLAALGAQLRGLKKQILESDRMIMDWYRSNETSKRLHYIPGVGPLLATALAASVADPKIFRSGRNFSAWIGLVPKQHSSGGKDRLGSISKQGDRYLRGLFVAGALAVIRYAKIHGTKHRPWLTALLARRPTKVAAIALANKIARMAWAMMSKGERYREPAALAR

SEQ ID NO: 351585 - protein, 415 aa, unidentified
MALKIVYKICCGIDVHKTFVVACIASTNSKGVTTYESHRFSTYTKGLRDLLQWLLARNCKDVCMESTGKYWIPVYNILENDCTIVLAHPKYVKAIRGKKTDKKDAKWIADLFKHDLVAGSFMPPADIRQLRDLMRYRFKLTCFRSSEKNRLQNCLTVSNIQLSNVVSDTFGKSALAILDKLLENPADTSFDLEPLVFKSLKKKLPELRDAIDGFITPEQAGKLKVIKGHFEDLESRKAELEELILALAAPYQQELAILQTAPGISSVFTAIGIISEIGTNMEAFPSAKHLCSWAGLTPTNNESAGKKKSVRVSKAGCYIKPLLVQCANAVVTSKKHPEIRNRYLRLKKRRGHKKAIIAIARMLLTALYHMLKNGENYNAELYRKSNLPPVDREITVEQAIIIARKQGYKIKSATA

SEQ ID NO: 351586 - protein, 320 aa, unidentified
MKSVTTNDKIFVGVDVSKATLDVYRPDTKEVFKIENSDEAIALLCSQLEKMKRKVMVVMEGTGGYEYLLLKHLAVHKLEASVVNPRRVRDFANGIGLDAKTDPIDAKAISKYAEVVVPKPIATKSDHELKHGALVARRNQLLELVNQENNRLKQSWDDDAKQSIRDVLEVLKKQVKSIDSQLAKMIQADTENQRAIEILQSVKGVGPVMISTVLAELPELGKLNRGEIAKLVGVAPINRDSGKKSGKRFIGGGRGQVRRVLYMATIVAIRHNPAIKAFYVHLKSKGKESKVAIVACMRKFITILNLLIKTNQLWENKMSV

SEQ ID NO: 351587 - protein, 338 aa, unidentified
MELYAGIDLHSNNSVVTVLDEQDRTVFAKRLPNDLAAVVAALRSCAGTLHGVAVESTYNWYWLVDGLQEAGFTVHLVNTAAVKQYDGLKHSGDFSDARHLAHLLRLGILPTGYIYPREQRAVRDLLRKRGQLVRQRSTQILSMGNLIARNLGCHAGGNEIKRWQPEHIDAMPLLDEQKLALKANLAVMICLDSQVDALERSILAKAKLREDYQALKTVSGIGVVLALTIALETGDVGRFDSAGNFASYARTVDSRRESNGKKKGVGNAKCGNKHLAWAFIEAAHFAVRYDAAIKRWYQKKCASALAVVAIKAVAHKLARACYHVMKDGKPFDVARAFG

SEQ ID NO: 351588 - protein, 362 aa, unidentified
MDTHKAKISVALAETGRDREVRFLGEIVNKPDAIKRPVDKLASRHGELSFCYEAGPCGYGLHRQITRLGHECMVVAPSLVPTRPGDHVKTNRRDAVTLAGLHRAGELTAVWVPDAAHEAMRDLVRARTSAVEDLRAARQRLQGFLLRHDRVYTGRTSWSQAHRRWLAGLGFDHPAQQIVFQEYIHAIDDAEARRDRLSSQIGELLPSWSMAPLVEALQAMRGVALLAAVTVVAEIGDFRRFANPRQLMAYLGLVPSEYSSGKKVTRGRITKAGNTHARRVLVEGAWTYRMPARLGPVLHARLDGLPRDVREIARKAQVRLCARYRRLAARGKPKNLVTTAIAREMEAFAWAIARQVEPAPAA

SEQ ID NO: 351589 - protein, 370 aa, unidentified
MTTTDAPTGASAKTRETIWCGCDVAKASFDAALWLPDDDPERAAARPMKAIPVHTFERSPEGVREWLRWADAQRPESPEPFAMRVVMEATGKYSLDLAVWMLSERAALAPAIINPETARAFNKSLALRNKTDKTDARALARFGAERRPAPLAPPSPAMAELRALTRHRQSIIEMRVAEENRLGECGDSPTVARMIKSHVVRLRKDEERAEKEIRRHLEALPDALRDAQAIDGIYGVGFVTAATVVAELGDLRRFEAARQLTAFVGLSPRRNDSGPKQGPSRLCKKGSPRLRKALYMPALTIIGGDNDLADCYRRLVAQGKPKKAALAVVMRKLLVLMRAVLISGEIYEKHHRKTCAKPVEKGEQKTQLSA

SEQ ID NO: 351590 - protein, 360 aa, unidentified
MEVGQTMADHGVVGGVDTHKDLHVAAVVDELDRVLESRCFATTRHGYQQMLTWMRSFGQLRRIGVEATGTYGAGLLRYMQNAGVEVLEVTTPDTHDRRKRGKNDDLDAQNAAHAAFAGRRTVTPKSRDGMVESLRVLKACRKTAVAARRVALQMIHNTIVCAPDELRETLRRMTRMQLIRTLAAWRPDLTDYRSVVSAYRITLKSLGRRYLELHDEIADLDTMIVAIVDELAPALVARNSIGHGSAAQLLVTAGENAERLQSEASFAALCGASPVPASSGKTTRHRLNRGGDRAANSALHIIAIGRLRTDPRTKAYIAKRVAEGHSKLEAIRCLKRYIAREVFSLISQRKREINQGRNAA

SEQ ID NO: 351591 - protein, 343 aa, unidentified
MQSISTIGLDIAKSVFQVHGVDEAGQVVIRRQLKRRHVLAFFQKLPPCLVGIEACASSHHWSRELQALGHAVRLMPPAYVKPYVKRQKNDSTDAEAICEAVTRPNMRFVPTKTVEQQSCLMLHRARHLFIRQQTAVINSIRAYLAEFGIIAPVGRRGVEQLLDVVADRADHRLPEIARACVAALGSQLRALKAQILEFDRRIIAWHRSSATSRRLDAIPGVGPALATALVASVADARAFRSGRDFSAWVGLVPKQNSSGGKDRLGSISKQGDRYLRSLFTAGALAVIRYARIHGTGHRPWLTGLLARRPAKVAAIALANKLARMAWAMMARGQRYTEPAALAA

SEQ ID NO: 351592 - protein, 350 aa, unidentified
MKKFFGCDAHKRYSVFASMNEAGQKGASIRVENNRSLFCRFLSKLPPGSSIALETVGNWYWMVDEMEKAGHMPQLAHATKAKLMMGQINKSDKLDAHALALLLRNGTLPVVWIPPGELRDQRELSRMRMALVRTRTKFKNRIHATLSKYGLQIPEVSDIFGVQGRLLLRNCLGELPSYTSQSVETQLELLDQVETHIRWCEKKIEEVVNKTPAMELLLTLPGVGDILAVVMAMEIGDVRRFPTSHHLASYAGTVPRIKESGGRHYYGKVRPDVNRYLKWALVEAANIIVINQGRWSDRHVVRLYWRIKERKGYPKAVVAVARHLAEAAFWVLKRNEPYKEPQGAKTVSST

SEQ ID NO: 351593 - protein, 408 aa, unidentified
MEVICPRCAGLDVHKQTVVACVRIAGDGPPLQEVRTFATTTSGLLALADWLDSHGVQVVAMEATGVYWKPVWHVLEGHFELVLANAAHVKNVPGRKTDVNDAMWLADLLAHGLIRASFVPPVAVQELRTLTRTRKQFVRERTAHTQRIDKVLEDANLKLGTVLSDVLGKSGRAVLQAIIDGHTDPERLAGCVTTRVKASRAELLEALRGHVSAHHRFMLKLHLAHIDALDQAIAAIEKEVGQGLESFRHAAKLLSTMPGLSAVGSNVVIAEIGIDMSRFATPAHLLSWACMCPRNDESAGKRRSTRVRRGGKWLKTTMVQAAWAAIKVKGSYLQAQFHRLRARRGAKKAIIAVAASMLTAAWHMLRNGTEYRDLGGSHFDRADAHKTATRLIRRLQQIGYAVQVTPAC

SEQ ID NO: 351594 - protein, 373 aa, unidentified
MELQFKAVTATKANKNEREVKDCTGKNIYIGIDVHKKEWKVSIRGEKKEYICISMDPDPDTLHKYLSKNFPGGKYHSVYEAGFSGYWADRRLRELGIRNIVTNPGDIPQRGKEKRGKTDSVDAGKLSRELEGGNLEGVYVPTAEEEAIRSWVRHRNKLAKDEASAKTEIKMFLLSRGVRYDEEGKTAKNWSKAFIRKLAEKEMKTEADKELLELLLEELEGKIEATEKVTKKIEEMINKKESFKRNYENIKSVPGVGKVTAMTIMTELIVPDRFMSIDGLKSYSGLKPMVYSSGDRERVLGLDKAYNHHLQAAWNSMIWDKSLRKRYFDLLGRGMAKANAIIRIAVKILKLIMVMWKNQCRYNPSILEAAQAK

SEQ ID NO: 351595 - protein, 447 aa, unidentified
MPCAFGSARAAEKGGAQVPAIGAPFAATRSHGQVDGVRLADRVGLFIGPTTLETLLEKIADRPAEPTAVRTDLGAIFVSLELSRSSWVVTALAPGSGERMSRHGIPGGDIAGLLARFAQLRDKAQARTGRHFPIIVIQEAGLDGFWIHRALVNEGVESHVVDPASIATSRRRRRAKTDRLDGETLVRTLLAFKRGEPRVCAMVRAPSPEDEDRRRITRERKVLIAERVEHVNRIKGLLFAQGIRGYEPLRRDRRARLEDLRTGDGRDLPPHLKAQILREIDRLELLLEQIKAVEAERDAALAEEPQDGETPAAAKMLLDIRGIGPEFAALLWSEGLFRHFDNRRQVAAYAGLAPTPWQSGAVSREQGVSKAGNPRLRSTMIQLAWLWLGHQPQSALTRWFRARVEQNGGRLRKTAIVALARKLLVALWKYVTSGVMIEGAAMKPSTP

SEQ ID NO: 351596 - protein, 313 aa, unidentified
MHEDVFVGIDIAQERLDVHVLPQGNAFAYQNDANGIERLVRHLQEVAPTVIVMEASGGFEISLAAELGAANLPPAIVNPRQVRDFARGIGKLAETDAIDAYVLACFAQTNKIKPKPLPSEEEQLIKDLIKRRQQLISLRATEKNRLHRVRSKPVRESILIVIQTPDEQIRNIDRDLDNILRSSPLRREKEDLLRSFSGVGPVTARTLLALLPELGKANRQQIAALVGLAPLNKDSGKMRGKRMIAGGRTDVRNALYMAAVSASKHNSTIKAFYERLMQPGKPAKVALTACMRRILVILNAMIKAKSPFEVHFA

SEQ ID NO: 351597 - protein, 318 aa, unidentified
MNSPSMTVGIDVSKQRLDFARFPQGDTFSVAYTDTGLAKLLKRLRGWSPQIILLEASGGYEYGVVAALVAASLTPVLINPRQVRDFARALGILAKTDKIDAKVLAEFAFRVQPEPRPLPAAQQQELNHLLSRRRQLLEMIQMECNRREVSPFLRIRQSIDHNLDSLRRQLTDLEREIDDFFNQSPLWVQQDALLRTVPGIGPQTVLSLQAWLPELGALNRHQIAALVGLAPFNRDSGVLRGRRMIRGGRHKVRQALYMATLSAVRYNPVIKALFERLARQSGKPGKVALVACMRKLLIILNAMVKNQTTWRPMTPLTS

SEQ ID NO: 351598 - protein, 413 aa, unidentified
MRLFAGDDWAEDHHDVELMDADGRRLAKARLPEGVAGIARLHAMIGAQLGEDADEEDAGQVAIGIETDRGPWVAALIAAGYTVFAINPLQASRYRERHGVSGAKSDAADAHVLADMVRTDSHQLRPVAGDSAQAAAVKVVTRTHKTLIWERTRCTQRLRHALRDYFPAALEAFEDLDAADTLELLAKAPDPASAARLTTAQISAALKRARRRDIATKAERIQAVLRAAHLGQPDIVAAAYAASVRALIAVLATLNEQVKTLQGQVEAYFGQHPDAEIIASQPGLGPVLGARVLAESGDDPGRYISAKARKNYAGTSPITRASGKKKTVMARYVHNDRLIDALMSQAFTALRTSPGARAYYDHQRARGAGHNPALRQLANRLTGILHGCLKTRTLYDEATAWPHYAATPEKTAA

SEQ ID NO: 351599 - protein, 483 aa, unidentified
MKPQQKEKPRKATCRPTQGNWQQLNRKQRREMTRKIQSEDLSLEVVHPDAAGIDIGNESHYVAVPPSRDSQPVRRFGCTTAEVKEMAAWLKQCAIRTIAMQSTGVYWIAVYDILEEAGFEVYLVNARETKNLPGRKSDVQESQWLMKLHTYGLLRNSFRPSPEIRTIRTYWRQRNDLVQTAGRHIQRIQKAMTQMNIQLANVLSDVSGMTGQAIIKAILAGERDPHELAALRDWRVKASKEEIARSLEGNWQEDQLFVLQQEQDSYEFCQKQIAHCDQRLQQYLQQQEDRSQGGSLPEEKRKERLRKKKKGNAPQFDLRTELFRMTGADLTQIDGIDVTTAMAILSEAGSDMSKWKTESHFVSWLRLCPENRISGDKIIGKGRLPTTNRASIALRMAASTLRLSNTYLGAQFRRLRTRLGAPVAIKAMAAKLARLVYRMLRNGMQFVDQGAEFYDAQNRNLQINYLRSKAAKLGLQIVEAPAA

SEQ ID NO: 351600 - protein, 340 aa, unidentified
MRYVGLDVHKEFCQASILNEAGEEISNERILSDVDSLNRFLDTLDEAKVVLESTNVWEYIFETIESAGFDVVLAHPKQVKAIAAAKVKTDKVDARTLAELLRADMIPVSYVPERDVRDLREALRTRASLVCDTTSLKNRIHAKLLRRGIRKPEEFTNNFTLKHRTWLRSLKIESLDHLLNALEATEKEVKEINEALLKKFQENDTAQLISEIPGIGYYGALMLAAEIGEINRFPDPEHLSAYAGLVPTVHQSANNCYYGHISKQGSRYMRWILVEAVHIHVRNAPDSQITKFFNRKMKKIGRNRATVATARKMLHIIYWMIKKEEHYHSHGLDLRPFPAT

SEQ ID NO: 351601 - protein, 408 aa, unidentified
MNTLYVGIDVSSKSNVVYLMLPNGDKHSNFSVANSHEGSTLLVKKIYSALTSHSLDTVLIGLEATSVYGVNLVYFLREDATLAPFNRKIHVLNPKQVKKFHDTYNDLPKNDYVDSFVIADCLRFGRINKEVYMGEYRYKALQNLTRARFFAVQNLVKEKQRFMNVLFKKYSTMTQEKVFSDAFSTTALAVYDEFESAEALANMDLHELTDFIIEKGKNRFPDPDAVAKAIQKAARSSYRLPKTVNDSVNQVLSISITSMKALESQIKEFDKAIKALMELLPNVLISIPGIGPVYSAGIMAEIGDINRFDNQASLAKYAGLAWKQHQSGGFEAEVTRLIPSGNRFLKYYLCEAAFSLVRCDKKYSDFYHLKYKEVNRCQHKRALALTARKFVRLVFRLLKDNRLYCPAK

SEQ ID NO: 351602 - protein, 343 aa, unidentified
MELYVGMDVSLKETSICVVDDDGVIQCEGTVISEPAAIADFIKTKAPGAKRLGLETGPTTTWLWHELRALGLPVICIDARHAKAALSMQINKSDRNGAVGLARIMQCGWYKEVQVKSVICHEIRAVLNSRAQLVKIKRDLENEIRGLLKNRGLVIGKAGGKVFHRRAEELLGSQGHLRDAVRPLLEIREKVSREIAALYRKLLELARNDEDVRRSMTVPGIGPINAMAFHSMIDDPSRFKRSRNVGAYIGLTSRRFASGEVDWSGRISKCGDAMVRTYLFEAAGVLLTRVAHWSKLKAWGHRLWKRIGFKKAKIAVARKLAVILHRMWCDGTDFIWSNKEVAA

SEQ ID NO: 351603 - protein, 375 aa, unidentified
MEHHSEAFVALDTAKLRNAVAIADAGRNGEIRYLGEIDNTEAETRKLVAKLASKHARLTFCYEAGPTGYGLYRLIKSIGHDCIVVAPSLIPSKPGDRVKTNRRDAVNLVKLLRAGELTAVWVPDERHEAMRDLVRARDAAVKDYRIKRQNVSSLLLRLGRHYPGKKTWGRTHINWLTGLKLEHREQRIAFEEMLLAVRQVRERIERLEQAMREAVADWTLAPVIEAVQAMRGIDMIGAIAFLAELGDLSRFENPRQLMAYLGLTPSERSTGESVKRGGITKAGNTRARRLLIEAAWSYRFPPRVSKDMQTRIGAAPRTAREIAWKAQMRLCGRFRTLTRKGKRPTIVVTAIARELSAFIWAINREIVGSYATANQ

SEQ ID NO: 351604 - protein, 356 aa, unidentified
MNKDSTLFVGLDLGDRWSHLTILDPEGEVVEESRVPTSGGALQRKFSALAQARVAMEVGTHSRWVSQALRDLGHEVLVANARKLRVIFDNPRKGDRADSHTLARLARLDPKLLSPIEHRSPQAQADLDVLRSRDALVRSRTLLINHVRGVVKSTGARVPSSSASSFPSKAAGSLPEALRPALSPILETVRALSLEIRSYDRPIEDLCTGKYPDCQRLRRVQGVGPITALVFVLTLENPKRFEKSREVGPALGLVPRRDQSGGQDPQLHITPGLPQGRQDRKCLSPSSPCWLRPVHPWPLWPRLRSPPLGPAAGQPWREECEEESGGGGGKKARHRASPALEDWRGLHPRAFVASTW

SEQ ID NO: 351605 - protein, 385 aa, unidentified
MPQTKFEPRRSLVAFDQHRAVVSAVELSLESWLVGGVVPGIAREPLKKLATPDPEALLRLLYRWRDEAVKAGQTITRIVVAYEAGRDGFWLARWLRARGIEVYVIHPTSVAVSREHRRAKSDRIDLALLKRSLLGWLRGEEKHCSMVAIPTVEEEDAKRPHREREQLVGKRTGIINRAKAICFRYGIRGFKPNLRNAMDRLSSLRTPDGEPLPPNTLAELRRELEHLRFIKEQIKQIEGIRLEQLAQTSREGLNATARDLSRVRSLGIETADMLASEIFTREYRDQRAIARYAGLTGSPDESGSRRREKGLAKAGNARVRRGMIQLAWRFRKHQKDSRLVQWFEARVAAGTKRKTMIVALARKLLIALWRFVTLGEVPEGVILAN

SEQ ID NO: 351606 - protein, 360 aa, unidentified
MDKYIGFDIDTVKTAVCVIQNGKKDKFYTIGSDIDSMITFLQRQQHSDVKLHLTFEISGQAGYLYDTLADHVDTITVSNPSKMTWIYRTAKKNDRIDARKQALLLSIGEIPKVHIPDKTIRQWRETILHRRNLIGRAVQVKNRIRAVLKSQGLANPLYSGSWWKKENRIWMRSLIQKRWPSRCLWQLKLSDLLDQLDLLEGQVKHITTYLDLYLSKQSGGKLLMSIPGVGPRTAEAVLAYTDDIRRFKKLKHYCAYFGLTPKLDESGTTKRMGHISKQGPSVVRWLVGESAWRVVKQSPAMRHFYERTLAGQPGRKKIAIVAVARKLLTIMRAMMLSGELYNEALISKSAEAEFKRTRTA

SEQ ID NO: 351607 - protein, 391 aa, unidentified
MADKIAGIDVHKKVLMVVVIDARTPESKPERRRFATMPSELRRLSTWLQERGVEEAVMESTAQYWRSVWLELEPHMCLHLAQAFSNRAPRGRKHDFKDAERLVRRLIAKELILSFVPDGEQRIWRNLTRMKLQLTRDRVRIQSQIECLLEEMRIKLSIVVSDLLGSSGLRILHALANGETDAKSLALLGDDRLKCTEEQLVEALTGRSHPMHGQMLALQLERLRLLDEQIAKLNSLIAQAMKPHQDAVIRLAEVPGLGIDSAQQVIAEVGVRASTFSSAADFTSWVGTCPGKEESAEENSSSRSAKGNKYMRRVLNQAAHAAARSKGTHFQAVFRRLLPRLGYQSAVWAIAHRLCRLVWKILHEGIRYIEQGIESEPKLLIHRAIPRETTS

SEQ ID NO: 351608 - protein, 355 aa, unidentified
MDRIYIGVDFHARQQTICYLTTEDGEVRTHELKHQDKTEVRAFYAQFSGHVVIGLEASGYSPWFEQLLEELGQEVWLGDATEIRRRARWRQKNDRRDAELILDLMAHHEFPRLHRPCSQSREILRMLRYRQKLIKIRTMGKNSLQALALQSGLARRSQLFTKAGQQELRTAAMSPVMQWQRDQWWLLLEPLNQRLLETMLWLKQQTKDDERISRLRTHPGIGLLTSLCVVHTLWPVTRFRNQRKVAAYAGFDPMERSSAERKHFLGISKAGSRVLRYLLVEAAHTAVKKDDDLKRFYQRLVERRGRPKAKVAAARKLLIRSYIMLRDEIDYAEFRRRAVAARLARQSSRPLVPVA

SEQ ID NO: 351609 - protein, 401 aa, unidentified
MNSVYERCAGIDVHKRNVVVCAITPDQQGQRRKEQATFSTMMPDLLRMRQWFQRLGVTHVAMESTGSFWKPIFNVLEGQMEVLVVNAQHLKAVPGRKTDLKDAEWIADLLQHGLLRSSFVPPAFQRELRELTRYRTSVVEERSRTINRLQKILEDTNLKLSAVATDLMGLSAREMLAALLAGETNPTVLAEFARGKMRAKRDLLVQALQGQFKPHHRLLIGEQVAHIDALDEEIERLSTDIAQRLRPYEAQLKRLETIPGIKRRLAEVILAEIGPDMQRFPSARHLASWAGMCPGNRESAGKRLSGKTRKGDPWLRTALVEAAHAATHCKDSYLSAQYPTIAVGHTLLVIVYHVLADEKDYQELGGNYFDEQDRQAVQKRLVHRLEKLGYEVILAPTSPAL

SEQ ID NO: 351610 - protein, 406 aa, unidentified
MRAIGLDVHRDFCEVAICEEGKVRLAGRVESSPEALGALAASLGPDDRVALEVTGGAWAIVAILDPQVAKVIVVSPGDTGIAQARAKTDRLDARTLARLLWAGELEPVWAPDELTRLLRRRLARREQLVRARSRAKNEIHAVLMRCLVGKPPVSDLFGKNGRRWLKGLELPVEEAETVEACMRHIEFLDAEIAEVERVIARYALSCSDARRLMSVPGVTVICAATFLAAVGDIGRFRTSRQLVGYLGLDPKVRQSGSSPAKGGPISKRGSGTVRWALVEAAWSVVHQPGPMRAYYQRLRARRGHQIAVVAVARKLAVLFWCLLTREEQYAHQQPSLTAKKLRLLEIRSGAPTMKGQRTGTFATREKMREAEQALALAAEASYVRMVRDWQAAAPKKVGATVTPGRA

SEQ ID NO: 351611 - protein, 369 aa, unidentified
MEIVYECCCGIDVHKKLIVACLIKGRKQELRQFGTTTGELRNMSSWLLEVGCQMIAMESTGSYWKPLYNIFELTGLDAIVVNASHMKALPGRKTDVKDAEWIADLLRHGLLKASYIPDREQRELREITRYRKSLIEERSREINRLQKMLEGANIKLSGVVKDINGKSSRKLLGKIIADKKLTEDEVKDLIFGSMHKKLDQIMPAIDGIISPLQKRLLASILSHIDDMTNRIKDMDKIIKDYLDAYERAITAIDELPGIGRTSAEAIIAEIGKDMSRFPSAAHICSWAGVCPGNNESAGKRKYGQTTKGNKALKTILVQCAKAAKNVKSSFFSAQYQRIAIRRGKNRATLAIVPLNAYCNISCVKNRNAF

SEQ ID NO: 351612 - protein, 457 aa, unidentified
MTDRTNRPDGDGHGFPVLRPDVAGIDVGSEQHWVCAPTAAGGEREVATFAATTPGVEQLVRWLQARGVKSVALESTGVYWIAPHEILERAGFEVVLVDTRELGRVPGRPKSDRRDCEWIQRLHSCGLLRAAFRPGEPVCLLRTLVRDKATLVAERSDWIRRMQKSLDQMNVRVHRAVAALDGVTGLAIVRAIVAGERDPHRLAALRDPRCQKTEAEIAEQLTGHWRDDHLFSLRQALKMYDTIQERIHEYEREIERQLAAMTPTDRRNDQAPPLSKSTKARAITKRGEELLRQALYRMSGVDLTAIDALGVETVSVVLSEYGPDLARFPTEKQFVSHVGLAPYKPISGGKPVRKRKKPASASARVGAALRMAATSLRRSRTALGAYYRRIAQRLGADVAVFATARKLAQWIYRVLRWGHAYVDEGAAAYEKRYHEARVKRLATTAKHLGYALVSVEA

SEQ ID NO: 351613 - protein, 413 aa, unidentified
MKQNPTNFAAFIGLDWADTKHDFCLKVIDSEALEYDIFQHTPEAIDEWALALQKRFNDQPIAICLELKAGPLVYALLKYNFIVLFPIPPMALAKYRKAFAPSGAKDDPTDAFLQLDYLLKHPESLNPLNPDSTDTRIIQRLVEDRRTLVGEKVRLTNRITAALKSYFPQALEWFTDLDTILFCEFVQRWSTLDMARKARPTVLTKFFKEHRCVRQSVIDKRLKAIKQAMPLTEDAGVIIPFEQLVKVLVGQLQQIIVAIRDYDLDIAKRFRKHSDYEIFNSLPGAGPVFGPRLLAAFGSDRDRFNSADEVNRLSGVAPVLERSGKKSWVHWRYSCPTFLRQTFVEWANQSIRYSFWAKEFYDEKRTSGKSHQATLRALAFKWIRIIYRCWKDKTPYDESAYLFALKKRKQAVA

SEQ ID NO: 351614 - protein, 389 aa, unidentified
MFYCGIDVAKHKHAVVVLDEHGQIHRPVFIIENTHAGLDCLVEELKRLGGEVIVGLEATGHYWLSLYDTLTRQGYRVVVINPLQIAAYRKSGVRKVKNDRTDTVWIADFVRIANLPASSRDIPALLQLRELSRFRFWLSEQIGDCKRKLLTILDRVFPEYETLFSSVFVKSSRALLLEAVSAQEFADFDLQELTELLVKKSRSRFGAEKAREIQEQARQSIGVGFLADAAQVEMRCLLAQLELLEEQVAEVERAQEALMESIPQHILSIPGIALPTGAAILAEIGDIARFESPDKLVAYAGIDATVHQSGQFQATEMHMSKRGSPYLRLALWQAASMAIQHNEELKVYYAKKRAEGKAHGTALGAVCRKLLVRVFVILKENRVYEARQP

SEQ ID NO: 351615 - protein, 340 aa, unidentified
MNKSLDFDPCGIEVSARTLVVERRRPGQPDAVREFANTAAGHQALLRWLEGAGRAVRVCLEATGLYGLDLALTLEAAGVALMVANPRAVRHFAQAMMQRSKTDRLDAAVLTEYAARLPFQPWRPPSPSALKLLAVARRLEDLTAMHAAEKNRLHAASVSQALPALLRRDIQRSLRTLERAVARLTRAAQEFIVADPRLAERYALLLSIPGLGPTSALHVLAELTLLGPDLDVRQWVAYAGLDPRQYTSGSSVHKKARLSKAGNKHLRCALYMPALVASQHDAHLGGFYQHLVARGKTKLQALVAVMRKLLHAIFGIFKHHQPYDGAKLFALPIPQEVTCT

SEQ ID NO: 351616 - protein, 276 aa, unidentified
MHGKRILNKKLKREQVVPFFSDRPACLIGMEACGSAHFWANKLQALGHTVKLIAPQFVKPYVKTDKNDAADAEAICEAMSRPNMCFAPIKNSEQLAVLAMHRARQGFVKARTAQANQLRGLLAEHGIIIPKGIRHINQHLLDILEAGDNGLPGRFRQLLDRLSAHFKELDKQVRELDVQLQSWHQDSPASQKLAKIPGIGPLTASALVATIGDAKQFQNGRQLAAWLGLVPRQHSSSGKPTLLGISKRGDTYLRTLLIHGARSRAAGGEEQGTTRR

SEQ ID NO: 351617 - protein, 424 aa, unidentified
MKVTYQTCCGVDVHKSFLVATIVKTTGGIEPSYQKKRFSTFNNSILEFKQWLLDNHCHDVCMESTGKYWVPVFNLLEDEINVVIANPKWVKAVKGNKDDTKDSKWIGDLFRLGLVKGSYIPCKKVRILREYTRYRYKLVSCRSSEKNRYQNALTVCNVALDSVVSDIFGKSSTSIIDYLLEQSGTSINHEEIASKLLRSLKSKEDAVIESVEGYQMTDAQKYRMRLVRAHMDYITAEINDVDKMIENMISSNPDFENAVQFLCTIPGVKRDSAITIISETGTDMSQFSSSKRLCCWAGLTPGSNESAGKKKSVRITRAGVYLKPALVQCAHAAVKSDKSPYYKKKYESLVKRRGKKRAIIAIARMILTAIYQMLSTGEQWNPSDLYKIDMPVALVEKQKAKAIKQAKKLLQREGILPPDEPLAS

SEQ ID NO: 351618 - protein, 371 aa, unidentified
MSSIIFIGMDVHKKSFNLCALEGTTGEILSETHCNAEAKNVAKFVSHVTEQMREECFVKVGYEAGCLGYALYHSLVGLGLHCDILAPTTMLRSAKNKVVKNDKLDARMIAQNLANGTYRAVHVPDSQDVETKEYIRMVQSRKKALKKIKQAIKALVLRHGYFYDGKSTWTLAYMKWLKSLKMTPILQETLSEYLIEYEALCDQIERFSTRVEQFSHEERYADAVAHLRTFKGIDTASAMTIQVEISDFNRFATAKAFCAYLGLTPSEQSSGGKVKLGGISKQGNSVVRTTLIECSRALVKSSVGKSKALKARQVGQPSEIIAYADRGVERMKRKYHHMVYQGKAKNKAVIAIARELACFIWGMSTGKIAAY

SEQ ID NO: 351619 - protein, 345 aa, unidentified
MSYYAGLDVSLEETAICIVDETGAIVRELRAPSDPGSLILAFDAVGLPMERIGLEACSQSAWLHQGLTRAGLPALCIETRHAKGAMSAMPNKTDRNDARGLAQIIRTGWYRQVHVKSAPSRMARSLLVARRTVLCKLRDMENAVRAVLRESGLKVGSPGRKRFSARVRELAEADPTLTDITEPLLAIIATMYRELERLTRRVLESVRVEPICRQLMTIPGVGPLTALAFRATVDQPERFRRSRDVGAHLGLTPRRYQSGETDIQGRVSRCGDELARTLLYEAAHTLLTRCKKWSALKAWGMNIAKRRGMAKARVAVARKLAVIMHRMWSDQSEFRWGKAPASLAA

SEQ ID NO: 351620 - protein, 392 aa, unidentified
MPDVSSNASAKTTRVWVALDVHRNAITAGVLPADGGQVELAQLENSEKAIRRLIARLGGPEGLSVCYEAGPCGYDLYRLLTSMGVACDIVVPSLIPVRPGDRVKTDRRDARKLARLYRAGELSFVRPPTPEQEGLRDLVRCRDDLRRARTAARHRVGKQLLRYGRIFREGKKSWTVQHRTWVRRQRLDDPLAQSALEHMLCHLDTLDAQLAAVDRQLEQVAASHPWCDPVRWLTCFRGISTLTALGLLAEIGDFRRFATARELMSFLGLTVAEYSSGDRHVRGAMTKTGNRHARRLLIEAAWHYRHPPRLSARLKANDALVPPEAQARAWQAQIRLHERHRHLTTAGKLQTVATAAVARELCGFIWAAMTRQPLRPQEHHTPKTTSKEALAA

SEQ ID NO: 351621 - protein, 408 aa, unidentified
MDVVYERCCGLDIHKQLVVACLVVPGTNEQPVKAVRSFGTMTADLLELADWLSGAGCTHVAMESTGVYWKPIYNLLEAQFTLLLVNPKHFRAVPGRKTDVRDAEWLADLLRHGLLRASYVPARGERELRELTRYRTALVRERADEVNRVHKTLEGANLKLGSVATDVMGRSGRRILSALAAGQTDPAVLADLAKDKLRKKLPELERALAGRMGAHQRFLLAQQLQHLEFLEQAIDRVSAEIGERLRPVEAELGRLVTIPGVGRRVAEILVAEIGTDMSRFATAGHLASWAGMCPGQNESAGKRKSGRTRKGSPWLRAVLVEAAHGAARSKDTYLAAQARRLKGRLGWKKAMVAVGHSILVRVYYLLQRGTIYQELGPDYFIERDKQAVERRCVRGLERLGYKVTLEVA

SEQ ID NO: 351622 - protein, 430 aa, unidentified
MKSNTQNAKIEAITEKTLVLGIDVGSETHYARAFDYRGIEYSKKPFKFSNTEAGFVTFKEWILDLKERHEKDKVVPGMEPTGHYWFNLGKFLQDNEMKPVLVNPHHVKKSKELDDNNPTKNDRKDPKVIAGLVREGRYMIPYLPDGVYADLRTASNIRFQLQAELTRIQNRISRWFNIYFPEYKTVYGKPDAKSGMLILKAAPLPEDILTLGIDGVNQIWRDAKLRAVGKARAKTLIEAAEHSVGSKEGAVAARMEIRMLLEDYESRNIRLQEVMTLIEGLVKQIPMAEKLLEIKGVGIRTVSGFLAEVGDISRFNNPKELQKLAGLALVENSSGKHKGETTISRRGRKRLRYLLFEAAMSLVAKNPEFRELHNYYTTRRLNPLKKMQSLMAIAAKLIRVFYVMLTKGVNYDPKKMVNDIKRPAVYLQTA

SEQ ID NO: 351623 - protein, 416 aa, unidentified
MEMEKEYNVAAIDVHKKMLAVVVTDAARVGEFRFERRKFGAGAGDLRLLEAWLAQQGVKEVVMESTAQYWKPVWQALEGKYKLELAQAHSNKAPKGRKRDFADAERLARRHIAGELILSFVPDEEQRLWRTMTRTKQQLTRDRVRLQSQLEGFLEEARIKLSSHISDLLGLSGRRMIEALAQGETDAARIAAMATHGLKATQEELRDALSAAATMNPMQRQILRLFLERLVLLETQMDTLEKSTAEALRQHQDSVQRLAAVPGLGADSAQQIIAEVGPHAATFPSADQMASWIGCCPGREESAEVSKNNRSPKGNRHMRHILNQAANAAVKATGSVFEILYRRLAARIGHFKAIWAVAHRLCRITWKILHEGVAYEERGQRTNVRAIRQRTNRLIRDLRRLGYQVQLTPLRPEAVA

SEQ ID NO: 351624 - protein, 350 aa, unidentified
MIIGVDYHPSFQTIAFLVEETGECGEQELNHSDGQAERFYRDLKQRGISVRVGMEATGYSRWFERLLAELGFEVWMGDPAEIKAKRVKKQKFDREDARLLRRLMLENNFPQIWVPGPENRDLRQLLWHRHRLVQMRTRIMNQLQALAMNEGYRWKKKLFSAPGRALLEKLSLAPWASRRRQELLELLDRMNPTIEELTAAVEREARKRPEAMRLMTHPGVGPLTALAYVLIIGTPTRFQRGKQIGTYVGMIPCEDSSAGKQRLGHISKQGSSLLRFLLVEAAQAAARIQPDWRRRYLHLAMRRHKSIAKVAMGRRLAVRLYWMWRNGCEYSPSLECGSYVGQLGTGHGVQ

SEQ ID NO: 351625 - protein, 385 aa, unidentified
MIEAVIERCAGIDVGKKFVVVCIMTGPLDGEPRTEIRSFGTMVPDLERLREWLVAEGCSHAVMESTGSYWKPVFNILEDSVQVVLANAFDVQNRRGHKTDPNDSRWLAHLLRHGMIRPSFIPERAIRELRDLTRRRSRLVQESARERNRVQKILEDANVKLGDVLSDVLGLSGRLMINALLEGILPAEEIAQLAQRKARQKIPELIAALRRHRLTDHHRFLLRHAFRHIDFLETEIEALNVEIRSRLSAKQFQQAHTLLQSIPGIKEEASATILAEVGPNMAQFPSGAHLASWAGLCPGNHESAGIRKTGRTNRGNDWLRSVLIQCAWAASNKKNSVLQSFYSRLSSGSRKKRAIVALGHRLLRIIHAVLLHARPYQEAWRPLRA

SEQ ID NO: 351626 - protein, 487 aa, unidentified
MRPRTTNSSTQTFDVYRFSFESAGALAFVNEYSGFAVQPAHYIAFAERKLARPGSPIYHCRRCSVKPLSERPFTAHVGIDWADAKHDVCLQAADSEQREFDRFAHQVGSIDQWAKSLHQRFGGPIAVALELAKGPIVYALQKYDFFVLFPINPATLAKYREAFKPSGAKDDPTDAELALDLLLRHPERFAPLKPQSVAMRTLLSLIEQRRELVDDKTRVTNRLGNALKQYYPQALDWFEQRDTILFCDFLSRWPTLSAVKRARKAGLQAFFYAHNGRRPKLIDDRIDSIRAATPLTDDMGVIAPYRLQVQVLVEQLRVTLQAIDRFDRQIAVVAATLPDYALFSPLPGAGPHLAPRLLAAFGEQRERFMSADELQKYSGIAPVTERSGKKRWVHWRWQCPTFVRQTFVEWAGQTINKSFWAGVYYRRQRDKGSSHQAAVRALAFKWIRILYRCWQAGTPYNESTYLNALRQRGSPLLKRFHPTAQNA

SEQ ID NO: 351627 - protein, 335 aa, unidentified
MKHYAGIDLSMETSHICVVDADGCKLGAACVDSTPEAIAAALERYGPVDRAVIETGRMTPSIALGLRELGVAIVCIDARQAHQSLKAMKANKTDLHDAAGLAQLARTGFYKEVHVKSPAAHGVRSVITARGHLVEARVRLDNTIRGLCATFGIRLGVGQGERFLARMRVTASIPGLGEAVASLLRARERLVDEIRQLDRQLKTISVVSPACQTLMSIPGVGVQTSAAFAAAVDDANRFKRSRTAGAYFGLVPRRHQSGELDWTGRITKQGDSTVRKLLYEAANSILTRTRQTFALKSWALKIAKRRGLRKARVALARRLAVIMHAMLRDGTLFEA

SEQ ID NO: 351628 - protein, 338 aa, unidentified
MNITTLGIDLAKSIFQLHGVDERGNVVLQKRVTRSKLRETVAQLSPCLIGMEACGSAQYWAREFQQLGHTVKLISPQFVKPYVKGNKNDSRDAEAICEAVSRPHMRFVPLKTVESQDIQAIHRMRNRLIRERTALGNQVRGLLAERGIIIPQGRTKLRTALPVIIEDVDNALTPLGREVMRELYEALLALEERIARADHLVQRVFVANAQCQKVAQIEGIGPVVATALVAAVGNAKEFANGRHLAAWLGLVPRQCSSGGKERLLGISKRGDRYLRMLLIHGARATVHRARYKTDARSRWIMSLEQRRGKNIATVAIANKNARIAWALLTTEAEYRKAA

SEQ ID NO: 351629 - protein, 420 aa, unidentified
MKTPDNIPFTAFVGIDWADAKHDVCIQAAGNEHREFARISHKVDEIETWAQSLYQRFGGPIAVALELSKGPIVYALQKYDFFVIFPVNPSTLAKYREAFTPSRAKDDPTDAELALDLILRHPHRFQPLNPQSVEMRTLVSLVEQRRRLVNDRVRITNRLRNTLKQYYPQALQWFDRIDTLLFCDFIERWPTLVQIKRARRNTLETFFHQRNMRFAHVLQARLESIKAASPLTLDQAVITPHRLQALVLVDLLRATLAAITRFDQEIAELAPKHPDYALFDSLPGAGPSLAPRLLVAFGEQRERFNNAAELQRYAGIAPVTERSGKKHWVHWRWQCPTFLRQTFVEWAAQTINKSFWAGAYYRQQREKGCTYNAAVRALAFKWIRILYRCWDTHTPYNESVYLKALQRRGSPLLNQLSSTK

SEQ ID NO: 351630 - protein, 425 aa, unidentified
MNYKQNEKINQVKESTLVVGIDIGSTTQYARAFDWRGIELGKVFPFSNSREGFESFKAWMQHLQDKYKKLDAIVGIEPTGHYWFDLGAYLEDEGILLVMVNPYAVKQTKELDDNSQSKNDRKDPKAIAKLVTEGRYSAPYTPDGVYADLRIMVANRKRLIREMTQIKNRFARWFAIYFPEYTDVFGDYEAQSSMLLLKKVCTPEAIVELGAEKINQIWRDAKLRAVGMKRATTLCETAKRSIGLKKGSSAARYEMKLLLEDYEYKKAQLDAVMEEIEKLCRKIPESEQMLAIKGIGVITVAGFLAEVGDVRRFESPRQIQKLAGLSLRENSSGKHKGQTTISKRGRSKLRAVLFNAAIPLIAKNPEFKSLHEYYTTRANNPLKKKQSVIAISCKLIRVFYAILANGVTYDAQKMLSDIHRQPQAA

SEQ ID NO: 351631 - protein, 359 aa, unidentified
MATKVKKNKINFKGKTVNIGIDMHKISWRITALVEGDIVLGITLANPSYDAFEKILARFKGNHVRIVYEAGPGGFDLYDRLTDDGIECIVTPPSLIPTESGNRVKTDKKDSYKLAELLGSGMLKAVWVLSPEERAHRQIVRTRRQILNHRSDVMRQIKSLLLFNSIEIPFKSTQHWTGVFMNWLQKLDFGHEALNSSLKALVNLFNYLNAEKKRLTKDVLQLAKDEKYAQRVDLLTTIPGIGPLSAIEILVEIQDITRFKTADALAAYLGLTPSQYSTGEHIRMGHITHAGNGRVRTTLVESSWILVGKDPQMRSKYERVKNKRGGKRAIVAVARNLSGRIRRILLDQVPYKLDFQKAA

SEQ ID NO: 351632 - protein, 409 aa, unidentified
MRVMHERCAGLDVHQKTVVVCVLTGTAGSEARQEKRTFTTVTSDLLKLGDWLGECEVTHVAMESSGVYWKPVWAVLEGQFDLTLANAAHIKNVPGRKTDQKDAEWIAELLRHGLMEKSFVPPVAVQDLRELTRYRAQVTGERSSVGNRIRKLLEGANIKLGSVASDVMGVSGQRMLDALVAGESDATRLAELALGQLRKKQTQLEVALAGRVREHHRRLLRLQLANWRFLDRLTEELDVEIDHELGPLREAAALVETIPGISVLTAWNVVAEIGGDMSQFPTAAHLSSWAGLCPGNNESAGKHYSGKTRSGNVWLKRALCQAAWAASHTRDTYFAAQFRRLAAKRGKKRAVIAVAHSLLVVIYTMLKQGKSYLELGVDYFEKLHVDDFKRYLVRKLEAQGYKVTLETAA

SEQ ID NO: 351633 - protein, 413 aa, unidentified
MTTVSPPTRFVALDIHRKYLVVGAVDSQQQIVLTPRRFGFEAFSDWATTHLTPSDTVVLEATANAWLFYDQLKPLVADVLVAHPQAVKLIAAARVKTDSRDTIKLASLLAANLIPAVWVPPHEVRELRALVAHRKRLVQQRTQAGNRLHGVLHRHNLVLPPGKPFAAHQREWWLSLDLPPSEKLRVQQDLSLHQSLEELVKGVEAELGRLSTSEPWIKQVPFLVQLPGLGVLSVMSVLAAIGDITRFPSAKHLVGYAGLGASVHDSGETHRGGHITKEGRSDLRGVMVEAAWVAVEHHSHWKAQFERLGARIGKQKAIVAIARKLLVAIWHVLTEQQADTNAQAQAVARKLMNWITHQGVTPGQHRDRLLLLYQHLDELGLSDELEEIHYYGTTYRLSMRQKLLREAQKRGSS

SEQ ID NO: 351634 - protein, 461 aa, unidentified
MEEKNMNELLKKAEVIRENLTASTWRELETNGKFDKNEKLSFISDDMLILGCDVGSEIHYLRAIDTRGRELSKSAFSFSNESEGFQSAKEWAVKIAAEHNKNQIVLGLEPTGHYWFCLATWMISNGISVVQVNPYAVKQTKEIEDNSQLKDDTKDPKLIANLVKDGNFGMPYLPEKLYGELRRLSMFRDQLNEDRIRSINRMHREMKIYFPEYKDALGKADGAFSLELLKQAPFPDDLTALGEDGIRQIWHNAKLRGRGYSRAREILQFAKVSVGIKDGAEAGKTAVKWFVQKITELNIELAAIEEKINQKCQEIPHVGNILEISGIGENTLSGILAEMGDISRFDDVKEIQKLSGLGLVACSSGKHKGETKISHRGRKRLRYWLFQGAKSAVAHAEEFKELHKYYTTRTDNPLKKMQSLVVIACKLLRIIYTILKNGTVYNPKKMLMDIRRPEKAEAVAA

SEQ ID NO: 351635 - protein, 379 aa, unidentified
MLVYHNSGLLRPSAPLKTLGERNEKSRIKYVGIDCGKKTLEVIRIGDNSLHQRQQFSTTEIGISKLINWLNPNDVVGLEAGSQSFRIAKSILNKGIQVIVLNPGDLATIYQSLKKTDKEDSLKIARLIQRFPIEELPVVPIPNDEEEDNRRLCTEQENWTRQLTQSKNRLHSLFTQAGLTHITKKHLRTKANREISVALLPSRYQKEAERILKVLDLVEQNLKLIEEEIKEALKKNKAYAQTIMSMPGVGMITSLAIMSYMGNCKRFSSAKQAAYYVGLVPRVDISGDSAYYGRIVNRGCHSIRRVIVQAAWSLVRCQYGGKIKEFYQRLYPKKGAKKSIIATSRKMIEILYTMIKTGELFDSMPEKVLNRKLTQYGLM

SEQ ID NO: 351636 - protein, 347 aa, unidentified
MSISMIGLDTAKSVFQVHAVDKHGKAQMRRKVQRDELIPFFEKQETCTIVMEACGAAHHWARMLTALGHDVKLIAPEAVRPFVKKGKKNDAADAAAICEAASRPDIKFVPVKKLEQQGILALHSARSLLVKQQTMLANAMRGLATEFGLTVPKGISKLDELVALVDTDEAFPEKARQVFIGLLDQCRATAETIKAFEAEIVVHARQDETARRLATIPGVGPITASLIAATVVDISLFRTARHFAAWLGLVPRQYSTGGKTRLGRITKSGNREIRRLLVLGATSMTSRASQWNSAVGAWTRAIQERRPFRLVTVALANKMARIAWASMTRKEVYHAKGRGAATTGAAA

SEQ ID NO: 351637 - protein, 344 aa, unidentified
MKITTLGIDLAKNVFQIHGVDELGKVIVKKQLKRDQLAAYLVNLPPCLIGMEACGGAHHWARKLMSFGHTVRLMAPQFVKPYVKTNKNDAADAEAICEAVARPNMRFVPIKDVGQQSVLSLHRVRQGFVGARTAQANQIRGLLAEFGVIVPQGIAHLYTRVPELIEDASNEMTGSFRLLIQRLLDHLKELDKQVDEMEAQIVQWHKHSQASLKLAEVPGIGPITASALVASLGDAKNFENGRQVSAWLGLVPKQHSSGGKEKLLKISKRGDTYLRTLLIHGARSVLYREQSRADSCSWVKGVAVRRNHNIAAVALANKNARIAWALLTREKGFDAKHVSLKVAA

SEQ ID NO: 351638 - protein, 340 aa, unidentified
MDYCGLDVGKKSSNFCIVDGKRRILREGKVRNRVPELARTFGDLPPMRIVLEASGKTFWLGERLREFGHVPIIVDPGRTKAIGSAKIKHDKLDARILAELCAADLLAVVEPPTEAQRHARMSVVARDGLVRGRVRLVNMVRGMLDSEGFEVKKCSLDTFVEKATECWEDLPEEMASALEPLLTTIHMLTEQIAHCNERLKEAISKDDDAKLLMTTPGIGPVAAACFMLAVRDPARFKSGRSVGAYLGLVPSLYQSGQTLRRGRITKRGNSAARWALCCAANVLLGPKMNTDCALRQWGLRLVERLGRKKAVTALARKLATVLWAMWKKQNAFEPRLAAAA

SEQ ID NO: 351639 - protein, 315 aa, unidentified
MEQSFFIGIDVSQKQLDVALSQGDEILEFYFVPHTEDKIAQLIEKFKQTSPKLIVVERSGGLERSLVAHLAEAGLPVVANNPRQIRDFAKATGILAKTDKIDARCLARFAAVIRPPQRPIKDADRQQLADQVARRRQLVRMLAQEKNRLLRAAGAVRADVEHHIHYLQERLDKSNKDIDQIIENSPIYQETIELLTTFPGVGRITSAALVADCPELGSLNRRQIAALVGTAPFNRDSGTRSGARCVWGGRKNVRQQLYMATISAIKWNYKIKSFYTRLIAACKKPKVAITACMRKLIIILNAMVKQQKPWQISAV

SEQ ID NO: 351640 - protein, 402 aa, unidentified
MSTHPFSHTLFVGIDVGSQTHSVAFGDEHGHVLHAFEMNHSHESFEHFFATLEQYSQIHHATPHIAMEGYNGWARPLDQMILERGYALYNVNNVKLSRFKEMFPGAAKTDQIDARRILELLILDRHVPTAKNILQPIDRHSRNNAILKRLTRRHAQLVKERVVITNRLGADLQAVAPELKGLSKRINNRWFLQLLTLRKDIRMLSSVRTATLNAIPYIRTHSREAIRHWQRHAHFGMETEYVAPMIYEDALRVLELEEKLKALKEQMKALIPVSPMANLIQTIPGFATITAATLAGEIGSIDRFESEASLALYLGTAPLDNSSGNYTGTKRNQATNRHAKTALTIATALHGMFVEESYDYLQKKKSQGKKPQQAIRALSRHLVRVIWSMIHQNRPYERREME

SEQ ID NO: 351641 - protein, 408 aa, unidentified
MNLTAMYKRVIALDVHQAKISACAIIEHDDGRLEVIQREFGAFQRDRRALAQWAQEVAPEVVVMESTGVYWKSPYAALEGVGIRAWVVNARHVKAVPGRKTDVADAQWLATLARAGLLRASFVPPAQMRQLRLVARQRQKLVGMLSAEKNRLHKVLTDGGLRLGVVVSDVHGRSARAMTKSLIQGKPLHEVLDLKGRLRASREELFEALSTDEFSAVHRFVAEQIMDHIEDIERRIERMDQYLLAGLAPWQVQLNLLQTLPGVDLIGAAMLLVEVGADMDAFGSAQRLASWVGICPGNNESAGKRKSGRIRKGNAWVRRLLCEFAQAAARTTSALKAKFEALAIRKGRKKSVVAIAHKMLRTIYAMLSQGTHYQDRSVDYEAMNVARNAPRWIKMLRKHGFIAEHAPA

SEQ ID NO: 351642 - protein, 355 aa, unidentified
MDNKKYIGMDVHKESISIAVMNGAGKIVMECVIETKANMILQFIDGLRGDLHVTFEEGTCAAWLYDLLKPHVTRLVVCDPRKNASMKEGNKSDKIDARRLAELLRMNHLSPVYHGEHGLRSLKELVRSYLTITKDLGRVMTRVKAIYRSWTIPCTGKQVYAPRHRDEWLGKIKEPGVRRRAEFYYQQLDALRALRRQVRRDLLAESKKHPAWKRLCQIPSIGPIRAAVLLGIVQTPHRFRTKRQLWTYSGFGIEIRSSADHHSVEGQLQRAKKQVSIRGLNQNCNHDLKNLFKGAAILASNKPGPFQEFYAALLTRGIRPEMARLTLARKIATIALIVWKRGASFDAQHLKPQTA

SEQ ID NO: 351643 - protein, 343 aa, unidentified
MNVFIGLDVSLASTAICVLGPQGRIVEELQAESEPEALVRAIASLSYSIDAIGLEAGPLSQWLSKGMEEAGFDVVMMETRLVKAALKAMPIKTDRRDAQGIARLLQMGWYRPVHRKSVSSQEIRALLTARKSVQQAIINLELSMRGVLRNFGLKLGHVTRIRYEARVRELVEQNEILSVSTEALLRARAQLRAELAEMDATIADLAKQDDVCRLMMTMPGVGRIVALTVKSAIDDPTRFARSKDVGPWVGLTPKRTQSGEMDIVGQITRAGDRALRTALYQAAMILMHRGSPNWLQAWALRVAHRRGSKRALIALARRIGVVLHRMWRDGTPFRHAQSSPATV

SEQ ID NO: 351644 - protein, 407 aa, unidentified
MYNAVGIDVSKGKSTVAVLQPGGVIVKKPFDVVHSISGLKELTDYIVSLDGDTKAVLECTGRYHEPILRSLSEANIFVSAVNPHLIKDFGNNSIRKVKSDPADAKKIARYTLDNWADLQEYSSMDNTRTQLKTLNAQLDFFTRQKASAKTNLISLLDMTYPGLNDLFSSPARPDGSEKWVDYAASFWHVDCVRGSGLKTFTERYKAFCKREGYNFSETRAKTLYENAKELVAVFPKDRSNKNLIEMAINQLRSLTECTIRLKNEMDELASTLPEYSTVMEMNGVGKVLGPQLIAEIGDVSRFTHREAITAYAGVDPGVDQSGKRASKSNRASKCGSARLRKALFLVMSVLLQTKPDDAVYHFLDKKRAEGKPYNVYMTAGANKFLRIYYGKVKAALAAQANSNSNQS

SEQ ID NO: 351645 - protein, 405 aa, unidentified
MPYILALDVSMGHSYSVLYKDDTCLFEDEIEHTQRGFHALLEEIQHLPERPLIVFEATGIYSRPVEKFFQDHHFSYCLLNPLEAKKQMEESTLRSWKTDKSDAHRLAQTHLRNQRQPKEVQSNFYLEMRDLARFYQEIEKKITRLRMDLHNCLQLTFPELEQFFSNRLTPYALTLIRLFPHPDFVLASTRTKIKNKLINETRKKISANRAEQKADQIIHYAQCAYPAVEKDSIHCQKTIYYAELLQDLLEQKKALATQMIKKAEASPCFLLYQTFPGIGALTAALLLGELGDITRFKTHKQLNAFVGIDIRRYHSGKYTGQDRINKRGNPKARKIIFFTIRNMIRQQRTAPNHIVDYYYKLKKQPIPKKDKVATVACMNKLLKCMHAMVRAHTEYDYAYAVSVDH

SEQ ID NO: 351646 - protein, 356 aa, unidentified
MRYDVKYIGMDVHKEAIVIAVLNESGKLVMESVIETKASSILQFLHGLRGELHVTWEEGTWAAWLYDLLQPQVQPIVVCNPRRNAFLKEGSKSDQVDARKLADLLRTGMLRPVYHGENGLRTLRELGRSYQTISKDLTRVMNRLKALYRGWGIPCAGTQVYAPRYREEWLGKIVQAGVRRRAELLYQQLDGLQGLRRNLRPEFVAESRKHKAAKLLRQIPCIGPIRAARLIALMQTPHRFRSKRQLWTYSGLGIETHDSAQYRFVRGQLQLSKKPQQLRGLNRNHHHEMKEIFKSAATRASCGMGPFHDFYAGLLAKGMKPEMARLTLARKIAAITLTLWKKEERFDAEQLKTQAA

SEQ ID NO: 351647 - protein, 407 aa, unidentified
MTNHSKSLPKAKPATTSATATNKAKPAKPATTNATATTAKKKRTSEQPGAGQSLTPAGRFTIGLDLGDRSTAFCVLDADGAIVAEGKLKTTQAAIDQQFASLAPARVVLEAGTHSGWISRLIESYGHEVIVANPREVRKIYQNDRKNDRSDAQILARLARFDPQLLEPIRHRTAPMQADLATIRARETLVTARTKCVNAMRGLVKSMGGRLPKCSTESFCKRVSADVPPELETALRPLITAIQTLNEQIRCCDVQIETLATETYPQTALPRQVSGVGALTALAFILTIADGGRFAKSRDIGPYLGLVPRQDDSGDHSSQLRITKARDPYLRRLLVGSAQYIVGPFGPDTDLRRHGEKLMQRGGKNGKKRAIVAVARKLAVLLHRLWITGEVYQPLRNSNRQASMKAA

SEQ ID NO: 351648 - protein, 424 aa, unidentified
MKSLPEFEFAAFAGIDWSDTKHDICLQAANSEEREFSVLLHRPAAIDAWARALCQRFGGRPVAVCLELAKGPLVYALQKYDFLVLFPIHPATLSKYREAFVPSHAKADPTDAQLALELLLRYRAKLKALAPQSVPMRMLLRLVEQRRRLVGDQNRISNRLTDALKQYFPDVLTWFADKDTLLFCDFLTRWPTLKQLKRARRATLLSFFHEHHVRSQARIDERLRAIKSATPLTDDLAVILPNQLLVLALVEQLRVTLQALERFDAQIATVSETLPDYALFRALPGAGASLAPRLLVAFGEQRERYQSAAEVQRYTGIAPVTESSGNKHWVHWRLQCPTFLRQTFVEWAGATIPRSFWAAAYYRQQRDKGSTHQAAVRALAFKWIRILYRCWQTRTPYDESTYLNALKRRGSPLLTSIVGAAKNT

SEQ ID NO: 351649 - protein, 390 aa, unidentified
MYTMIYLGIDVAKDSHVAAAITSDGEVVLKPFPFANSCSGFAKLKSRLDEFPCDSLLIGLESTAHYGENLIAYLVQNAYQVALLNPLQTAALRKSAIRKTKTDKADSFLIAKSMMVDGYRLLEPDDIHLLKLRGLCKTRQNLILLRTRCKIQLGAFVDQLFPELNDFFRAGLHINVSYTLLKLHPRPSEVQSLHLTYLSNLLQKASRGKYTKVDAVHLRELARQSIGTDHPSLALQINQTIAQIELFSEQLNQVDNEIVSIMDILNSPIMTIPGIGHINGAMILSVIGDVTRFSSPAKILAFAGLDPAVMQSGNFTARSTRMSKRGNSMLRYALINAAHNVVRNNHTFAQYYASKVAQGKSHYCALGHTAHKLVRVLFTLLTKNIRFDLP

SEQ ID NO: 351650 - protein, 369 aa, unidentified
MDKIMICGTDLHDRNLVCRVAVDRDEPRTRAYPNTSLGKSSLLDSLKRQARKHSCERIAMAYEASTQGFCLHDDCVDAGVECFVLAPTKIRKSKRDQKRKADEKDAQLILETLRGHLLAGNELPSVWIPDDATRADRETVRSRLDLGRKLTAAKTQVRTLLKAHRLRKPEGTSANWTKSYRCWLGSLCGEGQWPALATLVRQIEFVECEIQAIEGEITSLSETPRYAEPYRALTSKLKGVGLMTAMVFLTEIGDMGRFPNRRTLGAFLGLVPSSNESGEKGDRKGHITREGSPRLRYVLCQATWSRVRSDPDASLVYDRIVRKNPKHKKIAAVAMMRRLGIRMWHVARKAQVRCGIFAPEQMTAGVPTA

SEQ ID NO: 351651 - protein, 425 aa, unidentified
MKGGCAMKVVYPICCGVDVHKTFLVATIITSQGITPHYSKKRFSTFNNSILQFKQWLIDNNCFDVCMESTGKYWVPVYNLLEDTIHTTIANPKWVKAVKGNKDDTKDSQWIGDLFRLGLVPGSYIPNKPIRILREYTRYRSKLVSCKSSEKNRFQNAFTVCNVALDAVVSDMFGKSASSITDYLVSSDSFDPEYCSSLLQRSLKKKADTVVESIEGYQMTKEQKERIVMVRSHLEFIHQSIATLDEKLDKMVAPYESAITLLCTIPGVGKASAITIISEIGTDMSQFANSKRLCCWAGLTPSNNESAGKKKSVRITRAGVYLKPALVQVAHAAVKSNHSPYYRLKYERICKRRGKKRAIIAIARMILTAIYHMFVTGEEFNPSDLYKIDMPQEMVDKQKEKAVKHRKDDFLCIKNPRFFPLIFKR

SEQ ID NO: 351652 - protein, 380 aa, unidentified
MRRVSGLDVHKDTVFLCILDEDGVVFQSKYGVLTPELEQMAGVMVEYGVEEAAMESTSIYWMPVWRVLEPYVALRLVNPFFIKQLPGKKSDVKDAEWIATCLQKELIKGSYVPDELIQQLRQYDRRIFDLSKDIVYKLTKLDAALQRCNIRISNYVSTTKGKAYQDVVRLISDGKTDPEELVKHIHGRTVNRIGKDVLVCALSGVVTAADIDTIRQLREEVELARRHKDECQAKMDEICKRYFPKQYANLQTIPGVQARSATAVIAEVGINMDAFQTAAHLVSWAGLKPRNEESAGKIKSRRVTHGNKYLRKTLIECSWAASRTQNCFYNRFSYIQCTVRHKNKMKVQVAIARKMLTAVWYILHDDVPYRDFTPDIVPSE

SEQ ID NO: 351653 - protein, 478 aa, unidentified
MNVKTSKAKKQVNIENETVNLLPKEELNKRIEVIKKELRSYTWRELETKGKFVKNDKLSFITDDMLIVGCDIGSEMHYIRAIDVRGRELSRGAFEFSNTAEGFENARAWVLELAAKNEKKQIVLGLEPTGHYWFALAAWMISNGISVVQVNPYAVKQSKEIEDNSQLKDDRKDPKLIANLVKDGNYGMPYLPEKIYADLRRLSMFRDQLTEDRIRNVNRLHRELKIYFPEYMDAFGKIDGAFTLEVLRVSAIPSDITELGAEGLRNIWHAAKLRGRGYSRSGEIVRYAEKSVGLTDGKDAGREAVKWFAEQILQLDEQLVEIESALHRKCREIPYAENILAIQGVGEILSGIVAEMCDISRFDDVKEIQKLSGMGLVACSSGKHKGQTKISHRGRKRLRYWLFQAAKSAVSHAEEFKELHVYYTTRDNNPLKKMQSLIVIACKILRVIYAILKTGTTYDPKKMLKDIKRPALQASMAA

SEQ ID NO: 351654 - protein, 596 aa, unidentified
MTTMTSTRPLVTGGVDTHRDEHVAAALDRVGGLLGTASFPTSTAGYAALLAWLRTYGEVSSVGVEGTGSYGAGLARHLTSNKLVVLAISRPNRQVRRRYGKSDVVDAIAAGQAVLSGEATGTPKTHDGPVEALRALKSLHRSANKARTQAINQIRATLVTAPDELRARLRDLSRRDLLATCAAFRIGADDDSLAGIIRLTLRELASRVAFLDAQIKSTVVRLKRITDELAPDLVAMHGVGPDTASTLLLTAGDNPDRLRSERSFASLTGSCPVPATSGLIQKRYRLNRGGAGKPTPLSGASRWSGLVPTRPPASTSHDARPRARPRSKRCAASSATSPARSTTPYRKQPSVDSRSIAHVEQKNWSVVRQAVGYHRYDTAAELALLNEVYALLRLLINFFSPQQKLIDKRREGAKVIKRYDTAQTPYQRVLADPRVTRKVKQALTAQYRQLNRGAATPRPTGSQRAAPDTGQGQAPAQPAARSSTGSDTSICTGASGGAVSSRSRQGSIDAAVRCYYANDPASRPLCTLTAVVMFGTVALCPTCPPQRSSVGKGTPPAPLPAGPELQVLDWVGAAHQQAAAAERTLAAAVARARQTG

SEQ ID NO: 351655 - protein, 412 aa, unidentified
MDVLVRRCAGLDVHRDTVVATVRVPGSGRRRRVQHTRTFATTTAGITALADWLAEHRVTRAGMESTGVYWKPVYYLLEDQLEVWLINAEHLHNVPGRKTDVADSAWIAQMVEHGLVRPSFVPPPPIRQLRDLTRHRRTLVEERTRVVQRLEKVMQDAGIKLTSVASTLLTKSGRAILEALLAGQDDPDTLAELARGRLRAKIPALREALAGRFRAEHHGLLVAQMLAHIDFLDAAIAELDTTLERAAAPFQAVIKQVCTIPGVSVRTAIMLLAECGADMTVFRTPAHLASWAGICPGNNTSGGRSRSGRTRHGSIALRTALTEAAHAAARTKNTYLAAHHAHIRGRRGLPKAIGATRHDLLIAYWHVVHDQVDYADLGPDWAQRRRSTEHRTRRLVHQLERLGHTVTLESNT

SEQ ID NO: 351656 - protein, 348 aa, unidentified
MDHIGIDVHKRESQICILTAAEQRMERRVPTTPASFAAVLGDRAAATILLEASTESEWVARCLEQLGQTVIVADPNFAPMYATRTRAVKTDRRDARALADACRLGAYRPAHRLSDAQRHVRARLAVRDALVRTRTRYIALVRALLRQHGWRLPSGSAETVSARVRTLPLPGRRLSELAPLLAVLRPLHAQIGYSDHVIAQLTQHDPDVRRLQTVPFIGPVTAAAFVAAIDGAARFHDPHQVQAYLGLVPRELSSGDTQHRGRITKAGNVRVRWLLVQAALSIRRSRHPRTATLATWANRIATRRGKNIATVALARRLAGILYALLRDGTEYTPTRLRAPVPPPVEALA

SEQ ID NO: 351657 - protein, 362 aa, unidentified
MFVAGIDAHTRYVVVTIVNRSGELIVKPTRVRVEQSERLLTLLAPYRPLQAVMETSSSWPWLHEVLSGAGIDFVLAHARRLRAIAEANYKRDEIDAELLARMQLAGCIPPVYPTPFAQREWATLIRHRTALVMQRTAVVNRLHAQLHQRGLHLERGRLLTRAGRQWLKREAWPALSLEQRAVVRSHLRIIRGLGPLIRALDRRIAEVAASIPEAQLLRTIPGIGAHRALIVCAEALPIGRFRTPGHLASYAGLVPTSRQTGLRPVHHGPIPGGANRWLRGALVRAVVSHVQHAPDSWLTHYYLTQKPRLGWPVARIATARKLTRAIHAMLRTTTPWTNEGPTTGSTIRPGVSSHERMPQCTH

SEQ ID NO: 351658 - protein, 347 aa, unidentified
MGYAIGIDSHRRYSQITIMEADGHIVERQKVNNDRESLVKVLKPYAQPGSKAVLESGWNWGLVYDMVNSCIDEVKVAHPLKVKAIAEAKIKTDKISADTLAHLLRADLIPECYVRNQESRQTQQVLRQRIFFVRMQTMVKNKIHSMIDRQEYVREEALGYTDLFGSKGREFLRNAAIPSLERKLLDRQLELLEQLKTKISATEIILGQLEENDELVERLRTIPGIGKFFAMLIRHEIDKMERFKTSDKLCAYAGLVPSTYSSGGKTYHGHIIKQGNKYLRWALIEAVVPAMRADAQIRNYYYAMKAKKGSNSAKVATARRLLKIVYQVWKENRVYRNSFTRTALVTS

SEQ ID NO: 351659 - protein, 413 aa, unidentified
MEQLIQRCAGIDVGQAESVVCVRVPDTVTGAPAELIATYGTTTPDLLELVDWLRGLGVTHVAMESTGVFWKPIYYLLEDDFTVLLVNAAHIKHVPGRKTDTIDSAWIAQLLAHGLLTASFVPPPPVRELRDLTRYRKALVNEKTAQVNRIHKVLQDSGIKLTTYATDVMGVSGRAMMRALIAGQSDSAALADLAKGRMRTKIPDLRKALTGRFREHHGFLLKQMLDHVEAQEAEIAALDERIEAAIAPFVAQVELLTTIPGVDRRSAQVILAEIGPDMSVFPTAGHLASWAGMCPGQRDSAGKHGSGKTRKGSKWLRGALVQSARSASRSKSTYLSERYRQIMRRRGDAKAIVALGHEILLAAYRVLATAQPYTDPGPTAFSRLTAQRLTRQAVRRLQDLGYQVTIEPRTDAA

SEQ ID NO: 351660 - protein, 390 aa, unidentified
MQALHPRPDEHAAVRTDLKAIFVSLELSRSTWVITSLSPGGGEKMSKHAVPSGDIPALLARLSQLKEKARARTGQVFPIIVIQEAGLDGFWIHRVLQQEGIESYVVDPASIATSRRRRRAKTDKIDGEALVRALLAYKRGEPRVCAMVQAPTPHEEDRRRISRERETLTAERVQHVNRIKGLLFAQGISDYEPLHRNRRERLAELITGDGRPLPECLKAQISRELDRLELLIEQIKAVEAERDAVLAQAQASPGVPAPAAQLLALRGIGPEAAATLWSEGLFRTFNNRKQVAAYAGLAPTPWQSGSVHRDQGVSKAGNPRLRTIMIQIAWLWLRHQPQSALALWYRARIKRRGGRLGKTMIVALARRLLVALWKYATAGVLIEGAILKPA

SEQ ID NO: 351661 - protein, 389 aa, unidentified
MLLDHLSDGLTAIRTQFGAIFVSLELSRSNWLITSLSPGKGEKMSKYGITAGDVVGLMKLLADHKRKAEARTGESYPIITIQEAGLDGFWLHRVLQQNGIESHVVDAASIAMPRRRRRAKTDRLDGETLLRTLLAYKRGEPRVCAMVVAPSPEEEDRRRICRERQALIAERITHVNRIKGLLFAQGISDYEPLRRDRRARLEALRTGDGRELPAHLKAQIGRELDRTELLLEQIKAVETERDGLLAAARRPASEEAAPDVVTMLLALKGMGANFAAVLWSEAFYRQFSNRRQVAAYAGLAATPWQSGGIRHEQGVSKAGNPRLRTTMIQLAWLWIRHQPQSALTRWFKQRSLQGRKRAIVALARKLLVALWKYVTQGVVIEGAVMKPAA

SEQ ID NO: 351662 - protein, 352 aa, unidentified
MEHYAGIDVSLELSSVCIVDAKGKIVREAKVASDPDALVAFFKQLGFPVVRIGLEAGPLSQWLYAGLAQAGFEAVLLETRHVKAALSAMTVKTDRKDARGIAQLIRMGWFRPVHCKSPGSQEVRALLVARKQLLGKLLDVELSIRGILRGFGLKMGVVTRKTFEARARELSSGQTMLETVVGAMLTARAALQSEYAKLHKTMLVIVRDDKICRRLMTAPGVGPVVAITFKTAVDDPTRISKSKAVGPLFGLTPKKYQSGETDVTGGITCVGDMMVRTALYEAANILLSRVTRFSALKRGHGGGETARIEAGQGRARAQDRRDFASHVGRWDGFPMDESGVGLGRRGALSRRN

SEQ ID NO: 351663 - protein, 376 aa, unidentified
MIFVGIDVAKDKHDCFIISSEGEVLADIFTVSNSREGFEHLLQTINTCTGIGNSKIKVGLETTGHYSYNLLGFLLDNGLTTYVINPLHTNLYRKSQSLRKTKTDRVDARTIASMLMSDVSLKPYTNIAYHNYELKSLTRYRFDKVSERAKLKTSVSRLVNILFPELEKLLPTLHTASSYALLSEIPSAKHIADVHLTHLTNLLYTASKGRYNRDRAIQIRETARNSIGTYMPAKALELKHTIKLIRELDSEIDEINIAIKEIMDKIDSPITSIPGVGLNMATMIIAEIGDFNNFDSPDKILAFSGLSPSTYQSASSIIAMLTWKNEVLDIYDMLFLMLPSSFVFGTLFSSIILQKTLGRPSITMLLFLTLPRNWFV

SEQ ID NO: 351664 - protein, 349 aa, unidentified
MALTIVETRAITGGVDTHADTHVAAALDPIGGLPGVREFPATPAGYGRLLHWLGGFGTVCLVGIEGTGSYGAGLARHVTAAGVAVVEVDRSDRQDRRRQGKSDPLDAVSAARAAQSGKARGAPKGRDGSVEAIRALMVARRSARADRTQAINQARSLIVTGPDDLRARFAMHTPAALAAELASLRPRPGGDMVGYATRIALRELGRRAEFLADQIERLDELIVPLVTARAPGLLALYGVGPHTAALLLIAAGDHPGRLRSEAAWAHLCAAAPIPASSGKTIRHRLNPGGDRQANHAVWRIVFTPMSSHPPTRAYVERRSAEGLSKKEIIRCLKRYLAREVYPHLRPPVG

SEQ ID NO: 351665 - protein, 353 aa, unidentified
MTPLVIGIDPHSRIHVAAAVDEHGRLVDTCEVGASPTQLGQLLTWIQALAVTKVAVEGSKGYGLPLARLLVAAGHTVVDVSSNLTADERKRSRRRGKDDEGDAVAIARIALRESDLPIMDPAHLDADLKLLVDARDQLVQEEARVRNRLHALLLNMAPGYHDTTGPLNSRPAFARARSLALRARKSDPIRAKLALAAIRRLNALRGEQADLEKDIHGELEQRSTTHLQSIPGVGPLVAAKILGEVRDVRHYPSAAAFAAHAGVAPVPASSGNTQRHRLARGGNRQLNRALFTIAMVQARWHPPAREYLARKRAEGKTPAEARRCLKRHLANVVYRALQADLATVPSADLSPAA

SEQ ID NO: 351666 - protein, 340 aa, unidentified
MQKQERFYLGIDVSKSWFDAALMPCTDHQKQPMQCERFDNTADGIKLFDKWLSRQSVCFDERTLLVIENTGVYHRLIWHYCSTHNLPIYIGNATDLKWRMGMVRGKSDQADSRRLCEYAYKNGDDLSVTPALDPALIHLKDLMTARSKLLSQINSIKTYLKELKISKSKALTRLMDQAHKAALKGLSASFEQLEAQIEQAVKADPVIKNNYDLLLSVPGIGHLTAVYLVCWTSNFAGDRTGKQLASYAGVVPFTNSSGSSIKGRPRVHKMANKDLKKMLHLCAMTAIRRYPEFRSFFERKKAEGKHPMSILNAIRNKIALRAAAVVKNQKPYVDNYQKAA

SEQ ID NO: 351667 - protein, 316 aa, unidentified
MAAVMIGIDPHKASHTAVAIGAAGEPLGQLQVRASASQAERLLGWAAAWPERAWAIEGAGGLGHLLAQQLLAAGERVLDVPPKLGARVRLLATGDTNKNDPNDARSVAVAALRSAGVRAARRDDHAAVLRVWSKRHRDLGRTRTQVVCRLHAVLCDLVAGGVSKHITAAHAARLVELITPSGAVEAARCELAAAFTEDLRGIDDRIRRTRKKLAIAVQAAGTSLTGLFGVGPVIAAAVIGDVRAVARFPGRDHFAAYNGTAPIEVSSGDRKVYRLSRRGNRRLNHAIHMAAVTQIRHRRYRPAASSHPVSARRFQP

SEQ ID NO: 351668 - protein, 400 aa, unidentified
MKVMIGVDPHKGSHTAVAIGGDEARLAKVKVRATRRQVDQLLEWAARFDERTWAIESAGGLGYLLAQQLLNAGEQVVDVPATLAARVRVLGTGRSNKNDPNDALSVAVAALRAPRLASVARADHAGVLRLLAKRNTELGRARNKTACRLHALLAELVPGGISNEINAASAERMLDGVKPASPVEVARQALALEHLDDLRRLDAQMRVSKARIAEAIAASGTSLTELFGVGPVVAAMLIGYTGDVARFSNRDHFAAYTGAAPIEVSSGGRITHRLSRRGNRQLNHALHIAAITQIRFSHSPGRAFFERKVTEGKTKKEAVRALKRRIADAVYRQLLIDSGTVTGPGGQPGTTLQSSVTGSTPRRPALRISHSQARTNARTRRAATRTTTSSRTRTPSTKGY

SEQ ID NO: 351669 - protein, 345 aa, unidentified
MQPMYYIGLDVHKRSISYCVKDSSGTIHSEGSIPATRCDLDRWLKTLPQPWTAAMEATMFTGWIYDHLLPHAGALKVAHPLMLRAIAAAKKKNDRIDASKICDCLRCDFLPECYMASTAIRERRRTLRYRNLLVRQMVQMKNKIGMLLMEAGVSYNKQRLHKAGYFRELLATNPDINEGLRALLRLCRETVVRLQRTESTLVRSLECDPLLMDRVERLMTIPAVGLITALTWALEVGDVQRFSSIKKAISYCGLCGAEKSSANTVQRTPLSKQRNKHLQTTLIEAAKMAPRYSPALALLYDKEKQKGNANRATLAVARKLVAYLMAVDRGQRNFQVLETSTCIAA

SEQ ID NO: 351670 - protein, 340 aa, unidentified
MCVYTGLDLSRKRLDWYACRVDGTLVDAGAVPPDLDGLAQLVHRLGGGEVVAVVETMNGARFIHDRLELAGWDVRIADAQRARALAPLACKTDRIDAQVLAELARRDLVPEVWLPDPRVRGERERARFRLHLVKHRTMLKNRINQTLVAHGLGRPTRHLYGPKGRLLLERLPVPEPWQGTLRASLVLIDSLDEQIDELERELRALGADHRYVPLLMTAPGIAWILAYTIASEIGDIGRFPTARKLIGYTGLCPRVYQSGQTDRRGPLAKNGPNYLRWALIEAAHTAGRTAHYRGLVERMRDRHGRRRGSALASVEIARRLSESIWWMLTRNQPFAPAGAL

SEQ ID NO: 351671 - protein, 379 aa, unidentified
MPNTMRHVGLDVHAETIAVAVAEADGSVRELGTIRNRPEAVRKLVAKLGPVAPLRVCYEAGPTGYPLYWQFTALGVHCDVIAPSLIPTKAGDRVKTDRKDAVRLARCYRAGDLTVVWVPDAATEALRDLVRAREVTKQDQLRARHRVSKFLLRHGCQRPDGLRAWTLKHAQWLAQQHFALPTLQVVFDEYRATLALLADRLARLDRAIQAALPTLAPAQQALVGALATLRGVQTVTAATLVSEVGTFRRFATPRQLMGYAGLVPREHSSGSGMHRGPITKTGNAHLRRVLVEAAWAYRHAPNLRSPVLRARQQDQPAPVVAIATQAQRRLCGRYRRLTERAKPPLAVATVIARELLGFIWAIGIEVEPSPASVGAAMSA

SEQ ID NO: 351672 - protein, 449 aa, unidentified
MPKKRAKSVNLPIMEPNAAGVDIGTTQIFVAVPPERDPDPVRCFQTFTVDLEKLADWLQQCQIQTVAMESTGVYWIPLFQILEKRKIEVRLVNAHHVKNVPGKKTDVEDCQWIQHLHACGLLRGSFRPADEICAIRSLWRHRDNLIELATIHLQHMQKALDQMNVQLHHVISDLAGATGLAIVDAILAGERDPAQLARLRDWRIRASEETIMKSLVGDYREEHVFTLRQSLESYRHYQDQIQKVDARVKQMIQTVPSKVAEGEKPPKERNPRKTPWRNEPPQLRDDLYRTFGVDLTQIPGINTLTAQMIFTEIGPDFSRFPTAAAFCSWLRLCPDPKISGGQVLSSRTRPTKNRAALALRMSAQGLHRSQSYLGDYFRRMRARMGTPKAMTAAAHKLARIVYYMVTTQREYDATVFQDQERRTQDRKRTKLYAKGKEFGLQLVPAEAVP

SEQ ID NO: 351673 - protein, 408 aa, unidentified
MEIVGIDWGRKKHYCYLLHQGKKLVLKNKEEDFAKLLKIKEAVYVIEDGNNRIVDYLLRNNRQVYILPSRRSSEARSFFVIEGKSDFIDSKVIAMTYEHNPEWCLQVKREGIAFELDVLVEENAVINVSMMQDIGRLDAYLERYWPEVKEVFSGTSARKLAFISICPTAKDFLSMSDKEILLKLKEMGFLINSNLKSKLKELRKIALERYVPASIRTLIVAFSRYAMEKKVMKEEIGKQMKEIIEKSEFSVLLTLPGVGVIIASQLIVAYLTHKFSSYRDLQRYAGTTPTYYGSGNKNTTKMRSNCNHYLRGTLHIASLAATNSSKWMKRFYDNKKSEGKSSAHALRALANTILKIAFAMLRDLTPYSEEKFLKRNPPSDYTTSKKERKQKPEYSLKVSSVATCRSTA

SEQ ID NO: 351674 - protein, 315 aa, unidentified
MTNLKKSKTIVNVGVDVGKQFLDVWIYEKSLHFQEENSTSGIMRILKRLAHYQVERLVMEATGRYEFNLAQAAYSKKVPVCIVKPLLIRRYAGAINQLAKTDKIDAAVIAEFAAIVQPTITPRKSKNLIAIKDLIARRRQLMGLRTQELNRIKIMGKAFEISCSRIIRCLDMEIKRMEKRLAKHVEEQAEWSDKQTLLKSAPSVGDTLTYTLLADLPELGSLNNKEIASLVGVAPVNRDSGKMRGKRRIQGGRACVRTVLYMATLSATLCNPIIKAFYKKLVAQGKHKKVAITACMRKFITMLNAMVRDNCLWAY

SEQ ID NO: 351675 - protein, 406 aa, unidentified
MIRYHVGIDVGKNKHHACVYDIVEDRYTKVFPFTVDRPDFERFLLFLQRQGPIEEVMVGVEASGPYALTIGHFLLEHSYTVVELNPFQASQFRKAQGKKAKTDRVDARSLAAFLAVGSYKPLTLGDPLYENLRELTRFRVDLVKDRTSQVNRLKETLAIAFPELGAYMASLESPTVLTLLTNYPGPQALAEAGAQAVSACIIEASHGRLGSAQAQAIVSAAGTTIGLLQRQQALAIKLEVLASGIISVNMQLQRVEAAIEDLFRHLRYNKSDFPVGGIQSLACILAEIEDVNRFPTLKQFLSHFGWCPQTFQTGGFRQEHPRMSHAGNRYVRRVLWMLAIMAVNTVPAYHDYLQRRTAAGKKKMHTIVAVGRKILSVIYAVLKTGRPYTSEGGASHADPCPVLTSL

SEQ ID NO: 351676 - protein, 414 aa, unidentified
MDKVYDICCGIDVHKKLIVACFIQGNRQEIRNFGATTRELFELADWLKNGGCEMIAMESTSSYWKPLYNIFETYGLQAMVVNANHMKAVPGRKTDVKDAEWIADLLRHGLLTASYIPDKDQRELRELVRYRKSLVGERNRELNRLQKMLEGANIKISGTIKDINGKSARNLLEYLLTGTPIDSAGYDILYQQNVIAHNLKATKEQIIDDLNGVMSDLQRKMMRLLLKHLDELNDHIRELDDDIDNFMKPEEKQAAEAIEDIPGIGSTSAQAVISVIGTNMTRFPTDAHISSWAGLCPGNNESANKRKSGRTTKGNNLLKDTLVICAHSAVKNKKSYFSALFARISAHRGKKRAYVAVAHSMLVAIYHILKDNVAFKDLGADYYNQFNKERKINAYLKKLKALGWEAPVVAAQAF

SEQ ID NO: 351677 - protein, 383 aa, unidentified
MTTAIDTRDVCCVALELSKTSWVCAFAVPGESKVAIHKIKAGDTDRLMAVLTGSKARAEQQLGRPLQIVLCYEVGYDGFWLARYLIARAIHTIVFDPASFLMPRRSRVAKTDRLDAEGMTRILRRWLSGDREMARAVQIPSVEQEDAKRIERERKYLVEERISIIGRIKGLLALHGIWLVKKNIGKGLRQRLDAMKTGDGRPLAPFLRSEIERMLTRHDLISRQIADVEADRKAALNNEKGVFPHADKVRRLTTLGAVGETTATVLVAEIYHRTFLTRRQVASFVGLAPSPYKSGEVDRDRGINKAGSKLARHMLVELAWFWLRYQSNSQLSQWWHSRFGNQGMRGRKVGIVALARKLAIALWRFVEDGIVPDGATLKVRHAS

SEQ ID NO: 351678 - protein, 346 aa, unidentified
MHHIGMDGHITTLEFAVVNEAGRLVKADRVTTSVKGFMEFVRTVPRPRTIYMEEGTLAAWTLETCVRFGEKLVITDPKKNHWISSSGQKDDPIDALKLAQLGRGGYIKEIHHLVGQRRRFRELMIAYHDAVRSTTRIKNKIKARFRQNGIQCAGITVYSETYREDWKGKLPQEPTLLLILDGLWRQLEQSEQTEKELLAAARAQAKHYPEIKHFQALPGIGFISAATISALLETPYRFADKKKVWMYAGLGIMRRSSGGKVYSEKLSTDYNRLLKYTLKQAAEAAIQAKDSPFRRKYLDMTLMRGIAPHRAKLTIARDMLATMWAMWRKGEKYNPEIREQTAYKQG

SEQ ID NO: 351679 - protein, 423 aa, unidentified
MEIMHRRVAGLDVHKETVVACVRVMDGRRPTRECRTFTTTTQGLLELLGWLTASRVTHVAMEATGVYWTPVWKILSEGDFTLIVANAAHIKQVPGRKTDMNDAMWIADLLACGLLKASFVPPEEIHELRSLMRTRKQLVREQTRHVQRIEKTLEEANIKLGAVLSDLMGVSGRRIIEAMIAGERDPHRLAALAERSVKASPNALHDALHGRLREHHRFLLQLHLRQWDALDAAIRQIDEQVSDHIERVDEEAADGQPPFRELIPRLCAIPGVSFQSATAILAEIGRDMSRFPTAGHLIAWAGLCPGHNESAGKRKSSRLRKGAPWLKTMLVQCAWAAKRAKHSYYSAQFHRLCGRRGPQKAICAVAASILTAIYHMVQSGTPHRDLGADYFDRRTPETKAKRLVAQLARLGYAAQLQPLAEAA

SEQ ID NO: 351680 - protein, 308 aa, unidentified
MTIIYAGLDIAKSNLQLHLAGQFHDLPNSPAGHRRLIELLATQEHVHVICEATGGYERDVVAALHQAAIALSVLNPARVRHFARAQGQRAKTDRIDAAVLTAYGVSLQPKPTAARTKLEQQLAELVRRRLQLLEILVAQRQQTERLTIPALRRQAHSLIRRLERDLAQTESLLTQLREQVAELDERVQRLEAITGVGSITALGVLAELPELGTLNRQQAAALAGLAPHPRESGQWQGRRTIGGGRAAVRRALYLAALCAARSNRHLREFYQRLRAAGKPAKVALTAVMRKLIVLMNHVLKNPNFSLAT

SEQ ID NO: 351681 - protein, 384 aa, unidentified
MRYIEQTEAARDGAVVFVALELSKPAWLLAAQGSPSGKTSLHRLDRGDVAGLLALLRRLQAREQRASGNQVQVVLGYEAGYDGFWLQRRLSVEGITCCVMDPGSLQVDRRARRAKTDRLDAAMLLRALMAWWRGDRAACHMVQVPSVEREDARRTHRERQRLIAERVQHVNRIKGLLATQGVYDYRPLRRDRWKRLEELRTGDGRELPPCLRREIEREFKRLELVLEQIAASETERDATIEAPAAEDVDAAKVAQLSKLGGIGPELATVLVREALYRSFTNRKEVAAYAGLTPSPYASGDRHRDQGISKAGNPLLRKAMVELAWLWLRYQPDSALARWFTERVGAVRGRMRKITAVALARKLLVALWRYLTTGLLPDGVRLKAA

SEQ ID NO: 351682 - protein, 363 aa, unidentified
MEYIAFDAHKHYTLASVARPDGQLVREQRLPHERGALQQFLARCEPGSPVAVETIGNWYWIVDEIEAAGCVPKLVHARKAKLMMGEINKTDRLDVRGLNRLQRNGTLPTVWIPPGELRDQRDLPRTRMVLVRQRTQLKNRLHATLAKYALHDFTVSDIFGVRGRELLRQRLELLPPHTAYASQHLLRQVEELGGQIRQFEQRIQATFKPTPAIQHLMTVPGVGLTLAVVIALEVGDVARFATAEKLASYAGTTPRVHASGGKTRFGRSRPDVNRYLKWAFVEAANAICVTRRRSACRHVSRLYERIARRKGHPKAIGALARHLAEATFWILSKQEPYREPKISTVSSTEDKREIPLSSRKLDR

SEQ ID NO: 351683 - protein, 350 aa, unidentified
MSIIGCDVHSRYQVIAMLEVETGEIVKRRLEHENGEAKAFYAGLAKPALIGIEATGYTQWFERMLAEQGHELWTGDAAQIWARSVRRQVTDTRAAEHLLELLVTNHFPRIWVPTAEERDLRQLLKHRNKLVQMQTSVRNQLHFLAMSQGVCRKRKLWSAKGRAELEALSLGRWASQRRQELLELLDGLGPRIEELNQAVEVQAGRRPDCQELMKVKGVGAVTSLAYALTVGPVERFPNSRKLVSYLGLNPSEHSSGGRQRLGHISKQANQMLRWLLVEVSHSAAQHDPELRRQYQRLKFRRGGKVAQVAVARQLAVRLYWRLRQASRTTPPVRMSGSPGSAVVDESPSQV

SEQ ID NO: 351684 - protein, 338 aa, unidentified
MPTDQTGQTYALFVGVDIAAQTAMVATQRPGAKASRSFTIEQTPEGYTSLLRQLQATGFVPCQVLVVMEATGSYWMSLATRLVHEGFAVSVMNPAQAHHFAKALLKRAKTDAIDAQTLAQLAMILQPEPWTPPPQIYYALQQRLAQRDDLLNLRQQVRNQLHALVQHPEVIAEVRARMESLLATFASQLTEVESEITAALSQDSAWAAAATRLQSIKGVGWVTAAWTLVTTLNLTSCDTVDALTAYAGLAPMPRQSGSSVWHRPSIGHTGNGRLRTAFYMATLSAAQPNPVIKAFYTRLREVGKPEKVARCAAARKLLHIAWAVVKKDQPFDPNYALG

SEQ ID NO: 351685 - protein, 383 aa, unidentified
MLSAQGNDTTNGEAILAVALELSQKCWKIAFQDGRHDKPSIYNVQHEEAEQRLAEARAVIEAQKTKWQLSPDCRVVVMYEAGQDGFWLCRALKKQGYEALIVDPASIPVERQARRAKTDRLDAIKLVSCLLAYLRGERDRMHAIRIPEAAAEAQRHLARDRGEMQKEIQQHRDRIRKLLRTVGNWDGVGPDFEAQLHAGQVRCHDGAALPPEMQERFSRECERLALVKKQLAALESELVTQLPLPVQARIGHLLRLKGVGLVGSERLVLEFFWRDFNNRREVGACTGLAPQPYDSGESRVDQGISKQGNRRVRALLIEMAWMWLRYQPESALSRWFAQRTGGTGANKRGKRIAIVAVARRLAIALWRYLEQGVIPEGALLKAA

SEQ ID NO: 351686 - protein, 406 aa, unidentified
MEGPIITVDVSKGSCHYQPFIENGHPMRKPKQLSATIDGFQKLGQTIKDLEAKTEREDIPVIFEATGVYHRPLQKYLEDHKIRYYIISPLLSATYRKTDLHSNKTDALDCAHIAKAYYCEKELRQYQAQPQEYKRLYQLSRIYESELVHLRKRKVSLRSMLDIIYPRIDKTFKGNQNLYDPIPMEILKRYPHPSLLLSHREDTIVKTVGHRTGHLKGYTERIVHKIYEKAKECYSGCEINDIEVINLPRLIENVQEQKKKCDSLLKEMIEIARTCPYFASVVSIVGIGENLAARIIAELGDVNRFDNRAAIVAYAGLNPKIQQSGDIDGLHLKISKKGNKHLRCLLYLGAQCNYRLRKEDPLYEFTKKKRQQTQCPLSSKAAYTASAHKLLVIIYSLCKNGTLYHS

SEQ ID NO: 351687 - protein, 364 aa, unidentified
MQEPTHIGLDVHKETIAVAVLRAGTVECDERVIPNTPEALRKLLSRYPDRSLLRTCYEAGPTGYDTQRLITSLGIACDVIAPSLIPRRSGVRVKTDRTDARNLARLHRAGELVAVRVPTPAEEALRDLVRAREDLKNDRRIARQRIRSFLLRYGKRYPAPGSRWSFRFEVWMRALRFDEPASQAAFDHLVGAYFVRDSQLGAVDAQITELALLEPLAEPVARLRAFRGIDTLTAVTLLTETCDFRRFATAGSYMAFTGLTPSEHSSGASRHQGSITKSGNAHIRRVLVEAAWAYRYAPAVRGKLRARQIGQPPEVVAYSWAAQCRLHGTYRRLAAKKGPNKAVVAVARELAGFVWGAMTDNMAV

SEQ ID NO: 351688 - protein, 408 aa, unidentified
MRTTVGVDVGCHRHRVAIADPGGNIVEEFDLPARWEGFRDFFARLEHYRRNYGVPVVVAMEGYNGYARPLDREIQKRGYTLLNVNNFKLRRFKELFPSPAKTDAIDARKIVELVRLQGSLPRSREILQEVSEVPEDHRMLKRLTRRRRQLVDEKVCLLNRMQSDLQAVSPGLADLVEYKDGVAFLRFLSCRNRLEQLKNIRRESLLKIRGIGKSFTGKVQAWQKKACFSAEAPYVGPMIIEDARRILELKERIAGLEEQIRELSESSPLGRRIGSIPGFGVVSTGELVGEIGTMDRFDSESSLAMYLGMAPLDNSSGSYQGTKTARQVNRRARMSMMTATMRHIPQVEESRSYYERKRNEGKTYHQAVRATGRHLVRVIWSMAKRGEDYHIRQLHHLSENPPESVATS

SEQ ID NO: 351689 - protein, 338 aa, unidentified
MASVKGDIIMYYVGIDISKRFVDVCLLADGIKGKRKTKTLPNGPNAVQALAEWLTRQKCDPGQAHIIMEATGVYHEHLAYGLHQSGIAVSVINPHRLREFARGMGILTKTDKVDAYVLACYGGLRQPECWSPPSPEIRKLRALLQHRDSLLSDKQRIENRLSTLASTQAPEEVVASLDSMVRHVKSELERIERLIEDQIDKHPGLKNDLKLLKSIDGVGDQIGWNMLATIRSGHFRSAEQVAAYLGVIPVERRSGTSVRGRARLSKIGPPAMRAKLYMGAIAAISHNRHVKAQYERLLQKGKAKMLAVGAAMRKLVHLCYGVLHTQQRYDKNYGVVAS

SEQ ID NO: 351690 - protein, 485 aa, unidentified
MPQVYKSSKSKYPLSTQRKTRNPKKQTKADPTQGLQVANPNAAAIDIGSSEHWVAVPPGRAEPCYRRFGCWTADLEALADWLVQCSVDTVVLEATGNYWVVLYDILEQRKLRAVVVNPRYAKNMSGKKGDIPDCQWMQKLHTYGLFANSFRPAEEIRVLRTYLRQRETLVAAASQSIQHMQKALTEMNIQLTNTISDVSGETGLRIIDAILSGQRDPKELARLKDPRIRATQSELARALRGHWKTEQLFVLEQARLTYGHYQEQILACEEAIQQQICALQARFPQAVAPTAAATEDTAGQRAQTSGEVKPATAQPEAPTFSLSRELLRITGVDLTAIDGIGPVTAQIVLSEIGTDLSYWPDEKHFASWLGLCPDHRISGGRVLRRSTRPVVNRVRNALRLAAFTLDHSDSWLGAKYRRLKRKLGAPKAIVAMAHHLARLIYRMIKHGQQYVDKGIQAYEAKFREQRKRWLQKLAKELNMKLVETD

SEQ ID NO: 351691 - protein, 443 aa, unidentified
MAKTLYLGIDVAMAENVCCPLLEDGTEARRRFTVPNNLPGAEQLVKEILTLMDRYHLDHLLVGLESTNLYWWHLSCFLNSCSQLAHFHHSVYAFNPRLVRGFKKALPKTGRSDINDAYAVAERLRFGRLPAPFMPNELYQPLQRLTRFRRHLARQITREKNYFLTFLFLKFSEYQNLDPLSNTFGAASKAVLTDYLTVDEIVAAPLEELVSLLMKEGKNHFPAPEAIAAAIKKAARDSYRPHPSLKEPLNLILSATLENIRTFSQQVKKLDSAIEREERKFPNPLKSIPGLGPVFAAGILAEIQDVHRFPDQAATAKFSGLFWRTNESGSFQAEETSLDKSGNDYLRYYLIEGANSVRMHTVEYGRYYRTKYNESTKHKHKRAVVLTARKLVRMVDAMLRHNQLYIPQPLNPIEEVIPVLTRSRPAKQHHYRLPGSPVPTLSN

SEQ ID NO: 351692 - protein, 350 aa, unidentified
MMIIGCDLHTRYQQIAMLDTDTGELVERRLEHESGEARAFYAGLAGEVRVGIEATGHTHWFEAMLAELGHELWMGDAAKIRASVIRKQKTDARDAAHLLDLLRQDRFPKIWRPSPAERDLRQLVWHRQKLVWMRGAVKNQLHALAMGEGVCRKKKLFTAKGRKELEGLALGPWASYRRQELLRMFDELAAATAQLDQAVEQAAKSQPLAVRLMTHPGVGPVTSLAFVLIIGPVERFEHSKQVVSYLGLNPQEHSSGGKQRLGAISKQGNPMMRSLLVEAGHTAARFDPALKRMYQRLKFRRGASVAKVAVARKLAVRMYWMLRSTADYAQLVRMQGSPWATLVENSPSLG

SEQ ID NO: 351693 - protein, 412 aa, unidentified
MLFVGDDWARDHHDVELLDEHGKKLAAKRLPEGLAGVSELHALIAQHLPEQWADLPPGEAAARVKIGIESDHGVWVQALIAAGYEVFAINPFSVKQYRARHSTSGAKSDAADAHLLAEIVRLDRAHHRPVAADSDQVEAIKLAARTHQTMIWERSRHVLRLRSALVEFFPAALEAFPDLDAPDVLELLAAAPDPDTAARLSLSRIVAALRRARRRNVQERAQHIQQVLRASELRQSPPVQHTYAAIVTVQVRLISTLNEQVDALAAVVDHHFGLHPDADVYASLPGLGVILGARVLGEFGDAPDRYLDARARKNYAGSSPITRASGKKRLVQARYARNKRMADALRQWAFCSMRGSPGARAYYDELKDRKIGHQAALRQLANRWVGILHGCLKTHTLYDEDTAWSHHQTAAA

SEQ ID NO: 351694 - protein, 338 aa, unidentified
MKRYLGVDLHRNCFTVYTRQEDGSGESKEWSIDSRKAFARTVTATDEVAVEATGNVRLFREALKECGCRVVVVNPHQFKVISHSVKKTDEHDAKVLAEFLSKGMLPEVRMKDEVHARVASLAQTRDKLVKLRTTLKNKVNNLLAARGILIRKESLSSEKGLADVLTKPVSDLERTELEILVEEIRHLNESIKKLEGLLHDQGPKLPGWKNLTSIKGIGDTGASILLSTIGNIEDFADEGKLAAYFGIVPRVSNSNETEHSGRITKRGAKMGRTALVQCALIAARYSPYLQSFYKRVAAARGTGKAIIALARKFLSIIYKTLKNNWIFTDFPQFVHVNG

SEQ ID NO: 351695 - protein, 351 aa, unidentified
MNNATARKRTQITIGLDLGDRRHTYCVLDEAGKTAREGSLGNTREQLATMARSYPGATAVMEAGMHSPWVSCFLQELGLRVIVANPRKTRAIYQNERKSDRRDAMMLARLARMDATLLHPVKHGGQQAQQDMLQLKLRDSLVRTRVALINAMRFSLKSLGYSVSNPSSESFHKFVLKEVPESIGEMIAHNVAAIAELTQRIRALDASISRLAAKRYPETIYLQQVSGVGPITSLYFVLKVGSPERFGRTRDIGAFLGLCPKRDQSGETDKELRISKCGDRYLRRLLVGAAQYILGPFGADSALREHGLRLAQEGTAKAKKRAVVAVARKLAVLLLTLWKSREPYESFPTMA

SEQ ID NO: 351696 - protein, 350 aa, unidentified
MWYVGLDVHSKQSSYCILDKGGQVVQEKTVKGPVSRVLAELAAVKHAFTIVYEASCNYGYMYDELSKIARRVVVAHPAQLRLIFKSKRKNDRMDAKKLAKMLLLDLVPTVHVPSRGVRAWRGMIEHRQRQVDERTRIKNGLRALLRGRGIESPRRLWTKAGLAWLRAVAFEEPLDAIRRDDLVGRLELANASVQRVEAVLDKMGREHPGVVLLMTIDGVGIRTAEAMVAYIDDPTRFRHNKAAGSYFGLVPCQDASAGKNRLGHITHDGPPTVRRLLTQAAWQGIRRSPAIRAYFERIRHDDPGRKKIALVATMHYLARVMLAMLRTGEVWQPDVPEVRAAAAGKETHAA

SEQ ID NO: 351697 - protein, 313 aa, unidentified
MKPYIGIDVSKDRLDVAVGDSAQCFSVENTENGIEGLVKQMKALEPELIVMEATGGYERLCAAMLAAAGLALSVVNPRQVRDFAKSKGILAKTDRLDARVLAHFGAAIKPEPRALPDAQQQLLDELMLRRRQIVAGLVAEKNRLGMAHTDAVKKSLRKAIAFYERLLADVDRQIGEHIERSPLWRAREDLLRSFKGVGPVSSRTLIGDLPELGTLDRKRIAALVGVAPVARDSGKRKGTRAIFGGRAQVRAALYMVAITAIRTNAPIRQFYQRLRAAGKPAKVAIVACMRKILITLNAMVKTHTRWNEHLTVS

SEQ ID NO: 351698 - protein, 369 aa, unidentified
MDKAITYVGLDVHKDTIAVALAEAGVRGDVREYGKVANTPAAVKALATKLSRVGNALRFCYEAGPCGYGIQRQLTLVGHDCVVVAPSLIPRKPGDRIKTDRRDAINLAQLHRAGELTAVWVPDPAHEAIRDLVRARLAAVRSLRQARQQLSGFLLRHGRHYNRPAWTLIHRRWMAGLRFEQAAHHIVLEDCIAAVEAATARRDRLEAHIEAALPDWSLAPVVGALQALRGMALVAAATVIAELGDITRFANPRQLMAYLGLVPSEHSSGAMRRQGGITKAGNGAARRMLIEAAWSYRFPARISREQLLRQEGLAKPIRDTAWKAQERLCRRYRKLARAGKSPTVVTTAIARELTGFAWAIAKHVQTANP

SEQ ID NO: 351699 - protein, 362 aa, unidentified
MNVAGIDGHAQYLVVTVLSNRAKMLHAPVRIKNAEAYRLVELLEPFRPLEAVVETSPAWPWLHDLLVGHGFGFVLAHAKKLRAISEANYKRNEIDAELLARMRLAGLIPEVHPKSIEQREQAVLVRHRARLVKLRTSAAGRIHAELHSIGMHLERGRLLTQGGRRWLRTRAWPLFGPEQRLLVRSQLAIVHGLNPMVRALDRRIVGIGSEIPAVALLQTVPGIGPYRGLLIATEVLPIERFPSPRHLVSYSGLAPRSNQSGSRPIRHGPIPAGANRWLRAAFVRTIVSHHMAAPSSWLSLYYDTQKQRLGWQVARVAAARKLARAVHAMLRTGEVWMDDVPKSDEKGRAPRLACRSDDLQPS

SEQ ID NO: 351700 - protein, 371 aa, unidentified
MNHVTSIGLDVHARSVTAVALDSITGEVRSQKFGYSPAEIAGWILQLDSPKAVYESGVTGFHLVRELREMGVDCIVGAVSKMHKPASDRRKKNDRNDAEFLARQLMAHNIVEVFVPDVETEGARNLSRALEDVRDDLTRAKHRLTHLLIRWGYVWNEFNEDGKRRGSWTRAHWEWIRGIELPDAAARESLDYYISEVRHIESQKKAIEKRVAQCASRPRWRDRVEALRCMKGIETVTAFALTVEAGVFSRFDSARAFASWLGLVPSEHSSGERASRGGITKAGNSHLRKLLVEASWHYTRATKERKRSLCDESVPASISNHAAVGVKRLAERRRHLSCELRKRPVVANVATARELACWIWALGRMSEGALA

SEQ ID NO: 351701 - protein, 292 aa, unidentified
MSQPNPLCVGIDVSKATLDIAASSDVAQFTVSNDSDGFNAIITGLRRHSVALVLMEATGGLEVAVACSLQAEGFEVAVVNPRQARDFARAMGYLAKTDRIDARVLTQMAEVINRHPERKRFIRALPDAERQALAAMVVRRRQLIAMLVAERNRLHPFHPQNKKSINTIIKALEDELVRLEKEMDSHIRNHFKEIAERLSSIKGVGTMTVSAMLAEIPELGTLSRREISALIGVAPVNRDSGTMRGRRTIFGGRAGVRSALYMAALVATRFNPVIKTFYVRLLAAGKAKKWRW

SEQ ID NO: 351702 - protein, 364 aa, unidentified
MLIIGCDYHPGFQQIAFVETDTGECGERRLLHREEAEQFYRKLQEQSLKVRVGMESSGHSRWFERLLQELGCELWIGDPAEIRTKRVRKQKTDRQDAQLLLQLILENRFPRVWVPDAENRDLRQLLWHRHRLVQMRTRVMNQLHVVPLNEGLRRKKALWRPAGRKELESIALAPWASRRRQDLLDLLDQLTPKIQELTRALEEEVEKRPVTRLLMTHPGVGPLTALAYELVIGTPKRFHCGKQLASYVGLVPEEKSSGDRRRLGHISKQGNVLLRFLLVEAAQVTVRSQPVWRSKFFHLAMRRGRKIAKVAMARKLAVHLYWMWRQGCDYGQTRKLGSHAGEPGNPDGVQSITDVMIGHPAPSK

SEQ ID NO: 351703 - protein, 346 aa, unidentified
MLYAGLDLSRQRLDVHVLDEEGRTVEVMAVHPDADALRTLASRVLRHGQEVSAAIESMTGSRFVHDTLERLGWEVAIADPVKAKGLAPLAAKTDKIDAHVLAELVRRDLVPEIWLPTPGVRAERERARFRLHLVHHRSALKCRIHATLMTFGHTVPVTDLFGTSGRELLAGFELPEPWAGTLATSLAMVDELDERIDECGRQLARLGADHPYIPLLLTVPGVGPLLAYTIAAEIGDIARFASPKKLTGYTGLCPIVRQSGNRDVRGPLAKNGPKYLRWALIEAATHAARDLRYRDRYERNKRRLGRQRGAKVARVDIARKLAEAIWHVLTKNEPFAPAGPAMTLVA

SEQ ID NO: 351704 - protein, 350 aa, unidentified
MFMIGVDYHPSFQQIAFLNQETGEFGERRLDHSDGEVEQFYRRLQSQSVHIRVGIEATGYARWFERLLGELGIELWIGDAAEIRTLRVRKQKTDRQDAQLLLKLLMEDRFPRVWIPNPENRDLRQLLWHRHRLVQMRTRILNQLQAVAMNEGKRWKKRLWNKQGRALLENLPLAPWASRRRQDLSELLDRFNPVIGELTTAIEREASKRPEVVRLMTHPGVGPLTALAFVLIIGDPFRFARGKQVGSYVGLVPCENSSAGRQRLGHISKQGNKLLRFLLVEAAQVAVRFDPDWRRYLHLAVRRDRRIAKVAMGRKLAVRLFWMWRKGWDYSQFVEFGSHAGQPEANPGVQ

SEQ ID NO: 351705 - protein, 347 aa, unidentified
MNHYAGLDVSLEETAICVVDSTGRIVKEARAASEPETLIAALRQIDLPLERVGLEACSLTAWLHDELHSAGLPAVCIETRHANAAMKTMPNKTDRNDARALAQIMRTGWYRQVHVKSRQCRLWRSLLVARRSVLNEMRSIENVVRAVLREGGLKLGTPSRAAFAERVRDLMAEDASVKPLVEPLLTILVTMLDQFARLTKQVLDIVRREKVCRRLMSVPGVGPITALAFRATIDRPDRFRRSRDVGAHLGLTPARYQSGETDVSGRISRCGDELARTALYEAAHTLLVRSRKWSSLRAWGMKVAKTRGMARARVAVARKLAVILHRMWSDETEFRFGRNPAAALAAA

SEQ ID NO: 351706 - protein, 375 aa, unidentified
MTADLKTREYESTSVLYMAMELSNKIWRLAFGAGKRARQVCIDAGDIAALGEQLVNAKAKLGLESEAAVLSCYEAGRDGFWLHRQLRALGIENHVVDAASIEVSRRARRAKTDRLDAKALLEKLVRYAQGERGVWRVVRVPTLEWEDLRQLHREREQLRGERNRHRNRLSSKLVAQGIRLPIDGQFMRHLEEAKLFDGRAVPEHLKGGLEREWERLQVVQAQLKALEAHIRGLIKADGALKSVHALMLHTGVGWVGAWTLVLEVLGWREIANRRELASLVGLVPTPYNSGTMVRDQGISKAGNRRVRALMIQLAWLWLRYQPNSKHSRWFQERFGGGSKRQRRIGIVGLARRVLIDLWRFVDAGVVSQGARLKVA

SEQ ID NO: 351707 - protein, 322 aa, unidentified
MHPLQLGIDVAKAKLDCALRLTSGKFRHKVVDNTPAGFKALDTWLAKEGAAVLQVCMEATGIYWEAVAEHLADRPETTVSVINPAQIKAFGASRMVRTKTDKVDAKLIAQFCSERTPEPWQAPTPAEKTLRALVLRLDALQAMRIQESNRLEVARDSVAEGIVQHLKWLDDEIARISKAIRDHIDNDPTLRDKHRLLDSIPGLGERTTAVLLAFIAEPARFENARQAVAFAGLDPRQHESGSSVRGKPRLSKVGHSFLRKTLYMPAMVALYRTDWGKLFRDRLASKGKPPMLIIGAMMRKLVQVSYGVLKSGQTFQPGLHGA

SEQ ID NO: 351708 - protein, 425 aa, unidentified
MRFFGIDVHLEFCEVAVAEGGKVSQVGRIASTPEAIREFACGLGGEDQVVLDASGSVMAIARILRESNVGRVVVSNAAQTRAISHARVKSDRFDAAMLARLLSAGMLSEVWVPDEATLALRRRVARRSALVRARTRIKNEVHAVVMRCLLGRPPVSDLFGRKGRVWLAEQQLPEEEAETVAGCLRQIDFLDSEIALLDQKIAEQALAWPGLCRLLTIPGVDIGTAAAVIAAVGDITRFQSPGQLVAYLGLDPKVRQSGSEPARYGHISKRGNAQARSMLVEAAWIAIRSPGPLKAFGERVRARRGAQVAAVAVARKLVVLCWHLLTKDEDYAFARPSLTRQKTRRLELNAGASRRPRRHDGATVSPTAAQRAAERELQTQAELAYRRLVNDWRSTAAPKGGAGATPGRASQKPVKGKAARQTTSP

SEQ ID NO: 351709 - protein, 394 aa, unidentified
MKLVGIDVGKNSHHFCVMDKETGEFNVAPSSFSNNKEGFDFLINSLKPYSKKSILIGMEDTGHYHVALLKFLLNNGYTVALINPKTTDLTRKMEGGITKNDKLDTITICDVLDTPERKKQYRITKVDRFDLYEQRQLTRHHHNLKEELNVYCNRLQKSIDLVFPEFNTLFSSKYGIVYMNLLKTFGSAEAIASTDIRTIRKFFEIKGKGNRISLTPEKLKECAKNSIGISSEVETIQIKHLVSQITLIKEQIAEIDKKIEEFSITNNSPILSIPGISHFSGTSILAELGDIGNYSKPSQIIKFAGVAPYHYESSQYNAQHTGITKKGSKYLRKTLYQIILTVINNNPVFKKYYLLKISQGKGHRCAQGHCIRKLLRIIYHLLETGQSFDPALLR

SEQ ID NO: 351710 - protein, 344 aa, unidentified
MTYYAGLDVSLRTVHLCVIDDQGERVAETKLASDVQDIVAYLDDLELDIDSVGLEAGTLTQYLTYGLQAAGFDIICMEARQVKGALSAMRNKTDKHDARGIAQILRSGWYSQVHVKSMQSHHIRMLLSSRNAVLSKCVDLENEVRGLFKIFGIKLPPKLGHGAFDTAVRDIIEADEALSHALLPLLEARLVLYRTFRVLDNRTRKMAHADAVCVRLMSVPGVGFITALTFKAGVDDPSRFKRSRTVGAYFGLTARRFQSGEMDIDGHISKCGDADVRGTLYTAANALLTRSARWSPLKAWGMKLAKTRGHRRAVIAVARKLAVILHRVWIDDTQFRWGTEGARS

SEQ ID NO: 351711 - protein, 360 aa, unidentified
MSKYITIGMDLGNKKHTVCALAQDGKVLWRREVANTPEALKPFFEANAGATVAMETGLCCRWISALAKSCGCDVLVGNARKLAAIWKSKQKNDEKDALLIAELARTSSLLFHPVELRDDERHEMVQVIELRAVAVSQRTQAVNSVRGLCKARGVFIPKCDASCFHKVAGEAIPAGMAWKFRPMLRHLKEIAATVKRYDAMLEKYARAHFKDEVDLLQTIPSVGQITSCAFVAHVADPRRFGSARDAGAYFGLTPGQDQSGDRDAPKRITKMGSTLMRHLLVTAANYILREASPDTALKRHGERICARGGKVARRKAKVAVARKLAVTMLAMLKTGKPYDDGLAAKRSAMGDAPDAAGPIA

SEQ ID NO: 351712 - protein, 341 aa, unidentified
MVKTPAITGGVDTHADAHVAAALDGIGGLLGVSEFPATPAGYAQLLGWLNSFGMVCLAGIEGTGSYGAGLARHITAAGIRVVEVDRSDRQDRRRKGKSDPLDAVSAARAAQSGRASGAPRGRDGAVEAIRALMVAKRTARAQRTQTINQARALILTGPDGIRTRFTRHGPAELVAGLAALRPRPGSMVRYHTLLSLRELGRRAQFLDDQLERLDVLIIPLVTARAPRLLTLYGVGPDTAAMLLIAAGDHPGRLRSEAAWAHLCATAPIPASSGKVSRHRLNRGGDRQANHALWRIVITRMSSHPATRAYVQRRTAEGLSKKEIIRCLKRYAAREIYPHLRG

SEQ ID NO: 351713 - protein, 271 aa, unidentified
MTFRPHALHLKAELFVKSSRVHVRDDGFTRCNFHLKFFIMVYRGIDISKSSFVAAYPSTNGNPTKTFPNTTAGMRELIGTLAVAEHHCVMEATSNYGCCCTCYIRTVLPSVLPPPPKKKQIKHFSRMMMPVTKTDEKDAYMIAMYGEKMNPPIYKMPSQATIRILTTEGFTYFDNAKQLSRFIGICPTYQQSRTSVNIREHINRNDDERLRSLLYIAFWTALRYNSRECYIRLKANEKPFKVALIAVTNKLVRPVLTITTINSIYRWICPG

SEQ ID NO: 351714 - protein, 344 aa, unidentified
MKFTRCGLDIAKQVFQIHGVNEHGVVKARKTLARAKVLEYFAQVPPCLIGIEACGGAHYWARELGKLGHTVKLMAAQFVTAYRKRGKDDVNDAEAICEAVGRPNMHFIAVKTVEQQAVLMVHRARTLAVANRTALANQTRGLLGEFGLAVPRGVAKLRRQLPQILEDAENGLPALAREVLAGLREQFRELDKCIQQYDVKIRELASASEPARRLMQLESIGAMTATAIVAGMGDPKVFKSGRNYAASLGLIPRQYSSGGTIRLGPITKQGDRYLRTLLVHGARAYLRVVDRKTDRKSAWARAVKERRHVNVAAVALAAKHARIAWAMLAKGTEYRPLQLEGAAA

SEQ ID NO: 351715 - protein, 359 aa, unidentified
MDAQEGAVRRIVGGVDTHKDLHVAAVVDEQDRVLGTQSFASTRQGYRQMLAWMRSFGEVQRVGVESTGSYGAGLLRFLQQAGVAVLEVTTPDRQDRRRRGKNDDFDAQNAAHAAFAGIRTVTPKSRDGMIEALRVLSACRKTAVAARRVALQMIQNTVVCAPESLREVLRRMTRMQLVRTLAAWRPDLTAYRDVEAAYRISLKSLARRYLELHDEIADLDAMIAAIVDELAPNLVARNSIGHVSAAQLLLTAGDNPQRLRSEAGFAALCGVSPVPASSGKTARHRLNRGGDRAANSALHIIAIGRLRTEARTQTYVAKRIGEGHSKLEAIRCLKRYIAREVFMLIKQRQKEINQTRIAA

SEQ ID NO: 351716 - protein, 403 aa, unidentified
MSFFAGLDWGARGHAVCVVDERGAVQLSLNVRHDAAGLAELFARLRRVAPPEALPVAIERPSGLIVETLVAAGHPVVPIHPNIAKACRPRYRAAGGKSDPGDAYMLADILRTDGHRFRPLTPVSDGVKALRALVRGRDDLVATRIGLANQLRSLLESFWPGAAAIFADVDSPIALAFLARFPTPESARRLGPSRMCAFMAQHRYSGRRSAEELLARLHAAPKGLAGDAEADARGEMVRALVRALGPLVAAIRELSSRIEHAVEDLPDGRIVMSFPRAGRICAAAILAELGDVRERFQTDAQLAAEAGVCPVTHASGKSRGVVFRWACNHRLRTAVTCFADNSRHASPWAAGVYRRARGRGCDHPHAIRVLARAWIRVLWRAWRDRKPYDLAAHTAARDLVSTA

SEQ ID NO: 351717 - protein, 349 aa, unidentified
MSEPYAGRQIVGIDLHRRRSVLVRMTEAGERLETVRISNDPEYLREVMTRAGEAPEVVLEACYGWYWAADTLAELGATVHLAHPLGVKMFSYRRLKNDERDAADLADLLRMGRLPEAWIAPPATRELRGWVRHRAKLVGLRSNLKCQVHGILANAGITVPMSDLFGASGQRLLATADLATESRSRIDSLQRMITALDFEVELFAKLVAGRLRTHPGYQAIQLIPGVGPILAAVFVAEIGDITRFRRPEQLASWAGLTPKHHESDTTVHRGRITKQGSRLVRWAAIEAVQRLPGHTRIGQVRDRVAARRGRNIGVVAAARELTELVFYGLRDHRVHALAVHSPARTPLPA

SEQ ID NO: 351718 - protein, 392 aa, unidentified
MVVSVGIDVSKDKHDCFIASSEGEILADVFTIPNTIDGFHCLLQRIQNCTNTQDKIKVGLEATGHYNYNLLGFLLDNGLSTYVLNPLRTNLYRKSLSLRKTKTDRVDARTIASMLLSDAGLKPYTDTAYHNEELKSLTRYRFDKVKERSKLKSSIARLICILFPELEELVPSLHIASVYALLEEFPGAKQVAAAHLTRLKTLLETASKGRYKRDMALEIRDAARNSIGSWMPAKSLELQHTIRLIRELDNEIAEIEEQIQSIMDELNSPITSIPGLGFRMAAMILAEVGDFTRFDSPDKLLAYAGMSPSIYQSGQLKNCYPHMEKRGSRYLRYALYNATKYVCHWDPTFSAYLAKKRAEGKHYNVALSHATKKLVRLIFAMEKSRKAYRLAA

SEQ ID NO: 351719 - protein, 346 aa, unidentified
MNATTYGMDIAKNVFQVHWVDGNTGEICRKKLPRGKVTEFFAVRPAGRIAMEACGGAHHWGRTLGPLGHQIELLPTHQVRPFISGNKDDAADARGIWLAAQHGDIRRVAVKSSEQQAMLSLHRMRTHWVSVRTATVNALRGLLYEFGVTLPRGRHSGLRQLAQQRAEINDAVPAVMVRLVDDQLLALADIEGHVQAMEGGISLMLKSQESARRLRDTPGIGVLGATARAATLGDGTSWRNGREFACCLGLAPGHRGTGGKVRIGSISKRGNAYLRTLLINGARALASREHPAPWIVALLGRRPFNVVVVAIAHKLARIAWALVAHGRAYEASWKASAPPAASAGAV

SEQ ID NO: 351720 - protein, 325 aa, unidentified
MKTMSGSSVMVGIDVASAHVDVAAIGAELPATLNQVGNDAEGHSALADGLARLQPELVLMEATGGYEAALACALQAAGLRVAVVNPRMARDFARAMQRLAKTDRIDAATLAEFAGVLARRPDCARFIRPLSEPEQQDLAALVTRRRQLVSMQLAERQRLRLARPVARSSIEALLAAIAHQLDDVEAEMGRHVEQHHGQMAKLLRSVAGIGRVAAATLIAELPELGRLNRRQICALVGVAPYAHDSGASRGRRRISGGRFEVRRAIYMATLTATRHNAAIRAFYERLVAAGKLKKVALIACMRKLITHLNAIARDHLNAQARPTIA

SEQ ID NO: 351721 - protein, 345 aa, unidentified
MKEAITIGVDIAKSVFQVHAVDAAGEPVVRRQLRRRQVLPFFKKLPPCLIGMEACATSHYWAREIAAFGHEVRLMPPRYVKPYVKRNKNDAADAEAICEAVTRPNMRFVPIKTPEQQSVLMLHRTRQLFIRQRTSLINAIRAHMAEFGIVAGIGRNGVEVLLKRIAEGKDDGLPAAARECLMALAMQLDLAKRQILEADRRVLAWHRSSETSKRLEAIPGVGPLIASALVASIPDPSVFRSGRDLSAWIGLVPKQHSTGGKERLGSISKAGNRYLRTLLVIGAFSVIRRAKQLGYTRHPWLVRILGRRSTKFAAIALANKIARIAWAMMARNEKFQASRLTPILG

SEQ ID NO: 351722 - protein, 371 aa, unidentified
MTKKHREEANNEERLSWQEDLATGTDVNIGIDVHKESWHVTVMSEGEEIFHGRMPSSYQAFKRFLARFKNCRIRVAYEAGPCGFWLYDKLMADGVKTIVTPPSLIPMESGNKVKTDKKDSRKLANLLGKGMLKEVHVLSAKERSEREIVRTRRQLVGHCSDVARQIKSKLLFNGIQYSASGRERWTKGYIKWLRELSCKEESLKISLMSLLDLYEYLSQQIKKISKELVALSQMERYRARVALVRSVPGIGLLNAMELLVELQEIGRFKSARELASYTGLTPSEYSTGQHIRQGGITRCGNKRVRAALVESSWILVGKDPYMRCKYTKLKNRKGGKRAIVAIARNLVVRLRKMLITNEPYRIGMQVKVVNP

SEQ ID NO: 351723 - protein, 313 aa, unidentified
MPVSLSKPIVGVDVAKNELVIYQSGGDLLEEIPNTRTSIKQWLKALSGTVAIAIEATNIYHLDFADLAYEAGCTIYMVGGYELKHYREGVKIRAKTDALDAKLLARYLKNEAEELRPWTPPSPLYRQLLSLFRRRAALVQARVGLVQSWSNEPLLKAAFAEQVKSMQQLETLIEKTINDQLKEAGLLGQLKRCLKVEGIGFLTGARLITAFQRGDFRNADAFIAFLGMDLRVAKSGQKDARRSLTKRGDPEARRLLHNAAMSASRTKAWKGYYEEQRTRGFSTTQALVMLARKLARVVFALLKGQSEYQPKAS

SEQ ID NO: 351724 - protein, 323 aa, unidentified
MDSVMTTYLGLDVSKAKVDCALLLQGKVKSKVVSNNQEGFESLKQWLDKHGASGVHACCEATGTYSEAIALFLYEQGHVVSVVNPAQIAAYAQSQLSRAKTDALDARLIARYCAREQPMAWAPPPAEERLLLALLRDLQELQSMQGAESNRLATVHPGVRARIERHLEFLGREIEQLRQKIEQHIDHHDQLRGRRDLLDSVPGLGEHTIPWLIAYLGDGKRFPGSKCAVAFFGLCPKPRQSGTSVRGKARIAKSGHADLRHALYMPAVVAYSRCKAFASFVHRLKIAGKPPKVIIVALMRKLVAIAQAILKSGKPFDPSLHYA

SEQ ID NO: 351725 - protein, 363 aa, unidentified
MNSINDTELSSPEGTRSEFNRSKAAIKLGLDVHQEFYVVVVQEGGSNPKPAQRLAKGAFLVWAAKLRRSHPEAAIHAVYEACGFGFGLQRQLSALGIKCYVVCPQKLDERGQRVKTDGRDAKALVLKLDRFVEGNQEALAVVRVPSEEEEQLRAIHRQREQLVRTRKQLEAHGRSLLVNHGVEPEKRWWKRRTFAGLEVPRWLKDLLGNTQPLLLALEEKIRALTVQLQESAPNQPRGLGALSSVVIDREIGSWARFRNRRQVGSYTGLCPGEYSSGQTRRQSCVTKHGNPRLRAALVETAWRLVRFQPNYRAIVKWRHLLGKGALATGAARKKAITAVARQLAVDLWRIRTGRVRATELGLI

SEQ ID NO: 351726 - protein, 361 aa, unidentified
MNTLPESEALVTGGVDTHRDLHVAAVIDEVGRILGTEAFAVNADGYEALLTWMRSFGTIGSVGMEGTGSYGAGLFRHLTEHGVTVLEVIRPNRQARRRRGKSDPADAEAAARAALCGEASGTPEARSGAVEAIRALRVARCGAVKASTQASNQLKDLIVSAPEALRARLMSLSTPKRVGLAIRFRPGTLEDPTEATKAAMRSVARRWVALQGEITELDRQLADVVTSAAPEGLLAKQGVGFDVAGALLVAAGDNAERLGSEAGFAALCGASPIDASSGKQVRHRLNRGGDRQANAALWRIVMTRMACDPRTAAYVARRTAQGKTKREVIRCLKRYVAREIYRELVIEAQPVTAGFAPPLAA

SEQ ID NO: 351727 - protein, 354 aa, unidentified
MMIIAFDSHKRYTQACVEQLNGQRICEERIEHKRGGISEFLKRYEAGTPVAIETIGNWYWLVDEIESAGMEAKLVHARKAKMMIGSVNKTDKLDARGLNLLQRCGTLPTVWIPPGELRDQRELPRTRMIFAKQRTVLKNRIHSVIDKYGLQNEFGTLSDIFGLRGRKLLEAAMKLLPVETRFCVEGLLKELANIEERLKVIEKRMQEVYKENEEIRLLRTMPGIGPILSVVIWQEMGDVKRFCSAERFASYSGTCPRISQSGDKSRIGRLRTDVNQYLKWAFSEAGNLVAVHHKRLPQRYVSGLYSKLRLKRGHAKAVGAVARHLAESTWYIMSKREEYLERRFGNGSMRANLS

SEQ ID NO: 351728 - protein, 415 aa, unidentified
MRVHRNCCGLDVHKKIIAACLIKEDAGGNSIYEKRLFGSMTRDLHELAQWLCTAQVTAVAMEATGVYWMPVWNVLEPYGLQLLLINPEHYKAVRGKKTDLKDGTRIAELLQDGRLEGSYVPAVAIRVLRDLTRYRTKLVQYQSSLANRIQRLLEQCNIKLASVASDVLGVSAMAMLRALAQGETDAMRMADMAKKQLRKKIPQLQLALEGCVLPHHRWLLREMIEDLDHVGTKITRIEETIEQQMRPFQSAVERWVTVPGIKHRLAWTLVAEVGPSVEAFPSAADLVSWAGVCPGNNQTGGKRKSGTTRAGNPWLRRALCEAAWAASKTKGTYLQAQFRRLAALRGPKRALIAVANSILTAGYYMLQRATTYQDLGPAYFDKRNTVRATHRLVKRLEALGHRVILEPRFIADPSS

SEQ ID NO: 351729 - protein, 352 aa, unidentified
MEIIALDAHKRYSQVCVQKKNGQMLCEKRINHDKGQIAEFLSRWTAGSAVAIETVGNWYWIVDEIEQAGMEPKLVHAHKAKLMLGSINKTDKLDARGLNRLQQTGTLPTVWIPPGEIRDHRELPRTRMVFANLRTRFKNRIHSVLDKYGLHTDFDGIADIFGRRGREQIALSVKKLPPETRYTIRCLLRGLNMVESQIERIEKRMKKVFFDTEEVRRLMTLPGVGFILAVVIANEIGDISRFATAQRLAGYSGTVPRVHSSGGKVRYGKLRSDVNHYLKWAYSEAGNSTAVNHKRLPGRHVSRLYKRIRAKSCHAKAVGAVGRHLAEASFWVLSRGEDYKEPKAKSVSPTAA

SEQ ID NO: 351730 - protein, 328 aa, unidentified
MIYLGIDVSKLKLDCTLLLDPENDKRKSKVVPNSRDGVHELVRWCAKHGVGADQAHAVLEATGPYHEQAATTLHDGGIAVSIANPASVHDFSRAMAMRSKTDALDSLVLARYGVAMRPGAWQPPPAHVRELRALITQLDALSKDRLRTMNRQEKIEASSASELVERSISDTLSFYDKEIARLEKAIDDHIDRHPDLKDDTKLLSSIPGVGPKVARTMLRVMRMHQFKCAEDLAAYLGLVPVRRQSGTSLRGRSRMSKAGPADVRAKVYMAGVVASKHNPHVRALYQRLLAAGKTKMSALGACMRKVVHLCFGVLKTRQPYRPDYAFST

SEQ ID NO: 351731 - protein, 340 aa, unidentified
MQTPRHIGIDLHRNQFTCCMRLENGRSYLTAWKLEDLPRFVKKLRPSDQIAVEVTGNTRLFHDAVTPYVKRVVAVDPNQFKVISHSVKKTDPNDARNLALYLEKDLLPEVRMKDKTQAQLASLTQTRDTLVKLRTALKNKVNNILSAHGINLEKEALSSEKKLNEILAMRFDAMVKVELEVIIEEIRSLNQRIAKLEKTIADEGSKLEGHKNLTSIKGIGPLTGSILLSVIGDINDFADEGKLAAYFGIVPRVSNSNETERSGRITKRGSKLGRTALVQCALIAQRFSPYLKRYYEQVKARRGTGKAIIALARKLLGIIYRTLKNKWVFEDFPNFVLAEV

SEQ ID NO: 351732 - protein, 342 aa, unidentified
MQITTIGLDIAKNVFQVHGIDAAEKVVVRKQLRRSKVIAFFEALPPCLVGMEACASAHYWARELRKLGHEVRLMPAKDVKAYVKRNKNDAVDAEASCEAVRRPTMRFVGVKSAEQQGRLMQHRTRDLLLRQRTQVINALRAHLAELGIVAAQGREGLKELLAIIADEKDDRLPIDARASLMVLAAQLQALQTMIGSIEKRIIAQHRASEESKRVATIPGIGTLGASAITATVTDPSAFRSGRDFAAWIGLVPRQDSTGGKQKLGPISKQGDRYLRRVLVVGAHSVLRRAKQNPEKYPWLTQLLARRPFKVVAVALANKMARMAWALLAKGGTYRAPALAAAA

SEQ ID NO: 351733 - protein, 401 aa, unidentified
MDYCTAGLDWAKEAHAICIVDPTGAIRESFSVAHDAKGLAELVRRLRRYPDVRLAIERPDGLLVDTLVDAGIRVVPIHPNKLKAARERYSSSGAKSDPGDAYVLADFLRTDGHRFRELAPLSEATRALRALVRSRDDLVKAKVALTNQLAAQLAVFWPGAAEVFYRLDSAIALAFLEKYPTPEAAAHLGERRLTAFLRRNAYCGRKPVGELLARLQTAPRGLVGGIEGEARGECVKALVRALKVLLPQISELEGAIAVALDEHPDGAVFKSLPRAGEVNAAQLLAEIGDVRERFPSDDVLAMEAGVVPVTRRSGKAISVGFRWACNKRLRRAVTTWADNTRHASSWARDLYARARARGADHPHAIRILARAWLRVLWRCWQDRTRYDDVRHLAAVAARFAA

SEQ ID NO: 351734 - protein, 452 aa, unidentified
MKRNTTSVADQTLPVLNVNAAGLDIGSAEIWVAVPADRDPQPVRTFGTFTPDLRALADWLKDCRIQTVVMESTGVYWIPVYELLDAQGFHVSVVNARHVKNVPGRKTDEKDCQWLQRLHTYGLLSASFRPDAEIVALRAYLRHRASLLEHRAAHIQHMQKALHQMNVQLTQVLSDITGETGLAILRKIVAGDRDPVALAQLRDPRCQHSTDEIAKALTGNYRPEHVFALKQALALYDFYTAQVRECDGEIERQFSGMKPRHDDENLPPLDPTDKRDSHSKNAPSYDARTLLYQLVGVDLVAISGLNESTVQTIVSETGTDMSKWPTVKHFCAWLGLAPHHDISGGKVLRSRVLKTHNRAGQAFRLAAQSASRSPRTAYGAFYRRVCGRLGPAQAIVATAHKIARAFYHMLKHRVPFRDLSAEEYEQRARKREIANLRKKAKRLGITLVEQPA

SEQ ID NO: 351735 - protein, 334 aa, unidentified
MYQQFVGIDIASETAACFWETSQGQKQKLEIPQSSKAYQSLAKDLLKNVSASRSLVVMEATGNYWLRLALFLHQQGFPVAVLNPSHFYHFALSERRRAKTDLLDAELLARYGRLHQPTAWTPPPAIFYALQQRLSLREDLQNDRVRNLNRLHALRQVPKAETLVLARLERQIQQLEADIQALETEIRSLLNSEHEWSQSARRLLTIKGIGLITTAWLLTATQNFSRCQSPEEAAAYAGLAPYAHDSGKKHGKRLTGGGHPQLRKMLYMAAGAALRFNPPLRAFYQRLVQRGKIKQVARIAVARKLLHMAWACVVKERDFDPNFGRQSAIASFSA

SEQ ID NO: 351736 - protein, 345 aa, unidentified
MPKQDQYVGLDVSLESTSVCVINDKGAMVWRGTCASDPEAITAVVHKHAPRVIRIGLETGQLSNWLTLTLRKRGLPVVCFDARHAKAALQMQINKTDANDAFGLAHVVRTGWYREVAVKSMDAQTLRMLLVARSQLVGQRQSVANNIRGLLKTFGIVIPLGCKGVFAIRVREAAGDNDALMAIIDPMLVAWQALRDQVAVFDRQILIRAKTDAVARRLMTVPGVGVIVSLAYTAVIDDPKRFKHSSSVGAYVGLTPRRYQSGEVDFAGRISRCGDGLLRGYLFEAATVILRRHSRPSQLKQWGLALAKRIGMRRAKVALARKLAVIMHRIWMNGTDFDGGAVAAA

SEQ ID NO: 351737 - protein, 409 aa, unidentified
MDVLYARCAGLDIHRDSIVACVRLADSRIERHVESFGTTTTELERLSAWLSSYQVTHVAMEATGVYWKPVWAVLVEDFELLLANARHVKTVPGRKTDVNDAVWLADLLAHGLIRPSFVPPPAVQALRDLTRTRKQLTRERASHVQRIDKVLQGANLKLGSVLSNIMGHSGRAILDALAAGESTPETLAGLLRANVRASRAQVTEALHGRLAEHQRLLLRVHLGQIDAIEAAIAALDRELSGRLEPFREAVTRLSATPGLSALSVAGILAEIGLDMSPFPSEAHLISWAGLCPRNDESAGKRRSTRLRPGTPWLKTLLVQAAWCGVRTKGSYFRALFLRLKARRGPKKAIVAVARAILTAVYVMLRRGVDYHDLGPDHFQRTERTRLANRLAQRLDELGFDVTFTERAAA

SEQ ID NO: 351738 - protein, 404 aa, unidentified
MDRQRTVAGLDVHKDSIYLCVMGHDEAIIFQKTYGTLTPGLRQMCADMVAHGVTEAAMESTATYWVPVWNALCDSMSLKLVNPYFIKQLPGRKSDVKDAQWIAECLLKNLIKGSFVPDGVVQDMRKYNRRIFDLNDDMVYNTNKLDAALQRCGFRLSNYVTKVKGKSYRSCIAAIINGTTDQAELVKLVHGKTVNKHGRDVIMAAVTADFHQADIDLIRQYKEMIDIIERQIKDCQSALTALCRKHFPTQYERLQTIPGVKERAATAIIAETGADMSHFQKSTNLVGWCGLRPRNDESNRKIKSNKITHGNKFLRNILIEIAWTASRTRNCFFSNFSYVQCTVRRKTKMKVQVAIARKILVAVWHMLSNDEDFIDVYLRRLAKEAEEHRHKQESIQRIELSMVN

SEQ ID NO: 351739 - protein, 433 aa, unidentified
MGLIVPSAIDSEREEQPLPYDWFVGIDWGSRQHQVCVLDRDRRRVGERVVDHDGASLAQLVAWLWGLSAGQPQRVAVAIEVPRGAIVEGLVERGFHVFAINPKQLDRFRDRHSVAGAKDDRRDAFVLADSLRTDQPSFRRLQLDEPQLLLLRELSRAEETLLEEFRRSANRLRDQLHRFYPQMLQLCSGADEPWLWDLIDLVPTPAHAALLSEAQVQRVLKAHRIRRVTGTEVLTCLQTQALPVAPGAAEAAQAHCQLLLPCLRVLAEQLQACSQQVSALLSTLAEERGEGEGPSDVAIVLSLPGVGRKITAWLFAEAAQPLAERDYQVLRTHGGVAPVTKQSGKRRVVVMRRGCNPRLRNALYHMARVAMQRDAHFNSVYAALRAKGQRHGQALRSIGNRLLRILMAMLRHRTCYDASRIHREPVVQMGGKI

SEQ ID NO: 351740 - protein, 505 aa, unidentified
MARLNMEPQCPGVRLAPDRQGIIGEAETHSPRQDFLKLSAGPFAHTTQEDTPMPDKPAPAFDETRRNVAGIDIAGHADHYVCGPRRDDGGHDVAHFGTTTAELHKLLAWLKERGVESVALESTSVYWIPVADLLEADGVEVVLVDTREVRMVPGRKSDVKDCQWLQRLHSCGLLRGGFRPPENVAAVRTVLRERESLTGMRVQCLQQMQKSLDQMNVRVHHAVSDIDGKTGMAIIGAIVGGRRDPAVLAKLRDRRCEKSEAEIAAHLTGVWREEHLFNLGQAYRTLLFIDERLAEYDAKAAAMLRALAEASGKPQPPPPPAGEERPRKDTRDAEGKRDLQRIMGFDMTRLPGIGYDTAAVVLCEIGPDFARFPTERHFAAYIGLAPSLGKSAGKNVRQRKRCRNTSRAGRALRMAASTLYRSQTELGAFFRSVARRADRKTAVKATARRMAHLIYRAVRYGAAYVDNGAQAYEKRMRERALKAVRNLIKSHKINELELSTAFAAS

SEQ ID NO: 351741 - protein, 350 aa, unidentified
MVTIGIDSHKSSLAVALVDDVGRELASEQFGNDAGAHEALHAWVRARVPGECCFGIESTGWIGRGVACYLLERGERVVDVRGTLTERERKRLRGDGKSDTRDALAIARVSVREELPPVRVDSPSRDLKLLCDYRTQLVGERTRIANRLHVDLVSLHPGYERRVPRLTSGVRLEAAEEILAGDSGVQATLARRRIEGLRRIDLELADVRREIEAKVRASGTGLVRLVGISHLSAARIIGEVGDVARIATKDRFARMNGTAPIPASSGQTQRHRLNKGGNRRLNHAIHMMALTQARMDPRARAYVERRRGEGRTYRDAVRALKRHLSDAVYRQLREDADRATRRCTPGVALT

SEQ ID NO: 351742 - protein, 454 aa, unidentified
MPNKRRKPKNELPVLHPDAAGVDIGAEEIFVAIPADRDTLPVRRFPTFTRDLLEAVAWLKQCGIRTVAMESTSVYWIPLYQILETEGFEVFLVNAQYVKHVPGRKTDVSDCQWIQYLHSVGLLRGSFRPEGTICAVRSLWRHRESLIQMAAQHVLHMQKSLDQMNLQLHHVLSEITGLSGLRILDAILAGERNPVKLAELCHWRVKSSRDTVAKALEGDYRPEHLFALKQSLAGYRYYQQQIGEADEEIRQHLADLPAAKNAEPKLPKRTKKYPYEKRHHEPTNFNLRAELYRIFGVDLTNVPGISAVTAHTILCEVGTDLSRFRNASAFASWLGLCPEKQISGGKILYTRTRPVRNRVALALRLGANSLHHADNYLGNFFRRMKRKIGKPPAVTATAHKLARIIFHLLTRKEEYNDGIFFDSEKEASIRMTARLRKQAAALGFQIVPVTSANV

SEQ ID NO: 351743 - protein, 344 aa, unidentified
MPCFAALDVSQETTAICVVDDNGTIIAETTIATCPEVITSYLRDRAPNLSHVGLETGPLAVWLWNELAARQLPVLCIDARHANAALKMRPVKTDRNDAAGLAQIMRVGWFKQVRIKSHDCYQVRSLLTARETLVRIRVKIENELRGLLRTFGVLFGKRVGGFTGRAHEIICGELEASPEMRIIAETLMKARASVCDQIKVLDTRLAAIARANPTVKLFMTTPGVGIITALSVVSAFDDASRFKRSSSVGAYLGLTPRRYESGETSRNGRISKQGDKMVRKHLYEAATTLLTRNLRSSSLKTWGMKLVKVSGFKKARIAVARKLAVALHAMWKTNTPFRWTQSAA

SEQ ID NO: 351744 - protein, 391 aa, unidentified
MDKAWAGVDAGKEFHRAHVLDASGKELLCRKVQNDEDDLLKLIDEALSLAEEVIWAVDQPGGGAALLLALLWERNQRVLYVPGLSVDRARDAYRGESKTDARDARVIADQARMRSDLGELRAGEQEIAELHLFLARRRDLVTDQSRTITRLREALVSLFPALERALDVNGKGPLILLTHYQSPTQLRRAGHKRIATYLRNRGVKGSNNVAHKALGAARSQNVTLPAQEVGAAIVAELAEDILGLKDRLQSIDEEIGQRFFARREARVLISLPGMGPTLGAEFLVAVGEISAFESADRLAAYAGLVPAARDSGKRVGNNRRMRGGNKTLKRVFYQSAFASLRSAPESRVFYDRKRAEGKRHTQALIALARRRVNVLWAMLRDGTTFETRSAT

SEQ ID NO: 351745 - protein, 347 aa, unidentified
MGIVVALDVHRNQITYKLLDRETGEVRRGRVAPAARVDVRTWLAQFAGHEVEFALEGTTGWRFVVEEIERAGYRAHLADPAETAAKRGRKRRAKTDNADCDLQLRLLLAGELPESWIPPAHILELRARLRMRKTLIDQRTAWLQRVQAQLFQQGVPAGLRLRSEVGRQALAAADLSPAGRELVELGLRMIDALDQELVPLTRELGVFARRQAGCRALIASLYGVGPVSATAILAELGDARRFSSSDDAVRHAGLDVTVHQSDSKRAPGHLSHQGPEVLRWALFEAALSGARVGSPDHGYYLQVAERIDHTRACLSLARKLCRRAYHVLRELGDEALAPVEEAIAAAA

SEQ ID NO: 351746 - protein, 354 aa, unidentified
MSQELNAAIAVIGIDIGKNSFHIVGHDHRGAIVLRQKWSRGQVETRLANLPPCLIGMEACVGAHHLSRKLQMFGHDARLMPAKYVRPYSKGQKNDFRDAEAIAEAVQRPTMKFVATKTADQLDLQALHRVRERLVGQRTGVINQIRAFLLERGIAVRRGLRSLRSELPGIFATRTDVLSPRLLRIIEALAGDWRRLDERIEGLSSEIETLARQDTACERLMTVPGIGPIISSAMVAAIGTGDVFSKGRDFGAWLGLVPKQISTGDRTILGKISRRGNRYLRALFVQAAWVVLVRVKCWERYGLKSWIEAAKKRLHHNVLAIALANKLARIAWAVLNKGRAFECVKTEEMASRPA

SEQ ID NO: 351747 - protein, 316 aa, unidentified
MTSKVDSVEPARVLGLDVGKAQVALHDLVSGRTQMIANTFKALRAALADFADYDLAVCETTGGYERAALDACLATGVPAHRADAARVKAFIASHGGRAKTDPIDAAWLARYGAERGSSVRRWLPPDPARAAFAALVRLRQDVLVQRTQTKNRRAAPCCGPEAPFLDAQIAFFDGQIAALDAAIDAALRRTDDLAGAEAMLRTIPGIGPVAARTLLALLPELGALSVKQAASLAGLAPHPRDSGRTSGRRRMTGGRQGLKPTLFMAALSAARRHPKLKLFYNRLIEAGKPKRLALAAVARKLVIYANAVLKPHHALT

SEQ ID NO: 351748 - protein, 427 aa, unidentified
MVFAESQDDEQIIERVAALDIGKAEIVCCVRLPASGGGKRRVQEVTTHTTMVGALSDLAERLVDLRIERVVMEATSDYWRPPFYLFAAHGLAPWLVNAKDVRHLPGRPKTDVLDAVWLCKVAERQMLRPSFVPPPPIRRLRDLTRYRVDLVGVRTAEKNRVEKLLEDACIKLSVVASDIHGVSGRDMLAAMIAGERDPKKLADLARSRMRPKIGLLEEAFAGLKVGTFDEHHRFLLARMLARIDATDADIAALDTQIEEHLAPFADAVARLDEIPGIGPTAAAVIIAEIGTDMTRFPTPGHLASWAKFSPGIKSSAGKNKGNGSTGHGNRYLARVLGDAAVAASRTDTFLGARYRRIVRRRGKKKAVVAVGRSLLVIIWHLLSDPEARFEDLGADHYDRHLSTTAKKRSHVRGLEALGYHVTLQPAA

SEQ ID NO: 351749 - protein, 428 aa, unidentified
MPYNIAGIDVHKRMLHVVFSDVEVDGEYQFVRQKFDTSPSQLRMLADWLLEQQVEEVAMESTAQYWKPVWETLERYWKPVCEKREGAKPGSGTLHLAQALSNRGRRGRKKDFRDAERLVKRLVANELILSFVPHPEQRLWRTVMRTKYQMTCNRVQLQNRLEALLEEAHIKLSGLVSDLLGASARRMLKAIADGESDPAALAALADRKLRATSQQLTDALGACTELNPVYRRLIKMALEDLESIEKRIVQLEQEMADLLRPHEDQVKRLAEVPGLGVDSAQQIMAEVGATAATFPSAEHLSSWVGACPGDEESAEVSQSHRSPQGNRHMRRILNQAANAAVKLKGGIFEILYRRYVPRLGHNQTIGVIAHKLCRLVWKILHQGVHYEERGPAVSKVSKQKRTQRMLRELRALGYRIELAATQAGSPSA

SEQ ID NO: 351750 - protein, 355 aa, unidentified
MNQEKYIGMDVHDASISAAVMNAQGKVLMECVLETKAATILEFIQGLRGTLAVTFEEGILAAWLHDLLQPHVSRLVVCDPRKNALLRDGNQNDRADARNLAELLRTNHVHAVYHGNHGTRTLRELGRSYLALTKDSTRVMNRIKSVYRSWAIPCTGTSLYSRRHRAEWLAKLVEPGVRMRAEHLYQELDGLKPLRQAARRELLREASKHTAVKRLRQIPVIGPIRSALLVALLQTPHRFRTKRQLWAYSGFAVQTYDSGEFRFVRGKRQRNRERITVRGLNRNHNPDVKNLLKGAAISAIGRPGPLQDFYAALVEKGMRPSMARLTLTRKIAAIALIMWKKGVSFDPKQLPRQAA

SEQ ID NO: 351751 - protein, 370 aa, unidentified
MTEYSEVFVAFDTSKTKHAVAVAESGRDGEIRYLGEIESGPEAVERLVRKLAGRYGNVHFCYEAGPTGYGLYRQLRDLGHVCDVVAPSLIPQRPGDRVKTNRRDAVTLARLLRAGELTAVWVPDAVHEAVRDLTRAREAAMKDLRQKRQQLLSFLLRHGRVFTGHRHWSRAHSLWLAGQTFEHPAQQIVFQDHRDLIADAEARLTRLDRHLAETVPGWSMAPVVEAYQAMRGVSFLAAVTFVAEIGDVRRFDSPRQLMAFLGLVPSERSTGDTVTRGGLTLSGNRRARRVLVEGAWNYRFPARVSPLIQPRLEGLPKAVRDIAWKAQTRLCGRYRRLSAAGKKLPVTIAAIAREMAAFLWAIGQQVEPAT

SEQ ID NO: 351752 - protein, 349 aa, unidentified
MNFYTNTHPYYCGIDLHTRLLYVCIIDNENNILVHEKIDDSPEKLLALLSPYVGNIVVGVECMHCWYWVSDFCELHNIDFILGHALYMKAIHAGKTKNDKIDALKIAKLIRGGNFPLAHAYSKEHRSIRDALRRRTHIMRMSAQLKAHVASTISQYNLPALETRLNLQNSPDRQKMHHFFPDEAVQKSMDLNLNIISTMVHELYKIEHYVKTQAQTHNARDLHILKSFPGIGKILALTILYEVGDIQRFPSVQKFASYSRLVKCKAESAGKSYGTQGNKIGNAHLKWAFSEAAVLYLKGNDNAKRYLANLQKRMSKAKALSALAHKIGRCIYFMLKNQQVFDEERFLNG

SEQ ID NO: 351753 - protein, 390 aa, unidentified
MERPMQKLNDLSRSLTALELDSTLIAVIEMSLSNWLVAGIVPGIERQPLKKLAVDESALLKLLHRWREEAEKAGRRIERTAVAFEAGRDGFWLARWLKARSIEAHVIHAASVAVSREHRRAKTDRLDSELLKRAFLGWLRGERDHCKMVAIPSIKDEDAKRPNRERENLVGEQNRIVNRMKAALVRLGIRGFNPKLKRAAGRLDGLHTPEGEPIPPNTLAELRRDMERRRLVSNQIRQIEEARLGRLEQAPSDGPHAMVRLLARVIGVGIETADMLVQEVLSRNMRDRRAVARYAGLTGSPDESGRKCREKGLARSGNARVRRGMIQLAWRLLMFQKNSALAQWFRARTENARGTRKTMIVALARKLLIALWRLVREGVVPDGVVLRPAQ

SEQ ID NO: 351754 - protein, 322 aa, unidentified
MDEHGKLVKETKVASDPAALNACIRGMPGVVEAIGIEAGPLSQWLHKSLTDLGLPVVLMETRQVKAALKAAPVKTDRRDAAGLARLLQMGWFRPVHCKSLSAQELRVLLGARRSVQDAAINIEMSIRGMLRNFGLRLGRIGKVSFEDRVRELTEGNKLIQLSIEPMLRARAALRSELVRLERMARDITREDPVCRLLMTMPGVGSVVALTVRSSIDDPGRFRRSKDVGPAIGLTPRRYQSGETDIVGGITKAGDLDMRTALYQAATVVIHRSKKPTWLRAWAERVVRRRGAKRAAVALARRMGVILHRMWVDNTEFQAARQV

SEQ ID NO: 351755 - protein, 341 aa, unidentified
MQVTTIGLDLAKNVFQVHGIDATEKVVVRKQLRRGQVMTFFEALAPCLIGMEACATAHHWARELTKLGHEVRLMPAKDVKAYVKRNKNDAADAEAICEAVRRPTMRFVAVKSAEQQGRLMQHRVRDLLMRQRTQLINALRAHLAELGMAAAQGREGIKELLAIVAQNGDSRLPVDAHASLIVLSAQLQAVQTMIGSIEKRIVSQHRSNADSKRLETIPGIGVIGASTIAAVVPDPKVFRSGRDFAAWIGLVPRQDSTGGKQKLGPISKQGDRYLRRILVVGACAVLKQARRQPEKYPWLTQLLARRPFKVVAVALANKMARIAWALLAKGGTYRAPRLTAA

SEQ ID NO: 351756 - protein, 390 aa, unidentified
MDVLYQSCAGIDVHQATVVVCILHGPLTSTRPKREMAQFDTTTKGLKACHDFLSQFHVEAVGMESTGVYWRPVWHELCDDFELILAQPAHMKSIPGQKTDKKDAHWIAQLTRIGLLPRSFVPDETIQELRELTRQRKHYVESRNRETNRIHKILQSGGIKLTTYIEDIMGASGRNLLQLLIDETPVTPRMIHQSVYTSLKRKVPQLLEALDGYFSAHHRFMLGQSLEIYDFYQKQIDCLEERINGYLNLYERPVEILDSIPGMDLITASVIIAEIGVDMSQFPTAGHLASWAGLCPGNNESAGKKRSTKIRHGNSYLKRCLCQAVFAAKRQKGSPLAERYYQIQSRRGPQKATIALAHQLLKIAYILLKENLTYQEFVLQKKATRDEPVA

SEQ ID NO: 351757 - protein, 378 aa, unidentified
MAHPCSVQPPGECNVTPQRTERTTTMTVFTDPEIYVTAGADTHRDTHMVAALDQRGAQLGVREFATDPAGHDEILGWLESFGTIDRIGVEGTGTYGAGLCRFLQRHDLDVVEVTRSDRQERRSHGKSDPVDAVAAARSAQSGRAVARPKSRTGSVEAIRALRLVRRSATRDRTGALNQMRALVVTAPDEIREEFRGLTVRKLVARAARLRPGDPTTAAGATKFAMRELARRIKSLDAQLTDINAILGPLVASTAPGLVARHGIGTDTAATLLVTAGDNPERLRSEASFAHLCASAPIDASSGLIKRKRLNPRGDRQANEALWRIVLMRMSTEPRTRAYVARRTLEGKSKREIMRCLKRYVAREVFRDLNEIVQPLDRQ

SEQ ID NO: 351758 - protein, 366 aa, unidentified
MGWTPPRRPWCARVVAFVTTEQEASVSEASTIGLDLAKRVFHAHGADASGKVVFRKQLRRGQVLAFFAGRPACVVAMEACSSAHYWAREIGELGHMVRLIPPAYVKPFVKRQKNDATDAEAICEAAQRPTMRFVPVKSEAAQANAVVFRARDLLVRQRTQAINALRGHLGEYGLVVAKGPSHVAKLIAHVEDPATGLPEAARVALRVLTASLQFLSERIDVLDREVARRAREDNEVRRLTTIPGVGPVIATALVALAPPASAFRRGRDFAAWVGLTPSQHSTGGKQKLGAISKMGERTLRRLLIIGASSVVRKAIKHGTPSESWLGRILTRKPRMLVIVALANKMARTVWALRATGEIYRAPVAAG

SEQ ID NO: 351759 - protein, 457 aa, unidentified
MENYYMGIDVSKGYADFVILDAKKDVVEPNFQLDDTFGSHCKLFEILKRFFDCHSGSVLFAAVESTGGYENNWLHSLGGFQGTLDIRSARLNPLGVRANSKASLRRVITDKISARDVAEYLIAHPEKVTYQQEDSLAGLRRQWGFVRLLVKQKTQILNQFESLLYTANPELIAYCQSGVPAWLLKLLKQYPTAAKLAKARATSVARIPYVTAGRAKELIEQAKKSVASATDETTGSLITAMAEQIIRMEETIRIQSQQMAKRCAIPEVTLLKTIPGISDASAIGLMLEIQSVKRFSSVKKLAAHFGLHPAFKTSGDGTSGVRMSKQGRKEPRKILFMVAMVSLTANPHIRKIYEEHTEKGMEKMAAIGLCMHKILRIVYGMLKNNQAYDSQVDQKNRENRMARKATHTVKNVNRRYEIFDQQAPISRRQSNKRKEWKQSQGDNITQHGIGVPIPSAA

SEQ ID NO: 351760 - protein, 363 aa, unidentified
MKAEKVREPRYVGIDLGKRTYEVAIVGKGGVKISNGKTCVAGRQSLYKKLREQDKVALEAGNLAFIIAKEIEAAVGCRVYVLNPSHLPLIYGSMKKTDKEDSLKLAHIVEDFQEERLPVVPVPSDKEMERRKLLASYRRAQQSRIREINRLHGLFLAQGITTMTKEDLSTSDSRKEAILVLTGIELAEAKYLVECLDLHEGQIETLNRKIKEESAGDEVIERLQSVPGVGPMVAFAFVSHVGAERFENASQVSNYLGLVPRVYISGETVRYGRITKRGNGYLRALLVQGAWALTRSKQGGKLKERFEYMTIEKSVSRKKAIVAIARRMAELLYTLMRDGTRYEVRPFIREKKGEETAKLAMSA

SEQ ID NO: 351761 - protein, 377 aa, unidentified
MLRIIKIGMDVHSKTYSLCALEPKIGEEDHLLASTEVQADPKYILLFIESLKIKLGSDNDYDIVCGYEAGCLGYSLYNRLTAAGVKCVILAPTTMLTPQGKRVKTDARDARMIAQCLGNGGYRAVYIPTDEDDAVKEYIRMRDDQQDNLTRTKQQINAFCLRHGHHYPDGKWTIKHISWLRKLDLPGVLREVLDEYMSAYDELTAKIERQDKRICEFAEQPKYNEKAKRLVCLLGIKTHTALSLIVETGDFTRFAKGNTYGAFLGLAPGENSSGEKVHRTGISKAGNSHLRCLLVEAAHGICKGRVGQKSKALRARQEGNPAEVIAYADKANARMRSKYYRLTRNGKKHSVATAAIARELACYVWGMMTDNITLTTV

SEQ ID NO: 351762 - protein, 309 aa, unidentified
MTEKVIGIDVGKEKLDVNVVGYKKVKEWNNKPTEREQLREWIQKEEPKLVVMEASGGYEAALASELYENGVAVAVVNPTRVRAYAKAEGLLAKTDKIDARMIARFGATMKPKAQERRDQAQLELNQWVTRRRQVVEMRVAEKNRLDTAPEGIRADIERHIEWMTIEIEALEKLINQAIRDNPTWRETARRLQTTPGIGAITASTLVAELPELGQLNRQKIAALVGLAPFNRDSGKRRGKRHIFGGRTSIRAVLFMATLSTIRFNPVIKAFYQRLLSKGKLKKVALTACMRKLLVILNSMVKSQQDWKFS

SEQ ID NO: 351763 - protein, 413 aa, unidentified
MDVVHPRCAGIDISKRDAKVCVRIQGRGNTPTTSTVTTWGAMSNQILALREHLLTERVSCVVMEATGDYWKPYFYLLEDALTVMLVNAHDARNMPGRKTDVSDAAWLADLGAHGLLRGSLVPPQPIRELRDLTRARTALTRDRSRQVQRIEKVLEDAGIKLSSVATDIMGVSGRAMLAALIAGTATPAAIADLAQRRMRSKIPALTEALTGRFTPHHGYLIRMHLDLIDQYGQALADLDVRIGEAMAPLAAARELLISIPGVSRIVAEVLLAETGGDMSVFPSAAHLASWAGTAPGCNESAGRVKSTKTRRGNRYAKTALGTAALAASRTKETYLSAKYKRIAARRGPMKAVVALEHSILVATWNMLTNGEFYRDPGADYFARRIPAKTKARAIGQLEALGYRVSLQPITDTA

SEQ ID NO: 351764 - protein, 334 aa, unidentified
MENIALIGIDLGKNSFHIHCQDHRGKAVYRKKFTRPKLIEFLATCPATTIAMEACGGSHFMARKLEELGHFPKLISPQFVRPFVKSNKNDFVDAEAICEAASRPSMRFVQPRTESQQAMRALHRVRESLVQDKVKTTNQMHAFLLEFGISVPRGAAVISRLSTLLEDSSLPLYLSQLLLKLQQHYHYLVEQIKDLESQLKRKLDEDEVGQRLLSIPCVGTLTASTISTEIGDGKQYASSRDFAAATGLVPRQYSTGGRTTLLGISKRGNKKIRTLLVQCARVFIQKLERIDSSKPTCRQNRCCKNGSDHRFRFLRRPPHRDLPGHSLCRVCPWA

SEQ ID NO: 351765 - protein, 343 aa, unidentified
MVHYVGLDVSLKQTSICVVNQLGSIVREGVVDSEPEAIAAFVRLNAPGAVRIGLETGPTATWLWTELKQLGLPVICIDARHAKAVLKMQINKSDRNDAAGIARIMQTGWFKEVRVKDLDSHSVRALLASRALLVKIKRDLENQIRGLLKNVGLVIGRAKFNVFTMRTEELIADRPQMIAVVGPLLKARQAIEQQTDDLDRKVLKLARYDAQVRRFMTVPGIGPITALCFKATIDDPTRFKRSRSVGAYVGLTTRRHASGEIDWTGRISKCGDAMLRSYLFEAAGVLLTRVPKWSALKAWGMRLAKRNGLRKATVAVARKLAVILHRMWIDGTEFNWSKKEVAA

SEQ ID NO: 351766 - protein, 418 aa, unidentified
MKSMEITAVGIDVSKSKSTVAIRRPGGVIVARPFDISHSNHDLEKLVSILKTTGGDIRVVMEHTSNYWKPIALTLKEAGFYVSVVNAMLIHDFSDNSIRKLKTDRADSLKIANYALTFWNELPPFNDEDETRLVLREQSRMYERLSSTATALRNGLIALADQTFPAIDQAFGHAIKNADGHEKWVDFFSIYWHRDCVLRLSIEKFTESYRKWCLRRNYKFRTNTAHKLYALAQDAVPTLPKNNGTKALVLQACKSLNAVCEAKQATQEEMNRLASLLPEYEVVMQMEGTGPITGPALMAEIGDVRRFKNKKALVAFAGIDAPPFQSGNFESKSRHVSKRGSPHLRRTVFLVANIILTLSHKDNSVFCFMDKKRAEGKHYYVYTIAGSAKFLRIYYARVTEYLRTQEKPVAAGCPNGNS

SEQ ID NO: 351767 - protein, 400 aa, unidentified
MLSIGIDVSKGKSTVCGMKPGGEIVYTPFEVQHTREGMSELVSLLRGSGEEVRVVLESTGSYHCPVVAALLENGIFVSVVNSLRMKRFCSQSIRRVKTDQIDAMQIALYGLAYWQELQPTRLPENTYRELQLLARQYYQMTSLLIKAKVDFNALCDQVLPGMQELMSDHAGRHKLSDFVLRYHHTAHILKMGETRFRKDYCKWAEKKGYRNHERMAALIFATAQNGIPVLPNAPSTQIVITEAIRVLHTVEASRDAILTQMQALAKTLPEYSLVREMPCIGDTLAPRLIAEIGDVRRFHSKRALIAYAGIDAPPYQSGKFCANNRHISKRGNRYLRKTGYEVMQSYVMHKPANDPIFTFIEKKRSEGKSGKLAMVAGLNKFLRVYYGKVTELYRSLPAIE

SEQ ID NO: 351768 - protein, 343 aa, unidentified
MTIKVLGIDIAKNTFQLHGADDAGKAVVKKRLPRNRLSPYVANLHPCTIVMESCGGANYWARVFQRSGHTVKLISPQFVKPFVKTNKNDANDAEAIVEAASRPSMHFVPIKRPEQQDVQSIHRVRSRLVKNRTALINEIRGLCLEYGVIIALGAARVKKSLCAVVADSGNGLTPSSRDCMQDLYEELVDVEARLKKLDAKNRQLCRQNDSCRRILSIPGVGELTATAIVAAVGDAQEFKNGRHMSAWLGLVPRQSSSGDKRVLLGISKRGDRYLRTLLIHGARAALSHYKTTDNDYGLWLARKKATLSFNKAAVALANKNARIIWSLLNSGEEFNYGVQTAAA

SEQ ID NO: 351769 - protein, 353 aa, unidentified
MEDDSTLYVGLDVHKDSITVAYAIGMGTVELFGKVGAMQIDVDRLCKRLQQKARHICFVYEAGPCGYGLYRRLVDKGFDCMVCAPSLTPRRPGDRVKTDHRDAIKLVRSLRAGDLSAVHVPTVEDEAFRDLTRAWSAAREDLKAARCRLKSFLLAHGVHYLGRPNWGPTHRRWLSTFSCDSAWQQLAFNEHRRTIEDRLAQCERLELALREAVTNWRFYPVVLALQAMRGINFTSAIGLVSELGDLARFEHPRQLMAWIGVTPSEHSSSGKRRQGSITKTGNSYARKLLVESAWSYRHPARTGAADLYFRTGRFFTCAVTLPGLDVRSDRSVPCCTSIFAADRRSWFEVAIDG

SEQ ID NO: 351770 - protein, 400 aa, unidentified
MISVGIDVSKEKSTVCILKPYGEIVSKPFEVYHVEQELSELATMLLRLNDEVRIIMEATGIYHLPVLSYFKEKGFFVAVINPFEMKEYRCQGLRRVKTDKQDAITISHYGIDHWYRLKEYKAQENIYTELKLLGRQYCHYMRMRVESVLELTHLLDYTMPGIKTLLQGWNEKNGKDKLGDFAEEYWHYDNITKKSEKQFIDSYLKWAKKKGYHQNQDKAIKIYALAKEGIPTVSSNTPSTKMLVQEAVRVLREVDHTLMTILTQMRSLAKSLPEYPIVRAMGGVGDVLAPKLIAEIGDVRRFHSGKALIAYAGIDAPPYQSGRLVGTERKISKRGSSNLRKIGYEVMRSLKAHKVPEDAAVYEFILKKEREGKSKRAAKIAGLNKFLRIYYARVMEVYRK

SEQ ID NO: 351771 - protein, 355 aa, unidentified
MSSEKYIGLDVHQATISVAVVDSQGKVVVESILETKASTLLEFFAGLRGSLFVTFEEGTWAAWLYDLLKPHVSEVLVCNPRKIPLLKQGNKSDKIDARKLAERLRLHDLKPVYHGENGIRMLRELARSYLTVVKDLSRVMNRLKALYRSWAIPCAGRDVYYRRHRSEWLDKIPEAGTRRRAEQLYQQLDLLQRLRQQARRELLAESRKHAITAKLRKIPSLGPIRCALAVALIQTPHRFRSKRQLWTYSGLGLETRDSGEYHFVQGQVRRRKKQATIRGLNKDYNHDLKGLFKGAATRASVKPGPFQEFYQRSLAKGIKPTMVRLTLARKIAAITLTIWKKGEDFDINKLNSQAA

SEQ ID NO: 351772 - protein, 350 aa, unidentified
MTNLPRSITGGVDTHLDVHVAAALDERGTLLGVESFDTTTHGYKKLLGWLSDFGPVELVGVEGTGSYGAGLTRHLQGEGVRVVEVDRPNRQRRRRKGKSDPQDAITAAHAAQSGDALGEAKTRDGNVESMRVLRVARSSALSCRTRALNQMRSLISTAPEPIRAELRGLNVYRLLERTSTYRPGVKRDIVSLTKFSLRMLAHRAIELEEEIVEIDAILKSLVKETAPELVATLGVGTDAASALLVAAGDNPERLRNEAAFAHLCGASPLDASSGKNQRHRLNRSGDRQANSALWHIVITRIVFDPRTSEYINRRMKEGKTKKEAVRCLKRYVAREVYGLLPHDKLGVDNP

SEQ ID NO: 351773 - protein, 358 aa, unidentified
MTGSSDYESVQVFIGVDVGKDTHHAVAVNRSGKRLFDKALPNDENKLRSLISDLKQHGQILLVVDQPATIGALPVAVARSEGVLVGYLPGLSMRCIADLHAGEAKTDARDAAIIAEVGCELSMICGFDDDLAAQATQASNRICGLLTQIHPALERVLGPWLDHSAVLDLLQRYPSPEKLASQGEKRLASQLCKLAPRLGKRLAAGITQALAEQTVVVPGTNAAVVVLPRLALQLITLRKQRDEVAMEVEQRVLTHPLYPVLTSMPGVGVRTAARLLTEVACRAFASTAHLAAYAGLVPVTRRSGSSIRGERPSRRGNKTLKRALFLSTRPDIQGLLHTQNEPGKATQPGAYRPGKAAL

SEQ ID NO: 351774 - protein, 352 aa, unidentified
MIIIGVDFHPEFQQIASVDTDTGEFQEKRLAHPEEAEKFYRALTGPKVRVGMEASGHARWFERLLAELHFELWIGDATEIRAKRVRKQKTDRQDAQLILQLLLEERFPQIWVPSWENRDLRQLLWHRHRMVQARTRIMNQLQAVALNEGLRCKKRLWQERGREQLEAFRLAPWASRRRRDLLELLDRLNPIITELTHAIEQEVEQCPAAQRLMTHPGVGPLTALALVLIIGKADRFQCGKQVASYLGLVPLEDSSGNRRRLGHITKQGSSMLRFLLVEAAQVTVRSLPEWRSKYFHLAMRRGRKIAKIAMARRLAVRLYWMWRKGWDYEQLTKFGSHAGQPGNRHGVQSNTE

SEQ ID NO: 351775 - protein, 342 aa, unidentified
MTAIGVDTHKATLAACAVDELGRALDEATFGNDPAGYLAFIAWACSIEPEATIGIEGSASFGAPLARAVQSAGLRVREVPPHLSRFERRRTRRPGKSDPGDALAIARVTAREPNLPPIRLPDRTSEIRLLLEAREDLIGEATRARNRLHAHLRILLPGYGGTVANLVAARHRTMVRRLLRGNATVQGELARSLLDRLLRLERECALLTHRIEALVDGHPLLALPGAGPITVARLVAEAGDMHRFRTPDAFAALAGVAPIPASSGQVQRMRLNRGGNRQLNRALHVIAVTQARFHHPAKAYVTRRMELDGKTWLEAIRALKRQLVRPVFRLLVEGAEVRLEAA

SEQ ID NO: 351776 - protein, 342 aa, unidentified
MQATTIGLDIAKNVFQVHGIDAAEKVVVRKQLRRSQVLTSFKALSPCLIGMEACATAHYWARELRKLGHTVRLMPARDVKAYVKRNKNDSADAEAICEAVRRPTVRSVQVKSAEQQSQLMLHRTRDLLMRQRTQVINALRAHLAELGIVAAQGTAGLKELLKIIANDEAERLPVDARASLVVLAAELQAMQTLIGSIEKRIMAQHKKSEESRRLQTIPGIGFIGATAIAATVTDPKAFRSGRDFAAWIGLVPRQDSTGGKQKLGPISKQGDRYLRRILVVGAHAVLKLAKKNPEKYPWLTELLARKPFKVVAVALANKMARTAWALLAHGGKYRRPALVATQ

SEQ ID NO: 351777 - protein, 451 aa, unidentified
MKKKSLSMEVINRYAAGIDVGSRFHYVAIGQKPEHVRKFGVYNEDLKSLLKWLQENKITTIAMESTGTYWQSLFATLQEAGLEVYLCNGKFTKNIKGRKTDVQDCLWIQKLHSLGLLTSSFLPDLATEQLRTYCRHRTSLLETSSMTTQKMQKYLRLLNLRLDVVVKDVCGLTGLQIIEAICKGETNPQILASYRHGNCRKSKEEIAKALQSNGRKDYLFGLQQEFDLYQTLQAKMEQCDVAIAKLLSEQIEADETKKSLQVEAKPHKKVNKNAPKNMDLNQLAYQYFDGVDLMRIEGVSHATIIALMSEVGCEGIKKFDTAKQFTSWLRLCPNTKISGGKVLSKKIAKGSNRLKIALRQAANAVGNLKDTHLSDFFNRISYRRGRTAAVSATARKLAVIIWNMIVKHVPYNPPSQYLFMDQKRKMKLVKKIRNKIAKLELKPEDIGFAMN

SEQ ID NO: 351778 - protein, 410 aa, unidentified
MELVHKKCAGLDVHKDVIVACARIVEERGVRRELKRFGTTTTELLALADWLQKLGVTAVLMEATGIYWRPVWNVLEGMFELTLANAAHVKNIPGRKSDVKDAEWLAELLAHGLVRGSFVPPRDIQEMRELTRTRKQLVGEITQHCQRLQKVLETGNVRLPSVVSDILGATGRAIIRGLANGENDPQLLARLAEGRLRQEDKQKELVTALDGRLSPHHRFLLGFHLDTVEHLEKQVASLEARIDEVSRPLAWAIDLLDPIPGVSRICAQMVISEIGVDMKRFPTVGHLLSWIGLCPRSDESAGKIRSRQIRKGNRWFKGTFMQAAWAACRCKTSYYRSQYLRIKARRGAKKAVVALAASMVTAIYYMLRDGVAFQDLGPKYLEKRDKARLAAALVDRLNALGYQVQLPAAA

SEQ ID NO: 351779 - protein, 421 aa, unidentified
MTPPALEALAAFLGLDWADATHDICLQAAGAERRGFLVLEHRPEAIDTWVQTLRTRFHGQPVAVWLELKKGPLVSALRQWAFLVLFPIHPFPLAQDREAFTPSRAQDDPTDAELQGELLLTHCDKLTPLTPQRPTMRALAQRVEHRRRLVGDQVRCTNRLTRVLQNYFPHVLQWFQEKDTGIFGDFLSRWPTLNAAQLARRTTLEPVFREHHGRSADVIKTCIEAIKSAVALTTDPGVLTPNALWVQALVAQLRVTLQAITDCDNAIADHAQGHPDFPVFDALPGAGAVFAPRLLVAVGAHRARDASAEELHTYAGMAPVTERRGTNSWVHWRLQCPTCLRQTFVEWVVESSRHSCWAQAYSQQHRDQGKAHQAAVRAVAFTWLRILSRCWQERTLYDESLYLQALKRRNTPLLHNRAKVS

SEQ ID NO: 351780 - protein, 340 aa, unidentified
MNHYVGIDVSLEYSSVCVVDGDGKIVGEAKLGSDPMILIAWLMELGLGLTRIGLEAGPLSQWLHAAMRQAGLPVELLETRFVRAVLMTAINKTDRNDGRGIAQLMRLGWFRPVHCKSIEAQEVRALLTARKLVQAKLHDIEMSLRGILRGFGLKVGRVAPSEFEARIRELVDGHPSLVAIADGLLKARAVLRHELAKFEKQVRALARCDRRSRLLMSVPGVGPIVSLTFVAAIDDPGRFKSSKNVGAHFGLTPKKYQSGETDVTGRISKIGDASVRAALFEAAHLIVTKPLKGCTALKSWAMKLARRAGKMKAKVALARKLAVIMHRMLVDGTTFSTAQA

SEQ ID NO: 351781 - protein, 343 aa, unidentified
MNDITTIGLDTAKSVFQVHGVDADGEVVLRRQLKRRQVLAFFAKLPPCLVGIEACGASHYWSRELTKIGHTVRLIPPRYVKPYVKSQKNDATDAEAICEAVTRPNMRFVPTKTSEQQSILMLHRTRHLLVRQRTATINAIRSHLAEFGIVAGVGRNGVEALLKVIADEQDDRVPAVARDCLMALGAQLEMLKRQALELDAKILATHRNNELSRRLEAIPGVGPCIATALIASIPDPGAFRSGRQMAAWIGLVPKQNSSGGKDRLGGITKAGDRYLRSLLMLGALSVIKRAQQLRYTRRPWLAQLMARRPVKVAAIALANKIIRMVWAMMVRGEDYREPVALAA

SEQ ID NO: 351782 - protein, 338 aa, unidentified
MKLYGAIDLHSNNNVTVLIDEQDRVVYEKRLPNNLAMIAQQLSGYQESLQGIVVESTYNWYWLVDGLMDNGHRVHLANTAAIQQYEGLKYTDDSSDARWLAHILRLGVLPEGYIYPKQERGVRDLLRKRGQLVRQRSSNLLSIQNLVTRNTGSSISGNRIKTLDSEQVDQLLPDRDLALAVKANLSMMQCADEQIEILERTVRDRVKLRPEFSFLKSVPGIGPILALTIMLETGDIRRFPTVGDYASYCRCVGSQKLSNGKKKGRGNTKNGNKYLSWAFVEAANFAIRFSARIKGYYQRKKAKSHRVVAIKAVAHKLCRACYYIIKDQVAFDITKALA

SEQ ID NO: 351783 - protein, 499 aa, unidentified
MDFENNLRPGQNGSGRNARGRTRLLRPDPARIKPRTPVDPEAFVKKSERTTPREGHRIGKTDGKSPGLLRAGNKTRKPMTTEQIGWEEITHYAGFDWAKDHHDVVVVDRQGKVIKDLSFEHSAEGWSKWKEMVACYGKLAVAIETNQGAAIEQLLESGVAVYPVNPKSAKRYRERKAPSGTKTDYLDAWSLGDALRVDGQGWRALKPLDPLIHELRLLCRDEVELIGKRTEMVNQIQAALHEYYPAALEAFEDWTLPASWSFVQQFPTPEALKKAGRRQWEKFLHVHRLWRPGSVEKRLQVFARAHEFCGSQPVTRAKSRLALTLAKLLQALEKQLQDYRKEIERLFGEHPDHDLFGSLPGAGGKLAPRLLSEMGSDRSLFESAQALQCYVGTAPVSFESGQLRKVNVRWMCNKSFRHAVHLWADLSRKGSSWAQVYYQQMRARGKSHASALRCLGQRWLKILWKMWQDRTRYNPEFHTRNQLKHGSWILQIKPVKAGE

SEQ ID NO: 351784 - protein, 349 aa, unidentified
MNEPYAGRQIVGFDLHRRRSVLVRMTEAGERLETVRISNDPEYLREVMTRAGEAPEVVLEACYGWYWAADTLADLGATVHLAHPLGVKMFSYRRLKNDERDAADLADLLRMGRLPEAWIAPPATRELRGWVRHRAKLVGLRSNLKCQVHGILANAGITVPMSDLFGASGQRLLATADLATESRSRIDSLQRMITALDFEVELFAKLVAGRLRTHPGYQAIQLIPGVGPILAAVFVAEIGDITRFRRPEQLASWAGLTPKHHESDTTVHRGRITKQGSRLVRWAAIEAVQRLPGHTRIGQVRDRVAARRGRNIGVVAAARELTELVFYGLRDHRVHALAVHSPARTPLPA

SEQ ID NO: 351785 - protein, 346 aa, unidentified
MSRHQVPGGDLAGLLSRFAELQRKAHARTGQLARIVVIQEAGLDGFWIHRALVSEGIESHVVDPASIAVSRRHRRAKTDRIDGEALVRTLLAYKRGEPRVCAMVRIPTPDEEDQRRLCRELKTLVGERVRHVNRLRGLFFSQGIADYDLRRPDRRARLDELRTGDGRALPPHLKAVALRELEVIELLDRQIEAVKAERDALLAAAQTAEVASKAVQMLLGLKGIGSGFAGALWSEGLFRHFDNRRQVAAYAGLAPTPWKSGKIDHEQGVSKAGNPRLRAILVEMAWLWLRHQPGSALSLWYHDRVRRLGGRLKKVTIVALARKLLVALWKYVTQGVVIEGAALKAA

SEQ ID NO: 351786 - protein, 425 aa, unidentified
MNYKQNEKINQVKESTLVVGIDIGSTTQYARAFDWRGIELGKVFTFSNSREGFESFKAWMQHLQDKYRKSDVIVGIEPTGHYWFDLGAYLEDEGILLVMVNPYAVKQTKELDDNSQSKNDRKDPKVIAKLVTEGRYSAPYTPDGVYADLRIMVANRKRLIREMTQIKNRFARRFAIYFPEYTDVFGDYEAQSSMLLLKKICTPEAIVELGAEKINQIWRDAKLRAVGMKRATTLCETAKRSIGLKKGSSAAQYEMKLLLEDYEYKKAQLDAVMEEIEKLCRKIPESEQMLAIKGIGVITVAGFLAEVGDVRRFESPRQIQKLAGLSLRENSSGKHKGQTTISKRGRSKLRAVLFNAAIPLIAKNPEFKSLHEYYTTRANNPLKKKQSVIAISCKLIRVFYAILAKGVTYDAQKLISDIHRQPQVA

SEQ ID NO: 351787 - protein, 445 aa, unidentified
MLRIVYKRVAGLDVHKKTVVATRMRVTEDDRIEWETKTFGTTTPDLLELLDWLYEWDLTHVAMESTGDYWKPVFNVLEDTFEIWLVNAQHVKHVSGRKTDVKDSEWLAELMLHGLLKPSFIPPKPQRALREMTRYRTTLVQERTRIVNRVQKLLEGANIKLASVATDIMGVSGRAMLAEIATGQTDAELMADLARGRMRNKIPELEKALTGIVQEHHRFVLAQQLDHIDYLDEKIETISAEIGKQLESMSWPDEPSQPGVSESAEEGTGAADESELPLTWDAAVALLDTIPGIDRRIAEVILAEMGLDMSQFPTADHLASWAGLAPGNHQSGGKRFSGRTTKGNKALSSIMVQAAWGASRTKDTFLKSRYHRLAARRGKKRAIVAVAHSMLVSVWHMLTYQQPYQELGSDYFDERKKESKVNYLVRRLEKLTGGAVSIELQPAIA

SEQ ID NO: 351788 - protein, 358 aa, unidentified
MKAQVKKIDFTGQNIYVGFDAHLKSWKVTIMAEDFVYKTFTQPPKPEILYKYLIEHFPGGTYHSAYEAGFCGYWIHNALVSFGIKSIVVNPADIPTTDKERVNKEDKRDSRKIARSLSSGNLVPIYIPSIKNQRDRSLLRTRAMLVKDSTRYKNRIKSFLYFYGICIDDAFLNSKSHWSNRFMKWLESLDIKDESGKESLSVLISECKNLRVSILNVTKQIRRLSQTETYQDKVALLKTVPGVGILTSMIILTELETIKRFNNLDKMCGYIGLVPSTKSSGDKEKTGDITPRGHSVLRTAIIESSWIAKSNDPSLMKSYISYCKRMDQNKAIIKIAKKLLSRIRYVLNNDKPYKYSVA

SEQ ID NO: 351789 - protein, 319 aa, unidentified
MNCINNQKEITVGVDTGKLQLDIHIRPLDIYFTVTNDEKGIKKAIKQIKPHKPTRIVIEATGRLEHPFIIACSQADLSFTVANPAHIKKFAGAIGRKAKTDKLDAQLIAHYGEAIKPPLSKLKPENIQLMSNLLSRRRQLMTMQTMEKNRLQIMPKEITNIIKPILIAIKNQIEKVDNKLNKLIEKCSEYKAKNTIIQSMPGIGPVVAFNLLSDMPELGYLTNKEAASLIGVAPFNKESGSYEGQRNIRGGRHKIRTVMYMAMMSAMQCNPVFKTTYQRLVAAGKPKKTAIIACVRKMIIILNSMVRDGVMWDHERNQN

SEQ ID NO: 351790 - protein, 355 aa, unidentified
MKYYTSTTEFNCGIDLHARQMYVCVMDRDGKKLVHTNIKNNDFEFFLKLVAPYRHDLTVCAECMFGWYWLADACQAAGLSFVLAHALYLRAIHGGKNKNDRVDSEKIPHLLRSNLIPPAYVYPADKRPLRALLRQRLFYVWRRAELLARIASHQLAHNRAPIKQTRRVRDDWEKQLLAAEEHPLRQLTLQNDLALIGHFDTQLTQIEAQLQRQAKALAARDYTLLQTVPGIGQHLGLTILCEIGDITRFPTVKDFLSYSRLVKGTVASAGKIKGLRGAKLGNPYLRWAFGEAAVIAKRDPAVIGPLAQRLEARMGGNKFKANTVLAIKLARAVYYMLKSKTVFDPARLVAALARN

SEQ ID NO: 351791 - protein, 393 aa, unidentified
MMNTLRVAVDVGSRFHQVAIGDGGGQLLDEFQIDHDRAGFEQFFARICQHAATDVRVAMEGYNGWARPLDQQVLARGWRLYNVNNLKLARYKEIFPAPAKSDAIDSRRMLELFAFDEQRPLGRDVLQEVTVPTTTQRELKYLTRRRRQQVADRTTRLTRLQVDLLAVCPDLLALTKAVENLWFLRLLTCRDRLTALPRLHDKTITSIRGIGAKTWPRIRAWQKTATFGSTIDLADTDIVADAAAILALNEQIKALDTRIEATACDCPMARRLRTLPGFGATGTAELSGEIGTLHRFDTEASLALYLGMAPLDHSSGFQHRSKRPKCVNSRCQAALMTCVARHMACVAESRAYYDRKRAQGKRHNQAVRALGRHLVRVIWRMLQDDRDYEVRDE

SEQ ID NO: 351792 - protein, 356 aa, unidentified
MQSTTKYIGMDVHQSAISVAVLDNDGELVMQSVLATHAAAILDFLQGLRGTLHVTLEEGTQSAWLYDLLVPHVAKVVVCNPRMNALLKSGSKNDKIDARKLAELLRAGLLSPVYHGENSARTLQELVRSYTCLTEDTTRLMARLKALYRSHAIACAGKKPYGKRHRQEWLQQLQQAGLKVRAQRLYDELDAVQGLRRAARREMLGEAHKYRASQILCTIPCIGPVRAAILIARVQAPNRFRTKRQFWAYCGLALETRTSADYRFVEGQLQRSRKPIFIRGLNLNHNHELKNVFKASALAASLRTGPLREFYEQRLAKGIKPEMARLTLARKLAAIALILWKKGESFDAKYLTAQAA

SEQ ID NO: 351793 - protein, 448 aa, unidentified
MRTRKPARTKKMKLPKHLQHINPHAAGIDVGSRSHFVAVPEGSCEQPVREFTSFTDDLHRMADWLLACGVSTVAMESTGIYWIPVFEILESRGLEVRLVNARHVKNVPGRKSDVLDCQWLQRLHSYGLLEGAFRPTEQVCTLRAYVRQRMNLVRYAATHIQHMQKALSQMNLQLANVVADITGVTGMRIIKAVLAGERNPLVLARLRDRRCKSSESTIARSLHGNFRPEHLFSLKQAVDLYEFYQGQIAECDRQILDQLASFDGADASGNGPPESVDEALQRMAGADLTQIDGIDTNSALKIIAEIGTDMNRWRSAKHFASWLGLCPGTKISGGKVLNAKSKPVANRAAATLRMAAFALFNSKSALGAYLRRQRARLGAPKAITATAHKLARLVYSMLKHGTAYVDEGQKRYEERYRTRVVQNLKRKAKELGFALVEAVEKQPKLKTT

SEQ ID NO: 351794 - protein, 347 aa, unidentified
MLHAGLDLSRRKLDVCLLSDEGEHLDQLAVAPDADSLKTLARRIEETHCEPVCAVVESMTGARLVHDTLEQQGWTVEIADAQKVKGLAPLACKTDKIDSLVLATLSQRDLVPAIWLPGPRVREERELARFRLHLVKHKSALKNRIHSTLINFGRPCPVTDLFGAEGRELLARLDVPEPWRSNVTASVALIDDLERQIAEVNTRLKTGHADHPYIPLLRSAPGIGWVLAFTIAAEIGAIERFASPEKLTGYTGLCPRVNQSGDSDRRGPLTKHGPTYLRWALIEATMHALKHPAYAKRYQRTKRRLGKQRGAKVAQIDVARRLAHAIWHMLTRNQEFAPRGAAFRLAA

SEQ ID NO: 351795 - protein, 365 aa, unidentified
MSTITIGVDLAKSVFSVCEMDGAGHVLRRRDLKRDAFAVWLAQVPAGTVVAMEACSGAHHWARRCLDYGHQPRLMAAQLVKPYRLSQRSKNDRNDAEAIATAARQGNMRFVPVKDIDQQARLAWHRVREGYKTESLAIGNRIRGLLAEFGIVVAKSDLALRRALTELDQHAVLPDEFKELIRSVAIHWAQVRTAIDACDARIDAHARMDERCMRLRAIVGIGPITADAVIATLGSAKDFRNGRQLAAWLGLVPTQCSRGGHTQLGAISCRGDAYLRTLLIQGARSSLQRAKAVSVEKSMPEQIWIRQLACRVPFGKVLVAIANKHARQLWAMLAHDDPYDAEAWLKHPMVQRSAGKHAITVAAMA

SEQ ID NO: 351796 - protein, 409 aa, unidentified
MQVVHEVCCGLDVHKKGVTACVLWASGRRRQTRAFGTFTRELLELGDWLRACGVTHVAMESTGVYWKPVWNLLEGLFEVLLVNAQHIKAVPGRKTDQKDSEWIADLLQHGLLRASFVPPTPIRELRDLTRYRASLAQEINRIANRIQKVLEDANIKLASVATDTLGASGRAMLEAMVKGEQDSQRLAEMAQGKLRNKIPELQEALQGRVSRHHRFLLRELLDHLYFVESKMQRIEQEVAERLGPFQSEVARLCTIPGVDRVTAWGLLAEIGLSMKQFPDAQHLASWAGLCPGSHESAGKRKSGKIRKGSLWLRRCLCQGAWAVSTKKNNYLSALYRRLAARRGSKRATIAVAHKLLVIAYHILRDGTCYSDLGADYFDRLNPEGLRRRLTKRLEGLGFKVTLEPLAQVA

SEQ ID NO: 351797 - protein, 343 aa, unidentified
MKIIRVGVDLAKSVFQVHGVDRDEKSVWRRKLSRDNWLKVLLENIEPGCEIGMEACGSAHHWARKLEAQGYTVKLLAPQFVKPYVKSNKNDANDAEAICEAMSRPNMRFVSVKTVDQQDTQAVHRIRSGLMEQRKAKANQVRGLASEYGVVAPKELLHLRRAIPCWLEDAENGLSGRFRKLLVGMWQDLLRLDDRIAELDREIALIAAADPVAKRLQQLRGVGPMIATALVATVGDAHQFANGRQMAASLGLTPKQNSSGGKERLLGISKRGDAYVRCLLVHGARAMIRTAKAKDDRLSQWVTRIATTRHPNVAAVAMANKTARIAWAMIRNGTDYQPELVAG

SEQ ID NO: 351798 - protein, 417 aa, unidentified
MLHPKMQYVYVGIDSHKDTHCAVVLNCFFEKLGKITFDNAPAKFEEFFQAIRKFKPKGSKLAFGLEDVSAYGRNLTVFLTGKKQVVKHVNASLVAAERRSRNVLHKTDSEDAECAARVLLNRFDQLPDADPQDKYWVLTSLVTRRRSIVKMNIALQNHLHSFLTSHYPSYRKFFVNIDCHSSLAFFETYPSPSRLEGVMVEELAEILKHPNPRQRWEKARQILECVENDGDSKVYYQEARDQAVRSTINQIKNNLSEIDSIDAILDDFLGHFDYKLQSMRGISNVTAANLIAEIGDISRFPTPAKLARYSGVAPVTYSSGKSSVQFANQRGNRTLSALFYSLAVIVTMTAGRHKKIINPFFYHYYHKKISEGKTKRQALKCVQRRLVNIIWSMMTYKTEYINPPTQDFPKEAKAESS

SEQ ID NO: 351799 - protein, 373 aa, unidentified
MTVLMKFIGLDVHRDTISIAIADDGSDWEVRFFGTIANDCEMLHKALTRIGRDGALLKICYESGPCGFVIYRVLKRLGIDCVVISPSSMPRRPNDRVKTDRRDAQTLARLLRAGELTVVWVPDEAHEAIRDVVRARRQAKQDLVSAKNTLKSFLLRHDRRYPGKAIWGRMHWRWLSDQRFAFAHQQFVYEEYKRRIHELEERCVRLEQVLEEAVLDWPLAPVVTALQALRGIRFIAAITLVTEIGDLHRFDSPKQLMAWLGLVPAEHSSGTRIRRGELTRTGNAAARAMLIESAWQYRYPARGGRALRERNAGLPDHIRAIAWKAQTRLCAKFRRLAGTGKHAAKIVVAVAHELAGFIWDIAHHTPVTASRLA

SEQ ID NO: 351800 - protein, 431 aa, unidentified
MKHPSEPKFVAFIGIDWADAKHDVCLQPANASEREFSVIVHRPEAIEAWAQELKRRFPGGSIAVCLELTKGPLVSALAKYDFLALFPVNPSTLAKYRQAFTPSHAKDDPTDAELQLELLLHHPDKLKRLEPPSLAMRTLQYLVEQRRGLVDDTRRITNQITCALKQYFPQALDWFAERDTVLFCDFLERWPTLKQVQHTRQATLEAFLREHNVRYPQVIEKRIRAIKTALALTEDLAVILPHQLLVQALVDQLRVSLKAIARFDTHIESVSQSLPDYALFRALPGAGPALAPRLLAAFGERRDRFQDAAAVQKYSGIAPVTERSGKKHWVHWRLQCPKFLRQTFVEWAARDHCSLVLGWRLLSTTTRQGMFPSSRPASVGLQVGPDPLSLLADPHTLRRVHPSECVEASRLATAKFDRARATKCLTVDLRA

SEQ ID NO: 351801 - protein, 424 aa, unidentified
MSKKNSSPAGLQALYPRVCGLDLHKKLIVACVRILNTKDGTVQSTLRKFGTMTADLLELRQWLTEQEVTHVAMESTGIYWQPVYNLFEGHFKLLLINAQHLKKVPGRKTDMKDAEWIAQLLQCGLLRPSFVPERRQRELRDLTRQQTKLVQQRNAVGNRIQKVLESANIKLGSVATDVLGVSGRKIIEALMAGEKDVSALAELAQRRLRGKIPELQRALEGELTEHHLYLLRQLLEQYDFLEKKIASVSERVGAIAPPSFRAAVEQLDAVAGIGERGARALLAETGTDMSRFPTHKHFASWAGQCPGNRESAGKRRSGKTPAANRHIDAVLTEMAQAAVRTKNSYFKAQYHHLAGRRGKKRATGAVKHSLLVTVYYMLRDHKPYKDLGVDYFDKLNPQQRIRYHVRRLRELGQEVELSPMPDAA

SEQ ID NO: 351802 - protein, 441 aa, unidentified
MQIVYERCAGLDVHKKTVVVCVRLLATDGTITRHIRTFGTTTAALLELVAWLLSLDVTHVAMESTGEFWKPLYNLLEGSFTILVVNAAHIKNVPGRKTDVKDAEWLAELLAHGLLRPSFVPPPPQRALRDLTRQRTHLIRERGSEVNRLQKVLEWANIKLSSVVTDISGVSARAMLQALLAGQTDVSELAQLAKGRLRSKLPDLEQALRGSLQPHHAFLIGQHLALIDVFDEQVAAFDERIREAIEGTRPAPPPDGTGDATQTASGEGAPSAPDGAWAAQAIVDAIPGIGRRVSEIVLAELGSDMSRFPSRAHVSSWAGLAPSQHESAGKRKSTRVRDGNHYLRATLVQAAWAAVRTKNSFLAAYFHRLAGRRGKQKAIIAVAHKILVIIYTLLKSGQVYEERGAAALDERQKERIVHRLERRIAQLGYKVNLEPITAAAA

SEQ ID NO: 351803 - protein, 412 aa, unidentified
MDTIAAYIGLDWADERHAVHLQSADGKIEHLELEQKPAVLHEWVAQRQQRFGGGKIAVALEQRKGAVVHALLMYDCFVLYPINPKALARYREAFSTSGAKDDPLDSELLLDLVVRHRAKLRAWVPDTVESRTLQALCEQRRKLVNQRVALTNRLTSLLKQYFPQALEWVGDVASVQACDFLVQWPTLAAVQRARPSTVRRFYQDHNCRKRAVIEARLAAIADARPLTTDAAVLEPLSLSVQTYATQLRALIAAIQTFDARIGEVFAQHADHDLFGSFPGAGDVCAPRLAAAFGTDRSRWDSAAELQAHSGIAPVTERSGKSIWVHHRLACPKFVKQTFHEFADQSIRFSRWARAYYDQLRGRGKDHHAALRALAYKWIRILFRCWKERRPYEEETYIEALRRRGSPLAKNLA

SEQ ID NO: 351804 - protein, 324 aa, unidentified
MSNQKQEVSFSEVVSRGCGLDVHKKEIVATVSGTDIKKEARTFQSTTRSLTQLKEWLLELGVTHVAMESTGVYWKPVMNILEPGGFTLMVVNARHIKYVPGHKTDKKDSAWICKLLRAGLLKGSFIPCRDQRDLRDLTRYRRKLVQQQSAEHNRMIRIFEDANLKLSSVFSNIRGKTCTALIDAVIDGETDPSRLSELCTHWRLKHSQEEIAEAVEGHFTEHHKFMIRTIRKSIRNIEEEIDVLDKEIDRRMQPLQGRIEQLCEVPGMQQSSIKELLAEIGVDMEVFPTAEHLTSWAGLAPGNNESAGKKKAHTPTTAIRPRRR

SEQ ID NO: 351805 - protein, 351 aa, unidentified
MTEQRISYTGERVYVGIDVHKETYTVTCVCHKQIVKTATVPAEPASLAASLLRWFPGATLTSAYEAGFSAFVLHRALTQVGITNLVVNPASIAVAANDKVKTDRRDSKRLARDLADGRLRGIYVPTEVEELARLLPRTRAQIVQHRATIARQIKAKLHQFGLIAPSNRRLISSRYLREIATWPLPLELGVSLRLFAEQWRFATRQLIAMRRLLRDQAKAQEEIEKVYRSVPGIGEVVARTLATELGDMTRFANERALFSYTGLTPSEYSSGTSVRRGHISRQGSSRVRHLLVETAWRAIPRDAVLKEIFDRIAATRGKKRAIVAIARRLTGRIRACFRQGTADAVGTYAED

SEQ ID NO: 351806 - protein, 336 aa, unidentified
MKKVFVGIDVSKRWIDLCLTVNGKAVVHMQFDNNKTGFRKMVSWLKQYGKPSEWLLCMEHTGIYAQPLWYYLTEKSITYAVVPGSLITSGLEIRRGKNDKIDAADIARFTMRYADELKPHRLPAQVLRRLKMLFAYRDRLVKAKKIISVPAAEASVFAAQESKEVRADSSSLVQVITARIAKVERIMLQVINSDEETARIYQLIESVPGFGLITASYLLIITQCFTTLCNSRKLANFGGIAPHPHKSGTSIKGKTRVSPVADKKLKALLSNGTGSLLQYNRSMSLYFERMIAKGKHENLVRNNIKNKMLHTVCAVVKRGTPYVTAYIPQPTTSSFN

SEQ ID NO: 351807 - protein, 417 aa, unidentified
MQYPPVRLADQPANGLTCGIDWARDDHAITIIDTDARPVYRGVIEHSAKGLKDLIEVLAGTGVHEVAIERPDGPVVEALLDAGVTVVVINPHQVKNLRSRYGSAGNKDDRFDAFVLADTLRTDRARLRPLTPDTPATTALRALCRARKDLVIHRVRVANQLRAHLARVYPAPIGVFDALDSPISLRFLTRFDCQDRLDWLTPTRLASWLGSVGYKGRTDAAVLHARLSGRPRGLTGPDGAAYVGITTAFVATLTNLVSQIAQLSAQIADQLATHADAHIFTSLPRSGTLRAARLLAEIGDCRARFPTPDALACLAGVAPSTRQSGKMRSVGFRWACDKQLRDAVCDFANDSRHANPWAADLYNRARARGHDHPHATRILARAWLHVIWHCWQTNTPYDPAQHQALQTLLNQRSETAT

SEQ ID NO: 351808 - protein, 376 aa, unidentified
MKQFNDIYVGLDVHKDTIAVAIARGARTKPHYFGEVPNTPAAITKMLHQLSPDGEVLNFCYEAGPCGYELYHQLTKLGQSCSVVAPSLIPRMPGVRIKTDRRDAMSLAKLHADGSLTAVWVPDKEQEGIRDLSRAREDFKQTQTKARQRLGAFLLRNGKIFTGKSKWTLAHWRWMETLTFETPMQHVVMQEYVEALKEASRRLLGIEKQILLAVRGWSLEPVLNSLMAMRGVNTITAVTLLAELGDITRFDNPKQLMSYLGLVPSEYSSGGKRQQGSITKTGNGHVRRVLVEAAWNYRFPARKSRTIEMRAEKTSERVQAIAWEGQKRLCGRYQRLLSLGKLKQKVCTAVAREMVGFVWAIACEASGRVHASRATA

SEQ ID NO: 351809 - protein, 335 aa, unidentified
MKKIFIGIDISKEKLNLCYMNAKEIVLEEEVENTIPSIKRQIKNGLKVLGSDISEVLVCAEYTGRYIFPLTCSCHELGMSLWMEDPTRIKHSFGVSRGKNDTVDARRIAEYAFRFNDKAVEYAMKGKSIESLKNLLSDRDLLLSDRKKYQSQLSDQKHYMDKDDYKRKAKRWKIVIKTIQAQIDEIEAEMEKIAESDETIKHQMELLVSIDGVGKKLAVNMIVITECFSRFDNARQFNCYAGLAPFQYTSGKSIHSKSRVSQRANKHIKSLLHLCAVSAGTRMSNGEYREYYERRKQEGKHPMCIINVIRAKIVSRMFAVIKRDSIYTKNHKMTA

SEQ ID NO: 351810 - protein, 425 aa, unidentified
MGHVIIGMDPHKRSATIEVIDGQEKVLAQGRFGTDRGGYKAMLAAGRGFADRTWAVEGCGGIGRHIAQRLVADGEPVVDVPAKLSARARVFATGQGRKTDATDAHSVAVVALRTQGLQVAAADGATVALRLLADRRDGLGHARTDTVNRLHRLLLELLPGGAKKFLSAQQARALLATVRPRDIAGRTRRQLACELVTELAAIDKKIKAASAQLSGLVAETGSSLQRLSGIGPSGAARLLGDVGDIARFADRGHFASWNGTAPIDASSGEQQRHRLSRAGNRRINRVLHIMAIVQLRNDTEGRAYYRRKLAAGKTSMEAIRCLKRRLSDQVYRQMINDARASATGPGGHAGTAAGSSVAGLHPCAGTSEKSLPGPATCDPTPVRRSILQVAPGASLSRRTAAVVKRPLLDNGEDRHTLPSREQPPS

SEQ ID NO: 351811 - protein, 316 aa, unidentified
MKTSEVFIGIDVSKAELEVGVLPVEQFWTATNDETGRGGVVERLRALSPALIVLEATGGFEASVAAMLAAAGLPVVVMNPRPVRDFAKATGKLAKTDRLDARMLASFAQVMRPPVRPLKDEQSRELAALFNRRRQLVDMLTMEKNRLDLAAARVRQDLKAHITWLEQRLKDVDGELKTLIKRSPVWRAKDELLQSARGVGPVMSITLLAQLPELGTINRRQISALVGTAPLNNDSGKFKGQRHVWGGRANVRAVLYMATLAAIRCNQAIKAFHRRLRDAGKKPKVAIVACMRKLLTILNAMLKNKTPWCDKLAVQA

SEQ ID NO: 351812 - protein, 348 aa, unidentified
MIVAHRYDHVVGVDTHARTHTYAIVATKTGEILGTKAFPVTAAAIDRAIAWVRSVTSGSVLFALEGTGSYGASLGRALLRDEIVFCEVRPPKKSSRVRGKIDEIDAIAAATSAMGIELEALTRPKADGLRNALRVTLDARRDMEVRRTSARNQLNALIRTADFGLDTRRALTDRGVQQLANLDANRSDVAERIIRAEAVRLASTVIDLGRQMRHNREALAELVELLAPGLQQIYGVGPVTAAVAVAAYSHPGRVRSEAAFAALAGVNPIPASSGNTTRHRLNRGGDRQLNRALDVIARVRMVSEARTRAYVDRRTSEGRTVREIRRSVKRYIARELFKALQVRMALCT

SEQ ID NO: 351813 - protein, 399 aa, unidentified
MKKTAPLELRVGVDVGCHSHNVAIGLSTGEILEEFSIVHEPEGFRQFFSRIEKNEKDYGCPVAVAMEGYNGYARPLDTLVRTHNYRLFNINNLKLARFKEIFPGAAKTDDIDARKALELFQLRDHLPIAKDVLQEVKATPQENDILKRISRRRRRLVNERVRVLNNLQADLQSVCPGLLEITGEAGNLWFLRFLTSTDDLRKLTRMRETTIRKITGIGAKYTSIILKWQKSAEFSPETEWVGDMIQQDAERVLALHKQIETLETQMTEISANSNIAQLLTTMPGFGPITTSELAGEIGTIERFENESSLALYLGMSNLDNSSGKYKGSKAPKQVNERAKSAMMIAVDRHRKHVPQSQRYYDKKRTEGKKHNQAVRALGRHLCRAIFKMLKENRGYFLAQ

SEQ ID NO: 351814 - protein, 408 aa, unidentified
MLQRFHVGIDVGKRHHHACVRDTLTDQYTKVFSFTVNRNGFERFLGFLEQQGTKEQVLVGVEASGPYATTICNFLAERGYSLVEINPFQANEFRKSQGKKAKTDRIDARSLAAFLAVGSHKPLSFSNPLLENLRELTRFRADLLQDRTRQINRLRETVAEAFPELNAHLASLDSPTALALLIAYPGPQALAQANVAEVGATLSQISHGRINRAHVQVIIDCAYTTVGLLKRQQALTLKLRLLAEAILTLNTQIQQVEATIEELFSKLPYKPSDFPVGSIQSLAGILAEIDDIHRFATLKQFLSHFGWCPQTFQTGSFRLDHPRMSHAGNPYVRRMIWLLAILAVKSVRPYREYFRQRTANGKKKMHSIVAVARKILSVIYAVLKTGKPYNPEYGGHKQSSLCQGLTSL

SEQ ID NO: 351815 - protein, 427 aa, unidentified
MNPFPFGDFFMKNKTNKFVAFVGVDWADCKHDVSVLSETGGKPVHQVIAHTPEALSEWLTKLRQQYPEGQIAICLEQSKGALIFHLLGYDFLTIFPINPKSLARFREAFTPSGAKSDFNDADLCREFVSTHRDRLRPWKPDDEHTRTITFLAEGRRKAVDERTKLTSRLRSTLKKYFPQAVELLGDKLHSKMALDFIQRWPQLADLQKAKPDTVQKFYVAHNSRSSQLIEERLKLIRSAVPLTTDQAVIKSSLLTMKMLAGQIIQLNTSIDEYEQELKTLYDNHPDRDIFDSFPGSGGALGPRLLAAWGSDRDRHDSATSMQKFSGTAPVTKASGKSKIVMRRLACPTFLLQTFHEFANCSRRVSVWAQAYYEMLRDHGKSHHTAVRSLAFKWIRIMFRCWKDRTKYDEVKYLQALKRSNSPLREYL

SEQ ID NO: 351816 - protein, 359 aa, unidentified
MGRWLFPEADNIGSIIGRGKTHMEYFAGLDVSMAETHVCVVNRDGVVVHEVKVPTTPADIAAALTRAPTCERVVFETGRMAPMLYHGLSQLGLPVVCIESRQAYQALKSLATHKTDRNDARGLAHLARTGFFKPVHVKSLPAHALRSLIIARKKLVGQRVTLENQIRGLAVVFGVRLPRALTAAFIRQALQASDGIPGLSAAMRGLIAARTAVLAAVAAIDADVRQLVRASTACRRLMTIPGVGKLTALAFTAAVDDPTRFRRSRHIGAYLGLVPRRYQSGEVDYTGGISKCGDRRVRTLLYEAANVMLTRYKPALKLKDWALAIARRSTMRKARIALARRLAIIMHAMLRDGTEFKPA

SEQ ID NO: 351817 - protein, 413 aa, unidentified
MVKREKIELVKRQRIFVGIDIAGSKHRARFIDNMGEEQIKPLSFFNDREGLEKLERRVNEIPGIGDDIIFGLEPTGDYWKPVAQYLREKGYPVVLINPYHLKRTKEIIDNSQDKTDDKDSYLIADLTKQSKYFFPVIPEGVYAELREVSINWKRTSQQLARLKCHLSNFLAKYFPEYKGIFSDILGKTSLYILKHFPLPEDIERLGINKLYRVMKKVSKGSIKEGKIQLLYEKARTSIGLKGGSQTAKVLLNEVLSDIEILKKRKEKLTKMMDELLYQSGYLKNLLSIPGVGIVTGSLFLGEIGDPDNYERASQIEKMAGLNLVENSSGSMKGEKKISKRGRSTLRYVGHLVTTVAIGKSPEIKALYRYKVEECKKEKMKALTGLSAKMLRIMFAVCKNKTFYKHEEITRYFR

SEQ ID NO: 351818 - protein, 433 aa, unidentified
MQEAEDEPLFAERAAGIDIAKTGIEVTIRVPSDTRRGGRQQETRSFRTVRKDLLALADWLRCWQVAKVGMESTGDYWKPVYFLLEREGLDCVLYHAAQVKALPGRPKTDKADSVWLAKITERGALPGSFVPPEEIRRLRTHTRYRRHLTQARTAEKARVEKLLEDAHLKLSSVISDIHGVSGRAMLEAIAAGQRDPKALAQLARGTMRGKIARLEEALDCSFLTEEHAAVLAMMLATIDYYTAQIEELTAKITVLCQPYEHQIAQLDAVPGTGVITAQDIIAEIGADMTVFPTAAHLVSWAKWCPQVAQSGGKRKGAGASGRGNRYVGAALGEAAISAARTQTFPGAKYRRLVKRMPKKKALVATGNSLLAIYHALLSDPEAAYTDLGTDYYDRRASIRRQARNHLRGLERLGYKVTIEPIDPATGELEAAAS

SEQ ID NO: 351819 - protein, 389 aa, unidentified
MKIYVGIDIAKLNHFAAAISSDGEIIIEPFKFTNDADGFQLLISKLESFDKDSIIIGLESTAHYGDNLVRYLVAEFYQVCVLNPIKTCQMRKNNVRKTKTDKVDTFVIAKTLMMQDDLRFITFFVLDMMDLKALGRFRQKTIKQRTRLKIQLTTYVDQVFPEIQYFFKSGLHQHAVYALLKEAPSPKEIASMHMTHLANLLKVNSHGHFTKEQAKELRVLAQKSVGANDSAISIQITQTIQQIELLDSQLEKIEAEMTDIMKFNDSVIMTIPGIGYINGGMILGEIGDIHRFSNPNKLLAFAGLDPSVYQSGNFQAKTTRMSKRGSRVLRYALVNAAWNVVRNNATFKAYYDAKRAEGRSHYNALGHCAGKLVRVIWKMLTDEVEFNLE

SEQ ID NO: 351820 - protein, 461 aa, unidentified
MPENSGGSDRGSRGKAIEGLPVVRPQVAGIDLGSERHWVCAPALEGTSREVADFGATTAELVRMAQWLKQRKVESVAMESTGVYWIAPHEVLEAEGLEVRLVDTRQLARVPGRNQKTDPTDCEWIQRLHSCGLLRGSFRPQEQVCMLRTLIRDKANLVAESGDWMRRMQKSLDQMNVRVHRAVSDLAGSTGMAIVRAIVAGERDARQLAKLRDPRCRHSEEEIAEQLQGHWREDHLFSLQQAVKMYDAVQQRIAAYDKQILRKLAEMTPPERRRGSAPAAKNPQKANAIKMRGQEPMRQALYRMSGVDVTQIDAVGVATVEVVLSEYGPDLSPFPTEKQFVAHTTLALRVPKSGGKPVKKKKRDSASTRVAAALRMAALALRHSPTALGAYYRQIARRIGADVAVFATARKLATLIYRLLRWGQPYVDEGAEVYEKRYQETRIKALKSTAKQLGYGLVSNA

SEQ ID NO: 351821 - protein, 356 aa, unidentified
MEHFVGIDLHSNNSYIAIIDNDNKRVFKKKVSNDLHNVLHVLEPHRKQIKGIVVESTYNWYWLVDGLMEKSYKVHLANPTAIKQYEGLKHSDDVTDAFHLANLLRLGILPEGYIYPKEERPVRDLLRKRLQLVQQRTALILSFENLLARNLGTRLKVDEINKLTEEDVGDIFQQKHLIVSGKASIATINFLGTRIEQIEKTVHKAAKLKSAYKLLMTVPGIGKILALTIMYEAGPMERFAKVGNYTSYCRCVGSERISNGKKKGKGNRKNGNKHLSRAHVEAAHYAIRHYEYVKRYHQRKMAKTNNVVARKAIAHKLARACYYIIRDQKAFDKGKLFAHKIAAAVNPSYCWDNHTS

SEQ ID NO: 351822 - protein, 400 aa, unidentified
MRGLFVGMDVSKDDLKAAVKDDRNALVMPIKTYQHDQASFEALVNDIEPREREFGCRAIFGMEATGIYHVSLYRFLQEKGKQTKVFNGLEIKRFKGRIRKTKTDKLDAVAISEALILSVEPIYKPPSDFETVHLRELTRMRGRIVKKMSICKNQGTRSLDILCRGYSGMFKDTFSPSSVAIIKGTFRLTRLFGMSTEQMATVLSEFMPKKAAQEKASELSALFGRVVVPEKERDSSILELHLVLQQLELLNEQLDRIERRIEETVKKTNTKLTSIPGIGELTAGILIGELGSLKQFRSASQLIAFAGLDVVVKQSGHYEHLGHISKRGSPNLREALYNAALPAAQYNPVCRPFYEKLRNKGKHHKVALVAVARKLLHIAYSVETKNREFYVPNHIAIKAS

SEQ ID NO: 351823 - protein, 319 aa, unidentified
MTDPATFVGIDVSKDTLDVHVRPQGHAFAVPNGPQGLADLVARLAGARPALVALEATGGLGHACAAALAAAGHPVAVVNPRQARDFAKATGRLAKTDAIDAEGLALFAERVRPEPRPLPDEQAREFEALLQRRRQLLEMRAAEQNRLGAAAAAPVRASLQAHIDWLSKQLEKVDKELGAAVEASPVWRAKDELLRGIPGIGPAVSRTLLAALPELGALTRQQIAALAGLAPVSRDSGRRKGQRSIGGGRAEVRSLLYMAALSAARYNPALRGFSERLRRAGKAAKVRLVAVARKLLTIANAVLRDGRRWDAALCGTERG

SEQ ID NO: 351824 - protein, 348 aa, unidentified
MRFYTNTHRFYCGIDLHTRTLSLCVLDGSGAIVCQRTMPPEPDQLLSALAPFRDGLVVGCECLFAWYWLADLCAREAIPFVLGHALYLKAIHGGKTKTDTIDAEKLARLLKGGTFAQAYVYPKARRATRDLLRRRSYLVHQRAELLAHLQMTFLQYNLTPPAQKLCYARNRAALDLDVFADPSTRSMLAADLVITTALDGQIKRLEAELVRTAKVHDPQTFHLLRTIPGIGPVLALILLYEVHDIARFEDEGRFLSYARLVGGVRESAGKKKPTAHRKIGNAHLKWAFGEAVCLMIRELPKAKAWLAKKERRHGKKRALGALACRLARTVFHLWRKQQAFDVKRFLAS

SEQ ID NO: 351825 - protein, 445 aa, unidentified
MTKTNRDQNYSSPEAAETYLAPPPPADGKIIGVDGHPDTFTAAVFVGTTVHNARQVSCRQDLGLDAFLAWAQSEFDARDLFLIESNANSFELWRRLRAMGLRATVLDSVHVARHAKSYADNDKMAAARIAWVYLAGAAPAVWVPDPKTCERRELLHAYQKAVRDQTAAINSLKGYLNQFAVRLGRRQPATATTRQWILAQRDWSPLHREALADAFAQLESHTSRRRHFVRLIGQEICAEPLMLRCMKLLGISKINAFALLAVIGDIRRFDNPAKLVAYAGLNPGQRQSGHGKHIKLGLGRRGRGDLRHLLVQGAHAVLRTGKRTALGQWGWKLFARKGHRNIAVAAVARKMLVQVWHLLSGNPPTTLEPDKSLVIKLEKLVVLLGKEWRTRIGLTGKLTQCIAQLQTRMLAPQAPQTDGGYAPPNPAPLAAEAFGGNLMLPACGR

SEQ ID NO: 351826 - protein, 424 aa, unidentified
MNNSQNKKIAQVTDETLVIGVDIGSDTHYARAIMGRGYEVSKKPFDFENTREGFDRFVNWAYQLAVVHQLTRIFVAVEPTGHYWFNLADYLKAYDVTLVMVAPQHVKHSKEMDDNTQMKNDRKDPLVIARLVLEGRYMIPYIPDDVYAELRSAFNRRCDLVEALNRNINRMIRWFDMYFPEYRTVYEKANAISGLLILMRAPLPSDILELGVDGICRIWREAKLRAVGISRARKLVAAAENSIGLKGGEAIRRELWQLMEVHELLKKQLSDLMQIIEGLLRKIPGADKLLKVPGAGIVTVAGFLSEVGDISRFTDPKQIQKLAGLAVVENSSGKRKGKPGISRRGRSRLRWVLFQLAMTTVKSNKEMKAYHLYYTTRKNNPLKKMQSLMAIAGKMTRIFYGILKNGTEYNPEIVMKDFKKEATM

SEQ ID NO: 351827 - protein, 402 aa, unidentified
MTESSDYESVQVFIGVDVGKDTHHAVAINRSGKRLFDKALPNDENKLRSLISDLKQHGQILLVVDQPATIGALPVAVARSEGVLVGYLPGLAMRRIADLHAGEAKTDARDAAIIAEAARTLPHALRTLKLADEQIAELSMLCGFDDDLAAQTTQASNRIRGLLTQIHPALERVLGPRLEHPAVLDLLQRYPSPEKLASLGEKKLAAQLCKLAPRLGKRLAADIAQALAEQTVVVPGTNAAAVVLPRLALQLITLRKQKDEVALEVEQRVLAHPLYPVLTSMPGVGVRTAARLLTEVACRAFASAAHLAAYAGLAPVTRRSGSSIRGEHPSRRGNKALKRALFLSAFAALRDPLSRAYYTRKMSQGKRHNQALIALARRRCDVLFAMMRDGTFYTGVITCLTT

SEQ ID NO: 351828 - protein, 342 aa, unidentified
MNYYAGIDVSLECSSVAAVDASGKIVREGKVASEPAALIEWFAGVELRMERIGLEAGPQSQWLYGELREAGLAVELIETRHVRNAFKTMAVKTDRKDARGIAELMRVGWFRPVHCKSIAAQEVRVMLTARSLVQSKLQDVEASLRGMLRGFGLKVGRTTPNRFAERVRQLVCGHPNLEVIAQSLLAVHEVLLRELKGFEKRVRGVARSDARARLLTTIPSVGAIVSLAYASAIDDPTRFKSSKRVGAHFGMTPRRYQSGEIDHSGRISKIGDQGVRTALYQAAHIMLTKPVKGSALKSWAMQLAKRIGMQKAKVALARKLAVVMHRMLVDGKPFDFAAGAAA

SEQ ID NO: 351829 - protein, 348 aa, unidentified
MTIVEDARAITGGVDTHADVHVAAALDRIGGLLGVGEFPATAAGYARLLGWLGEFGTVCLVGIEGTGSYGAGLARHITAAGVRIVEVDRSDRQDRRRQGKSDPLDAVSAARAAQSGRARGASKGRDGSVEAIRTLMVAKRSAAGERTRSINQARALVLTGPDDLRARFAAHTPAALVAGLASLRPRPGGDVAGHATRVALRELGRRAQFLDSQLDRLDELIVPLVTAHAPGLLALYGVGPNTAALLLIAAGDHPGRLRSEAAWAHLCGVAPIPASSGKVARHRLNPGGDRQANHALWRIVFTRLGSDPATRAYAERRTAEGKSKAEIIRCLKRYVAREVYRYLRPAAR

SEQ ID NO: 351830 - protein, 373 aa, unidentified
MDLQEVRFVGLDLAKRLFSVQLQSEDGRNLGTRSLTRDELQPFFASLPPSVVAMEACAGAAYWCELFASQGHTPLPLHARAVARLRMGPKNDKKDAALILLAAHLPGARAVLVKSRDQLAALSLHRMRELVLRQEVACGGQLMGFLFEMGCVRWKTIADLRRATDEELDEEVRSMPSDMQFSIRSSFARLRAAHAENVATWKALQRWHASHPRSLVLGAIPGVGFGAASALAASIPDPPPWTSGRSFSAYLGLVPCQRSSGDIIRLGHIGRGGDQYLRRALFLASRSAAMRCFRMKEGPASLVSLLDRKHFFVAVTAHAARIARTSCQMLIDGTEFEETAAWHSAPFDGKRHTASGGATKRCTKVDPEPHMEP

SEQ ID NO: 351831 - protein, 318 aa, unidentified
MLIHYIDIAKRNFVIAVSSLSKTKTETNNPKGIAHTIEYLKKHKVALVVTESTGGLEIPAAKAIRRAGIAVIIANPRQTHQFAQSQPLTKTDAKDAKMPAFFAQMMTQKEDWQTMPYQPPTEAEEVLEALVNRRNQSADMRTAEKNRLHQVHETQVGSVKQLIAHFDRLIDELDKQIDNHTHTHFDGKAQVAEQIKGIGSITTATLMAMLPELGRLSHKRIASLVGIAPHPRESGETKFKSRCFGGRSAVLKALYMATVAATRFEPLIRDFHQRPLSEGKPYKVAVTACMRKLLTISNARMRDYFAENDTAENGIRTA

SEQ ID NO: 351832 - protein, 425 aa, unidentified
MSKRKKSSVAGLGALYGRVCGLDVHKKVVVACVRILDLKDGTVQSTLRQFGTMTADLLELRRWLAEQKVTHVAMESTGVYWQPVFNLLEGHFQTWVVNAQHIKKVPGRKTDMKDAEWIAQLMQCGLLRPSFIPDRQQRELRDLTRQQTKLVQQRNAVDNRVQKVLETANVKLGSVASDVLGVSGRKMIEALIAGEKDTSVLAELAQKKLREKIPQLQRALEGEINDHHRFLLRQLLDQYDFLEKEIARVSERLGAVAPSSFRAAVEQLDAVAGVGERGARSLLAETGTDMNRFPTHRHFASWAGQCPGNHESAGKRRSGKTPAANRHLDAVLTEMAHAAVRKKDSYFKSQYHRLAGRRGKKRALGAVKHSLLVTVYFMLRDNKPYKDLGVDYFDKLNPQQRIRYHVRKLQDLGQEVELSPIADAA

SEQ ID NO: 351833 - protein, 339 aa, unidentified
MHVTTIGLDLAKNVFQVHGIDDHGEIAFNRALRRAQVLAFFERLEPCLVGIEACGTSHHWARELIKLGHNVKLIPPAYVKPYVKRGKSDAVDAAAICEAVTRPTMRFVEVKTPEQQAILAVHRTRDLIVRQRTQTINMLRAQLAEFSLVLPQGVYHPLRFAKDCVDGEQPDLPQDAQEVVFDLCDELLFLHAKILRHSRHMTRIAKSEKRVALLRTIPGVGPITASAIVATVGSGKQFNNGREFAAWLGLTPLNRSSGGKERLGHISKMGDQYIRRLLVLGMTSRIRSIRLEPEKFDPWFADILSRKPSRVAAVAMANKTARMIWAVLTRNEPYKVRTV

SEQ ID NO: 351834 - protein, 389 aa, unidentified
MKIFVGIDIAKLNHFAAAISSDGEILIEPFKFTNDADGFQLLVSKLESFDKNSIIIGLESTAHYGDNLVRYLVAEFYQVCVLNPIKTCQMRKNNVRKTKTDKVDTFVIAKTLMMQDDLRFITFFDLDMMDLKALGRFRQKTIKQRTRLKIQLTTYVDQVFPEIQYFFKSGLHQNAVYALLKEAPSPKEIASMHMTHLANLLKVNSHGHFTKEQAKELRVLAQKSVGANDSAISIQITQTIQQIELLDSQLEKIEAEMTDIMRFNDSVIMTIPGIGYINGGMILGEIGDIHRFSNPNKLLAFAGLDPSVYQSGNFQAKTTRMSKRGSRVLRYALVNAAWNVVRNNATFEAYYNAKRAEGRSHYNALGHCAGKLVRVIWKMLTDEVDFNLE

SEQ ID NO: 351835 - protein, 370 aa, unidentified
MLIIGCDYHPGFQQIAFVDTETGECGERRLVHPKEAEQFYRKLKERNLGVRVGMEASGHSRWFERLLGELQFELWIGDAAEIRTKRVRKQKTDRQDAQLLLRLMLEERFPRIWVPDAENRDLRQLLWHRHGLVQMRTRVMNQLHVVALNEGVRRKKALWRPAGRMELDSIVLAPWASRRRQDLLDLLDQLTPKIQKLTGALEEEVEKRPVTRRLMTHPGVGPLTALAYELVIGTPQRFHCGKQIASYVGLVPEEKSSGDRRRLGHISKQGNVLLRFLLVEAAQVTVRSHPQWRSKFFHLAMRRGRKIAKVAMARKLAVHLYWMWRQGWDYAHLQKFGSHAGEPGHPDGVQSITDVMIGHPAPSAAGSSNK

SEQ ID NO: 351836 - protein, 349 aa, unidentified
MLTDEVDYVVGVDTHRDQHTLAVVASPTGAVVAQCSIATSGRGYAQALRIAQDYAAAARVWAVEGAGHYGAGLARYLSGHGEIVLEAGRSPRDERRLRGKDDGLDAIRAARAALGSDQLALPRAGQRREALRLLLLARRGAVDVRRQALVQLRSVIVTAPERLRRELRVLPQQRLIERCSRLRRSASRAPDELAATLVLRTLARRVQAATAEAAELEAEIAAHVRALAAPLLDEPGVGPIVAAQLIVAWSHSGRIRSEAAFARLAGAAPIPASSGQTSRHRLSRGGDRQLNRALHTVILHRRLHDPVTKDYSARRVAEGKTRRDAVRLLKRYLARHLYRLLQNQEPLMA

SEQ ID NO: 351837 - protein, 420 aa, unidentified
MDERRVTGLDTVVAYIGLDWADERHSVHLQTAEGAVEHRELEQKPAVLHEWIARLQQRFSGGKIAVALEQRKGAVIHALLMYDCFVLYPINPKALARYREAFRTSGAKDDPLDSELLLDLVVRHRDKLRAWVPDTVESRTLQALCEQRRKLVNQRVALTNRLTSLLKQYFPQALEWVGDLASVQACDFLTQWPTLAAVQRARPKTIQQFYRAHNCRKADVIEVRLAAIATARPLTTDAAVVEPLSLSVHAYATQLRTLIAAIQTFDDRIAAVFAAHADHDIFTSFPGAGDVCAPRLAAALGTDRSRWDSAAELQAHSGIAPVTERSGKTLWVHHRLACPKFLKQTFHEFADQSIRFSRWARAYYDQQRARGNHHHAALRALAYKWIRILFRCWKERRPYDEDTYIGALRRHGSPLAKHFA

SEQ ID NO: 351838 - protein, 351 aa, unidentified
MELEEGPVSIVGGLDIHRKQITFDWLDLETGEVERGKIAPADREHLAAWLDARMRAGADVHLAFEGCTGWRYVAEELARVGVVGHLAEPADTAALRGPKRRAKTDRADAQHLRRLLADGRIPECWIPPAHVLEGRALLETYRDLRAEHTGWLQRIHAVLFHQGTPCPSRGVCSVEGRAELAVLTARLSPAGQDQVMVALAMLAASEAQLDVVHRKLLLAARQLTGAKVLAANIYGVGPITGLALTCWLGGAGRFSSTRKAVRFAGLDVTVHSSDGKRSSGRLSRQGPAVLRWCLFEAGKTHARTDATDHDYYSAVKDRIDGKRAALSEARKIVRQACHILTELGDDAFAPT

SEQ ID NO: 351839 - protein, 420 aa, unidentified
MLKPETTPPFVACIGLDWGDQSHAVALQPVQGKTESGTLVNSPEVLHTWLQELAQRFEGRPVALAVETSRGPLIHVFSAYPWLTVYPIHPATSARYRSAFKPSGAKDDQPDALLLLELVLCHQAKLRPLQLQDTATRKLGALVELRRDLVDRRTQALNQLTSLLKSYYPQALELAGKDLSSALALDFLTRWPDLLALKTARPAALKTFYYRHSVRSAELVAQRLALIQPAQVLTTDEAVLEPALLHLQALVAQLRVFLKHVALLEKQIHSLFQSHEEAYLFRDLPGAGAALKPRLLVAFGQDRTLYPDPASFQKLSGVAPVIEKSGHQSWTHWRWQASRFLRQTLIEWAGQTVIYSTWAAAYYKAMKAKGKRHHVILRALAFKWIRILWKCWQTRIPYDEARYLKQLAARKSPLAVKINP

SEQ ID NO: 351840 - protein, 349 aa, unidentified
MTKVSMIGLDLAKNVFQAHGIDAAGNVVVRRQLRRPQVEKFLAALPPGVVVGMEACSGAHHWGRVVQKLGHEARIMPAAYVKPYVKRNKNDGRDAEGVCEAMGRPTMRFVQVKSLESQAVLVLHRTRRLLVRQRTMSGNAFRSALAEFGIVAAQGLKGLGSLMELLADPASAVPEAARLPLRVLARQWETLNADICKLETEIVRAAKTDEVARRLMAIPGLGPIGATAILAAVPDIRVFKTGRDFAAWLGLTPRQFGTGGKHSSGGISKQGDRTLRTLLTLGATSHLRYERARNIKDPWLQALLARRPFKVAAVAYAAKIARIIWAMLVTGEHYRAPNRGHGGSVQAAA

SEQ ID NO: 351841 - protein, 377 aa, unidentified
MKRIKFVGLDVHAETIAVAVAEQEGEIRSLGMIPNREESVRKLVKKLGPVEQLLFCYEAGPTGYVLYWQLTKLGAGCAVVAPTLVPVKAGDRVKTDRRDALKLARNYRAGELTAVWVPDAEHEALRDLVRAREAAKKDQLRARHRLSKFLLRHGRRPPVGVQPWTVKYLEWVKRDVHFAVKAQEATLLDYLHEVEHMAARIVRLDDAIEEAVKVAPAKMRAVIEGLQALRGIAQISAVTIVAELGEVTRFSKARELMGYGGIVASENSSGERQRRGGITKTGNAHLRRVVVEAAWAYRHRPAIGLTLRKRQENLSEEVKEMAWKAQHRLHARYGKLVAKGKNKGVVVTAIGRELLGFIWAIGVQVEAEQKESLRQAA

SEQ ID NO: 351842 - protein, 402 aa, unidentified
MADGPTRFFGLDIHKEYFVAVGVNVQREVIFGPQRVSNYQLAEWAERVLTLEDAVALEMSTNTYLFYDTLVPHVRSVIAVHPPSVALVTNAQVKTDKKAALALAQLHATGMLTGVWIPPHEGRDLRALIARRDKMVRLSTMAKNRLHSTLQRNHLVLPEKPFSPEQRSWWKNLSLSATEKFLVLSDLDTLEFAQKQVEQVEECLKQKSAEDERIPLLIQLPGVAMLTAITILAAIGDITRFPNAKKLVGYAGLGTRVHDSGMTHTSGRITKTGRKDLRRAMVNAANHAVVHHIHWKKEFERMDPRLGRSKAIIAIARKLLVAVWHVLGKQEADRFAEPRDVANSFFAHAYRIGVKNLPDGQSALAFTREQLDRLGIGKELQEIGWGMKPRKLPPSKMLLQKK

SEQ ID NO: 351843 - protein, 370 aa, unidentified
MEKIVYVGLDVHADTIAVAIADDGRNGEIRFHGVIDNTADSVRRLTKRLVATNTHPTFCYEAGPCGYGLHRLLTKLGFDCAVVSPAMIPRRTGDRIKTDRRDAEMLARLWRAGELTPVWTPDEEQEAMRDLIRTRKQSLDALKIAKQQLQSFLLRHGLRYTRPTYWTKMHWRWINDLRKFRFPHQQLAFEELKRTIRQIEERISTLDKAIEDAVKDWRFGDLVDALRSLRGVNTTIAATLAAEIGDISRFENPRQLMAWLGLVPSEHSSGSTVRRGRITKTGNALARTMMVEASWSYRHPAREGQPYLMRCQHQPQEIKDIGWKAQTRLCKRYRDLSKTGKPQPRVLTAVARELAGFIWDIARHVPIQAR

SEQ ID NO: 351844 - protein, 401 aa, unidentified
MNAVGIDVSKGKSMIAILRPYGEVVSTPFEIHHYANEISLLIEQIKSIEGESRIVMEHTGRYYEPLAHELSHTDLFVSAVNPKLIKDFGDNSLRKVKSDKADAIKIARYALDSWTDLKQYCLMDELRRQLKTMNRQFSFYMKHKTAMKNNFIGILDQTFPGVNTCFDSPARADGRQKWVDFATTYWHVDCVRKMSLEAFKAHYQKWCKRKKYNFSQLKAEEIYGAAKELIPVLPKDDLTKLVVRQATEQINIASKTVEKLRALMNETASKLPEYPIVMKMAGVGPSLGPQLIAEIGDVTRFSHRGALAAFAGVDPGVNQSGTHEQKSVHTSKRGSSTLRKTLFQVMDVLIKSMPQDDAVYKFMDKKRSQGKPYYVYMTAGANKFLRIYYGRLKEYLASLPQ

SEQ ID NO: 351845 - protein, 352 aa, unidentified
MQHFIGCDVHTRNQVVAWIEEETGEIKKRRLEHEGKEVKEFYAQFPRGTVVGIEATFPAYWFERLLGELGHELWVGDAARIRASEVRYQKTDCRDAELLLDLLRTGRFPRIWVPTLEERDLRQLLVHRMKQVRARTQVKNQLHALAISQGVCRKGKLWSAQGRKELESLALWPWAARRRKELLEWLDRLDEQVRELDRAVEEAGRARPEVALLRTHPGVGMVVSLAFVLTVGAVERFPNSRKLVSYWGLNPRENSSGGRQRLGSISKQGNTMMRWLLVEAAQTAARLDPQLRRTYQRLKKQKTSGVAKVAVARRLAVRLFWMLRTRHNYTQLVHMSGSPSSVVVPPPAEPMV

SEQ ID NO: 351846 - protein, 316 aa, unidentified
MSKRKTNIGIDVSKQLLEVAVHESKFHYRCPNQAQAFGGLLAELIDLRPARIVVEATGGLEKPVVAALHAASLPVVVINPRQVRAFAKAIGQLAKTDRLDAGVLAHFAAAIKPPLRPLKSTDEQELEALMGRRGQLIEMLVAEKNRRNSATSEVVRETIKEHIDWLEDRIAELDEQLQARLVSSATWQNKDAILQSVPGIGRVVSFSLLAELPELGTLNRQRISKLVGVAPLNCDSGQQRGVRHIFGGRARVRSMLYMATFTAMRFNPVIKEFYQRLVAKGKPYKVAITACMRKLLSIINLMVRNQTLWRSASVSA

SEQ ID NO: 351847 - protein, 333 aa, unidentified
MYYSGIDLHSDNCYVTTIDESGSVVKQQRVENNNELLLDYFRSLPGSHQAVVESTTGWYWLNDLLQDNGIELVLAHAKYLKAISYAKVKTDKVDSQTLAILLRQGLIPRAHKISRELRGLRDTMRIRLRLVQQRSDTLRRLNSIHAKFNGSVPDPYRFQLAVLEHTRDTLSNQILALEKSLHPVLIPNDDIQRLLIIPGIGKLSAFTTYLEIDGIERFDSDKHFVSYCRLVPAADNSNRTVHHRSSKDGNKYLKIAFSDAAVHAIQYYPEYKRFFLKRAKRSGDAIARTVVAKELAKIVYYVLKNKTTYKGLKGQPISRQKSQQWPRLSSPLP

SEQ ID NO: 351848 - protein, 360 aa, unidentified
MRIIGCDLHARQQTLAMLDTVTGEVVNRTLMHEGNQVREFYAELPHPVLVGIEAIGPMHWFLNLLEELGIECQVGDATKIRAAEPRKQKHDRRDAELILKLLVENRFPAIWMPSKEQLDLRALLLHRHHWVRLRTQIQNGLQAIALANGLRRGPGLWSYDGQAKIAFLPLPPHASYRRSALQTMYRKMEEEIENLTEQVAEQAKQRCGARLLMTHPGVGPVTALATDVFLGDPQRFADGKALASYVGMIPREYSSGERQRFGAITKQGSPLLRFLWGEAAAHAARRDPDLQRFYRRKLVQKGLGKARVAVARKLGIRLWIMLRDQIDYEEFCRRGQKQSSAACAGMPETGFGAKRHRAVD

SEQ ID NO: 351849 - protein, 264 aa, unidentified
MAGTEPHAWGTGRMDDITYVGLDVHKPAPRKRGATVCVAVAASGRSGVAVAASGRSGEVRQIGVFENRPQILCKMAARLGKGGRRLSFCYEAGPCGYRLHRLLTGRGRSCVVVAPSLIPMKPGDRIKTDRRDAMMLAKLHRAGELTAIWIPDAAHEAMRDLVRARATAGRVRSKARQPLWRKWGDFRRFTNARQLMAYLGLVPSEYSSGSTIRRGGITTAGNALARRVLIEGAWTYRMNARVSRKLHDRLEPLSAAIRDIAWKA

SEQ ID NO: 351850 - protein, 382 aa, unidentified
MDASVSPNEWKGLPRPELSACAETGNECHDGKCEVSSTHSEGEVMAILNVGIDLAKNVFALHGINERGQVDLRRPSVPRAKLHALVAALPPCTIGMEACSGAHHWARLFAQHGHTVKLMAPKFVAPYRMSGKRGKTDAADAAAICEAVQRPNMRFVSVKTAEQQSRLMVHRARQGYVEARTALFNRIRGLLAEFGVVLPQKPEVVRREAARHMDTLPGYGKTVIEDLLAEVRHLDERVRQYDGHVRAMARDSTPAQQLMQIVGIGEVTATAIVATVGNAREFSSSRQFAAWLGLVPGQYSSGGTTRLGHITKAGDAYLRGLLVMGARAVLNAAGNKTDSVSRWATNIALRRGYWRAVVAVAAKNARLAWAALTKGDSFTLPA

SEQ ID NO: 351851 - protein, 413 aa, unidentified
MRNLLEVCCGLDVHKEILVACMLKGGIEEEPEPIIKEFSTLLSGLDEFKSWLIEHNCHDVAMESTGVYWFPIYNVLESIFYEDGQMNIIVANPHHMKNVPGKKTDIKDSQWIATLLRAGLLAPSYIPPKEIRELRDWTRYRDVLIKELVGHKNRIEKHLQQCGFKLSSILSDIFGMSGYELIRKLCEKGKLTALDVQGCLHGTLRAKSDEVQQAVAGRLSAHDRLFLTNLVKVMEHCRKEIEETEWHITVYAQKYEPALQLLETIPALQRRASTIIVSELGVDFSMFPTAGHLCKWAGLCPGDNESAKKKKTMRITKGNPRIKSVMVQCAWAATRCKNFFLRDWFYRLRARRGTKKALIAVARKLLAMVWHILTTGEIYEETRYEKTKKNQEERRKQRLKTEAAKLGFKLVPA

SEQ ID NO: 351852 - protein, 369 aa, unidentified
MLNTMFVGLDVHKATISVAIAIGGRNGEVRHWGTIPNRADHVRKLSEKLGGDGRQLHFCYEAGPCGYGLHRQLSELGHDCVVVAPSLIPVKAGDRVKTDRRDGIMLAKLHRAGELTAVWVPDAAHEAMRDLVRARATAVRVAGKARQHLQGFLLRHGRIYPGKKGWTKPYRRWLTTVRFEHPAQQIVLQDYIHAVTDAEARIERLTKQIADLLPGWSLAPVVEAVQAMRGVAFVVAVTVVAEVGDFSRFDNPRQLMAYLGLTPSEHSSGASVRRGGITKAGSSLARRALVEGAWSYRMQARVSRRLLDRIEALPQAVRDIAWKGQLRMCQRYRHLMAAGKPKVVATTAIAREMVGFIWAIARVVTPVSA

SEQ ID NO: 351853 - protein, 301 aa, unidentified
MKCVQSNKLDFSGQNIYVGIDVHLKSWSVAILSEHSVLKRFSQSPEPEALHKYLVSNYPGANYFSVYEAGFCGFWIHERLTDLGITNIVVNPADVPTMSKEKLRKTDAVDCNKLARELRSGSLVGIYVPGVETLELRSLIRMRNLIVKDSTRAKNRIKSLLRFHGVEIPEEFTRCSIGCWSKRFLSWLQALELSTEYGKKTLELHLEQFIRLRKMLLQETRAIREISRKAPFEKPIRLLTSVPGIGVTTAASLMVELDDIVRFKNADHLASFIGLVPMCHSSGESNGPGELYADILSFGVF

SEQ ID NO: 351854 - protein, 348 aa, unidentified
MRIIGCDLHARQQTLAMLDTTTGEMVNLTLMHEGNGVREFYSQLPRPVLVGIEATGSMQWFLNLMDELGIECQVGHPATIRAAEPRKQKHDRRDADLILKLLAEQRFPAIWLPSKELLDLRALLLHRHQWVRIRTRIQNALQAIALANGLRRGPGLWSYDGQAKIAFLPLLPHASYRRSALQVMYRKMEEEIENLTQQVAEQAGQRSGARLLMTHPGVGPVTALATEVFLGDPKRFADGKALASYVGIIPREYSSGQRQRLGGVTKQGSPLLRFLWYEAGAHAVRRDPELKRFYLHKLIQKGLGKARVAVARKLGIRLWIMLRDEIDYQEFCRRGQMQQSGAACGGDA

SEQ ID NO: 351855 - protein, 334 aa, unidentified
MENIALIGIDLGKNSFHIHCQDHRGKAVYRKKFTRPKLIEFLATCPATTIAMEACGGSHFMARKLEELGHFPKLISPQFVRPFVKSNKNDFVDAEAICEAASRPSMRFVQPRTESQQAMRALHRVRESLVQDKVKTTNQMHAFLLEFGISVPRGAAVISRLSTLLEDSSLPLYLSQLLLKLQQHYHYLVEQIKDLESQLKRKLDEDEVGQRLLSIPCVGTLTASTISTEIGDGKQYASSRDFAAATGLVPRQYSTGGRTTLLGISKRGNQKIRTLLVQCARVFIQKLEHQSGKLADWVRELLCRKSNFVVTCALANKLARIAWALTARQQTYEA

SEQ ID NO: 351856 - protein, 428 aa, unidentified
MNDNQIIRHQQFCQLKEVIRGSDQHLIIGIDVAKDKHHAFMGAATGKSLLRKLIFENNSEGFRKLLTHVEAVRVQHGLSESVFGMEPTGNYHKPLGSYLINGNHQVVLVSGQAVKNNRILLDGRWDKHDTKCAANVADLISQGKCLFYDSPSEAIVELRSLLSLRKRLKKEEHSLRMRIRNSLLAKHFPEMDRYFGQCLSESLSIVYWCLDPKKIAEMDFGRFFQLVTPRQRGLAQQRRLKAIWQAAGASIGCAVDRASQFEAQLLVDMILQVQKEIKDTQQLIETISQQFMEYHLLLTIPGFGPYVASLVLAVIDDAWRFGSARQVLKMAGFDLSAERSGKTSKKAVPVISKKGNAALRYGLYQAAFVASTRNLDFVEYYTNTLRGREREKGIKTKMRVKLAAKMLVIAWTLMKKKEEFNPDFLNKD

SEQ ID NO: 351857 - protein, 342 aa, unidentified
MSRLTIGIDLAKNVFQVHGIDDSNRVVIAQKLRRGHLLAFFAKLEPSLIGMEACGSAHHWARELTGMGHEVKLMAPAYVKPYVKRGKNDMVDAEAICEAVTRPTMRFVPIKSASQQSILMVHKSRALLIRQRTMLVNALRGHLTEIGIVAPVGIERTAELVGRVLAHDPTELDVPPLVTDIVVSLARQIDSLTAEVRTLEAKIREWQRTSEASRRLATIPGVGVITATALAATVPDASVFRSGREFAAWLGLTPRSNSSGGKERLGRITKAGNRYLRTLLIVGATAVLRHVRHKMHGPLIEWVRKLLLTKSARLTSVALANKMARIAWAVMTRQTAYTNAIA

SEQ ID NO: 351858 - protein, 391 aa, unidentified
MFLLGIDIAKLNHVASCIDSSTNEVVFSNFKFKNDFKGFTSLLDKISTFDAENLIIGMESTSHYGENLINFLFKQHFKVALINPLQTSHLRKANIRDAKNDNLDSLNIAKALIFAKLNFISKKNIDCFSLKKLTRFRSNLIKQRSKTKIQLTSLLDLLFPELQYLFKSKIHSRAIYSLLKKYPSAEEIAALKDDEISNLLYASSKGHFKKEKSIELKSLAKTSVGIKDTSISLHVVQLIELIELYDKQIKDIVSKISDTVEKLDTKLLSVPGINIIACAIILGETNNFENFSSAKKLLAFAGLDPKIRQSGNFYASSCRMSKKGSPYLRYALVFTAWNIVRHSEKFNRYYCLKRSQGKSHYNALGHVAHKLVRVIFTLIKKNIIYQEENLR

SEQ ID NO: 351859 - protein, 397 aa, unidentified
MIAVGIDISKAKSTVAVIDSDGTVLASPFTMAHTQPEMEAFVTYLKGLGEPTTILMEYTGHYHYPVLKKLQDEGFPVCIVNPYQMKKYGDVEIHKAKTDKKDALRIAAYALEKSYKLVPYSSMEQKYEDLKFLSRQYSQRITYVAKLKVQLIALLDQTMPGITRILPLNSRNPEKCALLLFIKRFKSFDEIQRIGKARFLASYDVLAKKASERSASSKGLSIYELAVDSITTRGEDPYIWLSQNQCVDLLSATQNAADEIISQMRNIAETIPEYKVLRAMHGVGDCLGPIILAEIGDVHRFHSGKALNSYAGNDAPPYQSGQFESRNRHISKRGSSALRKACYEVMQALKLTKPQDDPVYLFMLKKEQEGKPFNVAKMAGVNKFLRIYYARAMELYK

SEQ ID NO: 351860 - protein, 314 aa, unidentified
MICGVDVSSKSLDARVGRDGAAASFTNDAEGIARLAEFCQSHKVDLVAMEATGGYEKKPFALLWAAGIRVAVVNPRAVRNFAQGMGLFEKTDRIDAGVIAWYAETKGCVVVSPASAQQQQLKAMVTRLRQLTEVRAAQRNQRLLVTDKVVLKSFRKLLDLVQRQIRDLEVAIAELIAADALWQKLDKSFRSIKGVADRTVARLMAEMPEIGTLSNKKISKLAGLAPLACDSGQWKGKRSIRGGRRSIRDILFVVAAGVRRHNPDFGAFSERLTAAGKPKKVVRIALAHKLLVRLNAKAREVRQLSNPSACTSVC

SEQ ID NO: 351861 - protein, 341 aa, unidentified
MRLYTGIDLHSSNSYLAIIDETGKRVFKKKLPNDPEQILSALAPYKDANIGIVIESTYNWYWLVDALMADGYKVHLANPTEIKQYKGLKYSDDQHDAFWLAEMLRLGILPEGYIYPKEDRPVRDLLRKRGHLVKLRTSLIISLQNIICRNNGFRLKTNDIKALNADRVAPFLEQNEDLALAGKVSKESIDFLTRQIKAVESVVEERMELREHYKELLTMQGVGKTLGLTIMLETGPINRFAQVGNYCSYCRKVSTKWISNDKKKGKGNKKSGNKYLAWAFSEAAELARRYYPEARAFYQRKMQKTNAMIAHQALAHKLARAAYYIMRDGVPFMPEKIFRSS

SEQ ID NO: 351862 - protein, 376 aa, unidentified
MKRPVSSANYPPAFSSTRNGRPKAPGSLVRPLTSSGLRSNAAAKLERSPGPLARARIREPEFVALEILPLADCIGIDVSKYTLEWSVGCEGRIQHTRNEPRPIGQLVRRIVALDPERIIVESTGGYERKLVLKLAEAGLPVVVVNPRRVRGLGEGMGILAKTDAIDARLLALFGEKVEPPIRPILQGTERLLADLVARRRQLIGMIVAEKNRRDTAAPPVQRTIDALLRTLNQLVRDLDRKIDQTLLEDAERAELSELLQTVPGVGPGVARTLLIDLPELGHLGRREISSLVGVAPYAKDSGTLRGSRRIRGGRAAVRTALYLAAMTASRFNPVLREFYERLRQAGKPPKLAFVAVARKLLTILNAIAREKTAWQA

SEQ ID NO: 351863 - protein, 418 aa, unidentified
MSHEFCIYLGIDWATEQHQACIMDSQGQVVEQRKIEHCGQAILDFMAWMEALVAGQVDRIAVAIEVPRGPVVEALLEHGWALFSINPKQLDRFRDRHTVAGAKDDSRDAFVLADSLRTDQHCFRRIAADQPVIVRIRELSRTEDSIGADLRRTVNQLYQLLLRYYPQLLRLCPTPDEPWLWALLELAPTPAQGAELKAGRLRRLLAKYRIRRWSAEEILPVLAAPPLPLAAETIDAVSEHARMLIPQLRLLWGMRKQVGDRIEALLAAVNASDAGTDVQLSRDLAVLRSLPGIGRIVAGTLLAEAAGPLAERNYQAIRAHGGIAPVTRQSGKSKHVGMRYQCNPRLRDALYHWARISMQHDALSKQHYARLRTSGHSHGRALRGVADRLLAVLIAMLKSGEKYDPKRRQASSVAIDAP

SEQ ID NO: 351864 - protein, 352 aa, unidentified
MESITVGLDLAKQVFSVCIMDAQGRVTQRRELKRDGLAEWLAQLPAGAVVAMEACSSAHYWGRVCLSQGLQPRLMAAQFVKPFRKSAVIKNDRNDAEAIATAARQGNMRFVGLKTMDQQARLSWHRVREGYKKDVLAVTNRIRGLLAEFGVAINKSGIALSRALARLEEYGLPAEFIELIRQQQMHWQAIDVQLKLCDVRIKEHAEQDERCARIRGLTGVGPLTADAIVATLGNAHEYKNGRQCAAWMGLTPSQHGTGGKVLLGSITCRGDDYLRTMLIQGARSSVQRARVVAPDKRTPEQQWIVQLSSRLPFGKVLVAIANKHARQIWAMLARGEDYDAEAWLKHPMVQRG

SEQ ID NO: 351865 - protein, 322 aa, unidentified
MNPKNYGGIDVAKKNFVIGIYGQDKTKTEANTPKGHAKAVEYLQKHNVDLVVLESTGGLEVPLANALHAADIRVVIANPQRTHQYAASFSLGKTDHLDAKMLADYAQALDSRKMADDMCYAPPSEEALALEALVKRRSQLVEMRKMEKNRLEQTHASQKASVVAMIKHLGELIAALDKEIDQSNRGGFNGKGEILSEMKGVGRITCATLLSMLPELGKVPHKRAALLVGVVPPPRQSGEKEKKSGCVGGRMVVRNALYMAALAATRSEPKIKAFYEKLMSRGKAFKVALNACMHKLLRILNARMRDYLASLKETEESESQSA

SEQ ID NO: 351866 - protein, 434 aa, unidentified
MSQQNISTPSTPPVYAAFVGLDWGDEKHALSLCAAGATVIERTTLPQTPEALADWANVLRSRFPSGKIALCLEQARGALLAGLMQYEHIVPYPVNPKTLACFREALYPSRSKDDPIDADLLLDLLLKHREHLRAWQPDTVQTRQLALLNEQRRHFVDHRTALTNELLSHLKAIFPQALELVGQSLASRLATDFLKKWPTLQAVQKVKPAVLRQFYYGHNSRSEELITGRLQRVKNAVALTSDPALLAVHSLAIQTLAGQLQALRPFLDQHEQQIAELFAAHPDAALFDSLPGAGSALAPRLLAALGSDRSRFPDALSIQCYSGIAPVTERSGKTQYWVHLRWSCPKFMRQSWHEFANCSLKFSTWARACYEDLNKRMDHHEAIRKLAYKWQRIVWRMWQERQPYDETRYLRSLQKRGLKIYADLVPQPIAPAGE

SEQ ID NO: 351867 - protein, 386 aa, unidentified
MKRNDLSRSPVAFDQNTTLVAVIELSQKSWLIAGLAAGLAREPLKKQSADEETLLKLLHRWRDEAIKAGGTIKRIVVAFEAGRDGFWLARWLQAHEIEAYVIHPTSVPVSRDHRRPKSDRLDTALLMRAVLGWLRGEPKHCSMVAIPTLAQEDAKRPSREHEHLVGQRTSIVCRMKATMARHGIRNFKLRLAKAAEQIKQLRTPEGGTLPLNTLAELRRDVGRLQLVGDQIKQIEKQRLQRLRQAPQEGPHPMMRLLAKVMSIGIETADMLVNEVLSRNLRDERAVGRYGGMTGSPDESGSKRREKGLAKAGNARVRRGMIQLAWRWLMFQKESELAKWFANRTAGAGRDVRKKMIVALARKLLIALWRYVTTGEVPAGAKLRPAT

SEQ ID NO: 351868 - protein, 479 aa, unidentified
MNAKAKNNKNQVSNNFSVINTLSAEERQTRVDDLLNTLQAKTWHDLETSGKFDKNAKLSFISDDMLIVGCDIGSETHYLRAIDRKGRELSRKPFSFLNNEEGFEAAKAWMVDLAAVNGKEQIVLGLEPTGHYWFCVATWLISNGISVVQVNPYAVKQTKEIEDNSQLKDDRKDPKVIANLVMNGNYGMPYLPEGIYADLRSLSLLRSQLAENRIRSINRLHRLMKIYFPEYKDAFGKTDGSFAMEILKVAPFPEDIIRLGEDGIRDIWHKAKLRGRGYSRAAEIFRYACVSIGKKEGSEPDRYSVKCHVEDIISLDERLATVEAAINEKCMEIPHAENILEISGLGQNIVAGIISSMGDIERFDDAKEIQKLSGLNLVANSSGKHNGETKISHRGRKELRTWLFQGAKSVVAHAPEFQYIHEYYTTRAKNPLKKMQSLIVIACKLLRIIFTILKKGITYDPQKMLNDIKRFEEAEIVAA

SEQ ID NO: 351869 - protein, 354 aa, unidentified
MKKLFIGIDFSKEKLDATIILACGMNEIGSREYGCFPNNTTGYRKLCNWVKTNAWNTIAEEWLFCGEDTGSCSIGLSKWLYGKGYDIWIENAYAIKHSSGIQRVKNDKADSAIIAEYAWRQQDKVVPFEPLNESLAQLREIFLYRHKLVGQRVAMELRKEDKSQSNKSKAISFINRKSKHLIAEINKTIAECDKAIDSIIEADEELKENYAIITSIKGVARQNATCMLVYTNNFKKFGYDPRKIACYYGVAPFGKQSGTSVNTPAHTSHFANKLIKSLLGQAAHIAKIYNPEIRAYYQRLISKGKKPQVALNNVKNKLIRIIVALVRKKVPYDQNTYKYYEEREVNLLLNGIRD

SEQ ID NO: 351870 - protein, 343 aa, unidentified
MDITTIGLDLAKNIFHLVGFNQRGKEVKKRMLRRNQVLRFFAQLPPCLVCMEACAGSHYWGRELRALGHRVKLIPPQYVKPYLQGNKNDYNDARAIVEAASRPSIPVVAIKTPEEQDMQAIHRMRSQCLRDRTALCNSTRGLLGEYGISMTKGVSKLRNLIPLLLEDAQNGLSDLFRELLARRYEQLVELDAHIEFFTNKLKILARRDDSCQRLQTIPGFGPIVASAFQAVIGDGRAYCRGRDAAASLGLVPRQHSTGGKNVLLGISKRGDRYLRNLLVHGARAVVQQAAGKKDKLSRWINRIREERGWNKAVVAMANKMSRMGWAILRYNTSYRPVSDSPVR

SEQ ID NO: 351871 - protein, 345 aa, unidentified
MTVAPSLAPSLALTVPVYVGIDVGRTSLDLAAGGAGAGVPPRLPRQVPNTPAGIARAVAALTALAPTLVVLEATGAYHRPLEAALVAARVPTAVANPTRVAAFRAERGGREKTDAADARLLAAFAATHAAALRRSEPVDPQLAQLRATVTYRDTLVAHKTQLTNRLHAQRFGGDATVTTRLTAELAHLRAHLREVDAGIARLLAAFPEAAVLRELRGVGPAVAAAVLGYLPRGVWGDAAAAAAYAGVHPRRTQSGARDTSRLSKQGHAGLRRYLYCATIVALRDDPELIAVRDRLVGRGKHPASARCAVMHKLLRWMMGRLKAYYAARSAAQPADPTAAVLPLAA

SEQ ID NO: 351872 - protein, 324 aa, unidentified
MIVRTTEAGEVLEAVRIVNDVQRLASVMDRAGHCPEVVLEATYGWYWAVDALQAGGANVHLAHPLGVKAFEYRRVKNDFRDARDLADLLRMGRLPEAWIAPPPTRELRELVRHRAKLVGLRSHCKAEVHAVLAKCGVQVLMSDLFGLAGTELLDRLDLPAPYAARIASLRRLMDDVDFEITVFAGIIRGRMAQEPGYTAVQKIPGIGPTLGAVLVAEIGDITRFASAQKLTCWAGLTPKHHESDTHVRRGRITKQGSRLVRWAAIESVKTVSKTSEVGVLRERVADRRGRHIGSVAAARRQLELVFYALRDGHVRALEHLPRVA

SEQ ID NO: 351873 - protein, 348 aa, unidentified
MSISMMGIDTAKSVFQLHGVDAQGKVQLKRKLRRDELIALFERQPRCTVVMEACGAAHHWARVLSGLGYEVRLIASEAVKPFVKRGKKNDPADAAAICAAASRPDAKFVVVKSLEQQGVLALHSVRSLLVKQETMLANAMRGLATEFGLVVPKGMAKLQELVALVEEDKGIPEQARGVFAELREHCRVTTERIEELERQIVVHARHNDTARRLATVPGIGPITASLIAATVGDSIGTFKSARHFAAWLGLVPRQHSSGGKTRLGKITKAGDRQIRTLLVLGATSMVHRAEQWNSAVGAWVRGLLERHPVRHVTVALANKMARIAWALMTRNEVYRAKGGVAPAAAATA

SEQ ID NO: 351874 - protein, 389 aa, unidentified
MAEGSGSAVAYLGIDVGKRTHSACALDEGGAVVFRADVENRPGDVDRLLGRAGAGALVVVDQKRNIGALVPARAFAHGNPCAHLPGYAERQARGMFPGIAKTDAIDAKVIARTARGIPGALRPLAEEPEGAAPLRILSSQREFAAAARTRAKNRLRATLLEADPALERAVDPSRGWHVAPLAEFGSAAGCSAAGWRRFSAAARRAGAPAPGARAPWESMLASARSGRSLPAGEDVAVRMLARDVAALDADVAELEGLVADSLAGDEVYECLLTVPGIGPKTAAALVTSVDISMFRGHDELASYCGVAPADSRSGTSVRSTSPQRGGNKQLKNLLIYSCNSLIGTQNRFGRYYDECRARGMRHNKALKAVARKRLKVIYAVMRDAVPYAA

SEQ ID NO: 351875 - protein, 420 aa, unidentified
MPDDRCRLGSDDVVIGLDLASAEHQVVVLTADGQRLTRFKIPHSRMGLEELLRRTMPAALSRTGGSRVFAFEATGHVWEAVAYILRARGERYVVINPLTTFRVREARQLSREKTDLTDAEQIAELCRSGLVTRTQLEARPYLALRRAWGEYRRLREERARLKVLVAHQLYGLFPEFLRVWADLLQPAALAVLRTGLTPATMAALSLGEFVARVREHRAGRRVWRFKLAQVHRYAEQTIACPDGVDVLAREVQRAVARIDVLTAQMTTVATEVDALLADLEETPYLRTIPGLGWASVAGLLAHVGAITKYRHGRQLIKLAGTNPSRRDTGQTVGRGQTMSRRGRPGLREVMYLATISCLQHNPRIRAHYDRLIQRADRPLSKMQALGACMNKLLLYAFAVMSRREAFQLDHDWQRTMSRVA

SEQ ID NO: 351876 - protein, 367 aa, unidentified
MKKGSTAAAKESKNISQQKLTIGLDLGDRNSWYCVVDETGKIQLEQQVRTSAKALQEVFGAMPRSRIALEIGTHSPWISRLLSELGHEVIVANARKVRLIGESRKKDDRLDAQTLARLARIDPELLSPGKHRSAQAQADLMMIRARAGLVRARTGLVHTARGLAKSYGERLRGCNVRSMNPEKAEGLSPELQRALEPLLAAIAELSERIVEYNDQIEALAEASYPQVELLKQIKGVGTLIALTFLLTLEDPHRFRKSRDVGCYLGLQPGRRNSGQSEPQRHISKEGDPYLRTLLVQGAQHILGPFGVDCDLRRWGLKLAERGGRNGKKRAIVATARKLAVLLHHLWVSGEVYEALHNHNRMSVASAA

SEQ ID NO: 351877 - protein, 421 aa, unidentified
MKRVSTEEFAACIGLDWADAKHDICLQASGSAHREFLRLDHRPEAIDAWVQSLRTRFNGQPIAVCLELNKGPIVSALRQYEFLVLFPVNPLTVAKYREAFTPSRAKDDPTDAEPQVELLLKHRDKLTPLSPQSPTMRALAQLVEHRRRLVGDKVRLTNRLTSALKNYFPHVLQWFQEKDTAIFCDFLSRWPTLKAAQLARRTTLEDFFRAHHVRSADVITTRIEAIKNARALTTDDGVITPNVLLVQALVAQLRVTVQAIADFDSAIAQRAQDHPDFPLFDALPGAGAVFAPRLLVAFGEQRERYASAAELQKYAGIAPVTERSGKKSWVHWRWQCPTFLRQTFVEWAAESIRHSFWAQVYYQQQRDKGKAHQAAVRALAFKWIRILYRCWQERLPYDESTYLQALRRRGSSLIHNLAKAS

SEQ ID NO: 351878 - protein, 403 aa, unidentified
MVSPRLFVGIDVSKLKHDVAIVNEHKKLVRRPFVIAEDRAGYEHLVHTLEHLARQYQTTTFVIGLEATSEYWKNLSHFLVQHSTAFVVTALNTIQTRKYAQADLRRAKTDPIDAQDIACFMVEKRPKPSFVRPPLFEGIKDLDRQLYSFKKQQTMTINKLRLELTKVAPELERGVGSLKSQQVLALLERYPTAAAIAQASHDELRKIRYGQRQWRLPTPFIAKMKSLAESSIACKTGPHAGIIVQALAKRLAADRQALAAMQVQITELYRSAKEHHSLLTTITGISKETAIVLEAYIGEVGRFSHAKKMVAYFGMNPTVNKSGKPRKRLSYLQKKGSGIVRHKLFMITLNLIRHKVEPFYGYYQRLVTAGKPKLVALAATMRKLLVICYTILKTQKPFALKKN

SEQ ID NO: 351879 - protein, 347 aa, unidentified
MTEAYDGRQVVGMDLHRRRSVLVRMTEDGRKLETVRIENSPAALRAVLARAGKNPRVVVEATYGWYWAVDVLEEAGAEVHLAHPLGVKAFTYRRVKDDERDAADLADLLRMGRLPEAWIAPPEIRELRELTRYRHKLVGLRTSCRDQVHAVLAKLGVPVTHSDIFGVHGQAWLDGLRLPQPYAGKVASLRQLNGELSGEIALLEQVIGDLLAGHEGYRAIQALPGIGPVLGAVIVAEIGDIRRFPGPGQLCSWAGLTPRHRESDTKVSRGHVTKQGSRMLRWAVCEAIQRQPAGTRPWQVKDAIIARRGIQARNTAKVAAARELLTLVFYSMRDGHIRRADRPGQAA

SEQ ID NO: 351880 - protein, 456 aa, unidentified
MAKKKMSLEVVNPNAAGIDIGSRSHWVSVGQNSEDVKEYGVYSEDHKKLCEWLKKHKVTTVAMESTGTYWQNLFSSLVAYGFEVILVNGRQTKNIKGKKTDILDCQWIQKLHTLGLLSSSFLPDSTTDIIRTYSRHRQNIIKQSASTVMKIQKYFRLMNMRLDVVVKDIVGLTGTKIISDFVNGEKSGEKLAKNRHYNCRKSEEEIAKALQFNGREDYYFALQQEWHTYLHLQKQIDAVDIQIKKHLTDVIDNDDNKKQHIASKKPYKRKNKNTIRDIDMNQMSYQYFEGIDLMAIEGVNDATIMALISEIGLAGIKKFGTAKQFTSWLRLAPNNKISGGKVLSNYMPKGSNRLKISLRQAANSIGNLKEGHLSDFFRRIKYKRGRATAVSATARKLAVIIWNMLAKGVPYSPPTEYLFLDQKRKMKLVSRIKKNIAKFELKPEDVGFSNLLNMNT

SEQ ID NO: 351881 - protein, 408 aa, unidentified
MKTLHKRCAGVDVHKTEVVVCLRLVTHGKVEREVRRFPTTTHGLLELAQWLESARCTHVAMEATGVYWKPVWHILDGRFALILANAAHVKTVPGRKSDVNDASWLADLLAHGLIRPSFVPPAAIQELRDLTRTRKQLTREIAQHSQRIQAVLEEANVKLCSVITDILGASGRRMLKAMIAGEIHAHKLAALGSERLGCAPETLIDALTGHMREHHRFLLAQHLQTIEQLEKTIAAFDTRIEEKLMPFRDTVERLKEVPGLGSTATGVILAEIGLDMSLFPSAGHLLSWAGFVPRLDESAGKSRSTRIRKGAPWLKPVLVQAAWGATRKKNSYFQAQFLRLKARHGAKKAAIAVAASILTTVYHMLRDGTCYQDLGPEYFTRRNPAKAAARLANRIRNLGYHVEIRPAA

SEQ ID NO: 351882 - protein, 348 aa, unidentified
MIIIGVDYHPSFQQIAFMDQETGECRERELKHSDGEAEKFYRELKQRGISVRLGMEASRWFERLLAELGFEVWIGDAAEIKTKRVRKKKTDREDARLLLKLLLENRFPRIWVPSPEDRDLRQLLWHRHRLTQMRTRIMNQLQAVAMNEGYRWKKKLFSERGRGLLEKLSLAPWASRRRKELLELLDQLDPKTAELTAAVEQEAKKRPEVVQLMTHPGVGPIAGLAYVLVIGTPEQFPCGKQIGSYVGLVPCEDSSAGRQRLGHISKQGNTLLRFLLVEAAQAAARCNPGWRRRYLHLMMRREKRITKVAMARKLAVRLYWMWRNGWDYSQLVEFGSNAGKLVIGHGVK

SEQ ID NO: 351883 - protein, 412 aa, unidentified
MEIVVERASGLDVHKASVTACVRLPTDRRGEREEHVQTFATTVSGLLVLSDWLAAHGVTQVAMEATGVYWKPVWAVLEDRFECLLVNARHVKQVPGRKTDVSDAQWICRLAEAGLLRASLVPPKPIRELRNLTRYRKSQIRDRQREAGRLHKMMEDTGIKLDTVASDLLGKSGRAMIAALIAGTSDPDVLAELAQGKLRAKLPALREALQGRFDAHHAVIIGRILAHIDYLDEAITEISQEIEQHLAPLASHVDLLCTIPGIARRTAEVLIAETGGDMSVFPTAGHLASWAGMCPGNDESAGKRRSGRTRNGSKWLRATLIESAKAASRTRDTYLAAQYQRLRLRRGANKATTAIAHSMLVAVWHMLQTGEIYNDPGPDYYTRRDPERTTRRLIAQLERLGHTVTLQPATPA

SEQ ID NO: 351884 - protein, 392 aa, unidentified
MVVSVGIDVSKDKHDCFIVSSEGEVLADAFIIPNTMDGFHYLLQRIRHCTAPQDKIKVGLEATGHYSYNLLGFLLDNGLTTYVLNPLRTNLYRKSLSLRKTKTDRVDARTIASMLLSDAGLKPYTDTAYHNEELKSLTRYRFDKVQERAKLKTSISRLVCILFPELEKLVPTLHMASVYALLSEFPSAHAIASVHLTRLTNLLSESSHGRYGKDTAVIFREAARNSIGSDMPAKSLELKHTIKLIQELTSEIDEIEAEIKSIMDEINSPILTIPGISYNMGAMIIAEIGDFSRFDSADKILAYAGMSPSTYQSGQLDNCYSHMEKRGSRYLRYALYNATKYVCHWDESFGTYLAKKRAEGKHYNVAISHAAKKLVRTIYAMEKSKQSYNLVA

SEQ ID NO: 351885 - protein, 493 aa, unidentified
MIRGGVAAARGTPPTADRDTTHPKENGNGTRMRPPCNVDAGAGRHDRPPTGTRRPERTDRRETNVQPGDIDVWLGLDVGKSSHHACALDHDGNTILDTPVDQDEKQLRRTIVKLQRRGTVLVIVDQPNTIGSLPLTVARDMGARTAYLPGDAMRKAAQLLPGGSKTDRRDARIIASTALRMPETLRDCEPDDETMAALRLLSGWDEDTAHELTRTVNLLRGLLLHLHPALERALAGDRIKSDTALGLLEHHKGPDGLRRAGAARIREYARRHGLKGTAITDAVADAIGEQTVTVPGTRAAESLIPQLVSDLRRLRDRRTDISRQVEELLADAPLLTVLTSMPGIAARTASQILLAIGGDIGRFKDAAHLAAYAGIAPVTRQSGTSIHGERPARGGNKRLKNALFQTAFAAIRLDPGSRAYYDRKRAEGKRHNAAVMCLARRRCNVIYSMLRNGTLYQPGGTHTTTTTPPRTETTPAHAPRPRQDTTHPGTRRT

SEQ ID NO: 351886 - protein, 337 aa, unidentified
MDFVGIDLHKKTISLCVVDQERDVLDRRRFYCSEPERIVRFFEERGAFQAVVEATASYEWLVSLLEPLADRVVLAHPKKLRIIAESTRKSDKLDAQVLAEFLALDMIPEAYRPSKRERAHRILVRQRSYISRRVTSVRNKIRRILSNYNADRKDLFTEAGLVYLSKAAVVEADRFVLDQLLEQWRFCTAHLKEVDKRLDAFAQDAPAEEAEARAILDTIPGVGPVTTDVVLSELGDIRRFRSQKKVCAYAGLAPGQRESAGRTRELRITKEGPRLLRWVLVQAAWRLVDKTARWRSIFEGLVKRRGKKKAIVAVARRLLCVMASMLQSGRRYRAAMV

SEQ ID NO: 351887 - protein, 320 aa, unidentified
MMAQNDLLVVGVDVAKDKVDACIRVLKVRKTCPSTSPGQRELIAWLRKHKVSKAVMEASGGYERVWAKALRRVGIEVRIVDPKRVRSFAQSAGRLAKNDVIDAEMIAWFAETFGEAPGQIDDPAHEELTALVKARRSLIDLRTRLTMQNEHEAPALVEKARARLLNKLAGEIETIEAAIGDKIKSTPDLAERAEIIQSVPGFAEATAVTLLAGMPELGQVSNSVAAALVGVAPYDDDSGKRYGQRHIKGGRRWVRNALYMPCVGAATLNNPVFKAFYQRLIAKGKEPKVALLACMRKLIIILNTMIARRQKWDPSRYVSS

SEQ ID NO: 351888 - protein, 379 aa, unidentified
MHIILHIGMDVHSTNYTLSTCSLQVDTETGSLEEKVIPSIQIEPDYKLVLSYIDRIRSAYPKDTVEFQCGYEAGCLGYSLYHQLTKAGVKCVILAPTTMAVSTKSKVKKNDKRDAEQIAKCLAYGTYKSVYVPSDQDNEIKEYIRMRDDHKLALKKVKQQILAFCLRNGFSYPKNYWTEAHLTWLRSAPMAACFREVLDEYLLTYQNLVDKLERMDKRIEQFAELPAYQEKVKKLTCLIGVKTHTAMATIVETGDFNRFESAERYSAFLGLVPTERSSGDGQNLFGITKAGNSHIRKLLIESAQCYSRGAVGYKSKALKLRQNGNPPKVIAYADKANERLRRKYYHMTQHGKKYNIAKTAIARELACFIWGMMTEHMNV

SEQ ID NO: 351889 - protein, 346 aa, unidentified
MQHVAIDLGGRESQVCVRDQDGQILLERKIATRTLKSFLGRQPPSRVVLETCAEAFAVADEATACQHEVRVVPATLVRSLGVGARGIKTDRRDAQVLSEVSCRIDLPSVHVPSDLARQRRSMCGVREQVVASRTALINCVRGWTRTQLLKVRSGEVTTFPSRVRKAAEQHPDGLPDYIERVLVVVESLNAQIARADKELEQLAKEDPVCKRLMTVPGVGPVTSLRFVAALDEMSRFPTAHAVQAFLGLTPGEHSSSQRQQRTGITKAGPPAVRRTLVQAAWNLRRLKPLDPISQWAAGIEQRRGKFIATIAVARKLAGVLFAMWRDGSTYDAHHVGKLKRQQPDSD

SEQ ID NO: 351890 - protein, 344 aa, unidentified
MRTRKVVDAETKGKSVSLDGFDHSVALDWSIKIMAIAHMGRSVDSLRVFERPASIKELKAYLRSLRGQIVLTFEETTTAQWLYLELRDCVARIIICDPFHNRLLWHGPKTDKIDAQKLCQLLRAGLLKEVFHTTDALYELRHLVSTYEDVVRAGVRCYNQQDAFRRSHAHEGPHASVVVDYLNQSISLYEQTKHQYEQRFEALARRLKPLKLLLTVPGIGTIGAVKILAYVVDPRRFPRAAHYLSYCGLVKHEKLSGQRSYGWRKGRFNHQLKAVYKIAALAVLRTQGPLRDYYDRLIAEGVAEHNARHALARILARITYGILKSGQPFQPGRLTQHREDNANS

SEQ ID NO: 351891 - protein, 267 aa, unidentified
MEPSHYVGLDVSQELTSVCVVDQQGAVVWRGKCASDPDAIAGAIRQHAPRIVRAGLETGLLSNFLTRSLRARHVPVVCLDARHAKAALRVQINKTDANDAHGLAQVVRTGWFREVAIKSMDAQSLRLLLVARAQLVSQRQAIANTVRGLLKAFGHVVRKGAGGLFAGRVREVCGDNPALCAIAEPMLTVWQSLREQIRILDGQLLKRAKGDSATQRLMSIPAVGVIVALAYVAVIDNPERFRRSSTVGAYLGLTPRRYQSGDVDCVG

SEQ ID NO: 351892 - protein, 356 aa, unidentified
MDYRVYCGVDFHARQQTICSLTTEDGVMSTHELNHQNKAELKAIYSQFSGPVLVGLEASGYSPWFEQLLEELGHEVWLGDATEIRRRARRRQKNDRRDAELILDLLVHNEFPRIHRPTPTSREILRMLRYRHKLVKMRTIIKNSLQALSIQSGLSLRARLFTGAGLEQLRRATMSPMMQYQRDQWLQSLEPLNQRILEAANWLQQQAAGDERIERLRTHPGIGLLTGLGLVHTLAPVGRFSNQRKVAAYVGFDPKERSSGEKKRYLGISKAGSRVLRFLLVEAAQTACKGDPELKRFYLRLLHRRGKPKAKVAVARKLLIRSYILLRDGIDYAEFNRRAVAVRLARKAHRPKVPEL

SEQ ID NO: 351893 - protein, 347 aa, unidentified
MRFYNRQHRHYCGIDLHVKTMYVCLLDAAGQVLVHRNVPSTSEAFLEIVAPYRDDLVVAAECMFTWYWLADVCAAEGITFVLGHALAMKAIHGGKAKNDKIDSHKIASLLRGGLVPQSYVYPAAMRSTRDLIRRRLHLVRKRGQLLTHIQNTRAQYNLPAFERRLAYPANREGVSAHFADPSVRKSIDVDLALIDQYDTLIVDLELTIVREAKRHDADAFHRLRSVPGIGKVLALTILYEIHDVTRFNRVQEFASYARLVKCVHQSGGKKLGTGGAKMGNVHLKWAFSEAAVLFLRHTKDGKQILAGIAQKHGKGKALSILAHKIGRAVFYMLSRGTVFSMEKFRAA

SEQ ID NO: 351894 - protein, 346 aa, unidentified
MDHYAGIDVSLECSSVCVVDANGKIARETKVPSEPAALIGWFHSLGFDLIRIGLEAGPLSQWLYAAMKQAGLAVELLETRHVSDAFKAMPVKSDRNDARNIAQLMRLGWFRPVHCKSMSAQETRAMLTARKLIQNKLQDIENSLRGILRGFGLKVGKTTKRNFASRTSELVVGHPALETIAAAMLSVHMALLREFNGLEKRVRAMSLLDAKARLLMSTPAVGPIISLTYASAIDDPFRFTSSKRAGPLFGLTPKKHQSGETDYSGRISKNGDASVREALYEAAHIILTKPIKGCAQLKSWAMRIARRAGMNKAKVALARKLAVIMLRMLKDNVPFNSTAKATAAAV

SEQ ID NO: 351895 - protein, 412 aa, unidentified
MDVIVQRPAALDVHKEQVTACVRSAAPDGARAQEVREFKTTVGGLLVLHDWLTAHGVTHVAMEATGVYWKPVWAILEDDFECILVNARHVKNVPGRKADVKDAEWLCQLLEAGLLRASFVPPKPIRQLRNFTRYRKAQIKERQREANRLHKALEDTGIKLDCVASDILGKSGRAMLDALCQGTTDPEVLANLAKGRLRAKLPALKEALEGRFEPLHALLISSILAHLDFLDEQVERLSDAIEEQLRPFQSAVELLRSMGGIETRTAQNILAEIGTDMSVFPTAGHCASWAGQCSGNDQSAGKRRSGRTRKGSKWLDDALKDAAMGAIRTNDSYLQAQYQRLRPRIGHGRALGAVKHSIICACWHMLTTGELYRDLGGDYFRKRDPERQTRRLVAQLERLGHKVSLEALPEAA

SEQ ID NO: 351896 - protein, 354 aa, unidentified
MPQPNDLSRSLAALEQDSTLIVVIEMSLSSWLVAGIVPGIERHPAKKLEPDEVALLQLLRRWSDEATKAGHVIARTVVAFEARRDGFWLARWLRARGVEAHVIHPTSVAVSREHRRAKTDRLDTELLKRAFLGWLRGERDHCSMAAIPTLEEEDAKRPNRERESLVGERSRIVNRMKGTLARLGIRGFKPTLRKAPEQLERLHTPEDTLLPPNTLAELRRGMARLRFVADQIREIEETRLERLEQQPEEGAHAMVRLLARVIGVGIETADMLVHEVLSRNLRDRRAVARYAGLTGSPDESGIRRREKGLARSGNARVRRGMIQLAWRFLIFQKARWRNGSGLGPRMPALARARQ

SEQ ID NO: 351897 - protein, 339 aa, unidentified
MIACGFDVHRAQITFDLVDHETGELKRGRIAPATREELRRWLAKVNTTRLVIAVEGTTGWRFVAEEVEAAGGQVVLAEPGETRALRGPKRRAKTDRADARWLRELLERGELPVSWIPPVHLLELRCRVQLRQTIADERRAWLQRIHAQLFHHGIAVGGELAKPAARDWLATVELSPAGQAVVETALATVDFLGAQLDALDRELRRYARAHPATQALGRLYGVGDLTAVAIYAAVGDARRFSSARKVVRLAGLDVTVHESAGKRQAGRISRQGPPMLRWAAYEAGLAACRASSPDHADYLALRERLGHKTACLTVSRRVLRRSYHALVAVGDAALEPIPS

SEQ ID NO: 351898 - protein, 480 aa, unidentified
MAKRAAQRSEIKAVPQFLNESLYVGIDIGKGKHLAGFLSKTLLERHERFEACPALVFENSREGFRLLIERIRGLAPLEHVFVLMERTGHYHRALAQYLQELDLPVYVMHVQSRPGGMLKTDKRDALTLANQLYSQLELGVQVANKLQLIRRVMPPTEAAAQLKGLIRHRYELIQESTQRKNKLTAICDEVFPELTRVVKDPNSLFALALREQFPTPQALAAISLTTLVEIRGGARSISEAKLLELQRLAAQSIGVKEVARQRGLVLEQTQLIKELRLLREHVEQLEDEIVSIVEHAREGQILLSFPGIGPVMAATTIAAIGSIHNFPSASALKSYFGWAPVVVQSGSTLDHSRLTHGGTRTMKQMLFLAVFQAIRLPDNEWAKLYERLVKARCPFDEKTQSYVGKKRVIGRVAGQMTEAIYALLKRDAELLSKVLPGQDPPPPMLYDPKVHQRHRQVHYRPLKSTPLPNTITVLHPLPSE

SEQ ID NO: 351899 - protein, 348 aa, unidentified
MDYYAGIDVSLEWSNVCVVDASGKIVREGKVASDRDALIGYFGSLGFSLSRIGLEAGPLSQWLYAAMKQAGLAVELLETRHVRDAFKAMPVKSDRNDARGIAQLMRLGWFRPVHCKSIAAQELRAVLTARKLVQSKLRDVENSLRGILRGFGLKVGTTTARSFPGRIRELVAGQATLETIAQALLAVHATLLREFKGFEKRVRTMAREHDGAKLLMTTPSVGPIVALTYASAIDDPARFKSSKQTGAHFGLTPRKYQSGETDVSGRISKIGDAAVREVLYQAAHVMLTKPLKGCTDLKSWAMRIAKRAGLRKAKVALARKLAVILHRMLADAKPFNPAAKAAAVTAAA

SEQ ID NO: 351900 - protein, 424 aa, unidentified
MKDTAARKRRQIPEGYLVVGVDPHKKRHAAVAITQDFAPQAKFKFDNTSEGLEMMLDRARVEMVKSCCRGVMFAIETGGHYWRNIAYYLDERGIPFRFINQYTLKRRREGKDLNRRKNDYRDSEVAAQLLCTGEFVESVIPQGVYAELRTSHNAYQRLVKERTRITNLVKGLLDALFPEFTQVFKDPGGLTALSVLSTCPIPKVVAGMTEDEFVAAIEARHKGRRLMRKKLGALHYSARRSIGIHAGARSLSSEIAFLVDKLELIRQQIRIMEVTLVKLVDETEEGKYLLSIRGLNYIAVAGLLAELGCFKLYRSAKQMIKMAGSNPTESESAGKKRSKTPMSKQGRPLLRYCAWTAVIPMLRFNEDFRAWAKQRRERPAHANPLSGREVVGAALNRLLRLAFALVKNQTYYQDTGPALIPVAV

SEQ ID NO: 351901 - protein, 352 aa, unidentified
MKEHNTKGIVVVGLDLGDKHCQFCGVNSLGEPVLERRFRQTHAGLDRHFQGKGPWRVVLEAGTPTRWIKKHLEGLGHEVKVVNPRKMRVIYENDSKSDVVDARELAEGGLSRWNRLPVVTLRGDDAQGRLAVIKTRDLLVRSRTALASQARSFLKQEGLCPPKCSPSAAPRRLRPLIPDTHEVALEALLTQIESLTERIKALDKWIEQQSLGNTAIKHLRSVPGVGPITAAAYVWTLDDPGRFAKSRTAGAYLGLRPRRDQSGEKDRQLRITKAGNGLLRRLLVSCAQYILGAFGPDTALRRWGLARAARGGRLAKRKAVVGVARKLAVILHHLWGTGEAYEPFPENTRAAA

SEQ ID NO: 351902 - protein, 440 aa, unidentified
MSVDVVADCEFAAFVGIDWAEQRHVLALQDVQSGRIAIDEVEHTPEAVDAWAMELSQRYQERPIAVALEQVRGSLVFMLTKYRHLVIFPIHPATLANYRKSFRPSGAKGDPHDAGLLLDLLTRHREKLRRINPDIAETRTLRFLVEERRKLVNERIRFSQRLNSHLKLYFPQVLNWFCDMSSQIAEHFLERWPTLEAVQKVKAKTLERFFADHNSRRPERIQTRLEEIRCAVTATHDSAVITASSSAALALVKILRELRNAISSYDSQIEKLAQAHPDFIIFDSFPGAGAALAPRLIAAFGTCRDRYRTAYEIQCYSGIAPVVESSGKQHWVHYRWSCPKFLRQTFHEWALHSMASSTWAKDYYKQQRTNRKSHHSAVRALAFKWIRILFRCWQDRKPYNAALYESARQRRSSESQACASPVNIEWKTRSGFSKLSRAGS

SEQ ID NO: 351903 - protein, 321 aa, unidentified
MHLVCGIDVSKDTLDLHYNTIEEKEVSLRVKNNEKGHLKILEVCGTRTYLMEASGPYYLRLATCLKQEGADVRVENPVRIKRFIQMGLERNKNDKKDARWLYRYARERGGQVWQLPSEEALKCNSVSASIELLTRQKTQLSNQLHSLKQLPGDHRELARSLNKIKAALVKEIKALEQKLAATLKNWNGDQLANLSSIPGLGKRATALLITTTDGFRKIKNHRQLIALTGLAPREHTSGSSIKGKRGICKMGNGHLRNVLYMCSLSAIKHNKACKELYDRLKAAGKKSKVALIAVCNKLLKQAFAIATTGRKYQPDFKSRFA

SEQ ID NO: 351904 - protein, 470 aa, unidentified
MNDNREAGRRRTKGSRQRKSPGLLERIQPDAAGIDCGAEYHYVAVPPDRDPEPVRPFRTFTADLERLADWLAACGVKTVAMESTGVYWIPLYELLEARGFQVVLVNARDVRNVPGRKSDVADSEWLRELHSVGLLRASFRPAGEIAALRAYLRHRETLVHGAATHIQRMQKALVQMNLQLHTVIADLTGVTGQRIVRDILAGVRDPHALAAHRDHRCRASADVIAASLTGHYRAEHLFALRQNFEAYEFLKRQIDACDAAIDAHLTTLAERQAPPPHTLPTPRRTRKPRDNDPRFEIRAPLYRLTGTDLTQIDAIGPSTALQLIGEIGTDMSRWRSEKHFASWLTLAPHNKVSGGRLLSSKTPPSTNRAAAILRRCAMSLGRTATALGAYYRRLAYRVGKPKAITATARKLAILVYRVLRGDLVYRDPGALAYEQLHRARTLRGLRKRANQLGFGLLNLETGEVLDAAVS

SEQ ID NO: 351905 - protein, 373 aa, unidentified
MPYVGIDVAKNKHDVTALNVQGKTVLKPLTFSNNKAGFELLDLSLRQLNQDCLIALEDTGHYAFNLLNFLHEQGYKVYTYNPLLIKKFAKSLSLRKTKTDKKDAHGIALKLLSDPNREQFQHNNRQVELKILTRHIHRLKKKQSDWKVQYTRCLDIIFPELDKIVGKHSEYTYQLLTRYPNPQKRIEAGFDKLIEIKRLTASKIQDILSVAPRSIGTTSPAREFEIIKHYKRLIDKAETCVNDLMAEFNSVITTVTGIGGRLGAVILAEIRNIHAFDNPAQLQAFAGLDSSIYQSGQIDLAGRMVKRGSPHLRWALIQAAKACARFSPAFKAYLKTKLEQGKHYNVAIIHLAKKLIRTLFYILKKSCHLTNKK

SEQ ID NO: 351906 - protein, 314 aa, unidentified
MSTLSKTPRGFIGCDVAKTSIVVFDSRDGRTLTIPNRPRDLSAYAERLDPQCLVVCEATGGHEAALLAALTAAGIPAHRADARKVKSFIRSFGTLGKTDAIDAKALARYGQERHTQLPLWQSTDPHRDQLQALVLTRRDLVAERQACTNRLAAPGAAHVLPYLTKIQRCLTTQIAAIDAAIEALIQAHQPLNAAVRTLRQVAGVGPVTAAAMVGLMPELGSLNRRQAAALAGLAPHPRQSGAADAYRRTQGGRPEVKRALFMAALSAAKHNLNLKVFYNRLLANGKKPLVALTAVMRKLVTICNALLRPSPQLI

SEQ ID NO: 351907 - protein, 342 aa, unidentified
MNSTYHYIGLDVHKRTVAFCEKRADGKTVASGSFSTRREALKQWVEQRTIPWVGAMEATLFSGYLYDALTPHAVEIQVGHPARIKAITAAKHKSDTIDAETLANLLRADLFPQCHMASPLVRELRRVLRYRNFLVRQAVTMKNKTTGLLMEVGAAYDAKRVHQRGYFHELLEDLEEVPPSVVQLLRTTRGGMEMFQGAQKQLVDALVRHDQLRERVERLRSIKSVGEVTALTWALEIDDPARFSNLKKVHSYCGLCSGQQESAGKNRRAPLSKQRNPHLQTVLIEAAKLAPRWNPQLREVHEKALEQDKNRNRATCIVARKLVAYLMAVDRSGQPFKMPDEE

SEQ ID NO: 351908 - protein, 345 aa, unidentified
MPIVGGLDIHRKQITFDYLDTVTGEVKRGQVAPADRAHLRAWLARFAGCDDAAFAVEGCAGWRYVSEELAAAGVAAHLGEPADTAALRGRKRRAKTDKTDARHLRALLADGRLPECWIPPAQILEYRALLETYHDLRREHTAWVQRIHAVFFHQGAPALGEGTLRTEQGLAGLRAAAAVHLSPAGQLQVATALDMIAATEARLGPLRHQLRDAAAHLTGAKVLAARLYGVGPLTALALTCWLAGEGRFSSSRKAVRFTGLDITVHSSDRKGPPGRLSRQGPPVLRWAVYEAGKTHARASAPDHAYYAAVKDRKNSKRAALSEARKIVRQACHILTELGDDALTAA

SEQ ID NO: 351909 - protein, 372 aa, unidentified
MTSIIYVGMDVHTTNYTLCCYSMEDDRFFAEVQVEPDAKNILKYLARIEKQQSRDCRIVCGYEAGCLGYSLYHQLHAHGIDCVILAPTTMMTKPGKRIKTDRRDARLISKCLAFHTYSPVYIPTEVDDAVKEYIRMRDDANSALARVKQQIIAFCIRHGKIHDGKSYWTNKHLEWLSSLDLGNKILSEVLQEYLIRYYQLREQVDMYDMRINELAQAEPYRQKVEKLGCFRGIAAHTALSFCVEVGDFRRFATAQQFASYLGLVPGECSSGDKQQYTGITKAGNSHLRKLLVETAQVFGRSATKSGKSVALKERQAKCDSLTVAYADKANARLKKKYFKIAMRSKVNIAKTAVAREMACFIWRMMTDNISCA

SEQ ID NO: 351910 - protein, 309 aa, unidentified
MKQSVVYIGIDVAKTHLDVAWAGTFRRWPNERSGHAALVRWIKQSATPVQLICEASGGYEQALLESLEKSEVKVTLVQAVRVRQYARAAGILAKTDRIDAKVLAAFGSAIQPQPTPPLSAEQKRLRQYEAQRRHLSRTLVAEENRLAQLSCAELRSLSRSLISKIKTQIKTLDRGISDLIAQDQTLCVKAQKLTAISGVGVRTAALLLAQMPELGQLNRRQAAALAGLAPFNHDSGSVRGKRAIFGGRPALRSGLYMAALSAARFNPILSNFYQRLRAKGKPHKLALTAVMRKLLLALNQTLKPLPCSA

SEQ ID NO: 351911 - protein, 457 aa, unidentified
MNRKRTKSKLDRAMPMVHPNAAAIDVGATMHMAAVRADRTPEPVRSFGTFTTDLHRLVNWFKECGVETVVMESTSVYWIPIFELLDARGFTVFLVNARDAKHVPGRKTDVSDAQWLQRLHSYGLLRASFRPKGQIAELRAYVRQRERLLEYAASHIQHMQKALTEMNLQLHHVVADITGATGQRIIRAILAGEHDPKALAHLRDYRCHASAETIEKALTGSYRAEHLFALEQALALFDAYHEKVSACDVRIEAVLKELSIGRGRGSGSLPSSRRRTDQTNAMAFDVRAALFALLGKDVTQINGLGPYLSLKLIAECGDDLSAWPSAKHFTSWLCLAPSNKISGGKVLSSRTRRSGSRASALLRLAAVTVGRTDTALGAFYRRLSARIGKAKAVTATARKIAVLFYNAVRHGMEYVDPGASFYETRYRARVVHNLHRRAKAFGFVLQPAEPTSSVAVS

SEQ ID NO: 351912 - protein, 351 aa, unidentified
MPAPSQTSVAVVGIDIGKNSFHIVGLDDCGAIVLRQKWSRGQVEARFANMPSCLIGMEACVGAHHLSRQLKGLGHDARLMPAKYVRPYSKGQKNDFRDAEAIAEAVQRPTMKFVATKTADQLDLQALHRVRERLVSQRTGIINQIRAFLLERGIAVRQGQRFLRVELPRILATPAEVLSPRMRQLIESLASDWRRLDERVGSLSGEIEDLARGDAGCERLMSIPGIGPIISSAMVAAIGTGDGFSKGRDFAAWLGLVPKQISTGDRTILGSISKRGNRYLRVLFVQAAWVVLVKVNPNRWQGHGLKPWIETAKKRLHHNVLAIALANKLARIAWSVLARGRAFETSKLQVA

SEQ ID NO: 351913 - protein, 366 aa, unidentified
MKKVSTAAANEIRNFSEQKLTIGLDLGDRSSWYCVLDATGEVVLEQRLSTTAKAMKEVFRAMPRSRIALETGMHSPWVSRGLSELGHEVIVAHARNVRLIGESRKKDDRLDARTLARLARIDPQLLCPVKHRSARAQADLTVIRARAGLVRARTALINTARGLAKSYGERLRGCNPRNVNPEKASGLSPELQSALEPLLAAVESLSEQIREYNERIEQLALQSYPQVALLKQVKGVGTLIALTYLLTLEDPHRFRKSRDVGCYLGLQPGRRNSGQSEPQLHISKEGDPYLRTLLVQGAHHILGPFGADSDLRRWGLKLAERGGKNGKKRAVIATARKLAVLLHRLWVSGEVYEPLRNSSQLMPAAA

SEQ ID NO: 351914 - protein, 371 aa, unidentified
MNTIVYIGMDVHKESHTLCCYSYETDKVEYKQTIPADCKLILKYMERVRERYEGEVSFVCGYEAGCLGYSLYHQLVDHEVDCKILAPTTMAITNTNSIKTDRRDAANIARCLAFHTYSEVYVPDEEDNSIKEYIRMRDDQKKMLKSIKQRILAFVLRNGKKFEGTKSYWTIAHVKWLNSLELGGVNDETLKEYLITYEYLVEKIERLDKRIEELASGEKYTEKVKNLGCFLGVKTHTALSMVVEIGDFNRFVKAQKFAGFLGLVPSENSSGDNINRYSITKAGNSHLRRLIVEAAQSYTRGAIGHKSKALKSRQKDCAPEVIAYADKANERLKRKFYRMTLHNGINRNVATTAVARELACFMWGMATGNIA

SEQ ID NO: 351915 - protein, 343 aa, unidentified
MQTVTTIGLDIAKSVFQVHGVDAAGQVVVRRQLKRRYVLAFFEKLPPCLVSIEACASSHHWSRELQALGHTVRLMPPAYVKPYVKRQKNDATDAEAICEAVTRANMRFVSTKTPEQQCGLVLHRTRHLFIRQQTAVINAIRAHLAEFGIIAPVGRHGVEELLNVVADPNDKRVPEIARACLLAFGAQLRRLKEQILEFDRMIRAWHRSSETSRRLDDCPGVGPVLATALVATVADPKSFRSGRNFSAWIGLVPKQHSSGGKNRLGSISKQGDRYLRGLFVAGALAVIRYAKIHGTKHRPWLTALLARRPTKVAAIALANKIARMAWAMMAKGERYKEPVALAA

SEQ ID NO: 351916 - protein, 417 aa, unidentified
MSEDIEWFVGFDWASQTHVVCLLDRAGRAIGERQVAHGGADLAELGDWLVAKSGAPPERIGVAIETPHGPIVETLLERGFGVFAVNPKQLDRFRDRFSVAGAKDDRRDAQVLADSLRTDRRAFRLLAVDDPVVIELREWSRIADELTQENTRLGHRIRQQLWRYYPQMLQLGDDLTADGFLALWECAPTPAEAAKIDEASLARLLKAHRIRRFDAAEALRVLRQKPLRAAAGASEAAVAHIRLVAERARLINRQIKEAHRQLDALCARLDQPKEGEAGQRCERRDVAILRSLPGVGRIVLAALLVEGTEPLRRRDYPVLRVLSGVAPVTRRSGKARLVVRRTACNARLRDAVYHWARVAMQVDPDSKRRYADLRRRGHSHGRALRTLGDRLLAVACAMLASQTLFDPNHKAARPAAA

SEQ ID NO: 351917 - protein, 409 aa, unidentified
MSGHWWAGIDWSWGLQDFVVIDRDGATVLHLRVEESHEGVTQILNALRGLNPTSHRFSRRQVPIAIEDGNRLLVAELRRHRQPVIVVPPAVTARYRGRHTAAVSKSDRTDAELLADIIRQNPGRRRPLPETSDRAQAIAVLARAQEFHADTARRATVRLRSHLGMYFPAAADAWSGMQHGLRRAEARAVIALAPTPRHAAALTKRKLYDALAAAGRTRLLDQEATRLRALFAEPQLRQQPQTEAAMGERTRHYLAELDAACLRAEQMAAQTDAAFSSHPHYAIYRSFPACGPLIAARLFAEIGDDPARFLTAKGLRAYAGTAPITWSSGRSHAVVHRSVCNRALKRAAHQWAFGTLTRSPGCRALYDARRERSDGYAAALRHVANRLLSGLHHCLRTDQSYDEAAMFRT

SEQ ID NO: 351918 - protein, 317 aa, unidentified
MENHLQSTWIGIDVSKYHWDIVVAGQPQMHHWSAGQEGCQQLRQLLVQHQVTHACLEATGGCERMLVDFLREQGIAVSVVNPRQIRDFARAQGQLAKTDRLDALVIARYAVLMQPKETQKPSENEQKLRSLRTRRQQVSDALTREKNRRGTQRDEQVRQSIEEAIDFYQRQLEQLDQQIQQLIKADPQFQERSSLLVTVPGVGTTTAAALLADMPELGTLNRREVARLAGLAPINRDSGTLRGKRMIGGGRAAVRQGLYMATLVATQHNPIIREHYQQLLQRGKAKMTALTACMRKLLLILNAMIKTKTDWKCSKET

SEQ ID NO: 351919 - protein, 350 aa, unidentified
MLIIGCDYHPSFQQIAFVDTGSGELGERRLVHREEAEQFYDQWKGQSLQVRVGMEASGHARWFERLLQDLQFELWIGDAAEIRSKRVRKQKTDRQDAQLLLRLLMEDRFPRIWVPDAENRDLRQLLWHRHRLVQMRTRVMNQLHVVALNQGLRRKKALWRAAGRQELESIALAPWASRRRQDLLDLLDQLTPKIQQLTGALEEEVEKRPVARRLLTHPGVGPLTALAFELVIGMPERFHCGKQIASYVGLVPTEESSGNRRRLGHISKQGNVLLRFLRVEAAQVTVRSQPEWRSRFFHLAMRRGRKIAKVAMARKLAVHLYWMWRQGWDYGQLHKFGSHAGEPGNLDGGK

SEQ ID NO: 351920 - protein, 371 aa, unidentified
MKKKILYVGLDVHKKSIDVALANGRANGKVRSYGKIDGSLDALDKLIGKLQSKDCVLEFVYEAGPCGYPIYRHLESKGHKCCVVAPSMIPKRSGDRIKTDRRDAINLVRLYRAGELSCIYVPSEEDEAMRDLVRSRDDFKRFERKARQRLLAFLLRHGLEFAGKKNWTKTHMNWLAGLKLSHRSQQIVLKEYVDAVKDCTQRVERTTEQIRQLVPDWSRADLVKAYQALRGVSLIVAVTVVAEIGDMGRFKNPKELMAYLGLVPSEHSSGSRLRRGSITKTGNSHVRRVLTEAAWTYRMRARKTTTILKRQQGLPKSICEISWKAQTRLCTRYQRLFAKGKSKQTIITAIARELSAFIWAIDKELQQKTTT

SEQ ID NO: 351921 - protein, 313 aa, unidentified
MKQSFVGIDVSKNTLDVHVLPEDVSYSFAYEPQKIKALIRKLKQLKPVLIVLEATGGYEISLAVQLSAAKLTMAVVNPRQVRDYARAIGKLAKTDQVDAYVIARFAQDVKPAAREQLTLKELQLKELVMRRQQLIDMRTAEKNRLTRAHTPQILQEIQEHISELNARINAIDEQLHNDIKNNPSWNQKLEIIASVPGIGANTAHSILFCLPELGKLNRRQIAALVGVAPMNRDSGMMRGKRSIVGGRAVVRKMLHMPTLSAVTRWNKRLKTFYCHLRDQGKKHSVALTACMRKLVIMLNVMVKNNQVYDPKFC

SEQ ID NO: 351922 - protein, 367 aa, unidentified
MTIVAHAHPFVVGVDTHAKNHALSILATPAGVQVDDGEFPTTAAGMARAIDWVARRTGGDLAVLWVIECAASFGSQLAHAVTAAGYQVVEAARMSAKANRGVGKSDPLDARRIAAAVLPLELDRLRHLRKDDGVRVGLRVLIAARDHMTGERTATVNALIALLRVLDLGIDARKPLTAAQIIEVSKWRTRTEDIGAAIARAEAVRLAKRVIVLEAELAENTKTTTDLLRRSPARVLLDKPGIGSVTAAVAMAAWSHDGRLRSEAAFASLAGVNPIPASSGNTVRRRLNRGGDRRLNQALHMAVVVRTRMDPATKAYVERRLTEGHTKKEIRRCLKRYLARQIYRTLTAVTRADEALAAVTSATPIPA

SEQ ID NO: 351923 - protein, 269 aa, unidentified
MTFRPHALHLKAELFVKSSRVHVRDDGFTRCNFHLKFFIMVYRGIDISKSSFVAAYPSTNGNPTKTFPNTTAGMRELIGTLAVAEHHCVMEATSNYGCCCTCYIRTVLPSVLPPPKKQIKHFSRMMMPVTKTDEKDAYMIAMYGEKMNPPIYKMPSQATIRILTTEGFTYFDNAKQLSRFIGICPTYQQSRTSVNIREHINRNDDERLRSLLYIAFWTALRYNSRECYIRLKANEKPFKVALIAVTNKLVRPVLTITTINSIYRWICPG

SEQ ID NO: 351924 - protein, 418 aa, unidentified
MSYKVAGIDIHKKVLMVVVATAGNEVADAAGEALEFECRRFGAGASERKHLCSWLRERNVSEVVMESTAQYWKPVWMDLEPHFGKLHLAQAHSNRAPKGRKNDFRDGKRLTRRLLADELMLSFVPASEQRAWRTITRGKQQLVRDRVRLQNQLEALLEEARIKLSSVISDLLGLSGRRILQAMAAGQTDPERLAALGDDRLRCSQQELVDALNGSLEPIHCQVLKLYLKRLELLDEQIGTLDQMIATALVQHQDAVIRVAEIPGFGVDSAQQLIAEMGIDAEAFPSAGRFTSWAGLCPGTEVTAEQNHSSRSAKGNRFVRRILTQAAQAAVKKKGSHFQSLFRRFLPRLRYNGAIWAIAHRLGRLVWKVLHDGIRYIEQGQETNPKAKKRRAQKLAQALRKLGYAVVLTAIAPEPATA

SEQ ID NO: 351925 - protein, 371 aa, unidentified
MNKSSTTLYVGLDVHKDSIAVAYAPEQRGTDVVSLGNVGTRQCDIDKLIRTLKAKASRLVFAYEAGPCGYWLYRYLTRKKLTCLVVAPSLIPKRPGDRVKTDRRDAITLARLLRAGDLRPIYVPAVQDEAVRDLSRAREDAMHDLKSAKFRLKALLLRQDIRYTGRANWGPAHLRWLAEVVCPTPAQQIVFQEYVRAVSEQHERLQRLEAELREQVQDWRLYPVVQALQALRGVQFTVAVTVIAELGDLTRFDNPRQLMSYLGLIPSEYSSGAQRRQGGITKGGNSHARRALVEGAWAYRYPAKVSRHLQLRLEGLPKAATDIAWRAQVRLCKRYRQLAARGKHRNQVVVAIARELAAFMWAIARTVPVAD

SEQ ID NO: 351926 - protein, 421 aa, unidentified
MQEQASTFAAFIGIDWADRKHDVCMQVPGAPGPEAFVLEHRPTAIDAWARQLRERFGGRPIAVCLELAQGPIVSALLEYEFFVIFPVNPSTLAKYRNAFVPSGAKDDPTDAAFALELLLRHPEKLAPLRRESENMRALRRLVEARRDLVQDRVRVTNRLTFTLKEYFPQIVEWFRDKETDVFAAFLERWPSLQTAQRARRDTLVSFFHAHSVRRVATIDRRIDAIRSERPLTSDPAIIEPALAVVATLVPQLRALSTGIARLDADIAARCEALPDFKLFNDLPGAGPVFASRLLAAFGEHRDRFADAAAVQKCVGIAPVTERSGNKHWVHWRWACPTFLRQTFVEWAASSISHSFWARAFYDSHKAKGSSHNATIRALAFKWIRILFRCWVDRTPYNESRYLSALQKRQSPLLKFAAQPTP

SEQ ID NO: 351927 - protein, 408 aa, unidentified
MNSAFQFFAGIDWGSDKHRVCLISHDGQILAERWIEHSGDSLAELAAWLRQHTSDSPSLLAAAIEIPRGAIVETLLEHGFAVFSINPKQLDRFRDRYSPAGAKDDRRDAFVLADALRTDMHCFRAVKLDQPAMIRLRELSRLDDELAQEQNRAVNRLREQFHRFFPQLLQLSECADEPWLWALFELAPSPQAAARLTEARIGRLLQQHRIRRLTAAQVRAVLKTKPLTLAPGAAEAAAEHALLLLPRLRLLHQQRADLGRRINAMLNELATPAEDKHEHRDAAILLSLPGLGRKIAATMLSEASQAIADRDYHALRCYSGAAPITRQSGKKKIVLMRRGINQRLRNALYHWARVSIVFDPQSKKRYAAMRACGHSHGRALRGMADRWLKTLTSMLTTRTLYDAQRRAA

SEQ ID NO: 351928 - protein, 376 aa, unidentified
MNQDSTLYVGLDVHKDSIAVAYAIGLDDVELLGKTGTTQIEVDRLCKRLQSKARHVHVVYEAGPCGYDLHRRLIGKGFDCMVCAPSLTPRKPGDRVKTDRRDAFKPVRSLRAGDLSAVHVPTVEDEAFRDLARAWSSARDDLKQARQRLKSFLLSHGVRYCGLANWGPAHRRWLSALSFDSAWQQLAFNEHRRTIEDRLAQCDRLEAALHEAVVSWRFYPVVLALQAMRGIQFTSAVGLVSELGDLSRFEHPRQLMAWLGVTPSEHSSGSKRRQGSITKAGNSYARKLLVESAWSYQHPARVSKDIQSRQEGIPKPIVDRAWDAQLRLCGRYRRLVARGKSRQVAIIAVARELAAFIWDIGRMGMALAVPQSEQPA

SEQ ID NO: 351929 - protein, 315 aa, unidentified
MEQNLWIGVDTHQASIACYQNGKFKEFKTTKDGFKKALQWAGKEALWAIEGAYCFGKPFSSYLIDNGCKVYEVNPILTKSYRKSLSICGQKNDYGDAKIISLFAKNVKLQEVSLQTIKLKEKLTARELLVKQRVDLINSIKNLYAIRGETIPFNRLNTLKAQKWLSAQDDTIISSFGNIIKELNISIKAIEKEIEILLPEKALKLTSLTGVDTIRAAVIYTELKDKISTKEALASYAGVAPVENSSGKSLKHRNNKGGNRKLNSIFYQISLNQSIYDTQGKIYYERKLAEGKSKRHARKCLARQLSNIVWKILKY

SEQ ID NO: 351930 - protein, 362 aa, unidentified
MNKHIFVGIDLGDKNSVARIGVDLEKSERFGFVNTNAGRARLILEVKRRSEQMGAAVVVMAYEASSCGFVLRDQAQAAGIDCKVLAPTKMEKSVEHKRNKNDDRDADDVLEKLRGHVLAGNRLPTVWVPELETRDDREVLRTRLTLSERQTQIKTQIQMLLKRHGLEKPSDLGSTQSKQYRHWLESLSQWESLGWGTRQSLASLLRQLSGIEAEMENLEKLIRQLGSQPRHKPIVEALMKEKGVGLLAALVYRTEIGQARRFHRGRHVGKFVGLTPTSHESGQQKDRKGHISRQGPPRLRKVLCQASWVHVRHDPHSREAYQRLVAKNPKKKKIALVAMMRRLAVRLWHRMREAESLQQTSS

SEQ ID NO: 351931 - protein, 356 aa, unidentified
MPSVPEIFDAVVGVDTHRDTHTAEIAAVTGRVISTETFPVTSAGYTQMLDWIQMHRPGQRVLVAVEGTRSYGLGLTRALQSAGLMVVEAEQPTRKKRRGKGKSDLIDAHYAVLTALAMDNTDRLPIPRADGDREALRLLHNAHRDLTLGKTRQINQLKDVLRGGDDTDHQLASRKITDKLLASLTRRRPTTGADRLASVRQQEIRRLAIAIRQAIIELKAFRKQILVLVDALAPGLTSRPGIGPITGAQAILSYSHPGRCRNDAAFAALAGVSVLEASSGQTVRHRLNRGGDRALNHAIHTIAVTRMRSDPRTRAYVERRTAQGKSTRDIRRCLKRYISREIYRELNRVMTLPAAA

SEQ ID NO: 351932 - protein, 425 aa, unidentified
MNKDVLSTLFVGIDVSSASNYFCAINFEGKHILDFSITNDLPSSEIAVERIFNALQENDLKFVTLVLESTNVFSFHIANFLASNNSLFNFNSKVFVINPKESSNFRKTYSDMDKTDPQDAFVLADMARCGRINQQPYKASQLFALQRLTRQRFHLVKTIMREKAYMMSNIYLKFSSLYISKKEDEPFSNMFGNTSKSVIADFTPDDIVNMSDEDMINFIMDKGKSRFSNPAENVKLLKKIARDSYRLDKLAYDPINVAISSSFNTINALEDNLKVIDKAIEKNVKGLCDNEFTILKSIPGIGDVYAAGIISEIGSIEFFKDNNALAKYAGLTWRKTQSGYFEAETTRMTKTGNKYLRYYLIEAVSSVKNYSSEFKEFYTRKYNEVSRGAHKRALALSARKLVRLIFGLLHHNQLYSATKLDNRSN

SEQ ID NO: 351933 - protein, 399 aa, unidentified
MKKHVSLELRVSVDVGCRSHNVAIGLSSGEILDEFSIAHEPEGFRHFFSRIEKQERKFGCPVAVAMEGFNGYARPLDTLVRARDYRLFNINNLKLARFKEIFPGAAKTDEIDARKGLELFQLRDHLPVAKDVLQEVYKTPQENDILKRLSRRRRRLVDERVRVLNNLHADLHAVCPGLLEITGEADNLWFLRFLTSTDDLRKLARMREATIRKIPGIGVKYASVILQWQKRAQFSHDVEWVGEMIQEDAVRVMELHDKIQSLEAKIEDVAQGSDMAQTLATIPGFGAVCTAELAGEMGTIERFSNEGSLALYLGMANLDNSSGKQKGSKPPRQVNTRAKAAMMIAVDRHCKKVLESQRYYEKKRAEGKKHNQAVRALGRHLCRVIFKMLKMNRRYILSQ

SEQ ID NO: 351934 - protein, 370 aa, unidentified
MEKQLSVLGIDIAKQVVHLVGMDAHGAILVRTRRYRAQVMALIAQLPPTLIGMEACGGAHDWARRFREYGHEVKLMAPQFVKPYVQANNNDLRDAEAMAEAVTRPTMRFVAVKSVAQQDLQALHRVRARLMQARTALINEPRGRLHEYGMIVPQGAATFRTHVLEKLATEDAKLTPHSRGLFRQLLEELGALEARVATDEAQLARVAQMHPVCQRLLTIPGVGELTATALVAAVSDAAQFKNGRQFAAWVGLVPRQQSTGGKSRLLGISTHGDRYLRKRLVHGARSGLRWVGRQRDRRSQWVQSGMERRGWNRATVALANKHARVAWVLMGTEQVYRTAAASGAPRTPGREKAWQHRTPAARCQERVVMR

SEQ ID NO: 351935 - protein, 366 aa, unidentified
MKKSSTVVNNRVEIFKDDKLTIGLDLGDRFSHYCVLNGAGEIIREHRLPTTPKGIDEVFSKIPTSRVALETGTHSPWISRQLARWGHEVIVAHARNVRLIGGSSRKDDRLDARTLARLARIDPGLLGPVRHRSAKAQIHLTVIRARAGLVSARTALVNAARGLTKSYGERLQKCGTQQMNRESAKGLSQELRDALEPLLAEIESLNTRIAEYDRRIEQIAKEVYPHVALLKQVKGVGTLIALTYVLTLDDPHRFRRSRDAGCFVGLRPGRRNSGMSQPQLHISKEGDRYLRTMLVQGAHYILGPFGEDSDLRRWGMRLAERGGKNAKKRAIVAVARKLAVLLHKLWVSGEVYEPLRNSHKVIGQVA

SEQ ID NO: 351936 - protein, 340 aa, unidentified
MKRYIGIDLHTNSFTCCFLQENGEERIRTWPLQGGGLEQFVKGLAGEDEIAIEATGNAAHFCKMVEPHVSRVVVIAPWQFEVIRRSVKKTDKHDARAIALFLSKDMLPEARVKSEEHVQLSSLITTRDQLVKLRVSLLGKVHGMFVRHGLKIKREVLTSKVGFAREVAKHDWSALERAELAVIENQIHSLHDNIRTLEKEIAAFAKTLPGYDNLISIKGIGPLSAAVMLTHIGDIEDFKNTGKIAAYFGIVPKVSNSNETNNSGRITKRGNKLARTTLVQCTLIAIRYSPYLRGFYENIKKRRGTGKAIIATARKLLNTIFHTLKNGWVFEDFSNFKLLT

SEQ ID NO: 351937 - protein, 342 aa, unidentified
MNGDYDGRQYVGIDLHRRRSVIVRMTEQGEQLGWVRIDNDPVALGLELAKAGPDPEVVLEATYGWYWAVDALQTAGAHVHLAHPLGVKGFAYRRVKNDVRDAADLADLLRMHRLPEAYIATPHERELRELVRHRAKLVALRSGLKAQVHATLAKQGQLPAASDVFGRAGMAWLRSAPLELVYRQRIDSLLELIDAYDGEIETFRTMIANRFTGHRGYRAIQQISGIGPTFAAVFVAEIGDVTRFSRPEKLCCWAGLTPRHRESDTTVHRGPITKQGSKLVRWAAIEACQHTRAGTKLSADRSRIIAARGRNVGIVAAARRLLTLVFYGLRDGEIRALAARAG

SEQ ID NO: 351938 - protein, 402 aa, unidentified
MKYVGIDIGKMNHYASVIDGNNPATKPLKFNSVREGYDSFLAYLAKNDCIKTETIIGLEATGHYWLTLFEKLKHDGYTVYVLNPLQVDSHRNENIRGAKTDEIDCQLIAKVIQFGAGRSTNLPQEDLFALKQLCRFRIDLVKRTTQLKLKIITVLDQVFPEYQTIFKDIFCKTATELLKEYTTADMIAQEDLDKLTQVIRTVSKKQLSEGKAQELHAKAQNTFGIKYGLDAFSLKLRCLIAELEHLDREIALIEKEIEIAVTKQHTSLTSIPGVSITAAGTILGETVEYNKDNPDSRSFLAFAGLDPKIRDSGKYTGRMKMTKRGSPYLRYAINTAAFYAAFNEPMFVKVYKKQVGRGKPKGLALAYVAKKMAYVVAAILRTNEPFVPKGDEEQVIPVTLFA

SEQ ID NO: 351939 - protein, 424 aa, unidentified
MKVTYLTCCGVDVHKSFLVATIVKTTGGIEPSYQKKRFSTFNHSILEFKQWLLENECHDVCMESTGKYWVPAFNLLEDEINVTIANPKWVKAVKGNKDDTKDSKWIGDLFRLGLVKGSYIPCKKIRILREYTRYRYKLVSCRSSEKNRYQNALTVCNVALDSVVSDIFGKSSTSIIDYLLEQADNSINHEEIASKLLRRLKSKEDAVIESIEGYQMTDSQKYRMRLVRAHMDYITAEINDVDSMIESMISSDPDYENAIQFLMTIPGVKRDSAITIISETGIDMSQFCSSKRLCCWAGLVPGSNESGGKKKSVRIARAGVYLKPALVQCAHAAVKSEKSPYYKKKYESLMKRRGKKRAIVAIARMILTAIYQMLSTGEAWNPSDLYKIDMPEALLEKQKTKAIKQAMKLLQREGLYPPPEPIAS

SEQ ID NO: 351940 - protein, 355 aa, unidentified
MNSVRYVGLDVHRDTISAAVLNESGRLIQQSILATRAAAILDFIGGMRGTLHVTLEEGTHSAWLYDLLARRVARLVVCNPRKNALLKSGNKSDAIDARKLAELLRADMLSPVYHGEKSALEVQHLARSYALLTEDTTRVMARIKAVFRSQAIACTGKKLYGHKHRDEYLSALGGGALRRRAELLYRELEAVQQLRRQAKHDMIAECRKYPECKLLCSVPFLGPVRAAVLIGRVQTPHRFRTKRQFWAYCGLALEMRDSGEYRMVDGQVERRKRPAQIRGLNWNHNHELKNLFKAAATSASASNGVFREFYLGLLKKNMRPEMARLTLARKIAAIALKIWKKGEAFDAEHLKLQAA

SEQ ID NO: 351941 - protein, 421 aa, unidentified
MKKAGTGKIGRVKEDTLIVTIDIGLEMNRGYCTTTDGRDVKPFRFDNTRAGLDRLWSMIVVNKNRFRCNEVIVGYESTGPYGEPIGHYLAKKPVTVVQVNPMHTKRVKEINDNSPLKTDDKDPRVLADIILLGHSLSVVIPEGDAAYLRRLNNSRERHVRERTALLNQLQQLVFLLFPEFRTVIKDIQVKTALYILSKYLTPDIIGGLKKEAFGEEIRKRSRGKFRESHAEMLIRLAKDTIGIREGAAGLSMDIRHILIQLDLVNRLIAEIEDEMEIALGRIPYSSKLLSIKGLGTVTVAGLIGEVGDFKKFRTQSEIMKLAGLDLYEVSSGKWKGRRRISKRGRSLLRKILYYAAIQTIRKNGILHDYYTRLTDRGMKRMMALVAVSRKLLRIIHAVVRDDGEYIVNHESVKRQVIKKAA

SEQ ID NO: 351942 - protein, 422 aa, unidentified
MSYCPVAGIDVSKQFSDMCILSPDNKIFAQEKIYHDETSINRANALLQKAERLFFSKPVIVMESTSHYHLILFQFFSEHGYDVIVVNPLQSNSMKDFSIRKRKTDRVDAFKLAMMYRTKTLRPSQIPQTATRALRQPCRHRAELLNDVSSYKNRLTALLDQTFPGYDKVFSDVGGVTSCAVLVRFPTPTILLVEEESELVEVIASASKSGYSFAKKKAGLLISAAQKAQAWGIHSCADETLIVCTIQMLRTLSESVLQIETAIDNLMAQIKEMRNNVSLLQSIPGIGSHSAALLLGEIGDISLFKKPKQLAAYFGLDPTERQSGSFRGTKNKLSKRGSPYARAALHMGVVNSICKRRKDSAANPVLLSYYEKKCKNKPAKVAQAASMHKLVFIVFAVLRDQKPFELKTPEQHAVEQGFVKAA

SEQ ID NO: 351943 - protein, 422 aa, unidentified
MLEETQDEQEIIARVAALDIGKAELVCCVRVPDPKGGSRRVQEVTTYSTMTRSLQVMADRLLDLGVTRVVMETTSSYWKPPFYLLEAHGFQTWLVNARDVKNLPGRPKTDRLDAVWLCKVAERQMLRPSFVPPVPIRRLRDLTRYRIALVSDQGREKNRVEKLLEDAQIKLSVVASDIFGISGRDMMAALIKGERNPQVLAQMARSRMRTKIPQLEEAFVGYFTDHHRFLLAKMLARIDALDADIADVETKIEAQIAPFADAVARLDEIPGVGATAAAVIIAEVGVDMTRFPTPAHLSSWARFAPGVKESAGRKKGTGATGHGDRYLARALGEAAVGASKTDTFLGERYRRIARRRGKKKAIVAVGRSILVITWYLLSDPETRYHDLGSGYYDSRINPERKKRNHIRELEALGYKVTLQPAA

SEQ ID NO: 351944 - protein, 366 aa, unidentified
MKKTSTVRVNGNMIFKGHKLTIGLDLGDHWSCYCVLDEAGRIILEQKVATTPEAMKQAFAKIPRSLIALETGTHSPWVSRLLTELGYEVIVAHAQRVQLITKSNRKDDRHDARTLARLARIDPELLGPVRHRSAKAQIHLTVIRARAELVRARTALVNAARGLAKSYGQRLRKCGTQQVSRELGVGLPAELREVLEPLLKEIESLNERIQEYEVRVEKIAKESYPQVELLKQVKGVGTQIALTYVLTLDDPHRFPKSREVGCFLGLRPGRRDSGESQPQMRISKEGDRYLRTMLVQGAHYILGPFGEDSDLRRWGLKLAARGGKNAKKRAVVAVARKLAVLLHRLWVSGEVYEPLRNSQKAMRAAA

SEQ ID NO: 351945 - protein, 363 aa, unidentified
MDTTTVGPVVGVDLAKTVFELAVAGPDWRIRERARLSRGQFERWFQNRPVGLVVMEACGSAHHWARWLGRLGIAVKLLPARYVRAYVKRNKTDAADAAALLEAARCAEIVPVRVKSLEQQGLQALHRTRSLWMATRTSRINALRGFCREFGIAIAEGSRVGVEQIGRVLADPQTAIPGLLRGTMTLLVEEIRLLEGRIAQLERELTNAAKQSPACATLLTVPGIGLLTATAMVAATGGSVGHFKDARHFAAWFGLTPKEHSSGGTRHLGRISKRGDRYLRMLLTHGARSVLRAASVATTAGKPIDALRQWAVAVQKRSNHNKATCALANKLARICYATLRDQEPYGAARLSRKLERVAFAMPA

SEQ ID NO: 351946 - protein, 481 aa, unidentified
MATTHLKVSRKPVGASIAAGIDVHKYKLAVFVLGRFGRENKPLSQQTFVNSTTGKTELCSYLEAYYPDEIVMEKTGKLSDSVYTAIIKHHGWNKGVPRVTVVSPDTVKRFAGEKHTDPNSAFQLARLGISGLLNAIHIPSLAGQQLKALTRESEKYITQSTRLINIMKDMLSGLGYTLPDFTLTSTWGLALLRLLLAEGIDGNIVKVYELLENGHVDIHPTSKKALLARKAKYLQYAYLSISPFDARTLQRYLVELEMVEALKASNMKHVEALVNETPLLKSRIQAIEHVAGISSPGAAGIIAEIDDIERFTSWKQLALYAGRAIAPDVSGEHAGNPHMTKRCNHHLKKIFKQAGMTTCFVLKEDSDIRRYALRQLGKHPRFPMVACANTSAKIVKIVYKILHDNAIYDPIHDITKKNGGTLSPGQAQLSERTFRLGEARKRANRFRKFTRRTLEELPPGEMRATLSRVLKMLDDALEKGG

SEQ ID NO: 351947 - protein, 316 aa, unidentified
MSVETWFVGIDVAKDRLDVAVHPTDERWTGSNDPAGIEALSEQLVRLAPQLVVLEATGGFEVPLVGALGARGLPVVVVNPRHVRDFAKALGRLAKTDRIDATVLAECAARVRPVVRPLPDEEARELHAWLARRRQWVEMMTADENRRQQAAAPIRRQIEGHLRWRRCQLAALERELTTRVRRSPVWRESETLRRSTPAVGPVLARTLLADVPDLGRLNRQQIAALVGVAPFNRDSGPRQGHRSLWGGRAPVRGVLDLAALVATPHNPVIRAFSQRRVAAGKPWKVVLTACMRKLLTILNARMKHRTAWKPVPALGA

SEQ ID NO: 351948 - protein, 469 aa, unidentified
MAARKQKQKQRRMSAQVVEDEDYQLRYEIVAGIDVAKESAVVCVRVPPAEGRKHRTSHLQAVPATVPAIGELAAELKAAGVQMVSMEATSDYWRVWFVVLEEAGLAVQLVNSSQARNLPGRPKTDKEDARWIARLTEMGMLRSSFVPPPEIRALRVYTRHIWDLTADRARYWQRLEKLLEDALCKLTSVVSKLAGHQTARAVIGKMIEGERDPRALAALGRGRMSNDKLPALAEALSGMRFGPQHAHAAASLLRAIDLLEAELRDLQERVAAHLAAIPASWGVDSDGVTGPEAGRASGAAVLPAADRLDEIPGLGREAAIALIAEIGLDMSRFPTPQALVSWAGLTPAARQSGPRKGRGKKGRGNTYAKRIAVLAAHGAANTDTFLGERFRRLASRPGGGGRKKAGCAVGRSILIIVWHLLNDPAARYRDLGPDWHVRHTDRSRKARNARRLLEALGYDVIITLREDAA

SEQ ID NO: 351949 - protein, 352 aa, unidentified
MTSAKYVGMDVHKDITVIVVLSEAGHVESRTQVKTKAENFRDFFRGLSGRVKVAFEEGTQSAWLYQLLKPLVAEVTVCDPRHNKLIGDGNKSDDDDAETIARLLWVGSLKAVYKGSSEQQQLKEFCRAYENLVEDATRAQNRLKAIYRGRGIDCSGTKIYHPDRRAEYLAKLSDEAAHFRAESLLDQIESLRGLRKQAKNRFLEQARKHPDYPILASLPGFGAVRVGELLAIAITPDRFRTKRQFWPYIGLAVVTKSTSDYKEVEGRIVKMQKVSTRGLNWNHNPRLKQVFKGAAKSALRHAEIEAYYQRLVERGTRPSLARVSVARKLAAITLTLWRRKEKYDPKKINAQS

SEQ ID NO: 351950 - protein, 356 aa, unidentified
MQNNFQSPESVILGVDTHLDIHVGAVISQAGKLLGTRIIQTNQIGYQELFDWAKSFGVLERAGIEGTGTYGAALTRFLIKNGIYVVEVNRPDRSKRRLEGKSDPLDAENAARTVLSGSSKAIPKMQSGACEALRIISVARRSAVKARTQAINQLRSLLVSAPQDVRDKLWKSKPHECVAACINCEVSEYSPLRIALYSTLRSLAKRWGALTEELNELDESLDKLTRKYASNLRSQFGVGPQTAATLLAVAGDNPERLKNEAALASLCGVNPLPASSGKTVRHRLNRGGSREANNALWTIALVRMRSDPRTRIYVDRRTGEGLSTKETLRCLKRYIVRELYPLILSDLTYANRPLLT

SEQ ID NO: 351951 - protein, 309 aa, unidentified
METIVGIDVSKNRLDVAVVPQGEAFAIGNDHAGIDELIGRLKTIGADAIALEATGGFETLAVAELSSAGLTVLVVNPAQVRAYANAIGRRAKTDPIDAAVIAAFVLATKPEIRPLRDAETQALCELVARRRQIVQMIVAEENRLRMALAKQAQKSIKRLLTALRRELESLNADLDDHIRKSPVWRVREELLTSVPGVGPTTARTLLAELPELGSLDRRQIASLAGLAPWTRQSGKWKGKSFISGGRGKVRAVLFMAALVASRHNPSLKAFRDRLVAQGKPKIVAIVATMRKLITILNAIIRDNKPWQNA

SEQ ID NO: 351952 - protein, 458 aa, unidentified
MSQKRRKQIRSRQPEWSLNLEVVHPNAAGIDIGNESHYVAVAPDRDPNPVRQFACFTEDLHRLADWLKSCGIVTVAMQSTGVYWLPVYEILTEKGLEVFLVNARHTKNLPGRKTDVQECQWLLQLHTFGLLNNSFRPPEEICVLRAYWRQRGEHVAAAGACIQRMQKVLTEMNVQLANVISDISGLTGMAIIQAILNGERDRYKLAVLADPRIHATREEIARSLEGNWRKELLFILQQERNLYQIYQQQITECDTALAAHLQTLNDKVEPGSQPPAAKPNKRAGSNAPTSFDMRGELYRISGTDLTQIDSINIMTAQTIIAEVGIDMSRFPTEAHFASFLGLCPDNQITGGKVFRRGTRHVQNRAATALRMAASTLWRSKTYLGAKFRRLRARLGAPKAITAMAHMLARLVYRMLRYGEQYVDKGINYYEEKYRDNEIRSIQKRAKQLGLQIALSPAP

SEQ ID NO: 351953 - protein, 359 aa, unidentified
MVKNSMLIVGLDLGDRCSYLTILDQDGELIEESRLPTTKASLQGKFSNLQPCRVAMEVGAHSRWASQLLKDLGHDVLVANARKLRAIYHNPRKGDRADAETLARLARLDPALLSPIHHRSPQAQADLAVLRSRDAVVRSRTLLINHARDIVKASGSRLPSCSADSFAHKVAPDIPESLRPALAPILDTIASLTQQIRAYDRKIEELCSERYLETKLLREISGVGPLTSLAFILTLENPDRFRRSREVGPTLGLVPRRDQSGDKDPQLRITKTGDPYLRRLLVGSAQYILGPFGPDCDLRRWGLRLAERGGKNAKKRAVLAVARKLAVLLHRLWKTGEIYDPSYHARKHDQALEAIAAVA

SEQ ID NO: 351954 - protein, 324 aa, unidentified
MRSTPIIGIDLAKATFDVALPLDKPGKFQTRSKIANQAKGFAEFLAWRNKHAPVAAVCMEATGVYHEALATFLHEQGITVYVVNPFQIAHFGKSELLRAKTDRADAKLIARFAAAQEGLLPWTPPTPSQRRLRALVLRLEDLLQMKVMEENRRHVTSAPGVLASIERVLQGLEEQIVEIRRMIDEHIDSDPDMKGDRRLLESIPGIGKAASATLLACVGDLRRFADPSKLTAFAGLNSFVRESGKWKGSRAIAKMGPSLIRAKLYMSTLTAMTHNPAIRAFTLRLRERGKPHRVAMVAGMRKLLHIAWGVVRSGRSFDPSIALA

SEQ ID NO: 351955 - protein, 412 aa, unidentified
MEGETVIAGVDTHKDVHVLCLLDGLGRKIWSGSFGADPEGYDRQAEAIGDPGSCMVVGVEGTASYGAGLTRRLVELGYNVVEVLRPKRDKMRPGEGKSDPLDAERAARKAASGRGCSVPKSQDGWVEAVRQLYVARRLAVATSTSCVACAKSMLTTAPSALRERFRGRERPKDLMPLLARGRKAGDALEESVLASLRSVAAVWKEARSQVESLDERIRALLEANAPALLGVEGCGTTTAAALVVAAGDNPGRLKGEAAFSMMCGASPIPASSGKTDRHRLNRGGNRQANWALYEIAIKRMAYDERTRRYVARRTSEGKSRREAVRCLKRYIAREVYHVLMDPNPDGAAPEGPELAKMRKAMRVTQKKAAAELGLSAATLGHLERGKRRSTKLERRYYELLCELERTLPQTAS

SEQ ID NO: 351956 - protein, 315 aa, unidentified
MMNEQTYCGIDVAKRHFVIGLSTQKRTKTETNNPKGIAHTIEYLRRFSVDLIVLESTGGLELPLAKALHRTGFRVVIANPRQTNQFAMSQSLAKTDNKDAKMLAFYTQMLAMRDNVAQQLYIPPTPEQEQLEALVSRRNQLVEMRFAEKNRLEQVHSTQVFSVEQHIDYLSLRIDELDREIEQHLKHFDDTIKKFKDIKGLGTQTIAVLMSMLPELGQYTHKQIASLVGVAPHPKESGNTKWKSRCSGGRKAVRNALYMATFVCVRFEPKLKQFYERLRANGKAFKVAINACMRKLLTILNAIVRDDSQWDAHAL

SEQ ID NO: 351957 - protein, 390 aa, unidentified
MIAIGIDIGKFKHCAAVYESSSSSVLVKPFFFDNNRSGFLSLLETVRPFSESAVFAMEDTGHYSQNLIAFLVEKDFHTVLINPVTTDSFRKSKLKSTKTDRTDAVLIAQVYAAGLPSRTITKKDLLLKDSKQYARMHHDVKEEENRLKNQLQKELDIVFPEYNSLFKTKYSRPYMDILKEFPSARSLAGTDIRNIRKVVNAPHKGRKVSLSAEDLKNLAKKSIGLDSPSAELNIRFLIQKIEMLQEQLAEIDKKIEELSTELNSPIFSIPGIGAITGVTLLGECQDISKFSNAAKLISYFGMDPYQYQSGIYQSAHGRLSKHGSKYARKSLYQAIMPVIRFEPAFHAYYTKKREEGKSHRCAQGHAVRKLLRVIYHLCTQDIPYQASSLL

SEQ ID NO: 351958 - protein, 277 aa, unidentified
MDQVTIIGLDLAKRAFQVHGARGDGGVVYRQKFSRDKILTFLAQQPRCVIAMEACGSAHHWGRAIRDLGHEVRLIPPIYVKPFVKRQKNDAADAEAIAEAAVRPTMRFVAVKSEDQQARAMLFRTRDLLVRQRTQTINALRGHLAEHGIVAPQGPANVKVLGQAIEDGETSLPLLVVELARIYLDQIEGLSKKIAKLQMVTVQEAKREPLTRRLQTMPGVGPITAMAIETFAPPMELFKRGRDFAAWVGLVPRQHSTGGSNFSAGLQKWDSATSGGC

SEQ ID NO: 351959 - protein, 366 aa, unidentified
MKKSITPIGTPVGIDVHKRRCKVVEFHQGEIKVRKPMGNTREDWLELLTELPPDAEIGLEVSTAGYFALSVLEGAGWRERAHWVHTAGIDSNRRQKNDRLDAERLARKLAAHHVDPLPEAWFPPPAIRALRLRARQRCWLALLRTQAKNHVQSLLEMHGLQIPGSDPFGTAGQRWLAAQKLPPPLTESIPQTLRLLGLLEEEIHTSEQYLQAADKQFPELMLIRTIPGIGPILAPVIWSEIGTIERFRSAKALANGTGLVASFYDSGEVKTTGPITHQGSRWLRWAFVTAANVAIQGRNPFARRYHRLRRSKKANVAKAAIAHSLARCVYGVLKHGCPYREDRWGRKVGALEPETRAGARSTKTAL

SEQ ID NO: 351960 - protein, 411 aa, unidentified
METTYQVVGIDVHKSMLAVVVADAAAEGEFQFERRKFGTTESALRQLAQWLAERNVREAVMESTALYWRPVWQQLEGQCDLYLAQAQSNRAPRGRKRDFADAERLLRRHVAGELILSFVPGPEQRLWRTMTRAKHQLTRDRVRIHNQLESLLEDGRIKLSGCVSDLLGLSSRRMLKALAEGERDAARLASLADPKLRATPEQLQDALYAAPTLSTLHRQILGLFLSRLELIEHQIEVLDKSVGQALLAHQDAVLRLAEVPGYGVDSAQQVIAEVGPAAATFPSPEQLSSWVGTCPGREESAEISKNNRSPKGNRMMRRVLNQVAHAAVKTKGSVFQALYRRLVIRLGHNKAIWAIAHRLCRLTWKILHQGVRYLELGTRSNSKTTKARANKLIRELRSLGYQVQLSQMPTP

SEQ ID NO: 351961 - protein, 388 aa, unidentified
MQATNPTSTTWSPSSDQAAIVVSLELSRAVWLVTALLPGGSQKMSRHQVPGGDLAELLSRFAELQRKAHARTGQLARIVVIQEAGLDGFWIHRVLESEGIESHVVDPASIAVSRRRRRAKTDRIDGEALVRTLLAYKRGEPRVCAMVRVPTPDEEDQRCLCRELKTLVSERVRHVNRLRGLFFSQGIADYDPRRPDRRARLDELRTGDGRALPPHLKAVARRELEVIELLDRQIEAVKAERDALLAAAQTAEVPSKAVQMLLGLKGIGSGFAGALWSEGLFRHFDNRRQVAAYAGLAPTPWKSGKIDHEQGVSKAGNPRLRAILVEMAWLWLRHQPGSALARWYHDRVRLGGRLKKVTIVALARKLLVALWKYVTHGVVIEGAALKVA

SEQ ID NO: 351962 - protein, 350 aa, unidentified
MRIIGCDYHPGFQQIAFVDTDTGELQERRLQHREEAEKFYRDLAAQGVKVCVGMEASGHARWFERLLAELNFEMWIGDAAEIRTKRVRKQKTDRQDAQLILRLMLKDDFPQIWVPSWENRDLRQLLWHRHRMVQARTRIMNQLQAVALNEGLRCKKRLWREAGREQLEAFPLAPWASRRRRDLLELLDRLSPTIAELTQTIEQEAEKCPEAQRLRTHPGVGSLTALAFVLIIGRAERFQCGKQIASYLGLVPSEESSGDRRRLGHISKQGNALLRFLLVEAAQVTVRSLPEWRSKYFHLAMRRGRKIAKVAMARKLAIQLFWMMRKEWDYEQVKKFGPHAGQPENRRGVQ

SEQ ID NO: 351963 - protein, 347 aa, unidentified
MDQVIIGVDTHKSNHIAVAIDAHGARLGSTSIPTTRKGYHDLQVWASQFGHVKAFGIEGTGSFGAGLSRDLLAKGHKVLDVMRPLRQLRYLHGKSDSLDAESAARSVLNGQATAFAKTQTGSSEMIRHLKVARDSAVKAKSQAMITLKTLIVNAPADLRDTLDGIRGRITLVRHVAALRPGEITSPIASAKMAMRAIARRWLDLHEEIQAHDQELDRLVREKAPELMKSHGISTMTVAEMLILVGDNPERIHSEAALAKLCGVCPILASSGRTNRMRLNRGGNRQANAAIYRVVIVRLRDDERTKTYAARRTSEGKTRREIVRCIKRYMVREIYRALCVPPTKAGHA

SEQ ID NO: 351964 - protein, 353 aa, unidentified
MSIRTASKIAVAEEGREPARLFASIPGENSKLIRKISKLGSSSEIKCCYEAGPGGYSIYRALTAAGIDCRVIAPSMIPKQSGKRVKTDRLDAENLAHYFRSGDLTEVWVPDENTGSIRNLVRLREDARNARQKARQQLNQFLLRKGLTYHLKTKWNTGHTSWIRGQRFPQEADNVTLADYLKQAEVLDESVTGIEEHLKVYSGHWEQNSLVESLQGLRGIAFVSAVAIAAEVGDLRRFPTAGKFMSYVGLVPSEHSSGRKEKRGSITRCGNSIVRRLLVEASWHYRHKPGNSRAITLRNEELPKRIQDITWKAQERLHRKYMKLLMAGKPKNKVCVAVARELAGFIWAIGQSI

SEQ ID NO: 351965 - protein, 439 aa, unidentified
MPQIWAGIDAGKGHHHCVVIDADGAKLHSARVANDEAALLELIATVTDLAGGDECLWAIDLSSGGAALILGLLAAHALPVVYIPGHAVHHAAKAYRGDGKTDAKDAAIIADQARMRRDLQVLTVEDETRIELRALTAHRKDLVCDRTRAINRLRGHLLEYFPALERAFNYSASRASLLLLTGYATPDAIRKMGESRLARWLRTQGCRTAVATAAAAVTAAKSQQSVLPGQAIAAELARRLALDVIALESRIAGIDQLIAARVESSRAAELLRSMPGFGPLLAAEFLASTGADLSVYVSADRLAGVAGLAPAPRDSGKISSNHHRPRRYDRRLLRACYLAAMVSVQQKTESRGFYDRKRAEGKSHKQAILALARRRLNVIWAMFRDDRPYDPPSLSDGAFEESAAPSLAPKARQTVAATAALAVDHMGLGLVVASYAARE

SEQ ID NO: 351966 - protein, 488 aa, unidentified
MADRKKSTFERLHSKSMNRQQRKQLQRQFDADSPELIIVHPDAAGIDIGSASHFVSVPPDRDQEPVREFGSWTADLHRLANWLKACGIKTVAIQSTGVYWIAVHDVLEKEGLEPYLVNARGTKNLPGRKSDVQECQWLRKLHTYGLLRKSFRPAEEIRQVRTIWRLRDRVVKEAGRAVQHIQKALTMMNVQLANAISDVSGVTGMAIVGAILQGQRDPHELAKMRDPRIQASEEEIAHSLEGNWQPDLLFELQQVMDAYDFHRKQLASIDDELQKYLSARPTREAVGEAAVKIDTSQLPAKQRKKMNKKLKAMRKQKDNRPDFDLGAELARLMGVDLRIIDGIDVMTAQTVYSELGPDLSAFPDEDAFASWLELVPRDDITGGRKVKTKKRPTNNRVTTALRDAAQALVRSDSYLGARYRYYTGHLEGLKGVKAMAHYLACLVYRLLTKGPAWVDRGAAYYENKRRDREMVNLTRKAAALGLKLVPTA

SEQ ID NO: 351967 - protein, 387 aa, unidentified
MQTKTPATTVETTVRDHSNTLFASLELSKAKWLVTANSPGEEKFSKHVVEGGDGASLLVLLARLKAKAEQRHGVAVKVVVIQEAGLDGFWIHRLLVQSGIESYVVEAASIAVARRHRRAKTDAIDGVSLLRTLMAWARGERRVCSMVRPPSPEEEDQRRLSRERGTLLKERIQHTNRIKGLLSGQGIRGYDPLKPDRLDRLDALRTGDGRPLPDRLKAEIRRELARIDVAATQLATVERARDALVRTQTTEPTNPSALLIKLKGVGIEFASLVWLEGLFRSFTNRRQVAAYAGLAPSPWQSGGTNRDQGISKAGNHRLRHVMIELAWFWLRHQPDSALSRWFHNRVGTAKGRVRRIAIVALARKLLVALWRYVTQGIVPEGATLKAA

SEQ ID NO: 351968 - protein, 338 aa, unidentified
MTVYLGLDVAADSFTASLFEAPGRLKAAPSAFGNSEAGVRALEEWLCSMGFGQEQVHVCLENTGVYSEALCYVLHGRGYRLSLLDPRALWKAFPDGQPKNDVRDAGKIGEYGFRYADKLTLWHPREEIIEQIGVVLSTREQLVRQKTASLNARSTLARKRVQTPAANRALDATIAHLKEQITGLDKELQRLIRSHPTLINGASLLMSAPGVGWLLSGHFIVLTRGFAEIPMYRTLAQYLGISPNEHTSGTSVRKKPRSRRYGPATIRKLLHLAARSIGTHEASYRSYYAQKVGAGKPKSLVINNIANKLLKRLCAMLKHQQPYNAAHRPIDPRSLALA

SEQ ID NO: 351969 - protein, 357 aa, unidentified
MSGAYEGRQIVGMDLHRRRSVLVRMTDTGEHLETVRISNDPEYLRQVMARAGEAPEVVLEACYGWYWAADTLAELGAQVHLAHPLGVKMFSYRRVKNDQRDAADLADLLRMGRLPEAWIAPPATRELRGWVRHRAKLVGLRSSLKCQVHGVLANAGVWVPMTDLFGVAGQQLLAELQAGSRLPLESRSRLDSALRIIGALEFEIDLFAKLVSGRLRSDPGYLAIQQIPGVGPVLAAVFVAEIGDITRFAKPEQLASWAGLTPRHHESDTTVHRGRITKQGSRLVRWAAVEAVQRVSAHTRLGQHRDRVAARRGRNIGVVAAARELLTLVFYGLRDHHIRALDRPPAPATPAATAPAA

SEQ ID NO: 351970 - protein, 366 aa, unidentified
MPSVAHLGPTHLGLDVHKDTISVAILAPDRDGPDVDRIPHDEPSVRRLVGRLGDPRLLRACYEAGPTGYELARLLASMHVHCEVIAPSLIPKAPGDKVKTDRRDARRLARLHRAGELVAIRIPTAQEEAVRDLCRARADLVEDRTRARHRLSKFLLRHARPWRGGNAWTLTHERWLLAQRFDQPALAATYAHYRAVLDVRDAQLEAIEADLATWYDAAPFADAVHRLAAYRGVTRLGALTLASEVCDWRRFARAAAFTGFCGLVPSEYSSGTSTRRGHITKTGNAHLRAQLVESAWAYQHRPAVGVDLRERQRGLDPAVVARAWAAQLRLCGRFRRLAARKDSKNVVVTAIARELAGFLWAEMLVA

SEQ ID NO: 351971 - protein, 316 aa, unidentified
MTALCVAGIDVSKARLDVFVLPQRIWLGFDNAQRGIAALRKQLQRRGVERVVLEATGGLEYPAARALSDAGLQVARVQPGRVRGYRSFLGKRAKTDALDAELIARFALAMPEEDIRPIPSQQAEAIRSLSARRRQLVELLVQEKTRLKMTRDRFVLQSLRAVIAALSAERVRVETVLAQAIAEDPAIHHRSQLLRTIPGIGPVVASVLITDLSELGSLNRHQAASLAGLAPHPQRSGTSLRGDHIGGGRSCVRTALYMAAVSAIRCNPDFKAFYRRLLDAGKPRKIAIVAVARKLIVLANSVVKSGTPWHKTHNLD

SEQ ID NO: 351972 - protein, 429 aa, unidentified
MNYTQNEKIEQVSDTTLVIGIDIGSQTHYARAFDNRGRELTRKVFSFGNDIEGFNTFNQWAEKLKTENNKTKVMIGCEPTGHYWFAFAKYVTDHQKELVMVNPFSVKKIKELDDNSPKKTDSKDPKTIAKLVMDGRYSIPYLPDGIYAEIRDLVYSRDRIVKQHNISANRIQRWLAIHFPEYLGIYTRFDSKSGLAVLEKAPLPKDVIALGIDGIRKIWHDKKIRGRGVTEDRAKILMEAAHNSVGLDGGAGTRSELYMLLEEHRLWTSQLEAVEKVIEETTLKVEHVEKLLAIKGVGIITIAGFIAEVGDIRRFKSPKQIQKYAGLELVENSSGKHKGRSRISKRGRRKLRRILYQVMIPLLASNKEFREVYDYYVTRVKNPLKRRQARVAVGCKLIRVFYAVLTKGMDYDRTKMKSDIHRDSELIAA

SEQ ID NO: 351973 - protein, 429 aa, unidentified
MIMGFTKPIEHFNLQRKKVITMNTLYVGIDVSSKSNVVYLMLPNGDKHSNFSIANSHKGSTQLVKRILSALTSHSLDTVLIGLEATSVYGDNLVYFLREDATLASFNRKIHVLNPKQVKKFHDAYNDLPKNDYVDSFVIADCLRFGRINKEVYLGDYRYKALQNLTRARFFAVQNLVKEKQRFMNVLFKKYSTMTQEKVFSDTFSTTALAVYDEFESAEALANMDLQELTDFIMEKGKNRFPDPDAVAKAIQKAARSSYRLPKTVNDSVNQVLSISITSMKALESQIKELDKAIAAQMELLPNVLISIPGIGPVYSAGIMAEIGDINRFDSQAALAKYAGLAWKQHQSGGFEAEVTRLIPSGNRFLKYYLCEAAFSLVRCDKEYSDFYRLKYKGVNRCQHKRALALTARKFVRLVFRLLKDNRLYCQAK

SEQ ID NO: 351974 - protein, 397 aa, unidentified
MAKLWAGIDAGKAHHHCVVIDADGNRLLSQKIPNDEPALLELIANVLKLGDGDEVVWATDLNHGGPALLIAMLVGHGQNIPYIPGRIVHHASKLYRGDGKTDAKDAAVIADQARMRRDLQPLRAGDEISTGLRLLTARRADKSADRVRAINRLQAQLLEYFPALERAFDYSRSKAALFLLTRHRTPDGIRRAGQARIHAWLKKHGARSSAAVAAAAVEAAKSQHTTVPAQHMGEQIVAALAREILSLNEELASLDALIGEKVTEHRHAQVLLSMPGFGPVLAAEFLGATGGDLTVFESADRFAGLAPAPRDSGRITGNHHRPRRYDRRLLRVFYLSGLSALKSCPASRAYYDRKRAEGKTHIQAMLSLARRRLNVLWAMLRDGTTYTPVPALAPIIA

SEQ ID NO: 351975 - protein, 424 aa, unidentified
MTVKTLCIGIDVHLDDLVVRAVDQTDGHEVLERFRVTNNLPGCQTALTTLAQTATQQGYARLQIGWEATGLLWLPFHQQLRASPVLQAFELQPICFNPKLVAHFKDGLVLRHPKNDDRAAWDVAARLRIGELPVSYVPSDFWQGLRRLTRYRYHLARDLTREKLRFQATAFLKCSEWQRVKPFADCFGATSLALLTEVTRAELQALSQLELAERIARHGRGRFDDPAATARAVHDALRTSYPIDPQLDALLTTTLALNAEQLRLIQRLIKRLDQQIARAIAPFPNSLLTVKGLGPVITAGLLAEIVDITRFPDDPQLAQYMGLTWEKHASGRFVSQNARLTKVGNVYLRYYTILGADRLRQFNLEYQAYYWRKYHEVPKHQHKRALVLTARKLVRLIYALLTKNVPYTVRPQTLQHPEGGLTRA

SEQ ID NO: 351976 - protein, 485 aa, unidentified
MTTVYLGIDVSKGYADFVAMNEAGSELGGWGRFDDTRAGHDQVQARVAAVLARAPETQVVVGVESTGGYERNWLGLCHRLSRSGWALTAYRLNPLVVKRYHERQLHRTVTDRVSAAGIAAYLRAGRRRQDQLWVAGELEGALTLYRTVRRLVRLQADLQNQLQALLSRCHPELVAFLRGGLRQWVLALLRQYPTAAALAQADPAAVARIPYVTPAAATRLVAAAAASVAEQTDPATGRAVMVLVDEIAHLRLQVRRLQTELAEQLRADPGVQIIDSIPGFGIWSAICLRLELGDIHRFPRPAELVAFAGLDPQHHQSGDTTINRGISHRGQAGVRAILYPVVRAAIRCNPAVGALYTRLRARGKTDAQAVVAGMRKLLHLVFACWVQGVAFDPSRWEQVAGKAQEMAQRAAMALTPAVAVPLATSLAAPVSKREAKRRKAAHSPQGPCGVAPQKRPEFERPPSAPIIPIRTPSCQGDHAPDFSSY

SEQ ID NO: 351977 - protein, 338 aa, unidentified
MKDIKYFIGLDVHKERTSYCVRDKLGNILTEAETATLYSELEPRLKPYLAYSLIALEASTSYYTLYQTFLKKGYRIKVANTIQLRQLIAKNDKLDAQRLAEMLRLGTLPCSYIPEERIQHLRSMVQMRHALMQEKVRCNNRIQAFLDRNGVVMPPVKAFSKKWKHALMQHLGTGTASMELRYEYNHYVYLEKTNEQADQEIIGYTKTYWKVEYNLLRSITGFGVLLPCYVIAFVHPIERFLSNRKLRRYAGVIPLSKESGDTTSPGRIPKTTSKALLRWALVQAANTIGKTNTRLGRYYRRKKNQKKKSGIAKIAVASTLVDIIYKVLTTKKPYVSTC

SEQ ID NO: 351978 - protein, 345 aa, unidentified
MIIGCDFHPSWQQVSWLDTETGETGEQKLVQALGDAERFDRQIPAPALIGMEATGNCHWLVDLLSELGHELWVGDAAQIRASYVRQQKTDKRDAAHILKLLVEGRFPRIWMPSSAVRDRRQLLLHRHKLVIIRARVKNELQHLCLNQGVQKKHKLWSRAGQQMLRELPLKPWAGRRREDLLRLMAMLDQQIEPLDQAVKTEAQGDKMALLLQTQPGVGPITALAYVLTMGEVSRFPRGKQVASYLGLIPREHSSGGRQKLGAITKQGNRMLRMLLVEAAQSAVRLDPQFRKEYWHRCHQKPKAVAKVAAARKLAIRLYWMLRTQKPYPAVVRIESSPRVPLVGAS

SEQ ID NO: 351979 - protein, 426 aa, unidentified
MSSWIGQSYGGRKALIYCGIDWAERTHDVALVDDSGQLVAKRHITDDAAGYRVLLDLLAEYGDTEENPIPVAIETSRGLLVAVLRTGKRKIFAINPMAAARYRDRHAVSRKKSDPGDALVLANILRTDMHAHRPLPQDSELARAVAVLARAQQDAVWNRQQIANQLRSLLREYYPAALMAVESWKKGLCRPEARELLRLAPTPTRAAKLTRAQLQAALKRAGRQRGIAAEADRLRDILRADWAHQPQLVEDALGRQMLALLLQLEAAAKAADDLEEAVDEAFPEHPDAEIILSFPGLGIQLGARVLAEIGDDRQRFADARGLKAYAGASPITRASGKKSSVTRRWVKNDRLNHVGYLWAFSAPNASPGAKMHYRRRRDDHGDWHASAQRNLFNRLLGQLYHCLQHGRRFDEAVAFPAPVSAVARVA

SEQ ID NO: 351980 - protein, 467 aa, unidentified
MAADEGMTGGTGVPGGEGAEVAEDSTQVVEYAAAIDVAKGSGMVCTRVPGSRADRRRQQTWAVAATFAAVTALMDRLRCEGIQRLVLESTSDYWRVWYYLAEAAGLEVWLVNARDVKHLPGRGKSDKADCVWLCKLNERGMLRRSFVPPQPVRDLRALTRTRARLAQDQARHQARVEKILEDALLKISVVISDLFGASGRRFLDALVAGERSPAALAALGDKRLRATRAELAQALTGRFRDIHAFEIAVHLRLIDAINTEITALDEQIGQQLALVPGTAPACAACGLAGGGHAPGCADGGAEVLGLAGRLDEITGVGAVNGRAIIAELGTDPSQFPTPGHAAGWARLTPRSRQSGESAKPGRTGKGNRYLRGALGQAAMTAARTDTRLGAMYRRIARKRGKQKAIVAVSRVICEIAWTLICDPSARYTELGPDYYSPRSPARQTRDKIREIERLNPGKKVILADAAA

SEQ ID NO: 351981 - protein, 334 aa, unidentified
MEFTHFLGVDISKNTLDISLLSDGKELFCDVITNDLSCMVSTADTLIKEFSLSKNQLLVCAEYTGMYSRPLALACFESGISLWLENPSEIKLSSGVQRSKSDRTDAKRIAKYASRFSDKARLYTPPERDIERLKALISERSMLVVDRAKYQAQLKDQKDYMLEKAYKMKKKRFTVLSKTLSKSILEIEQEMNEIILSNDDLYKHYELLTSIDGVGQQLALKMIVETRCFTRFTDPRKFCCHAGVAPFNFTSGTSQRSRNRVSNRARKDIKQLLHMASLAAIKKDGELKTYYNRKVEEGKSKMSVLNAIRAKLVIRMFAVIKRETTYIKEYKKVA

SEQ ID NO: 351982 - protein, 343 aa, unidentified
MQIIKQSVGIDVSKDTLEICIGSLITTLEHQILYTGQVSNTESGIEQLIGFLRRYCSADSAVHCIMEATGVYHELVAHRLHECETQVYIILPTKAKAFVKSINQRAKTDRVDARLLCQLGLERSLQPWKPADPLWQQVRGLTREREALVNERSRLKNKKHALTTAFIPSTTTLVRLKERITMINAHIKAIEQELRTLFASQQTLQAKVDNICQIKGISLLTVATVLGETNGFNLIRNQRQLVAYAGMDVKIHQSGSVQKKGRLSKKGNVHIRQALYMPALNAAHKNLALSAHYKQLNERQQAKKQGVIAVARKLLILIYSLWKNEETYDPHKNLPIGLTLSTV

SEQ ID NO: 351983 - protein, 459 aa, unidentified
MGMTLGIDLACRAAHVASLAGPDGALVWRGRSFFTRPADLEKLWRDVDCVPAELTVVMEPTRNAWIPVAAWFRRRGAKVVLVPTTQSADLRAYYSKHTKNDRLDSAILARLPLLHPEGLREHVGDGPADPLRRVVKQRSSIAKRRSAIFHRLDAQLELLGPAWYDALGTDYGKATLQFLAHYADPATVIRLGQARLARFLQRYSHGHWREGKAAELIAAAKESLQLWDTDGMDFAELAADIAVEAEQAMMLTAQLADLDERIANLYAEADPAGIIRSAPGVGPVIAGIIAGRLGDPHRFTSLAAVRSYSGLVPKVNQSGKAEHVGGLTKAGDPLLREAMWMAAEQARKLDPQLAAKYKRLMDAERHHGTAVCHIATTLLTRIATSWRNNEPYQIRDLNGTPLTQDEGKRIVQEQYQVKKNPKKQYKRATNHKAGREPQESPSAPTSRPATTKPTSPRAA

SEQ ID NO: 351984 - protein, 261 aa, unidentified
MPSPAVIGLDIAKNVFQVHGADAEGRCVLRRRLRRAEVITFFAQLPKALVGIEACPGGHHWARALRSLGHDVRLIPPQYVRPFVKTNKNDAADAEGICEAVVRPNMRFVPIKSVAQQAAMMLHRTRALLLRQRTQLINAVRGHLAEFGLVARRGARNIRELAELVRDTGSDKLPDAARAMLVLLLEQIREAQLRVQKTEQALEAWAKQSDACRRLMTIPGVGIMSATAIVLAMDDPKRFRSGRHFAAWLGLVPRQSSSGER

SEQ ID NO: 351985 - protein, 392 aa, unidentified
MRIWVGIDVAKEVHWATALGEDGEVVLDRRVPNEPGAIAELIGGLRALGGEATVGLDVVGGVAGLLEAMLAQAGLGLVHVSGLAVNRARQGTRGGESKSDPRDARVIADQVRTRRDLRPVQAPTEVDRGIHLLVGRRRDLVDEQTRRLGRLHDLLASVHPGLERALDLTTKGGLWLLARYVTPAELRRAGARRLVAHLERAGGVPRVEALADAALAAARAQRVAVPGERLAAELVRELAREALAVRDRLVRLDRDLEGALARHPDAALIRSLPGMGATLTGEFIAEAGDLLRFRSADALAAAAGLAPVLRQSGKVRFQRRPAGGNKVLKRVFYQSAFCSLRSPDSRAFYARKRAEGKRHHQAVIALARRRIDVLWAMLQSRRPFQPHHPKAA

SEQ ID NO: 351986 - protein, 345 aa, unidentified
MNKISVMGLDLAKNLFQVHGVNEAGEVLVRKQLTRSQMQRYFARLSPCLIGMEACSGAHYWARILTELGHTVRMMAPAFVKPCLKSNKNDRNDAEAIREAVQRPSMRFVRPKAPEQQAALQLHHSRQLLVRQRVALSNHMRGILSEYGIALPQGVKVISRRLPALLEDADNDLPMLARYLLAELKAEHDQLMERIEQLERQLKAWHTGNDVSQRLASIPGIGVLTATALAATVGEGQDFRNGRQLAAYLGLVPRQASSCGKERLLGISKRGDGYLRSLLIHGARAVIHHIRRRLKAYQPGGNPWVEQLLQRCHVNEVAVALANKMARTAWVLLARNETWCAAHPL

SEQ ID NO: 351987 - protein, 432 aa, unidentified
MKHKMKQKQNQRITRITEKTLVVGADIAKKIHVARAVDFRGIELGKDCVFHNDREGLMKLALWMKELGRAHEKADIVFGIEPTGHYWFPLAAFLKEQGIQIVVVNPHHVNKSKELEDNSQTKSDYKDAKVIANLIRNGKYSEPNLPTKEYAELRILMNLREKVMVSLNQVKARITNWFDRYFPEYPQVFKDWDGKASLMTMHQFPTPEEIVSIGARGVLTHWKTEIKRGVGIKRAEKLYTAATVSIGLTEGLTAARIELATLLQQFDLFIQQEEIIMAEVLQILEKIPGTAQMLSIPGVGVLTIAGFLAEVGDVNNYDHGQQIIRLAGLNLTENSSGKRKGKTGISKRGRSRLRGILFRCMLPMVAKNEEFKALHKHYTTRSQNPLKKKQSIIALCGKLVRVLYTLGTKQKEYNANEVLGPVRQAQLQQSVA

SEQ ID NO: 351988 - protein, 409 aa, unidentified
MNSVGIDVSKGTSTVMALRPMGEVALTPREVVHSAAGLERLGYDIISLGEDTRVIMEATGRYHEPVAAALHEMGIYVCILNPIVTKQSGAGSVRKVKNDKRDARKIAKYGLDNWTDLREHTPMDAVRQQLKLFSRQYNLYMKVSVALQNNLISLLDKTFPGANEIFDSPTRADGHQKWVDFVTDYWHCDCICHNMSVESFTERYRKWCKRKGYHFSEEKALDICASSAGHFTTLPKNANTKLLVTSAAAGLTAVRKPLMKIKAEVIRLAKQLPEYDAVVAMYGVGEITGAQLMAELGDVRRFDNRGAIVAFAGVDPEVNQSGSYQRESNPASKRGSPHLRKTLFQVVDTYLKKSPTDEPVYQFLDKKRAEGKPYYVYMTAAANKFLRIYYARVKAYLNEHCPEQELSER

SEQ ID NO: 351989 - protein, 398 aa, unidentified
MSRIWVGIDSGKGHHHGLAMDADGKTLLSRRVPNDEPDLLKLIGDVLDLADGEQVTWAIDMTGGEPALFLALLVSHGQEVLYIPGRLVNRASDGYRGEGKTDARDAYVIADQARMRRDLRSIRPDDKATIDLKLLTGRRADLVEDRTRAVNRLRGTLLGMCPALERALDVTNTGPLRLLTGYQTPAAIRRAGVTRLTTWLANRKVRNARSLAEAAVEAAERQHTSVPGEKTIAKLVRTMAEEVMALNERICEVDKLIEGRFCEHELADILLSVPGIGAVLGAEFLAAIGGSLDEFDSPDALAAFAGVAPAPRDSGKVSGNLHRPLVYHRRLQRVFYTSALVSVRYDPNSRKFYDRKRAEGKKHVQAVLALARRRVNVIWALIRDRRCYQVTPPATTAA

SEQ ID NO: 351990 - protein, 387 aa, unidentified
MIYVGIDIAKQKHFASVMSTDGEVLLQPFSFTNDHTGFQSILSKLSAFDKESLIIGMESTAHYGENLIYFLFSRGFRISVINPIQTATLRKTNIRKTKTDSVDTYLIIKALMLNQYRLFTQRDLETLKLKNLCRFRQKLIKARTKVKIQLVTYVDQLFPELQYFFKSGIHINACYTLLKEYSDPDKIAAMHLTKLSTLLRKASHGHFNKDTAIALKELASKSVGTKNHTLSLQISQSIIQIELYDEQLQELDSTIKSIMDEMDSVIKTVPGIGSLNGATILGEIGDIHRFNSSCQLLAYAGLDPSVNQSGKFNAHHTRMSKRGSKILRYALINAAWQATLNNKTFKDYYDLKISQGRSHYNALGHVAHKLVRVIHKMMTDNLKFNLA

SEQ ID NO: 351991 - protein, 347 aa, unidentified
MRFYTQQHSHYCGIDLHARTMYVCILDAAGNVLLHKDMAAGPEALLRAIAPYRDNLVIAVECMFTWYWLADLCAEQNIPFVLGHALYMKAIHGGKAKNDRIDAHKIAVLLRGGLIPVAYVYPPHMRSTRDLLRRRLHLTRKRAELLSHIENTLHQYNLPPLHKKIAYKANREGVAELFPDTSVQKSIQLDLDMLDSYDQILPRLEHELSLIAKTHDSDSYFRLRSIPGIGRILGLTILYEIHTINRFPTIQDFSSYCRLVKSAKESGGKKYGTSGAKIGNAHLKWAFSEAAVGFLRRSDRAMLYKARLEKKHGKGKALSILAHKLARASYYILKRKTVFDMETFFQN

SEQ ID NO: 351992 - protein, 342 aa, unidentified
MTSVFRFLEKKITRQQIKQSPEALNQWIGYLRNRFRNGPIAVCLEQSKGALINFLICHDLFVLYPINPKTLAKFREAFRPSGAKDDPDDATKLLEIVANHRNQLTPWKPAEEIVRIIDILARNRRDAVDRRKQVINQLRSVLKAYFPQAIDLVSEDICSPLTWDFLMKWPTLQKLQKVKDATLRKFYHDHHCYKKKVVETRLQLIRQTQPLTSDEGILKTSPIEVKLLCQLLKQYTQSIAEYEQQLKELYPQHPDAEIFRSFPGAGTVHSARLASAFAADRERYKSPESLQKYSAVAPITISSGKSKVALARYKCPKHLRQSFIEYAGQSLQVGRIKSHIMN

SEQ ID NO: 351993 - protein, 369 aa, unidentified
MSDVITYVGIDAHKKDLFIAMLVGQQAKPVAWTVANEPNAVRRLAKKLEREAPGPVHAFYEAGPCGYALQRQLTTPRVQCDVVAPGLIPQKPGERVKTNRRDARKLVELGRAGLLTTVRPPTPEEEAVRDLCRARDDAREDLQRCRHRLGKLLLRRGLQYRVGRHWTKTHRRWIDSLTWPHDAERVVVEDYLLAIDQHETRLKELDQQLAAVAETEPYREPVAWLRCFRGIDTLSAMLILAELHDFRRFPSPRALMAYVGLVPGENSSGEKHCRGRITRAGNALVRRLLVEAAWHYQHRPGVGVALARRRKGQPGRIVAIAEKAQQRLCRRFQYLAVLNKPRPTIAVAIARELVGFLWAALQPALVVAN

SEQ ID NO: 351994 - protein, 357 aa, unidentified
MKYVGIDVHKKMCQAAVMDEEGKLLDDVRFANDPEGIEEFAGKLSTLRDDVKAVVESTGNMWIQIHDRLEEHGFDVALSNPGKTRLIAEAKVKTDKVDARTLAGLLRADMLPTCYVPGEELRSRRELLRHRLNLVKTRTAVKNRIHGLLDKHGLRMPEATPFSKGNIDWLRGLSLSFMDDAILRSDLALLETVSEQVDAIEEKIASIAAEERRVRLLMTMTGVGYFTAMLILSEVGDISRFRGDKAFASWMGLAPSVRQSGERTRIGGVGPGNKRLRWVLVECAQAAVRFDPRFRGLHERVSRRRGAGCAVVAVAHEMARIMYFMLSRNEPYRDVDEGLVERKLKNMSRKAMDGLRN

SEQ ID NO: 351995 - protein, 408 aa, unidentified
MNTLYVGIDVSSKSNVVYLMLPNGDKHSNFSVANSHEGSTLLVKKIYSALTSHSLDTVLIGLEATSVYGDNLVYFLREDATLAPFNRKIHVLNPKQVKKFHDTYNDLPKNDYVDSFVIADCLRFGRINKEVYMGDYRYKALQNLTRARFFAVQNLVKEKQRFMNVLFKKYSTMTQEKVFSDAFSTTALAVYDEFESAEALANMDLHELTDFIMEKGKNRFPDPDAVAKAIQKAARSSYRLPKTVNDSVNQVLSISITSMKALESQIKEFDKAIIALMELLPNVLISIPGIGPVYSAGIMAEIGDINRFDNQASLAKYAGLAWKQHQSGGFEAEVTRLIPSGNRFLKYYLCEAAFSLVRCDKEYSDFYHLKYKEVNRCQHKRALALTARKFVRLVFRLLKDNRLYCPAK

SEQ ID NO: 351996 - protein, 400 aa, unidentified
MYKYFLGIDISKDSFDFSFTDETEKVLYKDHYQMDMTDFTKLSNYLAPFSKDEILIVMEATGIYHLTLLSYLLEQKLNVSVVNPLFIHAFTKSMTIRKTKTDAKDAHIISIFAKRNYATIRLSSACDIETIKPIVREKEKLTNQMSVIKTDIKSIVNQVFPEMLKNTNIFLKSSLNLLLQAPSKRIIRNLKEKKIAGYLACDTKRGAKPKVDAKEILLMAKNSIGINNQSLEKILVSKIKQLEFLQTQLDEFNEIIETFVDEHHHDDMDLLTSIGGVGKPSAASFLTELGGINNFATYKQLTAFIGTDPTIYQSGTSVNVKGSISKRGNSHLRRTLWHMARAATVWNETLKEYYDKKRSEGKTFKQSVIAVANKLIRIIFSMLKNNTKFQASYQPQGVKA

SEQ ID NO: 351997 - protein, 344 aa, unidentified
MQIHSVGIDLGKTTLHLVALSAAGKVLLRKKFTQKQLIAFTANIQISLIGMEACSGAHFLGRALQEQGHDVKLIPAQFVKPFVKSNKNDFLDAEAIAEVVDRQNMRFVPIKTDDQLDLQALHRVRDRLIARRTSVINQLRAFLLERGMTFAKTPAKLKVAMPEILENVDANLTPRMRTLVSLLWNEWKDLEQQIVAMNEEVEQIASADPACRRLRQIPGIGPLVATAIVAAIGNGAAFHKGREFASWLGLVPRQHSTGERRDCSASASAVTDTCARSLCTVLDPPFSASSENDPRSAHGSMPWSCGRRSTWSSPRQPTSSPVSHGRFYPADKSIAQRHAPCLPD

SEQ ID NO: 351998 - protein, 460 aa, unidentified
MAASEETEDSGPFVERVAALDIGKAGLVACVRVPSETGSSRRRQAVSEWATMTSDLLTLADHLVCQGVELVVMEATGDYWRSPYYVLEAAGLRCWLVNARHVKHLPGRAKTDRLDAVWLCKVAERGMCSPSYVPPRPLRQLRLFTRYRTAAVRERAREMNRVEKLLEDTQIKLSVVASDIFGVSGRAMLDALVAGERNPAVLAELARSRMRPKKAELARAFQGSFEDHHRLLLGMMLGHIDRLTADITTLDEQITAALAEIEDNTGPRADPGTGEIPPGAPTVDHGDGQPGAGGLSLAERLAEIPGIGLPTAHAIIAEIGVDVAAFPTPGHLASWAGLAPKTRESAGRAKPSRTAKGNRYLAGALGQVVLALARTQTFYGARYRRIRASRGPQKAIVAVSRSVLTTIWHLLHDPNARYHDLGPDYYQRRKDTRKQAAGHIKRLERLGFQVTLTPPEAPAT

SEQ ID NO: 351999 - protein, 423 aa, unidentified
MKIVRPICCGMDIHKNLIIATIATTDSSNITTYKQREFSTLNYDLFNLLNWLKANHCFDICMESTGKYWIPIFNVLENELNVFLTHPKYVKAIRGKKTDKKDSKWIADIFKHDLLKFSFIPPKNIRELREISRYRIKLVNMRSSERNRYQNCMTVSNISLGSVFSDPFGKSSRAVMKAVITNQSDLLNEDNIKKLLYRSASKKSKLVIQAIEHSHIESDQLFKLNIASNHMDMLSQYIEDCEVEMVKRCSSFFNLVLHISTIPGISLMSAMIILSEIGIDMNQWISEKELISWAGLSPANNESAGKKKSVRISKAGQYLKPILVQCALAAIKSEKEPYFRIKYNQIKKRRGHKKAIIAVARKLLISIYHMVQTGEIFNPSDYDCIEKTVIKKQSITTSQALEHLKSLGVDISTIIIPETVNLV

SEQ ID NO: 352000 - protein, 340 aa, unidentified
MNHYAGIDVSLECSSVCVVDASGKIICEDKVASEPEALISWFASLGVSLARVGLEAGPLSQWLFAAMRQAGLAVELLETRHVRDAFKAMPVKTDRKDARGIAQLMRLGWFRPVHCKSMAAQEMRAMLTARKLVQAKLHDVEMSLRGILRGFGLKVGKTTPRRFEGRIKELVAGHPSLEGVAAALLAVRAVLRREFDTLEKRVRSMAREDARAWLLTSVPGVGAIVALTFASAIDDPARFKSSKSVGAHFGMTPKKYQSGETDVSGRISKIGDGGVRTAVYEAANVILTRPVKGCASLKSWAMKLAKRAGMQKAKVALARKLTVIMHRMLADGTTFTNRPA

SEQ ID NO: 352001 - protein, 420 aa, unidentified
MKVVYQTCCGVDVHKSFLVATIIKTTSGVQPSYQKKRFSTFNNSILEFKKWLLDNSCRDICMESTGKYWIPVFNLLEDEINVTIANPKWVKAVKGNKDDTKDSKWIGDLFRLGLVPGSYIPCKEIRILREFTRYRYKLTSARSSEKNRFQNALTVCNVALDSVVSDIFGKSATSVIDYLLEQSGNSINHEEISSRLLRSLKKKSESVIESIEGYQMTDSQKYRMRLVYAHMDYITSTISDIDSMINSLVEPYDNAVKLLCTIPGVDRNSAITIISEIGTDMTQFSNSKRLCCWAGLTPGNNESAGKKKSVRITRAGVYLKPALVQVAHAAVKSDKSPYYKAKYERIMKRRGKKRAIIAIARMILTAAYQMLSTGEVWNPTDLYKIDMPEPLKEKQKEKAIKQAKKLLIAEGIIDESLLAS

SEQ ID NO: 352002 - protein, 336 aa, unidentified
MTIIRVGLDTSKHVFQVHGVDENEQPVLRRQIRRGAVEKFFAKLPSTRIGIEACGASHHWARLLRGLGHEVLLMPPQYIKAYVKRGKNDKIDAEAICEAMSRPTMRFVPVKTAEQQAALTMLGVRDLLVKQRTMLINAIRGHAAEFGVTAAKGPKQITELLARLASDEHVPGLAREMIGVLASQLNGLDIKLKALEARLMTWHRQDQTSQCLATIPGIGPIGGVSFALKVPDAKAFRSGRRFAAWVGITPREDSTAGRQKLGRISRAGDEDLRRLLVIGATAVIRAAKPGRTAPWLMGLLARKPKKVAAVALANKMARIVWAMMVSGETYRRPAQA

SEQ ID NO: 352003 - protein, 367 aa, unidentified
MKKVSTRAAAQSRNILQQKLTIGLDLGDRNSWYCVVDEAGQIQREQRVRTSGEALQEVFGALPRSRIALEIGTHSPWISRLLSALGHEVIVANARKVRLIGESRKKDDRLDAQTLARLARIDPELLYPVKHRSVQAQADLTLIRARAGLVRARTGLVNTARGLAKSYGERLRSCNVRNLNPEKAESLSPELQAALEPLLNAIESLSERIVEYNERIENLAQQSYPQVARLKQIKGVGALIALTFLLTLEDPHRFGKSRDVGCYLGLQPGRRNSGESEPQLHISKEGDPYLRTLLVQGAQHILGPFGPDCDLRRWGLKLAERGGRNGKKRAIVATARKLAVLLHHLWVSGEVYEPLHNSSRTTVGAAA

SEQ ID NO: 352004 - protein, 353 aa, unidentified
MHTHQKSSDAVAVIGIDIGKNTFHLVGLDKRGAIVLRIKVSRSQLERRLANMPRCLVGLEAGCGSHHIARQIRALGHDVRLLPAQYVKPFLKGHKNDYRDAEAIAEAVQRPTMNFVAIKTPEQSDLLSLHRVRSRLVGRRTAVINQIRGFLIERGITVRQGPAPLRKALPEILSSPTEALSPRMVRLIADLSEDWRRLDERIEAVSTEIESLAENDGSCQRLMTVPGVGPIISSAVVAAIGNGGGFRQGRDFGAWLGLVPKQESTGDRTKLGKISKRGNKYLRTLFVQAAHVVLIRRPAAAMRGLWPWIERAAKRLAHRNLLAIALANKLARIAWAVLARGRDYEPRITINAA

SEQ ID NO: 352005 - protein, 343 aa, unidentified
MDYFAGLDVSVKETSVCIVDDAGKIMREARVASEPEALLQVLTNTIYRFQRVGLEAGPLSQWLYSVLAEAGLPVICVETRHMRAVLKAQINKTDRNDARGMAQMMRAGLYRPVHVKTLRSQKLRVLLTHRKLLQSKAIAIENELRASLRNFGLKVGMIGTMKFEARIRELVERLPDLSVLVEPLLIVRRVVREQLGILHRRLLAIVRDDDVCRRLMTIPGVGPVVALTYRVTVDAPARFRKSKAVGAVFGLTPAKYQSGENDRTGAISRCGDEMMRIMLYEAAQSMLVRTAKWSWLKAWAMKIARHRGMKKAIVALARRLAVIMHRMWVDGTEFRWTRELPVA

SEQ ID NO: 352006 - protein, 352 aa, unidentified
MAATAQSAIAVIGIDIGKNSFHVVGLDGRGAIVLRQKWSRGQVEARFANMSPCLIGMEACVGAHHLSRKLKALGHDARLMPARYVRPYSKGQKNDFRDAEAIAEAVQRPTMKFVVTKTADQLDLQALHRVRERLVSQRTGIINQIRAFLLERGIAVRQGQRFLRVELPRILATPPDVLSPRMVRVIEGLASDWHRLDERIEVLSSEIEELAKRDAGCERLMSIPGIGPIISSAMVAAIGTGDSFSKGRDFAAWLGLVPRQISTGDRTILGKISKRGNRYLRVLFVQAAWVVLVKVKPTKWQGHGLRPWIEAAKKRLHHNVLAIALANKLARIAWSVLAHGRAFETNKLLAAA

SEQ ID NO: 352007 - protein, 337 aa, unidentified
MKYSGIDLHSNNSVLVVSDEVDRVLVRRRVPNDAAAILALLAVHREELVGVVVESTYNWYWLVDALQAAGYRVHLANTAAIKRYEGLKHSDDEDDAAYLAHLLRLGILPSGYICPPAARAVRDLARKRMQLVRNRTAQVLSVENLLSRQTGAGMRSRVVQRLTAQAVEGFGFDQDVQRAMCANVAVIKTLNREIDKLEQRLHQCVRLRPEFRLLTSVPGIGQTLATLIMLEVGTIERFAAVGNFASYARCVDSARISNGKKKGQGNVKNGNAYLAWAFVEAANFAQRYCAEARRFYERKKARTNGIVATKALAHKLARACYHMLKEQKPFDVKRCFA

SEQ ID NO: 352008 - protein, 338 aa, unidentified
MARFIGVDLHKNSFRVCYYKSETDYEFKTYHVSKTGLEAFKKSLKKSDEVAVESTGNTGFFTREIEGAVKRIRIVNPIQFKVISNSVKKTDDEDAMTIAKFLSKDMIPEVRMRSKEQAQISSLIGTRDKFVKLRTALKNKVHNILNANGIVSRTEMFSGKKGLEQVLNMDLEDSYRFEIELIVDQIKNLNEAINRIDDELKDRGSKLDGHKNLKSIKGISDTGATIFINTIGDINDFKDEKALFSYFGIVPRVHISNETIHYGRITKMGNKIARTALVQSTLVAIRYSPYLRSFYDKIKAKKGGGKAIIATSRKMLGIIYKTLKNNWVFEDFTQFKLA

SEQ ID NO: 352009 - protein, 331 aa, unidentified
MKIREIIGIDISKLDFHAFIHTTQVFTRFENSTKGFKALLKWVAKNSPRKQSQTLFVLEHTGRYSHNISYHFSANEIEFALVPGLEIKRSLGITRGKDDKIDAAKIALYGYRLRDEIKPTKLPGKQLDKLKRLLTLRDRMVRQRAGYKASLKEDEHVFCEEEAREIIEHQEDIIKALSSKISQIEKQMDDIIKANKKLNKLFKLLTSIKGVGKVTARYTIVYTAAFTKFATWRKFASYCGVAPFPHRSGTSVKGRNKVSNLANKKIKSLLTMCVCSAIQSNSEIKAYYERRLNEGKSTMSTQNNIRNKLLARMFAVVKRGTPYVDTMKYAA

SEQ ID NO: 352010 - protein, 316 aa, unidentified
MTKAERFVGIDVAQATLEIAVRPTGDSWQVANDEVAFGALVDRLRELAPTLIVLEATGGIQLPVVGALAAAGLPVVAMNPRQVRDFAKATGKLAKTDRIDAQVLAHFADAVRPEVRPLPDAATRELAILVARRRQLLEMRVAEQNRSRGVPPRIRAQIREHITWLNRCLAELDRELGQLVRSSPVWRERVDLLRSTPGVGPVLSATMLADLPELGSLSHKQIAALVGLAPLNQDSGKKRGKRVVWGGRASIRGALYMATLVATRHNPMIRAFYQRLLATHKPKKLALTACMHKLLTILNAMVRSQTRWAPPVAFVG

SEQ ID NO: 352011 - protein, 460 aa, unidentified
MARKKTKCNVQELKIINPHAAGIDLGATKHWVCVPPSGEDNFICSFSTDTQSLNELADYLEEHGITTVAMESTGVYWIPLFELLEERGFEVILADARTISKVPGRKTDVLDCQWIQQLHSYGLLKGAFRPGNDIIKFRSLTRMKKTFVQEQADWLRRIQKELDQMNIRVHRAVSDITGKTGMSILEAIVSGERDPAKLAEFRDCRCKKDKLQIERELTGNWREEHLFNLEMALDTYKFLNNRIELLKDKIFQLLKKYAKKAGRDKVSAPVAANKNKAKLMMRRGQESMRQTLFSFCGSDLTRIDGVSVETAEVVLSEIGFDVSKFPTEEQFISYIRFSPGMAISAGKKVRSRKKTSFGSSRLREALRNAAQSLNSSKTALGAYYRSIAFRKGSSVAIFATARKIAQHIYRMLCYGTDYVDIGMQAYEERNRMKRIRNLKNNAKSLGFDISSIIDAKLKTS

SEQ ID NO: 352012 - protein, 436 aa, unidentified
MGQRTVGIDLAIRGDHVARILDDGRPHGKPIRFRLTPDSLGAMVARLRGGVMEPTGMSWFPVACWLSGAGIKVIRVKGQRVRALRRYLSEHAKTDAADAHVLGAIPLFGGVPADPVYVPDAERHALQRLTRQRERLEDEIAAIKRRLLDLVRWACPAVEAVLPDFRTNLSLAVLHDLLDPADVIKARRPALLRFVAAHASGNHPHGGPFAENLVDGLKAAAAETRRLHGAAVDFSRLQLEVALEIDRMRLIEGQLSRLGREIEALYGKLHPSDALRTIPGIGDALAPLVLGVLHEARRFGSLHRLRGFCGLFPRTSSSGGADRPGQAITQSGNNRIKRALYLAADAARRLDPELAAVYWRLMVRKGHHHKQALCAVATRLVNRIGKVLRTGDAYVLRDTDGTPISAAEGKAIVAERFTIPPEIRNARRRHRQETAA

SEQ ID NO: 352013 - protein, 415 aa, unidentified
MTDSLQRGRDTLDSVVIGADPHKHSVTIEVVDDRERVLHKGRYGTDTDGYRQMLAVAKRYPKRRWAVEGCNGIGRHVAQRLVADGETVVDVPAKLAARARVFDTGNGRKTDPADAHSVAVVALRTSHLNEVRVDDELVALRLLVDRRDELGRTRTQTVNRLHRLLLELVPGGARRFLSAAQAQAMLDGVAPTDVAGRVRHQLATELLAEIVVLDAKMKASDKMLRKAVAATGTGLLDLYGIGPASAARILGDVADVARFPTRARFASWNGTAPLDASSGEQERHRQPADQPGAAHHGHRPDPPRHRRPRLLPPPGRRRQDHDGSLAGAQTTTVRCGLPPARRRRGQGEPGRTHGGDCGIQRGRPNSDGRLFGPVTARAQPRAYPPQPRCRRCGPAAEGRTSPTPANPRHQEHPHS

SEQ ID NO: 352014 - protein, 313 aa, unidentified
MNILKQTVGIDIAYKTFDARFGTIDTQQNTAISQAKSFKNSPQGFNLFLKWLKFLVLSQDIPLVFVMEATGVYYEHLAHFLVQKGFQVAVVLPNKIRNYAKSLQSKSKTDPIDAATITRFGLERQLSPWTPPSESMKTLRDLCREYHCLKANCTQIKNQLHALNSSFKPNRESFKRKSQLFKFLERQVTFITKELRALVKSDPVLSQHLKQIKTAKGLGDITILTVLAETRCFQLISNHKQLTSYAGLDIVFNDSGMKKGKSSISKKGNTFIRKAIFMPALSACRANPQLKQFYQRLLAKGKNKKLAIIAVAR

SEQ ID NO: 352015 - protein, 367 aa, unidentified
MAKRITVVGLDVHKETIDVVVAEPGAEGEVRHFGKIGGDLASVDRMVKQLRGAGGRLHFVYEAGPCGFHLYRHLRAQGLECTVVSPSMTPKRSGDHIKTDRRDAEALARLHRAGELRAIYIPGPDDEAFRDLVRAREDAVTSHSRARHRLKALLLRHGVRYPGRAAWTFRYRQWLSNVKFPTPAQQIALQEYIDTIEEAERRVERLTAQIRELLPQWNRAPVVAALQALRGVSMVTAATLVAEIGDITRFSNPRQLMAYLGLVPSEYSSGAKTRRGAITKAGNSHVRRVLAEAAWAYRGQARVGQALLSRQNHLPRPIVAIAWKAQLRLTTRFRRLTARGKSQPKIATAVARELTGFVWDIARHVAA

SEQ ID NO: 352016 - protein, 315 aa, unidentified
MTTERRYVGIDVAKATLDVCTSDGEAWQVPNADGDMDALCTRLRALQPELIVLEATGSYELRAAAALGAAGLQVAVVNPRQVRSYARSIGQLAKTDRIDARVLARFAEAARPEVRPLPDDETRALEALVVRRRQLIGMLGAEDARLKTAPAVTRKLIKAHIGWLRRQLAQLDSDIDGTVRRSPLFRAKDDLLQSVPCVGDATSRTLLALLPELGTLDEKQIAALVGVAPFNQDSGTLRGRRRVWGGRARVRTALYMAALVGSRHNPTLKALYGRLRTAGKPPKVALVACMRKLIIILNAIMRDGRPWDPTRAAVA

SEQ ID NO: 352017 - protein, 340 aa, unidentified
MSIVTIGLDLAKQVFQVHGNDAVGKAVVRRQVRRKDVESFFRDLPPCLVGMEACASAHYWARLIRALGHEVRLIAPSRVKAYVQRGKKNDATDAAAIAEAVTRPHMSFVPVKSEEQQAILMLHRTRELLVRQRTMLINALRAHLAEFGIIAARGRAKVKTLIEELPEVAIPALARSALIDLAGQIGACDQRIEALEKEIVAWHRSCEASRNLATIPGIGPITASVLAATVTDPGLFKNGRHLAAWLGLVPRQNSTGGKDRLGGITKAGNTYIRRLLVLGATSVIRFARDKAPGQAMWLKSLLERKPPRLASVALANKMARIAWAVLNREEVFRETCPATA

SEQ ID NO: 352018 - protein, 385 aa, unidentified
MSELNDLSRSLTSLEQDKTIIAVIEMSQSSWLVAGIVPGIERHPLKKLEPSEEELVRLLMRWRTEATKNGHTITRIAVAFEAGRDGFWLARWLRARDIETYVIHPTSVAVSREHRRAKTDRLDTGLLKRVFIGWLRGEPDHCHMAAIPTLAEEDAKRPNREREGLVRERTRIVNRMKSCLARFGIRNFKPTLRKAPERLATLATPEAVPLPPNTLLELRRDMARLRFVMDQIKEVEEARAQRLEQAPQEKAHAMVRLIARVIGVGIETADMLVHEILSRQLRDRRAVARYAGLTGAPDESGNKRREKGLAKAGNARVRRGMIQLAWRFLVFQKDSALARWYRARTESAGKKRKTMIVALARKLLIALWRLVTIGEVPAGVLLRAA

SEQ ID NO: 352019 - protein, 417 aa, unidentified
MNTPVSNVSNVSMSGTLIALDIAKKHHDAKIRYPDGRTSYLRIENTLEGFNRLLALTASPHEDIIAAFEPTADYHRNIAWWLHKQGVKCHLVSSVRCARAREMLFKTWDKNDRKDASVIMYLLEQGLSSPFYDPLANGIIDIQEISNTYHQVTLARTRCLNSLVNHYLTLYFPEAEQFLHMSRAEWFCQFLLQFPTPSCITSLNRDVFVKQSWDVVGRKQYKQQFLEHLYDVAANSIALPLPDDSLAVATFRLQLHRYIELSAQRLQLEKQAEKYLQERSDYQHLRTIPGIGPVIALMVIAESGDLTRFAHYRQYLNFCGFNLSAIQSGQKHSGYRLSKRGNARLRYAFWLAATVAVRTRENSFRYKYERYIRENGDKPDQKRKAMTAVATKVARVAHAIVKQDIDYKGYYEISHGT

SEQ ID NO: 352020 - protein, 399 aa, unidentified
MIGVGIDISKNKSTVSAINDTGEIIMKPQEFKHSQNELNKLIQWIKDQEDTVFVVMESTGHYHYPVLKKLYEEGIYVSVVNAYLMKKYGDIEIRKAKTDRKDAIRIAKYAIEKRFSLKKYEGEDEKYNDLKFLSRQYNQIVSIRVKAKIQFNNLLDEIMPGINKILTRTTGNSSKILYDFVEKYEHFDNIKRKGEQKFIKEYSAWSKKKGYRNGAIKALKIYELAQNSITTRSANNSTYIALRNCIKILRETEESSNSILTQMQTIAYTLPEYKIVRELKGVGDKLALRLIAEIGDVRKFTSAKALNAYAGNDAPPHQSGQFEGTKRHISKRGSSSLRKVGYEIMMALKVTKPTEDNAVYEFMIKKESEGKAKNVAKMAALNKFLRIYYTRVMNLYKTL

SEQ ID NO: 352021 - protein, 338 aa, unidentified
MFYVGLDIHAKRISICALNETGQVVHRSQVRSIEEMMRVLGSLPDRFEVCYEASCGYGHFHDLLRPLAARVLVAHPGQLRLIFRSKNKNDRNDAERLAKLLYLGETPTVHVPSLQVRTWRELINCRSQVIAKRTRAKNTVRALLRSAGVVPPKQPGLWTKKGLAWLRQLTLPTPSQHLRRDLLLEEIETLIRQVRRIEQQLNHQAQQTPAVAQLRSIPGVGIRTADAVAAFVDDPHRFRQAKAIGRYFGLVPCQDQSGDKNRLGHITREGASVVRQLVAEAAWQALRRSPTVRAYFERVQRGDPQRKKIALVATAHYLVRVMWALLKRGTVWEEKMAS

SEQ ID NO: 352022 - protein, 339 aa, unidentified
MFYIGLDVHAKQITVCVLDHHGQVHDRCQVRQITQLLARLEQIDGPFAVCFEASTGYGHLFELLSKIATRVVVAHPGLLRLIYRSKHKNDRNDALKLAKLLYVGEVPTVHVPSAEVRAWRELITFRHRLIEQRTRTKNGIRALLRTVGVSAPRRPALWTKAGLAWLRALEFVQPLQALKRAMLLNALEGANRDLALVERELERWAGHQTAVRQFRSIPGVGPRTAEAVAAFLDDPHRFAHSKQVGAYFGLVPRQDQSGNANRLGHITRDGSATTRQLLTEAAWQAVRRSPTVRRYFERIHRGDPDRRKIALLATAHDLVRVMWSMWKHGTVWREPPQAA

SEQ ID NO: 352023 - protein, 369 aa, unidentified
MRDRITYVGLDVHKDGIVVAIAEGGRRGEVREYGRIANTPAALQRLARKLGQEGVELRFCYEAGPCGYGIQRQLSALGHECTVVAPSLIPKRAGDRVKTDRRDAASLAKLHRAGELTAVWVPDPGHEAMRDLVRTRLDAVRALRRARQQLSGFLLRQGCHYGRPAWTKLHRRWLAGLKFEQAVHHIVLEDYIAAVEAAEARRDRLTAQIEAMLPDWTLAPVVAALQTMRGMALVNAATLIAELGDLSRFGNPRQLMAYLGLVPSEHSSGASIKRGGLTKAGNSAARRLLIEAAWTYRFPARVSRELRLRQEEQPRVIREIAWKAQLRLCARYRKLARSGKPPNVVTAAIARELAGFIWAIAQRVPPAAG

SEQ ID NO: 352024 - protein, 340 aa, unidentified
MTITTVGIDLAKNVFAVHGVDQNGRTVLVKPKVSRAALPELIASLPPCVIGMEACSGAHYWARLFRQYGHEPRLMAAKFVSPYRMAGKSGKNDAADAQAICEAVRRPHMRFVPVKDESQQAMQCLHRTRQGFIEEKTATYNRLRGLISEFGVIAPQSADALRHMVSVQKSSLPLQVQQCVDDLMEHVDRIEANITEYDRILSHIAKTDHRSQRLMELKGVAPTTACALVASIGNAHDFKNGRQLAAWLGLTPSQYSSGGKSKLGRITKAGDSYLRTLLVQGARSVLIGAGKRTDSFSRWVCMLVERRGYWRAVVAIAAKNARLCWASLHYGDDFRLYSVN

SEQ ID NO: 352025 - protein, 401 aa, unidentified
MPTIWVGIDAGKRAHHCVAIDQGGAVLLSQRVENDEEELLGLIATVAAIADGEHACWATDLNAGGAASLISLLAGHGQQRLYIPGRIVHHAAATYRGDGKTDAKDAKIIADQARMRTDLQPVRGADQVSVDLRLLTAHRTDVICDRVRAINRLRATMLEYFPALERAYDYSKNKAALVLLSHFTTPQGLRRVGPARLTAWLKARGCRNSAKIAATAISAAHAQHTTLPTQPMGSALVSELAAHIQDIDATLARIDAQLSEKFDQHADAQILLSMPGFGPVLAATFLAQIGGNLDDFDTVDRLACVAGLAPVPRDSGRISANLHRPRRFNRRLLRTCYLAALSSLKNSPASRTFYDRKRSEGKSHKQAIIALARRRINVIWVMLRDHVPYQEPAAVKMPVAA

SEQ ID NO: 352026 - protein, 320 aa, unidentified
MKHYCALDVSVKETAVCIVDETGKICRETKVATHPDDLILVIKDPKWQIERIGLEAGPLSQWLYEGLAKAGLPVICIETRHAKAFLKAQPNKTDRNDARGIAQMMRVNLYRPVHVKTLTSQKHRALLTARKLLQEKAIAIENDIRGLLRNFGLKVGLVGKVKFEERINELVEDRPELREIMQPLLTARKLLREEFTKLHKKVLDLVREDEVCRRLTTIPGVGPVVALTYTATIDIPERFAHSKAVGSVLGLTPRLNESGESKRVGRVSYCGDAMMRSLLYEAAQVLLANVKKWSWLKAWAMNIAKRRGRQKAVAWPDGLR

SEQ ID NO: 352027 - protein, 418 aa, unidentified
MQVETDEGEIIERVAALDVGKAEVVCCVRVPGPGGQRMQEVRTVSTMTAALLALGDWLAGLGVTRVVMEATSDYWRAPFYLLEDRFQTWLVNAKDVKHLPGRPKTDRLDAVWLCKVAERQMLRPSFVPPPQIRALRDLTRYRVDLLVARTAEKQRAEKLLEDALIKLAVVVSDPFGVSGRAIMAALVAGERNPAALAGLARGTLRSKTDRLTEALTGRFTEHHGFLLEQMLRRIDGITADIAAVQARIEGQLGELAGAVARLDAIPGVGPVAAQMILAEIGTDMSRFPTPAHLTSWARFAPGVNQSAGRPKGRAGTGHGNRYLARVLGEAAVGAARTDTFLGERYRRIARRRGKNRAIVAIGRSILVIVWALLSDEQAQFVELGPDHYASRTNPERKVRHHIRELQELGYTVTLNPAA

SEQ ID NO: 352028 - protein, 383 aa, unidentified
MKSVCGLDVHKDSVYLCILSEFGELIEKVFGVLTYQLEEMRDMMLHHHVVEVSMESTSVYWIPIWRVLSPHFKLNLANPYFIKQLPGRKSDVKDAQWIAECTMKELIRGSFVPPETIQQLRQYDRRIFDLNEEIVRKLSKLDAVLQRCNIRLSNYVSNVDSKSYKAVVRAISQGITDPEELVKLIHGRIINHHGIDVITASLKGVVSLAEIDMISQLRDELDMAEAHKEKCQARMLEICEREFPEELRRLQTIPGIKERAATSLIAEIGTDMNKFETANHLASWSGLKPRNDESNKKIKSRSITHGNVYLRKTIIECAWAASRTKDCFFSRFSYHQTQVRKKNKMKVLVAVARKMLIAVWHVLHDNTIYIDFTTDRKTSRTRG

SEQ ID NO: 352029 - protein, 352 aa, unidentified
MRWVGLDFHKRYITACALDNDGQVVAEHRRLPADVVPLVGWLPALGDAVTVAMEATRYWAWLYDQLSATGIAAVAAHPYQVKLIWQARCKTDPIDARKLADLLRTNLLPAIWVPDVEVRARRKLLRGRAYLVRLRTSVKNRIHGHLTAENCRAAVTDLYGRAGRAWLQTVALSPMGRVQVDLLLELVDALDARIGRLDDRVKRLVKHDPVAQRLQTWPGIGTFGAALLLAEIGTIHRFRSSHELAAYAGLTPSTQSSGDTTRHGSVGRAGSPWLKGILIEIVQSLKLAPGLVGQQYQKLLRSNGKAKATVAAARKLCCYLYWCLKEDWSYDAWLRQHERLEVRPVQPLGSAA

SEQ ID NO: 352030 - protein, 358 aa, unidentified
MADYREAFVGIDVAKLKNAIAVAESGRNGEVRYWGEVEASDAGIRRAIKQITAKFEHVYFCYEAGPTGYGLYRLIRSLGHECIVVAPSLIPRKPGDRVKTNRRDAISLARLLRAGELTAVWVPDEDHEAMRDLVRARTSAVETLRTHRQQVNAFMLKHGRIYPGKRSWTMRYLRWLQEQHFDHPAHQIALQEMVETVIAEFVPHWSLAAVVCALRALRGVDLIAAVTFATEVGDAGRFESPRQLMGYLGLVPGERSTGETTKRIGITKAGNSRVRTLLVECAWTYRYPPRIGKRKLYRLEEVSSSVREIAWKAQTRLTARYRMLSARGKKSTVVCTAVARELAGFMWAIAREARQTTS

SEQ ID NO: 352031 - protein, 461 aa, unidentified
MIVLGADTHKRSHTIAAVAAVSGELLGEQTVAVGARGFGALLQWARGLDDDRVWALEYCRHVSGSLERFLIERGERVLRIPTHLTAKARKSARQRGKSDPIDALNVARAALQEGLEAFPAAHLDGPELDLRLLVDHRERLVRHRVELNSTLLWHLHDLWPELRLPGGALLSKKWRTRIGRRLARAEQTMRVRIARDELRRLRELTAAINQLEREITMLVTQIAPRLLTEPGFGPLIAATLVGEIAGAQRFATPAKLARAAGVAPIPASSGNTRRHRLDQGGNRQINAALHRVIVTCARCHTPTRDYIARRRSEGKSTSPASEFVSALAAIITQCRRGSCEPERRLHVRHDRREEWQAGAAAQAVAERGGEAADLAAAVDRGMLAASGGRAVERRPDDDHADPSRRARGRAVGVGAVAAGGARRWRGCRASGIAGGDRALGGDGRGAGDRARRAPGKQRSAW

SEQ ID NO: 352032 - protein, 311 aa, unidentified
MPANATPHYVGLDIAKDQLDYCISDTDEGKFPNTAEARARFIQQLLRLRTPRVVCEASGGYEKIIVAELLAAGIEVCVAQPGRVRAFAYAEGLLAKTDRIDARLLRRYGEKIALRLAVPTDPAATLLRELLEHRRQLTTQLVEVEGRLGLAGPTLRKLLQRQMTFLQKQLKTVETMIDDHIDHDPDLRAKSERLQQITGVGPVLSATVLAYVPELGKIDNAQMAALIGVAPFPKDSGTLHAPRHVRGGRSQVRHVLYMAAVAAARSNPILAALYQRLLAGGKPKKVCLVAVMRKLICLMNRLIEDPDFVLA

SEQ ID NO: 352033 - protein, 337 aa, unidentified
MKYSGIDLHSNNCVVVVSDEADRVLVRRRVPNDAAAILALLAGHREELVGVVVESTYNWYWLVDALQTAGYRVHLANTAAIKRYEGLKHSGDEDDAAYLAQLLRLEILPSGYICPPAARAVRDLARKRMQLVRSRTAQVLSVENMLSRETGAGMRSYAVQRLTARGVESFGFHQDVGRAMCANVAVIKTLNREIDKLEQRLRQCVGLRPEFRLLTSVPGIGQTLATLIMLEVGTIERFAAVGNFASYARCVDSARISNGKKKGQGNVKNGNAYLAWAFVEAANFTRRYCVEAQRFYDRKKARTNGVVATKALAHKLARACYHMLKENQPFDVKRCFA

SEQ ID NO: 352034 - protein, 390 aa, unidentified
MIYVGIDVAKTTHYAAAADSDGVVLVEPFAFDNDAPGFAKFISKIASFPKEQLIIGLESTGIYSENLICFLFDSGYKLAVINPIQTAALRKTNIRKTKTDKVDTLLIIKSLMVNSYRLYTEQDTQSLKLKSLCRFRQSLKKSKARLKIQLSGYVNLLFPELLSFFKSGIHISTCYTLLKRCSSPAEIAALRLDSLSRLLSNASRGRFSRSTTEALKSLAKSSVGVKNPYISIQIAQTIQQIELLEQQIDEIENVIKDTICELDSVIMSIPGIGAIDGAMILGEIGNIDRFASPAKLLAYAGLDPTVCQSGKFKARSTKMSKRGSKILRFALINSAWQLTLKNDTFFNYYQLKLSQGLSHYGALGHVAHKLVRVIFTLLKHNVLFDPTRLV

SEQ ID NO: 352035 - protein, 348 aa, unidentified
MTLTIVETRAVTGGVDTHADTHVAAALDAIGGLLGVEEFPATAAGYARLLDWLGGFGTVCLVGIEGTGSYGAGLARHVAAAGIRVVEVDRADRQDRRRAGKSDPLDAVSAARAAQSGRACGRPKGRDGQVEAIRALMVAKRSARSERIQTINQARSLIVTGPDDLRARFARHAADDLVAGLASLRPRTGDTVGYATRMALRELGRRTQFLDAQLERLDELIVPLVTTRALGLLALYGVGPDTAAMLLVAAGDHPERLRSEAAWAHLCAAAPIPASSGKVTRHRLNPGGDRQANHALYRIVITRMSSHPPTRAYVDRRTKEGLSKKEIIRCLKRYVAREVYPHLRPPVR

SEQ ID NO: 352036 - protein, 345 aa, unidentified
MARHYIAFDTHCSSTDMAVVNQTGKVIKRHQCMTTIPALLSAVGLVSRPRSLTFEEGPLASWLSLHLRQAVDELIVCDPRRNALIAKEGDKDDPLDALKLAQLFRGGYLKPVHQVATQERAVLKQHVALYHDRVRDRVRQGHQIIAQLRRHGVMDPMNEVVEESKRSAWWKRLPNHQVLHHDLQLLLAMYGLYCEQEEELRNTLTRLAKKQEPVRRLEQVPGFGWVRAVTFYVYLDTPHRFASKSKLWRYCGIGLEKRGSGQGPMRTRLSRQGNRHLKGALIGAAHTVISGDSPYAQRYQRWIDQGLSPATARRNVARLLATTQWTLWKEGGRYDPARVCPMNTN

SEQ ID NO: 352037 - protein, 311 aa, unidentified
MTILTSQTVVGIDIAKSEIVVYRADLETIESVKNDRAALKRWLKTLPAKSAIAVEATNIYHLETVDLAHTMGHQVYVVDAYRVSHYRRGVGQRAKNDPCDARVLARYLTNEQSKLRLWNPPPKAYTVLKSLLHKRATLVQNHTGLMLSWADEPLLKKERTAQNKAFERSDQVIQKLLRKVSKEAGIEDNIDRCKAIEGVGELTATGLATTYMRGDFTNGDAFIAFLGLDLTVNDSGKKNGPRFLTKKGDPEIRRLTYNAAMAACRSAKWKPFYESYLARGFSKTQALVALSRKLCRVAFALMKNQGEYRLT

SEQ ID NO: 352038 - protein, 348 aa, unidentified
MRFYNQPHQYYCGGDLHARSLYLHVLDSQGKTCFEKNLPACPQAFLEAVAPFREGLVVGVECMFAWYWLADLCEEQHIPFVLGHALAMKAIHGGKTKTDKIDAAKLAGLLRGGVFPQAYVYPKAKRATRDLLRRRSIFVRQRAQLIAHIQNTNSQYNHPPFAKKLTYKGNRTVALAERFKDDSTKLSIEADLNMISAFDGQLQTLETHLIQHAKVDDAVTFQFLRTVPGIGPILGLTMLYEIDNIKRFPEVGNFLSYSRLVSCIHESAGKVKGVGGRKIGNAHLKWAFGEAASLMLRSFPAAKAWMQRQEKKRSKVRAHAILEAKIGRAVYSMWQKQRPFDAKRFLAS

SEQ ID NO: 352039 - protein, 343 aa, unidentified
MPHSVGLDVSQKTTAICVVDAEGTRIWRGDCPTHPKQISTLVSKHAGSDAKVGVETGAMTPWLVHGLRASGLQVDCLDARRVKSALQMRLNKTDHNDAEGLAQVVRTGWYRAVHVKSLEAHQARSLLGARAQLVGMRTRLANMIRGVLKTFGILPGSERGMRFDRRVEHAMENSPEVAAIVQPLLVSWRHLREQIAGFDVAIQRRVKADPTCRLLMSVPGIGALSALAFVSTIEDPARFSRSRAVGAHLGLTPRRYQSGEIDRSGRISRCGDALARTLMYEAAVVILHRVKRSLPLKDWALAIAERSGPGKARIALARKLSVILHSIWRSGEPFRWEPETAAQ

SEQ ID NO: 352040 - protein, 336 aa, unidentified
MKASTIGLDIAKTIFQVHGEDATGQVVIQQRLGRKRLAEFFAKLPPCLVALEACGTSHYWGRTLRAFGHDVRLIPAAYVKPFVKRNKTDARDAAAICVAARRPDMRPVAIKSEAQQASRALQRSRELLIKQRTQLMNSLRAMLAEFGVVAAQGYRGFAELRRRLADGEGLPETLVVALRLLAAQLDSLTSAVDALEDRIKSVAKADPTMRRLCGVPGVGFLTAHAVVAAIGDGRQFRSGRDFAAWAGMTPRENSSANKRRTAGVSRQGESRLRKLFALGAATLMRNARSRDDRATRWQRGILARRPMKVAVLAQAAKTARIVWAVLTSGEPYAPRA

SEQ ID NO: 352041 - protein, 321 aa, unidentified
MTYVGIDVSKATFVVAYSSAKSSKTKTFKNTTKGVHEFIQTLSASEHHCVLEATGNYSSLLVYLLSQVGITVSLENPLKIKNFARVMLSVTKTDETDARLIALYGEKMQPAPYRLRSDAILTLKQKRTVIRQLKKQLIATRNLKGSMEALPFFDPKCKKAIEKTIAFLEKQVKNLEEELAVLAQCEYKKQMDLLTSIKGIGVTLAAALIMATGGFTYFDNAKQLTRYLGLSPTYQQSGMSVNVKGHINRNGDSSLRSQLYIAAMASLRCNAECKECFNRLRSNGKPGKVAIVAVANKLVRQAFAVVTQEKPFVDGFKSAKP

SEQ ID NO: 352042 - protein, 412 aa, unidentified
MNPVVGLDVSKGESQVQAFLDKGQPYRKSFSVKHTLEGLGSLVEFLKDIEKLADGKQPSVILESTGQYHIPVIQFLDEQQYVYIMVNPLISHRARSTNLRKVKTDAVDAYHLCELYYKEELEPYKKRGIHLLNLRNLTRQQETISSTAAQTKLQLQSILDQVFPEYRGVFGNLYSKISLQILSLFPTSEEVLSVSESDLSDKVAELCPTRSEKWAEEKAQKLREAALRNPFQNNLYQSHIFNLKMFINIVLQYQEHLSKLAAEIDALAKEIEEYEIIQSIPGIGEKIAATIISEIGEIDRFNHPKKLVAFAGIDPSVYSSGRFTASINRITKRGSSRLRQALFMAVQCGIRDARKQKTSDEIIPRNKKLREFYDKKREEGKPFRVAIIACANKLLHWIYALLKRKITFQNTD

SEQ ID NO: 352043 - protein, 392 aa, unidentified
MFFIGIDIAKNNHEASIVDNEGKSLSKSISFSNSIRGCDRFLSFLSSFNIYPDIATIGMEATGHYWVSLYSYLINLGFTVYVINPIQSDAFRKMYIRKTKNDSKDSFIIAQIMRFGEFSSSFVADEDIMALRQLSRYRVALVDECSDWKRKCIALLDQVFPEYSKLFSDTFGATSKELLSKYPLPEDMIKVKTKTLVSLLFKTSKGRFSTDKALEIKEKAQKTFGVSFAKNAFSFQIKQIISQISFIESQIEELEVEISNLLQSTNQVITTITGIGNILGAIIIGEIGDISRFETAPQLVAYAGLDVAVKQSGEFVGTQTKISKRGSPYLRRAIWLAATVASFRDPALSQYYESLKARGKHHLTCVGAVARKLTNIIFAVLRDNKPYVPNLN

SEQ ID NO: 352044 - protein, 343 aa, unidentified
MDHYVGLDVSLKQTSICVVNQAGSIVREGVVDSDPEAITAFVMSQAPGAVRIGLETGPTATWLWTELKRLGLPVICIDARHAKAVLKMQINKSDRNDAAGIARIMQTGWFKEVRVKSLDSHATKALLASRALLVKVKRDLENQIRGLLKNLGLVIGRAKFNVFAVQAEELIEGRPELTAAVAPLLMARKAIEQQIADLDRKLRKLARQDAQVRRFMTVPGVGPITALCFKATIDDPTRFKRSRSVGAYVGLTTRRHASGEVDWSGRISKCGDAMLRMYLFEAANVLLTRVPKWSALKAWGTRLAKRCGLRKAKVAVARKLAVILHHLWIDETEFNWSTKKAAA

SEQ ID NO: 352045 - protein, 422 aa, unidentified
MIAKSNDLQPMLFIGIDWADQEHALHLISSTSDKQSTQVLQQEPEAIAEWVEKTRQQFPDYRLMVILEQSRGALFAALAGHPELELYPINPKQLSRYRDSLYPSGGKNDLVDAKLLAKFLKEHKEALQQWRPDDITTRQITEFSQLRRKLVDERKRLVSQLQSTLKVYFPQALTLFKAEMYEVCNLDLLKSWPSLQTLKRVHPKTLRAFLKTHRMKDEKKQTEFIEAVRTATPLTKDKAIVQANGLYVQSLVQQIRGIIQSIKKFDEQLKERVKIHPDAELFRSLPGAGEALVPRLIAAMGSDRHRYQSAKEIQCRVGIAPITIQSGKSLQVRKRIACPKFLRQTFHEFADHARRWSPWSKAFYKMKKEKGMKHNAILRELAFKWIRIIFRIWKTKTKYSETQYIQRLKITGSPIINFLENS

SEQ ID NO: 352046 - protein, 393 aa, unidentified
MLYVGIDIAKRKHECFIINGQGEELTGFFTVQNSKEGFQELLRRIKVFEPHPSIENTQVGLEATGHYSDNMIGFLRKMDLPPVIMNPLAVNLYRKGQSLRKAKNDKIDARAITKLLLFGDFEPHLAPSYHIEELKEFTRYRHRVVKACSGFKVSYDRLITIVFPELESFVAEKLGVTVLKLLLEFPGADAIAGCHLTRLTNLAHEYSRGRFGKDWAYNLKELAKNSIGTSSRAKAFELRHVIRQIMSLSEEIKLLDTEIKALVIEADTSLLTIPGIGYKLAAVILAEIGDIRRFANPGKLQAFAGLDPTTYQSGQFTGKRNVMVKRGSTYLRWALLLAARLACQYDSTFAGYLERKVASGKHYNAAMGHVAKKLIRVIFKLMTTGEAYQATPA

SEQ ID NO: 352047 - protein, 402 aa, unidentified
MNSVGIDISKGRSTIAVMRPFGEVAISPFEVRHTDSELSELARRLKSLNGETRVVMEATENYHAPVAKQLHDAGLYVSVVNAKLVHGYGNNDLRRVKTDRKDAIKLANYGLDRWLTLPRYIPEENTRLLLKNCYRQYRQYSKVQTVLKNNLISLLDMTFPNANRLFNSPARADGSEKWVDFVAEFWHCECVSERPLKSFVNKYWRWCRKHGYNFSEEKAHAIYDEASGHIGVMPKSETTKLLVEQAVSQLSATSAALAVLKQEMQSLSSQLPEYPVVMDMFGVGPTLGPQLIAEIGDVRRFYSKKALVAYAGIDAPPNDSGDVIGRHKSMSKVGASSLRRTLFLVMSVYLQNSPPNEPIYQFMNRKRAEGKPYRVYMMASANKFLRIYYATVKAYLEILEQI

SEQ ID NO: 352048 - protein, 360 aa, unidentified
MFIESVDRIIPQQFDVFVGLDVDARSYNVTVLNWAGNVHQFTMSAQAEGLLSWRAEHLPEARVAWVYEAGPTGYGVYDALSQGGDVCLVTPPALLPRVPGRRVKTNRLDSLELAIRLRGGELTGLRVPAPQIRSLRHLTHQWLSLAKRVRGVKCQIKSLLLMEGRPLTEAGRGWSRAVGVALAALACDAEVQFVLQQRWRQLTALHEEQLRLGRRIRAYCRADPDLAESLTYLMSLPGIGWVTGAHILARVGEWRRLKRPQELAKFAGLNPWEHSTGPRIVRGGISRSGDRHLRNLLIEAAWRAIRVDPELRAFYERLRRRNPREQGARKAIVAVARKLTERIGRVLMDRRCYRPVSAAS

SEQ ID NO: 352049 - protein, 421 aa, unidentified
MRGLRGKRVGAVKEGTLIATVDVGATTNTGYCTSVDGRDMKVFKFGNTKEGFEKFSHMIVAARNRFKCSEVMVGYESTGPYAEPLVHYLTDKPVSIVQVNPLHTKRLKEVNDNSPGKTDDKDPRVIADIIRLGRALSVVVPEGDAAYLRRLNNARERHVGERTALLNQMQQLVFLIFPEFKTVIPRMIGKTVRFVLKNYTTPEKIGSLAKEVLGEDMRKRSWGKLGMKDGELLISAARQTVGIKEGVAGIVLDIQHIVAQLEIVERFISEIESEMVVTLGRIPCSARLLSIKGLGVVSVAGLIGEVGDFSKFRTQSEIMKLAGLDLYEVSSGKRKGQKRISKRGRSLMRKILYFAAIQMIKKNGIMHGYYESLIARRMLKMRALVAVMRKLLCIIHAILRDDRDYVGEYCAPRRRVIKRAA

SEQ ID NO: 352050 - protein, 370 aa, unidentified
MGKYSEVFVGIDTAKRKHAVAIADAGRDGETRYLGEIDSAPATVERVIKKLASKYEKVRVCYEAGPTGYGLYRQIITLGHECTVVAPSLIPKKAGDRIKTNRRDAVTLARLFRAGELTSVWVPDAVHEAVRDLVRARDTAAADVRKNRQQLLSFLLRHGRIYSGSKHWTRAHARWLATQAFEHPAQQIVFQDAIDAIEDCVSRLHRLEEQLYAIVPNCSMAPVVDAYQAMRGVSFIVAVTFVAEIGDVRRFENPSQLMAFLGLVPSERSTGDNVRRAGLTLAGNRRARRALVEGAWTYRYQARVSAKLQKRLEDIPKQVRDIAWKAQVRLCGRFRRLAAIGKKRPVIVAAIAREMAAFLWAIGQHVAPAS

SEQ ID NO: 352051 - protein, 463 aa, unidentified
MKLRKQTSRANRRRVGTQGGRVVESRVNEDLQRINEHAAGIDVGSDRHYVAVPAGSDEHPVREFGVFTRDLNAIAEWLKKCGVTSVAMESTGVYWVPLYEVLEERGLAVKLVDARKVKNVSGRKSDVSDCQWIQQLESYGLLAKAYRPSEEVVILRGYVRQREMLVRLAVAHIQHMQKALQQMNLRLDTVVADVTGQTGMRIIKAILTGERDTRVLGEMRDPRCKATADQISASLEGTFRREHMFELRQAVELFEVYQEKIAACEAEMEKYLSEMTEGYDDDPPPKGTERKHESMSFSVRDYAWKLTGVDLFKIKGLGSETILRILSEVGVDLSAFPTEKHFASWLCLSPNRRVSGGRVLSSRTKASSNRAAGAFRQAAVSVGRSDTELGAYFRRMRAKKGPASAVTATAHKIARIYYSLVKHGGEYKERGAKVYDQQQQERIVASLRAKARSFGYELIEKAA

SEQ ID NO: 352052 - protein, 326 aa, unidentified
MKTQNDPEKYAGIDVSKASLDIAVGQEGEIWQASNTAGGIGTVVEHLLRCQPCLIVVESTGGLEKPLIAGLQKAGLPVALIHPGRARKFAAGIGRLAKTDRLDARLLAWYGFAARPEPKPQPQPACEALSELVRRRNQIIEMLVAERNRRSTCPASLLETLDAHIAWLTTERERLTTQIETMITTQAEFHDKDVVLQSAKGVGPILSATLQAELPELGAYSHKQIAALVGVAPFSRDSGRYHGKRQIKGGRSGVRSTLYLATLSAIRYNPVIRSHYQQLVDRGKLPKVAIVACMRKLLVILNAMIRDLRPWQPAPLHAVVSSTPYK

SEQ ID NO: 352053 - protein, 413 aa, unidentified
MVHEPITAVGIDVSKGKSMVAVRRPGGEVVLKPFNVHHTAFDLRALVDMLHGIGGDIRIVMEHTAMYWRPIAYELKKAGFFVSIVNAMLIHDFSDNSIRKIKTDRADALKIANYALTFWADLQDHSPEDETRMMLKTQTRLYERTQSMGVALRNGLTSLLDQVFPGADDFFTTVARESNGHVKWVDFIKHFWHKDCVAGVSFDSFADAYRKWCKKERYKCYPEHVKMIYAAARNAIATFPKNKSTRLLITQAVDSLNAIYDSLHALRTEMLRLASLLPKFPVVMSMQGAGKITGPPLMAEIGDVRRFAHKGALVAFAGVDSRPYQSGMVDVKSRRMSKRGSPHLRRIIFYICTIILQHANRDNPIFLFMDKKRSEGKHFYVYTVAAAAKFLRIYYARVKEYLAKQDSMDTNIA

SEQ ID NO: 352054 - protein, 322 aa, unidentified
MAMLSFGGIDVSKDRLDITVLPDEQCSSVSNDAAGWAELVEQLRGSSITAIGVEASGGYERGVVRALLAAGMSVRQINPFKLRQFAKASGTLAKNDRLDARMIASFVAVMPTRPAQRQAPMIEQLAAMLTVRRQLSEQKVATENASRLLEGAMLQRLSRRRVAGLTADIDLLDQRMVEIVTADAALAHRFRLLNSMPGVGAVLACTLIALLPELGQMSRKQVAALVGLAPYDFDSGKLKGRRCIWGGRARVRHVLYMAALSASNWNPALKAFHDRLAATGKKPKVVIVAVMRKMITTLNAMLRDGTAWVDRYSGRRSATTAR

SEQ ID NO: 352055 - protein, 338 aa, unidentified
MKLYGGIDLHSNNSVTALLDEEDKVVYRRRLPNDLKLVLAELEPHRDAIEGLVVESTYNWYWLVDGLMEAGYQLHLANTAAIVQYEGLKYGDDDTDACWLAKLLRLGLLPEGYIYPREERPVRDLMRKRNQLVHQRTSNLQSVQNLMARNRGHSLSANQIKRLSYEEVDRLLPDADLALAVKSNLAVIRTLDGLIDRLEKTVLRKIKLRAEFQPLLSVSGIGNILGLTIMLETGEIGRFAKVGNYASYCRCVGSEYLSNGKRKGRGNTKNGNKYLAWAYIEAANFAVRYNPQIKRYYQRKSARTNRIVAIKTVAHKLARACYYILRDQMSFDVNKAFT

SEQ ID NO: 352056 - protein, 341 aa, unidentified
MEQATTIGLDIAKYVFQVHGADGAGHVLFRKRITRAKLLGFLASQTRCIVAMEACAGAHYWAREIAKLGHHVRLIAPAYVKPFTRRQKNDAADAEAICEAAQRPSMRFVPVKTEEQQANGIVFRARDLLVRQRTQCVNALRGHLMEYGYVFPKGITHVETLVALVEDLQSSLPDSVRVILKLLVDTFTALEAQITALDAEINQRSKSDPTARRLMTIPGVGPIASTAITALVPAAEGFPAGRDFAAWLGLTPLQKSTGGKQKLGAVSKRGERTIRRLLIIGASAVVQQASRRGPPKGSWLAQMLARKPKMLVTVALANKMARIIWALLVKGGTYRTPIAAA

SEQ ID NO: 352057 - protein, 350 aa, unidentified
MSIVGGLDIHRKQITFDYLDVDTGQLWRGQISPADREHLAAWLAERFDPASDGPVELAVEACTGWRYVTEELAAAGVVAHLGEPAETAALRGPKRRPKTDKADARLLRELVATGRLPECWIPPAHVLECRALLQLFHALRVEHTAWVQRVHAVCFHQGTPALGAGALCTAEGLGRLAQLCERQLSPAGRLQVATALGMLAALDAQLDVVRRQLLACSRRLYGARVLQQELYGVGPITALALVCWLAGAGRFRSARKAVRFLGLDVTVYSSAGKRSPGRLSRQGPGVLRWLVYEAGKTHARKLAGDHDYYASVKDRIDGKRAALSEARKLVRRAVHLLDELGDQALAWTQP

SEQ ID NO: 352058 - protein, 345 aa, unidentified
MDHFAGLDVSVKETSICIVDDTGKIVREVKVASEPESLFAVLTNPAHHFKRIGLEAGPMSQWLFSVLAEAGLPVICVETRHMRAVLKAQINKTDRNDARGIAQMMRVGLYRPVHVKTLRSQKLRMLLTHRKLLQSKAIAIENDLRATLRNFGLKVGVAGKVKFEARIKELVENLPDLSMLVEPLLIVRRVLREQIGILHRRLLAIVRDDDVCRRLMTVPGVGPVVALTYRATVDVPARFRNSKAVGVVFGLTPAKYQSGESDRTGGISRCGDEMMRMMLYEAAQVMLVRSTKWSWLKAWAMQIARRRGLKKAIVALARRLAVIMHRIWVDGTEFRWSREQAAAAA

SEQ ID NO: 352059 - protein, 345 aa, unidentified
MKITTIGIDLAKNVFQVHGVDERGKAVLRKQLKRKDVVKFFANLEPCLIGMEACGSAHYWARKLSEFGHTVRLMAPQFVKPYVKTNKSDRNDAEAICEAVGRPNMCFVPVKTAEAQAVLALHRARQGFVKARTAQANQIRGLLAEFGIVIPQGIGHIAKRLPEILEDGENGLPGMMRQLVRALGEQLKGVDNQVEEMERQIKLWHRDSEPSRTLEAIAGIGPITASAYVASVGDAKSFKNARQVPAWLGMVPRHEGTGGKVKMGRISKRGDVYLRTLLIHGARAVIRQVERKPDQADGWLKKLLARRNKNVAAVALAAKNARIAWALLAHERTYQSDYVAKRTAA

SEQ ID NO: 352060 - protein, 346 aa, unidentified
MTTTMTCVGLDVHARSIHAAAVELVSGELQRARFGGGSEEVVAWLAGLPRPLRVCYEAGPTGFALYRAARAAGIDVCVVAPSKTPRASGDRIKSDRKDAELLARLLLAGQLKPIAVPSPALEAARHLCRAREQVRADLMRCRHRVSKLLLLHGRVYPEPTTWNERHRRWLGGQRFDEAVAELAYLDTLAAVDGLVARKRALDERLSRIALEGEWAETVARLRCFRGIDTLSALVLALEIGDFVRFGRPAQLASWLGLVPSLDQSGESRHQGAITKTGSSHARRLLVEAAWQYLREPRIGVSLRNRQQDQPAQVLQIAWRAQHRHQMRPAAPFRSWQEAGTNGSAVP

SEQ ID NO: 352061 - protein, 343 aa, unidentified
MQTITTIGLDIAKSVFQVHGVDADGQVVVRRQLKRRYVPAFFQKLPPCLVGIEACASSHHWSRELQALGHTVRLMPPAYVKPYVKRNKNDATDAEAICEAVTRPNMRFVATKTREQQSCLTLHRTRHLFIRQQTSVINVIRAHLSEFGIVAPVGRNGVEQLLGVVADLSDKRLPDIARACVAALGAQLQALKAQVLEFDRRIMAWHRSNEASKRLDEIPGVGPVLATALVASIADPKVFRSGRDFSAWIGLVPKQNSSGGKDRLGNISKRGDRHLRSLFTTGALAVIRYAKIHGTKHRPWLTALLARRPTKVAAIALANKIARMAWAIMARGERYKEPAALAA

SEQ ID NO: 352062 - protein, 412 aa, unidentified
MEVVYECCGGLDVHAKTVVACLVTKGRKEIRTFATMTDELLQLGDWLRSAGCTHVAIESTGVYWKPVFNLLESLLTVILVNARHIKAVPGRKTDVRDCEWLADLLRHGLLKASFIPPLEIRELRELIRYRRTLVKEHTAVANRIQKLIESANIKLGQVASEVLGLSGRLMLRALAEGVQDATQLAELAQGKLKSKKSELRRALDGRLTQVQRWVLAEFLTRVEELEAALTRVEARIGEEVTACADSFVPQAVELLESIPGVGVRTAQTIVAEIGVDMSRFPSAKHLASWAGVCPGNHESAGKRKSGQPTKGNQSLRTILVEAAWAATNAKGTFLRAKYQRLVKRMPKQKALGAIAHRLLVISYHLLSRRVPYAELGNVPRDHQQVERQRRRLVEQLKTLGVTVTIEEAASAA

SEQ ID NO: 352063 - protein, 343 aa, unidentified
MQAITTIGLDIAKSVFQVHGVDANGHLVIRRQLKRRHVLAFFQKLPRCLIGIEACATSHYWSRQLQAVGHTVRLMPPAYVKPYVKRQKNDAADAEAICEAVTRANMRFVATKTAEQQSCLTLHRTRHLFIRQQTSVINAIRAHLAEFGIVAPVGRNGIEELLHVVADPNDKRVPEITRACVAALGAQLHRLREQILAFDRMIMAWHRSSATSKRLDEIPGVGPALATALVASIADPKAFRSGRDFSAWIGLVPKQHSSGGKEKLGSISKQGDRYLRSLFTTGALAVIRYAKIYGTKHRPWLTALLARRPTKVAAIALANKIARMAWAMMTKGERYKEPIALAA

SEQ ID NO: 352064 - protein, 371 aa, unidentified
MKQESAVFVGLDASKLKISVALAEDGRQGEVRFLGDIEHTPEAVRRLVTKLAGKYRRLLFCYEAGPTGYGLQRQICALGPDCAVVAPSLIPKRPGERVKTNRRDALTLARLHRAGELTAIWVPDPGHEAVRDLVRARDAAMEDLREKRQPLQAFLLRHGRIYPGLRPWTQVHARWLSNLSFAHPAQYLVLREYRQAIEDAEARLERLTQQVSEVVSSWSMAPVVEAYQAMRGVAFLTAVTFVAEIGDVRRFETPRQRMASLGLVPSERSTGEQVRRGSITKAGNPRARRVLIEGAWTYRYPARLSRPLQVRQESLPKTVRAIAWKAQLRLCARYRRLMAAGKRQTLVTPAIAREMAAFLWAIGHAVEPRSA

SEQ ID NO: 352065 - protein, 403 aa, unidentified
MTETVNPVERVIGLDVHPHSFTAALIRGPTPAAAIVEKICNRVALGQLRSWVQKQTTTQDRIVLEASGNSFAVARSLLALDRRVLVLESCQLGKLKEAHANNDKISAVRIAKAYLAGTAKEVWIPDPLTQERRDLFHLHRKAVKYATQARNSLLSYLSDNEVTLKKGTPLCQAPQAEAQLRQARSWTPRQWQVIEGLLLRLRQADQQRAHWRSLIAQEVLADPQLLSLVRLGGIRDLIAFALGALVGDIHRFSHPKKLVKYVGLNPAFDESGQQKWSGGIGGHGRKDLRSLLIEAAQAILRSSTPLARWGRKLLVAKGCPNLAVAAVARKLTVAIWYLMMGRWTRLEEIEARLTYKLGKIISQVGVQRLQESAKPRKQWRLEAIEKLKAASIHPAVSAVPATA

SEQ ID NO: 352066 - protein, 442 aa, unidentified
MKCIGLDVHKRVVQAAVLHDTGEVEEDIRFACTPELLRAFCRKHVGAKDKVALEATTNCWAVAAIIREFTDGVMVSNPMRTKLIAQSRRKTDKVDALILAQLLSAGFLPGVWEPDVKTREKREITSRRAALVHDRTAIKNRLHAVLAQRMIAPDGKLFSKEGHHLLRTLELDGVGRQLVDSDLRQLTQVEKEIAALDDVIAGLAQEDDLAKLLMTLPGFDFGGAVGVVAGAGDMRRFPDGNHFASYFGLVPSTKQSAETTYHGPITKAGRAHVRWIFCQAAMHLGGNKGPLGHFFRRLAQKKGHNKAVVATARKLAVIAWHLLVKKEPYRYAEPRIVEKKLSHLRVRTTKTKRKTSMRGTSRPATYGSGVGIRIVKDIDTVLAAEALPPRMPAPAGEKKFLQDTGLDAVVAEYAKTRRLPRIRSPRLALKGKGSEPGSDESS

SEQ ID NO: 352067 - protein, 301 aa, unidentified
MKKTQETLRKHVSTKTAVLHVAFELSNSKWKLGFSDGNKMRFKNIDARNLEQLKEEIQKAKSRFRLDDDVRIVSCYEAGRDGFWLDRYLLSQEVENVVVDSSSIEVNRRKRRAKTDRIDARKLLNMLMRYHGGERKLWSVVRVPSVEAEDGRQLSRELESLNKERTSHRSRIRGLLIREGLEVKNPSGKTFLEELDSLCTWDGTGLPGDFKARIVREYERLRMVEEQMGMLRKERETRVGSAETLSMRKVAQLRTLYGIGVTSSWDFATEMFGWREFRNRREVGAFAGLTPTPYDSGGSQR

SEQ ID NO: 352068 - protein, 372 aa, unidentified
MKSIIYVGMDVHKASFTISCFSVTTQETFATVKISPDAKAIKKYLDGVSLSRSEECEFVCGYEAGCLGYTLYHQLTAMNIRCVIMAPTTILRNSKRVKTDRIDAENLARCLAYGGYKSVYIPTAQDEAVRDYLRMRDDHKLMLKKIKQQINAFCIRHGFCYDGTKWTLSHLKWLKKLEITNGLYRETLDEYMASYEEQEAKIERYDKRIGEIAEQTRYHDKVKKLGCFLGIKTHTALSLIVETGDFERFAKGNQYASYLGLAPGENSSSDNIHRLGITKAGNSHLRQLLIEASGGICKGAVGHKSKELRARQNGNTAEVIAYADKANTRLRSRYYKFIRHGKKRNVAVAAIARELACFVWGMMTDNIEMKAA

SEQ ID NO: 352069 - protein, 420 aa, unidentified
MRNAGIHANSLLEVRRMYNAVGIDVSKSKSTVAVLQPGGTVIRKPFDVSHTSQNLNELADYLSSLDGTTKIVMECTGRYHEPMVKALSEAGLFVSIVNPHLIKNFGNNSLRKVKSDPADARKIARYTLDNWTELRQYSGMDNTRTQLKTLNSQFSFFMKQKVAAKANLIALLDNTYPGVNKLFESPTREDGSEKWVDYAYSFWHADCVRKIGLKAFTERYMSFCKKHHYIFQQDKPEKLFNASKELVAVFPKEKTYKLLIQQSIQQLNLASEHVERLRREMNELASTLPEYSTVMGIYGVGKTYGPQLIAEIGDVSRFTHREALTAFAGVDPGVDESGQHKSKSNRASKVGSARLRKTLFQIMTTLLQNAPEADPVYCFLNKKRSQGKPYYVYMTAGANKFLRIYYGKVKECLRNLEQTE

SEQ ID NO: 352070 - protein, 430 aa, unidentified
MYNKNYISVGIDVGSAFSFMTIVAPDGSVIQKPFKITHNKPDSLEKAVSAIKKAEELHSLESRTFLESTGIYHFPLFCYLVDCGFHVSIINPIITHSANNTSIRKVKNDKVDSIGIAKLGLSGDIPVSQFPAKLVLEIRSLTRKYYDLTDERSAHINKLKGDLHTVFPQYLDIFCDVTGKTSTMILRQYGTPDKILRGHKKTMIEKISKASRKGLSKAAERYEKLCAAATAAKTFGCQIDSIYFNISLTLDLIEKLDSALDSILQRIHQLVTFNKSEKFIQQIKWLDTIKGVGFLTAVTIMCEIGDFSAFRNPKQLFAYFGLDPEVNQSGKFVGTEMHMTKRGSRIARRAVFAVALASIRTKRNGEGINPYLREYYEKKSGQKPKMVALGAVMHKVCNIIFAVLRDEKEFELRSPKEHCRQYQRPALQAA

SEQ ID NO: 352071 - protein, 362 aa, unidentified
MKEYIGVDLGKHKSVVVKKDRLGKVTGKVTLAVTEAALEKYFSKQDRRSKVVVEATGNWMYLYETIEKYVPEVVLAHPLKTRAIAEARIKTDTIDATTLAELLRLDGIAKAYIPPREVRDARELLRYRASVVSMRMGLKNKVHAVLTKNGMECGFSNVLGKRSRQWLKTLSVRDCYRRELDGYIRLAELSTGLIQEITTKIKEVVSVTPQAQLLMTVPGISYYSALLILSEIGQIDRFPSAKHLCSYAGLVPSVYSSGSKSFHGRITKQGSRWLRWICVEISIHAANGDAAFQSLYRRICRRRGLATAKVAVARKILTVIYAMLKNNEPFRRRRPRHQILAKAWSKKNKESSGHPPGVMIQA

SEQ ID NO: 352072 - protein, 331 aa, unidentified
MSNIIGIDVSKASLDCAYLRDADQKRARRLSCHNEVSCFASLVAWAETKSALPVTSLAFVIEPTHVYHEQLVQFLYNAGATVYMANPGRARKFAQGIGILSKNDLVDADLLARYGLMARNLIAWAPMPQEFNDLRSLLNRLDVLERNLRSELNRQEKVGKTMVFHRLEQQSITRAVKRLKAEIITFKRAIGQCIKSTSSLQRNFNLLLTIPGVGAKTAWVMIVILGSRNFRSAPEVASFLGLNPIEKRSGQSQYRRPRLSKSGSGHYRQQLFFPAMVATRKNPDIQALYERLLAADKTKMCALGAAMRKLVHICYGVVKNQTPYQAQTVQS

SEQ ID NO: 352073 - protein, 309 aa, unidentified
MAMLVDVNEFGVDVAKDWLDIFDGTEVVRIDNQLRAIKSFLKQLSGPSTFAVESTNTYHELLVEMTIAAKHTVYLIDAFRLSHYREGVGVRAKTDANDARLLLRYLRSEGHRLIAFKPLPKEVKRLNRLLKARAKLAELKASMGLALGGVAELAQTRQVLLKRFKLAMAGIDKRILDCIILGGYKADYKRCLAVPGIGHVNAAALVATYHRGYFPRSDSFIAFMGLDVRVRESGYFKGKRKLTKKGNPEMRRLLFNAARAGAKTKQWNAYYLAMRARGHSTTATAVALSRKIARLAFALMRDQSEYRPV

SEQ ID NO: 352074 - protein, 385 aa, unidentified
MTESSDYESVQVFIGVDVGKDTHHAVAINRSGKRLFDKALPNDENKLRSLISDLKQHSQILLVVDQPATIGALPVAVARSEGVLVGYLPGLAMRRIADLHAGEAKTDARDAAIIAEAARTLPHALRTLKLADEQIAELSMLCGFDDDLAAQTTQASNRIRGLLTQIHPALERVLGPRLEHPAVLDLLQRYPSPEKLASLGEKKLAAQLCKLAPRLGKRLAADIAQALAEQTVVVPGTNAAAVVLPRLALQLITLRKQRDEVALEVEQRVLAHPLYPVLTSMPGVGVRTAARLLTEVACRAFASAAHLAAYAGLAPVTRRSGSSIRGEHPSRRGNKALKRALFLSAFAALRDPLSRAYYTRKMSQGKRHNQALIALRDDAATFCSP

SEQ ID NO: 352075 - protein, 429 aa, unidentified
MNCTQNKKIEQVKETTMIVGIDVGSEKHYFRAFNWRGIELTRKPIAFSNSMEGFNSFYNTIVELMQKSELEEALVGIEPTGHYWFALGQFMGEKDIKFVMVNPHHVHKTKELDDNSPSKNDRKDPRVIAGLVRDGRYFYSYMPTGAYAELRNASNRRFVLVEEQTRAKNRLQKWIAVYFPEYKGIYTHIDAKGGMLVLKKAPTPEEIVRLGVEGIIKIWKDAKLRGNGHKKAMLILAAAMRSIGLKAGLTEARMEIQDLIEDYELQTKRLERVNDLIKGLCQQVRYADKLLEIKGIGITTVAGFIAEVGDITRFDSTKELQKLAGLELVADSSGKHNGKTKISKRGRKRLRYLLFEAAISVVGKNEEFKEIHRYYTTREKNPLKKMQSLIAVACKLIREFHAILTKGIRYDASKMLKDIRHPGEQLKAA

SEQ ID NO: 352076 - protein, 347 aa, unidentified
MEHIGIDLGKAESQISILTEAGELVGQRIRTERGRFIKVLGDRPRARVLIEASTESEWVARYLEELGHEVVVADPNYAPMYAQRSRRVKTDRRDAEALAEACRLGAYRPAHRTSDPQRHVRALLGVRESLVRTRVRWIVLIRSLLRREGHRVRNGQTSSFSERVGELELPRHLKEEIAPLLALLGSVNVRISAFDRRLVQISRRDEVVRRLMTVPGVGPVIAVCFVATLDRVDRFRGAHQVESYLGLVPREWSSSEIQRRGHITKAGNTRMRWLLVEAARCVMRGKKRPETAALREWGDRIAQRRGRSIAAVAVARRLAGVLYAIWRDESVYDPEKLKSPIVAPRVA

SEQ ID NO: 352077 - protein, 345 aa, unidentified
MKKVMAGIDLHSNNLVIGIMDLDGKRVASQKLSCKLKEVVEFLSPFKQRLEQVAVESTYNWYWLVDGLQALRYPVVLANPAGMEQYSGIKHADDTNDAFFLAELLRLKILPTGHIYEAQLRPVRDLLRRRLTLVHHRTALMLSFKSLYTRTTGLEMSLGELKELEIKAAQDLYDHPANQLIAGMQIKHIEQLTESIEKIEKAVLDCARELPLYTKLTTLPGVGRILGMTITMEVGDIKRFAEAGHFASYCRTVEAKRTSNNKKKAENNSKCGNKYLAWAFVEAANFARRYDEQCRKWSERKAAKRGKVIATKALACKLAKAAWHLMALGTDYDAKRMFGQPATTQ

SEQ ID NO: 352078 - protein, 412 aa, unidentified
MRRVIGMDIHRTFGEVVFWEQGKLRRAGRVDMTQTALEGFGKTLLATDEVVIEATGNCVAVSRMLSPFVKRVVIANPLQVKAIAHAHVKTDKVDAGTLASLYAAGYLPEIWTPDAGVERMRRLVARRYQVVRHRTRIKNEVHSILHTHLIPKCPHADLFNGRGRSWLLLQSLPNDERQAIERHLRELDWLAEDLAVLDREIAATTLDDQAIKRLLTITGVNLVVAAGLMAAIGNIARFESPQKLVSYFGLNPRVRQSGLGAAHHGRISKAGRSHARAMLVEAAWAAAKTPGPLHAFFMRIRARRGHQVAAVAVARKLTMLVWHMLTKGEDYHWARPSLVAHKVRSMELQAGKSQQKGNRRGPSYAYHVKELRDQEMQIAKRAQKSYEQFIGSWRPRPPTKRRAGASTRQGLG

SEQ ID NO: 352079 - protein, 346 aa, unidentified
MHYSTTVGVDLAKNVIQISVVSSRGKEVLNRSLTRKKFAEFLGKQKPSLVAFESCASAHYWARSAERYGHKARIIPAKAVAPFRQGHKTDANDALAVAEAAQRPKIKEAPMKTVEQQGLQAIQRARELLIQECIALSNHLRGILLEFGITIPQGFASLLRALPEVLEDGDNELPDFYRPTLHRLYGRMLELRGDIEAMTKEAEVLVKDHPVCNRLTALEGVGPIGAMSLYAVLGSGEAFTKSREFSAYLGLTPRQLSSGGKTNIIGISKKVGNRRLRSVLIQGALAYVYKMKEPRSAKDRWLKDLIERAGPRRAAVALANKNVRTIWAMVTQGTEYQRRGQLEMAA

SEQ ID NO: 352080 - protein, 401 aa, unidentified
MKRLSGGIDIGGDFHHMIILDDKEQVLYQKRIPQKLKEMKEIMKELTCLQKKEKAHLSFALEGKNGYGNPLDRLLLAQGFTLYNVDNYKLKRFREAFAGERKDDHRDALMLSKMLNLKEHINTKGEKVFVEITKPSVITESLKLLSRHQQVLISEKTRLTNRLGKKLLEVCPELLTLGKLKDQKLIAILSRYPDFSRYQKITLDSLLKIPGIGKKQAPHLLAGLHELAYMPEMTAIYKTIISSYAKRISQLQKEIKEIDKKMDQIGGQDKTIRHLKSLPAVGTKLASRFTGEIGDINRFPSEKNLAIYCGIACVNNASGKTNKTKAVYKANKIAKQTLMMMGGGSIRVNPQCRDYYLKKRTEGKKHNHALRCLARQMIKVIYRMLTEDRDYQIKQEALKAA

SEQ ID NO: 352081 - protein, 354 aa, unidentified
MSQKLESTIAVIGIDIGKNSFHIVGHDERGAIVLRQKWSRGQVEARFANMPPCLVGMEACVGAHHLSRKLRALGHDARLMPAKYVRPYSKGQKNDFRDAEAIAEAVQRPTMKFVATKTADQLDLQALHRVRERLVSQRTGVINQIRAFLLERGIAVRQGLRFLRSELPRLLTTPPDVLSPRMVRIVEDLAGDWRRLDERVERLSDEIEAIARQDASCERLMSVPGVGPIISSAMVAAIGTGDVFTKGRDFAAWLGLVPKQISTGDRTILGKISRRGNRYLRVLFVQAAWVVLIKPTVWERHGLKPWIEAARKRLHHNVLAIALANKLARIAWSVLARGRAFEARKMDQAANQSA

SEQ ID NO: 352082 - protein, 472 aa, unidentified
MIYSVGIDLHQGRHRARCLDEKAQPCDGFSFQTTPEGLATLEERVFRDGANPIIVLEPAGLPWLMVAVYLRSRHPDCRLVKAKTQKVAALRRYLRGPGKSDRLDALTLAKMPFIDPEKLVEIYLPPAEIHALQRLTRQRKRLESDVSGRKIRMSAILDGYLPGVRRAFNDAWSTPFRAFLRSRLNPFAVAREGEEALHTFLSKASPRSKWSRAETRPVFLACQSVADVCELSEPAGTVNEEFFMDLQDEIARELRLMEIEEAESESLARRIAELYRILHPLDNLCTIPGVGEHTAPIFLATVGNPARFPNQSAFANWEGVVPGARQSSDVQAKGLRMTKAGPSIMRMALYQAGDIGRRWDPQLAAVYYREMVYHGKNHRQAMGAVMSHLGARVFTVLKGGRPYEIRDTEGNPISKDDARRLILDKYQVPEEIRRERRRRNRKVSKNRETATYRTNEAAKAPQPVLVQAVSRK

SEQ ID NO: 352083 - protein, 430 aa, unidentified
MSVDRSGEHEPLFAAFVGIDWADQKHVWCLQTADSQKRESGELEHAPEAVEVWVAQLCQRFGQGPIAVALEQSRGALVFMLSKYERLHLFPVPSTMAGNLRDALYPSGAKDDPRDADLLLDLLLKHRDKLRRLSPDTEATRRVQNLVEERRKLVDEKTEQINRLTSHLKIYFPQMLDWFDRLDREAACALLERWPTLEELQKVPPVKLRTFFCKHHCRDQEVIERRIVGIRQAVPAIRDGAVIEAKSAVVQVIAPLIRILVQGIGELDRKIEEEMAAHPDFFIFDSLPGAGPALAPRLLSAFGSQRARYGSAREVQAYSGIAPVIERSGKKKWVHFRWAAPKFLRQSFHEWAGRSIAQSQWARAYYEQQRQRGKGHHAAVRALAFKWIRVAFRCWKNGVAYDESMYLATLARRASLQSGSAIALSPAKTL

SEQ ID NO: 352084 - protein, 350 aa, unidentified
MTTMTPEPGSVTGGVDTHLDVHVAAAVDHLGGVLGTQSFPTTAAGYRRLLAWLRAFGRVHAVGVEGTGSYGSALTRHLAEQDVMVIEVARPNRQVRRRHGKTDVVDAVAAARAVLSGEATGTPKAHNGPVEGLRLLKIVQRSAKKARTQGINQLRNIVATSPDELRCRLRALKTPELIETCAAFRVRNDDDSLLAVTRLALRELAQRVQHLDEQLDRTSVRLGRITSAIAPELAAIKGVGPDVASTILVSAGDNPHRLRNERSFAALAGSNPIPASSGKTHRHRLNRGGDRQLNSALWRIAMVRLRQDQRTRDYLERRITEGKSKLEAIRCLKRYIAREIFAALPRQALV

SEQ ID NO: 352085 - protein, 418 aa, unidentified
MNAHSLMRRRAAIKPDTLVVGIDVAKFSHVARAVLPGGAVTRPFVFANSQEGFLSLQAQLTAWKPAVTSAMIVGLESSGVYWINLAGWLTEHGCQVVQVSGLHVYRAKELLDNSRGTSDGKDALLIADLVAQGKFLGFVRPAGVHADLRALVRLRLRLKQEHSARCSLLHQSVDLLFPEFAAVFRDITLPSARRVIERFPTPAAVLAHTPDEMHRELKGGGVRIGSRKLIALAAAARQSIGVREGTAGLVVALKDTLGELDSLEARLRVIEAEIRRLLAELDEAAILTSVPRMGAMTVAAIEAETGGLRQYSCAAAVLKLAGLNLYQISSGQYRGERHISRRGQPLLRHALYFAVLQHTRSGAPLYPYYAELIRRGKPRLVALVALCCRLVRLLFALVRDGRRYSALPPVGTGQAATA

SEQ ID NO: 352086 - protein, 318 aa, unidentified
MLIHYIDIAKRNFVIAVSSLSKTKTETNNPKGIAHTIEYLKKHKVALVVTESTVGLEIPAAKAIRRAGIAVIIANPRQTHQFAQSQPLTKTDAKDAKMPAFFAQMKAQKEDSQTMPYQPPTEAEEVLEALVNRRNQSADMRTAEKNRLHQVHETQVESVKQLIAHFDRLIDELDKQIDNHTHTHFDGKAQVAEQIKGIGSITTATLMAMLPELGRLSHKRIASLVGIAPHPRESGETKFKSRCFGGRSAVRKALYMATVAATRFEPLIRDFYQRLPSEGKPYKVAVTACMRKLLTISNARMRDYFAENDTAENGIRTA

SEQ ID NO: 352087 - protein, 406 aa, unidentified
MNMNAVGIDVSKRKSTVAILRPGGEIVKKPFDVPHLSSDFRSLTRLIQDLDGETRIVMECSGHYYEPIARRLSQAGFFVSAVNPHIIRNFQGHDNPLRKVKTDKADSVKIARYTLDSWGNLKQYTLMDELRSQLKTMNRQFSFYTKHKTAMKNNLIGLIDQTYPGANTYFNSPVREDGCQKWVDFVDTYWHVDCVRKMSLTAFINHYQKWCHRRRYIFSKSKAEEIYGKAKELVPVLPKDNFTKRIIKQAIAQLNTTSKTVEELRNLMNETASKLPEYPVVMAMEGVGPSLGPQLMAEIGDVMRFTHKGAITAFAGVDPGVNASGEYSQKSVHASKHGSPVLRKTLFQIMEVLIKNKPDDAVYLFMDKKRAQGKPYYVYMTAGANKFLRIYYGRVKEYLLNLSELN

SEQ ID NO: 352088 - protein, 332 aa, unidentified
MNTSDSLSVGVDVSAKTCAVLKRQMGKSGVVQHFANETAGHRALIAALAGHAQVRVCVEATGMYSMDLVMALHGAGIPVMVVNPKSSHNFAKALLLRSKTDNIDADTLAQYAERMPFVPWQPPAAEHFALRAFARRLTALTEEKAAAKNQLHALSATAETPRALLQDAKRGIAQLEKRIDQLTAHALKLIKAHETLRTALALITSICGIANTSAIALLGEVLVLPSSLTHKQWVAHAGLDPRETQSGTSVHKAPRLSKAGNRYIRRALYMPALCAVQRDPYVKAFYQHLIDNGKKPLQALCAVQRKLLHAIHGMLRDQKPFDNTRFFAMVKT

SEQ ID NO: 352089 - protein, 364 aa, unidentified
MAKDGTVLETRNIRHDSHKEMAEFFHELEDGTDVVMEAGFNWPWVADMAEEAGLKPHLGHAIRCRELAKGMAKNDRKDAIFLGKLWLAGGDVFPESYLAPQEVRVMRAKFRTRSLLVKIRSQMRNSIHGILHKYGVNCEEATDLYGKKGRKILAGLALPAVAREEMGRKLAFLDDLGKHIESIERQLQSELPEDKRAVLLQTMPGIGPIIAYGMLAEIGEIGRFPDRRALAAYAGVLPLDNESAGEDHGKRTNSRCNKALRWMALEAVRGSVRNSRRMRSLFERVKAKHPSTPGKAVIAVARELLETAYIILTRSVPYMENPPPRPGTGQITDSCHSEIRGTSGSRRASQMGRYAGPEKVQAAK

SEQ ID NO: 352090 - protein, 350 aa, unidentified
MRRPKDRLIAGIDLHGNNVMIGIINLDGKRVAHRKLDCDLKQVVQFLLPFKPQLQSMAVESTFNWYWLVDGLRAQGYPIDLANPAKIEQYSGMKHVDDEDDAFHLAELQRLNILPKAHVYDPKLRPVRDLLRRRTNLVHQRTALLLSFKSLYTRTTGQRLDLSQVKQMEPKEAPKLYEHPANQLIAQVQTQHIQALDQSISQMEKAVLACAREIPFHEKLLTIPGIGRVLGMTITMEVGDVGRFKTDGDFASYCRMVDAKRLSNGKCKADNNQKCGNKYLSWAFVEAANFARRYDPRFRRWYDRKAAKTNKVVATKALGCKLAKAAWHVMATKSNYDEKRMFPELAMKKN

SEQ ID NO: 352091 - protein, 366 aa, unidentified
MKKISTAVGKQTSSFQDQKLTLGLDLGDRSSWYCVLDGAGEVLLEQRVSTTAKAMKEVFGGMARSRMALETGMHSPWVSRLLSELGHEVIVAHARNVRLIGESRKKDDRLDARTLARLARIDPQLLAPVKHRSAQAQVDLSVIRARAGLVRARTALINTARGLSKSYGERLRSCNPRNVNLEKAEGLSPELQAALEPLLVAIESLSQQIREYNERIEGLAEESYPEVALLKQVKGVGTLIALTYRLTLEDPNRFRQSRDVGCYVGLQPGRRNSGQSEPQLHISKEGDPYLRTLLVQGAQHILGPFGDDSDLRRWGLKLAERGGKNGKKRAVIAVARKLAVLLHRLWVSGEVYEPLRNSSQPVPAAA

SEQ ID NO: 352092 - protein, 414 aa, unidentified
MESLDRCIAGIDVHKKMLAVVVRKPSERGVEYVQRKFGTTKKEINHLAAWLQHCKVTEVVMESTANYWRPVWYGLERHFQLHLTHPLKTRAPRGRKRDYMDAARLANRWHSGDLEESYVPGAEQRAWRWLTRTRVQLKRKLAVVRGQMEGILEQGGIKLTAVVTDLFGVSAWAMLCKIAEGETDIDELMGEARGKLKKKHAQLKEALVGVLEPIYRFLLKQHMEQVQLIWRQVEELNQALIESMKDHVAVLVRLAKIPGVDLYAAQELLAEIGAGAIAFPSGDQFASWAGVCPGSQESAGINHSRRSAKGNRYLRRLLCQIAWAAVHTKNTFFGSLFARLKPRLEAKGAAWAVAHRMSYVIWLIMHNEVEYKERGIVPLKPKTLKRKLKRILQELTRQGVDAKSFLEQELTAIA

SEQ ID NO: 352093 - protein, 315 aa, unidentified
MALYVGVDVSKAWLDVATRPDGRAGEHFRVPNDPEGVGALVARLGGLAPELVVLEYTGGLERPAFAGLRVAGVPTTRINPRQVRDFAKASGRLAKTDALDAAALAHYGEAMKPEPSELPDPEAEALGALLARRRQLVGMQTAERNRLKAVTDPHVEADIEEHIGWLQGRLDRADAELERAVRENPEWSAKDELLQSVPGIGPVLSLTLLAELLELGSLDRKRIASLAGVAPLCRDSGKLRGRRSVWGGRARVRAALYMGALAAKLHNPPVKALYERLLAAGKPKKVALVACMHKLLTVANAMLRHGTLWQSGAAA

SEQ ID NO: 352094 - protein, 337 aa, unidentified
MEQYVGLDVSQETTSISVRQDGRRVWRGKCPTDPKALSEVIRKHAPHAVRVVFETGALATWLYHVLQAENLPVVCIDARHAKAALDMAPNKTDANDADGLAQIAEIGFYREVRVKGYGPMLTRTLVGARSQLLRISVQLSNQIRGIMKTFGLIVPKGAGRIFERNARALLETNEAVARVVLPLLETWQVVRARAAELDRQLIAAARTGSSYRLLMTIPGVGAITAVSFVAAIGVPENFKRSRAVGAWLGLTTRRYQSGETDYDGHISRRGDRYLRALVYEAAVAVLTRTRTDCALRSWGLKLKAKVGFKRAAIAVARKLSVIMHTMLKTGAAFAAAA

SEQ ID NO: 352095 - protein, 353 aa, unidentified
MGHQVKALVDGVDEFIGIDHHKRRSEVIIKGRDGQVVKRGNIPTSKEALSDLLGEAHGKVRLAVFEAGPRYRPMWRWLGELVDQVVMANPGRLKIISQTAYKDDRIDAGKLADLGMLGMVPEAYACTDEAWDRRQLLRQRAALVRMQTAIKNRIHALVDLHPDAEPPRLEASDLFGKLGMAWLEKLELPRADRKRLDQLLEVYEFLHGQIAHSDAAVRKIVRSDVHCQWLATVPGIGDFFAALIMAEVDQVDRFPDSKHFVSYTGLVPGRDKSDQVDRPRRMHKQGSKWLRWALVEAAVPATRTNLALKSLYDRICRKKGLRDGPNLAKVAVANKLAQVVYRLLVEQRPYEER

SEQ ID NO: 352096 - protein, 376 aa, unidentified
MSKILFVGLDVHADTIAVAVAEPGGEVRSHGVIANRLESIRKLIGKLGPANRIKACYEAGPTGYVLYWQLTQLGVACEVIAPSLVPAKAGDRVKTDRRDAEKLARCYRAGELTAVWVPDEAHEALRDLVRAREAAKKDQLKARHRLGKFLLRHGRRPEGIKAWTKQYLEWIKTHVRFNHAALEATLADYLEEVDHVAARIVKLEKAIDEAVRKAAPEIRAVIEALQALRGVAQMTAATIVSELGSLSRFESPRQLMGYSGLVAREHSSGNRVQRGGITKTGNSHLRRVLVEAAWAYQHRPNVTGFLLRRQKNLALSDEVKKIAWKAQYRLHKRYKAMAARGKNKNQIVTALGRELLGFVWAIALEAENQHKLAKAA

SEQ ID NO: 352097 - protein, 412 aa, unidentified
MEVVYPCCCGLDVHKKSITACVLWAEAKGKSRKEKKRFGTFTHDLLQLADWLAQCGVTHAAMESTGVYWKPVWNILAEQFEVLLVNAQHIKAVPGRKTDQKDSEWIADLLQHGLLRGSFVPPRPTRELRDLTRYRVSLVQEINRIANRIQKVLEDANIKLGSVATDALGASGRAMLEAMLAGEQDAARLAELSKGLLRNKIPELKLALQGRMTEHHRFLLRQLFDHLCFTESKLHEIEQEIDRRMLPFADEVIRLCTIPGVDRVTAWGMLAEMGMNMNQFPSSGHLASWACLCPGSFESAGKRLSGKMRKGNVSLRRCLSQAAWAISMMKNNYLSALYRRIAARRGAKRAVMAVAHALLVIAFHMLKRKENYHELGADHFDRIDISRVQRSLVRRLERLGHKVTLEPLAQTA

SEQ ID NO: 352098 - protein, 413 aa, unidentified
MLFVGDDWAEDHHDIEIVDGQGRRLARRRLSEGWDGVSRLHALIASVMPAEWKDLAPADAAARVKIGIETDRGPWVVSLVAAGYEVFAINPMSTARYRQRHGTSGAKSDPGDAHVLAEIVRLDRAHHRPVAADSTASEAMKLIARSHQTMIWDRTRHVLRLRSALREYFPAALDAFDDLDAVDALALLEMAPDPETAARLSKARIGAALRQANRRNVEARAAEIRAVLQAPALRQPAPVQKAFAAITVSEVRVIVALNTEIDALGEVVAEHFGRHPDAKIYASQPGLGAVLGARILAEFGDDRDRYTSAKARKNYAGTSPITRASGIKKTVLARHARNDRLGDAVHQWAFGALRGSPGARAYYDAMRARNIGHHAALRQLANRLVGVLHGCLKTRTVYNEDRAWAHHENTAAA

SEQ ID NO: 352099 - protein, 346 aa, unidentified
MKKVSTVAAKQSRKTSSQKLTVGLDLGDRSSWYCVLDESGAVVLEQRLSTTPKAMGEVFGGMPRSRIALETGTHSPWISRLLEELGHEVIVAHARKVRLIGESRKKDDRLDAQTLARLARIDPELLCPVKHRSAQAQADLTVIRARAGLVRARTALVNTARSLAKSYGERLRGCNVRNMNPEKAEGLSPELQTALEPLLAGIKSLSDQVRESNQRIERLAEESYPQVALLKQVKGVGTLIALTFLLTLEDPHRFRKSRDVGCYLGLQPGRRNSGQSEPQMHITKEGDPYLRTLLVQGAQHILGPFGVDCDLRRWGLKLAAAAGRAGRSELSWPPRESWRCCCITCG

SEQ ID NO: 352100 - protein, 431 aa, unidentified
MEAAQQGGRRPGRLKRRSAKRRAPKGYRDNWALPPLRPQDFNIWLDDTEDEEFMQIQCQEPTNAQLVDSEPVVQLPAMEDLPMLSNSTISGAMYAGIDYHKKTIAITFGDKSGNVLQQIEINNITELVERLFKQFEKLECVIESCRGYEWLVEMLQDQGHTVHVGDSRSIKLIACSRCKTDKIDSRILMELLAKGFLPTTYIPSAKERRYRELLRHRSTLVRTATRSKLRIHAVLAKENIQIRYPYSPAGRNRLEQLDMADHRYEILAQELAVMDFAEERAREQYLQISRCAKNEPDVARLKTIPGFDVLMSMAFLAEVGDHRRFKNADQVTAYFGLVPRVYSSGGTRRCGRITKTGSTFMRWMLVQAAWAAIKVSSNLRQRFSSIGRRRGQKVAIIAIARKLATIAFRVLRDKSEYKEDLLDAGLARAAF

SEQ ID NO: 352101 - protein, 457 aa, unidentified
MKTTRLKKAKVNKSNDKMITMPTINPHAAGIDLGSKSHFVCVAQDNVKEFGVFTSDLHAIAAHLKSYGVKTVAIESTGFYWRSIYLILLDYGFEVFLVNAAHLKNVKGHKTDVVDSRWLQLLHSIGLLSNSFQPDALTHELRTYTRHRKNMITDASHLISKMNKVLVLMNIQLHGVLRNITGVSGLKVIRAILQGERDPKVLSSLVSLRAKASREDIEKALTGDIRKEYLFELDQCFQLYNFYWQKIEEADKQIEAWLKDHVSNMPPNDGYKKPKNKNRGTNDPTFNVGKYVHRLTGGIELLDINGVGSNTILTLASETGLDMSKFPTAKHFASWLGFVPNRKITGGREISSHTRKKTNPLAKVIRDAANSTGNSKSKLGDFFRHLAYRKGRTAAIGATSRKIAVIIYKMLTEGKPYSYEYAQEQTEYMKVSKMKTILKTMDKFNISRDDLQLAWSM

SEQ ID NO: 352102 - protein, 341 aa, unidentified
MRMYAGLDIGGKRTAICVIDGSGKAVWRGTVDTHPEMIDGALQRFKGSLDKVGLESGPFTPHLFRSLEAIGYPMICMDARRAADAIKSRRIKSDKGDAWALAEMLRTGWFSSVYVKSVDTHRLKALLGARDQLVKLKRSLGNQVRGLLRPFGIKLPSRAGGKKFDEGAYLATRNDPILHTAIRALLESLASIEGQQARLDDELDELAKRNEIAWRLMSVPGVGRITALACMAAIENVERFRRTRDIGAYLGLTERRYQSAETDVGMGISKQGDAMARHYLYEAANVLLTTVKKRFALRNWGLRLVKTIGPKRARVAVARKLAVLLGRLWKDGAHFEVAVAA

SEQ ID NO: 352103 - protein, 356 aa, unidentified
MNRKMKDYIVKGKKVFVGLEDSKKTWKISARSEGMEIHYTAMPAKYAGLREYLFRKYPSCEITVIYEAGFKGFGLHDQLMSDGIRCIVTPPNKVTQEKDCRVKTDKVDARRLAKVLEQGDYKACSVPDKERREDRQVCRAMNQVQGEITRVKNRIRKFFDANGYAEAFPAGEWGEPQYAKVRTMELPPALKLTLDTYFSMLDKFKELRKKLHKEIMAMAKKDRYAEAVRIIKSIAGVGKLTAIRLVLEWGEDMGTRFRSGGSLACFSGLTQCEYSTGERIHKGRITRQGRGYIRSWLIQCAWMCIKRDPAMLEAYQRIAKNTASKKKAIVAIARKLVVRLWTCLHTKTEYAVGVVE

SEQ ID NO: 352104 - protein, 349 aa, unidentified
MNDVTTYGLDLAKRVFQVHWVDVQSGEVHRKTLPRTQVSVFFARAPRGVVAMEACGSAHHWGRLLQTMGHAVKLIAAQFVRPFVKTNKTDAADAQAIWEAAQRPEMRFVALKSEQQQAVLSLHRLRAQWVKVRTLQANQIRGLLYEFGVVVPLGWRALLNVATEQLTDPTEGSVPVLLRDELLKQLQALRDATAHIVALEKQLASWQRTAAECQRIMAIPGVGLLTATAVVASVADAQQFRSARQFAAYLGLVPRQSGTGGRVKLLGISKRGDTYLRTLLIHGARSVLLSQSRHGRSVDPWLGALLQRRPSNVVVVALANKMARTIWALLAQRRTFDANWHRGAIHGVA

SEQ ID NO: 352105 - protein, 476 aa, unidentified
MGRQSTFDRSERRREDRRGKKNAKPAVLTPRDLEIVHPDAAGIDIGSRTNYVAVPPARDTEHVRAFGTTTPQLHALADWLQQCAIRHVAMEATGVYWIPLYEILEERGFVVCLANPHEAKSKPGRKSDVLDCQWLLQLHTFDLLNASFRPKDVIVELRSYMRLRTTHVRQQSDEIRRMQKALHLMNLQLHNVLSDVTGTTGMQIIRAIVAGERDPKKLAANRDYRCHASSEEIEAALTGNYRPDHLLSLTHSLKLWDHLQTLIQECDQAAQDLLARTIQSRGDCAPEIEVATKKRGGKPTTKAPFASQLTTLTSVNIAAIPGFDNLSACKLISEIGMDMSPWPDAHHFVAWLRLAPGSSITGGRVLRSRKGQPSRSRAAEILRQAAVNTRSTQTWIGGFYRRMKARKDSGVAVAATAAKLARILYRLLKTGEQYIERGIDAFEAAGRDRSLKYLQKKAKRLGFALVELPKAAPAAA

SEQ ID NO: 352106 - protein, 404 aa, unidentified
MEVLYERCAALDVHKKVVVACVTTPEGKETKTFGTMTSELLELADYLVSKGCTHVAMGSTGVYWKPIYNILEGTGIEVLVVNARDIKAVPGRKADVKDAEWICDLLRHGLLRGSFIPGRPQRGLREVVRYRKDLIEERARGVNRIQKVLEGANIKLGDVATNVMGKSGQAMLEALVAGETDPESLAQLARGKLKKAGQLTKAMEGLIRPHQRMMLAAQIEHVRFLDGQIKKLDREIEERMRPFEKAVEALDGIPGVGRQTAEEVLAETGDNMSRFPSAAHLASWAGLCPGNNESAGKRKSGRTRPGNPHLRTTLVEAARSAARTKNTYLSAQYHRIAARRGGNRGAVAVAHTILVIIYLMLKEGTAYQDLGADYFDKLNHDAVARRAIKRLEALGYKVTLEQAA

SEQ ID NO: 352107 - protein, 430 aa, unidentified
MDGVNGNRLEEFRQLRKAIRQSEEHLIVGIDIAKDRHHAFFGTATGKTLLRRIVFSNDHAGFRKLLEQAEALRVQHGLKRVVYGMEPTANYHKPLGEYLIKLGRTVVLVSGVTVARNRESLDGRWDKHDGKDSVNVADLISQGKCLYYEHPSAELRGLRGLLSLKRRLKKQEHGYRVRIRNHLIAQYYPEMDRDYERLGAEGLSVVRWCLAASEIAQLDVDPFIERVTSRRITVEKRRRLEEIWEKAAGSIGCDGVPGVSHEAKIMVEGLRQIREMIKETEQKIEELCKAFPEYQYLLTIPGFGPDVSAKVLGAIGDPDRFQNGKQVLKMGGLDLSADRSGKDSGRAIPEISKRGKADLRYALYQAALIASFKNRDVMIYYTNKIRGREREKGIHVKMRVKLAAKLLVIAWTLMKKREPFNPVYLKAELD

SEQ ID NO: 352108 - protein, 331 aa, unidentified
MYVGVDYHKRYSVATIMDEAGAILSQQRVNNDPETLRQFAAQLPAGSTIALEATGSWYYFYELLENTGIDIRLAHPLKTRAIAEARIKTDKIDATMLAHLLRADLLPTAYIPPQEIRDIREILRYRASLVALRTSLKNKVHAIVSKNGIDIQYSNIFGKKALRYLKNLELRPCYRVGLDGYLRLAELFTILIAEVTENIKEIVKDNPQATLLTSIPGISYYSALLILSEIGDVSRFLSARKLCAYAGLVPSVHCSGGKSWHGTITKQGSRWLRWILVELSPHFARSCERLQRMYARISHKQGKHTARVAVAREMLKIIYYMLRDNRAFVRG

SEQ ID NO: 352109 - protein, 414 aa, unidentified
MKYNKKMEEIKGVKVFAGVDIGKEAHFMSLIAKDGEVIESGMRIVNSKEGFKEMLEMLKSIGTEKEVAVGMEPTGHYWKPLGYYLHEKGYRVYLVNPYHVKLSKEMRDNSQRKTDKKDSRLIAYLLMEGKFLNSRLLSGNYEELRRLTTARERIVQEIVRCRIRLISILDEYLPEYERCFCKITTKTSLKLLNKYGIRGLREKSNTKEVLEDIVKFSKHKISEARALEIVGKLENTIGLKEGLKGAEIELKLWIKQLEGYMADLKNIEEEIERVLNETEESKYLLSIKGVGYITAAIVLGQTGSFRNFSNAKELEKFAGLDLVERSSGKRIGEKSVSKRGRKLLRHGLYRVAIVAIARCKEFKALYEYKVNILRKNKMVAVTDITVKMLRIMFAVVKNKTMYDGNLVLKAIAYS

SEQ ID NO: 352110 - protein, 343 aa, unidentified
MSIDTMIGVDLAKSVFQVHGASMNGEVQFQRKLSRQAFRTLMARHPAAAVVMEACGSAHYWSRVLSGFGHEVRLIAPRYVRPFVKRQKNDAADAEAIVVAAQRPEMRFVEPKSESQQSAAILYRSRQRLVRQRTETVNALRAALYEFGHVIPQGIQQVGPIRAILEAPNSDLPTLMREECVAMLEQIAVLNGWIDRKTAKIKELAAATPVSKRLQTMPGIGPVVAMAVETFAPDMACFHNGRGFAAWLGLVPRQFSSGGKERLGRVSKAGQADIRQMLIIGAMSRLNWMGRKSIPESSWLARMMARKPRMLVAIALANKMARQIWAMLTKNEDYKNPMPVMAA

SEQ ID NO: 352111 - protein, 431 aa, unidentified
MTNRLQVGIDFSQKRADLCLLLPQGDLLEAHLPFANSLPGYEQAKALLLEAMERFEFEGLNISGEATGYYWLPFFQQLANDPHLKQHDLALFLLNPRWVKWFKKSFSQDDKSDQKDPFYIAERTRTRRPPVAWQPLSTMALRFYTRYRFHLAQDLTREKNYFLALLFLKASAYNRIKPFANPFGVTSSHILSQNTDLAELAALPIEQLAHLLAELSHNKLPDPVDNAFKLQETVRQSFPLDPNLALPVQEILDLTLAHIRFLEQQGRQVETKIEAEMANYPVIQKLTTIPGLGLILASGIGAEIGDTHRFLQAPKWDKKRKRYRPRTLRDAEDAVAKLAGLWWPRHSSGDFEAEDRKMAKSGNAYLRYFAIQAADKMRHHISEYAQFYHKKYHEVPKHQHKRALVLTARKSMGLFVGLLHRNEAFRSKEAP

SEQ ID NO: 352112 - protein, 333 aa, unidentified
MRLVKYRYYFERGRSCVAYLGVDISKADFHCCLLDGQRSTAAKFDNKPTGYRGVLKWLKKQRAQDVRVCMEATGAYWRGLANALYAAELQVSVVNPSRTAHYAHVRQQRTKTDVVDAAMLADFCKTQEPDLWKPPAPEILELGAFLTYRTQLVNQRVAQKLLVTQVEGNRALERIHTAQLNALGKAIDAVDREMRAHLKRHGKLQESVALVESIPGLGTLSAATIVARLPVDRLRNSKAVGAYAGLSPRDRQSGTSVHGKSRICKTGNAALRQALYMPAMVAIRYNPAMKAFAERLKARGKPAKVIIVAVMRKLLVLAYTLLVRKSTFDPSRA

SEQ ID NO: 352113 - protein, 488 aa, unidentified
MAKRKLSTFERLTSGKLNRAQRKELTRRICSDDPGLEVVHQHVAGIDVGNESHFVAVAPGCDAEPVREFGSWTADLTRMVEWLKSCGIQHVVMQSTGVYWIAVYDVLEKAGFQVCLANARDTRNLPGRKTDVQESQWLLKLHTYGLLRNSFRPPEEIRMLRTTWRLRDRHVREAAREIQHMQKALTTMNVQLANVISDLSGVTGLAIVRAILKGERDPHRLAQLRNYRIQASEEEIARSLEGAWQEDVLFELQQAVEAYDFCQKQIGKCDVRLQKYLAALPDRAIAPPDGAGGPGDPNQANPNQNDKRKKSKGRKSQRNHPPLDLEAEFTRICGVNLKSIDGVDVMTIATFVSELGTDMTRWRTEDHLVSWLKLAPCRQISGGRMIKRERVKTKNRVAGALRMAASSLIHSQSYLGARFRHLRSRLGADKAIKAMAAQLARLIYRMLTHGRAWVDRGEQAHETKRAEREKLMLQRKAAQLGFRLEPAA

SEQ ID NO: 352114 - protein, 350 aa, unidentified
MLIIGADYHPSFQQIAFCNQDTGECGDRRLNHSDGETDRFYRGLKQRGISVRVGMEATGFSRWFERLLAELGFELWIGNAAEIKTKRVRKQKTDREDARLLRKLLLEDRFPRIWVPSPENRDLRQLLWHRHRLVQMRTRIANQLQALAMNEGKRCRKLWSAQGRAELEKLALAPWASRRRRELLELLDRLHPTIEELTTAVEKEAGKRPEVLRLMTHPGVGPLTALAYVLVIGTPERFQCGKQLGSYVGMIPSEDSSAGKQRLGHISKQGNSLLRFLLVEAAQAAARSNDAWCRRFSRLAIRRHRSIAKVAMGRRLAIRLYWMWRNQCEYSPKMEFGSYVGQLGPGHGVK

SEQ ID NO: 352115 - protein, 392 aa, unidentified
MVVSVGIDVSKDKHDCFILNSEGKVLAEVFTISNTMDGFNCLLQKIQDSTTPQDKIRVGLEATGHYSYNLLGFLLDRGLATYVLNPLRTNIYRKSLSLRKTKTDRVDARTIASMLLSDAGLKPYTDTAYHNEELKSLTRYRFDKVKERAKLKSSVSRLVCILFPELEKLVPTLHMASVYALLEEFPGAKQIARAHLTRLKSLLETTSNGHYKRDMALEIRDAARNSIGSWMPAKSLELQHTIRLIRELDDEIAEIEEQIQAIMDELNSPITTIPGLGFRMAAMILAEVGDFARFDSPDKLLAYAGMSPSTYQSGQLKNCYPHMEKRGSRYLRYALYNATKYVCLWDPAFVAYLAKKRAEGKHYNIAISHAAKKLLRLIFAMEKSRQPYRVAA

SEQ ID NO: 352116 - protein, 389 aa, unidentified
MILFFRPILASSANQMGWTASSGINGATVEVRENERREPPTMSVIMMIGLDAAKSVFQIHGVNEAGKAEIKRKLGRSELLPFFEKQPACTVVMEACGVGHHWARMLTGLGHTVRLIAPEAVRPFVKKGKKNDASDAAAICEAASRAEVKFVPIKSIELQGILALHTTRSLLIRQRVMLSNAIRGLAAEFGLTVSKGAEKLHELVALIDADQSLPADARHAIVALRSHYRNLVDSIDTFEINIVAHARHDDMARRLATIPGIGPITASLIAASVVNIALFKTARQFAAWLGLVPRQNSTGGKTRLGRITKAGNREIRTLLVLGATSMIHRAAVWNSVVGAWLRRILERRPTRLATVALANKMARIAWAVMVRKEVYHPKGAIMAGVNATA

SEQ ID NO: 352117 - protein, 493 aa, unidentified
MGACGLESGDVVLAAIPIRKMTIGIAQTLLLVIERRIAMPKRTTGDRPELKTVSVGAAAIDIGSKMHMAAVNPACTDVPVRSFGTFTQDLHDLADWFKACGVTSVAMESTGIYWIPVYEILEQRGFDVILVNARYAKNVPGRKTDVSDAAWLRQLHSYGLLRGSFRPDAEIATLRAYLRQRERLVEYAAAHIQHMQKALMEMNLQLHHVVSDITGATGMRIIRAIVAGERSPDVLATYRDVRCHSSPETIRAALVGNDRDEHIFALTQSLELYDIYQAKMLDCDRKLEVLIAALSNKGGKPVGKLSKPRIKTKQVNTPTFDVRTALYGVLGVDLTEIHGLGPSLALKLVGECGTDLRAWPSAKHFTSWLCLAPGNKISGGKVLSSRTRRSSSRAAALLRLAATTVGRTDTALGAFYRRLSSRAGKSKAVTATARKIAVLFYNTLRHGMSYRDPGADHYEQQYRSRVLANLQRRAKSLGFLLQAIPGDADPAVS

SEQ ID NO: 352118 - protein, 416 aa, unidentified
MTHSEVQERKPTVKKNNRQGREKAGVVKPCKQTQQQERAERRAEALLRKLEANAARVVETRQEAPAYYIGVDVGDRKSHFCMLNAAGKVVIEESVATTREALTAYFSQVKRSWMVLEVGTHSAWISELLEGLGHRVVVANARKVRAIYGNRRKNDRVDARTLARLLRVDEELLHGIRHRGVAARQSLTVLRARDAMVQVRSKLINSMRGLVKSHGRRLPACSVESFVGKVRDAIPESLKGALAPMLEQIESLTLSIRKYDRSVTVLAKKHKETGSLRQVKGVGELISVAYVLTVEDPGRFRKSREVGPYLGMVPRQDDSGDSSPQLRITKTGDRMLRRLMVTAAQYILGHHGEDCDLRRYGLRIAARGGKNGKKRAVVAVARKLAVLLHRLWVTGEEYEPLRNSRQEQSQGRQAAA

SEQ ID NO: 352119 - protein, 372 aa, unidentified
MSQSTTAYVGLDVHKDSIDIALAETPRESEVRHLGAVGGGVEPVSKALRRLVSRGQRLHIVYEAGPCGFVLQRHFAALGWHCDVVAPSSIPRPPGERVKTDRRDALKLARLARVGELTPVRVPDTADEAVRDLARAREDAVREQRNARHRLKALLLRNGIAYAGRSAWTNAHLRWLAQVKLAHPAQQIAFQEYLHAITEAGARIARHEQALRDALPGWTLAPLVHALQALRGVQLIAAITLVAEIQDFHRFANPRQLMAYLGLVPCEHSSGTRRRQGAITKAGNAPARRMLVEIAHLYRYPARVSPVIARRQAELPTAVTDIAWAAQLRLCARFRRLAARRVPHNKIVVAIARELCGFIWAIALTVAPTLPH

SEQ ID NO: 352120 - protein, 387 aa, unidentified
MQSVTPATVVAAAARTNDITLFASLELSKSKWVVTINSPGSEKFSKHLVEGGDGAGLIDLLSRSRAKAEQRYGVPVKAIVIQEAGLEGFWIHRLLIANGIESHVVDAASIAVPRRHRRAKTDSIDGETLLRTLMAWARGERRVCSMVQAPSPEEEDRRRLTRERGALLEERIRHTNRIRGLLSGQGIRDYNPLRRDCLKRLEGLRTGDGRELPAMLKAEIRRELDRLALATTQLAAVERARDALIRADAEERNNPAAMLLKLKGLGPEFASLLWLEALFRSFANRRQVAAYGGLAPSPWQSGGVERDQGISKSGNRRLRKTMIELAWFWLRHQPDSALSRWFQARVGAAKGRVRRIGIVALARKLLVALWRYVTQGVVPEGAVFKAA

SEQ ID NO: 352121 - protein, 459 aa, unidentified
MKRDKRKAKRLPSQLAAVNLHAAGIDIGAQEHWVAVPADRDLQPVRRFGACTADLEAIADWLQQCGVTTVAMESTGVYWIALFELLEARGFAVVLTDAREVQRAPGRPKSDVQDCQWLQRLHTYGLLAAAFRPTEQVCVLRSYLRQRAMLVTYASQHIQHMQKALTQMNIKLQHVISDVTGVTGMTILKAILAGERDPQKLAHFRDRHCQHSEAEIARALQGNWRTEHLFALQQAVELYEFYHQQITTCDHQIEAHLQTFVDKSEGKELPHRPRKRKRRATEPRFEARTPLFRLSGVDLTAIEGIDENTALVLLSEIGTDMSRWPTEKHFASWLGLCPHHKISGGKVLSRKVRPSANRAATALRLAAQCLHHSHSALGAFFRRLKARLGAPKAITATAHKLARLVYRLLKYGEDYVAQGMEEYEQAYRARTLQNLVRKAKALGYKLLPTSDAASQGAPA

SEQ ID NO: 352122 - protein, 329 aa, unidentified
MREVVVGLDVHLKNTQVTIMKLNGEIVKKERVKTCKAELRRVLESVPKGSKVALESVGFCWPWIDFLDELKYEPLLANPVRVKLRAEDVKNDKVDSRTLADLTRMNWLPTCYVPPAELRWLRNLLRHRAFRTKLCTGVKNRTKSEFSKRDIGLDVNLGTQKGRKAASKLDVFEVSQNVELLEIMDRQTKEVEAMLRKKYGQTRPVVLLMTIPGIGFLSAVTLYAEICDIKRFSNPEKLAHYAGLVPKVRQSGEHSFVGKETRGDAWLKWILVEVAWAHVRYCPEGHLAQVFKDACKRKGNSCDAIKIVARKLVNVVWAVWTYEKEFMVK

SEQ ID NO: 352123 - protein, 417 aa, unidentified
MAMKIVRFNCCGMDVHKNLVVATIGITDRKTNVTEYFQRSFSTLNSDLYRLKDWLRSHHCSDVCMESTGKYWIPIFNILEDEINVHLTHPKYVKAIKGKKTDKKDSKWICDLFKHDLIKFSFIPPKEIRELREIARYRYKLVCMRSSERNRYQNCMTVSNVGLASVVSDPFGKTASNIMKEVMKSNVIDDDKILKLVHKNCKNKDKILDSLHGYRIESDQRFKMEKSLDHMEYLDQLIDSCEVELIKRAYPFRRSFQHITQIKGISVLSAILIISEIGIDMSQFRSDKQLVSWAGLSPANNESAGKKKSVRISKAGQYLKPLLVQCALSAIKDKTSYFGRKYSNIKKRRGHKKAIIAIARMMLVSIYHMILTGEEFQPCDYESFMDPKPNANPSLTVEKALNFLKQSGIDISSILVN

SEQ ID NO: 352124 - protein, 413 aa, unidentified
MEQLIQRCAGIDVGQAELVVCVRVPDAVTGAPAELIASYGTTTPDLLELVDWLRGLGVTDVAMESTGVYWKPIYYLLEDDFTVLLVNATHIKHVPGRKTDTIDSAWIAQLLAHGLLTASFVPPPPVRELRDVTRYRKALINEKTAQVNRIHKVLQDSGIKLTTYATDVMGVSGRAMMRALIAGQSDSTALAELAKGRMRTKIPDLRKALTGRFREHHGFLLKRMLDHVEAQEAEIAALDERIEAALDPFVAQVELLTTIPGVDHRSAQVILAEIGPDMAVFPTAAHLASWAGMCPGQRDSAGKHGSGRTRKGSKWLRAALVQSARAASRTKGTYLSERYRQVMRRRGDAKAIVALGHEILLAAYRVLTTAQPYIDPGLATLSRLTAQRLTRQAVRRLQDLGYQVTITPRTDAA

SEQ ID NO: 352125 - protein, 374 aa, unidentified
MKGTRFIGLDVHADSIAVAVAEPSGEVCPLGVIPNDPEAVRKLVRKLGPPESLRACYEAGPCGYPLDWQLTQLGVGCIVVAPTLVPVRAGDRIKTDRRDAAKLARSVRSGDLTPVWVPDAAHEALRDLVRAREAAKRDQLRARHRLQKFLLRHGRRAPADVKAWTQRFGLWVRGLRFDHPAQEATYLDYVGEVDHAAERITRLEQAIDAAVATVPELMRTVIEALQALRGIGRVTAATIVAEVGPLARFDRPRPLMAYCGVVSREDSSGGRTRRGAITKTGNAHLRRVVIEAAWAYQHRPAVGPTLRHRQRHLSAAVTAIAWKAQHRLHQRYRRLTGRGKPRPQVITAVGRELLGFIWAIGVEVERPALMTATA

SEQ ID NO: 352126 - protein, 335 aa, unidentified
MKVFYLGVDVSKKKLDLCLRSNGKDILYDVIPNDLSSIKSWLTRTFEKFFLSEDSLVVCAEHTGQYTYPLVCATKSIGVYLCLEDAAKIKYCHGIPRGKNDKIDACRIAMYAERYNDCLQPYTASELIIQKLKNLSTERSMLVADRAKYQSQLKDQVDYMEHSIYIAKCNRVEGIINTFTDYIAQIDLEIKELINQAPVIAHQMDLLMSVDGVGERVALKMIMETDAFTSFTDPRKFCCHAGVVPFVYVSGSSQRSKNRVSNRADKSIKHLLHMAALSVSQVKNSPLKKYYDRKVEEGKNKMSVLNAVRAKLVTIMFAVIRACLLYTSPSPRDCS

SEQ ID NO: 352127 - protein, 346 aa, unidentified
MLHVGLDLSRKRIDVCLISDQGELIDRLTATPDRDGLYGLARRVAVYGEPVRAVVESMNGARFVHDELVEHGWEVLVADAQKVKGLAPLACKTDKIDARVLGELSFRDLVPAIWLPTFGLRREREISRWRLHLVKHRSTLKNRVHSTLITFGHQRHMSDLFGVAGRRLLKELEIPEPWRAHVDASLVLIDDLEARIMAIVKELRRSGADHRYVPVLMTAPGFGWITSFTVACEIGDINRFSSPVKLTGYTGLCPRVKQSGQMDQRGPLSKHGPKYLRWGLMEAAIAASSHPLYRERYQRTKRRLGRQRGPKVAQIDLARQLTQAIWYMLTRNQPFTPAGATFRLAA

SEQ ID NO: 352128 - protein, 326 aa, unidentified
MTQHKIIGIDLAKNIFFLFEINHKGKNLSRKKLQRSKLLSYIANKEPCTIAMEACSGAHYWAREFSQFGHEVILYAPQHVKTQRRKQKNDYNDAEAIAEVALYKRPHPVPHKSVEQQDIQSLIRMRRLLVTERTRIVNQVRGLISEYGIIMPKGAAAFRKAIPEILENDENQLSCILRELISHQYERYLYIDEQVKWFDDKLNQTIKQFENAKRLMSIPGFGPLTSQAVAVWLGSGQQFKTGRDASAAMGLVPKQDTSGDKVILLGITKRGNTYIRSLLVHGARAALRRAKFKSDNLSKWMLELQERRGPNRAAVALANKLMRIAW

SEQ ID NO: 352129 - protein, 418 aa, unidentified
MMEDISFFVGCDWASEGHQLCLLDAAGECVGRRQVAHTGSALAEACDWLLAMTGVEPGRIGIAIETPRGPVVETFLQRGFRVYAMNPKQLDRFRDRFTVAGAKDDRRDAHVLGDALRTDRHALRALTVDDPLVIELRECSRMLEDLREEHNRLTNRVREQLWRYYPQALELTEDLGGNWFLDLWAQVPTPAKAGRVSEHKLDRILKAHRVRRLDGAAARRILRQNPLWVVPGTTEAATGHIRTVAARLRLVNQQIKEVECRLDEICSAIEAATESPSGQQNEQRDVAILRSFPGIGRITLATLLAEGWDLLRQRDYHALRALCGVAPVTRRSGKQCVVLRRHACNRRLAYALFHWARVAMQHEPTSKRRYAELRARGHSHGRALRAIGDRLLYVLCVLLERQTLFDPDHQSSARVAPA

SEQ ID NO: 352130 - protein, 380 aa, unidentified
MRKAILRLKSIVLDQVLTMAFELSDKNWKVIFSHGGKNRFYNVYPDESRTRVPEIVARAKKKFGLPEDCRVFSCYEAGRDGFWVHRFLVSLGIENLVIDPASIEVPRKHRRTKTDRVDAEKLVGLLIRHLRGEEKNVLKVVAVPSEKDEDEMRLHREREKCVSERTRLRNRIRSLLVTQGVRMGSWKEVNAAYIERVLKWNGEKLGPKLQDALKRNIARMEFVDAQIKELDQEIRKFVNDKDPCEAVKKMQKLHGLKGVGIQGARILVAEFFGWRTFDGGKQVGALAGLTGCPYASGEMEREQGISKSGNYRIRTLMVEMAWSWQRFQPHSRLSRWFKERFGQGRRHRRIGIVALARKLLVALWRYVEFGIVPEGAVVVR

SEQ ID NO: 352131 - protein, 331 aa, unidentified
MIIVAVDVAKDKHDCFITNTDGEVLFDSFVVRNNQDGFDDLYQKICSVADSTQNVKVGLEATGHYHLNLLGYLLDKGLTTCLINPLQTSLFRKSLSFRKTKTDPVDARAIARLLMSDRTLQPYSLTSYQNEELKSLTRYRADKVRERARLKSSLARLVVILFPELEKLVPILHMATVYDLLREFPGASYVASAHLTRLCHLISDSSKGHYGKEKALEIREAARHSIGSVFPAKSLELRHTIDHIRFLDDEIDEIEVQIFALLDKDPPKMLGIPGIGPRMAAVIVAETGDFKRFSSPDKLLAYAGLSPSTYQSGQLTSTYAKMEKRGSRYLR

SEQ ID NO: 352132 - protein, 386 aa, unidentified
MYFVGIDISKYKHDCFICTETGEVIEGNLSFTNTNEGFNQLLNLLKSLDNNQEIRIGFEATGHYGMNLKLFLEKNNYSFMEFNPALVKRFISTQTLRRTKTDKKDAMLITKYLISVDYKPHPRQFYHKYSLKSLSRMREKLVKQRSYYEVQITNTLDIIFPEFKTFFNNTFSKTSLYILSKYKTADKIKNMKDFDSIRKVSRDKFTSANFIKLKELAKNSIGISNDIFETELESLLTLHSGIEFEIEKLENKIETIIKDLNPPTLSIKGIGYISCAGIISEFSDLSRFKSADACVAFAGIEPSISQSGTESHTGHMVKHGSGHLRYFLMNAADYVFLHEPIFTEFYYKKRSEGKSHRVALTHVAKKLVRVIYKLESENIKFNSDIK

SEQ ID NO: 352133 - protein, 397 aa, unidentified
MRAVFGIDVSKTSSEVAILVNGEKVHGYTILNDTIGFNRLLGDLKTVHNPEIIFEATGVYSRRLQAFLEEYSYAYTRLNPLEAKKQLDSLRVRKTDKIDAEKLAKSQLVHNRKPTYVQEEVYQHLRDLSRFYQNMTEDLVRTKNRLHKVLQVTFPELENLLSTPTGEQYWNLVMAFPCKEFVLSLSQSNLCEIIRQSTSKRISEKRIAYLTDKLIKLAKQSFCAVKKTSPMLEEVRYYAQELLRLSERRQVVLNDMVALAQPLPEYDILRSIPGIAETTATSIIGKLGDIRRLQSTNQINAFIGIDLRHYESGNFLAKEHITKRGNPYARKILFKCIHNIASASHTNPCHIADFYEKRKRQSTIASTKPHTIASIHRLIRTMYYLITHNKLYDYSLA

SEQ ID NO: 352134 - protein, 316 aa, unidentified
MTETETYVGIDVSKARLDVAIVPGEQTWSVANDDGGITELVDKLKGLTPKLVLLEATGGLERRVLARLVSGGLPAMAINPRNVRDFAKALGKLAKTDRIDAIILGRFAQAVRPELRAIADEQSQELQTLLTRRRQVVEMITAERNRLFATDLPKTRRTIKEHIEYLQKSLNINDYDLDQSIKQMPVWLEKVDLLESMPGVGRVTATTLVALLPELGTLGRKQIAALVGVAPFNRDSGTLRGRRAIWGGRAAVRAVLYMAALTSARWNPAIRALYQRLKAAGKPSKVALVACMRKLLTILNAMLRSRMPWRSPEIPA

SEQ ID NO: 352135 - protein, 411 aa, unidentified
MGTTEPSPSSAPLARQLYAGVDIGKASHWVCLLDDQGRVLLSRKVANDEGDLTAVIEKATSYGAEVTWAVDIVDTLSVLLLTLLTVAGQEVRYVAGQVVNTMSTAYVGEGKTDAKDAFVIAETARVRRGLPVVTSASDSSQELMLLTTRRADLVADRVRMLNRLRSLLTSVAPALERAFEYGTHKGAMVLLTGYPTPQRLTRIGQTRLTRWLRARGVRSCALVAARAIEAARAQQVRLPGEDVAAALVVELAADILALDERLKTLEAQLATAFRAHPHARAIESMPGFGPVLGAMLLTAVGDLSSYPDHGHLAAPAGLVPVPKDSGRRVGNVHKPRRYSRPLRHALYLSALSSLRTEGVNRDHYQKKRDAGRTHKQALIALARRRVDVLWALIRDHRTYTTQPPLRTPAAA

SEQ ID NO: 352136 - protein, 329 aa, unidentified
MTKLSKKVIGVDVGAKFLTVSYNDSNNQDQVSNIENNQRSILSFLKKFSLDDYCFVIEATGNYSSRILHLALEKSFEASLINCMSIKHFGRMKNIITKTDAEDAKLIRLYGEMFCPENYVPKSIEIEHLDQEIKLLNDLEEEKRRYAVKLKALRFNPYLNPNTEKHYEKRLKQLENEIKEVEFRLPKLQNKEFKEVKDLIQSVSGIGEKTSLQLMTATSGFKNFDSAKSLVKYFGLAPRIYQSGKKSYSPGKCRTSKTHIRSLLYVCSWTAMKHNAHCKGLYLRLLAKGKPKKLALIAVCNKLLRICFGVVKNKIAYQQDYLKNCKILT

SEQ ID NO: 352137 - protein, 344 aa, unidentified
MKVTTVGLDLAKNVFQVHGIDSTGKVIVRRTLRRRQMMPFFGKLEPCLIGIEACGTSHFWSRELQALGHEVKLMPPIYVKPYVKRGKTDAADAEAICEAVTRPTMRFVAIKSAEQQSVLALHRTRDLLVRQRTQLVNMIRSQLAELGIVLAKGIHHALRLVDQLVEGVVPDIPPLACKIVIALAEQIRELQARVAMIEGEIKTWFRGNDLAKRLATVPGIGYITASALAASVTDPHRFTSARQFAASLGLTPKADSSAGKDRMGRISKMGDRYLRRLLVIGMTSQLQSARRKPEAHPWITNLLVSKPNKLVAVAMANKAARIAWVIMTRGEAYRAHRPATEGTA

SEQ ID NO: 352138 - protein, 393 aa, unidentified
MYLVGIDIGKLKHSFCLLEKETDEILVEPVFFENSKDGFNALLSSFKHLPQKDILIGTEDTGHYNLALLKFLLDRHYQVALINPVATDLTRKMQGGISKNDKLDTLTICDVLASNQRVKSYRITKVERFDLYEQKQLTREHHNLKEELNQYTNRLQKSIDIVFPEFNSLFKSKYGIVYMNLLKEFGSANAIAHADIRTLRKHFDTGRGKHISLTAEELKEAARNSIGFPSTAEVIQIKHLIARIELIKEQIAEIDKKIEKFSIQNNSPILSIPGISHFSGTSILAELGDIHNYSKPSQIIKYAGVAPLTYESSQFTAQHTAITKKGCKYLRKTLYQIITPVIQYNPVFRKFYLLKIAQGKGHRCAQGHCVRKLMRVIYHLLSTGTQFDPALLQ

SEQ ID NO: 352139 - protein, 364 aa, unidentified
MNKCHLNTELSSLEGTRSKFNRSKAVIKLGIDVHQDFYVVVEQMEGTNPKPAQRFQKQVFLHWAAKLSKSGSKVHAVYEACGFGFGLQRQLTAQGIHCYVVCPQKLDERNKRVKTDGLDAKALCLKLDRFVQGNREALALVRVPTEAEEQKRAIHRQREQLVKARKGLEAQGRSLLVNHGMEPASNWWKGRTFAQLQVPEWMKELLSNSQPILLALEEKIRALTAQLQAAAISKQPRGLGLLSSVVIDREIGSWTRFKNRRQVGSYTGLCPGEYSSGNTRVQSCVTKHGNPRLRAALVETAWRLVRFQPNYKPVLKWRKILAKGALATGAARKKAIVAVARQLAVDLWRIRTGRVAIETLGLIN

SEQ ID NO: 352140 - protein, 482 aa, unidentified
MKKRSIYQNRSQELYSLFQDAGNNSKIMCIPMDYAKKHHVVMFCNGYGDIIRKPFPVKNSPDGVDYLIDQVKKSCAHRSIKLQHAFFGGEDISSYSENFVHVLRSQGWLVGSVNAHEAKKQRENLQASTDRLDLMGIAVMLLNRRTNTNPAQSGLYRNLRTIVRHRKKLVKMKTEVKNRIYTVVDQLFPGFLDETKSGIRPFSNSSLYLMSDRFSARQISRRKLKPLTKALNRLGTRNPDQAAAKLKGYASKAFTAPKPHMDTFQLSLSCHTKHFTCLLECIQQLEKEIALVLSQTQGAFLTSIQGIGIILAAGICSEIGDPFIQGAAANLSSYAGVVPRVKQSGGPESEPRVSSVSKRNNHILKDYLLQASNHIGRHGPDDLKQDFQRRKCQGQNAEFGMARRLMRIAISMMKTWQFYLPGHLRTNHADKKDRARYYLSIWPYITGKWRRAKVIEKAFEKDKPMGQWRDVVQKLYQIKLDL

SEQ ID NO: 352141 - protein, 344 aa, unidentified
MEITTIGLDLAKSVFQVHGVDATGQVVIRRSLRRAQMLPFFTRLPSCLIGMEACGTSHYWARELIKLGHQVRLMPPAYVKPYVKRGKTDAADAEAICEAVTRPTMRFVAVKSPEQQAALSMHRTRDLLVKQRTQLVNMIRGLLAEFGIDIPKGLERALLMARRIVDGEAPDVPMEAAKIVSTLSQQALDIHIRLREIDRDLLVWQRGNDVARRLMTIPGIGPVGATALAASITDPRQFRSGRQFAAWLGLTPLQKSSGGKERLGRITKMGDKYLRKLLIVGMTSLVRRAKYNPKTVDPRLADLLARKPVRVATVAMANKTARIVWAVMARGETYCAGHRPALAT

SEQ ID NO: 352142 - protein, 275 aa, unidentified
MNKHNSKGNITVLGIDLAKSSFQLHGVDEQGNVVLKKKLTRSKLVAFIANLPPCLIGLEACGGAHHWVRVFSGFGHTVKMIAPQFVKPYVKSNKNDAVDAEAICEAVQRPNMRFVPRKSIEQQDIQCVHRIRSLLVGRRTAQANQIRGLLMEYGIVIPQGINPLRKAIPEILEDAENTLSSCFRELLRELYEEIVHFDERIATVELKLKMISEQNEDCKRLLTIPGIGLLTATALIAAIGDITVFKNGRELAAWLGLVPRQHSTGGKPTLLGISK

SEQ ID NO: 352143 - protein, 344 aa, unidentified
MGEITTVGLDLAKRVVSVCGEDASGRVVMRRTFRREAVLAWFVQRPACVVGMEACASAHWFARELEALGHRPRIIAPEFVRPFRLSGKNDANDAAAICAAVRQPQLRFVTVKSADQQARLVVHRLRQGWQEERTAGLNRLRGLLAEFGRVYPKSAAAALAGARSALADETLPPALRRSVARQLEHLRELDAHLAECDREIAQQARDDPRAVRVARLSGVGALTASAIAATVADASQFRCGRQFAAWLGLTPRQYSTGGKARLGRITRRGDSYLRGLLVQGARSALQAAMRMAPERRSRLAAWMVATHLRIGYHKTLIAIANKHARLIWVLLTRDEPLHVHAAAN

SEQ ID NO: 352144 - protein, 410 aa, unidentified
MLLVGIDWADDHHDICVINEQGQELKHFQISNDSEGFLNLLKEVQTLEVEAKEIAFCLEKSHGLLVDFLLDHGFTVYPINPKSAERMRDRHASSKKKDDRFDAFVLADTLRTDRHRLVPLAPDSEIARELRALVQDREHLVQAKTRVVNQMTSCLKEYYPVALEIFSTLQGEIVLTFLKAYSTPEILSHLNFKTFRRFLEEHHYPWKMVKKTPEELYQEVRSPKWQMKPDPVVQKTKSRLLLALIDQLQTLMGQVKQYDQAISELMGQHPDNDIFSSLPGAGEKLGPKLAAHFGEDRKRFKNFESVQRFAGTAPITQQSGTYRHVQRRIACQQSFQNTLFQYAFVTLRRCLWAKKYYQEKRKAGKTHATALRALANKWAKIIFTLWKNRERYQEHIFLASRQQHALLNAS

SEQ ID NO: 352145 - protein, 343 aa, unidentified
MEQYVGLDVSQEQTSVCVVDGGGKVIWEGKCTSTPEAIAVTIRTRAPEAVRIGLESGPLSAWHWHELRKLGLPVVCLDARHVKAALALQLNKSDRNDARGLAQIVRTGWYREVVVKSVDSYLVRSLLITRAQLVRMRVDLANQIRGVLKPFGLIAGKGGGRPFAERVRALVAGGPLQEVAGALLAAWQAIGEQIAVLGRRLVTVARQNKAARRLMTAPGVGVLVALAYVSVVDAPERFAKSSSVGAYIGLTPRRYQSGEADYTGHISRCGDKLLRTYLYEAAGIILHRVPRWSALKAWGTRLARRIGTRKATVAVARKLSVILHRMLRDSSEFRWSAKEVHAA

SEQ ID NO: 352146 - protein, 399 aa, unidentified
MECHDVPAERPRPAPGQALSRSLVALDQNSTIIAVIELSQSSWLVAGMLPGTERQPRKKLEPSPERLLALLHRWRDEAVRAGRTITRIALAFEAGRDGFWLARWLAARGIEAHVIHASSVAVSREHRRAKTDRLDTELLKRGFLGWLRGERGHCSMARVPTIAEEDAKRPNRERDCLVGERTRIVNRIKSTLARLGIRNFKPTLRKAAERLATVHTPEGMPLPPNTLAELQRDMARLGFVVSQIREIEDARQKRLEQQHATGPHAMVRLLARIVGVGVETADLLVHEVLSRPMRDRRAVARYAGLTGSPDESGARRREQGLARAGNARVRRGMIQLAWRFLMFQKESALALWYRARTADSRSGTRKTMIVALARKLIIALWRFVTAGEPLEGVVLRPAS

SEQ ID NO: 352147 - protein, 428 aa, unidentified
MEVIHPRCAGVDVSKKDAKVCVRVQGRGRRGTSTAVSTWGSTTGEILALGEHLLAERVSCVVIESTSDYWKPFYYLLQEQLPVMLVNAKAARNVPGRKTDVSDAAWLADLGAHGLLRASLVPPAPVRALRDLTRARTIITRARTKEIQRLEKLLEDTGIKLSAVASNIVGASGRAMLEALIAGERDPAVLADLAKRRLRHKIPELTEALRGRFSEHHAFMVRLYLDRIDGHAADIARLDARIEEAIAPFRWARELLMSIPGWSQIVADVFIAETGADMSVFPTAAHLASWAGVVPGCNESAGRIKSGATRPGNRHLKAALGVAALSAARSKDTYYSVRYRRIAGRRRSAQSPRGKTPAMSIAAMTALVAIEHKMLTDAWHMLTNGTFYCDPGPDYYTRHQPGRTKARAIKQLESLGYTVTLEPLTQVA

SEQ ID NO: 352148 - protein, 340 aa, unidentified
MTIATIGLDLAKSVFQAHGVDENGATVLIKKLHRKQMLPFSSKLPPCLIGVEACGTAHYWARTLSAMGHEVRLIPPSYVKAYVKRGKSDALDAEAICEAVQRPTMRFVPAKTVEQQAILTIHRTRSLLVRQRTMLANALRAHLAELGHVANLGIANLAKLTKEVLADENALLPMARTALEMLMRQVMTVSGEIAALDRQLLAWHAQSEASRRLSGVPGLGILTATALAATVTDPNQFHSGRQFAAWLGLTPQQHSTGGKVHIRGISKQGDRYLRRLLVVGATAVIRHIKDNPTPVASWVRKLMEKKPFRLVSVALANKLARIAWVVLTRKETYQPYKLPA

SEQ ID NO: 352149 - protein, 434 aa, unidentified
MSQQNISTPSTPPVYAAFVGLDWGDEKHALSLCAADATVIERTTLPQTPEALADWANVLRSRFPSGKIALCLEQARGALLAGLMQYEHIVPYPVNPKTLARFRQALYPSRSKDDPIDADLLLDLLLKHREHLRAWQPDTVQTRQLALLNEQRRHFVDHRTALTNELLSHLKAIFPQALELVGQSLASRLATDFLKKWPTLQAVQKVKPAVLRQFYYGHNSRSQELITGRLERVKNAVALTSDPALLAVHSLAIQTLAGQLQALRPFLDQHEQQIAELFAAHPDAALFDSLPGAGSALAPRLLAALGSDRSRFPDALSIQCYSGIAPVTERSGKTQYWVHLRWSCPKFMRQSWHEFANCSLKFSTWARACYQDLNKRMDHHEAIRKLAYKWQRIVWRMWQERQPYDETRYLRSLQKRGLKIYADLVPQPIAPAGE

SEQ ID NO: 352150 - protein, 375 aa, unidentified
MSKVIMIGCDLHLRSILLQYCVGDSTPQQAAFVNDAPGRTKMIDMLLEFAEKHGAQRIVFAYEASSLGYGLCDQLHDRRIECHVLSPTHLPKSAKQAKQKTDAKDAMMLLEQVRGHILAGNSLPAVWTPPQRLRDDRELVRARIDASDETTKIKLQILSMFKRRGVVKPAWYTTRWTKRFLAWLREVVAGMDEFVAPVLENLIDRYELLVKHEAKLDKCLKTLSQTQRYQVAAEELRKLPGVGLLTSMTFLTEMGDLNRFHNRREIAAYLGLCPSSHESGETSDRKGHITRQGPSRVRKLLCQAAWVAIYRCRDTSQEYDRIRGDKKNRTKKALVAIMRLLAIKMWHKAQACGVDNQLEGRGGPHSPELSRKPAE

SEQ ID NO: 352151 - protein, 363 aa, unidentified
MNQIYIGMDLHKNTSTFAVKDKDGQVIDECKIATEPSAIKGYLKQYPDSSLAVEPVSQWYFYGDLIQGLGIDVHLANPLKVKAIASARVKTDKIDASALCDLLRSNLLPEAYFASADARYWKEMVRYRLSLIRLRTQIKNKIHSILFRNGLRHDFTNLFGVGGRKWLDSLDLAEHFAFNLKHYLGLIDAFGQLIKEADERIEKVVGDNQPAKLLTSIPGISYVSALTIMAEIGTVERFASAKKLQGYAGLVPSTYASGDRMVHGRLTKQGSRWLRWTMIEIAQRQLLCKKKPGFDWYYQRIKQRKGSGAAAAATARKLLAVVWRMLKDNRPFEIVPPAPRSKTSLLRDKSGAKDAHRKNIVSH

SEQ ID NO: 352152 - protein, 333 aa, unidentified
MTVIIGVDPHKASHTAVAISGGEEELDCKKVRATCVQVDQLVAWAEPFQTRMWAIESAGGLGYLLAQQLVAAGETVVDVPATLASRARLLSTGRSNKNDPNDALSIAVAALRSSSLRQVEPVGHSEVLRLLAKRNTDIGNQRSRLVCRMHALIAELAAGGIAKEINASDVDRFLEDLTPVTPVEQVRYDLTLELLDDVRRLDSQLKASHKRIRRAVKASGTSLTELFGVGPIIAGMLIGYTGDVTRFGNWDQYAAYGGRVVHRLSERGNRKLNHAIHMAVICQLRQPHSDGRIYFERRVAEGKTNKEAIRSLKRQVSNAVYRHLVADARRTRR

SEQ ID NO: 352153 - protein, 332 aa, unidentified
MTEYIGIDVSKQSLELWDGTHEEEVPNEKGLTTLKKLLKKRYGEKWNQEVRFIYEPTGPYSNYLRAFAAEHEVQVVEVNPKKSANFAKVVGNRSKTDTVDAKMLSTFHALLTEEDFCIPAIDERAEQLGAELGSYEMIQKTRTMLSNHLQSLEYKSGVTRKPKDSLEKELGRLGTMEDQLEKEMEAVAEDHQETREDLNDLLSIKGVGVISATNLLYLFRTYPGANRNEITALAGLDPGGRQSGSSLNGGRKISRAGDPMLRKVLYLACMNCIQHNESMKAFYKHLVSDHHKKPNVALIACMRKLLLIAHHLTVTKSTYRTLEHDANLCLSS

SEQ ID NO: 352154 - protein, 356 aa, unidentified
MTRIAQLEPTRVTVGVDTHRDVHVAVALDQLGRRLGEIELATTRAGYQRLLSWAERFGAVEAFGIEGTGCYGAGLARHLRARRVLVIEVMRPNRQTRRRKGKSDPTDAEAAARAVLSAEAAGAPKAGDDLVEMIRVLRVARSTAIKARTQAINALRSLLVTAPPELRDELRALSSTRLVAKAAQLRPGEQLNPLAASKVALRHLARRCQALQAETQSLDAQLAHLTATASPQLTEAFGIGPDTAGALLVAAGDNPGRLRSEAAFSMLCGSSPIPASSGQTRRHRLNRGGNRQANAALYRIVLVRMRYHQPTKDYVVRRTSEGKSKREIIRCLKRYVAREVYTALTQTSEENLARTA

SEQ ID NO: 352155 - protein, 364 aa, unidentified
MENVYYVGMDVHKDSIRMAVLQGEERSTVYEGTYENDVSKIIRRLKSYSQKGTVITAYEAGCMGYTLQRGLSQAGIECRVISPNKIDRMAINRIKTDARDAVLIARMIKHNEADTIQIPTQDDEAARDLLRCREDIKTELQRTRHQISNFLLRQGHLYSGKTNWTGVHKTWMKQLAFPRAPQQEAFTQYFCHMMEIEARLERIEASIITLAQAEPYREKVARLRCFKGIDYLTALACICEVGDYRRFPSAGSFMSYLGLVPSEHSSGAKRCQGGITKTGNSHLRKLLIESSWHYRYRYAANAALKERRKGMDEMVIMYADKAIHRLQKKFSKIVYKGKSAKMAVTATARELAGFIWGMMTESYC

SEQ ID NO: 352156 - protein, 402 aa, unidentified
MVETIWVGIDVGRHAHHAAAVDDAGTVLWSRRVPNDQAAIEAIVDQACRVESVVWAIDMTAPESALLRGVWSRRGQHIRYVPGRVVHSMTGAFAGEGKTDARDAVVIAQTARLRGDLATVAVPDDVAIELDLLTGHRRDLVTERTRGINRLRGLLTRIFPGLERCFDYSTLTGLAFVTRFTTPSAIDGVSDEEIYDHLRGQGVRRPTIPKMISKARAAAAAQTVALPGEATTALLVQQAATSLMALTRQITYLDKQIAEVFRRDRHARILESVPGIGTRSGAELIAFTGGDLTSFGSAAKLAAYAGLAPVPHDSGNRRGTLRRPQRYHRGLRKVFYMAALNSSQRDGPSREFYQRKRRENRSHVHALISLARRLIDVVWALIRDGREWTPRGAGPPIAEAAA

SEQ ID NO: 352157 - protein, 412 aa, unidentified
MDIVHERAAGLDISKRDAKVCLRVPGQRAGTYTSRVTTWGATTRQILELRDVLEREHVTTVVMEATSDYWKPFYYLLEETLPVMLVNAKAARNIPGRKTDVSDAAWLAQLGAHGLLRGSFVPPEPIRELRDLTRARSIAARDRTREIQRLEKFLEGSGIKLSSVVSDLTGVSSRAMLEALINGERNPEVLAGLAKGTLRSKIPDLVDALTGRFKDHHAFMARLHLDQIDAQSRIIDALTDRIEEAMAPFRAAREFLATIPGVSLKVADVIIAETGADMSRFETPGRLASWTGVCPGSNESAGRIKSAHILPGNKYLKAALGTAALAASRTKDTYLAARFRRIAARRGPMKAVVAIEHSILTAAWHLLAEGECYADPGADHFTRLDPIKAKNNAIKKLNSLGFDVTITPATAA

SEQ ID NO: 352158 - protein, 368 aa, unidentified
MKNLVYIGVDVDDQAFHFSAVSAEGDILAKGIRVLCNAKKLLLAAKKMAGGARIELAYEAGFLGYTLARDLKKLGASCKVIAPTTIKRCPNERVKNDRLDSLRLAQGLQRQEFSFVAIPSDTQEADRQLVRARSFMVAQKGDLKRHILNQCRLFGLDYKRETSGKEYWTQAHRHWLDKKLSQLPKSMHIALSCLLANLENLEQQIDSLGTSIEELSQEAHYKKTSEALCCFKGISTTTAMTLITEIIDISRFKHPRQLVAFCGLDIREYSSGGKQQQFGISKMGNRRLRTALVESCQNFGRSQTPSKRKQAARRASDPQAIAIADRCQQRLYKKGHRLLAREKNRNKVKVACAREMIGFIWEAMNLAA

SEQ ID NO: 352159 - protein, 336 aa, unidentified
MEKYSFFVGIDISKGHLDFCIRNSSVRLGFNRVPNDPGGIKEAIKWMRSFEGFRVKECLACLEHTGIYGLTVLETLHRLDFAVWMEVAACIKNGSGSLMRGKNDKVDASRIADYAHRFRADAKLWEPPRKEITLLADLMASRTRLMAVISKLAVPVNEIKSFKAKGHYEKIKDASKKTIEAARKEAKAIEKQILEIMMGDAVLARLYKVVTSVQGVGFVTATNLIIATNEFKSINDPRKLACNAGCAPFEHSSGTSIRGRNKVSHKANKRLKSLLHMCATSALQAEGEFKVYFDRKIAEGKNKFIVINAIRNKIIHRVCACVREDRLYTKFPKTVA

SEQ ID NO: 352160 - protein, 428 aa, unidentified
MNYNQNQRLNQLDENILIIGIDVSKKFHVARAQNFRGVEFKRGIKFDNSRQGFKEFEEWKDSLLEENQKTKVLVGMEPTGPYWLPFARWLQTEGYWTVTVNPAHVKKSKELDDNNQAKTDYRDARVIAQLLKDARFSEPNLLEGIYEELRNAKNIRKIIVNDLKRIKNQMANWFDRYFPEYKKGYTNWESESFLYLLENYKLPAKIAELNPSEVYAKIRKVFPRGIGQKKIENLINASKESIGIKEGCRMAEKELDYLLKRYKEIVSDIDDIEKNINDLCEELPEVIRITQIKGIGIITASGVVAELGNIKNYRTPKQMIKMAGLSLTENSSGQKKGKMSISKRGRKDLRKILYQAVVGMIRSNKAFNELYQYYRYRAKNQLTGKQAIVVLINKLLRIIHTIVVKDVDYDEDKMLGAIKHPDEFSFAA

SEQ ID NO: 352161 - protein, 356 aa, unidentified
MSHDVKYIGMDVHREAIVIAVLNGSGKLVMETILETKASSILQFLHGLRGELHVTWEEGTWAAWLYDLLQPQVQEVVVCNPRRNALLKEGSKSDKVDARKLADLLRTGMLRPVYHGENGLRTLRELARSYQTIGKDLTRVMNRLKALYRGWGIACAGTQVYAPRYREEWLNKLPQAGVRRRAELLYQQLDGLQALRRNLRPEFLAESRKHKAAQLLRQIPCIGPIRAAHLIALMQTPHRFRSKRQLWTYSGLGIETHDSAQFRFVRGQLQRSKKPQQLRGLNQNHNHEMKDIFKSTATRASCGRGPFHNFYAALLAKGMKPEMARLTLARKIAAITLTLWKGGKRFDAEQLKTQAA

SEQ ID NO: 352162 - protein, 342 aa, unidentified
MQITTIGLDIAKNVFQVHGIDAAEKVVVRKQLRRSQVLGFFKALPPCLIGLEACATAHYWARELTRLGHQVRLMPAKDVEAYVKRNKNDAADAEAICEAVRRPTMRFVQIKSAEQQGRLMLHRTRDLLMRQRTQVINALRAHLAELGITSAQGREGLKELLKIVASDADERLPADARASLVMLAAELRAMQTLIGLIEKRIVTQHRENKASKRLRTIPGIGIIGATAIADTVTDPKAFRSGRDFAAWIGLVPRQDSTGGKQNLGPISKQGDRYLRRILVVGAHSVLRRAKLNPQKYPWLTQLLARRPFKVVAVALANKMARMAWALLAKGGAYRAPALAATA

SEQ ID NO: 352163 - protein, 343 aa, unidentified
MDHSAGLDVSVKETSVCIVDDTGRIVREVKVASEPEALLAVLTKPGYHFKRIGLEAGPLSQWLFSALAEAGLPVICVETRHMRAVLKAQINKTDRNDARGMAQMMRVGLYRAVHVKTLRSQKLRMLLTHRKLLQSKAIAIENDLRGTLRNFGLKVGMVGTVKFEARIKELVENLPDLAELVEPLLVVRRVLREQLVIQHRRLLAIVRDDDVCRRLMSIPGVGPVVALTYRVTVDVPARFRNSKAVGAVFGLTPSKYQSGEINRTGAISRCGDEMMRMMLYEAAQSMLTRTVKWSWLKAWAMKIARHRGMKKAIVALARRLAVIMHRIWVDGTEFRWSREEAAA

SEQ ID NO: 352164 - protein, 461 aa, unidentified
MIRRLVGVDLGIASAHTVRVLTEDGREVCRRRCEPTVDSLRRVETAALAGAPAGTVLEVVMEPTGPAWLPIAVFFTARGHRVFRVSSAKAADLRRFLSRHAKSNGIDADTLARLPLVDPAGLYPLELPGTEAAALDRRVRATDRLTVLAAQHKVRIKDLTRQLLPCSPLTGDLGVADLAVLERWADPRALLAAGPARLTALIVKASNGHLGADRAQQWRAAAAAAVELYGDHPAIAWTDLAAEVGTEVRLLRATQAELATHAQERETAYRYADLGGLARSLPGVGDVGGPVLVAGMGRPGRFPNGAAFKSYTGLAPRAAETGNTDRKGQPMSKAGSSLLRTTLIRAADTARKQDPQLARIYYTQMVERGAEHLKAVCVVAGALAERIWTVMNRQMPYVICDIDGTPVTPEQAKQIIAQNFTVPDEVRRRRRSSKTPSRKPAQQPTISSKGGRPLSKPHTAA

SEQ ID NO: 352165 - protein, 421 aa, unidentified
MSKGRYHSVECKGVDWDALATQVAGRCLVFAVDVAKHDFVACLRVADEDPLVRVKWQHPEETPTVLTGLGRLIAAGPVAAVMESSGTYGDALRWQLGQLGATLYRVSAKRVHDAAEVFDGVPSLHDPKAADIIAELHDLGHSQEWLQADTHRRALTAQLKMLHQCKARHQQELNRLEALLSRHWPEALTLLDLDSVTLHHLIAAYGGPAQVHALEGQARTLMQKIGRPGLAAAKIEALLDSAGHTVGMPCILEERELLRWQAKAVVDTHTELRRIEKLIEQAVAGDPALASLRSVVGPVTSAVLLAAQGSPLSYPDADSYCKGLGLNLTERSSGKHKGRLKITKRGPAVARFYLYFAALRLIANEPVVAKWFKAKTARPGAIKGKQVVELMRKLAKALWHHAHGRLFQAEKLFDQRAVAGA

SEQ ID NO: 352166 - protein, 347 aa, unidentified
MLHAGLDLSRKKLDVCLLSDQGEHLDQFAVPPDVDSLRRLAGRIEEVHRQPVCAVIESMTGARIVHDTLEQQGWSVEIADAQKVKGLAPLACKTDKIDSKVLAVLSHRDLVPAIWLPDPSVRDERELARFRLHLVKHKSALKCRIHSTLINFGKPCPVTDLFGLEGRRLLQRLQVPEPWRGNITASIELIDDLERQIVEINRRLKEGHAEHPYVPLLLTVPGIGWVLAFTIAAEIGEIERFPSPEKLAGYTGLCPRVNQSGEKDRRGPLTKHGPTYLRWALLEATMHALRHPAYAERYQRTKRRLGKQRGAKVAQVDLARRLAHAIWHMLSRKEKFAPRGAAFRLAA

SEQ ID NO: 352167 - protein, 366 aa, unidentified
MAARKNLFFTRKLSHSKGRNMLKYSVGLDVSSKDIHCCISVIDRGQRVSVKGTRKVTNALKGFEGLDDWIKRHWKQSDIPLVICMEATGAYYENCAMYLFKAGYTVSVILPNKAKKYLQASGVKSKNDKIDAKGLAQMGAEKSLEPWQPMGEFFYQLRELTRHEQSLQELKTMINNRLHASNLGMYLNKEVIRQTKAQVKLLEKQIEACEKLVVEHVNSNAEVASRISKICTIKGVAIKTVATLVAETNGFLLFKNARQLCSFAGYDIVENQSGNHVGKTRISKKGNSHIRRILHMPAFNVVLRKVKPFSDLYERTVDKHGIKMKGFVAVQKKLLTIIYALWKKDEAFNEKYTNEQYIQASEPILG

SEQ ID NO: 352168 - protein, 482 aa, unidentified
MKKKTIYTNQSQELLRLFEEAGNSSKIMCVPMDYAKKDHVVMFCNGNGHILRKPFSVKNTPEGVKYLTDQVSRSCRHRRIKRKHVFFGGEDVNSYAENFVNSLRTKGWLVAGVNAHDAKKQRASIQASTDHLDLMGIASMLLNRRANCSPAQYGIYRNLRTLTRHRRKLVAMSTEVRNQVHTVVDRLFPGFLDDKKSGIVPFTNSSLYLMENRFSAPQIARRKRDKLTGILRRYSTSKPERTAVQLQEYAKTVLITPNDYISTLQLSLAHHVKHYRCLRENIDQLEKEIAIWLAQTPGAFLTTVRGIGIVLAAGVMAEIGDPHQQKPVNNLVSYAGIIPRVKQSGGPEGHTYTGKVAKRCNRILKDYVTRSAFHLGFHGPEDLMVDYKRRDAAGQHADFGMGRRYLRMAMCLMRTSQIYLPKRLRNKKVKPEERASYYSMIWPKIVEKWQRHDALQAAVERDRPLGQWRNMVQELYEIKLTL

SEQ ID NO: 352169 - protein, 342 aa, unidentified
MKGYHYVGMDVHKKVIAYCVKEADGSIVNEGTIPATRKELYRWADKLPHPWAGAMEATLFTGWIYDFLLPHADELKVGHSYMLRAICASKKKNDRLDARKLADALRCDWFPQAHVPPANIRELRTALRYRNLLVREEVRLKNRTAGLLMEAGVEYDKGKLHGKRYFGELLDKLDYVPDSFKELATASHESAMYFGKAQKRLVDELVKNPVLQERVERLRSIPGVGEITALTWALEIDDPHRFANRKKAVSYCGLCSSEDESAGKTHRRPISKQRNKHLQTALIEAAKLAPNWNSQLAAVCQKAKDRGANRNEATIEVARMLVAYLLYVDKTGKRFQLKENLN

SEQ ID NO: 352170 - protein, 355 aa, unidentified
MNTLTPNSIFVGVDVHKYGHSAVALDAFGQEKSKLDFTNGTLSPFTAWLQSLGNKDDIIVGLEDTNCYGTHMVELLRKESFHIRYVSAILTERERKRSTKREKSDYVDAKRVGRVILTKYEETLPAKESIADENELNIAKSLDLLLMERRDLVKHKTILKNQLHALLHQRYTESYRTVVPRSFTKKSIRWFLDDMKGNETILAQSIVRRLSRLLFVEDQIYVISKEVAVIGNRSKEARSLTAIHGCGMVTASAIMAEVITIKRFTDKHRFSMYAGVAPTERSSGRKQTMHTNPFGNRQLNKAIHVIALSQIAIKGDPTGKEYYQRKLKEGKTKLWALRCLKHQIAKRVFQTLRYC

SEQ ID NO: 352171 - protein, 412 aa, unidentified
MGKSKIEYEQVIDRGCGLDVHRDTVVATVMGKGIKTETRTFGTTTSSLNELGVWLESLGVTNGAMESTGIYWKPVLHVLRTYPLDLIVVNARHIKNVPGRKTDKADSQWICKLLISGLLKGSFIPPENIQELRDLHRYKKKLIGTVASEKNRIIRVLEDANIKLSSVVSDTSGVTASYLIKGLIEGRKDLEKLIAECYHRKLQANPGQIKEAITGRLTAHHAFILKSMQKHIASVEEQIAEIDVEIEKYIKDFEKEIELLQTIPGVGKGGAIGIVAEIGVDMDVFPSEHHLASHSGMCPGNNESAGKKKSSRTRQGNKHLKATLTELAWGATRTKKSYYKAKYESMVARRGKKRALIAIGHKILCASYHIIKNKEAFKDLGYEYLAERRKKNRLEYLKRELKEQGYKIEKAA

SEQ ID NO: 352172 - protein, 431 aa, unidentified
MKKTAAVKRIDRGQPVLAKGRAVVGIDIGKRKHAATALSPQGEIIAQLASFPNTREGIDRLERDVLRKAGGPGKVLVAMEATGHYWMCVYHELRRRGYECVVLNPVQTHAQGRTRIRKTSNDRICSEDIARVAQSGKAHATRVPDADTAELRMIARHRQRLLRAVMATERYAHTLVDRIFPEYADILSKPFLPSGQKLIGQLGLAPDNLAARPKEARQVLHAASRGRIAPETIDRLLDAARNSIGTRQTEQVAEGQLVSIFEHLKLLRGQIAAIEDDLAERIERINSPLLSLGISTTLAATIHAESDPIADFRTPDQYVAYTGLDPSLRESGDTIHRQGKISKRGSPTLRHALYLAAFVVCRKHAYFQRIYRKHRARGKTHRNALVIVAHRTARVIWRLLTDNRPFTKRPPIKSNPRLKQKRSQSRRRKAG

SEQ ID NO: 352173 - protein, 322 aa, unidentified
MKQSVGIDVSKASLDVCYKTDGEKSTKYHQVFDNTAKGHKQLLQWLNGLSENALTGVHIILEATGVYHLVLVKKLHGKGMPVCILNPLQSHYYAKGLGLRGKTDKLDSHMLACYGLERKIQLWKPASQDRIELKALNTRLFAVDKDIRREQNRLESAQTADQSKVVVRLIKQSIRALEKQAEKLIELIDEHIEQHEDLKKDRKLFLSIPGIGEVCSRYLLGDIYQGRFKSSAQCAAYMGLVPVPNQSGNRATSSLSRAGNRKLKAKLYMAAIVAKQHNPILKKHYDQLIARGKCKMSALCAVMRRLVQICFGVIKHQKEFCL

SEQ ID NO: 352174 - protein, 340 aa, unidentified
MRIIGCDLHRSQQTLAMLDRDTGEEVTKTLTHDGDAVRDFYASLKLPVIVGIEATGSMGWFLELMEELGITCRVGHPTAIRKAETRKQKHDRRDASLLLKLLIEDRFPAIWTPGGPLRDLRALLLHRHQWVRMRTRVQNSLQAIALSHGIRRGHALWNRDGRKAITAVPLLPNAAARRTALLELYDSLEEHVDRLDAHVRDVPTDRPAACVLMTHPGVGPVTALATEVFLGDPARFSDGKAVASYVGMIPREYSSGPRQRLGALSKQGNPFLRFLWCEATLHAVRLDPALQRFYRHKLHQKGLAKARVAAARKLGIRLWIMLRDQITYDEFCRRGARPAS

SEQ ID NO: 352175 - protein, 409 aa, unidentified
MELMYRRCAGLDVHKNSVVACARLVGESGGVTQETRTFEATTKGLLELQTWLLEQGVTHAVMEATGVYWKPVWHVLEGTIALLLGNAAHLRNVPGRKSDVSDAEWLANLVAHGLVRGSFVPPGPVQELRDLTRTRKQLMRERTRHIQRIQKTLEDANIKLSSVLSDVVGVSGRRMLDALIAGESDPDVLASLVHARVLAKREDLREALRGRATPHHRYLLKLHLAQVDSLDALVADLDGQIGEHLRPFRDAVERLDAIPGVSATAAAVIVSEIGDDMKRFPTAGHLVSWAGLCPRMDESAGRRRSTRIRKGAPWLKVVLVQCALSAARVKNSYYRAQYHRLRTRRGAKKAAIAVAASLLTAIYHMLKDGTLFEDLGVRYFDRRDETKVVNRLTRRLNDLGYAVELRKAA

SEQ ID NO: 352176 - protein, 378 aa, unidentified
MPPSAPPDKDGVDGPNGIDVPHCGLSEPATGEPPTVSITMIGLDTSKSVFQIHGVNETGKAELKRKVRRSELIAFFEKQESCTVVMEACGAAHHWARILTGLGHTVKLIAPEAVKPFVKKGKKNDAADAAAICEAASRPDAQFVPAKTVAQQGILALHTVRSLLVKQQTMLANAIRGLATEFGHVVPKGLHNLEPLVALVDADEAMPAQARQAIAELHERFGELAKGIQSCEAGIVKHARNDATARRLATIPGIGPITASLTAATVVDISLFKTARQFAAWLGLVPRQHSTAGKTRLGRITKAGNKEIRKLLVLGATSMLGRAEGWHSALGAWLRDILQRRPVRLVTVALANKMARIAWAVMTRNEVYRAQGGVAAKA

SEQ ID NO: 352177 - protein, 314 aa, unidentified
MNTQGMVAGIDVSKDWLDVALGEESLRVANEAAGVSSLIERLQAMSVELVVMEATGGYETQAASAIAAAGLKLAVVNPRQVRDFAKATGRLAKNDRIDAHVIAAFGQAIEPQITHLPDEQARELQGLLVRRSQLLGMRVQESNRLALMQGAMRKQIKSHIAWLDQAIDEVNTDLTARLRQSPVWREKDELLRSLKGIGPITSGTLMSSLPELGELDRRSIAALVGVAPFNRDSGAFRGRRAIWGGRAHVRHVLYMAAIAAVRSNPVIKPFYERLIARGKPHKVAMVACMRKMLTILNAMMRSNTPWTPSWQGAN

SEQ ID NO: 352178 - protein, 318 aa, unidentified
MTQTTHTSALYVGIDVSQETLVVATYPTNAVWVLPNDADHCAALADELAQQPVQLVLLEGSGGFERPIVHALQQAGVPVVIVPPQRARYFAKSMRGNLKTDRVDAQLLARFASCYPVPEMPETPAMQAQLKGLWARREQLVQALESEKKRLQVAMHPLIRASLERTIAHLQAECAEIEAAIEALIASDEALQPKAALLQTAVGVGRVVAYGLLAELPELGCVSHKTIAALAGLAPVRRESGRWRGSARIGGGRRRVRRLLYVASVVAVTHDARWRAVYEGLLAKGKAKKVALCAVARRLLVVLNAMVRDGRAYARVQE

SEQ ID NO: 352179 - protein, 358 aa, unidentified
MFYLGIDQHARQLTISLRDENGDVVQRKQVSTRPAKVLEFFEQLTRRCTAAGCGFWAIVEVCGFNDWLLEMLKNFRCDRIVLVQPEESGRRKTDRRDAAKLSEQLWLFRERIANGKPIDKLKIVKIPNSIQLQQRRLTTLRKDARAAHGRAINQIKHILRRHNLQHQLPTKTFPTKAAVAWLATLQLPAADMVEMRQLRDDLIRYTQRTAELDAATAEISVKDEDAKLLALTPGIAQFSSVALSSRIAGIERFKRPRSLANYFGLTPGCRNSGENNKRLGHITKAGSGMARWVLGHATKHILRTDPAMRAWFKKIKRKKGPGIARVAVMRRLATIIWHMLTKRKTYAEVRSLGIGLQE

SEQ ID NO: 352180 - protein, 481 aa, unidentified
MSNELWRMSAVEAVARLRKREISSLELVEASAQRIAEVEPAVNALPTLCLDRAREHARRIMQGSADADAADEAGWLARPHVRLSTGRPVHSMQVTKVAPGEPVPSLMHRRRVMADRITYVGLDVHKESIVVAVASGGLRGEVREYGRIANTATALDRLLRKLGDAGMALRFCYEAGPCGYGIQRHVSARGHECVVVAPSLIPKRAGDRVKTDRRDAASLVKLHRAGELTAVWVPDPQHEAMRDLVRARLDAVHSLRRARQQLSGFLLRQGCHYGRPAWTKLHRRWLAGLIFEQAIHHIVLEDYIAAVEAAEARRDRLTAQIETMLPDWTLAPVVAALQTMRGMAMVNAATLIAELGDLSRFADPRQLMAYLGLTPSEYSSGSSVRRGGITKAGNGAARRLLIEAAWSYRFPARLSRELLLRQESQPKPIRDIAWKGQVRLCARYRRLARTAKPANVVTTAIARELTGFVWAIARQVTVTPG

SEQ ID NO: 352181 - protein, 355 aa, unidentified
MIVIGVDPHKQTHTAAVVDECSGGLRGERTVKARRDGHEQLLGWARALDRERLWALEDCRHVSVALERFLLASGERVVRVPPKLMAGARRSARQRGKSDAIDALAVARAALRERSLPVARLAGPEREIRLLVDHRDDLVAERTRIQQRLRWHLHELDPELALPAGCLDRRVWLERLARRLARDEQTTQVRISRELVARCRELTTRANELEHELSRLVRAQAGALLELPGCGVLTAAKLVGETASAERFPTEAQLAMHAGAAPLPASSGNKHRHRLNRSGNRQLNCALHRIAVTQGRCHPPAQEYLARKQAEGQSRKEALRSLKRHLARAVYRTLQTIEKEKPTPTTQPPLTPALT

SEQ ID NO: 352182 - protein, 397 aa, unidentified
MIAVGIDISKAKSTVAVIDSDGTVLASPFTMAHTQPEMEAFVTYLKGLGEPTTILMEYTGHYHYPVLKKLQGEGFPVCIVNPYQMKKYGDVEIHKAKTDKKDALRIAAYALEKSYKLVPYSSMEQKYEDLKFLSRQYSQRITYVAKLKVQLIALLDQTMPGITRILPLNSRNPEKCALLLFIKRFKSFDEIHRIGKARFLASYDVLAKKTSERSASSKGLSIYELAVDSITTRGEDPYIWLSQNQCVDLLSTTQNAADEIISQMRNIAETIPEYKVLRAMRGVGDRLGPIILAEIGDIRRFHSGKALNSYAGNDAPPYQSGQFESRNRHISKRGSSTLWKACYEVMQALKLTKPQDDPVYLFMLKKEQEGKPFNVAKMAGVNKFLRIYYARAMELYK

SEQ ID NO: 352183 - protein, 427 aa, unidentified
MYRIAGIDVHKKKLAVVVSDVEVHGEYQFERGWFGANPEQLRCLSQWLVEHQVEEVVMESTALYWKPVWGALERYWQPICEKGEGAGATSGILHLAQAQSNRGPRGRKKDFRDAERLVKRLVADELKLSFVPDWEQRLWRTLTRRRYQLTRARVQLQNQLEALLEEAHLKLSSLVSDLLGVSARRMLQAIADGETNPEALAGLADRRLRATPAQLSDALGACTELHAVYRRLIKMMLGELKVIEEHTAELNQELATLLRPHQDAVERLAEVPGLGVDSAQQILAEVGANAVVFASDKNLCSWVGICPGDEESAGESSSHRCPQGNRQMRRLLNQAANAAVKTKGSIFEIVYRRLVPRLGHNQTIGAVAHRLCRLIWLLLRKGVRYEERGPAVSRRSRQNRTSKMIRELRTLGYRVDFLNAVPSNPMP

SEQ ID NO: 352184 - protein, 404 aa, unidentified
MAKYHVGVDVSKHKHKACIRNLSQDSYSGVFSFEVNRQGFQKFLGTLEKFSQNKEDFVIAIEATGNYGITLAYFLLFHGYRVVEINPYRASQFRKAQGKKAKTDRIDARSLAALLSLENHKPLTIPDPVLDNLKELTRFRADMVKDRTSLVNQLHETLSTSFPEFATNFSRLDSPTCLSLLIAYPGPEPISRAGEAKVAESLISASRGRIGNVVAKALVEAAQGSVGVFQRQPALATRVSILGERIVVLTGAIERVEKEIADLFHRLPYKPEDFPVGDITSLVTLISEIGDINRFATLKQFLSHFGWCPQSFQTGSYKLEHPKMSHAGNKYVRRLIWMLSIAAVRAVPRYRTYFQSRVAEGKPKMHIIVAVGRKLLSVFYAILKRGIPYDPNWEVNRHSAPARS

SEQ ID NO: 352185 - protein, 361 aa, unidentified
MTYNNFREDLMEQFVGLDVSQQETHVCVVDRDGVALWRGTCASSPAQIAAIINEKAPSAVRVGLETGPLATWHWHALKALGLPVICIDARHAKAVLSMQINKTDRNDAYGLAQIMRTGWYREVGVKSLDAHKVRAILGARAQLVGMRTDLRNQIRGLLKVFGIILERHGGKSFQARVMQVAQDDGIPGQSLQALLAILTSIERQLDRLNRIASNQARLNPICRNLMTIPGVGALTAVAFVAAIEDPRKFAKSTSVGAYFGLTPKRYQSGETDLSGRVSKCGDGLVRVYLYEAANSLLVGSRKWSSLKAWGMRIAKRSGMNKAKVAVARKLAVIMHQMWTTGEEFRWSNTVNDAAQVEVPAA

SEQ ID NO: 352186 - protein, 336 aa, unidentified
MERGKIYPGTREAVREWLDRFEPGTDAHFALEGTTGWRLVVEEIQRRGFAAHLADPAELSERRGPKRRAKTDHADCELMVNLLIEGRLPESFIPPAHILELRTLVRLRKTLVDQRTEWQQRLQAQLFHQGVVPGLKLCRAEDRRRLADVEISQAGRQMIETGIVMLDGFDAKLKPLSAQLVALAKAQPGCRGLQRGLYGVGWLTAVAIVAELGDCRRFHSADQAVRASGLDVTVYESNGKRPGGHLARQGPQVLRWALFEAAQCAARKSSPDHAYYLGVRDRIDHNRACLSVSRKICRRACHILKELGDAAMAPPEPASASRRPPRVAPRLPEVLR

SEQ ID NO: 352187 - protein, 371 aa, unidentified
MNTSAQPSNKLNASLTPPTPRHLFKLGLDVDLNFVVTAVQCDHGAIKPAHKWTRPQLLAWVRQQVEAGHTVHTVYEACGFGYTLHEQLTAAGAHSLVTTPMRLSPERRRKNDRLDALALCVRLSRHLDGHRHELHPIRIPSQVEQQRRELGRQRDFYKREVNRLENHGRALRLQFEHQTLPGGWAGPRKWKVIAAQCSDFVRAQLEPVLAQIRLVKETLAQLTAQIEALVAEEKIPHGLGALTVALLDGEVCDWKRFGHRKAVGSYTGCCPSEHSSGGVQRFGHIDRHGNGTVRTLLVEAVWRLLRWQPNWHARLKYLQKLKHGASLKKKMAVALARQLAIDLWRWRTGRCTAAELGWTLGGAKAEVRGEK

SEQ ID NO: 352188 - protein, 347 aa, unidentified
MRFYNRQHRHYCGIDLHVKTMYVCILDAAGHALVHRNVKSTPEAFLEIVAPYRDDLVVAAECMFTWYWLADVCAAEGITFVLGHALAMKAIHGGKSKNDKIDSHKIASLLRGGLVPQSYVYPAMMRSTRDLLRRRLHLVRKRGQLLAHIQNTRAQYNLPEFERRLAYPANRDGVSDHFPDASVRKSIEVDLALLERYDTLINDLELTLVRDAKRHDGDAFQRLRSVPGIGKVLALTILYEIHDISRFDRVQEFASYARLVKGRKQSGGKLLGTSGAKMGNVHLKWAFSEAAVLLLRHATGGKKFLATLEKKHGKGKALSILAHKIGRAVFYILSRDTVFSMEKFMAA

SEQ ID NO: 352189 - protein, 345 aa, unidentified
MAKSSVAVLGIDLGKNSCSLVGFDQAGTVVLRRRARRETVVGLTAKLPACVVAMEACGAHHLGRLLAVQGHAVRLMSPEYVRPYVKAQKNDDRDAEAIDEAATRPTMRFVPLKAQEQLDMQSLHRVRSRLVGMRTMLMNQLRAILLERGLAFPQGRRKFETAVGGLLEDPEARVGARIRSLVAEIREEWAGLDRRIDALDREFIAHAHADEAAHRLVSIPGVGPMTATALRAAVDDGSAFASARDLPAWLGLVPRQHTTGGKPKLLGISKRGNAYLRGLFIHGARAALASLSKAEDATGRWLRGLLARAHYNVVVVALAAKLARIAWARLRKEVSFERRLEPALA

SEQ ID NO: 352190 - protein, 311 aa, unidentified
MDEIWVGIDVSKENLDVGSLPSNEVTRYSQGEIAQLVSDLQEKQPELVVLEATGGYEAALVAALALARVPTAVVNPRQVREFARSTGKLAKTDKLDALVAARFAEAVRPEVRPLKDEELSALDAITRRREQIVGMLVSEKNRLRLARKEVAADIREHIAWLERRQKHVEHELQQRIKQSPVWRAKDRLLRTASGVGRVGSTTLITSLPELGALNRKQIAALVGVAPLNRDSGTLRGRRKVWGGRARVRSVLYMGVLAAVRNPESELGAFYTRLVERGKPKKVALTACMRKLLTVLNAMVRDGVPYTPQHSC

SEQ ID NO: 352191 - protein, 364 aa, unidentified
MNKCHLNTELSSHEGTRCQFNGGTGAIKLGIDVHQDFYVVVMQEGGSNPKPPQRFRKEAFLHWATKLKSRATEVHAVYEACGFGFSLQRQLNALSIHCYVVCPQKLDEHNKRVKTDGLDAKALVLKLDRFVQGNRAALAMVRVPSKEEEQKRAIHRQREQLVKTRMQLEAQGRTLMVNHGIEPVKNWWKGRTFAALQLPAWMKELLGNSQPILLALQEKINALTLQLQVAAASKQARGLGAMTSVIIDREIGDWNRFSNRRQIASYTGLCPGEYSSGNSRLQSCVTKHGNPRLRAALVELAWRLVRFQPSYKPILKWRRLLAKGALATGAARKKAVVAVARQLAVDLWRVRTGRCKPEALGLVI

SEQ ID NO: 352192 - protein, 346 aa, unidentified
MNNHAAGLLDVLVAWRKKAEQAGRTIARIVVAFEAGRDGFWLPRWLQANEIEAYVIHPSSIPVPRGARAKTDRLDTAMLLRAFSAWLRGDTDACRMVAIPSREQEDLRRPSRERAELVTERTRLINRMRSLLTLHGLSQVNPNTPATRRNLAQLRTAEGEPLPPNTFAELERMFERLELIKKQIKAIEDDYIHPARQCVLEREESGLAEQAQKARRQLATIAGVGAATAATLVSEVFTRNFAHRRALARFVGLTGTPDESGSRRRDRGLMKAGSARVRHTMIQLAWRMLYHQPNATLVQWYRERVARANSAGRKTFIVALARKLVIALWRFVQTGELPNGMHLARA

SEQ ID NO: 352193 - protein, 355 aa, unidentified
MPVYIGVDFHTRTQTVCWCDTATGECGEQELENGDLGEVRRFYQQFQQAVVGVEALGYAGWFHRLIEELGHALLVGNAQEIRRRAGRRHKNDHRDAVLILDLLLHEDFPEIHHLSPASQQVLGLLRYRHRLVKMQTMLKNGVQAVALNEGLRLQSKLWTEAGRQRLAALELEAAGAWQRETALAMLEELGKQIERTEGQLQKRAEGDECVLRLQTHPGVGLLTSLAVVHLLGPTKRFARTRQVAAYCGFDPREQSSGDHQRFGHISKQGSRLVRFLLGQAALSALNGDDELRPFYYRLLKHRHKHPGVAITATARKLLIRLFVMLRDQIDYAEFRRRGRDARCARETHRPALCSA

SEQ ID NO: 352194 - protein, 293 aa, unidentified
MSDGICFAGLDVHARKTAAAAVRLGSGEVFKAQIAGGPAAAIDWLQSLPGPVRAVYEAGPTGFGLARAARSAGLEVMVCAPGAIPRQPGDRIKTDMRDALKLARLHAAGQLRAVAVPSPELEALRDLVRAREDLRGDLMAARHRISKLLLRRGLTYGGPGSPWESQRHAAWLGAIVLPDELAHLVLGEYLATHEVILARRARLDALIEERSLEAQWAPLVGRLRCMRGIDTLTAVGLLAEIGDFHAFSHPKQLASFLGLVPSESSTGERRRQGAITKAGSLACFIWEIARLPN

SEQ ID NO: 352195 - protein, 356 aa, unidentified
MTKTQATCSGHVVIGVDTHKHVHVAAVMDSIGGILATLTIATDTAGYRQLLEWAKTFGKIIAFGIEGTGSYGAGLTSFVRRNGHKVIEVSRPDRRLRRLNGKSDTLDAENAARAVLAGFATAVPKSANGNVEMIRQLKVAHDTAVKSRSAAMITLKSMLVHASEKLRQDTAGKTQIMIARHCAGLRPRNLATPDDANRHALRSIAKRWIALNEEIKELQAQIEQLVTQRAPHLLDEFGIGVDTAAEILIVAGDNPQRIKSEAAFAKLAGISPVPTGSGMTSGKHRINHGGHRQLNAAIYRTVIVRMQHHEPTKAYVARRSAEGKSKRDIIRCLKRYVIREVYHLIKVNPQTGEITS

SEQ ID NO: 352196 - protein, 403 aa, unidentified
MAQMALQANDSGWVGVLYMALELSKSTWKVGFEYQGKRRIKNVPGGEVSALRQALDEARHKLGVPEGALVRCCYEAGRDGFWLHRLLEGWGVQNVVVDPASIEVSRQARRAKTDRVDLQSLLSKLRQYHGGEWGVWKVAKVPSEQDEEGRLLHRELERLKKERTAHVLRIKALLFAQGVRVERVGGKQWAAALMALRRHDGRALPADLMAQVRRESERLAMVQAQITAIEKEQARRVREAAEAGGAMAMVRALRQLKGIGPVAAWVFVMEFFGWRQFKNGKQVGALAGLTGTPYASGQMQREQGISKAGNQRVRALAVEIAWLWLRHQPDSAISRWYAERFAGTSKRHKRVGIVAVARKLLVALWRYLDTGERPAGAPGVRHLTPIFAPFRKVPSALARVSRP

SEQ ID NO: 352197 - protein, 392 aa, unidentified
MLFVGIDIAKRNHEASVIAQDGHVVRKAMRFANSQAGYNKFMDMVRSLSEPVVFGMEATGHYWLTLYTHLRNDGFTVHVINPTQSDALRGMYIRKTKTDSVDSVIIADVIRFGRYCETSVDPGDLQAMRELCRQRFYIIDMASDLKRKVIALLDQVFPEYEKLFSDSFGLSSMELLSQYTTPEEMLSVSSQQLAEVLKKASRGRLGAEKAVEIQDAAKNSFGIVMASSSFSLIIRQYIEQIRSLESSVDIFDTEIARLLSGFDTQLTTITGIGSTLAAVILSEIGGDIRRFSSPAKLAAYAGVDPTVKQSGDFSGTRIKMSKRGSPYLRRAIWLASTVAAFKDPVIHALYERKRAEGKDHMTVIGHVCRKMISIIFAVLRGNTPYVPAGISD

SEQ ID NO: 352198 - protein, 402 aa, unidentified
MNAVGIDVSKGKSMVAIMRPLGETVSAPFEIKHTASDINLLVELINSVEGESRIVMEHTGRYYEVLAHQLSEANLFVSAINPKLIKDFDNDSLRKVKSDKADAVKIARYALDKWQNLKQYSVMDELRNQLKTMNRQFGFYMKHKTAMKNNLIGILDQTYPGVNTYFDSPARSDGSQKWVDFASTYWHVDCIRKMSLNAFIDHYQNWCKRKKYNFSQSKAEEIYGKAKELVPVLPKDAITKLIIKQAVDQLNSASTTVESLRTLMNETASQLPEYPVVMAMKGVGSSLGPQLMAEIGDVSRFTHKGAITAFAGVDPGVNESGSYEQKSVPTSKRGSSDLRKTLFQVMDVLIKTHPQDDPVYQFLDKKRAQKKPYYVYMTAGANKFLRIYYGRVKEYLASLPES

SEQ ID NO: 352199 - protein, 349 aa, unidentified
MEQQFVGLDVSQQKTHICVVDDNGATVWRGTSASVPEQIAAVIRERAPVAVRIGLETGPLATWHWHALKKLGLPIVCLDARHAKAVLSMQINKTDQNDARGLAQIMRTGWYREVGVKSLEGHKVRAILGARTRLVGMRTGIRNQIRGLLKIFGIVLERHGGKRFETRVMEAAQGDSVPGQSLRSLLAVLSAIEIQLAKLDRIANDQAKQNPVCRNFMTIPGVGALTAVAFVAAIEDPRKFPKSSSVGAFFGLTPKRYQSGETDISGRVSKCGDDLVRTYLYEAANSLLICSNQWSSLKAWGLRIAKRSGMNKAKVAVARKLAVIMHQMWITGEEFRWSNKPDDAEVAAA

SEQ ID NO: 352200 - protein, 345 aa, unidentified
MYRTRVGVDLAKKVIQVCIYKNKKVQSNIEMTPEAFLYWLINNKPVTIIFEACSTSNYWKQKAIEAGHDARLVSAKLVSVVRQNQKTDKNDALAIVQTTFMPDVTYIGGKTVEQQQLQSIKRLRELAVKQQDASQKQLIALLFELNIKISSRKGGIISAIEGVLEDATNGLSAECRRAIFLAKEHLRGLFEAAHHYDVCIEKSVAAHPECKKLMKLEGVGPMNAINLYIALGCAEIGTFSKGKDASACIGLTPIQHSSGGMVKLGSIGKFTKNSRLRSQLICGATAAVQHAVKRKAKTKKDIWIQGLVERRGKKCAAVALANKTVRTAYAMLTQDTEYKAELLAA

SEQ ID NO: 352201 - protein, 314 aa, unidentified
MMQKVFVGIDVSSEKLDLFVDQPETHIIYRNIPDSWEEIAQYLSQISPERIVLEPTGNYEKGILRTLLSYGLPVARVNAARVRAFANALGLKAKNDRIDARVLAIFAKSMTTFVTELPSQALQQLQEVRRYRDFLSDQLVSMKHLKRTSEAAKPLLEKHIFEIQQMLKEIEKQIKTEVERQPALKTQIKTLSTIPGVSFISAVAILTEVPELGLMSPKKISALVGVAPYVNESGKFKGRAQIFGGRARARKSLYMPVVAAVRCNPQIKTFYQNLKERGKPSKVALTACMRKLLCTMNAMLREQKPWATYDPSPL

SEQ ID NO: 352202 - protein, 465 aa, unidentified
MSKAKKRASKKPGKKNKKKDVLEGLPPLNLNAAGIDVGNAEHTVAVPPGRDPQPVRTFGSFTADVHRMGRWLKACGVDTVVMQATGVYWVGLYQILEMYGLEVKVVNARYTKTLPGRKTDVQECQWLQKLHTFGLLNNSFLPDEQTRVLRTYLRQRENLVAAAGTCMQHIQKALTEMNVQLANVISDLSGVTGMAILRALVGGERNPQRLAELKNERIQASRKEIARSLEGNWREELLFVVEQSLQMYDTYHQKIVACDGRIEAHLKSMGAKVDVVAQPIPEPRRVKWPRKHQPQYDLRGELYRVTGVDLTQTDGLDVGTVQTVISEVGVDMSPWKTEHHFSSWLGLSPDNRISGGKVLKRGTRKVVNRAATALRLAAWSLLRSQSALGANFRRLRARLGAPKAITAMAHKLARLIYRMLKYGKEYVDKGMAYYEEKYRQQQLKWLTKQAAALNLQLVPATAVVP

SEQ ID NO: 352203 - protein, 357 aa, unidentified
MEQFIGCNAHKKFSLFVAMNEDGEYGRAIRVGHDREVFRAFLEDLPPGSQIALETSGSYYWLVDEMERAGHRPQLAHALTAKRRMEGRHKTDERDARGLAMLLRNGTLPRVWIPPAELRDQREMLRLRMSLVRMKTQLKNRIHGVLLRYNLCIQASDLYGDQGRPELISRQAELPPWSRESVLEQLQMVDSVQSQIVECEKQLEVILYPNAERDLLKTLPCVGKILSAVIALEIGDVRRFGEAKFLVSYAGLVPSARESAERKRQGRCPRDCNVYLKWAFVEAANLIASKQKTWPERHAVRLYQRVKQNTKMHGKATMAVARHLAEASYWILTKQEVYREPMSKAASSFVDARVSAN

SEQ ID NO: 352204 - protein, 318 aa, unidentified
MMVQDEKCYIGIDVSKAILDVYVLPCGKHMQFKNDARDIKKLSEKVKLFPQAAVVLEATGGYEKPVVLALQKLELNISVVNPRLIRDFAKALGKLAKTDKIDAEVIALFAEKMRPRTNAVFNENQQKLAGLNTRRRQIIDMITMERNRLDKVDGELKKSIQRIIKVLEKELEAINEALEKSIQNDANHAQKNKLLKSIKGVGSVVAAGIIADLPELGNVSARQISALAGLAPYNRDSGTLRGKRTIWGGRASVRTMLYMAALVATRHNPQIKNFYNRLCNAGKQKKVALTACMHKLLIIMNAMIKNGELWRTATVFEI

SEQ ID NO: 352205 - protein, 370 aa, unidentified
MQATIRFIGLDVHKDFISVAIADEGRGDVTSYGDIANTPAAVSKLARKLSRQSLDLCFVYEAGCFGFVLYRHLTKMGHSCVVAAPSLIPRKPGDRIKTDTRDALKLARLLRSGDIECCYVPDESDEAMRDLVRAREDAVCACRISRQRLNGFLLRHGKVYDGKSRWSGAHMRWILETKLPHEAQQIVLEEYRRRVEHDADCVDALTMQIRRLNEFWRWAPVVSALQALRGVCLITAVTVVAEMGDLRRFAHPKQMMAALGLVPSEYSSGGKRHQGAITKTGNGHVRRILVESGWNYRFPARLTRQMEHRQRGLDKAVTDIAWQAQKRLCGRYHQLNMRGKNVKLITTAVARELCGFIWDIAQQVEPKTNI

SEQ ID NO: 352206 - protein, 353 aa, unidentified
MKRIAYLAMDVHANHCVLGEMDCDGKYKGHRPFSTSEKNIIHAIKSVKAKEKYLTLEEGNLAYWVAQVARPYVTEVIPCDPRENALIYKSSLKKDKIDTKKLCRLLRLGELKKVYHPESDDRAIFKAAALHYIDLRDQQTALKQKIKAMFRHWGVIDVAGTSVYSVTHRHDYLIQVKHAHIRNQLNRLYALMDETESMEKKALKAMKALGRKYPEIKKFKKISGIGDISAHIFDAFIQTPDRFANRSKLCRYCRMGVTDRSSDGKPLGYKRLDPSGISEIKSLLYRAWLSAMKGDNEVREFYVRSLSRTHDRVHARLNTQRKILGVMYSLWKNGGTYNPNLFLGSEEIVALYN

SEQ ID NO: 352207 - protein, 342 aa, unidentified
MTYHMGIDTHHGYSFFQHMDAEGAIGISQRVATDRDRINELLAQLDDPTTITFEAGRNYWWLHELFAQHPLVSQVNVVDPRRSRHLSVELSVLSGYGRAKNDYIDAEMLAEQTRRGLAPTIHVPTAEQLEQRTLCRHRFNSIVNRSRAKNLIHALLELRGYSAKIADLVTPSATQDQFLALLPGYVAFIIEQLVARIKLFNQQIASCETRLAQLLPTGHPQMKIVMSAPGFGPVLSRMVLTELLDITYFKEPKYLISYAGLAPIDNESAGRKGSIKLNKYCNYYLKYAFIEAAHNARDNSSYRRKYDLDVKKQSKIIAKLNLARRLAKTVYWMLTRQQLYRW

SEQ ID NO: 352208 - protein, 328 aa, unidentified
MIYLGIDVSKLKLDCTLLLDPENDKRKSKVVPNSRDGVHELVRWCAKHGVGADQAHAVLEATGPYHEQAATTLHDGGIAVSIANPASVHDFSRAMAMRSKTDALDSLVLARYGVAMRPGAWQPPPAHVRELRALITQLDALSKDRLRTMNRQEKIKASSASELVERSISDTLSFYDKEIARLEKAIDDHIDRHPDLKDDTKLLSSIPGVGPKVARTMLRVMRMHQFKCAEDLAAYLGLVPVRRQSGTSLRGRSRMSKAGPADVRAKVYMAGVVASKHNPHVRALYQRLLAAGKTKMSALGACMRKVVHLCFGVLKTRQPYRPDYAFST

SEQ ID NO: 352209 - protein, 456 aa, unidentified
MPVINRHAAGIDVGATSHWVCVPEDAVAPGESPVREFGAFTKDLDELVEWLLTCGVKTIVMESTSVFWIPLFQKLEAARLEVLLVNARHVRHVPGRKSDCKDCQWLQRLHSYGLLNGSFRPSDDICRLHTLMRHRDNLTKSCGAEVQHMQQALNQMNIHLHHAVSDLNGETGLRILDSILAGERDPKKLVELRDAQCSKTRPEELGAALQGDWREEHLFVLRQSLENYRHLLKQMEICDAELEKALAKVVVNPAAFTEEERPENPPAAEAKAKTRKKFKKLKSSTGLKRDLSAELTRICGVDLTRVIGLNVLGVLILISEIGVDMSRWRSVKAFCSWLGLCPGNKISGGKILSSHTVHVVNRVSILLRTVAPAVGRSDTWLGIFHRRMRARLGPAAANTATARKLACMIYHLLKYKEDYIDVDCLIYQEKIRKSRITKLSRQAEELGFELTKKEAA

SEQ ID NO: 352210 - protein, 344 aa, unidentified
MGQYVGLDVSLETTKVHVLDEQGKRVWRGTCVTHPTAIEATIRQHAPEAVRIGLETGPLTTWLWQALTEVGLPMACLDARQAQAALNMRINKTDDNDAEGLAHLVRSGWYREVRVKSREAMLTRSLLGARTQLLGIVTDLSNQIRGLLKTFGLVVPKGAGKIFEANVRRLLEGEPAVAAIILPLLESWRAVRVRAAELDRQLLAAAREDRACRRLMTAPGVGAVVAASFVAAIETPEAFRRSRDVGAWIGLTPRRYQSGEVDYDGHISRRGDARLRSLLYEAATSILTHVHADSTLRSWGLALKKRLGFKRAAVALARKLAVILHAMWKTGTNFDARASASAAP

SEQ ID NO: 352211 - protein, 347 aa, unidentified
MRFYTNQHQFYCGIDLPARSMSVCILSHDGELLLHRNMKAAPEPVLKAVGPYREGLVVAVDWIFTWYGLADLCVQEGIPCVLGHALYMRAIHGGKAKHDTIDSHKMATLLRGGMLPQASVYPAEMRATRDLLRRRMHLMRKRAALLSPVQQTNSQDNLPEIGKNIAYQATREGVAERFDDAAVQKTLEVDLALITYDAELLRDLELCIIQTAKKHDANTLHLLQTVPGIGTILSLVRLYEIHHIDRFPRVQDFASYCRLVKCAKESAGKRLGTSGKNIGNAHLTWAFSEAAILCLRNNPQGQKYLVRLAKKHDNGKALTILAQKLARAVYDLLKRHTAFDRAMFLRA

SEQ ID NO: 352212 - protein, 420 aa, unidentified
MKKDNNSAKKSEPRSKRAKSRGPVQRDTKEVMAEVLGKLTGKLAAASVSTSAQENRRGNTFGPNRDRLTVGVDLGDRWSQYCILGLEGETLAEGQLRTTQEDVGEFFRGLTRARVVVEVGTHSAWVRDVITECGHEVLVANPRLMEGSKRRKRKSDRIDANKLARLGRVDPQSLYPIRHRSREVRQDLVMLRARDALVSVRTELINTTRGLVKSMGTRLPRCSSPSFAEKVKHAIPVEVREALLPLVQLVETGNECITRYDQRIEELGRKKYGHTTLLRPVKGVGPITSLAYVLTLEDPQRFASSREVGPYLGLVPKQEDSGDIQPQLGISKAGDRMLRRLLVGSSQYMLGAFGPDSDLRRYGLRLCARGGKNAQKRAVVAVARKLAVLLHHLWVTGDVYEPLHQARAGTGTATAQAAAA

SEQ ID NO: 352213 - protein, 336 aa, unidentified
MLFVGIDLHKKIISLCVVNQERQVIQRKTLHCSQPDKIREFFAQLGPFEAVVEATASYEWLWQLLEPLAQRLVLAHPKKLRIIAESTRKSDKLDAQVLAEFLALDMIPQAYRPTPRQRQHRVLVRQRCYVQRRITSVKNKLRRILSDYNADRKDLFSSEGLAYLAEVQVSAADRFVLDQLRGLWEFLEEQLTASAKELRTFARKAPAREAEARAVLESIPGVGVVTVDVVVSELGEVARFRSEKKVAAYAGLAPGQRESAGRSQELGISKQGSRLLRWALVEAAWRLVQKSQRWETVYERLHKRRGKKKAIVAVARRLLGVMVALLRSGQAYRLAG

SEQ ID NO: 352214 - protein, 337 aa, unidentified
MTPSTVGLDLAKNVFHVHVADVSGKTICSKRLTRRNVMPFFKDLPPCLIGIEACATAHNWARQLLEIGHEVRLMPPGYVKPFVRRGAKNDATDAAAICEAVTRPNMRFVPIKSREDQGFLMLHRARGLLVRQRTMAACAFRAHLAEFGIIVAQGRHRVDVLIEELDDIRSDLPDYAGFALDALVAQLAALNRQIDKIDERLADIHKTNPICRLLDTIPGIGPITATAFAATIPDPSAFRSGREFAAWLGLTPRQNSSGGKHRLGGITKQGDRYLRHLLVLGARTVVRYPKARSRIDGPWIEALLDRRRPMVVAVAVANKLARTIWAMLSTGEVYRNA

SEQ ID NO: 352215 - protein, 317 aa, unidentified
MARKGTIVGIDVAKGKIDAAIRFGAEASFANSAEGRRELQAWLKEHGVCKAVMEASGGYEKSWAALLRGAAVEVVITDPNRVRHFAKSAGQLAKNDPIDARMIAWFGEVFGHVSGQPHDEERQELDQIVTARLGIGRLKEQIENWGEHEQPKAVQKAQQALLKAVATQLAKLETIIAAKIDKTERFAQRAEIIQSVPGLAGTAAAGLIAFLPELGLVDRQAAAALLGVAPFDADSGKRRGERHIQGGRHKLRKLLFMPVLSAATQHNPVLKACYQRLIAKGKKAKVALIACMRKLIGILNTMLARGEKWDPARHAIA

SEQ ID NO: 352216 - protein, 343 aa, unidentified
MHIASIGIDIGKTTFHLVALDEHGSIVLRKKFSRKQLLIYTANLSASLIGIEACGGAHCLARVLRNQGHNVRLIPGQFVKPYRKSNKNDYLDAEAIAEAVKRNNMRFVPIKTEDQLDLQGLHRVRERLVHNRTEVINQIRGFLLERGITFNRGPLSLRKELPSLLEDAEQQLTPSLRRLLDHLWREWQYLNSQIDQIAGAIDVVADSDEGCRRLRKIPGVGPLVSTATVAAVGNGAAFKRGRDFAAWLGLVPKQYSTGGKAKLLGITKRGNRYLRTMFVHGARAVLLRVKYDTGGLGQWVRRLSVRAPRNKVIVAIANKLARIAWVVLSSGNEYQHQPLAAAV

SEQ ID NO: 352217 - protein, 345 aa, unidentified
MTESKIVAFDLAKRIVQACVIDGTGAVIAEERMGPERVLSFTARHPHATVALEACGGAHYWGRALERQGHRVLLLPPQRVKSYGDPACKDDRRDARAIAEAASRSYLRPVPVKSEGQQALQSLDRVAALLARQRTQTVNALHGHLSEFGITLPKGPHLLKRRFTELEASPRWRELPEELRAAMGELFAAFLALEDRLSAIKARLAKGAKQSKLGRLLLEIPGIGPMTAVSLEAAIGDDPGRFASGRQFAAWLGLTPRVSASGERRQLARITKRGSARLRSLLVVCAQAMLRQYRQGRHGDPLACWARHLLARKRWNVAVVALANKLARIVWKVASSGAAYQARTA

SEQ ID NO: 352218 - protein, 346 aa, unidentified
MKQITTIGLDLAKQVFQVHGAESDGSPVVSRKLRRADVLDFFKKLSPCLVGMEACGGSHYWAREIAKFGHDVRLVPPSYVKPFVKRGKTDAADAEAICEAVIRKTMRFVPVKSADQQAAAMVLKTRELLVRQRTQAINALRAHLSELGIIAATGPAKVATLIEIVRDEEDVRLPQAARFALSELANQIEGTKKRIDKLERAIVIEAIRDEDMRRLVTIPGVGVIIAASIKALVPDPHGFKSGRHFAAWLGLTPRSYSSGGKERLGRISKMGNSTLRSLLILGAISVLKHARHRTDASTWLAAILARRPFKVVATALANKMARIIWALLTKGGTYRKSGLAIGTASA

SEQ ID NO: 352219 - protein, 422 aa, unidentified
MSEVTFPRLVSRGCGIDVHQKVVVATIEGEGLKKETREFDTFTSSLTEMRHWLETNGITHVAMESTGVFWVPVYTILERTIPNVWIVNARHIKYVPGHKTDKKDSAWISKLLLAGLLEPSFIPPLDQRNLRELTRRRRKLVQEISSEKNRLLRVLEQCNIKLKSVMSHMDGKVATKLLDRLCSGQEVTMEYINSVYHGSLQATREELYEACRGKIENDNLFLIYVIKAHIHEMEKLVDQISERVASELAPHRASMDKLKAIPGFDTRTVEDLVAEIGFDMSKFPSAKHLGSWAGLCPGNNESAGKKKSGRITHGNKQVKAVMTEAAWAATRTKNTFYSERYHRIAARRGKKCALIAVAYSMLTTVYNILVSNAEYNELGAEYVKSKIEKRRKKYLTAELSKLGYEVQITKKQTESQTEECST

SEQ ID NO: 352220 - protein, 493 aa, unidentified
MNSKSNSRKKQGGNCGGRMGRDSGKQKKENMKALSPEQEAGLKQKAEEISKGLQSYTWRDLETGGKFTHNDKLTFIRDDMLIVGCDIGSERHYARAIDAKGRELSKGAYSFENSAEGFQSAKDWALCLAAQHGKNQIVLGVEPTGHYWFSLAAWMIAKGISVVQVNPYAVKQTKELADNSQAKNDAKDPKLIAELVKNGNYGVPYLPEDVYAELRVLCTLRDQLMEDRVRNMNRLHREMKIVFPEYREAFGKIDGIFTLSVLANAPLPSELVALGEDGVKDIWHAEKLRGGGYKRAKEIVRLAGVSAGLTQGAEARKIAIVSFVGKVMELAAELEEIEAQIALKCREIPRADNILEIHGLGAATVSGILAEMGDIDRFDAAKEIQKLSGLGLVACSSGKHQGQTKISHRGRKRLRYWLFQGALSVVSHNEAFRQIHAYYTTRAENPLKKMQSITVIACKLLRIIFTILKKGVRFDPDKMLSDITHPAPLDAAA

SEQ ID NO: 352221 - protein, 377 aa, unidentified
MNSITYIGMDVHTTNYTLCAFTLQTQTPFFELQIQPEFEELKKYLTNLDQIQGGGSHFVCGYEAGCLGYSLYKEIMFHDWKGFSVECVIMAPSTMAASPNDKMQKSDSIDARRIARCLCFGQYKKVFVPTEEDEAVKEYIRMRDDTQTMLKQTKQQIIAFCTRHGLAYARKTYWTQKHLEWLEHLTFTNALLQETLGEYLLTYRKLSENLERYDKRIEELSQGERYAENVGKLCCFKGIATHTAMSLLSEVGDFNRFPSAEHFSAFLGLVPRQHSSSDSKHFGAITKTGNSHLRRLLTEAATCYNRGVAGKKSALLKKRQEGNTPEVIAYADRGSERLRRKYIHLMLNNKKPSNIAKIAVARELACFIWGMMTDHII

SEQ ID NO: 352222 - protein, 401 aa, unidentified
MIDTGDIDVFLGLDVGKGEHHATAVTPTGKKAFDKRLPNTEPKLRELFAKLQAKHGTVLVVVDQPASIGALPLAVARDMGCPVAYLPGLTMRRIADLYPGEAKTDAKDAFIIADAARAMPHTLRAIDGEDETIAELEMIVGFDDDLAGEATRVANRLHGLLTQIHPSLERVLGPRLQHPAVLALLERFGSPAQIRKAGRRRLVTLLRPKAPRMAERLAEKIFTALDEQTVSVPGTEAAALIVPSLAGSLAAVLDQRKLLAGRIEELLETHPLSKALTSMPGIGVRTGARILIEVGDGSTFPTAGHLAAYAGLAPATRSSGSSIRGEQPSRRGNKQLKRAFFLSAFAALGDPASRAYYDKKIAQGKHHTQALLCLARRRADVLFAMLRDGTFYESRPTTAVT

SEQ ID NO: 352223 - protein, 401 aa, unidentified
MEVLHQKCCGLDVHKQTVVACVLAPRVRETRTFSTMTNDLLKLKEWLLECKATHVAMESTGIFWKPVYNVLEDAFTVLLVNPQHIKALPGRKTDVQDAEWIADLLRHGLVKGSFVPDREQRELRELTRCRRSLLQERNRVINRIQKVLEGGNIKLSSVATDIVGVSGRAILEAMVNGVEDPKALADMAKGLLRKKKTSLEEALKGVMGEHQKMILAAHLRHLDFLDREIARMDDEVGQRTGRFEKILKSLDDIPGIDRRSSEEIVAETGIDMSHFATAAHRASWAGLCPGNNQSGGKRRTGKTHKGNRWLCSTLVQAARGAARSKGNYLSAQYHRLVGRRGDKRAIVAVAHSILVIIYNMLRKDTTYYIPEGQWLQLNSYILNLHRWADPSLFSPGSQFSG

SEQ ID NO: 352224 - protein, 311 aa, unidentified
MTTSEYVGIDVAKAELVVSTPTASLGRYGNDAKGHCDLVKRLGRMQVAGVVLESTGRYGQDVAVALMAAGFSVAMVQPGRVRHFARSLGVRAKSDPIDAQVIAKFGEATKPRPMSPMPSEITQLRALVDRRDQVVELRKQEQNHLEACTAPIIVKDLRSSIARLEKSEARYTADIARHLAAHEQLHRLSQALQTESGVATLTAATLIAHLPELGRINRQQVAALSGLAPYDHSSGTQDGKRSIAGGRKRLRRALYMAAITAARFSTWLAPMYLRLLERGKCKKVAIIACARKLLIRLNSIAAKALATPTPA

SEQ ID NO: 352225 - protein, 345 aa, unidentified
MDKSSKIIGVDLAKNVFQLALANKHYHVTRSKRLNRTQFYRFFVNHPPVQVVMESCGTAHYWARTLKAMGHQVTLLPAQHVRPYVRRNKTDRSDAMAIVEAARNPEIKPVPVKTEYQQSLQSLHRLREQWKATRVARINALRGILREFGVLVPMGPRAAISTAGEVLPSLPALLQSSVQVVLEELSDIETRIRELEKQLKQAARDDVVIQQFMHIQGIGLLCATAMRASVQSPAQFKNGRQLSAWLGITPREFSSGDHRYLGRISKRGDKYLRTLLIHGARSVMARIKRLQHDNRPLSALQLWAAQLEQRVGHNKATVALANKLVRILWATWMHQREFDANYTVQ

SEQ ID NO: 352226 - protein, 387 aa, unidentified
MSEMFNPHAPATAYDHSTTIVAVLELSGKNWLLGAVAPGLSRRTKRSFEARDVEAVVRAIEQVKAESAKAGFEIARIVVGFESGRDGFWIARALQQRGLEVYVMHAASIAVERRGKRAKTDRLDVDLLLTTLIGWLRGEPGRCTMAPIPSEEEEDLREPGRRRETLIRVRLMVENQIGSLLIRQGIAGFRPRLKNAETKLGEQRTFDGRPLPANTIKSLGLLLAQHRLLSAQLHEIEAARQQVVKVAKPNRLQCMIQALARVVGVGVETAIVLVYEVFSRSFKDRRALAAFVGLTGTPYNSGGSTIEQGISKNGNPRVRRMLSQLAWRWLGHQPESALAQWFKARLGGAKGRMKKVLIVALMRKLLIALWRLAETGEVPAGVRLAAR

SEQ ID NO: 352227 - protein, 415 aa, unidentified
MKVVFPTCCGVDVHKRFLVATIITSPTDSLQPHYQKKRFSTFNSDLNRFADWLHENACLDVCMESTGKYWVPVFNILEKRDIRVVIANPKWVKAVKGNKDDTKDSKWIGDLFRIGLVKSSFIPDKNIRILREFTRYRYKLMSMRSSEKNRFQNAFTVCNVALDSVVSDMFGKSATAIADYLTSNEPFDAKHCVSLLQRSLKKKADAVLESIEGYSITDEQKLRIGIIREHLYHIDDLIDKVDVCINTLVSEYESHIDLLCTIPGVRRNTAITIISEIGVDMSQFGSSKRLCCWAGLTPGNNESAGKKKSVRISRAGVYLKPALVEVAHAAVKDKANPYYAIKYERIAKRRGKKRAIIAIARMILTAIYEMFSTGEVWNPVDLYKVDMPEHLKEKQLAKAVKQAIRFLEKQGLKIS

SEQ ID NO: 352228 - protein, 313 aa, unidentified
MKETTTVGIDISKDSFDVHIDTTSQFLHLENTPTGIQLLLEALRELSVSLVVMEATSKYHYLLASMLTEAGLAVAVVNPRQVKNFARALGKIAKSDPIDAKTICEFGKRMQPAPRPLKGNELQELSLILARRRQLVQTRTMEAARCQEKPSPFIEQGIAKHIAWLNAEINALDLEIKARLKESEELTIRRKLLDSVKGIGPVTQAVLFTQLPELGKLNRRQISALVGVCPYDRDSGSLRGKRAIWGGRSGVRAMLYMAMLSAVRYNPQIKMFYTNLVSRGKPKKVALTACIRKFITILNAMFRDERMWAELKS

SEQ ID NO: 352229 - protein, 367 aa, unidentified
MKDSITVVGLDVHRNSIQIVTADTDGAMEVRHFGRIGGTMDALDRAVRKLVSRGSTLRFVYEAGPCGYEIYRHLTGKGFSCKVIAPSKTPKKSGDRIKNDRRDAETLARMERAGELTAIYVPREEDEAMRDLTRAREDAVKALKTARHQLNAFLLRYGQRYPGKASWTPSHLRWLSDVTLPHPSQQIVLQEYIHTVVACAERTARLTDQIMKLLPDWRMFPVVKALQALRGVAPIVATTTVAEIGDLSRFANPRQLMAYLGLVPSEDSSGESTHRGSITKTGNGHVRRVLVEAAHAYGFPARVSRHLLKRHEGVPQPVLDIAWKAQVRLCGKFRRLMARGKLKNKVVTAIARELSGFMWAIAREVEV

SEQ ID NO: 352230 - protein, 315 aa, unidentified
MENNSLIRVVGIDVSQDFLDVFCSGAGASRVGYDANGLRRLIASYADSRPDLVVCEATGGLERRLVAALVSAGVATAVVNPRQVRDFAKATGRLAKTDRIDAQVIAEFALAVRPPARLPKAELTQQLDDQLRRREQLLEMLIAERHRLARASRAVMKNIRLHIAWLERQIDHADHDIDTTIKDSPAWQAKHDLLKNFKGIGPMTRAGLFAWLPELGTLNRKQIAALAGVAPFACDSGTLRGQRHIWGGRRNVRRAVYMATLVAVRHNPTLRAHYTQLRDRGKAAKVALVACMRKLLVILNAVFRCGTPYVERNAS

SEQ ID NO: 352231 - protein, 376 aa, unidentified
MTKAREKLAKGKRIDVGLDVHKKTWSVCVLCEGEELYNAMLPADVERLVSLLKRFGAREVHTVFEAGPTGFGLHDALQAAGFDSMVTPPSLVPKTGGRVKTDRRDGRKLATMMASGFLHRVHVLSPKERAERQLSRTRGQMERHRCQAMNQIKSLLLMHGIRAPEGLREHWRTPHLNWLRTVPCEFPEIRVALDALLALYDHADGQVREFNARLEELARSDAYRDRVRVLTKIPGIAILTAIVILLELQDVERFRRAEELSSYLGLTPVQHSSGEKTRLGRITHCGNATVRTRLVQSAWVQIRFDPEARATFDRIKSRTGSGKKAVTAIARCLGLRVRRALLDLAPPVPSAASRSAADQPKGRAVKHYVLKRKEQL

SEQ ID NO: 352232 - protein, 378 aa, unidentified
MIRTALDQDTTTTKRTLYLALELSRKTWKLGFSAGGKKVRTVSVDGGSVPAVLEAAKTAKSKLGLPAEARVLSCYEAGRDGFWIHRMLVAAGVENLVVDPSCIEVDRRARRAKTDRLDATKLVQQLVRHDERGDRLRAVRVPSAEDEDARRPIRELGRLKQERGAHSNRIRGLLTLHGLAGLKVGKGFGLLVDALRSADGELLPEKVREEMKREAARLDLARDQILMVERARGVALRAKPSKAMEMAAMLTSLLGVGANAATILACEFFAWRDFKNGKQVGACAGMTGTPYDSGDVRREQGISKAGNWRVRAVMVELAWFWLRYQPGSRLARWWEDRFGAATGRMKRVGIVALARKLLVALWRYATQGIVPDGALTRA

SEQ ID NO: 352233 - protein, 339 aa, unidentified
MESSVWLGVDVGKRSFHAALALQVLGGNEWRKLPSASFEHSAQGMRGLLAWLKGQGLRPAALGGVCIESTGRLAQHFAALAKGRLGEVSIINPARSKSFMQSLGFQHKNDCVDARLLAYFGQHRRPRAQAPKDAAYAQLRELTRAWEDMQIQCQSEQRRLADGPACKAVCAALKRIIRMYTREMDALQIKINALIGSTPALKEDAARILSVPGLGARTAQILLAEFGELRQYNRDELVALAGLYPRQHDSGSSVHKAPRIIKAGKANVRAVLYMAAMSAKQCNPAIKAFAQRLQDARKAPMQVLIAVMRKLLLIAHALIVNNTTYNPEHHSPSKAVFSS

SEQ ID NO: 352234 - protein, 313 aa, unidentified
MTEHNIGVDISKSHLDVFRLEDEAARRFENSAAGFRALVKWLGKSAVARIVFEPTGPYHRAFETALSGKFPLVKINPLQARRFAEACGTRTKTDAVDARMLARMGAALALEPDAPVNEKLNELRDLQVARTGLIKERTRLHNRGHVQANPVLKRQTKARLALVERQIAELDAEIARQIAEDQPTARKRQILCSVPGLGPIAAALILTFLPEIGTLDRKQAGSLAGLAPHSRESGQWKGKSFISGGRKPLRDALYMPALVAMRFNPDLKAKYTALRAAGKPAKVAIVAIMRKLLETANALVKGDRIWVKKTSCS

SEQ ID NO: 352235 - protein, 310 aa, unidentified
MESKESPTYVGIDIAKDSLQTTLPGASSRLSNDKRGLYNLFTCLRSIDNPHVICEATGGYERLLVEACHERGIAVSLLNPARVRAFVESEGIKAKTDPIDAKMLVRFAQEKKPRANTPLPPERKEMAELLDRRAQLSEFLAREKNRLEKSSDAARESIKRMIEVLEKEIAQVDQAIQELIDRHPELAEEDQMFRSVTGIGKVTSWTILAYLGEISHLKRNEVVALAGVAPFNKDTGTRTGKRVIQGGRAKVRRCLFMAAQTAAIHNPVITAYVQRLRERGKPYKCALVAAMRKLLIHLHSLIKKSKEAVA

SEQ ID NO: 352236 - protein, 373 aa, unidentified
MDNSITFAAMDTHKKEHRVALIYPNDEQVIEFSVRNAPAEITKMVKKIKRNASGQVKFCYEAGVCGFTLQRRIEASGCKCSVIAPSLTPRKPGERIKTDRRDAKKLLGLFMADMLTEVYPPNEQQEAARELTRCREAAQENLKRIRHQLQKLLVRHGYVFTDGEHWTQKHLRWLDAVDFEQPLLQEVFDCYFTEMRHCLQRVKTLDRELEKLAQSDVYREVTGALRCFYGINTLTAMSIIAEVFDFGRFASARDFMSYLGLTPSESSSGQKQQKGSITKTGNKRARRLLTEAAWHYRHAYTVSKALNERREGQPQWAIDIADRAGVRLRKRYHRLVNRGKLPCKAVAAIARELAGFIWSVLIEYEARKKRKAA

SEQ ID NO: 352237 - protein, 316 aa, unidentified
MTYFIGVDIGKHYFDASIDGQTGTKRFDNDEKGFKAFLKWIAPFEERHVAMEATGNYSMPLAIFLYEKDIHVSIINPAQIKYYAQAQLKRVKTDPEDAKVIADFCKTQSPKLWQPSRDLVARLQQWLGFKHLLEQQKLQLQNQMNSHMDEELKQIQAQQLAEFTQQIKQLDKRLKKWVKADEVLNRDVSLLETIDGIGTNSAMNMLASIEDIGRFDKAKQLACYAGLTPRIRRSGTSVNSSSISKTGNHKLRKALYMPAIAALRFNPVIKCFAQRLKQNGVTGKKMVVAVMRKLIHIVFAVLKSGKPFDREYEIRA

SEQ ID NO: 352238 - protein, 314 aa, unidentified
MKREYQKVKVLVNGKAVYIGIDVHKEKWHITVRADGEEIFHGSMLSEYQSLRKLLDRFKGCKIKVAYEAGPCGFWLYDKLSAEGIETIVVPPSLIPVESGNKVKTDKRDSRKLARLLESSMLKRVYVLTEEDRANRELVRTRRQLMEHRSDVMRQIKSKLLFHGIKSPFPGKDRWSKRYVKWLRELHFEHEVLKASFNTLIDLYEYLSSEVVKISKEVIALSQSDKYSYKVKLLRSVPGIGILIAMELLVELADIERFKTADEIASYMGLTPSEYSTGQYVRQGRITRCGNTRARVCLVESKLASDREGSHLAD

SEQ ID NO: 352239 - protein, 323 aa, unidentified
MTRIICGVDVSKDSLEARIGPEGAAASFPNHPEGIADLACFSREQQAELVAMEATGGYEQLAFAQLSQAGLGVAILNPRAVRQFAQSMGRLEKTDRIDAGMIAWYAEVKQSPPVCLAPQSQQHLRALVTRLRQLTEIRTAQLNQQRLVTDRRVQASFTKLLAFVARQIRDLEQRIAKLIAEDPLWRELDQQFRTIKGVADRTVSRLMADMPEIGTLSNKTISKLAGVAPLARDSGKHHGKRPVRGGRPSVRDLLFIVVSVVGRYEPDFMTFQQRLRAAGKPPKVVRIALAHKLLVRLNAKAREVRHRMVSLQPSSSALLLGTN

SEQ ID NO: 352240 - protein, 315 aa, unidentified
MTPAESKEINIGIDVSKASLDVAVHETSETWFDDNNAGGCAALVARLIKLKPARIVIEATGGYETLVAASLSAAGLPVIVVNPRQVRDFAKATGQLAKTDRLDAGVLAHFAAAIAPPLRPTKSDEAQHLEALLARRRQMVEMLVAEKNRLAAHRDRAVVKDLKTHIAWLERRLKQSDDELQRVLKASPVWRERDDLLRSTPGVGSVLSLTLLAQLPELGTLNRKQIAKLVGVAPFNWDSGQWRGSRHIWGGRAAVRAPLFMATLSAIRCNPIISSFYRRLIAAHKAPKVAITACMRKLLTILNVMVKTQTSWRTA

SEQ ID NO: 352241 - protein, 350 aa, unidentified
MKIIGCDFHPSHQQIAMLDESTGELSGRRLSHPGEAQEFYRSLRGPVRVGMEAVGNALWFERLLTKLGHEWWVGDAARIRAAAVRQQKTDTRDAALVLELMLQGRFPRIWVPSPAERDLRQLLLHRHKLVEMRTQVKNQLQHLALNQGVRRQHRLWSAAGRTVLESLDLPGWTARRRKDLLALLDMLEQSVAELDRAVEAEAQARPDCRALMTEPGVGPVVSLATVLTLGPVERFQRGKQVASYLGLTPREHSSGGRQRLGRISKQGNSFLRVLLVQAAHVAVQHDDELGRQYRRLAQRKNRGVAIVAIARKLAVRLYWILRRKAWESGKVGSMQGSPSHSVAEALKPSA

SEQ ID NO: 352242 - protein, 344 aa, unidentified
MEHYAGLDVSLELTSVCLVDQQGQVVREARVASEPEALIRFLEQQDLEIARVGLEAGPLSQWLHAGLVSAGFEAVLLETRHVKAALSAMTVKTDRRDARGIAQLLRLGWYRPVHAKSASAQEVRSLLTARKLIQCKLLDIESGIRGVLRGFGLKVGTISRGRFEARIRDLVEGQAMLETVIGSMLAARAALQAEFTRLHRALLALVRADPVCRQLMSVPGVGAVVAITFKSGVDDPTRFRRSRDVGPHFGLTPRKYQSGEIDVTGSISKVGDRMVRTALYEAASVMLSRTVRMSPLKSWAMAVARRRGAKKARVALARKLGVILHRMWVDGTSFRWTSEAAAMA

SEQ ID NO: 352243 - protein, 316 aa, unidentified
MPETFIGIDVARDSLEIAVRPTGAHWSASNEPTALGELVARLLELDPQLIVLEATGGLELALLAALGSAGLPVVAVNPRQVRDFAKARGTLAKTDRLDAQVLAHFAAAMRPSVRPLPEAATQALAALVTRRRQLLEMLVAEQNRTAMAPPAIRSQIEEHIAWLRQRLTGVDRELATTVRASPLWRAQEDLLRSVPGIGPVASVTLLAELPELGTLNRKQIAALVGVAPLNRDSGTWRGKRTVWGGRATVRAALYMAALVGTRHNPVLRALYTRLVAAGKPKKVALTACMRKLLIICNAMLKHGARWAPPDPMAPNP

SEQ ID NO: 352244 - protein, 356 aa, unidentified
MNTHRVQQHVVEGKEIFVGLEDSKRTWKLAVRCERMVVHTVSMEPKYKGLLKYLETKFPGCLIHLIYEAGFKGFNLYDRLTDAGIDCVVIPPHMVTQPKVSKVKTDRRDANRLAIILENGDFKDACCVPDRERREDRQISRTLIGIQKDLIRVKNRIHKFIDFHGIEVSLRGYWGRDELRILKELPLEGPLKTSFDVLLTQLEELTCHQTTLRNGLRALCQKPRYKKAFDIARGLPGIGWFTAIRLILELGEDLSRFTTGEKVASFVGLTCSEYSSGESECKGRITGMGSGFIRGVLIENSWIAMKRDPVLLAKFSRVWRSSGSKKKAIVAVARMLIVRLRACVVSGTPYVMGTVR

SEQ ID NO: 352245 - protein, 449 aa, unidentified
MRKPLVVLDEEHERVFERVAAVDVAKASGVVCVRTPGRPGGPRQNQVFEDVAATTGAITELGRFLVAEKVQMVTMEATSDYWRIWYVVLEMAGLAVQLVPPHQARQIQGRPKTDKLDAIWLARLTEWGLLRPCFVPPGPVRKLRDFTRARADLVRDRTRCWQRLEKLLEGALIKVSSVASKLTTRSAQDMIRALIAGERDPQVLAGLARGRMRAKHDALVAALTGMFDDRHGMLAGLLLDQIAYLDNAVSQVEAATEAAIAQIPQAWGVDADGVTGPDAGTGPDAARLPAAWRLAEIAGLSYELAIAIIAEIGLDMTRFRTASHLVSWAGLCGTANQSGPRKRKDKKGHGNSYLRGYLCQAANGAARTSTFLGERYHRIARRRSAARALVAVARSILVIIWHLLADPDARYTDLGPGYHAARTDKDKKIRNHVRQLQALGLTVTITPAA

SEQ ID NO: 352246 - protein, 371 aa, unidentified
MQYVTKFIGLDVSKEKISVAIADPGRELPRYYGTIAHTPGALRKLIKELGPADSLAFCYEAGPTGYETQRWIESMGASCVVIAPSLMPKRPGDHVKTDRRDAEQLARLFRAGELTAIHVPTRDDEALRDLVRSREAAREDAHRARQRILKFLLRHQIHPPESIKRRWTKKYRVWLAALTFQHEAMQVVFTEMLHALEEIEHRIGRLENALLQQATTGAKSSVIQILQSLRGVAHITAITIAAEIGSFERFRSPAQLMAYLGLVPREYSSGQTTRRGSMTKAGNGHLRRTLVESAWSYRHRPAVKGDLAKRLEGLPAEVQLLSWKAQERLHNKYRRLVFGKSKHKNVAIGAVARELVGFIWAVARIAEQGRS

SEQ ID NO: 352247 - protein, 332 aa, unidentified
MVIIGCDLHTRYQVIALLDTATGESMTRRLEHESGEARRFYAALEKGSLIGIEATGYTQWFERLMAEVGHELWVGDPAEIRARAVRRQKTDERDAEHILDLLLTKRFPRVWVPTPEERDVRQLLKHRDKLVKMQTSVRNQLHFLAMSQAVCRKRRLWSEHGRTELEGLKPGVWASERRQELLEFLDRLGPRIEELDRAVKAEAAGRPEARELMQELGVGPVTALAFVLTVGPIERFPRSRQLVSYLGLNPREDSSGGHQRLGHISKQGNEMLRWLLVEAGHTAARCDPQFRQQYAHLKFRRGGRIAKVAIARRLAVRLYWRLRRYAAGSHVQ

SEQ ID NO: 352248 - protein, 402 aa, unidentified
MNAVGIDVSKGKSMVAIMRPFGEIVSAPFEIKHTASGINSLVELINSVEGESRIVMEHTGRYYEVLAHQLSEANLFVSAINPKLIKDFDNDSLRKVKSDKADAVKIARYALDKWQNLKQYNVMDELRNQLKTMNRQFGFYIKHKTAMKNNLIGILDQTYPGVNTYFDSPARSDGSQKWVDFASTYWHVDCVRKMSLNAFIDHYQNWCKRKKYNFSQSKAEEIYGKAKELVPVLPKDAITKLIIKQAVDQLNSASTTVESLRTLMNETASKLPEYPVVMAMKGVGTSLGPQLIAEIGDVSRFTHKSAITAFAGVDPGVNESGTYEQKSVPTSKRGSADLRKTLFQVMDVLIKTHPQDDPVYQFLDKKRAQGKPYYVYMTAGANKFLRIYYGRVKEYLSSLPES

SEQ ID NO: 352249 - protein, 371 aa, unidentified
MRRVCGLDVHKDSIYMCILYENGSKIESVFGVLTPELDKLRDLLVSHHVCEVALESTSIYWIPIWNILSVDFSLKLVNPYFIKQLPGRKSDVKDAEWIATVLQKGLIRGSYVPDRMIQCLRQYERRNHELSKNIVHAEQRMDMILQRCNIRISNYVSCISCKGYQKVVNAIISGESNPKVLVTLIHKRTLNKHGRQVVEDSLNGFVSDTDRDILRQYRDERMQMEQHKSENKAHYCEELELLQTLPGIKEESAANIIAEIGVDMKMFLTASAIVGWAGLKPRNDQSAGKIKSRKITHGNKYLRKILVEAAWSAARTKDSRFMKMYQRLLARGKSKQKALIAVARKLLVLIWNMLSKKEAFNPEYKRRIQAA

SEQ ID NO: 352250 - protein, 400 aa, unidentified
MRVVFGIDVSKTSSEVAILVNGEKVHSYTMTNDALGFSHLLSDLKSVQNPEIIFEATGVYSRRFQAFLENNGYTYTRLNPLEAKKQLDGLRVRKTDKIDAEKLAHSQFILNRKSSYVQEEVYQQLRDLSRFYQNLTEDIVRTKNRLHKVLQVTFPELEDLLSAPTGEQYWNLVIAFPCKKFVLEWEERDLVDVIRTSTSKRISEKRAAYLAEKLTALAKQSYCAVEKTSPMMEEVRYYAQELLRLSKRRQTVLDEMVALAHPLPEYEILLSIPGIAETTATSIIGELGDIRRFQSANQINAFIGIDLRHYESGNYLAKEHITKRGNPYARKILFKCIHNIASARHTNPCHIADFYEKRKRQSQASSTKPHAIASIHRLTRTMYYLITHNKLYDYGSTQNH

SEQ ID NO: 352251 - protein, 389 aa, unidentified
MPPCPVESEDGKTTMARTKRPVTPTQPTDPATAGDPVGDREVVGGVDTHKDTHTAAVIDTAGRMLGHETFPATGAGYALLLDWLVSFGHLLLVGIEGTGAYGSGLATHLRGLGVAMVEVDRPDRKARRWQGKSDPVDAEAAARAALAARATGTPKDRDGSVEALRVLRVARRSAVDQRADVQRQIKALVVTAPESLRDRLRGLRDKDLLATCARLRPDSARLHEPVEATKHALRTLAARHAQLTVEITGLDAHLATLVEQINPALLELKGVGVDVAGQLLVTVGGNPERVRSEPAFAMLCGVAPLPASSGRTQRHRLNRGGDRQANCALYRVVLSRLRWDPRTRAYAERRTAEGLSKKEIIRCLKRLIAREIYYVLNPRTITKPAAQAA

SEQ ID NO: 352252 - protein, 413 aa, unidentified
MLLFIGDDWAEDHHDLELEDETGRRLAKARLPEGLEGITRFHALVAQHAPADWADLPSEEVAGRVVVGIETDRGPWVTALRAAGYRVFAINPLSSARYRERYSTSGAKSDAGDAHVLAEIVRLDRDHHRQIAGDTDLVDAVKLVARAHQTAIWERTRQVLRLRSALREYFPAAIEAFGDLSATDTLILLARAPSPVRAGKLTRSQVVSALRAARRHHVQTKADALLAVLRAPGLRQPSTTEAAYAAVVVGQVGIITALNVQITQLEVVVAEHFGRHPAADIYLSQPGLGVVLAARVLGEFGDDKKRFADARCRKNYSGQSPITRASGKKTIVLARYATNRRLGDALHQQAFSALGASPGARAYYDALRAGKIGHHAALRQLANRLVGILHGCLKTGTKYDENTAWQHLNVAAA

SEQ ID NO: 352253 - protein, 313 aa, unidentified
MSQNNPSILHVGLDVAKDSLQLDLAGQSHALANDAKGHAQLLKLLRPHPGAHVVCEATGGYEQPAVRALHAAQVPVSIVEAGRVRHFAKAKGQRAKTDPIDAAVLSAYGRTFQPAATAAPTPQQARLAELSTRRRQLLTTLTAESNRCAHYLDPLSLRQARDLRRLLEKQVAACDAALAEIIAADEALKVRAQRLDAIPGVGAVTAATVLAELPELGHISDAAASALAGVAPFNRDSGQQTGGRHIAGGRKPVRCALYMAALSAVRHDAILKAFYLKLRAAGKKPKVALVACMRKLVILMNRLLSNPKFQLAN

SEQ ID NO: 352254 - protein, 346 aa, unidentified
MLYVGLDLSRKRLDFCLLGELGDRVEVGAVPPDVDGLRGLAARVGRFGEPVRAAIESMNGARFVRDQLELGGWTVEIADAAKVKGLAPLACKTDRIDAWVLAELCRRDLVPAIWLPNPRVRAERERARFRLHLVRHRSSLKQRVHAVLLAHGQPGPVSDLFGVRGRRLLERLALPEPWAGTVAATLRLIDDLDREIAACERELQRLGADHPYVPLLRTIPGIGWVLAYTIAAEIGDINRFASPRKLAGYTGLCPRVYQSGDSDRRGPLAKQGPKYLRWALIEATSHACRHPAYRARYQRTKQRLGKQRGAKVAQVDLARRLAEAIWYMLSRNQPFAPKGATNPLAA

SEQ ID NO: 352255 - protein, 452 aa, unidentified
MAKKREKRECRAVVLEPDAAGIDIGAEEIFVAVPPDRDEESVRRFSSFTCDLHALADWLQQCRIRTVAMESTGVYWIPLFQILEARGLEVYLVNARYLKSVPGRKSDVSDCQWIQYLHSVGLLRASFRPALEICAVRSLWRHRGSLLQMASEHILHMQKSLSQMNLQIHHLLSDLTGASGQAILDAILAGERNPVLLAQLCNCRVKSPREKVAKALEGDYRPEHVFTLKQSLDGYRYYQKLIAELDREIQRLMQTLPSAVETGQEIPRRTKHSAFQRQGNDPGFDLRGQLYRIAGVDLTDIPGVSTVTAQVILTEVGPDLHRFRNASAFASWLGLCPENRVSGGKILSCKTRKVKSRAALALRLGANSLCRAKGYFGEFFRRMRAKLGTAQAITATAHKIARVLYHVLLTKEPYAETVFHKCDEHARRRAEMRLRKHAALLGFQIVPIDPAT

SEQ ID NO: 352256 - protein, 416 aa, unidentified
MNRTLTRRIAYIEQFDLFVGIDLGKDSSVAVIIDRRHKRYGRFQFGHTRTEYNKLVKWLKQDRAGLKEPCILIGMEPTNDYWQWLATYLEEVEIPYRLVNSFTVKKTREGSQLDYAKDDPRDGDTIAYLLSQGQFTETQLPSDTYAQMRQYEQAHWQLRQAMRRQKTILRQQVERLFPELRQVFADFRGKTITALLQNHADPRQITQLNWETFVTDVRQDFSGKQLMVSKLRQAYELAPQSIGLQPGCALQQLIRQQIALLALQQQQLDALETNLLACFHTLPIAPYLLSIGMGEVSSALIVAELGDLSHFNNAKQLVKLAGIQATPNQSGKYRRQKTPMSRKGRVRLRTYLFFATMRLIRWDPAFQARQQRLIKRENKPLKKLEAVGALMNKLLHLLWSLCRQQTTYSTERFASA

SEQ ID NO: 352257 - protein, 343 aa, unidentified
MQNTIIAVDIAKNVFEVAVSRRTGVVAERHRLSRRRFLPFMGEFQPATVLLEACGSAHHWARQLQAIGHTPILLPAHATRPYVLRNKTDQADAKALLEAFRNKNIKPVPIKSVEQQALMALHRLRSGWMAARTARLNALRGHLRELGFTIPLGARLVVPRLWELLEDAENGIPQFLRPALAEAGREVRELEQRILDIERQLREVSRQNPMIIRLRSVPGIGLLTSTALVAFVGNVQRFSSGRRFASYLGLTPREYSSGGRRRLGHISKRGDIYLRMLLIHGARSVLNAAKRVENPDRLRVWVLSLETRAGHNRATVALANKMARIAWAVWRNESAFQSTPAEA

SEQ ID NO: 352258 - protein, 358 aa, unidentified
MDRMFVGVDISKDTFSAAGLDAEGNECFSGFYSMDSDGFCKFLEIVTAHCQDRQKVLVGMESTGCYHINLFSFLTSQGIPAVVINPLLIANFAKRSLRKTKTDKKDARTIAEFLRENGEEISQLSISQDLQDLRDLARERESLSHLISATKVEIKRVLRAIFPELESIADIYTRVMLRFLQVYPSARLVKAAKPKVLAQALRQPYVGHKLTFSAEDILRAAQSSVATASPGKEIILKGKIATLLHLQERMDEMTKLLTDLCKATRVEDLKTLRSIKGVGAKTGVPFLAEMGSVENFSSPKKLIAFAGMDPSVCQSGKYIGKSKPKRCIKRAISTTSFPRKRESRQKSWIPGQARNDGC

SEQ ID NO: 352259 - protein, 319 aa, unidentified
MKIYVGIDIAKLNHFAAAISSDGEIIIEPFKFTNDADGFQLLVSKLESFDKNSLIIDLESTAHYGDNLVRYLVTELYQVCVLNPIKTCQMRKNNVRKTKTDKVDTYVIAKTLMMQDNLRFVSFFDLDMMDLKALGRFRQKTIKQRTRLKIQLTTYVDQVFPEIQYFFKSGLHQNAVYALLKEAPSPKEIASMHMTHLANLLKVNSHGHFTKEQAKELRVLAQKSVGANDSAISIQITQTIQQIELLDSQLEKIEVEMTDIMKFNDSVIMTIPGIGYINGGMILGEIGDIHRFSNPNKLLAFAGLDPSVYQSGKVYRCCV

SEQ ID NO: 352260 - protein, 339 aa, unidentified
MKHTTIGLDIAKNVFHVVGIDSHNKVVLRKKLMRGKMLTYFANLPVSTVALEACATSHYWGRELRKLGHQIRLIPTRAVKPYVQGNKNDYNDALAIAEAAFRPGLRCVSIKTIEEQDSQALHRLREGAIGHRRRISNQLRSLLAEYGLIAPTGLATLRRVIPALLEDAENGLSDAFRSLLHQGYQQLLESDAHIQAYDCQLRAQVKASEAAQRLLTIPGFGPVVSSVFLNVVGDGKAFRRGRDVAACIGIVPRQHSSGDKPVLLGISKRGNSYLRSVLIHGARSVVVNAHKKDDALNRWVTQLVARRGKNKATVALANKLARIGWAVLTSGGVYQPRLA

SEQ ID NO: 352261 - protein, 355 aa, unidentified
MSQEKYIGMDVHQATISVAVMDARGKLIMECLLETKAATILEFIQGLRGTLALTFEEGTSAAWLHDLLKPHVSRLVVCDPRKNALLKDGNKSDRVDARKLAELLRTNQVKPVYHGKHGTRALKELGRSYLTITKDVTRVMNRIKAVYRSWAIPCAGTSVYTPRRRAEWLAKLVEPGVRIRAEHLYQQLDSLQPVRLEARRELLLESRKHAAVKLLRQIPSIGPIRAALLVALLQTPHRFRTKRQLWAYSGFAVEIHDSGEYRSVRGKLQRNRERITVRGLNDNHNKDVKSLFKSAAISASTRPGPLHDFYVTRVESGMRPTMARLTLARKIAAITLTMWKKGVSFDPKQLQRQAA

SEQ ID NO: 352262 - protein, 319 aa, unidentified
MTLAYPIAGIDISSTTLDVAVLHADGSFKASSVANSKAAARKLARELARIGVRLAVIEATGGYELIAMAALAGEDVPVARVNPRQVRHFAKGIGRLAKTDPIDARVLATFGERARPRVTTLPSAQEARLKALALRRRQLIDARVAEKNHLGMIVEKDIKASVQRIIEALDDEIERIEDAIAEHIAACQPMRERRELLESIPCIAAATSATVIAELPELGQRSTGVLKALVGVAPFNADSGGIKGERHIQGGRAPLRQALYMAAQTGYRCNPLLQPFYARLRAKGKSHKQAIVACIGKLVSIMNAIVKTGRPFNANIAAA

SEQ ID NO: 352263 - protein, 371 aa, unidentified
MNEFSKYVGLDVHKETIAASVAEANGGEVRYVGEIANTEEALDKLVKQLRKGGANLSFCYEAGPCGYGIHRQLTDLGWDCQVVAPSLIPKKAGDRVKTDRRDSLMLARLHRAGELTAVWVPDGAQEALRDLTRAREDIKHLQLQARQRLLAFLLRHGRRYDGKSKWTLTHFRWMESVKFDHPVQQIVFQEYVDTVKAMTKRIEALDKQIENAATESVFWPVIEGLMALRGVNLLTATTIVAEIGDLRRFASAPQLMAYLGVVPSEHSSGGTKSRGGITKTGNGHVRRLLVEAAWTYRHPARKTAYLQRRSEQTSEAVQEIAWKAQTRLCGRYRLLEARGKLSVQTCTAIARELTGFIWAIGQALPQPTARA

SEQ ID NO: 352264 - protein, 403 aa, unidentified
MNNVVGIDVSKGKSMVSVLRPFGEVVAKPFSIGHTGSELKELADYLKSLDGETRVVMEHTGRYYEPVARFLHDEGVFVSAVNPKLIKDYGNNTLRKVKTDKADSRKIARYGIDNWAELRQHTPMDTIRMQLKTLNRQQSLYSKTKTMMKNNLIALLDQTYPGVNALFDSPVREDGSQKWVDFATAFWHVDCVRSMSLTAFAERYRKWCKRHGYNFSQSKAVEVHAGAQDLIAMLPRDALTKTMVRQAIDALNAVSASLERLKAEMRTLAAQLPEYPVVMAMHGAGDSLGPQLMAELGDVTRFTHRNAITAFAGVDPGADQSGTHEAKSTRVSKSGPPELRRALFLVMDCLLKTQPQDDPVYRFMDKKRAEGKPYLVYMTAGANKFLRIYYGRVKEYLASLEGN

SEQ ID NO: 352265 - protein, 401 aa, unidentified
MKTVLSVDVAKNKSMIMLMNSEGEIFIDTKEINHNLEDFEKVKEEIKEINPQNLTVFMESTGTYHLPVERYFKENGFNTLVINSLTTKNNYDTIRKTKTDKKDCYRLAKLFFVNEVEYHDLSKKDLYANLKAMTRQYFYLLQNNVSCKNRYKRLINICFPELEKIFKSTRIYDDTALNFIKEFPHAEIVKEKRIDALYNNLYKTNGRNLNFYKKLATTIKTASINSYPGVDKEHEDVKNLSYMAKIVQNNNNIINELREKMIETAKQSPYYKIINSFYGIGDTLTAEILGELGDITRFDSPKEIIAFCGLDPTIKQSGKSINVKGTISKRGNKYARYILFNCSQMVVKLGASNYPEHPVYIYYQNKKAEGKHYYESLTACSTKILRMLYSMCKNNKQFLEN

SEQ ID NO: 352266 - protein, 334 aa, unidentified
MSNNENNTAQRKSNETHFVGIDVAKDELVVHVLPTNQQLTVSNSKEGIKELVKLFREIEPNQIVLEATGGLERTLLTNLVANGFAAIAVNPRQARDLAKGLGELAKTDKVDARILARFAQLECLSVRPVPSIETQEMNDLVTRKEQLIQMRVMETNRLHRTTQKAIQKSIEKIIAAFEKEIETIDARIEEMIANNPDWSEKDKILQSVPGVGAKTSQVLISALPELGTLNRQEIAALVGVAPFCDDSGKRSGARHIKGGRANVRSALYMAAFNAIRRNKTIKTFFDRLIAEGKKFKVALVAAMRKLIAILNVMVKTKTTWKEHEATEQKGGKNA

SEQ ID NO: 352267 - protein, 444 aa, unidentified
MPKQKPKKIRITNSLPTIHLNAAAIDIGSNEHWVAVPADRDPRPVRPFTAFTDDLYALADWLVACGIDTVAMEATGVYWIPLYDVLELRGFDVHLVNAKHVQNVSGRKTDILDCQWLQQLHTFGLLCGAFRPDQDFLVLRSYVRHRKMLIEYASAHVQHIQKALIQMNLVLHNVVSDVVGVTGMAILRDIVAGVRDPEALAAHRDYRCKASKETIARSLTGSWRDEHLFALRQALELYDTYQKKIDDCDAAIARHLDQIKKKADRAAIPPERTRYKRGGNAPSANHREVLFEIAGVDLSQIAGIQPYTVLMFLAETDTDMSRWTNVKRFTSWLGLCPGTKVSGGKRLDGRTKKRKGRAATILLLAAATLRSSDSALGAFFRRKAAQFGAPKRSWPPLTSSPASSTPYSSPVSPITNSAPRPTNLSSVSEQSSVSAVRHKCLATN

SEQ ID NO: 352268 - protein, 705 aa, unidentified
MSIREASRVFGLHRDTVRKMLSHPVPPGYRRKRPPRRPKLEPYTGVIDRILEDDRSAPKKQRHTAKRIFDRLRDEHGFDGGYTIVKDYVREHRRVVREMFVPLEHPPGHAQCDFGQAWAFIGGEKRRIHYFVMSLPYSDGIFIKAYPGETTEAFCDGHVSAFRYLGGVPQSILYDNTKLAVARILGGGRRKRTRAFTELQSHYLFTDRFGRVGKGNDKGIVEGMVGYGRRNFLVPIPRTEDFDELNVHLEAECMERLDAMLRGHTESIGERMERDLGALLPLPATPYDASDKHATRVSSQSLVRYRSNDLYVVITPRIGQSVGWARGARRARLGELRDIPGLHRRVVRHPSRRTCGSERIQGHEARICKCGAQRHDTYGGRTMVVVAGIDVSKATLEVSVSEGPVLRFDNSATGIRRLVRHLERAGATKAVCESTGGYERLVVGKLRETAINVQVAHPLRVRAFARACGYEAKTDPLDAQVLSRYGVVFSESNAAQPDVDPDREELRQLLSRRRQLVEQRVRERNRLDKGISASVGKSTRRHVRWLDREIERLDEEYKELLKRSTSLTETVELYQTVPGVGLLTAATLVAYLPELGRWDGRALTSLVGLAPWSRDSGQKRGNRSIRGGRSTVRQALYICAWVVLRVDGDLRDFYRRLLERGKPGKVATIAVARKLLMQLNAVARRGTPWVRQHPNNRVPYQADPA

SEQ ID NO: 352269 - protein, 346 aa, unidentified
MKHYVGLDVSLKLTAICVVDQTGSVIREGVVDSDPEMIAEFVRSNAPSVVRIGLESGPTATWLWTELKQLGLPVICIDARHAKAVLKMQINKSDRNDAAGIARIMQTGWFREVRVKDLDSHSVRALLASRALLVKIKRDLENQVRGLLKNLGLVIGRAKLNVFAVRAEELIEGRPELMAAVRPLLAARHAIERQVDDLDHKVMRLARNNAQVRRFMTAPGIGPITALCFLATIDDPTRFKRSRSVGAYVGLTTRRYASGEIDWTGRISKCGDKMLRSYLYEAANVLLTRVAKWSTLKSWGVRLAKRSGLRKAKVAVARKLAVILHRMWIEGTEFKWSSKEVANQPA

SEQ ID NO: 352270 - protein, 345 aa, unidentified
MKILSLDLGKYKTVGCDYESESGAHQFKRGFTTPTGLAKMVQEVKPDRVVIEVCSIAGWVCDLLWGLGIEVQVANTSDDAWRWRKVKQKDDRRDALKAARLSAVNQLREVYIPAHEVRQWRALTYRQQVIRRRTKIKNHIRDLLLREGQILGRGSSCWSQVGIAALAAQARPFSECGPAELWRGELQLELEQLKEIQRQVATVTAQLDKIGAGDARVQLLRTVPGVGPRLAEAIVALLDQPQRFRKASQVSGYIGMVPKAMDSGETERRGHITRQGSRLVRSLLVEVAWAGLRHNAWVRQTYQRLSGGKKGRKKIAIVAVGRKLLVRCWAMLRDNRAWDWQPQIT

SEQ ID NO: 352271 - protein, 345 aa, unidentified
MKVTTVGIDLAKNVIQIHGVDERGKTVLRKQLKRGQVASFFATLEPCMIGMEACGSAHHWARKLQGFGHTVRLMAPQFVKPYVKTNKNDVADAEAICEAVGRPNMRFVPLKTTAQQSVLALHRARQGFVKARTAQANAIRGLLGEFGIVIAQGMSPLAQRVPEIVEDGENGLNGSFRQLLQRLMDHLKELDRQVGELEREIQMWHRENEASRKLAKVPGIGPITASALVASVGNAKNFANGRQMAAWLGLVPRQHSSGGKPTLLGISKRGDCYLRTLLVHGARSVVRYAEGKTNPASGWLNSLLSRRNTNVAVVALANKNARIAWALLAHDREFRSDYAPARAKA

SEQ ID NO: 352272 - protein, 451 aa, unidentified
MPQPILAVGVDPAKRLHRAVAVLFPDEVVLDVELPNAFDAVANLDNCLCELANQHGADLVYGLEDHRRYGRLFCQVLTERGRDVRVVNPLWTNRQRAFYGQDKDDAIDGRSIAAVVLRRHHQLPLASDSGEVVQAIREAERSLQDLSKVRTQLGNRLHLQLSDTYTAAYEEYFGKLKSPLTLRFFRRFPLPQDLVGHNVEMLASLLLDLAGGKVGPHKGGNRLIAMRSKAQAILETSAGMRASPRTLALELKAELIRQLCDELLANHDRILRLERMLREQLLPATKQTITTITGISTILAATIIGETGSITRFRSPAAFAVYNGTAPARNSTGGRDRHKARRDCNHRLKRAFYPAARAAVLHDPLAKAYHQSCKSRGLSYVEALKRVARRMSDVVYALLKSGKAYDRSIIEQAIERRREQAAHAARSHAKQSLVHSRPRKSNSPLPQQQVM

SEQ ID NO: 352273 - protein, 405 aa, unidentified
MNAVGIDVSKGKSMIAVVRPFGEVVVTPYEVRHTASELRELAHSLKSLDGETRVVLEHTGRYYEPVVQVLCNAGIFVSAVNPLLIKEYGNNSIRKVKTDKADAMKIARYGLDNWAELREHTVMEKLREQLKILNRQYSLYVKNKTALKNNLIALLDQSFPGVNTFFDSPVREDGSQKWVDFAASFWHVDCVRTLGTKAFTERYRKWCKRHGYNFNASKVVTIYEETKELVPILPKNDSTKVLVTEAVNQLNATSRTVEVLRSEMNRLAEQLPEYPVVMSLYGLGPSLGPQLMAEIGDVRRFAHRGSLTAFAGVDPMPNQSGNYERQSNPSSKRGSPYLRKSLFIVMTVLLKSTPVDDPVYLFLDKKRAEGKPYYVYMTAGANKFLRIYYGRVREYLNSLKEDTLS

SEQ ID NO: 352274 - protein, 309 aa, unidentified
MDTTVVGIDVSKDRLDVHVHPDGTALSFSRDASGIEALIGKLAGLVLQSVAVEATGGFETVVVASLAAASLPVVVVNPAQVRAYAKALGKRAKTDPIDAQVIAQFAAAAKPQVRPLPDAATQALADLVTRRRQIIHMIAAEGQREKRASPRARKSIARMLKTLRAELSVIDAEIDESVRGSSIWCEKEKLLDSVPGVGAVTVRTMLAELPELGSLDRREIAALVGVAPFTRQSGQWRGKSFIGGGRASVRAVLFMAAMTAMRWNPTLRAFHQRLRAAGKPKMVALIAVARKLLTILNAIIRDNKPWQTA

SEQ ID NO: 352275 - protein, 421 aa, unidentified
MTQGYGNTGGDILVAIDVAKKHDAVLVQFPDGSRKKFTVANNLRDYRNFSAYLNDLASPCKIGLEATGNYHRPLAYYLQRQGFDLKLISSVAAARTREAMYNSWDKNDPKDAQVILHMLQTGLTQTFYDPLVHKINDIQELSKTYHQVSLQKVRVQHSILTHFLPLYFPEAQQYFHTSRAEWFTSLLLSFPNPAAVLKFSQDGFIEAAQTVAGRKVNKTAWLKDFYETAKESIGLPVPEDSEAIRMFRLVLQEHQDLCRMRRAIESRADLYLQQNADYLRLRTMPGIGPVIALTILAEAGDLRRFSHYKKFLKYCGLNLSTQQSGGFRGMSKLSKHGNSRLRYAFWIAGTSAIRMRENTFRKKYENYVKADPRNPDLKRKAYTAVAAKIARVAFGLIKSGCDYHGYYESSIPSGKIPSTRR

SEQ ID NO: 352276 - protein, 411 aa, unidentified
MRIVGLDVSRSVAEIAYLEDGTLHAGDRTGLRRDELERFAAKLRATDHVVLEATGNTTAIVNVLRAHVARVAIANPLQVRLIAEARVKTDKIDAAVLAQLYASGFLPEVWMPDEHTLALRRQIARRSQLVRQRTRLKNEIHAVLIAHLIERCPATDLFGKKGRAWLGVQPLPLDERLGVEQRLRELDRLGDDLREVEQALAQATIDDARLRVMLTITGVNTTVAIGLLSAIGDIARFPNPEKLVSYFGLNPSVYQSGPAPARHGHITKRGRSYARAMLVEAAWGATQAPGPLRAFFLRVRDRRGQQIAAVATARKLAVIVWYVLTRGEPFAWDRPALTAHKLRALELQAGMPAQHGPRKGSAAAYSLKSVRQQERAVAEQSERTYQRLFNRWKQSRPKSDSAPIRWPQART

SEQ ID NO: 352277 - protein, 358 aa, unidentified
MRIIGCDLHARQQTIAMLDGDTGELEEKVLEHQGETVRGFYSALSGPILVGIEATGSMQWFLELMEELGIECRVGHPAKIRRAETRKQKHDRRDARLLLTLLAENRFPTIWMPSSEQRDLRTLLRHRHQWVRLRSRVQHTLQSMALNYGLRRGHALWSQAGQHALLALPLAPHASERRAALLSLYPRLQESIDQLDQQVSQQVQQRPQARRLLTHPGVGPITALATDVFLGDPLRFSDGKALASYIGMIPSEHSSGDRQRLGAMSKQGNTLLRYLWCEAAMHAVERDAELKRFYRRKLVQKGLGKARVAAARKLGIRLWIMMRDQIDYQEFCRRGKARQENGSVCAGMPAINSGPAKQ

SEQ ID NO: 352278 - protein, 310 aa, unidentified
MEDIIVGIDVAKDRLDVAVRPGGEAFVVERNAVGLEVLVGRLRELSPYLVALEATGGYETIVAAALAGAALPVVVVNPAQVRAFAKALGQRAKTDPIDAAVIAHFAQATSPEPRALPDEATQLLADMVARRRQIVEMIGAERQREKRVTISRLRKSIARLIKTLEKELASLDTDIDGAVRGSPAWREKEDLLSSVPGVGPTIARTLIAELPELGQLSRKQIAALAGLAPFTRQSGQWHGRSFIGGGRTTVRTALFMGALVAKRHNTVLKAFFDRLVAAGKPKMVALIAVARKLLTILNAILRDRQPWQIA

SEQ ID NO: 352279 - protein, 358 aa, unidentified
MAQGSWVGLDVHARSVLAGVIEEATGELRVRPVGPECGPVVEWLLGLPAPVRVAYEAGPTGYTLARACAAAQIDCLVAAPSRIARAPGDRVKTDRRDTERLVRLLRLGELTPVRVPDEDEEAARDLVRAREDARGDLMRARHRLSKLLLRHGRLYPTRAWTRAHAAWLARQRFNQPALALAFEEAHAAVLGVRARREALDAAIVALAGEPRWAAQVGRLCCLRGVGVHTALALCAEIGDWKRFSGASIGAFLGLVPSESSSGQRRQQGPITKTGNAHARRLLVEAAWHHRRPLRASAELARRRQGQCAAVRDRAERAGRRLHQRWAHLEGRRAKRSTVVAVAVARELAGWCWSLAVME

SEQ ID NO: 352280 - protein, 343 aa, unidentified
MEQYVGLDVSQEQTSVCVVDGGGKVIWEGKCTSTPEAIAATIRMRAPEAVRIGLESGPLSAWHWHELRKIGLPVVCLDARHAKAALALQLNKSDRNDARGLAQIVRTGWYREVVVKSVDSHLVRSLLTARAQLVRMRVDLANQIRGVLKPFGLIAGKGGGRPFAERVRALVAGGPLQEVTGALLAAWQALGEQIAVLGRRLVAVARQDEAVRRLMTAPGVGVLVALAYVSIVDAPERFARSSSVGAYIGLTPRRYQSGEEDYTGHISRCGDKLLRTYLYEAAGIILHRVPRWSALKAWGTRLARRIGTRKATVAVARKLSVILHCMLRDGSEFRWSAKEVHAA

SEQ ID NO: 352281 - protein, 375 aa, unidentified
MKEKVRFLGMDVHAETIAAAIAEPDGEVRSLGTIPNRMESVRKLIRKLGPVEKLRVCYEAGPTGYVLYWQLAELGVQCEVIAPSLVPVKAGDRVKTDRRDAEKLARSYRSGDLTAVWVPDAGSEALRDLVRAREAAKQDELRARHRLGKFLLRSGHRPPVGVRAWTHLHLIWVSQIRFAQAAQESTRLDYLHEVEHMRERVLRLEQAIAEAVKLASPALQEVITDLQALRGIAQISAVTIAAELGQVSRFDSARQLMGYCGAVPSENSSGQRTRRGSITKTGNAHLRRIVVEAAWSYQRPPAIWAGLRKRQQSASDEAKEIAWMAQHRLHKRYARLAAKGKDKRKIVTAVGRELLGFIWAIGTKAEATVNQRIAA

SEQ ID NO: 352282 - protein, 340 aa, unidentified
MGEITTVGLDLAKQVFQVHGVDAEGATVVRKQLRRAQVLAFFSKLPRCLVGMEACATAHYWARELRALGHEVRLMPAQYVKAYVKRNKNDAADAEAICEAVVRPTMRFVPVKTADQQAAVLLHRGRERLVCQRTMLVNALRAHLAEFGIIAPQGLRNVGKLIAIIRDEDDARLPDLGRQVLAVLAVQLEQLEAAVAALEKQLMAWHKNNPVSQRLATIPGIGPIIATAIAAMVAEPSGFRSGREFAAWLGLVPRQNSTGGKIRLGGISKRGNQYLRRLLINGASANLLRSKATNADPWVIGLRRRRPSMVVAVAVANKTARIAWAVMRRQENYQRTALAA

SEQ ID NO: 352283 - protein, 360 aa, unidentified
MKIMVGIDLHSNNAVCGLMDESGRRLLHKQLPCELTGIVQLLKPYKKRIDTIAVESTYNWYWLVDGLQDHGYHVVLANPAAMQPYSGKKHTDDVSDAYFLAELLRLNLLPTGHLYDRKLRPVRDLLRRRMLLVRQRTTLILSFKSLNERTLGQRVPLARVKAMSPEEAQARFTEPADQLLATEQITLLDHYTDSIAKIEKHILEVAEKSPAYQRLQEMPGIGKILGLTIALETGDAKRFADAGNFASYCRCVKSVRQSNHKKKGENNRKCGNKYLGWAFVEAAHFACRYDERSRCFYDRKKQKTNPIIATKSLACKLAKASWHVMVADVPYDATRVFGPGKKDFGETGREPARRSGHQSQ

SEQ ID NO: 352284 - protein, 363 aa, unidentified
MEVGGRYVGLDLGKRTYEMCAIESKGKISRTGGKADKEGLSKLCEKLGADDAVAMESCSLAQRLERQIRKDVGCKVYILNPKRLAIIYASTRKTDKEDSLKLAKLLRTHGEDELPTVTPPTEEELERRRLLSEYRSLKRQRTREINRLHAIFEHNGHTQFTRKNMMTEKSRSEIVPLLKGYEKGEAERLIERLTIIEKQIEELSEKINAEVKNDKNVQKAMTVPGIWPIVALSYVAYMGDLNRFENAHQVSNFIGFVPKVDMSCTIVRYGHITKRGNPYLRSLLVQAAWALVRSKNGGALKEKYKYMAETRCIGRGKSIVTIARKLGELLYMLLKTGREYEPKRFITPEAKVQRLADTALKCG

SEQ ID NO: 352285 - protein, 585 aa, unidentified
MLPPPPSAPPAPRRFGVGIDTSRYGHYAAFLRDDLQPAAPELPFAESAAGYAQLRRQLDRLAQQHGPAHFVIRVDSAGQYADNLLHFLHGLGTPSAATPGGAAPWRASLSCGDPQRNKDYRAAIFGSQKSDPIEARAAARFALTERPKSDLPLALELRTLRQVAGRLQTVVRQRTRLRNQFHHLLALTFPELALLTKDLAAGWVLELVHRYPTAPLLAAASAADLAAIPYLPEQHRAALLEHARHSIGSLRGAVAEELVRDQVRQLRDSAARQKRLENLLVTAYRALPRANHLDTIAGIGPVTAAVLTAFLVDIDRFATPGKLDAYFGVLPIEVASGVDRDGQARAPRRWVMSRRGNDLVRRYLWMAALSALRCNPAVRALYARVVAKHPQQKAIAVGHAMRKLLHLVFAIWKSGRPFQADWYPWEAGATRVTSDRPLSTDGQAAGHKADTKPARSVVAAACTDTVGEAEAIGESTAVDFAHLKRQLPLARALDQLGLAERLRGSGPQRRGPCPLHRGDARGRTFSVNLDANVFQCFEAQCRQKGDVIDLWAAVHGLTLRAAALDLVRTFGLEPVRRTGTEKRNG

SEQ ID NO: 352286 - protein, 402 aa, unidentified
MRIETQPHDRLTATTPEPATVLVSFELSQSKWVLTIRQPGEAKLSRCTVPAGDTAKVLSLLTKQRQQAERRTGRPVRIVSIYEAGLDGFWLHRWLETQGVESHVVDAASILGPQRRRNAKTDRIDGVKLLRSLAAWLGGEAGVCSMVVPPSVAQEDIRRLSRERGELVGERTKLTNRIGGLLANQGIAGFKPLKKGARQALEALRTGDGRELPPHLRTAIERILQRLELLLEQIKAAEAERDALLRAARVAAAPETAPEAATATSPEMAAASLLLRLRGIGPEFATVLPLECLNKEFDNRRQVAAFAGLAPTPWASGSVEREQGISKAGNRRLRSTLIELAWSWQRHQPESTLTQWFHKRIKGQGARVKRIAVVALARKLLVALWRYVKHGVLPQGAVLKAA

SEQ ID NO: 352287 - protein, 427 aa, unidentified
MSEEKSIELRVSVDVGYRRHSVAIGLPSGEVLEEFEIEHRLEGFQDFFSRIEKHNPKQGYSVAVAMEGYNGYARPLDSMVRQRGYRLYNINNLKLARFKEIFPGAAKSDRIDARKGLELFQLRDHLPLAKEVLQEVSGTPQHNEVLKRLTRRRRRLVNERVRVVNNLQADLQAVCPGLLEITSEASNQWFLNFLLSADTLPQLARLRKASLLKIPAVGKKYASLIEAWQKRAHFGAEVEWVSEMIQEDAQRCLDLEEKIKTLETKIQQVATDSKIAKTLLSIPGFGPVCTSELAGEIGTIERFSKEGSLALYLGMSTLDNSSGKYQGTKAPKHVNTRAKAAMMIALDRHRKYVPESQRYYEKKRSEGKRHNQAIRALGRHLCRIIYKMLKEQREYQLRSEKGDTQARVRSRSCVKTRIRRPKISVNV

SEQ ID NO: 352288 - protein, 425 aa, unidentified
MAMKVPEKILNKDSGKVLEVVHPICCGLDIHKAVISGCMVFVDGNGETQTEIREFGTFSDDLLELWDWLLEYDCPVVAMESTGIYWRPVHNLIENLVVVILVNARHIKNVPGRKTDIEDCKWLAGLLRHGLLKGSFIPPKEVRDWRELNRLRKKYTGSLGDYKRRVHKVFETANIKIDSVVSDLFGVTGRNLMKKIIDSESHLTFDDILKCARGTLKGKAEELLRSVQGLFRDHHRFLLRTLLSTIKDLENKILGLDKRIRSTMKPHHDLVKRLDDIPGIDLVTAYAIIAEIGPDLDTFQNSKALCSWAGVCPGNNESAGKRRSGKSPVHKHALKTILIEVAWAAIKKKGSYYKDKYYRLKSRRGAKKAIVAIAHRILRAVFHIVKNNASYKELGDEYLESKGNKKQLITLQKMAEKLGFELVSV

SEQ ID NO: 352289 - protein, 420 aa, unidentified
MTARNERTIVSVVNPICCGLDVHKESITACILFNDNKGKEQTIIQEFSTFTDDLFSFRDWLLIHNCPILAMESTGVYWHPVHNILEGYVEVILVNARDIKNVPGRKTDIKDSEWLAGLLRHGLLRSSFIPPKEVRVWRALTRMRRKYVNSQSSYKKRVQKLFESANIKIDSVVSDLFGVTGRNLMSLLASGHTNITMKDIENCVRGRLKSKQQELYRSIKGFFTEDHRFMLQTLLSTIASLEDTIASLDQRIDRYMIEHKELLERLKEVPGISDISARDIIAEIGTTLDAFPSEAAFASWCGLCPGNNESAGKRKNPKNHTWKNQLKPVMVEVAWAASRTKNTYYHDKYHRLKTRRGHKKALVAIAHRIMNCLYHIIKDGVRYKELGIDYLDKKTKTAKLYRLQKQAESLGFQMIPITVV

SEQ ID NO: 352290 - protein, 385 aa, unidentified
MKPNSQMTLGEFFRQCVGIDISKNKFTACLYMYDRASDVGCCTKSIDFDNTKSGFNQMVKWSRKEAVKGYPLTFLMEPTGVYYERLAYHLHKIGQTVYVVLPNKARKFCESEGIKTKTDAMDARCLALMGCASRKLKPWSPPAAIYRELRQMTRFHADLCVIRRSVANRMEALDHMEGVSKTVRKHCEKLIEEIDTLTEKNDKDIMKKVAEDKELLARVKRIATARGVGATTIVCVIAETEGFHLIENRKQLASYAGLDVKAKQSGKEDPKHRISKEGNAHIRAALYMPALVAVRHNRQIREAYGRICQKHPKEKMIGVAAAMRRLLMLIYTLWKNGEEYDETRDKTHTPKKKELEPEYGPEDCIGTDKESIDWNAMDENGEPPF

SEQ ID NO: 352291 - protein, 413 aa, unidentified
MLLFIGDDWAEDHHDLEIEDETGRRLAKARVPEGLEGITKLHALVAEHAPADWSDLPSEEVAARVFVGIETDRGPWVTALQAAGYQVFAINPLSSARYRERYSTSGAKSDAGDAHVLAEIVRLDRDHHRQIAGDTDLVDAVKLVARAHQTAIWERTRQVLRLRSTLREYFPAAIEAFEDLAAKDTLLLLARAPSPARVAKLTRSQVVSALQAARRHHVQAKADAVLAVLRAPGLRQPATTEAAYAAVVVGQVGIIGALNEQITQLQEVVAEHFGRHPDADIYLSQPGFGVVLAARALGEFGDDKKRFRDARARKNYSGQSPITRASGKKTVVLARYATNRRLGAALHAQAFSALAASPGARAYYDALRARKIGHHAALRQLANRLVGILHGCLKTGTKYDENTAWQHQIVVAA

SEQ ID NO: 352292 - protein, 425 aa, unidentified
MSDNKPLELRVSVDVGYRRHSVAIGLPSGEVLEEFEIAHRPEGFEQFFSRIEKHQKLRACEVAVAMEGYNGCARPLDRLVRRRGYRLYNINNLKLARFKEIFPGAAKSDRIDARKGLELFQLSDHLPLAKEVLQEVKGTPEENEILKRLTRRRRRLVDERVRVISNLQTDLQAVCPGLLEITKNAGNQWFLNFLVSADTLPQLARLRPSTLLKIPAVGRKYASLIEDWQKRAHFSEEVKWVSEMIQEDARRCLELDEKIKVLRAKIKEVAKDSKIAKSLLSIPGFGTICTSELAAEIGTIERFSKEGSLALYLGMSTLDNSSGKYQGSKQPKHVNTRAKAAMMVAIDRHRKYVPESQTYYEKKRSEGKKHNQAIRALGRQLCRIIYKMLTEGREYEMRPEKSNTKSKVSPRSLLKTQIRKKKSQR

SEQ ID NO: 352293 - protein, 366 aa, unidentified
MKKISTVRVNGNMIFKGHKLTIGVDLGDRWSCYCVLDEAGEVLLEKKLPTTPEAMQQTFVRIPRSLIALETGTHSPWISRLLTELGHEVLVAHAQKVQLITKSNRKDDRHDAWTLARLARIDPELLGPVRHRSAKAQIHLTVIRARAELVRARTALVNAARGLVKSYGQRLPKCGTQQVSRELAARLNAELREVLEPLLKEIESLNERIKEYDVRMEKIAKESYPQVELLKQVKGVGTQIALTYILTLEDPHRFPKSREVGCFLGLRPGRRDSGESQPQMRISKEGDRYLRTMLVQGAHYILGPFGADSDLRRWGLKLAARGGKSAKKRAVVAVARKLAVLLHRLWVSGEVYEPLRNSQKAMRAVA

SEQ ID NO: 352294 - protein, 415 aa, unidentified
MEVLFSRCCGLDVHKSSITACVRIQEVGGKPRKIVRRFGAMTADLRSLANWLIEEGVTHVAMESTGVYWKPVWNILEGQFTLVLANAQHVKNVPGRKTDTKDSEWLAELLQHGLLAGSFVPPRLIRDLRDLTRTRAVLTQESSRIASRIQKVLEDANIKLASVASDTLGKSGQAMLVALIAGEDNPEQLADLALGSLRGKIPQLRRALEGLTREHHRFLLKRLLVQWRFVESETELIDQRLEQIGKQEVPIAEAVARWDTVPGVDRIAAWGLVAEMGIDMEQFPSAKHAASWGGVCPGNHESAGKRLSGRTRKGNPWLKRILGQSAWAAARTKNTYVAVQFRRLAAKRGRKRAIVAVGHSLLVIGYHLLRKQSVYQDLGAGYFDRLNAEGLKRYLVKRLESLGQKVTLEPRESVA

SEQ ID NO: 352295 - protein, 424 aa, unidentified
MEEKELEKPIRAWIGIDWADEKHDVSLYDAATEKQETLTVRQSPEALQEWLGQLRSRYEGGYVAVVLEQGRGGLLNALMGCEFLVLYIINPKSLSSFREAFYGSGATSDPVDAELMRDMVRQNPSRFRAWRPDDVMTRSLRLLTEGRRHLVNQSTALTNQLTALLKGYYPQALAWVGTLDTAWACDFLEHWPTLQSLQARSRRQILRFYEKHPRASLDLNEQLKQIQEARALTQDEAVLESSALMVQALVSQLRPLLASIAEFDRKIAMIFRKHPDRPIFESFPGAGAALAPRLTAAFGTDRDRFQAAKEMQELAGIAPVTEKSGKKSFVHWRYACPKFMRQTFQEFADHSRRWCKNFGQHYDLLRQRGKSHNAAVRALAYKWIRILFRCWKDRQPYQDEVYTKSLFKHGSPLSALLATSVENS

SEQ ID NO: 352296 - protein, 327 aa, unidentified
MSKQVFWIGVDVGKDEVWVSVAGKKARSFPTTTKGMQSLCRWAQSCAGEGEVRLCMESTVVYGYRVAVLCRQCGSEVSVINPAQIKAFSHAQLRRTKTDQVDAEVIRCFAESQRPAVWQPPRKAVSQLYWLISELDALCEMRRQCKNREHSRQLVPDLPKEALVASRKVLQSITRQIDALQKRIKELVADDEQIHERVTLLCTIPAIQQATATHLMAYGKDHWDTHTAKQLTAHAGLAPRHRQSGSSIRGKSRLAKQGDKRLRQILYMPTVCAIVHNPYVRAVYQRLVANGKPKMLALMAGMRKLIVLIRAILRTKKPFTYPNPALT

SEQ ID NO: 352297 - protein, 344 aa, unidentified
MDHFAGLDVSVKETSICIVDDAGKIVREVKVASEPEALLAVLKNLAYHFKRIGLEAGPLSQWLFSALAEAGLPVICVETRHMQAVLKAQINKTDRNDARGIAQMMRAGLYRPVHVKTIRSQKLRMLLTHRKLLQSQAIAIENDLRGTLRNFGLKVGMVGKVKFEARIRELVENLPDLAVLVEPMLIVRRTLREQIVILHRRLLAIVRDDEVCRRLMTTPGVGPVVALTYRATVDVPARFRKSKAVGAVFGLTCAKYQSGEVDRNGRISRCGDEMMRVMLYEAAQSMLRSKKWSWLKAWAMQIARRRGMKKAIVALARRLAVIMHRIWVDGTEFRWTREQATAAA

SEQ ID NO: 352298 - protein, 344 aa, unidentified
MKIAVLGIDLGKNVCSLVGLDENGAVVMRRRARRDLLLEFVGKLPPCTVGMEACCGAHHLGRLFAIASHDVRLISPEYVRPYVKAQKNDDRDAEGIAEAATRPTMRFVEIKTEAQLDMQTLHRSRDRLVGERTALINQLRAVLLERGIVVPQGKRKLEHYLIGLMQEPQGRGLSARMRMLVADMQSQWKELDRRIASFEAEFVSYAKESTDARCLISIPGVGVITATALIAAVGKAEAFKHGRDLAAWLGLVPRQSTTGGKPRLMGISKRGNTYLRKLLIHGARAAMAHVAERDTSLGRWVKGLLARVHPNVAVVALANKLARISWAILRTGQQFDAKGTPLAV

SEQ ID NO: 352299 - protein, 362 aa, unidentified
MTFFIGVDLHKTQFTVHVRTDEMTETLKQIRQYKTDKSGYAEFIERIQAYRESGAYVKIGVESTGNTRFFKHQVEKAGAEVTVINTLKFKVINESAKKTDKHDAATISEFLAKDMLPESYLCSKETENIRRLLKSRERLVRSIVGQKNEVHALLVSMGLKDEQRSLQSKKGRQKILDVLESNNDYVLEAQSVKLMIEIISQMEAAVKVIEKQLSELTKNDQMVNRLLTIRGCGKITAWTIRAYTEDISRFSSAKKYAAFCGLVPWVSDSNETIRHGKITKRGPQELRVSFVQMVMGIRRCKDTANWRIMQRYDYMKTHKGSGKSIIAAARKLAEIVWVMLSNNNDFDREKMYGKYKPAPLAV

SEQ ID NO: 352300 - protein, 384 aa, unidentified
MIKHNILFIGLDTHKTFTEVAFIEDQRGAKSIHLGKILSNKAAFKKLARQLQSKYPDATLHFVYEAGPCGYWIYRLLTSLHHCCYVIAPSLIPKKPGERIKTDKRDALKLAKLLKSEDLTPIYVPEPEDEAVRDLSRARETGMKDLKDAKYQLKALLLRNNINSKIKDNWSLQHLRWLAELVLPHPCQQIVLQEAVSTITERLKRLKRLDNELTHQVKNWRYYPVVKAVQALRGVRLLVATGVIAELGDLTRFDHPRKLMSYLGLVPSEHSSGGKRHLGAITKCGNSRARRLLVEGAHSYKYNANISKEMQLRQEGLSKEIINMAWQAQLRLCRRYQRLMHKGKHRNVVVTAIAREMIAYIWAISREVVLPVVDVKLRLARMPA

SEQ ID NO: 352301 - protein, 383 aa, unidentified
MTNGNGVSRGDRNRNARLVRLRVLVPVENAIVGIDLADNKQMVVVCDHDSKVLARKTFRCKAWDLGTALDWAADRARVKGFAAATVACEPTGHRWRVLGQLAADRGMPMVCVQPMQTSWARRSEDLTFDKTDDKDAVLIARLTAQLRCYAPEPVEETWGRLRHLGTRREELIVANVAQVQQVRDLLDCVWPAALTTAKQPFRSQTWAAAMSVVLDRDAGDLDRTRRLGMDRFEQQVRRQITKRGGQKPCLRIVRELFTALSDPAGVLAHRLGALERVAWVLADWEADQQRLAETEQRMVAVLDELELTTLATSIHGISAVGAAAILAETGDPHRFPTARALVKHAGLAPREKLSGTFVGRTRLTGKGRPGLRVAAWRAVWGAL

SEQ ID NO: 352302 - protein, 354 aa, unidentified
MEFRPLERKGATEMKITTIGIDLAKNVFQIHGADERGKAVLKKQLKRDQVVPFFANLVPCKIGMEACGSAHYWARKLQALGHSVQLIAPQYVKPFVKRNKNDAADAEAICEAVTRPNMPAVPIKNASQQAILSVHRARQGFVKARTAQANQIRGLLAEFGIIIPQGISHIAKRVPEIIEDGENELPGSFRLLIQRLVDHLKVLDQQVGELEREIQAWHRENEASKKLAKIPGIGPMTASALVASVGNARSFRNGRQLAAWLGIVPKQHSTGGKATLLGISKRGDTYLRTLLIHGARAVIRVAERKPQPDAWLGKLLTRRNKNVAAVALANKNARTIWALLAYDRAYESDYRMAA

SEQ ID NO: 352303 - protein, 338 aa, unidentified
MQVTTIGLDIAKSVFQVHGVDQHGNVVLRQRLSRGNVLVFFANLPRCVIGLEACGGAHYWARELTKVGHEVRLMPPQYVRPYVKTNKHDAADADACCEAVQRPGMRFVPVKNEQQQSLLMLHRIRDRLIAERTGTINAIRGHMAEFGMVAAQRDAGLKTLIAIIADGDDVRLPALARELLLLQLEHLRQIEARIATLDGRLVRQAREDEACRRLTEAPGIGPVIATAMVATVGNARLFSSGRSFAAWLGLTPRQHATGGKERLLGISKRGDGYLRRQLMHGARSLVRLAQGREGHPWAWINALLARRPFNVVVAAVANKPARMIWALLSRGEAYRAAA

SEQ ID NO: 352304 - protein, 383 aa, unidentified
MQALTMDTPTAGHFGTIFVAIELSQKSWLVTLHSPDRDRISRQKLEGGDHAGLLALIDRERDRASRTAGGIVAVASCYEAGYDGFWLHRLLLAAGITNYVFDPSSIAVDQRARRVKTDRIDGERMLRTLMAYLRGEPRVVRIVRVPTPEQEDARRASRERGRLTKEQTAHTTRIKALLRLLGMAVGNPRRHDWLTWLAKQRDWQDRTIPPQILAEIKREHARLMLVREQLDALAQAPVDLTPVAAQMAQRRELLLRLKSLGPAFAMTLTSEVFYKDFRNRREVASYFGLTPSPWQSGGIDRDQGISKAGNPRARCAAIEMAWLWLRHQPNSKLTQEYRRRTLDAGKRIKRVAIVALARKLIVALWRYLTTGLVPDGAMLKTAE

SEQ ID NO: 352305 - protein, 347 aa, unidentified
MDHIGIDVHKKESQICILAEEGELIERRIRTEPRRFAEELGERAPARILLESSTESEWVARSLEGLGHEVVVADPNFAPMYATRTRKVKTDRRDARALAEACRLGAYRPAHRLSDAQRHVRARLTVRDTLVRTRTRYISLSRALLRQRGWSVPSGSAEGFPRRVMALPLPGRLRSEVAPLLAVMRHLQQQLAYSDERITAVTQTDERVRRLQSVPNIGPVTAAAFVAALDDPARFRRAHEVEAYLGLVPRELSSGETQRRGRITKAGSSRVRWLLIQAAVSMLRLHDLRTAGLRDWAGRIAARRGKGIAVVALARRLAGILFALLRDRTVYESRQRQRRPMPEAVPA

SEQ ID NO: 352306 - protein, 353 aa, unidentified
MTHTKQSVGIDISKDTFTACICKREVSGNFVFSKIASFTNEKSGFNQFLRWVNSEITKSIDLVFLMEATGVYYESLAHHLYKLKKTVHVALPNTTKHYFSSLNIKTKTDEIDAKWLSQFGAERKHKIWSPPSRIVIELRNLTRYYVQLQEQRTVLGNIKHSKECSYEVQKFILQSNKNLITQIDKQIAKCKEEIERLISSNDDLNQKVQKVLTIKGIGLMTIATILAETMCFEHFQNIKQLSSFAGYDVVQRESGTSIKGKTRISKKGNRYIRNALYFPAMVACRFNPKMKETYIRINMKKPSKMIGQVAIQRKLLGLIFTLWKNDSVFDPEYKKVVSDKTETTQDSLTIKLL

SEQ ID NO: 352307 - protein, 365 aa, unidentified
MLYLGIDQHKRQLTVNLRGEDGSVVLKRQVSTKWDKVREFFADLAEKSAVEGGFWAILEVCGMNPWLLEMLAEYGCGEIVVTQPTSRAKQKTDRRDASQLSHSLWVHRRQLAGGKHPSGLRRVDPPTAQQAEDRQLTAMRATLTKKRTAVLNAIHKILRKHNREQECPTKVFQTKKVRRWLAEMELPAVDRSEMDLLLPQWELLDGQLEVVGGKIAERAEADQDAQLLESMPGMGHYSAVAIASRIGDIERFRRPASLANYFGLTPGCRNSGDANQRLGSITKRGSKIVRYLLGQAVVKVLRFDTAMRGWYKRIKRRRGSKIGRVAVMRRMVTIIWHMLKRRQRYRYELSLKKHKEFEAFEGATG

SEQ ID NO: 352308 - protein, 376 aa, unidentified
MSNVRFIGLDVHAETIAVAVAEPDGEVRSVGVIPNRLEAICKLVKKLGPVASLRVCYEAGPTGYVVYWQLTALGVRCEVVAPTLVPVKPGDRVKTDRRDALKLARSYRAGDLTPVWVPDAAHEALRDLVRAREAAKKDQLRARHRLGKFLLRQGRRPPTAMNPWTQTHLTWVKTVHFEHAAQEATLLDYLQEVEHMVERIARLDRAIDDAVKTAPDQMRAVIEALQALRGIALVSAVTIAAEVGELSRFAKPSQLMGYSGAVSREDSSGERTRRGAITKTGNAHLRRVVIEAAWAYRYRPAVGTALRKRQATVGPDVKEIAWKAQHRLHARYRHLTARGKCKQQTVTAVGRELLGFIWAIGVHVEAKQRQRKSVAA

SEQ ID NO: 352309 - protein, 339 aa, unidentified
MRLYAATDLHSNNNVLVIIDEQDHVVHKRRLPNVLSTVLAALEPYKNDLEAIAVESTYNWYWIIDGLMAAGYKVKLVNTSAVKKYDGLKYTDDEDDARHLAHLLRLGILPTGYICPVEARGVRDLLRKRGQLVRCRTAQFLSIQNLASRNTGKGLDVKEIRELNEESILCLFDGSADRALALQSNLSVVCCLDEQIDTLEHTILGRAKLEPAFQKLQTVPGIGKILGLTIMYEAGPMERFPKVGQFASYARCVQSAHWSNGKKKDEGNRKNGNKYLAWAFVEAAHFAVRYNERARRFYQRKKARKNTAVAVKAVAHKLARACYHVLRDQVEFDEERTFA

SEQ ID NO: 352310 - protein, 342 aa, unidentified
MTITIGIDPHKASHTAVAIDNTEHVLDEVRVRACAAQTERLRVWATPFPDRVWAIESARGLGYLLAQQLVAAGETVVDVPAVLSTRTRLLGSGKAQKNDPNDARSVAIAALRTDGLARVSVDEHAQVLKLLAKRHRDLGRLRGQAACRLHALLMELEPGGMAKRMNVTRANGLLDRVVVDTEMVAHRVGVAREFVADLAHYEAQMKASKARLRHAVAATSTSLTDIRGIGVVTAAMIVGHVGDVARFKSSAHFASYNGTAPIEASSGERRRHRLNPRGNRQLNYAIHVVAVTQLRYPCEGRQYYDRKRAEGKSNKEAMRALKRQISNVVYRALVADARRVSS

SEQ ID NO: 352311 - protein, 347 aa, unidentified
MSTMDCAPFGIDVSARWFDVAAGPAATDVQRFANTPDGIRACVSWLAGVAGAGRPVRVGMEATGTYSLPLATALHAAGHTVYVCNPLSLARYGQAMLARTKTDALDARRIARFCAAHELAPWSPSSAAHQQLHALVSTREVLVGQAQRLRNRQHAADYTSCPALVADLQAPVLAAITAQIAAIERELATLAKADTPLGAQLRVVQSVPGLGLTTAATLVSGLPLHRLAGPRQVASYVGLCPRERSSGSSVRGRSSIGSLGPAHLRRALYLPAVVAMRANPELRTFAERLRTRGKPPKVIVVAVMRKLLLLAWALLQSGQPYAPAHRPAAAVRQGDGHAHTVPRPLSA

SEQ ID NO: 352312 - protein, 403 aa, unidentified
MNAVGIDVSKGKSMVAIMRPFGEIVSTPFEIKHTTSDINSLVELINSIEGESRIVMEHTGRYYEVLAHQLSEANLFVSAINPKLIKDFDSDSLRKVKSDKADAVKIARYALDKWQNLKQYNVMDELRNQLKTMNRQFGFYMKHKTAMKNNLIGILDQTYPGVNTYFDSPARSDGSQKWVDFASTYWHVDCVRKMSLNAFIDHYQKWCKRKKYNFSQSKAEEIYGKAKELVPVLPKDEITKLIIKQAIDQLNSASVTVEELRSLMDKTASKLPEYPIVMQMKGVGSSLGPQLMAEIGDVSRFTHKGAITAFAGVDPGVNESGSYEQKSVPTSKRGSSGLRKTLFQIMDVLLKTHPQDDPVYQFLDKKRAQGKPYYVYMTAGANKFLRIYYGRVKEYLSSLPESE

SEQ ID NO: 352313 - protein, 342 aa, unidentified
MREKRYVGVDLHRRVFTCCVRLESGRQFLSVWRLEQLPQFVKKLRCTDEAAVEVTSNTRLFYEAVAPYVARVVVVDPNQFRVISQSVKKTDPNDARNLALYLAKGLLPEVRMKEKQQAQVASLTQTRDRLGKLRTALKNKVNNLLSARGIELEKEDLSSEKGLARVLRMDVEEITQFELEVIVEQIRSLNHSIAELEKVIEREGRKLKGHGNLTSIKGIGSLGASILLSVIGDVRDFPDEGRLASYFGIVPRVSNSNETERSGRITKRGSKLGRTTLVQCALIAKRYSPYLANYYERVRSRRGTGRAIIALARKFLGIIYHTLKHNWVFEDFANFVLQEGTA

SEQ ID NO: 352314 - protein, 330 aa, unidentified
MQDYVGIDIGAKSVVVSVRRAGRTLTTQEFRQTPEGHQALCKKLGRRVACVVLEATGIYYLDLAVALCRAGLPVAVINPRSFHHFAQLKLNNSKTDPVDAALLAEYGECMKPALWQAPNETLMGLRDIGRQINRLTAARTQAKNRLHALCSKSSTLALLIEDETDGIERLNSRIERLTKAALELIDQQPHYKQHLANITSAKGIGQASAIAMLAELSVLPRELKSPQVSRYAGLDVRLCQSGTSVNKPGRLSKAGNAYLRSAFYMPAMSAVRHDPNAKAFYEALQKRGKKKIQALCAVMRKYLTGVWACLKLGVPFDSAELFSDKHLKNI

SEQ ID NO: 352315 - protein, 492 aa, unidentified
MNNSAASQNRAGGRPASARSRSSIGYPKRITGRLPEEPEASAPTSNRKTPLEGRHISSVDGRAKRRKSQKQHNQSMNDPQQWQQHRAFGALDWAREKHSVIVLNPTGKVIEEFEIEHSALGWKKFREKLQAYGSIPFAIETSQGAAVEQLVEAGMMVYPLNPKSAQAYRDRKAPSGVKDDWLDAWSFADALRVDGQGWKALRPEEALIKELRLLCRDEVSLIEQRTAFIQQLRDALAQYYPAALEAFDDWTRVSAWMFLQRFPTPDALAQAGKRKWQNFLHSRRLWAGQEGTRRMEIFARATEFAGSPPTVKAKSLLALSLVQMLFAIEKQLSLYRQRIEELFARHPDHDLFGSLPGAGPKIAPRLLSEIGDDRERFGGDAQNLQCLGETAPVTKRSGKRRYCYIRWACNKHLRYAIHLFAEQSLSRCVWAERYYQHHRQKGQSHANALRRLGHRWLKILHKMWIDRKPYDAELHHRNQLNHGSWIFQLKAL

SEQ ID NO: 352316 - protein, 458 aa, unidentified
MGRSKSTDRVRRAMAMVHPNAAAIDVGATTHVAAVKADRTPEPVRSFGTFTKDLHRLVDWFAECGVDTVVMESTSVYWIPIFELLDSRGFAVFLVNARDAKHVPGRKTDVSDAEWLQRLHSYGLLRASFRPKGRIVELRAYLRQRERLLEYGASHIQHMQKALTEMNVQLHHVVADITGATGLRIIRAILAGERDPAVLARLRDSRCHATVETIEKALTGTYRAEHLFALEQALALYDTYQEKASSCDTRIEAVLKELSIRRGREAGPLPSPRQRMRRQPNGMDFDVRAALYALLGKDLTQINGLGPYLALRLIAECGDDLSAWPSAKHFTSWLCLAPSNKISGGKVLSSRTRPSASRAAALLRLAATTVGRTDTALGAFYRRLSARIGKAKAVTATARKIAVLFYNAVRHGMEYVDPGASFYETRYRARVIDNLHRRAKAFGFALQPLEPTAAIPVS

SEQ ID NO: 352317 - protein, 420 aa, unidentified
MRKIKADRTGGVNRKTLIATVDIGKVTHTGYYRCPNGTDVRPFEFSNNARGFKKFWEGIVQTLSASDLKDVVIGFESTGPYAEPLIHYLRRKPVRLVQVNPMHTKKLKELQGNSPNKTDQKDPKVIADIIELGHALTLVIPEGPAAELRRLTQARERSVQGRAALFNTLQHLVFVLFPEFLQVMKDVKTRSARYLLSRCPTPEDLLKCDFESLACSVWNISRGKVSRQRLQALYAAARESVGIQQGQEAMAFEIKNILRMIEASECFTSDVEEKMSSLLKQIPYSRSILSIKGIGEVTAAGLIGEVGDFRQFKTLSEITKLAGLDLFEISSGRHQGQRRISKRGRSLLRKLLFYAALNMVSRAGMMRQTYESYLQRGMLKMKALTAIARKLLRIIFALVRDQSEYKEGYTQTKNALNEAA

SEQ ID NO: 352318 - protein, 365 aa, unidentified
MEKLYIGVDFHARKQTLCYLKTETGELVITELKHADKESVRAFYQQFPRPVVVGLEASGYSPWFEALLEQLGCEIWLGHATEIRRRARWRQKNDRRDAQLIWELMVHDEFPRLHRPVLPSREVLRMLRYRQKLTQLRTMAKNSLQAIALQAGLAKGPQLFTGAGQQQFRAVSLSPVLQWQREHWFALLQPLNQQLLETTIWFKAQSKDDPDVTRLRTHPGLGLLTALCLVHTLQPVRRFSNARKVAAYAGFDPVERSSAQRQRFLGISKAGSRLLRYLLVEAAHTAVRYDEDLKRFYKRLAQRRGRPKAKVAAARKLLIRAYIMLRDEIDYAEFRRRAVAARLARNRQRPNVPEVLIGQPASSEQ

SEQ ID NO: 352319 - protein, 368 aa, unidentified
MQILYSRCCGIDVHKDSVTACVLMYAEGKEVEVRKKEFPTHFKSLGNLRFWLLAQKVTHVAMESTGVYWKPVWQALEGHFELILANPFQIKTVPGRKTDARDSQWITELLAHGLIRPSFVPPRETRDLRDLTRYRVKLVEERNRVHNRIHKILEDACIKLDTVVSDILGATGRGIIQAIVNGQEHPDWLADKAKGRLRGKRPELRLALRGRITDHHRLMLRELMEDLEFVERKIARMEMEIATKVDRDKLHRLCSIPGIDLITGCTMLAELGSDMSVFNSPHHAASWAGLCPGNHESGGKRLSNRTRKGNRWLRRALLPGGMGGNEEEELLHRSLLLPQSREAWHLQGYRRHRSQAAHDRILHPARRH

SEQ ID NO: 352320 - protein, 347 aa, unidentified
MNFYNNTHPYYCGIDLHARSLYVCIIDQAGNNCLHKEISANPDKLHQLLEPYIGSIVVGVECMHCWYWVADFCDDAGIDFILGHALYMKAIHGGKAKNDRIDSFKIANLIRGGNFPVAYVYPKEMRATRDLLRRRMKIVRHGADLKAHVVNTTSQYNLPPNKVNLKNKVAREQLRSTFTEMSVQKNIDLDMALLDCYAGELSKIEWYIQQQAKQHKPNHFHLLKSVWGIGPILALTIIYEIGDIERFESVQKFASYARLVKCKAESAGKIYGTQGNKIGNAHLKWAFSEAAVLYLRGNEKAQKYLLKLQKRMSKAKALSALAHKLGRCVYFMLKNESVFDETRFLKG

SEQ ID NO: 352321 - protein, 414 aa, unidentified
MPYKIAGIDVHKKVLMVVVIDATTPDEKPERRRFTTMPSEMGRLSVWLREQGVEEAVMESTAQYWRSVGLELEPYMRLHLAQAFSNRAPRGRKHDFKDAERLVRRLIAQELILSFVPDGEQRTWRNLTRMKLQLRRDRVRLQNQMECLLEEMRIKLSIVVSDLLGASGLRMLLALAKGESDPKKLAQLGDERLRCTEEQLVDALTGRPQPMHREMLALQLERLQLIDSQIAKLNALIGQAMKPHQEAVMRLAEVPGLGVDSAQQIIAEVGAQASTFPSAAELTSWVGTCPGKDESAEENHSSRSAKGNKYLRRVLNQAAHAAVKKNGSYFQAVFRRLLPRLGYQSAIWAVAHRLCRVVWKILHEGVRFIEQGREPDPRAKKKRAQMLARALRKLGYEVTITPINPAIAENGMQI

SEQ ID NO: 352322 - protein, 290 aa, unidentified
MKQNILHIGLDVDDTQYHGAAFNKDTGEVCDFKCRPTLKGLLNQLDKLAGYFPGCVIRLCYEASYVGYCLQRDLISHGVHCDVVSPSSIPSPRGKAVKTDRIDAGYLAQFYANDLLTIVQPPDAEQEQDRDFLRSRQKLMQQQTQLRKHMQAVLRRSGLHYKAETGNKSPWTKHHYCWLARTIDGLSGSLKVNLELLLRQLKGLNQILTEYGHQIEELANSPRYQKAVQSLTCYKGIKNIFALTMITEIGDVKRFPHPRKRVSWIGMDIREYSSGGKYNRFGITKCHGSP

SEQ ID NO: 352323 - protein, 369 aa, unidentified
MHVTSIGPDVHARTISAAAFNPITGEVTHREFGPEAGPIAEWARGFESPKCVYESGPTGWHLARELGALGVDCAVAAVSRMHRPAADRGRKNDRNDAAFLARMLACHNVVEVFVPPEEVEAARDLSRALDDARDDLQRARQRLSKFLLRRGYVFSETNPLGQRRGTWSRAHWRWIGEVRLEGAARVTYTHYVTAARCAEADKRELEKAVAAEAATDRWAPVVRAVSTIKGIDVASAFCLAAEAGCFSRFGSAGEYASWCGLVPSERSSGERESHGHITKTGNAASRRTLVEAAWHFASCSGRPKRLPDGWEVPAEIRRRGNDCTRRLARRHGELAGSGHNGCVANVAVARELACWVWEIGCRAEGTYRA

SEQ ID NO: 352324 - protein, 354 aa, unidentified
MKRTTKYVALDVHQATTVASVREESGRVIARSVLPTDLGALTEFVRGMRGARHVTFEEGTQAQWLYDVLAPLVDRVVVCDRRGASRQGNKGDQVDADQLSELLRRGALRAVYHGSADRATLKELTRTYRNLVEDATRVMLRLKALFRARAIQTRGTNVYQVRARGQWLAQLGDRGARFRAEALYAELDVLRTLRPRAKAAMVTEARRDPAWPVLRTIPFFGPVRVALLLATMQTPWRFRTKRNLWAYAGLAVVTRSSAEYTLVAGQPVRRRRPPMTRGLNRNHNRVLKDVFKGAATAATARPGPLQDFYHSVIARGTREELARLTLTRKLAALTLRLWKKGERYDPTKLTTPAR

SEQ ID NO: 352325 - protein, 344 aa, unidentified
MQKYNVIAIDLAKNVFQVCKLSPQGKVIYNREISRTKLKELLIKEKLSLVAMESCSSAHYWARYAKTAGHQVKVINARAVKGFQTKQITDKNDALAIATAASLEHIYSIRVQSVDEQAMQSMERARNLALTHQIAQSNHIRGLLSEFGIILPQGLTSLREGIPFVLEDAQNGLPDRFRAVLLRLWEHLLVQIDHLDDLTKQLEIAIKDNDVCQKLMKLEGVGPLGALGLALRLGKGENFSSGRSASASIGLTPKQHSSGGKERIGHISKKSADMRLRSTLFQGALSVVSLVVNRPARTNKEQWLKALIERRGKKVAAIALANKTVRTAYALLKNDSVYQLGKLA

SEQ ID NO: 352326 - protein, 475 aa, unidentified
MNVKGTKKKNQVVTANIFEQQELLKKAEVIKENLTASTWHELETNGKFDKNEKLSFISEDMLILGCDVGSEAHYLRAIDTRGRELSKSAFSFSNDSEGFQSAKEWAVKIAAEHDKSQIVLGLEPTGHYWFCLATWMISNGISVVQVNPYAVKQTKEVEDNSQLKDDTKDPKLIANLVKDGNFGMPYLPEKLYAELRRLSMFRDQLNEDRIRTINRMHREMKIYFPEYKDALGKVDGAFSLELLKQAPFPDDLIALGEDGIRQIWHDAKLRGRGYSRAGEILQYAKASVGIKDGATAGKTAVKWFVQKVMELDAELAVIENQINQKCQKIPHAGNILEIAGIGENTLSGILAEMGDISRFDDVKEIQKLSGLGLVACSSGKHKGETKISHRGRKRLRYWLFQAAKSAVAHAEEFKELHVYYTTRPDNPLKKMQSLIVIACKLLRIIYTILKNGTVYDPKKMLTDIRRQEKKEVIAA

SEQ ID NO: 352327 - protein, 343 aa, unidentified
MQDVATVGLDIAKQVFQAHGADASGETLFNTKIKRENVLEFFSKLKPCLIGMESCATSYYWARQLLEFGHDVRLIHTRYVKPFVKRGKTDANDAEAINVALTQKTMRFVPVKTLNQQAAITILRTRSLFVSQRTQLVNALRGHLAEAGLVAAKGIQNYSKLLKLMESAADTVLPTVMKQALTDICDEIHRLNDLVTKLDKEIDRRVQHDENACRLLTIPGVGPKTAMCVIATIPDIHRFPSGRHFSSWLGLTPRTHSSGGRSVLRRITKMGNSELRTMLYLGGTVIMMRDSKTPIGRWAARLRARRPYKVAAIAVANRLARIIWALLTNGGVYDPTYGREASA

SEQ ID NO: 352328 - protein, 314 aa, unidentified
MNASMYVGIDISKGWIDAYLDPTGETWHVERTPQGIAAWITLLPSGITLAVMEATGGFEILVASLLVNAGIPTAIVNPRQIRDFASALGTLAKTDELDARVIARFAAAIKPVPRQLPSNQQAELGELVARRCQLVETSTAEKNRLATVTYQRVRKSIETHLRWLARQIEDIEDQIKTLIETSPIWYATKQVLITNKGVGDKTAFVLISDLPELGLLNRRKIAALSGVAPFTRTSGKWRGKSFTQGGRESVRRALFMACRSAIRFNPVIREFYQNLIARGKEPLVAHTACMRKLLTILNAQVRDTVYANSQPLPA

SEQ ID NO: 352329 - protein, 351 aa, unidentified
MIIIGLDYHPGMQQIALVDTETGEYLEQELHHSAGEAEKFYRDLKQKGVRVRVGMEATGHARWFERLMAELGFELWIGDPAAIKAARVRKQKTDREDARLLLKLLREDRFPRVWVPNPENRDLRQMLWHRHRLVQMRTRVMNQLQAIAMNEGLRLRKKLWSGSGRAKLESLQLAPWAARRRKDLLELLDRLTPKIEDLNLAVEAEAWERPEVHRLMTHPGVGPITALAFVLIIGTPERFRCGKQIGSYLGLIPCEESSGGRQRLGHISKQGNSLLRFLLVEAAHSAAREDAEWKRRYLQLAMRREKRIAKVAMARRLGVRLYWMWRKGWDYRQVLQFGSHAGELELGHSVK

SEQ ID NO: 352330 - protein, 424 aa, unidentified
MDPAQKQELPFVEQFNLFVGFDWAKDHHDAVAVDRSGRIVGQWQFQDDGPGWADFGQKLQGLAGADLSKTAVAIETSQGPAVGRLLELGCVVYPLNPKSAERYRDRKAPAGVKDDFLDAWSMGDGLRTDGHGWRRLLPEHPLTQELRLLCRDEVALIEQRTALLCQLQEALHEYYPAALEAFDDWTRPGTWEFLARFRTPQKLVQAGKRRWEKFLHSHRLYHPHTYAQRLEIFARADQFCGRPGVTSAKSRLAVAIVAQLRTLEVQLRQYRQAIQELFAQHPDHDMFDSLPGVGEKLGPRLASELGQDRGRFQDHQALQCLAGTAPVTRQSGKSRWVKFRLGCNKHLRAAVYHWARLSLADCAWAEAYYRHKREHGMGHDCALRCLGHRWLKILWKMWQTRTAYDEPLHTQNQLKHGSWKLNLD

SEQ ID NO: 352331 - protein, 438 aa, unidentified
MNEIDSIRLEQFRQLKKKIRGSNEYLIVGIDVAKDKHNAFFGTATGKTLFKRLVFENTSEGFKRLLIQADAVTIQHNLTKTVFGLEPTANYHKPLGEFLLKGGYMVVLVSGVAVKRNRELLDGRWDKHDTKDSANVADLISQGKCLFYEYPSMVLRELRSLLSLKRRLKKQEHGLRVRIRNHLLATYFPELDRYFGQSDSGSLEIVKWCLDPSVIAGLKYDEFVRLVAPHTRTIGQRDRLKAIWKKAADSIGCNAGESLEFEVKVMVEGLKHVQETISEVSGKIEEICCEFPEYRYLLTIPGFGPDVSSKTLGAIDDPFRFKTGKQVLKMAGLDLSAERSGKNSDAAIPVISKKGKADLRYALYQAAMIASTRNQYFIIYFTNKLRGREKEKGIKTKMRVKLAAKMLIIVYPVKCEAYFTGAWTLMKKKEVFYTPQAY

SEQ ID NO: 352332 - protein, 335 aa, unidentified
MDRSGKLIMECILETKAATILEFIAGLRGALSVTFEEGTSAAWLHDLLKPHVSHLVVCDPRRNALLKDGSKSDGIDARKLAELLPGNKLHAVYHGEHGVRTLKELGRSYLTITKDLTRVMSRIKALYRSWAIPCSGTTVYAPRHRAEWLAKIVEPGVRQRAERLYQQLDLLQPVRQEARRDLMVESHKHHAVKLLRQIPSIGPIRAALLVALLQTPHRFRTKRQLWAYSGFAVEIHDSGEYRFVRGKLVRNRERITVRGLNHHHNHDLKNLFKGAALSASTRPGPLCDFYVALVEKGMRPTMARLTLARKMAAITLTIWKKGVDFDAKQLNRQAA

SEQ ID NO: 352333 - protein, 370 aa, unidentified
MKKKVLYVGLDVHKKTTDVAIAPGRSNGKVRSYGKIDSTVDALNKLIKKLEDGDKQLRFVYEAGPCGYQIYRHLDAKGIDCCVVAPSLIPRRSGDRIKTDRRDAINLVRLFRAGELTSIYVPTPEDEAIRDLLRCRDDMKRFERKARQRLLSFLLRHGHQYSGKKNWTKGFYTWLATVKFSHSAQQVTLQEYIDVTNECSQRIKRITEQIQVHVDEWSRARFVKAYQALRGVSHIVATTVVSEIGDMRRFPTPKQLMAYLGLIPSEHSSGKTVRRGPITKTGNSHVRRALIEAAWTYKMQARVSNILLKRQQGLPKTVCDISWKAQTRLCARYRRLYARGKSKQTVVTAIARELSAFIWAIDKEMQVAHE

SEQ ID NO: 352334 - protein, 314 aa, unidentified
MYYYIGIDVSKKVLNIFDGKKDLIFDNKENLSSFKKYLKKRCSDLSSLVILFEATGIYSYPLKAFCADHHIKAYIINPQASHNFAKSLGTRSKTDTTDARTIWAYHKLISDKDIHIPKIDPVSITLASYLASYQLSLKQRLSFANHLEGVKDKALYRLLKKELERLSKLEQELLVRMDAYIKEHPKLNEDYQRLLSISGVGQKTAISLLTLFRAYPATNRKQITALIGLDPIQRQSGTSVHGRSRISKHGNQMMRKCLYMPALVSIRYNQKIKVFYDRLVSKHKPKKVAIIACMRKLLLIAHAIYKNKTVYVPG

SEQ ID NO: 352335 - protein, 366 aa, unidentified
MKKISTVQTLRNEILKKQKLTIGMDLGDRWSCYCILDEAGTIILEQKVAMTPEAMKQTFSKIPRSLIAMETGTHSPWVSRLLTELGYKVIVAHAQKVQLITKSNRKDDRHDARTLARLARIDPELLGPVRHRSAQAQIHLTVIRARAELVRARTALVNAARGLVKSYGQRLPKCGTRQVSRELGAGLPAELREVLEPLLQEIESLNERIEEYDERMEKIARERYPHVELLKQVKGVGTQIALTYILTLEDPHRFPKSREVGCFLGLRPGRRDSGESQPQMHISKEGDRYLRTMLVQGAHYILGPFGEDSDLRRWGLKLAARGGKSAKKRAVVAVARKLAVLLHRLWVSGEVYEPLRNSKKAMSTAA

SEQ ID NO: 352336 - protein, 420 aa, unidentified
MKPTKSKKVKVINEKTMIAALDIGKTAHYAYFRAPNGKDIKPFPFYNFRKSFNEFWTKLCQFKREHKLEDIVVGFESSGPYAEPLFHYLRKKPVKLVQINPMHSKRIKELTGNSPNKTDKKDPRVIADVISLGHALTLVVPEGPAAQLRRLSQARERALKRRTAAINQLQDIIFIIFPEFLAIMKNISTKTASYLIKKYPTPESIVALGIESLALIVKRVSRGKLKQQRAEEVFNAAQNSIGISEGKRSILLEVEYLISQIRADSRFIVNLEEQMEDYLEKIPYSYSLLSIKGFGRVTVAGLIGEVGDFKKFNTISEIMKLAGLDLYEISSGKHKGQRRISKRGRSLMRKLLFFASINAVKSNGIMHEPYQQMLSRGMLKMKALIAISRKLLRIAFALARDDTVYDENYSNIHDSFKLAA

SEQ ID NO: 352337 - protein, 343 aa, unidentified
MKLSRIGIDLAKDVFQLHGVDIHGKAVWKRRLKRDQWMSAVLDRGEPGCEIGMEACAGAHHWAREFQSRGYTVRLMAPQFVKPYVKSNKNDANDAEAICEAMSRPNMRFVTVKSVAQQDIQATHRIRAELMTQRTAKANQIRGLVAEYGLVAPQHLRALRVAIPCWLEDADNGLTDHFRSLLHGLWSDLTALDDRKLELDRVITRLANDNEVTRRLQQLRGVGPMVATALVATVGTAEQYHRGRQMAAALGLTPRQHSSGGKNRLLGISKRGDVYLRTLLIHGARSVVNHAKHKEDRLSCWVTSIAQRRHPNVAAVALANKTARMAWAMLRNETDYDPDFAIS

SEQ ID NO: 352338 - protein, 338 aa, unidentified
MDVHHHNWNISIFFEQTFVRSFTQPSSVDALERLLRRDYPGATYVCGYESGFCGFWIQRKLEQRGICCQVLHAADIPQTAKEKLVKRDPVDSKKIGHALSLKEKNSIYIPDEESERDRSLVRYRERIQKDLTRCKNRIRSILYQFGINLPDQYQKGWSNRFIEWLKQCDQVEGSAKITLDHMLEQMIVHRSMLLRVNRDIRSLQNSEKYRQRMGWLTSIPGIGPLTAIIILVELIDIRRFSCFRQLNSFVGLYPMEHSSGDEEHKGAITIRHNKYLRKIFVEDSWTAIRHDPALTLAFNQLTQRMTSKRAIVKIARKLLSRTRYVLMNETFYETGIVK

SEQ ID NO: 352339 - protein, 339 aa, unidentified
MVLYGGMDLHGDNVFCTLMDRDYKPVYEQRLPNDLPTVLAALAPYRAQVAGVAVESTYNWYWLVDGLQANQYSTRLANPARMQENIGLKSANDKTDARFLAKQMVMGVLPEGYIYPKEERPVRDLLRRRMCLVHMRTGEWLRLEGHVARHSGKDLGIQALQNLEARELSELLCNDTLTMAAAQISYRHIAFLDQEIRQIEKAVEGHVKLADGYERLIGVPGIGRILAMTIILETGPIGRFPGPGNYASYCRAVKAEHTSNNRKKGKGNGKSGNRYLAWAYVEAANFAVRYSPELRAWYQRKAARTKRVVALKALANKLAKACYFILRDGVEFDVKKLVG

SEQ ID NO: 352340 - protein, 355 aa, unidentified
MNDAKYIGMDVHQATISVAVRDSRGNLVMEAIVETKAETILQFIHGLRGSLSVTFEEGTWATWLHDLLQPHVTRVVVCDPRKNALLKVGNKNDRIDARKLSELLYLNKLSSVYHGEPGIRTLKELARSYIAMTRDLTRVMSRLKAIYRSWGIPCAGQQVYAPRYRAEWLAKISEAGVRRRAGLYYQQFDALAALRQQARRELLAEARKHPAMKLLRQIPTIGLIRAALLIALMQTPNRFRTKRQLWAYCGLALRTYTSGEYRFVGGQLKRSKKVLAVRGLNINHNHDLKNIFKGAATRAASTVGPFQDFYQACVARGVKPHLARLTLARKIAATTLLVWKKGVRFDAEHLKQQAA

SEQ ID NO: 352341 - protein, 415 aa, unidentified
MKFEKDTRGIKRYIAFDIHKEYALVGGQNAQQEWVMAPRRIGMEKLREWAKANLGKGDAVVIETTTNVWDVYDIVEPRVSYTVVAHAGGVRQIAEARVKTDKKDIERLIRLLIADIVPEVWVPPVEVRELRGMISYRTRLVKTSTMIRNRLQSLIHRHNLILPKGKLRDKAWWEAQQVSELERIQIRQELAMLDEMEKHEGEVDAELGRQSLGEVWGKQAMRLLQLSGFGVIVTMTVLSAIGDVTRFESGKKLVGYSGLGAGVHDSGKEHIEKRITKSGRKELRWALVEAAWRAIRISPYWKEQYEKYLRRMRKPNQAIVVIARKLLVVVWHVLTKEETDERVNEEDLAYKMLVLAWDLDENARMGLSYKQFAKYALMKLGVEKDITRFVRKEVPRRLAPREEVLARMVELGIAQ

SEQ ID NO: 352342 - protein, 347 aa, unidentified
MEQYAGLDVSLDSASVCIVDAQGKIVKEAKVACEPEVLIAWFAAHGTPMARIGLEAGPLSQGLFAGLKAAGLPVELLETRHVSAAFKAMPVKTDRTDARGIAQLMRLGWFRPVHCKSLPAQEVRALLTTRKLLQAKRHDVEMSLRGVLRGFGLKVGPTTPKTFEARVRDLVAQHGTLQTIADALLKARAVLEQAFEALEKRLSALARCHAPTRQLMTTPGVGVIVALTFASAIDDPARFRSSRTVGAHFGLTPRKHQSGETDVTGRISRIGDHGVRVALYEAANVILTRAVRGSDLKNWVLRVAKRAGMKKAKVALARKLAVVLHRMLADGTTFMASPAARAVAGAA

SEQ ID NO: 352343 - protein, 408 aa, unidentified
MERYYLGVDWADKFHQVWVSDAQGQKVAENKVVENKEGLAEFSRWLNESRARGIELWAAIEKPQGRIVDFLLDHGVVVYPVNPKALDRARDRFRMSQSKSDSFDAHVLAEFLRTDHGHLRALEPNSDDAQELKLLTRDQHRLGRQKTRLLNQIRVTLKEYYPRPLEVFSDLEAQIARDFLKQYPTPRALSDLTQRKWNRFAKREHHLGEGRCKELWEKLNQPQLQVPDHVVRAKAQLLLVLLAQLEASSDAVQTYNERVKHFFASMPAAKLVKTLPGAKTGTIVAMLWAELGDSNNRWESFHHLQAEAGVVPVTKASGKSHVVHFRFSCNKVMRHASYWLAFVSLNQSEWANHYYRDQRAKGHNHHQALRALGAKWLKIIFVMWRDHKPYDENYHLANITRQKMRQAA

SEQ ID NO: 352344 - protein, 362 aa, unidentified
MKKPSQRLIIAEVPRSITKVGMTIGIDLGDVWSHYCTLNEDGEVVDRGRFRTTPSGVEKWFTDLPRARVAMETGTHSIWISEQLRELGHEVIVANVRELRAISHSDRKSDTVDAEKIARYARLDPKILRPISHRTLAQQEALTLIRARNLMVRLRTAAVNSVRGLAKPCGYRLPASSTLCFAKRCMAVLPPGLAQALGPVLQQIAAMTVKIKQYDRTIKRLTETEYPETQALIQVYGVGQLTALTYVLTLGSKERFERSRDVGCYLGLRPRRSQSGDHDPQLGITKAGNIYLRSLLVECANHVLGPHGRDSTLRQWGLHLASRGGKQSRNRAIVAVARKLAVLLHRIWVTQEPYIPFYAVAA

SEQ ID NO: 352345 - protein, 371 aa, unidentified
MQQIRSFVGMDVHKTTISISVAEDGRSGPVRFIGVIPNTPEAVHKMAKQLARHGELDFCYEASGCGYGIHRQLTGLGHKCTVAAPSMIPRKPGERIMTDRRDSEKLAILHRSGDLTPVWVPDTTHEALRDLVRARVDASMHLMRARQQLLAFLLRHGRSYPTGKHWTQRHRSWLAGQTFQEEAHGIVFQDYLETVWTTQGRRDGLIKRISAMVSSWSLGPLVEALRGLRGVDLVSAATFIASTGDLSRFESPRLLMGYLGLVPSEHSSGGTIRRGGITKTGNREARRMLIEAAWSYQYPARIAKEKAEILVRLPKKIRDIAWKAQVRLCTRYRSMIARGKKPTVVVAAIARELAGFIWAIGQEMRLCTASS

SEQ ID NO: 352346 - protein, 319 aa, unidentified
MAMRVEPIDVGIDVSKKSLAVAQEGEKVVEIVNDAGSIRAWLKSLPQPARIGVEATGIYHVELVEQAHRAGHTIYVIDGYRLNRYRESIGGRAKTDASDARLLLRYLQREATDLRPWSPPPKGYRDLQQLILRRARLIQCKTRLDQSLSGLNQLGPTRRALIRHIDQVDQLLKKRIRKVLQNQQWLQEARRIQAIEGIGDITAAALVMTFQRGAFGGSDAFIAFLGLDVRVRESGSFKGRRKLTKKGASELRRLLYMAAMTARRSATWQASYQRQLDRGLSNIQSLVALARKLARVAFALLKNGSEYRPQIRQEGCNAT

SEQ ID NO: 352347 - protein, 382 aa, unidentified
MKKNSKKQTKRAEQAKMGAAQLSGLQQRDANSLVIGMDLGDRTSFYCVRTLGQERIATGTIATTAAAMVEFFQGMKRQRVVMETGTHSRWVAHLLELLGHEVIVGNSRKLKLITQNDQKSDKVDAGLLSKLGCVGAEWLYPVYRRSDSVQRDLAMVRAREALVETRTGLINHVRGQVKSYGCRISACGADRFVEVARKELPEALRPALAGVLEILEELEDQLHRYDCQVKHACEQKYPQTKWLMQISGVGALTALTYVLTIEDPGRFESSRDVGSYLGLVAKRRQSGGRDPQLGITKTGDELLRKLLVNCAHHILGHVGADSDLRRWGLNLVAKGQKAGQQGARKRAATAVARKLAVVMHRLWVDERKYEPLRNSRALAPAA

SEQ ID NO: 352348 - protein, 421 aa, unidentified
MSLASVNCFVGLDVGRETMEALWIDEEGQQVGSMGFPNNHEGYEEFIEKLTELEGKGLSPVVGVEGHSGEVSPLDEYLAGERIPLVSIQPYRVHSHKDVLGQPKKTDHYDAYVIADFLWSRRHQLTEMPKFKKQVQKVKKLSRTNQDLQKEENRYVNRLRQTVTEYFPEFLQEDWFSKLTGTTCLSFLATYPSLVKLKRIDIEELSKFLKEKSQGHYGEKLATAIIEKVNSLSRSLEDEQAYALRAKSMAKLLLTIKKRRKEVKKAIREALKGWEEADILKSLPGAGDILTAQLLGEIGSIDRFENSDALALYCGVAPIPHSSGKWQTDKNTKRVNRVAKDALMQLAQCSKRYNPISNQYYQKKRDEGKSHWHALKCLARNLIRVIYAMLRDRTYYQPHHGGEKEDEKSQSREEQPAMATA

SEQ ID NO: 352349 - protein, 415 aa, unidentified
MYYVGIDIAKSFHVVSVIDDNETKVINKPFKINNDSKGFEKLLTILDSITLEKSEFTIGLEATGIYGENLQEFLKSKGYSVKLLNPFQTTRYREQITLKKVKNDEIDSLVIALLLKSGKFSSGYITDDEYQSLRTLYRNRATIQADMKDVKKRILTQITVTFPEFEGFTKPFNVTGLALLDKYPTAHHYKHSSVDRIMKLFRHIQGNNFTQSKALQLLELSKESIYSGKAKDARAIAIRSSIRLLQMYLNELDIIETEILSLLENSSVETTVDEAGQEIQKTDTLLHNLKTIPGVAEKTIAALISECGDLTRFPTIPKFIGYLGLFPTENSSGNSKYIGHLSKRGSPLAKHALYMSAVSCLIHNTQLKQLYDTKRSQGKSKKEALIAVSRKIATIIYSIFKYNVPYDPNRVFAKS

SEQ ID NO: 352350 - protein, 412 aa, unidentified
MEVMYPRCAGLDVHKETVVACVRIVEGGDVSRSVRTFATTTASLIELGEWLEVNGCTHVAMEATGVYWKPVWQVLADSSLELVLANAAQVKNVPGRKSDVNDATWLSELLAHGLVRASFVPEPAIQQLRGLLRTRKQLVREKASHVQRLQKTLEEANIKIESVLSDVMGRSGRAMIQALIDGESDPAKLAALAHWKVRASAATLREALHGRIKRHHRFLLRLHLQQVDALDAAIAEIDREADAGLACFRDAVKQLSTIPGVSELSAQVILSEIGTDMGRFASAAHLRSWAGLCPRNDESAGKRRSTRLRRGAPWLKAMLVQCAWAAARTKATYLHAQFVRLRGRRGPKKAICAVAASILTAAYHMLKDGTFYEDLGAVHFDRRRPETQARRLVKRLAELGFSVELKPVAAVS

SEQ ID NO: 352351 - protein, 328 aa, unidentified
MEWTVAIGVDTHTRTHVAVAVDRVGRLLGSLELTVDEDGFAALTRFARSLGEPAFVVEGTGSYGASLARALLADGFPVYECERRERRRRGDKNDLLDAEAAARRLLSGKQLPLPRSGGAGREQLRLLLTERRSAQHARLQARNQVQAALVTLDPPLRAHLGRLDPATLHRSTLLRRTPSLAALGRLSRRIQQLETELAAIDTELAELTQALCPQLLAEHSVGPLCTAQLLVSAANPNRLKSEASFAALAGVSPIEASSGPRKRHRLNRGGDRQLNWALHMSALNRIRHHPETQAYYQRLLTNGKTKKEAIRIVKRVLARRLYRTLTAT

SEQ ID NO: 352352 - protein, 373 aa, unidentified
MPRYSTAFGMDVHLRSTTVCALDAETGEAVTRRFRGNPWGEVAEWMSGFPGPSLAAYESGYLGFAPQRELSGLGVDCVVAAVSKVPRSAADLSSKNDRNDAARMAKAILSHDVTPVWVPSPEIEGLRDLAAAHDAATARLAAAKQRLLAFLARRGYVYGGTTPAGNPRKYWTYGFLRWLDGIHPADDGGIRALATLRNEVEAADETREALLAEYRAAVAAGPLSAEVEALQSIRGCGFALAAAFASEVGDFSGFRSGRQVTAYFGLAPSQRSSADSVRLGGISGAGNALVRKLAVEGSWCYAQAGHQPKLMPKGSGVPLEIRMHGRKGSERLLRRREEMIARGMPQAKANAATAAELVRWLWALGTMCREGAE

SEQ ID NO: 352353 - protein, 428 aa, unidentified
MKYNTQNAKIESITEKTLIVGIDVGSETHYARAFDWRNYEYSKKPLEFSNNEAGFVTFKVWMEELAEKYGKDVVIPGMEPTGHYWFNLGAYLQDNGMKPVHVNPHHVKKSKELDDNNPNKNDRKDPKTIAALGNEGRFSYPYIPTGVYAEIRSLSNLRLQAQEEITRIKNRIARWFSIYFPEIKDVYKNPGAVSGLMILKVAPLPKDIVKLGVDGVNQIWRDAKLRAAGLKRAKTLVTAAEHSIGSQEACDSARIELKILLNDYEIYHQREEELMELIEEKLSEVPYIDKLLEIKGIGMKTVSGFVAEVGDIKRFDNPKQLQKLAGYAIVECSSGKHKGESHISYRGRKRLRYVLYEAAISLIARNTEFKEIHRYYQTRGKNSLKKMQSVIAVACKALRIFYAILTKGVTYDGAKMLQDIKRPQLKVA

SEQ ID NO: 352354 - protein, 412 aa, unidentified
MEVLYRSCCGIDVHKQFLVACLLVVDEKGRQHKELRRFSTMTGELQQCVDWLEAARCQAVAMESTGVYWRPPFNLLEGHIETVMIVNAEHLKRVPGRKTDKKDAEWIAELLQFGLLKPSFIPSQEQRELRDLTRLRTTLTAERTRLVNRLHKTLEDTNLKLSSVLTDIMGKTGQQILFALLRGEEDPAVLADLALGRAMSKRDALTQALRGHISDHHRLLLQELLSLIERHTRGISQLDREIEERLRPYEALITRLDAIPGCSRRIIEVLLAEIGWEVSAFPDAAHLASWVGICPGNNESGGKRKSGRIRKGNRWVKAMLVQAANAAARTKNSYLSAQYHQIAARRGNKRAVVAVAHSILVIYYHMLTTGEPYQEKGANYFSELDRKHAERRATKQLERLGYQVTLTPAQIA

SEQ ID NO: 352355 - protein, 369 aa, unidentified
MRFYTTQHRFYCGIDLHARTMHVCVLDATGTVVFDKNLPCHFETLLQALVPFKDDLVVGVECMFGWYWVADRCAEHHIPFVLGHALYMKLIHAAKAKNDRLDAGKIARLLKGGNFPLAYVYPKGMRETRDLLRRRMYLVHKRAELITHLEILNAQNNLPPFGKKLGYAANRADLRIPERFMHPSVQQSACLDLKLIDKLDELIGSVELYLTRTAKVDDVQTYHRLRTVPGIGPILGLVLLYEMHDVARFEQVGQFLSYARLVRCDHESAGKKLGSGGKKIGNAHLRWAFAEAACLFLRTSERARQWKQKQEKKHGPAKVLGILAARLARSVYHLLRKQEAFDEERFWNGQAGATPVDSNKSAAGNRQGS

SEQ ID NO: 352356 - protein, 428 aa, unidentified
MSNQKLTRRQQFCQIQSEINGSDQYLIVGIDVAKDRHHAFMGTATGKTVLKKLVFENDIDGFRKLLQRSEAARVQNDLAKMVFGIEPTGNYHKPLAHHLIESGCHVVLAAGKAVKDNRRQINGRWDKNDTKDAANVADLVSRGRCLYYDAGSSQINQLRDLLSLRKRLKKEEHSVKMRIRNTLLAKYFPELDRFYSACESESLAIVRWCLDPAKLAVLGFDKFFAMVTRNRRGIAQKLRLEKIHQLAAQSVGCPIAAAAEFEAALLVEKLKRVRAQLKQLEDLMQQVAGNFDQYQILLSMPGFGPYVSAVVLAAIADPFRFDSSKQLLKMAGYDLCASRSGKSSDNAVPVISKNGNGQLRYALYQAAHIASTRNPDFIGYFTRMLEGRQRERGIKTKMRVKLAAKMLKIAWTLMKKKEAFNPDYLNTK

SEQ ID NO: 352357 - protein, 348 aa, unidentified
MNYIGTDIHISTLDFKVVGNLGKIKMAREVRTSAPNFLDFIKSVPAPRQVIIEEGPLAAWLLEICDKNGEHLIISDPKRNKWIGASGEKEDPIDAEKLAQLARGGYIKEIHHPLGQRRRFRELITAYHDTNKSIVRIKNKIKAKFLQNGIQCPGKTVYSGKQRAEWRQKLPQEPALLVIIDSLWQQLDQIQDNLESILAEAKLEANRYPEIELIDEIPGIGFIIAATIVAILENPHRFANKRKVWAYAGLGIVRKSSANKTYAEKLGKEFNRMLKCVVEEAAQAAINTETDNAFRRSYARMTIQKGIDPHHAMLTVSRDIIATVWAMWKKGEHYNPAIDRQVKTEVEV

SEQ ID NO: 352358 - protein, 408 aa, unidentified
MEVVHPRCAALDLGKDELVACVRIQEGARAQQECRTFKTTVKQLVALSEWMASEGVTHVVMEATGTYWRPVWHVLEESFTLILANAAHVRGIPGRKSDVNDAMWLADLLAHGLIRGSFIPPAPIQSLRDLTRTRKQLVREIVQHTQRIQKTLDDANLKITGVITDILGVTGRAVLKALIQGETNPERLADLARGRLRAKRSRLIEALHGWVTPHHRMLLKLHLDLIEAIERALDNLDKEIGDALAPFRNAAQRVKTVPGISDLAGQSVIAEIGVDMSRFPSHQHLLSWACLCPRLDQSAGKVHSTRTRKGALWLKTLLIQCAWSAVRCKDTYLRTQFYRIRARRGPKKAIGAVAASMLTAIYYILRDDVEYRDLGPNYLDTIDRTRISRRLVQRLENMGYHVELKGAA

SEQ ID NO: 352359 - protein, 388 aa, unidentified
MGILRLKTYILNPKDLKAINVVLTFPSKYPVGKFDFLDVIQKVYEKKYPMVNFLGRHNANIIFGGNCWAIARMTNKLDKIRTFEGPSDVKGIREYLKGLSGSKILTIEESTASQWLYTELNDSVDKLFICDPSRNRLLSEGAKNDKIDAMKLVKLLRSGMMKEVFHSGDEFIHLRKIVSGYEDLIKAGVRLKNQRSAMYRAIGLHSKRDTFPIELKADKFVLEKIEQRIEEYERQRAEYEAEFKRLCKKHKTIQNLKGVSGIGDIHAVQIAATIVDAKRFPTSGHFLSYCGLIKHEKMSGGKSYGKRPSRYRRSLKRVFKLAAQSATQEGCTNPFRMYYESLLNEKKLPEHTAQHAIARRIAVLVYGVLQSGKKFDYNSFRGVKKKKE

SEQ ID NO: 352360 - protein, 310 aa, unidentified
MATAGIDVAKATLDLAIHGQDAHLTVGNDAAGWRLLAAALHKAGVGRVGLEATGGYERGVAAHLRRNGFEVRLLQPLQTKAFARLHLRRAKNDAIDASLIAACTAMLDAAAGAPDPRLTLCADLLTFVEQLEEHIVRCKTRLEHIRIPRLRRIVTSDIARTKARIAAELKAIAAELRRFDDLAQRLDLVLSVPGIGLRTAVAIVVRMPELGSVTREQAAALAGLAPFDHDSGAQRGQRRIAGGRSRLRRSLYAAAFSAAFHWNPALKAFYARLTAAGKSHNAALVACARKLLIYALTLVQRGTPWKTHPV

SEQ ID NO: 352361 - protein, 313 aa, unidentified
MTIQTIIGIDVAKDELVIYRQDTDAQESFENRKPAIKRWLRSLPAQCAIAIEATGTYHVAAIELAHQCGHQVFVIDGYQLSHYRQGIGGRAKTDSSDARLLARYLSREHETLRVWTPPPAAYRSLQTLLRRRATLVQARVAIQQSCSELPELAPHLKRLIAQLTRIDQVIQRQIRTIIREAGLSQQVARCQAIEGVGELTAAALVMAFLRGDFRHSDAFVAFLGLDVRVRDSGKQRGRRRLTKKGDPEVRRLLHNAAMAASRQPAWKMTYQRYLARGLKTTQVFVILARKLARIAFSLMKHEVEYCPPALMKG

SEQ ID NO: 352362 - protein, 319 aa, unidentified
MQMIHFLGVDVSQDWFDVAIFGSAKPAQFQNDEAGFAAFAQHCVDLDWSKCFVVVEATGGYETRLLRYLIAQGAHVHRATPLHAKHFIRSLGLKAKTDKIDALALARYAVERHAELPVFVFPDEEQSAFNDLMMRRGDLVAFAAAEKARASQPRYKDAASSVMQSIEAMLGFIEAQIAAIEAELDALVEASPTLSRRIETLRTVKGVGRLSAYALQAFMPELGTLTRRTAASLAGCAPHPRDSGIKNRKRSVFGGRGTVKRMLFLAAMTARRYEPALKAFFEKLVATGKPKMVALTALMRKIIVIANARLKELNLQSSW

SEQ ID NO: 352363 - protein, 446 aa, unidentified
MKKNTQKPKTLNYINENVAGIDIGHGSIFVSINPRGKESETRRFGTFTSDLKDMVEWLKENNIESAAMESTGVYWIPTYDLLDQAGIVPVLVNAYFFKSLPGKKTDVKDSEWIQQLHSFGLLRGSFRPNGNEVTLRTYVRQRSNQVRQASRQINLIHKVLAQMNIKLNLVISDVTGETGINIIKAIIAGETDPKKLAQFRNYRCRSTEAEIAKSLEGNFKPELVFSLKQSFEAYNFFMSQATACEENIQEVLDLWQVKNSDNSVTNNSPKKKKGKNSYSFDATSNLEKILSINITEIPGLGENLAIKIISEIGTDISKWPTVKHFSSWLGLCPNNKISGERVLSSRTAPSSNKAAEALRFAAQSLQFSQTALGAFFRRIMIRTGTAKAITATAHKLAVILYHMMKEKVAFIEVGQAVYEENYKRRKMANLQRQAQSLGYELVAREA

SEQ ID NO: 352364 - protein, 341 aa, unidentified
MEKKLNVLGIDIAKQVFHLVGRNEQGTILLRKRLYRAQVMAFIAQLPPTLIGMEACGGAHYWARRFREHGHAVRLMAPQFVTPYRKANKNAMRDAEAIAEAMTRPPMRFVPVKSVAQQDLQALHRVRERLMKARTALINETRGLLHEYGIIVPQGAATFRKHVLEKLTTEAAKLTPHSLELFRQLLEELAALESRVAPYDAQLAQVAQMHPVCQRLMTIPGLGELTATALVAAVNDATQFQNGRQFAAWLGLVPRQHSTGGKSRLLGISKHGDSYLRKLLVHGARSCLRWVGRKRDRRSQWVQSLMERRGWNKAAVALANKNARVAWALMGTEQVYRVAEA

SEQ ID NO: 352365 - protein, 421 aa, unidentified
MSKHRYQTKKINEIDWSKLAEQIGSREVVLATDVAKEVFVAALMCASGELLVLIKWQHPQETSQLLAQLEQALAGIRWCAVMEPTGTYGDSLRHQLVMRGIPVYQIGPKRVHDAAEIFDGVPSLHDAKAAWLIGTLHWQGVSRPWPVISDERRALQAQMKQLDWLKQRQRRALNRLEALLSRHWPEASRLLALNSVTLLTLIADYGDPAAVAADRATAHQLMRRTGGPFLPEEKIGQLLDSVEHSLGVPCIEAERELLQWLAQDLLATHRLLLQEERRIRQQVEQDTATHRMAVVVSATTAAVLSASLGSAHDYAHPQSYLKGAGLNLKERSSGQLKGQLSVTKRGPSVARQYLYFAALRLIRDDAVAQAWYQRKVERDGGLKSKAIMAVMRKLCKALWYVARGETFDTRRLFNVARLGLS

SEQ ID NO: 352366 - protein, 343 aa, unidentified
MGRKIGVDLHKNSFRVCYYQNDEKYDFETYHVSVKGLEHFKKGLKKTDELAVESTGNTGHFYRAVEGKVNRIRVINPMQFKVISESVKKTDDEDALKIAKFLSKDMIPEVRMKTKQEGQLASLIGTRDKFVKLRTALKNKVHNILNANGIVTKTELLTSDKSLDKVLGNKLDEACLFELEIIVSEIRNLNEAIKKIDAQVKERGQKLEGFKGVTSITGIGDMSGTILLNTIGDVKYFRDEKALASYFGIVPRIRSSNETTHMGRITKMGNKIARTALVQSTLIAIRYSPYLRAFYDRLKAKKGSGKAIIATARKLLGIVYNTLKNNWVFEDFNNYKLAPQGAY

SEQ ID NO: 352367 - protein, 429 aa, unidentified
MNYTQNEKIEQVTDTTLIVGVDIGSQLHYARAFDNRGRELTKRVFSFSNDLEGFNSFNLWAETLKKDNDKTEVMIGCEPTGHYWFTFAKYVSDHQKTLVMVNPFSVKKIKELDDNSPKKTDSKDPKTIAKLVVDGRYSVPYMPEGIYAEIRDLVYSRDRIVKQHNISANRIQRWLAIHFPEYLGIYKNFDAASGLAVLEKAPLPKDVIALGVEGIRRIWHDKKIRGKGVTEDRARTLVEAAHNSIGLDGGAGTRSELYMLLEEHRLWTSQKDAIEKALEETIFKVKYVEKLLAIKGVGVITIAGFLAEVGDIRRFKSPKQIQKYAGLELVENSSGKHKGRTKISKRGRRKLRRILYQAMIPMLARNKEFRKIYDYYITRVKNPLKRRQAMIAVSCKLIRIFYAVLTKGVDYDRFKMMSDIHRDSDVIAA

SEQ ID NO: 352368 - protein, 345 aa, unidentified
MPIVGGLDIHRKQITFDYLDTETGQVRRGQIAPADRTHLRAWLARFAGREDVAFAVEGCAGWRYVAEELAAAGATAHLAEPADTAFARGRKRRAKTDKTDSRHLRMLLAEGRLPECWIPPGHILECRALLETYHDLRREHTAWVQRIHAVLFHQGAPALGAGTLRTGQGVAALRAAAAHLSPAGQLQVATALEVLEALEARMHVVRHQLLDAARQLTGAKVLAARLYGVGPFAALALTCWLAGEGRFSSSRKAVRFAGLDITVSSSDRKGPPGRLSRQGPPVLRWALYEAGKTHARTSAPDHAYYAQVKDRKNSKRAALSEARKILRQACHILTELGDDALAPVT

SEQ ID NO: 352369 - protein, 410 aa, unidentified
MLFVGDDWAEDHHDLAVLDPEGRVLKQVRVPEGVDGITAFTETVAGCMPDDDGDPSEVLVCIEIDHGPWVQALQAAGYRVFGVDPKQAKRHRESVSSSGAKSDKSDARALADMVRTRRLQLRESGGDSELAESIKVVARAHQRAVWDLARHSNRMRAVLRLYFPVVLTIASELDVAFSSSVILGLLDKCAARPVKARKLTGPQVKSLLYRRREQDLKTARIRELLREEPLPQSEVMLQAYATTVLAEVAILRAIAGQVTVLEKELAGHFSQHPLAEIYLSQPGVGVTIGPRLLGEFGDLPDRYRSAKARRNAAGTSPITKQSGKSRVVHARHFTNTWLLDAAIQQAGEAIRYDSHARAFYNKQRKRDVKHNAALRQLANKLIGILHGCLARHELYNPSIAWSQAQTQPAA

SEQ ID NO: 352370 - protein, 410 aa, unidentified
MRVVYERCCGLDVHKKTVVACVLITEPSGELQRHIRTFSTMTAGLLALADWLESMHIPVVAMESTGVYWRPVFNLIEEGRTIILVNAQHMKAVPGRKTDVKDAEWLADLLRHGLLTASFIPPAPIREIRDLVRYRKTLVQERAQEVNRIQKVLETANVKLSSVATDVLGKSGRDMLHAIIEGTTDAEVLANLARGLLRKKLPQLQEALDGRVQPHHRILLKHILAHVAFLEQELEQLQQEIEQRLPPFEEEMGLLLSIPGIQALSAAAILAEIGADMSRFPSAKHLASWAGVCPGNKQSGGKRLSGKTRKGNATLRAALAEVVWVISHTKDNYLAAQYHRLARRIGKNKAAMAVAHSVLVIIYHVLHSKKPYSDLGADYFQKQDANRVAQRSLRQLEALGYEVTLTPKVA

SEQ ID NO: 352371 - protein, 349 aa, unidentified
METILSIDLGKNKSVACIFDKKSFNAKFKTIKTTAAVLRELVDKVKPDIVLFEVGSSAGWIADMLNDMSVPFKVANTNHPAWKWRNNSKKTDRDDAYRMVTMYLNNSLPTVYIPNKEVRQKRSLVNYRQSLVGRITQSKNTIRSILSSVDISMPSGKKGWSQKSLEELKKIAINIQEIGSDEDFWRGELYAELEVLEKLCEQLKNITAKLNSLAEKDENIQLIKTIPGVGNRVAEAVVAILDDPHRFKSAKQVGSYAGLVPRCYQSGQMEKNGRITRQGDSLIRALLVQVSWLGLRYEWMREIFDRVQKGSKSRNKIAIVALARHILVRCWAMLRDGSKWHGSVAMVKK

SEQ ID NO: 352372 - protein, 388 aa, unidentified
MQVVTGQAAAPTAIQTNLRAIFVSLELSRSTWLITSLSPGAAEKMSKHSVQAGDIAGLLRRLAQIKEKARARTGRDFPIITIQEAGLDGFWIHRVLQSEGIESHVVDPASIATSRRRRRAKTDKIDGETLVRTLLAYKRGEPRVCAMIKVPTPEEEDSRRLCRERKVLTAERVLHVNRIKGLLFCQGISGYEPLRRDRHERLEELQTGDGRPLPPHLKAQVNRELDRLELLLKQIKAVEAERDALLVAAHTPAAVPASMLLNIRGIGPEFAAVLWSEGLFRHFDNRRQVAAYAGLAPTPWQSGAVDREQGVSKAGNPRLRTTLIQLAWLWLRNQPHSALTLWFHERVSRNGGRLRKTTIVALARKLLVALWKYVTAGVVIEGAAMTAA

SEQ ID NO: 352373 - protein, 412 aa, unidentified
MDVLHPCCAGLDVHKDSVYACVRRIGPGGGVRETVQVFGTMTPDLLQLADWLAAEGATHVAMESTGVYWKPVYYVLDEQFELVLANAQQLKRVPGRKTDAQDCAWIATLMQHGLIAASFVPPEPQRDLRELCRQRVQLTRQKAAVSNRIQKVLEDANLKLGSVASDVLGKSGRAMLRAIIAGETDPVTLAGLALGRLRKQLPRLRPALTGRVTEHHRFVLKLFLDEVEVVEEWVRRLEERIEAVLSPFAEAVRRWTTIPGVDRRTAQAVAAEIGTDMSRFPTEGHLSAWAGMCPGNDESAGRRRSGKTPKGSSWLKRALVQAAWAASHTKGTYLSAFYRRLAARRGRKRALVGLGHAMLGIMYHMQRTGTDYTDLGGDYFERRDADRLTRRLVRRLESLGLKVTLEPSPQAA

SEQ ID NO: 352374 - protein, 349 aa, unidentified
MKQILKQVLGVDVAQKELVVTLGKMYDDLTLDLYAYKVFKNNKTGFAALLKWLKPIIDKDIKLQFVMEATGVYHQKFAYYLDEKGCNLTIVLPNKISNYMRTLEVRTITDKTASQAICQFGLERKLECWIKPKKVYKELQQLTRERSQIVDQRVIVKNQLHAENTEAEPNKSSLKRIKARIKFLNQQEKEIKVEIQNIVNKDAELKKELENICTIPGVGILTAVIVIAETNGFELIRNKKQITSYAGLDVKEKQSGTSIRSKPRISKKGNRNLRKAMHLPSLSAVKYNKNHKELYVRLIAKSGIKMKGLIAVQRKLLELIYIVYKNKKGFIQNYEQQKRATPLEMETAL

SEQ ID NO: 352375 - protein, 324 aa, unidentified
MSTIGIDVSKAKLDCAWLKEDEKIKTKAVDNAKAGWKELIEWSLKNTGLPIEQLHFVMEATGIYHQRLATYLFDAGAKVSVVNPAQVKFYGQSLGVRTKNDKKDSVVLARYGFKENPKLWQPEALEVRDLKALVTRLDGIEKDLQREKNRQEKALCGETPQAVLDSINNMIELFETEQKSLEKLIKEHIDKHKKLKEDKVLLETIPGVGDVISTRMLMVINSREFTKASQCAAYLGLVPVQHESGSSVKGRVRLSKARNPAIRAKLYLPAVVAAHYNPDVKALYERLLSRGKSKMSALGAAMRKLVQICFGVLKHQKTYQPQTG

SEQ ID NO: 352376 - protein, 500 aa, unidentified
MILPPHDGSRNKLSRKTREKALARGVGKKKRKKGPDHSGRPKGRPKVAGRGGHPIAAPASVEQLDQVNRNAAGIDLGATVHFVAVPPGRDPEGDVRYFETFTADLEALADWLTRCGIETVAMESTGVYWIPLYELLEQRGFEVLLINPADFKKFRRKTDVSDCQWLQTLHTFGLLQGSFRPAEKIVTLRAYLRHRDNLVKCATDEVRRMQKALEQMNVKLTHVISDITGVTGMAIIRAILAGERNPQRLAQLRQAGCKNDVATIALALQGNWRDEHLFALRQGLELYEVYLQKLAQLDEQIGAYLQTFEDRSGGEELPAQRRKRALEPGLDLPNLLHKLTGVDLTEVDGIGGNAALQIVGEIGTDMTKWETDKHFVSWLCLCPELHLSGGSRKSQGSRTQRSKNRVAAVFRMCAQSLLQADCALGAFGRRLRAKKGGPHAVTAVARKLAIIVYHMLKEGRPYKDQGAAYYEEKYRQRVVANLRRRARELGLDLIPAALPA

SEQ ID NO: 352377 - protein, 481 aa, unidentified
MAQENKHKKTRRPKAKGPSRRKQHKGMCLEDRPALEPNAAGIDIGAREIYVAVPPDRDPHPVRVFHTFTEDLQAMAQWLKRCGITTAAMESTGVYWIPLYDVLEAHRIEPCLTHARHMKNVPGRRTDWHECQWLQYLHSVGLLRAAFRPDAEVCAVRAVLRQRQELVEMAGQHVQHMQKALTQMNLQIQHVISDITGTTGLAIIDAILDGERSPTVLARLRDPRIQASAETIQKSLVGTWQPEHLFVLRQSRLLFRTYQQEIVKCDQEIERRIGTFPPRVDPQQKPLPPDHKRHRNAQKKRKKQGRSENEFDLRTEAYKLFGVDATQVPGLEMSVLPLFSEVGRDLSHKWPTSAHFASWLGLCPDNDISGGRVLWKGTRRIQTRAGQIFRMAAYALHRSPTPLGSYLRRMKSKLGPRAATTATAHKIAVIFYTIVTKQVEYNESIWAQRDLHREKRLADKIKRQAQQLGYKLVPLEEKPAA

SEQ ID NO: 352378 - protein, 360 aa, unidentified
MRIIGCDLHARQQSVAMFDSETGEVVNRTLMHEGNEVREFYSRLPRPVLVGIEAIGPMQWFLKLLDELGIECQVGDATKIRAAEPRKQKHDRRDAELILKLLVENRFPAIWKPSQELLDLRALLLHRHHWVRLRTQIQNALQAIALAHGLRRGPSLWSYDGQAKIAFLPLPPHASYRRSMLQALYRKMEEEIEQLTAQVAEQAEQRSGARLLLTHPGVGPVTALATDVFLGDPQRFADGKALASYVGLIPREYSSGARQRLGALTKQGSPLLRFLWNEAAAHAVRRDPELQRFYRRKLVQKGLGKARVAAARKLGIRLWIMLRDQIDYQEFCRRGQKQSGAACAGMLDVANGVNRHRPVD

SEQ ID NO: 352379 - protein, 323 aa, unidentified
MDGYGGIDVSKDRLDVLLLHGEQRMGQQFTNSATGFSKLDGWLKRRLQPGQVHICLEATGPYGEAVAEYLFAQGYTVSVVNPARIKGYAESQMQRNKTDKLDAALIADFCRTQHPAVWMPPSPEIRQLQHLVRHLDDLTEARQQAKNRLGLPGQSQPVTDHLHAQIAFFDQQLRETKQAITDLLDHSPDLKQQKDLLLSIPGLGELTIGKLIAECRDLHAFRDVRQLVAFAGLNPRQHVSGSSIHWKSSISRTGSASLRAALYMPALTAMRYNPLLRAFAQRLSARGLTGKAVVVAVMRKLLHLVFGVLKSGQPFDANWSTAS

SEQ ID NO: 352380 - protein, 406 aa, unidentified
MNYLGIDVSKSTSRYVLLDNDGEKAAKPFTLDNNQQAFAKLLERIQELNLQPDGLLIGIEATGIWWENLYCFMTEQKFKVIVLNPHQTNKFREALRLKAKTDDIDAYVIAGLLRSGEYAASYIPEETIQILREIVKLRHQLVTNRQSFERQAHALLGLLFPEYEKTAIKNPFSVASLAILKDYPTAKHLAEAKPKNIEKIVRHIQGNNFNIAEIQTLIATAKNSIYSGRAKDARGMNLNILLTHVETLHHSIAQLDQRIDDILSPQNSDDANSFPGANLLSIPGVGPKTLAAILSVVGADGSAYPDGKSFIGYIGFFPKIYESGETRRDNIISKRGPNYIRRALYIAAVACLKHNPELKALYNRKISQGKKPKQALICVAKKLAHLCLSMLQSGESYNPSRVFMPT

SEQ ID NO: 352381 - protein, 338 aa, unidentified
MEYGAIDLHRRNSLIRIVTEDGGVVLDRTITTSHEGFQRMFEGRASMRVLVESGTESEWVAQVIERCGHEVIVADPNYALMYGSRHRAVKTDRRDVAALAEACRLGIYRSAHRVSAAQRAERRRLRVREQLIRVRTQAINLLRAQLRQEGYRLPSGSSATVVPRLERLRVADPVAADLEPLRALLNELTPLIRRAEQAADRRAAADAVVGRLMSAPGVGPIVGLTYRAVLDDVARFHDANAVTAFVGLVPREDSSGSRRRKGTITKRGPNSLRVLLIQAAWVIWRQRRGRAALHAWVERLAARRGRRVAVVALARRLARILYALWRDECDYQAAPVPA

SEQ ID NO: 352382 - protein, 339 aa, unidentified
MNYVGADLHKKTITLCVMDQNRKILGRKTLSCVDPDSILEYLRAFQPFEIVVEATASYLWFAELVRPLAQRVVLANPSKLRVIAESTKKTDRLDAQTLAEFLARDMIPEAHLPSPRQRQHRVLVRQRHYLRGRTTSVKNKIRRILGDYNADRKDLFSAELGLTYIQQVPLSDADRFVIHQLWAEYLYHDQQIRDLNAHIKAFAAKAPVREKEAREILNTIPYVGPVTIEVVVSELGEVQRFRNSKAATAYSGLVPAVRQTGGKKSKDLSITKEGSGLLRWALVEAAWRLVGHSQRWKQVYERIKKRSGAKRAIVAVARKLMCVIYAMLKTMTPYKVITP

SEQ ID NO: 352383 - protein, 386 aa, unidentified
MQKLNDLSRSLTALEPDGTLIAVIEMSLSSWLVAGMVPGVERQPLKKLAVDESALLKLLHRWREEAEKAGRRIDRIAVAFEAGRDGFWLARWLKARGIEAYVIHASSVAVSREHRRAKTDRLDTELLKRSFLGWLRGERDHCKMVEIPTMKDEDAKRPNREHDSLIGERSRIVNRMKAALVRLGIRGFNPKLKRATTRLDGLRTPEGEPIPPNALAELRRDMERRRLVNNQIRQIEEERLERIEQAPCDGPHVMVRLLARVMGIGIETADMLVHEVLSRNLRDRRAVARYAGLTGSPDESGRKRREKGLARSGNVRVRRGMIQLAWRFLLHQKNSALTKWFRSRTENARGTRKPMIVALARKLLIALWRLVREGIVPDGVVLRAAQ

SEQ ID NO: 352384 - protein, 366 aa, unidentified
MASEYVGIDLHRRRSVIVRLTPDGEVLEQVRIDNDPVALALEIAQAGPNPDAVLEATYGWYWAVDVLEASGAHVRLAHPLAIKAYAHRRVKNDSIDARTLADLARMNRVPEAWIAPPEIRELRELVRYRAKLVALRSGLKAQVHSVLAKHGVRVPMTDLFGLAGNRLLDELSFPAPYAMRISSLRELIGIYHSQVARFDAEIRTLLAEHPGYRAIQAVPGVGPILGAVFVAEIGDVTRFSSAPQVCSWAGLTPRHRESDTVVHRGAITKQGPRLVRWAAVEAVQKLRTSTKQHRDFRRIARRRGKNIARVAVARKLLTLVYYGLRDEEVRCLPRPKEAARPASGSSQGARSRSRMTPDPRRGRHGD

SEQ ID NO: 352385 - protein, 418 aa, unidentified
MRAVGLDVHRDFCEVALVEDGALRSAGRIETRPEALELFAESLDVRDQVALEVTGNAWEIARILEPHVARVIVVSPSDTGIRQARAKTDRLDARALAKLLAAGSLDAVWMPDERVRAMRRRLARRAQLVRARTRAKNEIHAVLVRRLKGKPPVSDLFGVKGRRWLQELELPLEERETADAALRQVEFLDAEVAAVEALIAAEALSWPEVKRLMTVPGVNVIVAATFMAAVGDVARFPDRRKLTGYLGLDPRVRQSGTGPASHGRISKQGSSSARHALVEASWSTVRQPGPIAGFYVRIKARRGHQVAIVAAARKLACLFWCLLTRGEDYAFAQPSLTKKKMRRLELQAGAPRERGRSGVWSTNEAMRDAERELALQAQRAYERTASDWQAKRPAKAGVGATTGRASSGSSKDQVARQT

SEQ ID NO: 352386 - protein, 339 aa, unidentified
MDTIRFLAIDLAKNVFQVHGVDAAGKLVLRRRVGRAQLTELVLRLAPCTIGMEACSSAHHWARQFLQQGHTVKLISPQFVKPFVKGNKTDGNDAEAICEALQRPSIRFVPIKSVEQQDVQSLHRARSRLVSNRTGLVSQMRGILAERGIVFAQSITRARREIPVIVADTSNALTPLAREMLADLMDQLRELDRRIAGFDRRIDLVFKASETCQRIAQIEGVGPKTATAIVAAVSDPKDFRNGRHFAAWLGLVPRQSSSGDRTHLLGISKRGDRHLRTLLIHGARAVLRTALTKHDKKHAWALALKARRGANRAIVAIANKMARVIWSMLATGQSYQKAG

SEQ ID NO: 352387 - protein, 438 aa, unidentified
MSNKVIFNLDDLFISVGIDVGADFSWMSIALPNQQFVGKPYKILHSSIDSLTTAVSKIKEAEELYSLESRIFLESTGIYHYPLFCYLRDKGFNCSVINPIITKNSTNINIRKVHNDRFDSKKAALVGLKPDLKVSLMPSDLALNCRNLCREYYDLMDNRSAYVNKLQGELRMAFPQYLSIFSKVTINTSLTLLETYTSPSAFLEADKQEIINIIKSTARFGLTYAQNKYNAIIQAATDANQFGYIIDSNIKRIRLYISFIRKYDEEINNILESLHELVDANEDADFVKQIHLIETFKGAGFLSAVSIMGEIGDFSAFSKPKQLFAYFGLDPAVKQSGKFEGTKVQMSKRGSAIARRVIHTLTLQSISISRNGEAKNPVLREYYLKKCDSKPKLVAMGAVSHKVCNMIFAILRDNKSFEIITPQEHIKQYNASKCDMAA

SEQ ID NO: 352388 - protein, 399 aa, unidentified
MRYVGWDWASRTHDVTVLDEQGAVLERWAFPHTEAGWITTLHRLRRHGEPDDLPVIIEKSSGLVVDRLLGARHPVVPVHPTSFYAARPRWGASGAKSDPGDSYKLADYLRTDGHRLRRLEPTEPRLRELQALVRQRDDHVRTRTAAINQLVATLEAHWPGPRDLFCSLASPIALAFLTDYPTPQAAARMGEARMAAFCRRHSYRGTKTPAQLLARLRTAPTAPVGLPAATLASMIGVQIALLRALQSGIAQIEALITERVTSHPKAQLLAQLPGVGTINLAQLLAELGPILDRVDTAEQAATECGAAPVTKASGKTTTVHFRHAVNTRARKAITAYAHNARQQSPWAAQLYADARARGKRNPHAVRIVARAWIRVIWACWHTGTPYDPAIHQARHHPAA

SEQ ID NO: 352389 - protein, 322 aa, unidentified
MSSSYLGCDVSKRKIQLALLLPNGKFRTKAISNDSKGFQALSEWLAFHKVEVLHVCMEATNTYWEALAEYLNDQSYVVSVVNPARIKAFAQSTLTRTKTDPVDARLIARFCSLHRPEPWQAPPREVRELYALVARRQALIEMHTQEKSRLDTANPAIKPDLKAHLDYLNKAIAEIEQAIRDHFDNHPGLKRQKTLLESIPGIGEVISSILLAFLGGPQRFRRASQVVAFAGLDPRHIQSGSRIEGKPRMSKTGHRFLRRALYFPAVVTLYRTEWGKHFRQRLSARGKPPKLIIGAMMRKLLHVAFGVLKSGKPFDPSLHQLA

SEQ ID NO: 352390 - protein, 341 aa, unidentified
MKNKSFIGIDISKNVIDASIFTEGASIKDFPHAVFNNSRKGFGEMCTWLKKNHVVLSNCLFGMEFTGSYSMELEKFLYARNYQFCMLSTHVVKHYPMGSKDKSDKIDSAKIADFLYRYNGTECVKPYKMPDKTMQRLKTLMNERKFLVEQRTCFMNRRQLCTTKEDTQLYDGYIKKLSRDIENIELEEQKLLATDESLLTTYRNLLTIPGIGSVNAINVIVITRNFTAFETARQYASYVGVAPHFRTSGTSVRWRPRPSARCDGQAKADLSMAALITVQYDAELQSFYNRKLGGKQDSDTKRKALNAVKFKLILRMFAIGKQNRKWETLDSMSNNEILAIS

SEQ ID NO: 352391 - protein, 342 aa, unidentified
MKLIKKVTGIDISKDSFTVCFGTLDDTLNQKISKSFTFENNKKGFKTLIKSVNNIDVFRSEDKTIPLWFVVEATGVYYENLAYFLAENNFSVSVVLPNKIKHFFKTLKNKSKTDSLDAEGITQYGLQSQLEQWKAPSPIFKELKELTRELDSVTTMMVQIKNKLHAKEHSHNANEKTIQRLNQQISFFIKQQKLIEQQIKDLVKSDSGLDERIKKIITAEGVGFKTAVRVVAETNGFELIQNERQLTSYAGYDPQQNTSGIFKGKTPISKKGNKFLRNAVYLPALAAVRCNEHLKAVYKRLCISKNNKKIALVAVARKLLILIYTLWKKNEPFNNKYQHATC

SEQ ID NO: 352392 - protein, 354 aa, unidentified
MSQTQNAAIAVVGIDIGKNSFHIVGHDERGAIVLRQKWSRGQVEARFANMSPCLVGMEACVGAHHLSRKLNSLGHNARLMPAKYVRPYSRGQKNDFRDAEAIAEAVQRPTMKFVATKTADQLDLQALHRVRERLVSQRTGIINQIRAFLLERGIAVRQGQRFLRAELPRILATPPDVLSPRMVRMIEDLAGDWRRLDERVESLSNEIETIARQDAGCERLMSVPGIGPIISSAMVAAIGAGDVFTKGRDFAAWLGLVPKQISTGDRTILGKVSRRGNRYLRVLFVQAAWVVLIKPKIWERHGLKPWLEAARKRLHHNVLAIALANKLARIAWSVLAHGRAFEARKIDQAANQSA

SEQ ID NO: 352393 - protein, 455 aa, unidentified
MPRKSAKASFDLTRHIQGAAAIDIGSRMHMAAVSPEAAKDPIRSFGTFTSDLHALAEWFKECKVTSVAMESTGVYWIPVYEILEQHGFDVILVNARYAKNVPGRKTDVSDAGWLQQLHSYGLLRGSFRPQADIAALRAYLRQRERLVEYAAGHIQHMQKALMEMNLQLHHVVSDITGVTGMQIIRAIVGGERDPETLAAKRDVRCRSSAEVISAALMGNYRDEHVFALTQALELYDIYQERIMACDRRMEGLLLLLSHGSAKPAADLPKPRIKTKQVSAPSFDVRGILYRLLGVDLTQIHGIGVSLALKLVAECGTDLRAWPSAKHFTSWLCLAPGNKISGGKLLSSRTRRSSSRAAALLRLAATTLGRSDTALGAFYRRLSARVGKAKAVTATARKIAVLFYNTLRYGMVYADPGAGHYDEIHRKRVVSNLHRRAQSLGFVLHPIPVATEPAVS

SEQ ID NO: 352394 - protein, 334 aa, unidentified
MLDTETGELVERRLEHESGEARSFYAALSGPVRVGIEATGHTHWFEAMLAEFGHELWMGDAAKIRAAVVRKQKTDARDAAHLLDMLSSGRFPKIWRPLPGERDLRQLLWHRQKLVWMRGAVKNQMHALAMGEGVCRKKKLFTAKGRKEFEALVLGPWASYRRQELLRMFDELQSSVARLDQAVELAAKNQPLAVRLMTHPGVGPVTSLAFVLIIGPIDRFERSKQVVSYLGLNPQEHSSGGRQRLGSISKQGNPMMRSLLVEAGHTAARFDPQLKRVYQRLKFRRGASVAKVAVARKLAVRMYWMLRDTADYAQLVRMQGSPWATLVENSSSLG

SEQ ID NO: 352395 - protein, 400 aa, unidentified
MISVGIDVSKGKSTVCILKPYGEIVSKPFNITHTQKDLSELSSMLFRLNDEVKIVMEATGIYHLPVLTYLQEKGFFVSVINPYLMKSYRNESLRKAKTDKIDSRIIANYGIDHWFKMKEFQTSGEIYKELKLLGQQYRHYMKLHLLSLAELTHLLDLTMPGIKNLLASWNETNRKDKRSDFVERFWHYDVITSMSEQEFTEEYILWAKEKKYVPSQEKAKVIYALAQESIPTLPSETSSIKMLVTEAVRVLKEVDATLGLILSRMQEIAKTLPEYSVVREMGGVGNTLAPKLIAEIGDVRRFRNGKALVAFAGIDPPPYESGQFVGCNRKISKRGSASLRKVGYETMRSLKMRSRPEDPVYRYVVKKESEGKSKKSAKIAGLNKFLRIYYARVTELYKNI

SEQ ID NO: 352396 - protein, 344 aa, unidentified
MSEVITIGVDLAKNVFQVHGIDNSGEVVVRRQLRRSQMLPFFNKTPPCLIGMEACATAHHWARQLIGLGHEVRLMPPRYVKPYVKRNKNDAADAEAICEAVTRPTMRFVSVKSVEQQGILMVHRSRELLVRQRTMVINAVRAHMAEFGVIAPVGVPQVKKLLNIIADTDDDRLPDTARTCLEGLARQLFSLQDEIRALEMRIHAWHRSNEVSQRLETIPGIGPITASALTASIANPAVFRNGRELAAWIGLVPKQSSTGGKDRLGRISKQGDQYLRWLLVAGAMSVIRQAQRRGAAKTPWLTNMIATKPTKMAAVALANKTARIAWVLLSHGGTYQEPELATAA

SEQ ID NO: 352397 - protein, 436 aa, unidentified
MIVREHLTIRAWWISRGLPVLLPERGEAWVLFVGDDWAEDHHDVEVQDATGRRLAKARLPEGLAGITRLHELVGAHLAEDAGPDQVVVGIETDRGPWVSALVAAGYQVIAVNPVQAARYRERYSTSGAKSDAGDAHALADMVRTDRHQLRPVAGDSDLADAVKIVARSHQTLVWDRTRQVQRLRAALVESFPATLAAFDDLDAADTLELLGKAPTPAAARRLTVAQLSAALKRARRRDIAEKSRKIRAAFQAAQPPVRPATAAAYGAVVRAQVGLIGTLNAEIDRLGEQVEAHFGQHPDAEIYRSQPGLGTVLAARVLAEFGDDPKRYAHAKARKNYAGTSPITRASGKKTVVMARYARNDRLADALHQQAFCALNASPGARAYYDTLRARGTGHHAALRQLANRLVGILHGCLKTRTPYNEATAWPQTVTLDAAA

SEQ ID NO: 352398 - protein, 343 aa, unidentified
MNEVITIGVDLAKNVFQIHGIDAEGGVVIRRQLKRGQMMPFFKKQPPCLVGMEACATSHHWARQLIGLGHEVKLMAPRYVKPYVKRNKNDMADAEAICEAVTRPTMRFVEVKTPEQQSVLMLHRTRQLFVRQRTTLINALRAHLAEFGIVAGVGRNGLEKLLQVIEEGEDDRVPPTARDCLLALRDQLEMVKHQILGADRRILDWHRGSEVSRRLDDIPGVGPLIATALVASVPDPHIFKSGRDLSAWIGLVPKQNSTGGKERLGHISKAGNRYLRTMLVVGALSVIRRAKQVGYTKRPWLTKLLERRSTKIAAIALANKNARTAWAMMAHGTFYEEPVLKEV

SEQ ID NO: 352399 - protein, 409 aa, unidentified
MRLFAGDDWAEDHHDVELMDERGRVLARARLPEGVAGMARLHELIGEQLGEDADDAEVVIGTETDRGPWVAALVAAGYTVYGVNPLQASRYRERHGVSGAKSDRGDAHMLTDMVRTDSHQLRAVAGDSPGAGAVKVVARTHKTLIWERTRQVQRLRHQLREYFPAALEAFDDLDAPDALDLLGKAPDPAKAAKLTRAQISAALKRARRRDIPGKATAILAALRSAQLGQPPAVTAAYAVTVRSLVAVITVLNEQVKTLQRQVEADFGRHPDAEIYLSQPGLGPVLGARVLGEFGDDPHRYASGKARKNYAGTSPLTRASGKKKMVMARFIRNDRLIDALMAQALSALGSSPGARAFYDAQRADGAEHNAALRKLANRLVGILHGCLRSHTPYDEHLAWHTEPDNLSPAA

SEQ ID NO: 352400 - protein, 328 aa, unidentified
MEREYIGIDLHKASFQVCALTSTGARQWEQRWPTTDAGIAGLLARCGAQSRVAVEASSPTWAFVDRIVDHVGAVHVVDARKTRLKAGYAAKTDRLDAQRLADALRRDSVVGIYYPPPTIRDVRELCRYRSHLARLQASLKQRIQALLLRQGVQVPIKGLFTARGSMWLAALTLPGWAGASLTGLRQVVTDVRAQRVPVLAELRTIAATDPIACALDARPGFGPVFSVTLRAEIGTMTRFPDGPHLASYAGLVPRVERSAGRSWSGRITKAGSPWMRWALIEAAIHQFRRQDNFGRWARHLAIRKGMLKARVGVARALCDELFDAWPRA

SEQ ID NO: 352401 - protein, 392 aa, unidentified
MFYIGIDVSKDKHDCFCCNDNLQPVFQFQFNNDSIGFNQLFEAIKSLDSPFDNIKIALEATGHYSYNITSFILDNSLPLAIINPLHSNLFRKSLSLRKTKTDKVDACVLARMLIAYPDLKFSTSLDDNDIILSELKSLTRFRLSLVKDLSKLKTSLSRIINIVFPEIEKVFSSTNSLYELLYNFPSAKEIANAHLTKLTNVLIKASKGHFSKEKAVQIKELAQNTVGNSSYALTLELKHTIKLINEYNSSIDKIDKEITAIMDKIASPITSIPGIGITLASIIIAEIGNFDNFDSPDKILAFAGMSPTIYQSGKYVASSAKMEKRGSKALRYALYNAARLTSIYCPVFKEHLARKRSQGKHFSVAISHVVKKLVRVIYHLQTKNELFKNIIN

SEQ ID NO: 352402 - protein, 342 aa, unidentified
MDEYDGRQFVGIDLHRQRSVIVRQSESGEQLSAVRIVNDPVALELQLEEAGADPEVVLEATYGWYWAVDVLQARGARVHLAHPLGVKGFRYRRVKNDVRDAADLADLLRMGRLPEAWIAPPQTRELRELVRYRAKLVAIRSGFKAQIHAVLAKAGVLIAVSDVFGVTGRQRLGKVPLRPAYAQRIRSLLELIDILDSHEARFAAMIAERLNTDRGYQAIQHVPGIGPTLAAVFVAEIGDVHRFTDPAHLCSWAGLTPRHRESDTVVHRGHITKQGSKAVRWAAIEAIQHQPDTTKIALDRNRIEARRGRNIAKVAAARKLLTLVYYGLRDGQIRALDRARAA

SEQ ID NO: 352403 - protein, 414 aa, unidentified
MPNTLIVGIDISSQSNSIFFVDDAGNHLIKKPFSLPNDQQGANELIQRVINCLNQYNLSFVKFGMEATSHYTWHLHLHLASSSELLPYKPTFYVLNPSIVKGFKKIYTFLPKTDNIDAIIIAECVRFSKLNPTPLPDFKYAALQRLTRMRYHLVHNLTREKNRALNLIYLKFSTYSQDCPFSDIFGKASVAIIENFTPDDIASMPLEDLIKFVSHNGNNRLSDVNKIAEILKTAANRAFRLHPLLAEANDLALSMTLENIRFMQEQLKKLDKEISKLLKAFSQTLTTIPGIGDVLAAGIIAEIGDIKRFKNEAALAKYSGLVWTQYQSGNFNAQDVSLVKCGNQYLRYYLVEAANCVRVHTVRYKAFYNKKFSEVTKHQHKRALVLTARRLIPLIFAMLSKGQIYEERGDVYNT

SEQ ID NO: 352404 - protein, 338 aa, unidentified
MSAIKVIGIDLGKSTFHLVGHDYSGREQYRHKLSRSKLLQFISVHEPTLIAMEACCGAHWLARKCQEYGHQVKLIPPQYVKPYVKAHKNDFIDAAAIAEASTRPNMRFVSPKSEQAQVGVVIRRVRTGYIRERTATMNRIGSMLIEFGISFPRGHANMKKLFQWLADNKEPIPPLLVQELQNQLDYYNQLNERIKEQDRKIEKLSSEDELYTLLQTIPGVGPMTASCCLSCVGKPSDFSNGRNFAAWIGLVPFQYSTGGKQWMLGISKRGNKELRELFVHAARAVMWREETAERYFGSWLLDLKRRKPFNVALVALANKLARIAWSVMTSHKPFELRV

SEQ ID NO: 352405 - protein, 345 aa, unidentified
MRKLIAGMDLHSNNVVIGLMDMDGKRVAHQKVECRLSEVVKFLAPYKKRLEQVAVESTYNWYWLVDGLQALRYPVVLANPAGMEQYSGIKHADDTNDAFFLAELLRLKILPTGYIYDRHLRPVRDLLRRRLTLVHQRTALMLSFKSLYTRTTGQEMTLSRLKELEIKEAQDLYDHPANQLIAGMQIKHIEQLTESIEKVEKVVLDCARELPFYSKLTTLPGVGKILGMTITMEVGDIKRFAEPGNFASYCRTVEAQRTSNSKKKGENNSKCGNKYLAWAFVEGANFARRYDAQCRRWYDRKVAKTSNVIATKALACKLAKAAWHAMAEDTDYDSQRMFGQAASTE

SEQ ID NO: 352406 - protein, 347 aa, unidentified
MGIVVALDVHRNQITYKLLDRDTGEVRRGRVAPAARVDVRTWLAQFAGHEVEFALEGTTGWRFVVEEIERAGYRAHLADPAETAAKRGRKRRAKTDSADCDLQLRLLLAGELPESWIPPAHILELRARVRMRKTLIDQRTAWLQRVQAQLFQQGVPAGLRLRSEVGRQALAAADLSPAGRELVELGLRMIDALDQELVPLTRELGVFARRQAGCRALIARLYGVGPVSATAILAELGDARRFSSSDDAVRHAGLDVTVHQSDSKRAPGHLSHQGPEVLRWALFEAALSGARVGSPDHGYYLQVAERIDHTRACLSLARKLCRRAYHVLRELGDEALAPVEEAIAAAA

SEQ ID NO: 352407 - protein, 385 aa, unidentified
MNILAIDLGKFNSMCCFYDTDTQKYRFQAVATTRPYLTAVFTHHKIDLVVMEACGPSGWINDLCQEFGLKTLVCSTNDEAWRWKNVKRKTDKDDALKLSRMAMMRQLTPVHVPSHTVREHRTLIKYRKKLVGRINQIKNSIRGLFACRGIEIDRGQPAWRTGRELINSHRKSLVECSLEELWRGQLDAELTQLDSLADQLADVERRLDVIANEDERIQRVRTIPGVGRKTAEVIVTALDDVDRFENARQVSSYIGLVPRQYQSGETDRNGRITKRGSRLLRTMLVECAWLSLRYNEWSRTTYDRIHGGQKTRKKKAAIALARKIAVVAWSMLKHKTDWDPERAGIVAKEPAKEGPTRDTNQGRCDRVTHTDASSVGQVAESSMTS

SEQ ID NO: 352408 - protein, 408 aa, unidentified
MVLFIGDDWAEDHHDVELMDSAGRRLARARLPEGVIGIGRFHALVAEHLGDDDGPGEVTVGIETDRGPWVAALIAAGYVVYAVNPLQAARYRDRHAVSGAKSDPADAHVLADMVRTDSHQLRPVAPDSEAAEALKVVARAHKTLIWDRTRQVQRLRHALREYFPAALEAFDDLTAADTLELLGKAPEPVAAARLSLKQIRAALSRARRRDVDAKAARIRDVLRGEHLRRDAVIDTAYAATTRASISVLITLCKQIAELQGQVEAHFGKHPDAEIVLSQPGMGVILGARVLAEFGDAHDRYTSAKARKNYAGTSPITRASGKKKIVAARFVHNDRLIDALLRQAFSALTVSAGARAYYDHHRARGLDHHPALRQLANRLVGILHGCLKTKTTYDETTAWSPHVTDTAAA

SEQ ID NO: 352409 - protein, 384 aa, unidentified
MDVHTSNYTLCSLDPGYGVEKDNYFAEVQFTNDFIKNVVNYVTNLKKKLKDCEFVCGYEAGCLGYSTYKDLTKVGIKCVLMAPSTMAVQKGGKKVKNDRRDARVIAQCLAYQTYKEVYVLSEHDEAVRGYLRMRDSHNKALKRIKQQIIAFCTGHGLFSPTKSNWTVAHLKWLKDLKFNDPVEQEILNEYLSSLTFLSDKIKAMDVRIEELASEKQYLENVKKLRCIKGIETNVALTLLAEIWDFNRFSKPTDFASYLGLIPGEQSSGDKVRGTGITKAGNSTLRRKLTESAKGYWRGRIGIKSATFKKLEKELPKEVTEYALKANTRLQRKFFNMTHVKGKNMNVAASACAREMACFVWGLITNHYDKAPAVPKTDEELLDLN

SEQ ID NO: 352410 - protein, 316 aa, unidentified
MNTATNQNINVGVDTGKSQLDIYIRPLDIFFSVSNDDKGIKQAIKTIKQHSPQRVVIEATGRLEMPFIIACADANISYVIANPVHVKRFAGAIGQRAKTDKLDAKLIAHYAEAIKPALTRLKPESMRLMADLVSRRNQLLSMQTMEKNRLQIMPKQLAMTIKPILTAFKNQIEKTEKKIVALIESCPEYQAKNDILQSMPGIGKIAAASIISNLPELGYITNKQAAALVGVAPMNRESGRYKGLRKIQGGRAQVRTVLYMAMMSAMQCNPVFKSTYQRLLAEGKPKKVAIIACVRKMINILNSMLRDGALWDAKTA

SEQ ID NO: 352411 - protein, 457 aa, unidentified
MAKRRRKAKPVRMSAPVVRDDAAGVDISPAMMYVAVGPDRDNEPVRCFGSFTCDLYSIAEWLQRCGVRTVAMESTGVYWIPLYQVLEDQGFEVCLVNARHFKNVPGRKTDVSDCQWLQYLHSVGLLRASFRPPQEVCAMRTLWRHRRGLVEAASKHIQHMQKSLDQMNVQLHHVLSDLTGVSGMAIVDAILAGERNPRKLAGLRNKKVKASEEKIVKALEGDYREEHLFTLAQSLEAYRYDQKQIAECDAEIQRRMEAFDGNEDLESPPEPPVTGSGGRSKKGVFDLRMHHHRIFGVDLTQIPSINTGTIQVVLSEIGVDFRKFPNASQFASWMALCPNNDTSGGKLLRSRTKKSANRVAQALRMAAESLCRDKSYLGIYYRRKRAQLGPPQAITAAAHKLARVIYTMVTTSQEYDESVFDKAEKRERERAHIRLQRQARHFGYELVPNGAASGIVS

SEQ ID NO: 352412 - protein, 403 aa, unidentified
MIFAGVDWAEAHHDVCVMSQDGQVLEQHRVSHTVAGIGELHALIAAHAADGEPVAVGIEVDRGLVVTALLAAGYQVFAVNPLASARYRDRHSTSGAKSDRGDAKVLADLVRTDRHNHRQVAGDTDLAEAVKILARAHQSAVWARQRQVNALRSALREYYPAALAVFGTGLTDRDALAVLPIAPDPASGRTLSRSKIAAALRRAGRQRNIDQRAGEIQAALRGDYLQAPATVSGAYAVAARSAIRLISAYTAEIGELEEALSEHFDQHPDAKIVRSLPGLGTILGARVLGEFGDDRTRFASPQSRKNYAGTSPITRASGRSRIVLARYARNRRLADALQQWAFCSLTLSPGARAYYDQLRGRGKTHHQALRQLANRWTGILHTCLQRGQLYDENIAWTARAIAA

SEQ ID NO: 352413 - protein, 343 aa, unidentified
MGRKIGVDLHKNSFRVCYYQNDEKYDFETYHVSVKGLEHFKKGLKKTDELAVESTGNTGHFVRSIEGAVKRIRVINPMQFKVISQSVKKTDDEDALKIAKFLSKDLIPEVRMKTKQEGQLSSLIGTRDKFVKLRTALKNKVHNILNANGIVTKTELLTSDKSLDKVLGNKLDEACLFELEIIVNEIRNLNEAIKKIDGQVKERGQKLDGYKGVTSITGIGDMSGTILLNTIGDVKYFRDEKALASYFGIVPRIHSSNETTHMGRITKMGNKIARTALVQSTLIAIRYSPYLRAFYDRLKAKKGSGKAIIATARKLLGIVYNTLKNNWVFEDFSKFKLAPQGAY

SEQ ID NO: 352414 - protein, 409 aa, unidentified
MRLLFVGDDWAEEHHDVELQNETGRVLGRAKLPEGVAGIARLHAMIGEHLGEDDDATVVVGIETERGPWVQALIAAGYQIYAINPLQVARYRERHSVSGAKSDAGDAHVLADMVRTDRHQLRPVAGDSVEAEAVKVLTRAHKTLIWERTRHLLRLRHALREFFPAALVAFDDLTAVDTLELLGAAPDPASAAALSTERITEALKRARRHGRAAKAEAIATALRAEHLGQPAVVTAAYAATVRAQVAILGTLNTEIKTMQEQVEAHFGQHPDAEIYLSQPGLGVVLGARVLAEFGDDKDRYADARARKNYAGTSPITRQSGKRKTVLARHVHNDRLIDALGLQAFAALRASPGARAYYDQLRGRGIGHRAALRQLGNRLVGILHGCLKTSTSYHEDKAWTPIQQDRQLAA

SEQ ID NO: 352415 - protein, 389 aa, unidentified
MFYVGIDVASEKHDCCILNEKKKIIRSFSFLNSPVGFQSLLSALSGIQPDEIKIGLEATGIYSENLSVFLRRKGFNVTTINPLLLKKHQCATTLRKTKTDKADAKGIALFIAEEGFQPDLPVSYHIQELKSLTRARFSFVQDRSALKNKVKRLVVLLFPELLEQFSDIFGASATALLKQYPSAEKLAACHTDALAALLRKSSRGRFGRAKAAYLKQLAKCSIGNHSPARVMELKMLLARIDLLSEQIKDYDKQIKIIMDELDSPVPTIPGIGYTLGATIIAEIGNISRFSSPAKLLAFAGLEPSIYQSGKFVPASGRMVKRGSPFLRWALLQAAGYVPNYSSTFALYREKKLSEGKSAAVARSHVAKKLVRIIHSLMTHSTAFSDQLTS

SEQ ID NO: 352416 - protein, 349 aa, unidentified
MVVLGIDAHKRTHTVVAIDEAGRELGTMTTRATTTEANLELVRWADQFGPDRRFAVEDCRHLSRKLEGDLLGAGEMLVRVPPKLMAHARDAARTYGKSDPIDALAVARAALREPNLPVARLDGPSRDLRLLVDHREDLVKDRTGQINRLRWHLHELDPAWDPAPRVLVRFKHLNEVAARLEGLETMVARIARDLVARVRELTETANALEREIVQAVAKLARSLLGLAGVGALTAAKLLAEVADVRRFHSKDAFARHNGTAPLPVWSANKVRHRLSRTGNRQLNAAIHRIAVTQMRIHDEAKAYLERRIAMGNTKTEAIRALKRKLSDVVYRRLLTDAEAADVAFLGEAA

SEQ ID NO: 352417 - protein, 394 aa, unidentified
MALTGRACVNRSRNSGSDLHSAVPASACHPRPSEGKPEMASPILADSTRPVTGGVDTHKDTHVAAVIDHLGRELATRSFQTNTTGYQQLLDWMGTFGTIDRIGVEGTGSWGAALTRHLHTAGIDVTEINRVNRQHRRRHGKTDPADAIAAARACLAGLDVGTPKTGDGPVEAIRMLRIARRSGVQTRTRTMNQIRSLLDTAPTSIRDNYRHLTTRKLMVALARTRPNEQHIADTDVAATIALRNLARRWKFLTDQIVELDTQLENLVTATAPNLVAVHCVGVDSAAALLIAAGDNPQRLKSEAAFAALCGVNPIPASSGKTVRYRLNRAGNREANAALFVIVLARMSHDQRTRDYVARRTTEGRTKREIIRILKRYVARELYPILTADLNNLHT

SEQ ID NO: 352418 - protein, 419 aa, unidentified
MRNGNTKKVKRINEETLLVTIDMGKVKHTGYYRFPDGAEGKIFEFSSSRNGFEDLWQRVCHAKRSRNLTEIVVGFESTGPYAEPLLHFLRKRDVGLVQVNPFHTKRLKELQGNSPSKTDQKDPKVIADIIELGHALTVIIPEGAAAELRRLTQARERGIQRRSMLMSQVQDLVFLIFPEFMPVMKDITIKSTQYLLKHYPRPQDVVEAGVKLLTQSLKKVSRGKLGKQRAEALYQAAEGSVGLREGQESIVMEIKEIISAIENIERYVKELEKHMSKHLKDIPYSCFILSIKGIGEITTAGLIGEIGDFRGYHTISEVIKHAGLDLFEISSGKHKGKRRISKRGRPLLRKLLFFASINVVRKGGILHKQYLQHLDKGMPKVKALIAISRKLLSIIFALVRDHSVYIAQYSEIQQLKEAA

SEQ ID NO: 352419 - protein, 391 aa, unidentified
MNPCALGWDNHRKFSKVSVMEQTPDGEIRAIERARLEHDDKDAMRAWLSHLDPEMPVALEATFGWPWVADLLEELGHPVHLAHPPVIRALAKHEAKTDRCDSDRLGKFQLRGILPESYLAPPEVRQRRERTRYRMALSALRTAVKNRAQAVLHRHGILHDFSDLFGKAGRQFLGNLELPEGSRQALQGCLQLLDSLTLLIDEVEQWMVENLEEDDIVRLLMTLPGVGLILAHVIRAEIGEIERFPTFRHLASYGGLAPLSDDTAGREGPRHCSSACNHVLRWAFIEAVHGVQRTKGPHGFRLRWLYARLSGQGRPKGRKSSAIVAVAHELSKLVYVVWTKRVPYTDTPSPRPGSRQQRPEPKECPTAKTTLRSDQPHHPMVRRRATVGQTR

SEQ ID NO: 352420 - protein, 347 aa, unidentified
MELTPVGIDIAKNVFQVHYVDKTSGEIVNRQIKRAKFLEFFVNRSPCLIGMEACGGAHHWARQFIAMGHQVKLMPARFVKAFNIGNKSDAADARAIWLAVQQPSKPVAVKTEMQQAMLSLHRVRWQLVKIRTMQTNQLRGLLAEYGQVAGKGRASLIKAIPELLDRLSQRLPAALIDTLREQWAEIARIDQRIAVIERLMLECKKQDPAMQAISEIPGVGLLTATAAVATMGDARAFGSGREFAAWVGLVPRHSGTSGQIRLHGISKRGDTYLRTLLIHGARSVMANAKNPTPWLQGLKQRRAPNVVAVALANKMARTIWAVLAHGRAYQGQFVSVRPAQVAGPDIV

SEQ ID NO: 352421 - protein, 377 aa, unidentified
MKSIKFVGLDVHAETIAVAVAEQGGELRSLGVIPNREESIRKLVKKLGPVEQLRFCYEAGPTGYVVYWQLTKLGAKCEVVAPTLVPVKSGERVKTDRRDALKLARNYRAGELTAVWVPSAAHEALRDLVRAREAAKKDQLRAKHRLGKFLLRHGRRPPTGMKSWTLKYLSWVKQEVHFEQPAQEATLLDYLHEVEHAEARIARLELAVEEAVKSTPPEMKAVIEGLQALRGIAEVAAVTIVAELGEISRFSRARQLMGYGGIVACEHSSGESNWRGGITKTGNAHLRRVVVEAAWGYRHRPNVGVALRKRQELVSEEVREIAWKAQHRLYTRYRKLMARGKDKGKVITAIGRELLGFIWAIGVKVEAAQKVRERRAA

SEQ ID NO: 352422 - protein, 407 aa, unidentified
MKPKTNAPHEVRILPQIDKACGFDIHKDKIVLFISDKEGKNQLLIEKTTFTEDLLWIRDLLLKEEVKNCVMESTGVYWLSLFDVLSHSGMNVVVVNPQQVKQIPKRKTDRRDARWLCTLLLNGLVRPSFIASGVQRELRDLCRYRNKRIHEVNRIANWMVKELEKSNIKIRSVLSSITSKSGISMVRLLAAGEKDVAKLKSVCHKRIRDKGELLDKALQGTLSEHGCKMLQMHLEDYDYVQCRIELVNKQIEDLVNQHYSTVMEPLQSISGIASTAAQIIVSEIGDDMSRFPSAEHLTAWCGVAPGNNESADKKRNTGVKKGNKFLKTAMVGAAWAAVKMKNSYWRFLFEHLKKRMKAIKAIVVIARRLLKVVYKHIISKMQYAEKGWEQFAELQRRNGLRKRPVVI

SEQ ID NO: 352423 - protein, 355 aa, unidentified
MDNTKYIGMDVHKETISIAVLNSSGKLVMESVIETKGVTVVQFVRGLRGDLHVTLEEGTWAAWLYDLLKPQVREVLVCDPRKNALLKTGNKSDRIDARKLAELLRGGQLSSVYHGEHGVRTLKELSRSYLTISGDLIRVMTRLKAVYRSWAIACAGKQVYAPRYRAQWLGKISEAGVRRRAEFYYQQLDALRSLRQQVRRELLAESAKHKASKLLCQIPSIGPIRAAQLIAILQTPHRFRSKRQLWAYGGLAIETHSSADHRYVEGQLRPSKRQVSLRGLNRNHNHELKNIFKGAAIIAATKAGPFQEFYAALVAKGMRPEMARLTLARKIAAITLIVWKKGVCFDAQHLKPQTA

SEQ ID NO: 352424 - protein, 422 aa, unidentified
MQTLLSQKFTAYIGIDWADTKHDVCLQVAGQAQRSFSVIRHTPEAIDQWAHALYQRYGGPIAIAVELDKGPLIAALQKYDFFCLFPINPATLAKQRKAFVPSGAKDDPSDAQWALELLLKHPDRFPQQEKQSPAIRSLASLTEHRRTLVDERVRISNRLVCMLKQYYPLVLELFHDHDTLVFCNFLERWSTLEALKRARPASVLKFLNAHNVRHAELNQERLALILKATPLTEDPGIVNPSALYVRILASQLSGMLVAIKQFDAAIEETANTLADYSLFKSLPGAGQQLAPRLMVAFGEQRDRFKNAGAVQRYAGIAPVTERSGKKKIVRWRYQCSTFLRQTFVEWAAHSINQSAWAGAYYRQQKAKGCSHQAALRALAFKWIRIVYRCWKTRTPYDESVYLQALTCHDSPLTRASQATKVC

SEQ ID NO: 352425 - protein, 400 aa, unidentified
MNPVVGLDVAKGESQVQAFLDKSKPFGKSFSVKHTREELHRFIGFLKEIEKMTGQMPMVILESTGHYHTPVVQFMEEHDVIYILLNPIISYQAKKSSLRKVKTDAIDAYQLCVLYYKEDFEPHKNRGLQLLDLRNLSRQQEIVTNMYVEAKLQFHTILDQVFPEYRKVFGDLYSKVSLLMLVEFPTSEAVLSAGESKIAVRVAEFCPSRSVQWAREKAKKIMDAAMRNPFQKVVYQSHLINLQMYIEMLFQYQGHLSILENRIVTLANELEDYKIVQSIPGIGEKIAATIISEIGEIDRFSHPKKLVAFAGVDPRVYSSGKFTATTNRMTKRGSSRLRHALYLAVLCGIRSSRNKKLKEFYDKKKSEGKPAKVAIVACINKLLHWIYALLNRKESFLDIA

SEQ ID NO: 352426 - protein, 411 aa, unidentified
MEQIHDRVAGLDVHRDQVTVCVRTPGPRGGVQTEKARFDTTTGGLAALAGWLAGREVTLAAMEATGVYWKPIYYALEDRFLVWLCNAHHVKNVPGRKTDMSDAEWLADVAAHGMVRPSFVPPPPIRELRELTRYRKTQVDARAAEIARLEKVLQDAGIKLTSVASKVLTQSGRAMIEALIAGERDPAALAGLAKGKLRPKIPQLTAALHGHFGEHHAIAAARILAHLDFLDDTIAVLDGQIAARVAGHCQSAARLLADVPGLERRSVEVIIAETGADMSCFPSPAHLASWAGLCPGNHESAGKRRKVATTPGNPWLRRTLIESARAAARTRDSYFGAQYRQIARRRGPNKAAVAVAHSLLDVIWHMLTTGEVFADLGADYFTSRQDKEHQTRRLVSQLEKLGYTVQLAATE

SEQ ID NO: 352427 - protein, 370 aa, unidentified
MKKNSTVAQSPKRAAARKGGPITIGMDLGDKTSRYCVLAENGERLSEGSVATTRKAMTQKFAGMRRCRVAMEVGTHSPWLSRWLTGLGFEVIVANARQVQLISANSRKNDRMDAHLLARLARVDPQLLRPIRHRSEQAQADLLTIRIRAALVEARTSLINAARGFAKAQGDRLPACDADAMGVEKMEALPAEMRERLRPLLEQVESLTEKIQESDAKIEQIARTQYPENELLRQVSGVGTLIALTFVLTVEDRDRFQKSRDVGCYVGLRPKQSESGQSQPQLRITKEGDRYLRQLLVQGAHCILSRRGPDTDLKRWGLKLASRGGKNAKKRAIVAVARKLAVLLHRLWVTGEVYDALRNSQAARSSKQAA

SEQ ID NO: 352428 - protein, 361 aa, unidentified
MEAQLQSKKLNFEGQNFFVGIDVHLKSWTVSIITDHLVHKTFTQPASVDVLSNYLNRNFPGGIYHSVYEAGFCGFWSHYRLKEMGINSIVINPADVPTSQKEHLQKDDPTDSRKLARSLRAGELNAIYIPDPSSLEDRSLIRMRATLIKDMTRFKLRIKSFLYFYGIPYPKEFERSGSHWSNRFMKWLNEVSLQHDSGTQALKILVQEAEQQRKLLFEVLRKIHSLASVEKYAKNIALLRTIPGIGIITAMTFLTEIENIDRFENTDHFAGFVGLVPSRHSSGETDRNGEITFRGQDTLKRSIIESSWIAVRYDPAIMLSYHGYIKRMEPNKAIIRIARKVLNRMYYVLKNKKEYVSSIVK

SEQ ID NO: 352429 - protein, 417 aa, unidentified
MDDEVYYERCAGIDVHKNLLVVCLRIGRKSEVRKFGTLTHEIREIVAWLKDNGCQMAAMESTGSYWKPIYNIFEQEELPAMVCNAYHIKNVPGRKTDVNDAQWIARCLSQGLLNPSFVPDRDQRELRDMTRFRKSQIEERARNINRLQKFLEGANVKLGSWLSDIEGKSATLLLELVIGKPDFTVDDVASRMHGGMKSTAEELFLSLEGSITPLQREFFAHVMAVIREQTTQIEETDAMIRRNLNDNYKAAVEALDTIPGIGRISAEQIIAETSTDMSRFKNQHSLSKWAGVCPGNNESAGKRKSSKTPPGNKTLKSTLTQCAQSAKKNKNSFFSAQYSRLVTHRGKNRATMAVAHSLLIAIYFVLSGYQFEDLGADYYIQFNREKKINSHVKQLSKLGVTIPDYILKAAIQHPPDG

SEQ ID NO: 352430 - protein, 316 aa, unidentified
MARTEVFVGIDVSKARLDVAVGSTGESFAIDNNGRGITDFVGQLRKLGPELIVLEASGGLETVLVGELAAAQLPVAVVNPRQVRDFARANGQLAKTDALDAKMLALFAERMRPPLRALPDEQTRQLQALVTRRRELVEMLTAERNRLTAVPKELHREIRAHIRWLEARLEDRNRDLDRTLRNSPLWREREDLLRSVPGVGPVLCTTLLAGLPELGRLNRREIAALVGVAPLNHDSGTMRGRRTVWGGRAHLRAALYMGALVGVRYNPVLRALYRRLLERGKAKKVALVACMRKLITILNAMLKYRTHWSVPCPDPA

SEQ ID NO: 352431 - protein, 342 aa, unidentified
MKIHTIGIDLGKTSFHLVGLNERSEVIVRKRFSRAQLLRFTANRKVHVIGMESCGGSHFLGRALQEQGHEVRLMPAQYVKPYVKTNKNDYVDAEAIAEAVGRPTMRFVPIKSDDQLDLQSLHRVRERWVMRRTAVINQIRGLLLERGITVRKGRRYIEAALPGILEDADAKLSGTLRLLLAQLKSELDQTALRLEEAEALIEQTVLKNEACQRLVKIPGIGPVTATAVIAAIGNGAAFRKGRDFAAWMGVVPREYSTGGKQKLLGISKRGNRYLRKLFVQCARAVLQQKTKQAPVLKAWLEKLTARTHRHVAAVALANKLARMAWAVLATGEAYRAPLPVAA

SEQ ID NO: 352432 - protein, 363 aa, unidentified
MMAKATCLVGLDVHARQTHAALLDSRTGEINVRRLMGMPEAAVLSYLEHLGGGVLAAYEAGPTGFGLAREANKRGLDVRVVAPGSIPKGAGDRVKTDRRDAVRLVRLLAAGELRFAFVPTVEDEAFRDLIRCIEDLRGDLMRARHRLSKFLLRRGRRYEEKSTWGSTHLRWLKAIGFDDGCSQATFVDYLASVQLLGGRRATLLEVLEAQVPGCSYAPTIARMRCFRGIDTLSAAGLCAEVGSFERFPKPGLLSGFLGIVPSERTSDTKRRQGSITKAGPGHARRLLIEAAHQYRRRPAIGETLARRQQGQDPRIIEIAWRAQRRLYQRWQHLREARRKPAGVVAIAVARELAGFLWEAAVLD

SEQ ID NO: 352433 - protein, 386 aa, unidentified
MQKLNDLSRSLTALEPNGTLIAVIEMSLSSWLVAGIVPGVERQPLKKLAVDESALLKLLHRWREEAEKAGRRIERIAVAFEAGRDGFWLARWLKARGIEAYVIHASSVAVSREHRRAKTDRLDTELLKRSFLGWLRGERDHCKMVEIPTMQDEDAKRPNREHDSLIGERSRIVNRMKAALVRLGIRGFNPKLKRATTRLDGLHTPEGEPIPPNALAELRRDMERRRLVNNQIRQIEEERLERIEQAPCDGAHVMVRLLARVMGVGIETADMLVHEVLSRNMRDRRAIARYAGLTGSPDESGRKRREKGLARSGNARVRRGMIQLAWRFLLHQKNSALTKWFRSRTENARGTRKPMIVALARKLLIALWRLMREGIVPDGVVLRPAQ

SEQ ID NO: 352434 - protein, 427 aa, unidentified
MEEVTDEPLYRDRVCGIDIGKAEMYATIRVPSDKDPARRAQETRGFATTRQGVLALADWMRCWQVPCAVMEATGDYWKGPFYRLEAEGLECVLADARQVKNLPGRPKRDPSDSRWLATCFERGSVTSCFVATPEFRIIREHTRYRRDLTAERTREKQRAEKLLESAAIKVSSVITDLHGVTGRDIMDHLIAGERDSRILAQLARGRARSKIAELEAALDGAEFFTSELAALLARMLARIDRLGADIDEITAVIEALLAPYEEQLQQAESMPGWGRRSAQDAIAETGADMSRFRTGAHLASWAGRTPLDNQSGSRKGKAKSKKGNRYLGAVLGETAVSAGKTQTREGARYRRLSRRRGKAKACVALGSTQMKVYHKLLSNPGMRYEDLGADYYDERASARRQLRALEKRARELGYTLIPDLTGCPEIT

SEQ ID NO: 352435 - protein, 261 aa, unidentified
MSLPGPLCAGIDVSKATLDIAASSAIEPFSVANDTDGFDSIIAELRKHSVALVLMEATGWLEAAVVCALFELAVVNPRQARDFARAMEYLAKTDRIDARVLAQMTEVINHHPERSRFIRALPDAERQGLNAKVVRRRQLIAMPVAELNRLYPVHPQSRKNNTIIKALEDELARIDDDMNNYVRSHFKELSERLSSIKGVGTMTVAALLVEIPELGRLSRREISFLVEIVPVNRDSGTIRDRRTIFGSREGVRSGNGYPETN

SEQ ID NO: 352436 - protein, 465 aa, unidentified
MKKTHKKSQRSKSKKKLVASGGRAVEVRASGELNRINEHAAGVDIGGERHYVAVPPGSTEHPVREFGVFTKDLYAIADWLRECGVETVAMESTGVYWVPLFEVLDECGFKVKLVDARKVKNVSGRKSDVLDCQWVQQLESYGLLQAAYRPTDEIVVLRSYIRQREMLVKSAATHIQHMQKALQQMNLRLDNVVSDITGQTGMRIIKAILSGERDAQKLGMMRDYRCHATAEEIAQSLIGNYRQEHLFSLKQAVELFEYYQEKIVECEAEMEKYLERLPHVTEEDPPELPFKDKRNMMSFNVQDHAYKLLGVDLFRIRGLNSETVLRIVSEVGVDLSAFPSEKHFASWLCLSPNQRVSGGKVLSSKTNPSRNRAAAAFRQAAVSVERSQSELGAFYRRKRSQKGPASAATATAHKIARLYYSLVKNGTEYQEQGARAYEERERERIVANLKKRARSFGLELVAKGA

SEQ ID NO: 352437 - protein, 338 aa, unidentified
MVYGAIDLHMRYSQVRIVDESGTVLRDQRIVTTGERLVKAFDAFRPVRIVLEAGSESEWVAQALEAAGHAVIIADPNYAPMYGKLRRKVKTDRRDAAALAEANRRGGYRPAHRRSATQRATQQLLRTRRPIVRMRSGAAALVRSLLKQEGCRIGTCAAEHLPTRGAALALPAGVGAAVQPMTRMIATTTKAIAALDEQLRRRAARDPIVQGLQTVPGVGVVVALTFRAQLDRIERFAHAGQVSAAIGLVPHEDSSAERRHRGHTTKAGSSELRCLLVQAAWSCWRSKRSGGLRAWAEQLAARRGRWIAVVGLARRLSRILYALWRDGAAFDLTKLAAA

SEQ ID NO: 352438 - protein, 418 aa, unidentified
MEVLFPCCCGLDVHKDTVVACLVRSVTAGVRTKETRTFGTTTGELEALGAWLRAVGCTHAAMESTGVYWKPVFNILTEPGDDLAVWVVNAQHARAIPGRKTDVKDAEWLADLLQHGLVRPSFVPGREQRELRDLTRTRTSLVDERSAAVKRVQKVLEDANIKLSGVATDVMGTSGRAILAALLEGTADPAEMAELARGKLRAKIPQLERALAGRVREHHRQLLALHLSHIDFLEGAIAELDARIADKTRPFEAELARLDTIPGVDRRTAEVLVAEIGVDMAQFPSARHLASWAGMAPGNNASAGKRKGGKTRKGSKHLRRALVEAARAAARTKQPGRTAFAQQYRRIVVRRGPKKAAVAVGHAILVTAYFLVSRHTTYREPDPSQFDDRRRARVRQRALDQLRALAYHVTLAPKEVAA

SEQ ID NO: 352439 - protein, 355 aa, unidentified
MPSKADTAVARTIGIDTGKNTLHMIGLDERGAIVLREKISRARIAARFMNLPPCLVGIEAGMASHYVARELVALGHEVKQVPPAYSKPFRHGHKNDFRDAHAVAEAVERPSTRCVPIKTDGQLDLQALHRVRSRLIGNRTAVINQIRGFLLEHGIPVRQGHHFLRKQLPLILATRTDVLSPRMIRIIGDLMADWKYLDERIERVTDEIEALAHADEGCQQLITVPGIGPIISSAMVAAIGNGAAFCKGRDFAAWLGLVPKQMSTGDRTVLGRITKLGNRYLRMLFIQGARAVLLRPASWVKHSFGSWLTAATRRLHRNVLAVALANKLARIAWTVLAQGRRYEARVEPRVEPAAA

SEQ ID NO: 352440 - protein, 352 aa, unidentified
MKYDIGCDAHKHYSQFAVLDKDGKFCRQARIEHARGAIQEFLSEFPEGTPVAVESVGNWYWIVDEIEASGCEPQMAHALRAKVMMGHVDKTDKLDAKGLAVLLHNGTLPTVWIAPKEVRDERELHRTRMVLCKLRTALKNRIHASLAKYNLSLPTHSDIFAPKWQSELHQLINQLPAETGRCIHQELELLKTLQEQIHHMETRLQERVQSTLNMRLLQTLPGIGQILSLVIEREIGSVDRFPSAQHFASYAGTVPTTNASGGKVWQGSLRKQANQYLKWAFVEAANVIMLQQNHPRWRSKHTVHLYQRMRRRKGHAVAIGAVARHLSEAAFWVLRKQQPYQDPAFCMVAQTG

SEQ ID NO: 352441 - protein, 374 aa, unidentified
MDDHSVAYVALDTSKLRNAVAIAEAGRDGEIRYLGEIDNAPAATAKLARRLAKKHAALTFAYEAGPTGYGLYRQIKSLGHDCIVVASSLIPQKPGDRVKTNRRDALSLARQLRAGDLTAVWVPDPHHEAVRDLTRARGAAVRDQRAKRQQVSALLLRLGLHYPGKTTWGKAHMAWLAGQKLAHLEQRIALEEMLHAVRQAGDRIARLEQAIRTAVPDWSLAPSATALMALRGIEFIAATTLLAEIGDLTRFRSPRELMAWLGMVPSEHSTGERIRRGAITRTGNRRARSVLVECAWSYRHPPRVSRDKLARLEAAPPAVRDIAWKAQSRLTARYRALRRAGKLDVVAITAVARELAAFIWAVGLAVGSGRTPEV

SEQ ID NO: 352442 - protein, 372 aa, unidentified
MHYNTVFVGMDVHKESFTLCAYTIEAEKASHVQRTTADYKQVLKYLEFLRSVYGNNVHFVCGYEAGCLGYTLYHQLKERNVDCVILAPTTMLEQRSKRRIKTDKRDAEIIARCLAQHNYSPVHIPTAMDEETKEYLRMRDDHKLALKKVKQQILAFCLRHNFRYEGKTHWTASHIRWLKSLKPEALYQEILSEYLLTFDQLSDKLDRLDKRTDELAAKDEYKDSVQKLRCFIGVKTHTALAVLVEVGDFNRFASAEKFAAYLGLVPAENSSGDDQNRLGITKAGNSHVRQLLTESAQCYGRGQIGFKSKELKSRQDGNKPQVIAYADKANERLRRKYYKMVLGKNKKHNVAKIAIARELACFMWGMLTDHIA

SEQ ID NO: 352443 - protein, 435 aa, unidentified
MKMTHRVEKINRKFYLTVAFDIGKDKLNYYYEIPGRLKSKHKELVECYEGEIENKARVIDQKLLDLDHFAKDHGYEGLHVVCEPTGPYDRKLMRIARAQGHTTAYVSGESVSKMKVVENNDTGKTDIKDPRVIYMISKNMGKELTCRDIKDEYQLLRELNRMYDTEDSAHTSMKCQIHFLLQRLFCDYSFKKDFLYTSTGRVLVEQYHASPYRILKSGYKRFCATMKRYAPRVRKLTLERLWQDAQSSMLHQMDKEIIMLLERRLSFLWEEYELHRKRRAQIKQEIIVLYRRLLKKGEPVPRPHKRFLNEFRIGRILGETGRLTDFPNKRAVLKYGGLNLRERKSGYYFGKTRLGKKGRSTLRNVVGQAAFRLVRKHEVFGPYYHRKKKEGMMGTKALAAVERKLLQVFYVIGIRKEDFYPHRLHECESQLKKAA

SEQ ID NO: 352444 - protein, 417 aa, unidentified
MKKHNNSAKKSEPTSKRAKSRGLVQRDTKEVLAELVGKLREKLDPKVGAARAGEEHPRGWLGPNLDRLTVGVDLGDQWSHYCIVGLEGETLAEGQVRTTQQDIAEFFQALNAARVVVEVGTHSAWVREVICGYGHEVLVANPRLMEGSKRRKRKNDRIDANKLARLGRVDPQSLHPMQHRSAEVRQDLVMLRARDALVAARTELINATRGLVKSMGRRLPKCSSPSFAQKVEEAVPAEIREALLPLVRMTAALSDCIEGDDEKIEKLASEKYGHTALLRQVKGVGPITSLAYVLTLENPERFVKSRDVGPYLGLVPKQEDSGESQPQLGISKAGDTMVRRLLVGSAQYILGPFGPDTDLRRYGLRLCERGGKNAKKRAAVAVARKLAVLLHRLWVTGEVYEPLRHGMSATTVQAAAA

SEQ ID NO: 352445 - protein, 480 aa, unidentified
MKNKPIHIRPKRWKKNRSSKTQQCINTTAHPDAGGIDIGADEIVAAVPPDRDTQTVRTFSSFTGGVHELRDWLLSCGVKTVAMESTGNYWVTTFDVLERAGIEVFLVNARHVKGVPGKKTDVCDAQWLQQLHSAGLLKKSFRPAQDILPLRYLMRHRAGLVEELGRQVLLMQKVLTEMNLKIHHVFSDLDGVSAQAIITAILAGERDPATLAALRDRRCRSSEETVMAALRGDYREEYLFVLGQCQSQWRYHLQALAELDERIGVLIKGIAPSPDEGADPPGDTAQPAQPAQATGRPGLKKDKPLGKNTLRMDVQAEAVRFYGVDLTTIDGVGSGLLSVLMSELGPREQILNAFSTPPQFCSWLGLNPANDISGGKVLKAKTRQVKNRLAAAFRLCALGLANAKGMMGQYSRRIKGRLGKAEGITATAHKLARVVYAMISSGRAYDENEAFRITPQNRKKQLNKLQKQAEALGFQIVALP

SEQ ID NO: 352446 - protein, 351 aa, unidentified
MKNATARKRTQTTIGLDLGDRRHTYYVLDGAGKMAREGSLGNTREPLATMARSYPGATVVMEAGTHSPWVSRFLQELGLRVIVANPRKTRAIYQNERKSDRRDAMMLARLARMDPTLLHPVEHGSQEAQQDMLQLKLRDSLVRARVALINALRFTLKSLGYPVSNPSSERFHKLVLSEVPESIGEMIAHNVAAIAELTQRIKALDVSISRLAAERYPETIYLQQVSGVGPITSLYFVLKVGTPGRFQRTRDIGAFLGLCPRRDQSGETDKELRISKCGDQYLRCLLVNAAQYILGPFGTDSALREHGLRLAQEGTARAKKRAVVAVARKLAVLLLTLWKSREPYESFPTMA

SEQ ID NO: 352447 - protein, 340 aa, unidentified
MAIVAGFDVHRAQITFDALDDETGELSRGRIGADRDAVRRWVERFGGREVHVAVEACTGWLFVCEALSEAGAEAHLAEPVETSALRGKKRRAKTDREDARWLRQLLAEGRLPEAWIPPAHVREWRTRSRLRKTLIDERTAWLQRVQATLYHHGVRGVPDRLRSAAGRQFLARLELPAADRERIEVALQMVDALDRQREPLEQGLRRLARSQPGCRALMRHFGIGELTAPMILCELGDVARLSASRKAVRCAGLDIGVHRSDGRSRVGKLTRQGSPQLRWALFEAAQSACRPRSPDHADYLALKARGLSHTRASMTIARKFARRSFHTLRQLGPSALEPVS

SEQ ID NO: 352448 - protein, 380 aa, unidentified
MNRVALQSKDNAVERRLCMAMELSDKHWKLVFSDGGEKRRHETTEAGHRMKLVEAIKKAKEKFDLLSEAKVVSCYEAGRDGFWLHRYLVSLGIENQVVDSSSIETNRRKRRAKTDRIDAVKLLTMLRRYWGGERGLWSVVRVPSVKDEEGRRLHRELASLQKERTRHRNLIRGLLVAQGLRLEPNGDFLKRLENLTLWDGAPLPLEIKGELEREYQRLSLVEAQRRALEKTRKSRLRQADTASLQRVVQLMGLRAIGPNCAWLLVMEFFAWRGFRNRRELGACAGLTGTPYDSGGSKRDQGISKAGNRRVRTMMIEIAWLWLRYQPNSKLSRWFRERFAGGGARMRRVGIVALARRLLVALWRYLEDGMLPEGAELKAAG

SEQ ID NO: 352449 - protein, 426 aa, unidentified
MKKADLLSTLFVGIDVSSRENVVCALDYESQKLLRFSVPNNQPGAVEMAKKFHALLYGNRELNKLIVALESTSFYGIHIANYLSSCELLMPFSPHVYCLNPKMIANYKRSFIDLGKNDDIDAFVIADFARVGRIQSSPWRGSQFLALQRLTRHRLHIADFLTREKTYMLSNIFLKFSELSILHEDKQPFSNKYGATASSVLTDFLSTEDIANMPMEVLVDHICHKGKNRFVDPKHTVSLLQQAARNSYRLDKCLYEPLTISIASSFNLISAYEAEMKAINKAIAKTLLGLDPNAYQSLLSIPGVGPVYTAGILAEIGSIDAFKSQDALAKYAGLVWRENQSGNFKADDTILSKAGNSYLRYYLIEAASHVKNHIPEYAAFYQKKYDEVKTHQHKRALALTARKFIRLIFGLLANHQLYSSSRVSQS

SEQ ID NO: 352450 - protein, 451 aa, unidentified
MTKKKMELDIINPNCAGIDIGSKSHFVAVGQALEDVKEFGVYADDLTAICLHLKEYGITSVAMESTGNYWQNLYVELEKHQMEVTLCNGKFTRHAKGKKTDVKDCRWIQKLHALGLLTGSFLPDETTEQLRTYCRQRTNWIDLAAEASHKMQKYLKLLNFRLDVVVKDICGLTGLAIIADICKGNLDPEKLSQHRHGNCRKSQEEIAKALKGNNRTDFLFGLKQEYDSYLFFQKKIDACDVQINSFLKTQINTYPDKKKLQTDNKIHKRINKNAIKGIDLNQAAYQYFNGVDLMKIEGLSHSTILTIMSEVGPDGFIKFETAKQFTSWLRLAPNNKISGGKILSNKIPKGSNRLKIALRHAANAIGNLKDTHLSDFFKRVAYRKGRATAVSATARKLAVIVWNMISKRIAYKPPTEYLFVDQKRKLRLIQKIKNNIAKFELKPEDIGFVTE

SEQ ID NO: 352451 - protein, 346 aa, unidentified
MDKLDFSGVEVGAEELVVSLEREGQRKALKTFANQPPGHQAIVRHLRCPGRNVRVCLESTGVYGLDLALALARAGFQVMVANPRAVRHFATALMLRSKNDRLDALVLLEFAMRMPFQAWVPPRPAALQLHAVGRRLEALTQMQAAEKSRWHAAQATDTTPPALRRDLERSLRSIRRALVRLSGEAVKIIERDPALKLRFDLLVSVHGSIAATSAIQILAELAVVSPGLDARQHVAYAGLDPRECSSGTSVHKKVRISKAGNAHLRRALYMPALVAIRRQPHLRAYYQHLRDRGKLKMVALIAVMRKLLHAIYGMFKHQQPFDGSKVYRLPGPHTSPPLNSAQEVAA

SEQ ID NO: 352452 - protein, 343 aa, unidentified
MKITAIGLDLAKSVFQVHGVDNRGHAIVRKQLRRDQVVPYFAKVPPCLVGMEACGGAHHWARRLREFGHTVRLISPQFVKPYVKSNKNDAADAEAICEAVGRPNMRFVPIKTVEQQSVLSVHRVRQGFVKARTAQANQIRGLLAEFGLILPQGISNVARRVPGLVDEAAELPVPMRQLVNRLLEHMKMLDQQAKELEAQIKAWHQGSELSRNLEAIPGIGPLTASALVASIADAKSFKNGRQVAAWLGLVPKQDSTGGKPKLLGMSKRGDTYLRTLLIHGARSAIVSAQRWHKPNAWLERLLSRRHPNVAAVALANKNARTAWALLAHEREFRPDYVPQPPIA

SEQ ID NO: 352453 - protein, 362 aa, unidentified
MAKVRSWVGLDVHARSVLAVMIDGESGELRSRRLSGTTSEVVEFCCSLPGPARVAYEAGPTGYGLARALHTARVGCVVAAPGKIERPVGDKVKTDQRDAKRVLRLLMIDGLHAVRVPSGEEEALRDVVRAREAVRGDLMRARQRLSKLLLRHDVRYEDTASAWTVAHRGWLTKIDLGERGAQVTLLEYLGAIDAIVIRRDALEKTIAELIPGSPWEQTVARLRCLRGIDTLSAVGLCAEVGDFERFAKAGQLMSYVGLTPSEDTSGEKRRLGSITKTGSRHARRLLVEAAWHYRRAPAKGRTLRRRQDGQPAHITEIAWQAQRRLHNLWQRLDTQRGKRRTIVAVAVARELTGFCWALANAD

SEQ ID NO: 352454 - protein, 401 aa, unidentified
MWYAGLDWADSHHDVVVIPEAGRQVASRRVAHTAEGLAELITFLQGIAPLDQIACIIETNQGLLISTLLEAGCTIYPVNPKTIDRRRTASGAKTDTIDAYLLAKTGRSDLADLRKLTPDSVIVQELKALTRDQDSLVQSQTRLVNQLTACLKAYYPVALQLFSKLQQRSTLVFLQTYPTAEAALSASVEQITAVLKQTRHPHPTTFALKMFKTLHQPSLHADAITTRTKSRLMLALVAQLLPLIEQIASYDKEISDLFLTHEDNEVFSSLPGAGKRLAPRMLAEWGDDRSRYSGSTSVQALAGTAPVAFQSGNYAKAHKRYACLKPLRNVLHQFAWQSTKQEGWALAYYQRKRREGKSHSMAVRALANVWVRIIYAMWFEHKCYETTTFEQAQHQHAPRAA

SEQ ID NO: 352455 - protein, 315 aa, unidentified
MSNEPCFVGIDVAKAQLDIALRPSGERWTVPNDASGVVTLVERLQPLHPTWIVLEATGGLERVATAALATASLPVVVVNPRQARDFARATGQLAKTDALDARALAHFADVIRPTPRPLPDAQTQELRALLGRRQQLIGMRTAEQNRLAGTSGRLQTDIEAHITWLNARLAMLDNDLETLLRASPLWRDNDDLLQSAPGIGPVCARTLLLALPELGTRTRQQIAALVGVAPLNCDSGTLRGRRIIWGGRAHVRTVLYMGTLVATRYNPRIKAFYERLLAAGKVKKVALTACMHKFLTILNAMLKHRTPWQSQEVQG

SEQ ID NO: 352456 - protein, 373 aa, unidentified
MPINLRYVGLDVHAETIAVAVAEADGEVRSLGILPNRLEAVAKLIRKLGPREHLRVCYEAGPCGYVLYWQLTRLGVHCDVVAPTLVPMKPGDRVKTDRRDAEKLARCYRAGDLTAVWVPDAAHEALRDLVRAREAAKQDQLRARHRLGKFLLRQGRRPPEGVKPWTQRHRRWLDALHFELPAQQATLADYLSEVDHAAARVARLESALDEAVAAAPAPMRAVIAALQTLRGIRQVIAATIVSEVGSLARFTHPRELMGYSGTVPSEHSSGDRVHRGAITKTGNAHLRRVLVEAAWAYRFPPKCAKGLRQRQRGQPAAIIDIAWKAQQRLCHRYHRLLARGKPTPHVITAIARELVGFIWAIGIAVERGQAMAA

SEQ ID NO: 352457 - protein, 539 aa, unidentified
MVLDEAGRQVDSRRFAHSHDGLNELKQCVLRIAASPEQLACIVETSHGLLIAFLLEAGFPVYPVNPKTANQLRKAAGAKTDRIDAYLLAKTGRFDLAELRRLEPDSATVHELKTLTRDQDALIQTQTRLVNQLTACLKEYYPAALHLFAKVQQRSTLLFLQAYPTPQAAQAASVEEITATLRAGKHTNPRRVAAKNVAELHRPQLLASPVIVRAKSRLMLSLVKQLLVVIQEIASYDKAIRPLFLSHPDQELWRSLPRAGKRLAPRLLAEWGDDRSRYADGNSVQTLAGTAPVPYESGNYAKAHKRFACLKPLRNALQQFAWQSTLSEAWARDYYQRKRAQGKTHRMALRALANVWVRIIYRMWVNQTSYQTATFAAATHRLSRSCTFPSCPVGHAQRCEVLRQCRQPVLQRSRPTGSRRVSSANREPVPLRFLSLQRLPQPATAFPTPGVGCCHKTTPSQGRTEARGGVDEGGWPRSARLGLDRCGTLASLHGRQLHSRSSCFFSFPFVALDIEGLSYTNNSSDSLIERLASILNHIW

SEQ ID NO: 352458 - protein, 404 aa, unidentified
MKGPIVSIDVSKGKSDYQAFKEMNVKYTGSRSIKHTKEGFDEIVSLVREMEKKLETEVCVVYEATGVYHRVLKKVLEDNNIKQFIINPLLSAKTRKNDSLRSPKTDKLDPKSIAKTYYSHSLHNSHKPETIYHELRELSRYYEDILVHLRKDKVAFRAQLDVVFPGYDTLYDDLYGPVALAVIEKYPHPEMLQKKKINTVSKVIQSKTCHRQAMSDTMADKAIEYSKTIYSGCDKDDIEVLILQRFIKKLKEDMAEAERTIGEMIKLAQELPDFSIIKSIPGIGDNLAARIIAELGDMTRFKKKNELVAFAGLDPRISESGQNDGDHMHITKKGNKRLRCLLYLAVTCSIRLKRDDNSIKDFYIKKKQQSNPMCSKAAKTACASKLVRIIYSMCKAGELYQYNK

SEQ ID NO: 352459 - protein, 397 aa, unidentified
MIAVGIDVSKAKSTVAILNGDGSIRAKPFDVHHVADELQALVDYIKRTSEPPTILMEPTSHYHYPLLKAFQEAELPVCLINPYQMKKYGDTELRKAKTDKRDSLRIAQYALEKSYSLIPYTPQDQKYEDLRFLSRQYSQRISTLTVAKVQLLSLLDETMPGITTILPLKSRDPDNCVLLRFIKRFKSFDVIRKMGKTRFLDSYQVLVKKTKDRFAGSKGLAIYELVLNSVTTRGENPLSAMTQDQCVDLVSTSQKAADEINLQMRIIAETIPEYKVLRSMAGVGDRLGPIILGEIGDIRRFHSGKALNAYAGNDAPPYQSGQFESRNRHISKRGNPALRKACFEVMQALKLTKPQDDPVYLFLLKKEQEGKPYNVAKMAAVNKFLRIYYARAMELYK

SEQ ID NO: 352460 - protein, 344 aa, unidentified
MKITRVGLDIAKQVFQVHGVDEHGKARVGKQLARARVREFFAQLPPCLIGIEACASAHYWGRELTKLGHTVKLMAAQFVIPYRKRSKNDANDAEAICEAVGRPNMHFVAIKSEEQQSVLMVHRARTLVVANRTAQVNQIRGLLGEFGLVVAKGAARLRRALPGILEDAENGLPALAREVLAGLLEQFHEFDAQVSAYDRQLRALAAASEPARRLMQVEAIGAQPATALVASMGDPHVFKSGRSYAASLGITPRQHSSGGKERLGKITRQGDRYLRTLLVHGARAYLRVIDKKTDAKSAWARALKERRHVNVAAVALAAKHARVAWAILAHGTEYRPAGPEVVAA

SEQ ID NO: 352461 - protein, 345 aa, unidentified
MQPMYYIGLDVHKQKISYCVNDSSGRIYAEGWIPATRFDLDRWMKTLPQPWSAALEATMFSGWIYDHLKPHAAALKVAHPLMLRAIAAAKKKNDRIDANKICDCLRCDFLPECYMAPTAIRERRRTLRYRNLLVRQMVQMKIKISTLLMEAGVSYNKQKLHKAGYFRELLASNPDINESLRSLLRQCREMVVRLGKMESALIHSLQQDRLLVERVERLMSIPGIGPITALTWALEIGEVQRISSIKKAISYCGLCGDEQRSANTAQRTPLSKQRNKHLQTMLIEAAKMAPRYSPTLALLYDREKQKGNANRATLAVARKLVAYLMAVDRGQCHFLVIDQDTCTAA

SEQ ID NO: 352462 - protein, 342 aa, unidentified
MYYIGLDVHKKTISYCVKDASGQVHQEGKVGATRRELDSWIKTLPQPRTMAMEATIFTGWIYDHLLPHAQQVKVAHPLMLRAIAAAKKKNDRIDAGKIADCLRCDFLPECHIASTQIRDRRRTLRYRHLLVRQMVQMKNRISGLLMETGVSYNKQRLHKVGYFRELLATNEDVHESIRPLLKVSRDTVVRLQKTEYALVSSLQRDPLLADRVKRLRTVPGVGPITALAWALEIGDVARFRSIRQAISYCGLCGEEKSSADKVMRTPLSKQRNKHIQRVLVEAAKLAPRQDHDLALVYETEKQKGNANRATLAVARKRVAYLLAVDREERDFVPAENYQRAAA

SEQ ID NO: 352463 - protein, 339 aa, unidentified
MELYSGLDLHSRNTYIGILSTDFKRVFKKRVSNNLDLILETLEPFRNQLKGLVVESTYNWYWLVDGLMDAGYDCVHLANPSAIKQYEGLKHSDDQHDAFFLAQLLILGILPQGYIYPKKDRPVRDLARKRMFLVKHKTAHILSLQSLIARCCGQRVSSNHLRTFTGENLEQLLKEDHLVISAQANLDAILFLKQQIHRLEKVIKSKVKLSQAFNGLLTVPGIGQILAMTIMLEVGNIERFAKVGNFTSYCRCAPTQRLSDGKSKGSGNRKNGNRYLSWAFSEAAQMARRYNQRFRRYYDRKVAQTNMMVARRALSNKLARICYYIMRDQVTFNDELILH

SEQ ID NO: 352464 - protein, 456 aa, unidentified
MRTTTIGVDLGVTAASDVAVAEGTKVIASRKVASTPQALTAMFGKLGADGPVNVVVESTAMAWYVAAVAVRHADIDARVFRVSGTKAAALRRFYRAHTKTDRIDARVLARMPLVDDGLHELVLPEAGELALKRLVVLRQKLVVEAVKVGDRVRSTLHWAAPGLLSGRETVTDGFVAVLARWPDLRRLAVARPATIAKTGRLSSARAEKIRDAAAAAVVFYDGLVDFDALAVEFEIAADQHATLKTQIARLEERITALHAEQYPDDLLLSVPGVGPVIAAVLRGHLGNLERFPNLAALRAYTGLVPRENSSGSTDRRGKISKAGPSMLRWSLYLAADTARKWDPQLAELYRRLMVERGRHHHQALCAVASHLVGRIWAVIREDRPYTWRDLDGQPITREQARTITLSLAVDPDTRQRLRQQRGPDASHPRQPEAPHDHDRPSPSDLTDRALEAANNT

SEQ ID NO: 352465 - protein, 358 aa, unidentified
MQSNKISFKGQKIFIGIDVHAKNWEVAIAPEIGIVRRHSQKPSAKELFDFLKKNYPDGEYQAVYESGFSGFSTYYALKEVGIDCMVIHAADVPTTQYEEVMKTDRVDAVKLARSLKAGLLRGNYVPEKQSIDDRSVVRIRKTIQKQLGGYKARVKHMLHCHGVEYPERFAKKQTHWSRAFITWLIKDVRLMSDTRASLDLLIRQVEVIRGTLLEATRQLRQMSQTERYKRRYDLLRTIPGIGLITAMCILTEVCDVKRFSNENQFAAYLGLIPTSHSSGEKTVHGEKTFRGNKQIGPTIIEAAWIAIVRDTGLGSQYLNYKKRMEPQEAIVRIARKLSNIIFSVLKNEKEYVPYQMGN

SEQ ID NO: 352466 - protein, 338 aa, unidentified
MGQVVTIGLDLAKSVFQVHGVDAVGEVVVRRQIRRSQLLQFFARQPACLIGMEACASSHFWAREFTALGHQVKLMPAQYVKPYVKRGKNDAADAEAICEAVTRPTMRFVAVKTPEQQSAMMLHRVRLVLCRQRTQLSNAVRAHLGEFGIVAAAGRLGLERLLDVIADAGDDRLPADARTCLQMLAAQLGVVKAQILENDRRIMADARSTELGRRLMAIPGVGPVLASALVASVPDPGIFRSGRDLAAWIGLVPRQNSSGGKERLGSICKAGHRYLRQMLVVGAMAVIRYASATRRPWLAQLLGRRKAKVAAVALANKTARTVWAMMMTGERYREPLAA

SEQ ID NO: 352467 - protein, 424 aa, unidentified
MRSIGLDVGRQFAEAAAIEPGGEVHRLGRITASPAGLRAFAAGLGPDDAVVLEATANTWAIAELLAEHAGRVVVSNPLRTRAIAAAKTKTDQIDAATLAQLLAADYLPEVWQPDAATQALRRLVAHRAGLVRGRTGARNRVHAICARRLLSAPVSDLFGVAGRAWLDRLVLEPDERLALDAQMRLLATLEVEIDAAERAIAAHVLDDRRMRHLLTIPGVGLATAASLVAVIGDVGRFPRPHKLVSYLGLDPRVRQSGARPAFTGHISRAGQAHARGLLVEAAHAAVKVPGPLRGFFVRTRGRRGTGVAIVAVARKLTVLAWHLLTDDVDYRWAPAVRSAEKLRRLELLGGASKRFDLRGRREGVKARRTAELVRERVVLEQAEAAYVALVAARRTRHAKDAAATNGERLDGPALNGPGPAARRS

SEQ ID NO: 352468 - protein, 348 aa, unidentified
MKYYTSTTEYNCGIDLHSRQMYVCVMDQKGKKLVHTNIKNNDFAFFLKLIAPYRHDLTVCCECMFGWYWLADACQEANLTFVLAHALYLRMIHGGKNKNDRVDSEKLAHLLRSNLITPSYVYPAERRPLRALLRQRVYYVWSRAELLARINSHQLAQNRVPPKQGRSNRDPWLDNLLDAEDNALRKAALQNDMAMIAHFDQQIAKVEWELKRETKKVASRDYILLTSVPGIGNCLALTILHEIGEISRFPSVKDFLSYCRLVKGTVASAGKIKGLRGAKLGNPYLRWAFGEAAVIAKRDHPIRPLADRLEAKMGGNKFKANTVVAIKLARSAFFMLKNKTAFDPERLA

SEQ ID NO: 352469 - protein, 345 aa, unidentified
MQPMYYIGLDVHKRKISYCVKDGSGRIHAEGSISATRLELDHWMRSLPQPWSAAMEATMFTGWIYDHLQPHAAVLKVAHPLMLRAIAVAKKKNDRIDASKICDCLRCDFLPESYMASTAIRERRRTLRYRNLLVRQMVQMKIKISALLMEAGVSYNKQRLHKAGYFRELLATNPDIDEGLCSLLRLCRETVVRLGKNESALVRSLERDSLLVERIERLMTIPAVGPITALTWALEVGDVQRFSSIKKAISYCGLCGAEKSSGNTVQRTPLSKQRNKHLQTTLIEAAKMAPRNSPELAMLYDKEKQKGNANRATLAVARKLVAYLMAVDRGQRNFQRAERSSSIAA

SEQ ID NO: 352470 - protein, 456 aa, unidentified
MSKLSKPNVGLEEARPFAGMSQVHPHAAGVDIGAHEIMVCVQGGDSTQLVRSFGSYTVDLQAIATWLEEHGVETVAMESTGVYWIPLLEELERRGFQCHLISSRSLRRVPGRKSDVVDCQWIQTLHSYGLLESSFRPEADLVALRTLLRHRAQLIQHRSPHILHMQKALLQMNIQLSQALSDVSGTTGQAMIRAIVAGERDPHKLAALRNYRCKKDEADIAKALTGTWRAEHLFILKQSLELYDFYTKQMEVCDAEIECTYSLVRPDWEQAGLHEYPEGKRNSHSKNAPKDVQVRKHLKRICGVDITAVQGVSASLAQTIVIEVGTDMSKFPNEKHFCSWLGLAPKNEISGGKVLKNKTLKTNNRAGQAFRMAAGSVMRADCAFGAFYRRQKARLGPAQAVVATAHLIARIVYRMLKYKVEYEPLSVAEYEQHYREQQLKYLQKKAAKFGFQLAPV

SEQ ID NO: 352471 - protein, 343 aa, unidentified
MYYIGLDLHKKTISYCVKDAAGHVHREGKIGSTRRELDAWLHTLPQPRMMAMEATIFTGWIYDHLLPHAEKVKVAHPLMLRAIAASKKKNDRIDAGKIADCLRCDFLPECHMASTEIRDRRRTLRYRNLVMRQMVQMKNRISGLLMESGVSYDKQRLHKMGYFTELFSTNEEISDSIRPLLRLSREHILRGQRLDRALISSLERDPLLSERLRRLRTIPGVGHITALTWVLEIGDYTRFQSVKKAISYCGLCGAEKSSADKVMRMPISKQRNKHIQHVLVEAAKLALRYSHELALLREKEIQRGNKNRATLAVARKLVAYMLAVDRRKQDFVPTEELAAKAVA

SEQ ID NO: 352472 - protein, 364 aa, unidentified
MNKCHLNTELSSLEGTRSEFNRSKAVIKLGIDVHQDFYVVVEQMEGTNPKPAQRFQKQVFLHWAAKLSKSGSKVHAVYEACGFGFGLQRQLTAQGIHCYVVCPQKLDERNKRVKTDGLDAKALCLKLDRFVQGNREALALVRVPTEAEEQKRAIHRQREQLVKARKGLEAQGRSLLVNHGMEPASNWWKGRTFAQLQVPEWMKKLLSNSQPILLALEEKIRALTAQLQAAAISKQPRGLGLLSSVVIDREIGSWTRFKNRRQVGSYTGLCPGEYSSGNTRVQSCVTKHGNPRLRAALVETAWRLVRFQPNYKPVLKWRKILAKGALATGAARKKAIVAVARQLAVDLWRIRTGRVAIETLGLIN

SEQ ID NO: 352473 - protein, 343 aa, unidentified
MQISTIGLDLAKHWFQVHGVDAKGRVVVRRRLWRSGVVTYFRSLEPCLVGMEACATAHYWARELMAIGHTVKLMPPAYVKAYVKRNKNDAADAEAICEAVTRPSMRFVLVKDAEQQSVLMLHRARSLLVRQRTMLVNALRAHLAEFGIVAPQGLRHVEMLTKTIAHQQGRLPELACSILQTIVDQLNGTMARIREIESRLVRLHRHSRISQLLATVPGVGIMGASAIAATVADPTLFRSGREFAAWLGMTPRQNSSGGKERLGRTSKRGDKYIRSLLTAGAVAVLRHARNRPTRDGEWVRALLARKPTKVAAVALANKTARIVWAVMMRGEGYQAKEVFGQPA

SEQ ID NO: 352474 - protein, 387 aa, unidentified
MPQLNDLSRSLVALDQDSTIIAVVELSQSSWLVAGVLPGIERQPQKKLEPSAERLLGLLHRWRDEAVRAGKKITRIALAFEAGRDGFWLARWLNARGVEAHVIHPSSVAVSREHRRAKTDRLDTELLKRGFLGWLRGERGHCSMARVPTIAEEDAKRPNRERECLVGERTRIVNRMKATLARLGVRNFKPTLRKAAERLATVHTPEGTPLPRNVLAELQRDMARLGFVVSQIREIEQARQKRLEQETETGPHAMVRQVARVIGIGIETADMLVHEVLSRPMRDRKAVARYAGLTGSPDESGARRREQGLARAGNARVRRGMIQLAWRFLRFQKQSTLAQWYRARTADSRLGTRKTMIVALARKLLIALWRFVTTGETLEGVILRPAG

SEQ ID NO: 352475 - protein, 479 aa, unidentified
MIRSVGIDLSRTGNHQVCCLDEQARPCDSFSFDSTLEGLEKFEKRVFLEGATPTIVFEPTGLAWIPMAAYLRARHPDCQLVKARLQKVAALRRYLRSRAKSDRVDGVTLAKMPFIDAEQLDEAYLPPAEYHALQRLTRQRERLMKSITIRKNRIGAIINGYLPGLRKAFTNEWSDRARLFYRQRLNPFTVVHGGKDALETLFVSAKAKGAVTESHRVYQLCQKLVEFYEKSRAAGMINEDFFDNLQDEISCELRLMETEEAEVERVSGRIEELYRHLHPSDHLRTIPGIGVRTAQVFLAVIGDPNRFRNQSAFANWTGVVPGARQSADSEGKGLRMTKAGPAMMKRALYQAGDIARRYDPQLADLYYREMVQHGKTHLQAMGAVMSHLGARILTVLRENRLYELRDNQDRPISKMEAIGLIQQFKVPEETRQARRRRKPNEGRLTGRRTREAAKAPQSGPLIPPLKIVYCAEELQSTAN

SEQ ID NO: 352476 - protein, 320 aa, unidentified
MMAQNDLVVVGIDVAKDKVDSWIRALALRQTFPNTAQGHRKLVGWLRKHEVNKAVMEASGGYERVWAKLLRQAGIAVRIVDPKRVRSFALSAGRLAKNDAIDAEMIAWFAETFSEAPSQTHDAAHEELQALVKARLGLIDFRMRLENQSEHVALGLVQKAHAHILKSLASEIAKLETAISAKIKSAPDFAERAEIIESVPGFAETSSANLVAGMPELGQVSDEIAAALIGVAPYDDDSGKRRGERHIKGGRRWVRNAIYMPCVGAATQNNPVLKAYYQRLIAKGKEPKVALVACMRKLIIILNTMIARRQKWDPSRYALG

SEQ ID NO: 352477 - protein, 414 aa, unidentified
MNTLVSNTSLSGTLIALDIAKKHHDAKIRHPDGRKSYLRIENTLEGFNRLLALTASPHDDIIAAFEPTADYHRNIAWWLHKQGVKCHLVSSVRCARAREMLFKTWDKNDRKDASVIMYLLEQGLSSPFYDPLANGIIDIQEISNTYHQVTLARTRCLNSLVNHYLTLYFPEAEQFLHMSRAEWFCQFLLQFPTPSCITSLNRDLFVKQSWDVVGRKQYKKQFLEHLYDVAADSIALPLSEDSLAVTTFRLQLHRYVGLSAQRLQLEKQAENYLQERSDYRHLRTIPGIGAIIALMIIAESGDLTRFAHYRQYLNFCGFNLSASQSGQKHSGYRLSKRGNARLRYAFWLAATVAVRTRENSFRYKYERYIRENGDKPDQKRKAMTAVATKVARVAHAIVKQDIDYKGYYEISHGT

SEQ ID NO: 352478 - protein, 314 aa, unidentified
MNTKTFAGIDVSKNHLDVHVLPDDTAFQTGSSTKDITKLITKLKKLKVDLIVIEATGGYGTQLAAELQANDLSTAVVNPRQTRAFAVATGRLAKTDRIDAKALAEFAQKLQPQARPVGDENTLKIKAIVARRRQLVDMRTAESNRLGRAKNEVIYQSIQAVLDCIKRQIDDTDDQLREAIEDSSQWTQKAELLKSVPGIGDVTCITLLSELPELGYLNRREIAALVGVAPMNCDSGMFRGYRRIRGGRTPVRNALFMATLVATKHNPKIRAYYQRLVQGGKKKIVALVAAMRKLLTILNIMLRDNQPWKSTILT

SEQ ID NO: 352479 - protein, 347 aa, unidentified
MMIIGCDFHTRMQVIAALDTETGEVVERQLDHEGGEARAFYEGLKEPGLVGIETTGYTRWFAELLSELGHELVVGEAGKIRAMKTRKQHYDRGDAEHILNLLLRGDFPKVWLPPAEERDVRVLLEHRHQLVELRTRAQNGLQAIALSYGLRRRRGLWSKRGQEELKKLPLREGMGRRRADLLRLLHQLDTWIQELDQRIKQEVAQREEARRLMTHPGVGPQTALATVLVLGPVERFPDDRHLTSYLGLIPREDSSAGRQRFGHLTKQGNRLLRWLLVEAAQTASRYDPRLRRAYRRLAFRKGRAVAKVAMARKLAIRLYIMLRDKIDYPEFCRRGSHAGMLEEVALV

SEQ ID NO: 352480 - protein, 320 aa, unidentified
MSEQPVVVGIDVAKLHVDVAVLGAPAPTTRFDNDDSGHKFLIEALVPLAPALVVMEATGGYEAPLACALQAAGLAVAVVNPRQARDFARSFGQLAKTDRIDALGLAEFAVALLGRPDLKRYLKPLATTAQQDLVALVNRRRQLLTMLGMEEQRLAMARPAVRRSIQALIRAIRKQLDDVDGAMAEHVARHFAELSGLLRSTSGIGPVASATLIADLPELGHLTRRQVSALVGVAPFACDSGSMRGRRRIRGGRFELRRTLYMATLAAITYNPVIRAHYRRLVDAGKLKKVALVACMRKLLTILNAMARTHTPFQENYGNT

SEQ ID NO: 352481 - protein, 391 aa, unidentified
MSMYFVGIDISKYKHDCCILSAVDQNVVTKFTIKNDKSGFQQLIKILHSLSNPEDIKIGFESTAHYALNLELFLENAHHSFMEINPLLIKEYKKSTSLRRTKTDSVDCESIARWLMTVEYKPHSKGFYHAYSLKSLTRLRDRLVRQRSFYLVKITNVLDHTFPEFKPFFHERLSKTALYLLENYGSAEKMARMNAASYEKLRSLSRGRFSPQQFLQLKELAANTVGINNSIFDVELNSLLTLYKSLVKEIGTLEAEINKLIEEVHPHYMSVPGIGPISAAVIYSEYGDLSNFSTPAQMLAFAGIEPGINQSGTESHGGRMVKHGSSQLRYTLINCCLPLIRFDMTFAAYYAKKRAEGKPHRVAITHVAKKLVRVIYALERQGTDFNVQKLR

SEQ ID NO: 352482 - protein, 387 aa, unidentified
MKIMAGIDLHSNNAMCGLVDSEGKRLLHKKVPCDLRCVLSVLEPYKQRLESVAVESTFNWYWLVDGLQEHGYKVALANPAAMQQYNGLKHTDDKSDAFFLGELQRLKILPTAHIYDRKTRPVRDLLRRRLLLVHQRTSLLLSLKSLHARTTGCSLSLGLAKALLPEQAAKLFRHPADQLIAREQAQHIRQLSQSIEAIEKMVLGEVKQLFCYRQLQTLPGVGSILALTITLETGDITRFPSAGDYASYCRTVDSARLSNERKKGQNNEKCGNKYLAWAYVEAANFAQRSDGPCRRFFDRKLAKTNRFVATKALACKLSKAAWYVMSQGVDFDSARAFPGPRPEAQTQRSGKAQAGQATKQTELKKKTDLGRASVNPSKGSGSKTLRD

SEQ ID NO: 352483 - protein, 342 aa, unidentified
MKITTVGIDLAKSGIQVHGIDERGKRQVHKGLKRAQVMPFFANLPACLVGMEACGSAHYWARKLEKLGHTVKLMAPQFVKPYVKSNKNDAADAEAICEAVARPTMRFVPIKNGEQQAVLSVHRARQAFVKARTAQANQIRGLLAEYGIVIPQGIRNIAKRLPEIVEDGENELPGMFRELLQRLGNHLQELDRQVGELEVQIQAWHRESASSQKLEQIPGIGPLTASALVASIGDATCFANGRQLAAWLGLVPRQHSSGGKPTLLGISKRGDRYLRTLLIHGARAVIRVAERKPDHAGSWLAQVMGRRNKNVAAVALANKNVRTVWALLAHHRDYVADYAIAA

SEQ ID NO: 352484 - protein, 312 aa, unidentified
MDAIVIGIDVSKDRLDIATHPSRDTFVVARNEEGLKDLIARLAPLSPQAVAVEATGGYETVVAATLSAAGLPVLVVNPAQVRAFARALGKRAKTDPIDAAVIAHFAAATKPDIRPLPDETTRLFAELLSRRAQIVQMIGAERQRQKRLTGRRQQNSIARLLLALQKELSSLEGDIDEAVRGSPAWREKEDLLASVPGIGPVIARTLIAEMPELGLLDRRQIAALAGLAPWTRQSGQWKGKSRIGGGRAVVRTALSMGALVAGRHNPVLKAFRDKLVAAGKPHKLAGIAVARKLLTILNAIIRDRTPWNPQIA

SEQ ID NO: 352485 - protein, 355 aa, unidentified
MNKIKTNFEGQTIFVGMDVHKAHWNLAIHLNDLFVKSVHQKPNPTVMADYLKQHFPGANYKAAYEAGKFGFWIQRQLTQLGIECLVVNPADIPKSQKDTIQKTDPRDARNISMRLQSGVLHSIHIPDEQQEADRVFFRHRKRIWKDLTRCKNRIKGCLAFSGIDIPEQYDNASWSHNFIRWLKSIDCRQASRRSALNYMISQMEFLRKELLQISNDIRKMMREQRYKTNYYLLRTIPGIGPLTAASLLVEIGDVKRFETFYHLNSFVGLLPMEHSSGEKERKGMLTVRKHRQLRSDLVESAWTAKRTDPAMSLYFQEQVKKKDSKIVIIKIARKLLNRIRYVLVNQTEYEYGIVK

SEQ ID NO: 352486 - protein, 413 aa, unidentified
MEVMYPRCAGLDVHKETVVACVRLAAGSDTSHVVRTFATTTADLIVLSEWLEENGCTHVAMEATGVYWKPVWQVLADSSCFELILANAAQVKNVPGRKTDVNDATWLAELLAHGLVRASFVPEPAIQELRGLLRTRKQLVREKASHVQRVQKTLEEANIKLESVLSDVMGRSGRAIIQALIDGETDPAKLAALAHWKVRASTETLSEALRGRIKRNHRFLLRLHLQQIQALDAGIAEIDREVDDGLACFRDAVDRLSTIPGISQLSAQVIVAEIGTDMSRFATDAHLRSWAGLCPRNDESAGKRRSTRLRKGAPWLKSMLVQCAWAAIRSKGTYLHAQYVRLRGRRGPKKAICAVAASILTAAYHMLKDGTFYNDLGPTHFDRRRPETQARRLIKRLAELGFSVELKSMATAS

SEQ ID NO: 352487 - protein, 411 aa, unidentified
MNNTLFVGIDISKRSNVATFMNCEGKVVGRLTFSNNGPGADRLVAKILSYYEKEDFEAIRIGMENTSVYSKNLVWFLYEHEALNEHKLSIIPLNALMVANYKKSFLDMDKDDITDSFAIADFIRIRPGLLPFKLDDRQEALKIMTRSRYNYVQALSRMKSQFLTRLFLSFSEMEAGKPFYSIFSKTSLSLLEEAFTLDELAEKPIPELVEFLQEKGGGKFQNPEEIAKVLKKAASSSYRVPAMVRESLNRTMASDMEIMRILENEIHNCDKNIEKLMKSVPAILVSIPGIGPVLAAGIMSEIGDISRFQKQESLGKMAGFKWKRNQSGKKESENKAAVLSGNKKLRYYLVEAANRVRIHDPVFEAYYRKKYAESKTHAHKRALILTARKLVRVIFYLLKENKLYKPDVGIS

SEQ ID NO: 352488 - protein, 414 aa, unidentified
MELLHERCAALDIGKKDLKACVRTPSPKGKRSRRQEIRTFATTTNALLELRDWLVAEQVSLVVVEATGDYWRGAFYLLEDQLNVILVNSAHAKGLPGRKTDVCDAAWLCQLGECGLLRASFVPPEPIRQLRDLTRYRTTLTAERSREAQRLEKELEDAGIKLSSVATDITGVSGRAMLAALIDGERDPQVLAEMAKARMRPKIPHLVQALTGNFGEHHAFLCRLHLQRIDELTAAIAELSARIAEQMRPFARQLEHLMTIPGVGQTVAEVIVAETGTDMGRFRTGANLASWAGVCPGHHESAGKRKSGKTRHGDRWLTGALGTAAMAAARTKDTTYLGARYRRLAPRLGKKKALVAIEHSILVAVWHMLTNNVDYHDLGGDYFARLDPERAMRRIIRQANSLGFTVRFDPIQAA

SEQ ID NO: 352489 - protein, 334 aa, unidentified
MKNYLFHVGIDISKLKLDVNLLNSQTLQSEHFVIDNNPKSIKDFVKQLIKKKIDVNQVLFCCENTGVYTNHLSYTLLGLELDLWIVPAIEIKRSKGISRGKNDKTDAKDISLYSLRNIDKLKLYTLAEIDIQKLKILYAEREKALKSLLLIETTKENSEFISKEIYNEVCIINKSLTNNIKKAIDKIEKRIKEIIKSNQQLDKQSKLIKSVPGVGEQTSLYFIIATKGFTAFNNWRQFACYSGVAPFEYSSGSSIKGRTKVNHMADKKMKSLLQMCAMTSLKYDPQLKEYYKKKKAEGKNSMLVLNNIRCKLISRVFAVVNRETPYINTFKFAS

SEQ ID NO: 352490 - protein, 410 aa, unidentified
MDVLVERCAGLDVHKDTVVACVRTPGPNGARSQQTREFGTMTNELLGLRDWLAACGVTLVGMESTGVYWKPIFCVLEDELECWVLNARHLRNVPGRKTDVKDAEWICQLVEHGLVKPSFVPPKPIPELRNLTRYRKAQIEERTREAQRLDKVLQDAGLKLSSVASDILGKSGRDMLNALAEGTRDPEILAELARGRMRDKIPLLQQALEGRFTRHHGLLVGGILSKLDFLEELIGHLSAEIDQVIAPFEEAVELLDTITGVDRRTVEGLIAEIGVDMSRFGSSERLASWAGMCPGNHESAGKQRSGKSRKGSKWLGSYLTEAAKAAGRSKDTYLGAQYQRLRGRRGSAKATKAVGHSILVAAFHILDKQVPYQDLGADWFVKRRPEAQARKLIQQLNTLGYRVTLDPIPV

SEQ ID NO: 352491 - protein, 354 aa, unidentified
MRYVGIDVHKNFCQFAMMDDAGHIVKEDRFPNNDEGMRSFISRLVGYDDVRVVMESTGSLWMKLYDVIEEHGLEAVLSNPYKTRLIAEARIKTDKLDARILAHLLRADLIPRCYVPSKEVREVRSLVRHRAKLSKTRTEIKNRIHALLDKQRLKAPCSGLFSKEGLEWLKGLELSSVDDAVLKSDLGILRALDEQVGYVESKIASVALKDPNVELLITMPGIDFYSAMVLSSEMGSVERFSTDKKLVAWAGMAPSLRQSGDVLRVGRITKEGNKMVRWIMVQAALNAIRSDARLRAFYERCRSRKGHQKAIIAVAHEMLRIVWFMLKRGMPYRDENKRLSLRKHNRMSRIAVDG

SEQ ID NO: 352492 - protein, 315 aa, unidentified
MSDVPCFVGIDVAKAQLDIALRPSGERWAVPNDASGVATLVDRVQTLHPTLIVLEATGGLERAATSALAAAGLPVVVVNPRQARDFARATGQLAKTDALDARALAHFADVIRPLPRPLPDAQTQELRALLGRRQQLIVMRTAEQNRLAGTSARLTQAIAAHITWLNADIATLDDALETLLRARPLWRENDDLLQSAKGIGPVCAHTLLLELPELGTLTRQQIAALVGVAPLNCDSGTLRGRRTIWGGRAHVRTVLSMGTLVATRFNPQIKVFYERLLAAGKVKKVALTACMHKFLTILNAMLKHRTPWKPQEVQN

SEQ ID NO: 352493 - protein, 341 aa, unidentified
MVQFIGIDVSLKESFISVREGGQRIWRGKCPSDPKLIAELIRKRAPTAERVVFETGPLSVWFYHALTLEGVPAICIDARHAKSALDMARNKTDANDADGLAHLAEVGFYREVRVKSFESMLTRTLVAARNQMLKATIQLSNQIRGLMKTFGLVVPKGAGRVFEGHVRSLLASNAGLEHIILPVLEAWRGLRARTAELSKQLIASARVSEQCQLLSSIPGVGVVTASSFVAAIEDPENFKKSRSVGAWVGLTTRRYQSGEVDYDGHISRRGDNHLRGLLYEAATVILTRATADSALRIWGLKLREKIGFKRAAVAVARKLAVIMHTMLRTGQLFDRSVAAKA

SEQ ID NO: 352494 - protein, 340 aa, unidentified
MGEYIGLDVSLKETALSVRRDGKRVWRGRCDSDPAVMARVLRKHAPEAQRIVFETGPLSVWFYHALRAEGLPAICIDARHAKAALDMAANKTDANDADGLAHLAEVGFFREVRVKGYDSMLVRTLVAARSKLVQMTTELSNQIRGLMKTFGLIVPGAKGGSFEAEVLRLLSGDHGLARVILPLLEAWNAVRRRAAELGRQLLAGARQSQACQRLMAIPGIGAITATAFVTAIEDPANFRSSRSVAAWFGLTTRRYQSGEVDDDGHLSRRGDAHMRGLLYEAATVLLTRSQVDSDLRAWGLKLRERLGFKRAAVAVARKLAVVMHSMLKSGQSYRAKAAMA

SEQ ID NO: 352495 - protein, 322 aa, unidentified
MSLPKPLCVGIDVSKATLDIAASSVIEQFSVGNDADGFDSIIAELRTREVALVLMEATGGLEAAVASTLQVEGFEIAVVNPRQARDFARAMGYLAKTDRIDARALAQMAEVINRHPERNRFIRALPDAERQVLNAMVVRRRQLIAMLVAERNRLYPAHPQSRKSINIIMRTLDDELARIDEGMNNHIRNHFKELSERLSSIKGVGTMTVAALLAEAPELGRLSRRGISALVGVAPVNRDSGTMRGRRTIFGGRAGVRTALYMAALVATRFNPVIKAFYMRLVSVGKPKKVALVACMRKLLTILNAMLRKNEEWNESYHHVAP

SEQ ID NO: 352496 - protein, 358 aa, unidentified
MVDKVTEAAVVGGVDTHKDLHVAAVVDQNNKVLGTQYFSTTRQGYRQMLAWMTSFGTLKRIGVECTGTYGSGLLRYFQNAGLEVLEVTVPDRMERRKRGKSDTIDAECAAHAAFSGIRTVTPKTRDGMIESLRVLKTCRKTAISARRVALQIIHSNIISAPDELREQLRNMTRMQLIRTLGSWRPDASEYRNVTNVYRISLKSLARRYLELHDEIADLDVMIAAIVDELAPELIKRNAIGYESASQLLITAGDNPQRLRSESGFAALCGVSPVPVSSGKTNRYRLNRGGDRAANSALHIIAIGRLRTDAKTKEYVARRVAEGHTKMEAIRCLKRYISREVYTLLRNQNRRINSIPITA

SEQ ID NO: 352497 - protein, 371 aa, unidentified
MKKRNTSEQSPKRATKALEGKGPFTIGMDLGDKASRYCTLDKDGAVVREGSIVTTKKGMLQTFGGMKRCRIAMEVGTHSPWVSRLLKSLGHEVIVANARQVKLISASSRKDDRLDAQTLGRLARVDPELLRPIRRRSEKAQGHLMVIRVRAALVEARSSLVNTARGLAKAMGERLVKCDTDQLRVERMEGLPAELRESLEPLLKEVESLTEKIHGSDEKIEQIARTEYPETKLLQQVSGVGNLIALTFVLTLEDRERFQKSGDVGCYVGLRPKRSNSGESEPQLRITKEGDIYLRKMLVQGAHYILGHRGPDTDLKRWGLKLSERGGKNAKKRAIVAVARKLAVLLHRLWVTGEVYEPLRNHPAQQSRAAA

SEQ ID NO: 352498 - protein, 361 aa, unidentified
MKKPAHHPIAEVPRRQAKVEITIGIDLGDVWSHYCTLNQDGEVVDRGRFRTTPKAIEKWFTDVSPARVAMEAGTHSIWISAQLQELGHEVIVANVRELRAISHSDRKSDQVDAEKLARYARLDPNILRPIAHRTVAQQEALTLVRARALLVRLRTAAVNAVRGLTKSCGYRMPASATTCFAQRSLAVMPPGLAQALGPVLQQIAEMTVKIKLYDRQIQQLGQTEYPETQALLKVHGVGHLTALTFVLTLGSKERFGRSRDVGCYLGLRPRRSQSGDHDPQLGITHAGNAYLRSLLIECSNHILRPHGRDSALRQWGLHLAARGGKQAKSKAVVAVARKLAVLLHHLWSTQEPYMPFYEQAA

SEQ ID NO: 352499 - protein, 347 aa, unidentified
MRFYTKQHRYYCGIDLHARSMYVCVLDSQGEILMHRNMTCSPELFLKAIAPYREDVVVGVECIFTWYWLADLCGQQNIPFVLGHALYMKAIHGGKAKNDKIDAHKIAVLLRGGMLPMAYVYPAVMRSTRDLLRRRMHLMRKRSELLAHIQNTNSQYCLPQFGKKIAYKRNRPGVAEHFTDLSVRKSIEMDLSLIDHYDKLLTEVELYITQNAKVHDVNAFYRLRSVHGIGKILALVILYEIHDIKRFPTVQDFVSYCRLVKCSKESAGKRHGSSGAKIGNVHLKWAFSEASVLFLRANPAGQRFVDKLTSKHGKAKALSILAHKLGRAVYYMLQQDKAFDMNKFLNS

SEQ ID NO: 352500 - protein, 428 aa, unidentified
MDITQNQRLAQMNDRTLIIGVDVAKHKHVARVVDDRGRDLAKRLVFANTIAGFSELLSWAKDLSENHNRPEIVIGMEPTGHYWLNLAYHLKARGIHTVVVNPMKVKRFKEMDDDSPTKNDTKDAKVIAQIVRDGRFHEPTLPEDVYAELREGMKVYDIMQEDLSSIKAQMQNALDRYFPEFLQVFKDWTGKAALHLLEKGFLPEDIRQASEEALLAEVKTAAKRAVGIKRIQALKQAAETSVGLTVGLRMAREEFHYLIDQYKRIEERLVALEAQLEELVLHVPGADQMRAIKGVSALTVAGFFAEVGDLANYRDPRQIIKLAGLNLKVNQSGTFKGQTTITKRGRKRLRSLLFQVARPLSSHNEAFRKLHEHYRYRATNPLTGKQSFVALSRKLVKIFYVLGTRKCAFSETRMIRDVPGISGLQEAV

SEQ ID NO: 352501 - protein, 371 aa, unidentified
MSQYSTDTVWVGMDVHQDSITAAILVGNDKDPKIRHLPGDLNAVRRLFRRLSEYGTPRSCYEASGCGYVLQRCLDHDGFHCEVIAPSLVPKKSGNQCKTDPRDAINLAQQYRAGNLVPVTVPSTAQEQVRQLVRSRLAVQSHVVRLKHRIVRVLATHGHRFTAGKSNWTQKHRAWLKKLHRELEEPLGTVLTHHLEHLEYLESQKISLEQEIDRYARSEPYREKVEVLCCFRGVKVLTAMTILTELGDIRRFKKATGLMSYAGLVPSEHSSGNVKRRGSITKAGSQELRRILVEASWHYRKRAGSTLKLQRRRMGQNPQVVSIAVKAQHRLHKTFWKIASHRHSCTAVTAVAREFCGFIWAALWAVECQEV

SEQ ID NO: 352502 - protein, 412 aa, unidentified
MQTLIERGCGLDVHQATVVACLLIVRNGGKVQKQMRTFGTTTRELVGLREWLLSEGCTHVAMESTGVYWKPIYAILEGALEIVVANAQHIKKVPGRKTDVKDAEWIADLLCHGLLRSSFVPPKPIRELRDLMRYRRKLVESQAAERNRLLKVLETANIKLANVATDVFGMSGRLMLRALIAGKATPQEMAELAKGLLRKKIPELELALEGKLEQHHRFLLELQLQRLEAAEKDLAVLEQRIRRMLEPYAAQLALLDEIPGVDWTLAAVIIAELGVDMSAFGSVSQLASWAGVCPGNNESAGKRKSSRVPSGNVYLKSGLVEAANAAARAKGTYLRDKFFRLKARRGYKRAVVAIAHKILVAIYHMLSQQVSYNDLGDLYLDKLNKNHLTRNLVHRLERLGYAVTLTPQQEAA

SEQ ID NO: 352503 - protein, 481 aa, unidentified
MKIKSIYPARNSSQLREVLGKYSPGELLYAPIDVAKYNHKACAVNFFGDILTPAFEFSNNAHGVKFFISKITEAARNAKAKKIFIGLEATGHYHQNLTLHLKSLGYEVAVINPFDSWKERLNKSSKTDKIDLGSIAKSLISRKFSSSTVPQGVYYNLQRATRTRRKFVNRRTSSKNIITGLLDNLFPGLWDKEDTIFSDRWGKASLSVLEHYPTPQMVLRLGEKRLTRFLKKGTTKLGEKTARKIISAAKVALTRSPYEQTMDILALRSHLQAYRLYEEIIFHLEKEIAYLLVQTPGTYLLSVPGISVTYAAEVTAEIGDISRFAYANQIISLAGTCSKKDQTGEHDPQNLPISKKGNKFLRTVLNQAGLSLNTWCPDFNAYYSRKVEEKKGRCGIARTATGNKFARLAFALMKHESLYHPHSFNTLVQDPGNYYLSVYGEILKKLRAFSSEKILPQSNYLEKIKQKLEKEYAINLSEVKG

SEQ ID NO: 352504 - protein, 368 aa, unidentified
MDEPIKFFVGLDAHKDSTSVAACEASREPARFVGTIGPDVQALLKLLAKAGDPAQVNVVYEAGPTGYGLYRELRRRGYRCQIVAPSLIPRRPGERVKNDRRDCGRLAELSRAGELKPIWVPDEAHEAMRNLWRAREDAVGARLKARQQLKAFLLRHARRYPGKTSWTKSHEHWIAGLRFDHEGDRIALAEYQLAAQAAEQRVQRLTSALTEAVKGWRFAPVVAALRALRGIDTVSAIGLISEIGDISRFSSARQLMSYLGLVPSEHSSGNSIRRGSITKTGNAHARRLLTEAAWSYRFPARMSQQLRQRSAAVDEVIRNHAWKAQLRLCGRFGRLSARGVQVNKVCVAVARELAGFVWAIARQAATAG

SEQ ID NO: 352505 - protein, 401 aa, unidentified
MLYVGIDWADTQHRVSVIDSQGCEKANFSIPHTREGLEHLKEKLLELAQSPQSIACIIETKHGLLIQFLLEAGFAVYPVNPKVVDRRRKPSGAKSDPLDARILAELGRTDINRLQQLKPDSELIQELKALTRDQDTLIRESTRLTNRLISCLKEYFPVALELFSKPTLPVALDFLKNYPTVEAAQKLSVSKLTAFLKSHKHPKPSEAAMEIYQKLHTPQLKASPVVARTKARFMLAILSQLEPLLEQIKEYDKEIERLFNLHSDSRLFASLPGAGLRLAPRLLSEWGDDRERFLNASVVQALAGTSPVLYQSGKYRFAKQRKSCVKPFRNAMHQFAYQTVRWVGWAREYYDKKRSEGKSHHEAIRALANIWVRIIFAMWKNFKPYDESIFLAAREKHRLAA

SEQ ID NO: 352506 - protein, 347 aa, unidentified
MVEITRIGMDTSKSVFQLHGVNAAEEVVLRKKLRRQDLLRFFAKLPPCRVGMEACGGSHYWARELQALGHQVELIPPQYVKPYVPRGKTDAADAEGICEAMSRPKVRQRLVPVKSAESQAALMLAGLRERLVRQRTQLINTIRGYASEFGLVAAKGPAKVTTLLRRIEDGPTVPETARALFAELACEHARLEAQVEAADARLMAWHRQDEASRRLAEIPGIGPVGATVLVLRAPEPQRFGSGRDFAAWIGLTPKNHNTAGKQRLGGITRAGDEALRSQLVVGATSVIRQVRRGTSRWAPPWLLDLIARKPPKLAAVALANKIARIAWKLMVSGERYRPQPAAATLGA

SEQ ID NO: 352507 - protein, 373 aa, unidentified
MKRILRIGMDVHSTNYTLCAIEPRFDGDDIIYANVKVTPDPGNVMQFIENLKAKIKDDCDILCGYEAGCLGFSLYHELVKKGIRCVILAPTTMMTPQGKRIKTDKRDALMIAQCLAYGGYHAVHIPTDQDDDVKVYLRMRDDHKCNLKRTKQQICAFCLSQGFHYEKGKWTQAHLKWLKTIELGAMDRETLNEYLITYEYLTNRIETFDRRIEELGSGTEYVEKVKKLVCFLGVKTHTALSCLVETGDFQRFAKGNIYAAYLGLAPGEDSSSDSINRLPITKAGNSHLRRLLVEASRGICKGVVGHKSKDLKARQNGNPPEVVAYADKANERLRRKYYKMMRHGKKKNVAVTAVARELACFIWGMMTDNISIV

SEQ ID NO: 352508 - protein, 467 aa, unidentified
MKLYLGGDVSKGYTDWVILSDKKQTVLENFQLDDTYEGHCKLYSTIEAYFDKYPGLEMYAAVESTGGYENNWVHTLKSYQKVFNLKVARVNPAGVNYNRRAGMKRNVTDAISALSIAEYMINHPENIIYDQDEKWKTLCRHWNFVEMQKKQRVQTINQLETILYCANPTLLRFKKNKLPNWLLELIIKCPTAGKLANAKPEKLAKISFLTLKKAQGLVAEATQNIASATDRNSEILVRQIARQIKAFDENIKSQMKLIEKEFICPGIEILKSFQGIDTTSAIGILLEIGTIERFPTVKGCSCFYGLHPKFKQSGDKIIGVRMSKQGSKNMRKILFNIAKGAITSNPLIRDLYQKKLSEGMSKMAAIGVCMHKILRIIYGMLKNNQAFDPSIDKHNNERSKSKQQEKKQQESANIDKSRRYQKFDATAPISRKQLKKRKEHDLSQCEISSQSTGSICPSDTKILKVKH

SEQ ID NO: 352509 - protein, 356 aa, unidentified
MSQQSNYAIAVIGIDIGKNSFHVVGQDQRGAIVLRQKWSRGQVGARLANLPPCLIGMEACVGAHHLSRKLHLLGHNARLMPAKYVRPYSKGQKNDFRDAEAIAEAVQRPTMKFVATKTADQLDLQALHRVRERLVSQRTGIINQIRAFLLERGVAVRQGLHFLRAELPGTLATRTDVLSPRMVRIIEDLSADWRRLDARIEGLSGEIETFARQDQHCERLMTVPGIGPMISSAMVAAIGTGDVFSKGRDFGAWLGLVPKQISTGDRTILGSISRRGNRYLRALFVQAAWVVLVKLGPKQWERYGLKSWIEAAKKRLHHNVLAIALANKLARIAWAVLNKGRAFACVKTDAVASRPA

SEQ ID NO: 352510 - protein, 387 aa, unidentified
MARKRTLSTLDTSIAYEAVGLDLAKTDVALAAFDSDHKEPYLIDRIPYDKLYELLANMAPTLVAMEPCSGAHQIAEQIQELGHEVMMISGRHVQAWVKDHCNGQKTDLNDAFAILNLAYDRWLTPIRGKTREECRLLALQASYRQLKGQRTKTMVHVKATLHAWGFPIRAGSFNQKALHELIDANREAFGDEVVETLHLMINRVHDLDHDIATVLKLLTEATKRDPRASLLRSIPGFGILTMSRWCAVIGDIARFDSPKQTMAFVGLVPNNRITGHHTETSSGREARGQGRMSKRGDKMLRSLCILGAASLCLMVRNDRLPDCPFVASIKERLASPRPWFKVLVYVAAKLVRIATALLKYGETFSYEKAGISKAVLKQWELEQAKAA

SEQ ID NO: 352511 - protein, 423 aa, unidentified
MSYKIAGIDVHKKMLAVVVADVSAEGEYDFERRQFGSSPDQLRLLTEWLVEQKIQEVVLESTAQYWRPVWQTLEQHWKAECQTWEGAGPMAGTLHLAQAQSNRGPRGRKKDFADAERLLKRLVAQELILSFVPDAEQRLWRTVVRRKNQLTCDRVRLQNQLESLLEEAHLKLSSLVADLLGASARRMLKALADGETNPAALAALADRRLRATQQQLCDALGASKELNPVYRRLVKMALEELQLIEQQMDQLDHEIADLLSQHQTAVQRLAEVPGLGVNSAHQIIAEVGATAATFPSEKHLASWVGVCPGEEESAGVSASNRSPKGNRFMRRLLNQAANAAVKVKGSIFEIVFRRLLPRLGYQQAIWAIAHRLCRLIWKILHQGVRYDERGPAVSQRSRGARTAKMIRELRSLGYNVELSGNPA

SEQ ID NO: 352512 - protein, 331 aa, unidentified
MVIKDVIGIDVGKLKNEACIHNSQLKLQFDNTSKGYKELINWTNKNIKQNLSNILFAFEHTGLYSYSLSVFLTEQCMMFVVIPGLELKRSMGIVRGKDDKIDAKRIALYAYQKRESLELFKLPKQEIVQIKRHLSLREKLVKQRAGYKASLTEYTLFLKKKENQTLFDVHKKMIAELTKQIDKTEKELDQLVNANQHLKQMFDLITSINGVGKQTALFMIAFTNGFTQFKSWRKFASYCGIAPFPNRSGISIRGRTKVSNLANKKLKSLLDLCAKSAIQSNPEMRIYYHRRIEEGKSKMGTINIIRNKLLARIFAVVDRKTPYVQVKKYAA

SEQ ID NO: 352513 - protein, 312 aa, unidentified
MEARYVGVDVSKDRLDVHVLPEGAAFAVARDGKGLAELVERLSALQPQRIAVEATGGFETIVAAALAGASLPLVIVNPAQVRHFAQALGRRAKTDPIDASMIARFVEATKPDLRPLADEAAQLLADLVARRRQIIEMIVAERNREKRVAVRRIRKSIARLIAALEKELSEIDAEIDASVRGSPAWREKEDLLASVPGVGPITARTLIAELPELGTLDGKRIASLAGLAPFTRQSGQWKGKAMIAGGRKSVRSALFLASLAACRHNPVLKAFRQRLIDAGKPKMLVAIAAARKLLTILNAILRDKQPWRPETA

SEQ ID NO: 352514 - protein, 363 aa, unidentified
MKIMTGIDLHSNNALCGLMDESGQRLVHKQLPCDLPAILQLLAPYKERIATVAIESTYNWYWLADGLRDHGYQVVLANPARMKPYDGLKHTDDVSDAYFLTELLRLNILPTGHLYDRKTRPVRDLLRRRLLLVHQRTSLILSFKSLNERTLGQRVALSRVKALKAEEARALFTDPADQLLSGTEIELMGHLTEAITKIEAHVLSVAGKWSTYQRLQELPGIGKILGLTIALETGDAKRFASAGNFASYCRCVKSLRTSNGKKKGENNRKCGNTYLAWAFVEAAHFACRYDDQCRRFYDRKKQQTHPVIATKALACKLAKAAWHVMAEDVPYDSERVFGPGKKTDFGETGREPAKGSGHPSQID

SEQ ID NO: 352515 - protein, 442 aa, unidentified
MKKEAKNEFRLVHPNAAGIDIAKDVHYVSVPADRDETPVKHFGSFTEDLHELAQWLKRCEIDTVAMESTGIYWVQLFLILEEYGFDVFLVNARHIKNVTGRKSDVLDCQWIQQLHSFGLLNKSFQPENEIRELRAYMRHRKNLTQSSASQIQLMQKAFEQMNIKLQNVLTDICGKSGQLIIQAILAGERNPEVLVELIDHQVKASKQEIKKSLVGNWRTEHLFELKQAYELYLFFKEKISECDVQIENVLVRLDSNGLDEGKNSNTPRRVYTKNRFDFNATCYLKSFIGVDLTKIFGVSEILALEIISETGIDMTKWPTKKHFTSWLNLVPNNRVSGGKLLKPRKVKKKNKAGQAFLMAAFALQRSNHWLGSFYRRIKAKQGPATATKATARKLALIFYDMIKFQREFNPINSEVYDKHFAEQRIKYISSQAVKLGFHLIPA

SEQ ID NO: 352516 - protein, 315 aa, unidentified
MKKDSIRMKKGKGDWEGKKLTIGMDLGDRTSRYCVLGEEGEVLLEASVATTQKGLSEGFSAVPPCRTAIETGQHSPWVSRHLSGLGHEVIVAHARNVRLIGESTRKDDRLDAKTLARLARIDPALLSPVRHRSAEAQAHLTRIRARAVLVGARTALVNAIRGLTKAYGERLRKCHPEQIRKELATELSSELRTALEPLFQEVQSLTERIQHYDHEIEKIAKQHYPEVAQLQQVNGVGTLIALTYVLTVDDPHRFGKSRDLGCYIGLRPGRRNSGNSQPQLHISKEGNRYLRTMMVQARTISWARLGKIATCGGGD

SEQ ID NO: 352517 - protein, 316 aa, unidentified
MTMNDYPFSQFVGVDVSKATLDFVLAEGEKSVSIKNTEKQIVSKLIEVITDRQSTIVVLEATGGYEGRLVALLHQHNIAVAVVNPRRVRDFAKGIGLDAKTDPIDAKALVLYGQVVKPAAQMAKSVEDKKLKALVNRRKQLLGLVTQEKNRLQQTSDLEIQDYIQQSVEALEKQIETINQRLAKCVKADTKNARKIEIFDSIKGLGPVIASTFLAELPELGELNRGEIAKLVGVAPMNRDSGTMSGHRRTMGGRSYVRRVLYMATLVATQHNPRIKVFYQRLLARGKSKKVALVAAMRKLLTIVNTLIKNDVLWQD

SEQ ID NO: 352518 - protein, 412 aa, unidentified
MWPAKPEMPAEPPDGSSGEWAQTQRLLELGSNAWKLELMHVAVGQPTQEAYRTPMNSVGLDVHKTRCVACVKTQEGRIVEEFAFQNTPHGHEELITHLKAYPEVQVAIESTGNLWIPIYNRLEDEQIHIILTNPKKTRLIAEAKIKTDKLDARILADLLRANLLSASYVPPPEIREQRSIIRERARLTQLRTIIKNRIHTLLDKHAYKSPFTDLFGKHGLEWLAKLKLPAGDRILLEINLEQLNSLNHSITRLTESIAASAIENPEVKLLMGFTGIDYYSAMFLINEIGPVARFSSPKKLVSYAGLAPSTRQSGNHTTHGPITKEGNSHIRWILIEAAHQAARHDPRLSQFYQRIMKRRGHNRAVVAVARKMLVTIYHVLNHHSQYRGLRPELFENKIRRLERITESSLQTA

SEQ ID NO: 352519 - protein, 388 aa, unidentified
MGVIIGMDPHKRSATIEVVDDQRGNVLSSGRFGTDKVGYQQMLAAGREYPDRVWAVEGCNGIGKHIAHRLVHDGETVIDVPSKLSAQVRVFATGNGRKTDPVDAHSVAMAALHNPSLLRVEVDDDLVVMGMRADRRDELGRARTQTLNRLHRILLELFPGGAKQFLSATQARALVATIKPRDLPGKTRRRLAVELIGELEAIDRKIKTLKKELTALVQDRGSTLLELNGIGPSAAARLLADVGDIHRFSDRNKFASWNGTAPLDASSGDQSRHRLSRAGNRRINRALHIMAVVQLRHPTEGRAYYDRRKAGGLPSMMAQRALKRRLSNVVYSRMLEDQKRREAADPGGQSGNGSDSSAIDSHPGIDSSEKPHPEPATQQPRTDLAAVS

SEQ ID NO: 352520 - protein, 339 aa, unidentified
MKDIKILGVDIAKDVFQLCGIDEWGKVIYTRRVKRAQYVSTVASLKVGCVVMEACGGANHWYRTFMGMGISTQLISPQHVKPYVKSNKNDRNDAQAIAEAASRASMRFVRGKTVEQQDVQALLKIRDRLVKSRTALINEIRGLLQEYGLTMARGAKRFYEELPLILASEAVGLTPRMKRVLNCLYTELLNRDEAIGDYEEELKAVAKANEDCQRVQSIPGVGYLTALSVYASVGDIHQFHRSRQLSAFIGLVHRQHSRGNKEVLLGISKRGNVMLRTLLIHGARALLRHVKNRTDKKSLWLKALIERRGMNRACVALANKNARIIWALLTRQETYRCGA

SEQ ID NO: 352521 - protein, 331 aa, unidentified
MADAKRFVGIDVAKAQLDVAIGPNGESFSVANDETGISELLRRLEPADLVIIEATGGLEVPVASALATAGIAVAVVNPRQVRDFARATGQLAKTDALDAQVLARFGEAVKPQVRALRDAQAQALEALVNRRRQLVEMLTAEKNRRANSPKVIHKGIDEHIRWLEKRLSGLDDELAGLVRETPIWRERDELLRSVPGVGKVLSTTLLAHLPELGALNRKQIAALVGLAPFNRDSGSLRGSRCIWGGRAQVRRVLYMAVVAAVRSNPVIKNFYAQLRARGKYPKSALTACMRKLLVILNAMLRSKISWQTPALASSTATLSPLLGAAPEHGCC

SEQ ID NO: 352522 - protein, 408 aa, unidentified
MDVVYQTCCGIDVHKMKLVACLCKGHKQEIKEFSAKTKDIKAMVDWLEGNKCEMVAMESTSVYWKPLVNIFEMRGLKYMVVNAKDFKAVPGRKTDVLDSAWLADLLRHGLLKSSFIPTREQRELREATRYRKAITEERARALNRLQKLLEGANIKISSVLSTMTGKTTMNLLDYVLNNDEMMDEKTAETLIISRISASVKEVTEAMEGIMTPFQKTMMKQVLTHLNELSERIEEMDIIIDTYMAEYWEAIKKLEQIPGIGKKSAEIILAEIGLDMNQFPSAGHLASWAGVAPGNNESAGKRKSGRTRKGNKILKSTLAQAAKSAAKNKNSFFHAQYQRIAIRRGKNRATLAVAHSILIAIYHMLKDNQEFIDLGSDYYNQFNTEKKINSYLKKLAALGYRVDEHSTVK

SEQ ID NO: 352523 - protein, 364 aa, unidentified
MDTHKKEHVVAVAYADTGELEVFTVRNTVKDIRKMVRKVQRQAPGEVHFCYEAGVCGFTLKRQIEALGSRCQVIAPSLVPTKPGDHIKTDRRDAKKLLGQFVAGELTEVEAPSPAQEAAREITRCREAAKENLKRVRHQLLKFLTRHGYIYRDGRHWTQKHDRWLRSLQFDLADLREVFDWYYTELQHCLQRLATLDKEVAALADREEYREAVGALRCFRGIDTLTAVTVLTEIFEFGRFPSPRKLMAYLGLVPSERTSSESRRTGPITKAGNRRVRRLLVESAWHYRHRPFVSKELKRRRQDQPQWAVDLADRAMARLHKRYWRLLDRGKAPGVVVVALARELAGFLWAVLHEQQWRAARAEA

SEQ ID NO: 352524 - protein, 452 aa, unidentified
MAQGSGLTRGDRNRNRRIGLLREVVRRDRAVLAIDLGEDKQAAVLVDHEGRVLARKMVMVKAHRLGGLLEWAAGQAARAGFAGLAVACEPTGHRWKALMGLADAAGAGFVCVQSLAVARAREGDDYTRDKTDHRDARLIGKLAVRLDCYLPERAEEAWARLRHLGARRFALVADVVAGRQQIGDLLACAWPAALGTAARPLESTTWLAAMGVVTDRCCGDPARLRKMGYDKFAAAVRRELPRWGARRACRRIVAGLWAALADPGGVAAQRRGALERVHLLMGDWRSLLARLADAGARMCAVLDELGLTALVTSIDGLSAVGAAVILAETGDLARFATSRSVVKHAGLNPAENTSATLAGATRISRRGRPGLRTAAWRAAWPGLRHNRVLRARYAHLTGRDGGNRLSDGQARAACAAALLRWLYAVVTRRQAWDARIAAGLIPARAVTAPAAA

SEQ ID NO: 352525 - protein, 394 aa, unidentified
MNKVDIAPFEVFCGIDVGKSLNHIVALDRYDDKPLINRKVPQEEAEIRAALEEAGDFGLALVIVDQFGAFGRLVVGVAKSMDIPVAHMSPRRFRQVAETYGEDKFDEKDAFILADASRTTPRNIEFVGNRAESMAEIKVLSSRRDDIVEERTRCYNRLHDFIHQVSPPLEELFSKRKLHNDLEIRLIARYGGPAELKYHCVDGPKKVEQVFDVLDRQTVMLPGAAVIEEQIRSIASRIIELLAEEKRLNLMIDQRAKMIPEVDLLQSIPGVGSVYAALIAVEIGDIGRFRDSNHLASYAGVAPRKEESGTSVHKRRKRKGGNRRLKNALMQSSQRSVQCDPLARAYYERKRAEGKKHLQALRALARHRVTVIFAMLNEGTFYEPPVEVDENGRG

SEQ ID NO: 352526 - protein, 354 aa, unidentified
MDKYIGFDIDCKKTVACVVQKGKKDIYQTLGSDIESMKNFLLQEKRGDNKVHLAFEISGHAGFIYDSLIDCVDRINVVNPHKATWIYRTSKKNDRIDARKMAVLMSIDELPTVYMPSKEVRQWREMILHRKKIVCKMVQSKNRIRATLKSQGYFCPEYKGGWWKKVNRLWMRRLCEGRFDVDSLWRIHLCNLIDELDLLEGQLRRVTNYLDGYLAKNSGGRLLMSIPGVGPRTAEAVLAYTDDVTRFGSYKQYCSYFGLTPKLDESGSMRRLGHISKHGPSVARWAICESSWIAIRHSKGLRAFYDRVMAGQNCRKKIAVVAVGRKMLSIMRAMLLTGEMFNERLVDAAIIQAA

SEQ ID NO: 352527 - protein, 356 aa, unidentified
MKEIKSQTELPYKNKEVFVGIDTHKRSWSVSIRIDNTSMKTFSMDPSPDLLVKHLVKNYPLAKYKCVYEAGFGGFWIHEALVKENIECLVVHACDIPTTHKEKNRKTDKNDARKLALELERGSLEGIYIPSREHQIFRTLSRSREQAVTDVTRVKNRIKGIVNFYGIELPEHSSGWSKKFIVQLRDLDLNSDDLKDTLTIYLDDLEYQMSKHDRILCRIKKILEKKDPELFKRVQSIPGVGLKSAAGLIGEIWDMSRFENIDKLKSFVGLMPSTHSSGETIREGTLTMRRNRFLRKILIESAWVAMRHDKVLTDQYFKLKSRMIAQRAITRIAKKLLSRLRAVWLGEYAYAKGLES

SEQ ID NO: 352528 - protein, 343 aa, unidentified
MQTITTIGLDIAKSVFQVHGVDAQGNIIVRRQLKRRYVLAFFQKLPPCLIGIEACASSHHWSRELQSVGHTVRLMPPAYVKPYVKRQKNDAADAEAICEAVTRANMRFVATKTPEQQSCLMLHRTRHLFIRQQTAVINVIRAHLAEFGIVAPVGRRGVEELLDIVADPTDKRLLDVARACLVALGAQLRSLKAQILGFDRQIMAWHRSNEASRRLDAIPGVGPMLATALVACVADPKVFRSGRNFSAWIGLVPKQHSSGGKDRLGSISKQGDRYLRSLFMAGALAVIRYAKIHGTKHRPWLTALLARRPTKVAAIALANKIARMAWAMMARGERYKEPVALAA

SEQ ID NO: 352529 - protein, 347 aa, unidentified
MVIVDSARLVVGGIDTHRDSNVAAVVDINGGLLGVESFVTTADGHRGLLSWMSGFGTIERVGIEGTGSYGAGVARHLSSSGLLVIEVDRPNRQKRRQHGKSDQLDAIEAARGALSGRCEGRAKSADGHAEALRALLVAKRSARSTRIRTIVQLRHLMFTAPDELRARLAVLSAAQLVNEASRLRPRPGGDVALHGTKTAAVLLARRVHALDVELAALDEQIEALVKDSAPALLNIYGVGADTAAVLLVTAGDNPQRITSEAKWAMLCGIAPVPAMTGKIDNRYRLNNGGNRHANNAIWRIVITRLGQHEPRTVAYMQRRLAEGKSKRYIIRSLKRYVARETFRALPR

SEQ ID NO: 352530 - protein, 340 aa, unidentified
MIKIIGLDIAKNVFQVHGIDETGQPALRRKLRRAEVLRLFSHLEPAVVGIEACHTAHYWGREIAALGHEVRLMPPQFVRPYVKSQKNDAADAEAICEAVQRPTMRFVPVKGADQQAVLLLHRTRDLLIRQRSSLISAIRTHFAEFGVVVGQRMRNIDRLLGLLVDEGAALPELARRMLAVLADQLRDVAARVAAVEGELMAWHRANDVSRRLATIPGVGPITASAIVATVGDATQFKSGRQFAAWLGLVPQQRSSGGKERLGRISKRGDGYIRRLMIHGARAVVGWRKRRPVARDPWLSGLLARRHVNVATVAFANKSARIAWALMARGRIYTTARARAA

SEQ ID NO: 352531 - protein, 338 aa, unidentified
MNIVFLGIDLAKNVFQLCGLNQAGKPVYTKRTGRKELLQTLANIPACLIGIEASTGAFYWQREFEKLGHKVKVISPQYVKPFVRGQKNDGNDAQAIAVALMQPTMQFVPPKSPEQQDIQALHRARQRIVNHRTATVCQIRGLLLDRGIPIGSAVSRVRRAIPLILEDAENGLSSRMRRTIAELYDLFNDLERRIHFFDKEIETVFRQSEACQRIARVKGIGPKTATAVVAAIGKGTEFKNGRHFAAWLGLVPRQHSSGDRQVLMNMTKKGDKHLRTLFIHGARAVVRVATNNNDGHMNQWVNQLKERRGFNKTTVAVANKNARIIWSMLRNETEYQVV

SEQ ID NO: 352532 - protein, 450 aa, unidentified
MKYRSYENCQEKKREVSGKKVIGIDPAKEKHQVTVLDEEGMQMGNSFSIEVSYRGFKDDLWKKLEKTLGNFSKDEVVFAVESSCNLWKVLTEYLSGEGYTVLLVSPLTTYQSRPMMNNDYSKTDPKDALLIANNAGKGYYSTYRIYGPEVNMLHSLCITYDKLTKDRNKTLLRLRALLEEIFPEYLQCVNVAIDTSLYLLEKYFLPEHFAKLDVEEEEWNIRRISKGNHNADTLRKIKEHAKHSIGVEKTGEEDGVRLILDCWIAQIRQLNKSIKVISEKMIDLARENEYFEILTSVMGISDISAARFIGECRDLRLFKHFKQIEKSAGFNLRISDSGSGVGMRRISRLGNKRLSKLIYQMTTQTARFIPEVRIKFLNRQLKKKSYRKNIIASSSNLLKILMALIKDRRKYEFREEKAKEMELLEKKYEQAEKKDTRKKKTTKPKIKKAA

SEQ ID NO: 352533 - protein, 350 aa, unidentified
MNVNHYIGFDVHKKSVSYCVKGADGLIFEEGKLRATHQALRQWAQKRPEPWHGAMEATLFSGWIYDALKPFAAELQMGHPALMKAIGASKKKNDKLDARKIADLVRCNLLPACYVAPVEIRELRRMLRYRNLVVAQAVRMKNKMSGLLMEAGAEYNKQRLHGKQYFTELLDAVEEVPESVKDLLRLSRGALEMFETTQLQLLARLRKDRRLAQRVTLLRSIRGVGEVTALTWILEVGDPHRFSSIAQAVSYCGLTSALVSSADKQQRGPISKQRNAHLQTVLIEAAKLAPRWNPQLAALHARELERGNRNRATLALARKLVAYLLAVDKSGQPFQVLSPSAEETEVGKAA

SEQ ID NO: 352534 - protein, 329 aa, unidentified
MYYVGIDISKRVVDVCLLIDGIKGKRKTKTLPNGPNAVEALAEWLTRQKCDPSQAHIVMEATGIYHEHLAYGLHQSGIAVSVINPHRLREFAKGMGILTKTDKVDACALACYGCLRQPECWTSPAPEIRKLRALLQHRDSLLGDKQRLENRLSTLRSTLTTEEVMASLESMVQHVKDELERIERLIADHIDNHPGLKNDLKLLKSIDGVGDQIGWNMLATIRGNCFRSAEQVAAYLGVIPVERRSGASVRGRARLSKIGPSAMRAKLYMGAIAAISHNHHVKAQYERLLLKGKAKMLAIGAAMRKLVHLCYGVLHTQQQYDRNYGVVAS

SEQ ID NO: 352535 - protein, 340 aa, unidentified
MGEVTTIGLDLAKLVFQVHGVDAEGATVLRKQLRRAQVLGFFSRLPPCLVGLEACATAHYWARELHALGHEVRLMPAQYVKAYIKRNKHDAADAEAICEAVVRPTMRFVPVKTADQQAAVLLHRGRERLVRQRTGLVNALRGHLAEFGVIAPQGLRNIGKLIAIVRDEGDARLPALARQVLQVLAAQIEQLEAAVAAIEKQLMAWHKSNPVSQRLTSVPGIGPIIATAIAATVVEPSSFRSGREFAAWLGLVPRQNSTGGKHRLGGISKRGNQYLRRLLINGASANLLRSKATNADPWVIGLRQRRPSLVVAVALANKTARIAWALMHRHENYQRVAAAA

SEQ ID NO: 352536 - protein, 419 aa, unidentified
MSQSIIDKSSMQDPSETLHAGVDLALEKNVVVVVNERAERLDHFSFPHDRRGYDYFLRRLEGLCQKHHATKVVVAMEPTNYFWKLLARELEEKQQTYRLVNPYTVKKHREGDQLDRSKDDRRDAGQIAELSRNSKTTQTQLQKGAYEDLRQYATMYYQLMQSIRREKIILWSLVGQVFPEMVRTFKDLEGETYRALLMTCAAAAAIRQLSLDVFLAQVRAFYSGKRLCTSKLKRVYQLASRSIGVTEGLQAIQLAIQVHLTQLQVFETQLEQVTGAMTARLFSLLEAPYLLSCPCLKPTSAALFLAEVGDPQRYQKAAQWVKLAGIQPVPNTSGKKQRSRTPMSHQGRPRLRTLLYFSCLRMIQHDTRFAQLYSYLQRRKDNPLTKMQALGVLMNKLLHIWWALIQNQTFYNPSFGQSV

SEQ ID NO: 352537 - protein, 380 aa, unidentified
MPDVSSNATRQTSATYVALDVHKRSIVAGALPASGGEVSLSELPNTERALRRLIERLGGPDGIAVCYEAGPCGYEPYRLLTRIGVACDVVAPALVPVRPGDRVKTDRRDARKLCRLYRAGALSFVRPPSPAQEGLRDLMRCLDDLISVRRAARHRIAKQLLRHGHIFEGKRSWTLVHRAWVARQRLEDPLADEALTQMRLHLVSLDAQIETLEHRVEEVARSEPWSDPARWLMSFRGISFKTALGLISEIGDFHRFASPRELMSYLGLTPSEYSSGEQRHRGHITKSGNRHARRLLVEAAWHYRRRPNLSKRAVEAAAALPAEVPARAWRAQLRLYHRHGVLERQGKRSTVANVAVARELTGFIWAAMTNQPLREEVELA

SEQ ID NO: 352538 - protein, 411 aa, unidentified
MEVIYKRCCGLDVHKEIVVACLIIREGGKVIKEIRTFRTMTSDLVVLHDWLQAHRVTHVAMESTGIYWRPVFNLLEGSFTVLLVNAAHIKTVPGRKTDVKDCEWIGDLLSHGLLRGSFIPPEPIRDLRDLTRYRKSLTDERGREVNRLQKFLEAANIKLSSVATDVMGASGRAMLEALVSGSTDPEVLSNLAKGRLRKKLPELRKALEGRFRAHHRFMIAEILTHLDFLDEAIERVSQEVSTRIAPFLPKVELMDLIPGINRRVAEGVLSEIGADMSCFPTSGHLASWAGLCPGNNESAGKRKSGKTRKGNQWLRRYLIEAAWAATRKKGSYFSALYHRLVVRRGKKKAIVGVAHALLVVVYHILKNQVSYRELGSDHFDKLNIAYAQRHHVKRLESLGFRVILEPLSIAV

SEQ ID NO: 352539 - protein, 351 aa, unidentified
MDATTVGVDLAKNVFVACVADCTGRIVARREFNRAGFLSWLGTLPTGTVIGMEACGSAHHWGRTAQRLGLAPRLMAAEFVRPYRKRQSVKNDRADAEAILVALRAPGMRFIPVKTEAQQQRLAWHSLRVGWVEERTALLNRVRGLLAEFGLIVDPGPKHLRTLLAEREFDTALSPALRGVIQSVRDQLEALDTRIGECDRQITAQQANDPLAKRARDLPGVGLITADAVTASVGDASMFRNGRQFAAWLGLTPSQSGSGGKTKLGRITRRGDDYLRTLLVQGARSVLAATLRKQRRESPEKLTRLQQWIVALSGRIGYHKTLIAIANKHARQLWAVLAKGEAYNPQAWQQA

SEQ ID NO: 352540 - protein, 416 aa, unidentified
MPPILFVGIDVSSKNNVVCCLPEGDSPKPLSRFTVANDEPGVFAFQERIMALMQKHDLTHIRFGLEATGPFSSHLARYLHRVLDFAPYEHSVYLFNPSLIKAFKKMHVLDAPKNDRVDAWFIAAKLRSGHLPRAFTWSETNAALQRLSRTRFHVVQTLTRETNFLLTNLFLKFSSYAAGPFGKKTSATSLAVLEQFASVEAIIDMSVDQLIAFVSACGKNRFENPQEVVQALQKAARSSYRLPKAMADAVNLAMASNIRIIRSLQEQAKSLQKAIEEHLATLPQTLTSVPGIGPIFAAGLLSEIGDIQRFPNHMALAKYAGLAWTQSQSGDFKGVESRLIKSGNRYLKYYFIEAAKSVQVHDTVFAQYFSLKKAEPAKYAEKRALALTARKLVRLVDYLLRTNRLYAPKEVIRQQK

SEQ ID NO: 352541 - protein, 416 aa, unidentified
MSFALPEALFFTGIDWAAETHAVCVMNAAGKIAAEFTIEHSADGIATLIRRLAKYGEPGEVPVAIERPDGRLVDLLLEAGHPVVPVKPNAIKTWRDGEVLSGAKSDAGDAAVIAEYLRLRAHKLKAAAPYSDQTKALRTVVRTRGDLVEMRVAATNQLSALLDAHWPGAKAIFADVESPISLEFLTRYPTPAAAAHLGEKRMAAFCVKHGYCGRRTAVELLTRLRSAPAGATGEALTEALRDAVLAAVSVLTALNASVKALDRSAAAHLGEHPDSVIFTSLPRSGQVNAAQVLAEWGDARQAYEHPDSVAALAGVTPVTRESGKHRAVHFRWASGKRFRVAITTFADNSRHASPWAAEIYNHARASGKDHPHAVRILARAWIRVIWRCWLDGVPYDPALHGAAATLTKQTAEQIAA

SEQ ID NO: 352542 - protein, 344 aa, unidentified
MERYLGLDVHRDSTTIVVLSAKGKRVCRERVETNGRALVGCVKTLAGRLHICLEEGEWSQWLVEILSPHVVEVVVYRSRWKPGAKNDQIDAHDLAERLRTGRVGCPVYKAPRRWAKLRESVRLYTKLTQDTVRAKQRLNGLMRRRGVACPSAAIYDPSRRDRWLARLPVGLRPSAELLGLELDCLEEFRAEAKRAMLAEARRFKITRILETAPGIGPKRAAQLLAVVVTPHRFRSKRQFWSYCGFGVVTRSSSDWVQADGHWLRAPVVRTRGLNRACNRSLKALFKGAATTVLKHSKPNPLRDKYEQLLAAGTKPNLAKLTIARSIAAMVLAMWKTETKYKPVS

SEQ ID NO: 352543 - protein, 457 aa, unidentified
MRTIGIDLSVKGEHKAILADEQGCYVSPVLKFGPDPAALQRLLELAQENNPDGQLLAVLEPTGMAWFPVAVFLSQQGVTVYLVNSQQVADLRKYYKKHAKSDRIDCRVLAKLPLVNRENLHALQLPGGVALACQRGCKQLERLQKLITASKNRLIALDRFAWPGLETEVFSEAFSAPVLWFREHWYDPQQVKAAGVAAIQTAWAASQVDPGEDGEWVKYLVSLAPRVLALYGPDSQQLDYGQLQAEALREQQLMAFLSQQHHCLQIQTVRPLYRQLHPSRHLETIPGVGQDGACVYASFIGQPERFGSLREHRGWSGMVPNSKQSAASEAQGLKITQAGPRLIKKFSYLDAETARQRDPQIAALYFDQMVNKGKHHIQAICACATHLLDRVLVVLRQDRPYQLQDVDGTPLTKEQALAIIKERYQVPVEVRRRNNKRTRRERREQRAEKRNEGKLRK

SEQ ID NO: 352544 - protein, 381 aa, unidentified
MSTAATHHANGNTTEAILFVAFELSEKTWKLGFTTGHGQKPRERSMPARDHERVLDEIAQAKRRLGLPETAPVVSCYEAGREGFWLHRFLRAQGITNHVVDSSSIEVNRRRRRAKSDGLDVRKLLSMLMRYEQGERQVWQVVKVPAVEAEEQRHLHRDLETLKRERASTTTRIKGLLSTQGLQVTTLTKLPEQLEALRLWDGSPIPPSLRDRILRVYAHHTFLSQQIAEIEAERRGQLQTSSDASLDKIRQLMQLKGIGINGAWLLVMEFFGWRAFKNRRKVGGLAGFTPTPYQSGESAREQGITKAGNRHVRWMITELAWSWLRFQPESALSVWFRERFGSGGKRLRRIGIVAVARKLLIALWRFLETGALPEGAVLKEG

SEQ ID NO: 352545 - protein, 400 aa, unidentified
MLSIGIDVSKGKSTVCGMKPGGEIVYTPFEIQHTREGMSDLVSLLRSSGEEVRAVLESTGSYHCPVVAALLENGIFVSVVNSLRMKRFCSQSIRKVKTDRIDAMQIALYGLAYWQELQPARLPEDTYRELQLLARQYYQMTSLLIKAKVDFNAICDQVLPGMQELMSDHAGRHKLSDFVLRYCHTTHILEMGETRFRKDYCKWAEKKGYRNCERMAALIFATAQNGIPVLPNAPSTQIVITEAIRVLHTVEASRDAILTQMQALAKTLPEYSLVREMPCIGDTLAPRLIAEIGDVRRFHSKRALIAYAGIDAPPYQSGKFCANNRHISKRGNRYLRKTGYEVMQSYVMHKPANDPIFTFIEKKRSEGKSGKLAMVAGLNKFLRVYYGKVTELYRSLPAIE

SEQ ID NO: 352546 - protein, 356 aa, unidentified
MDRPKYFVGIDIASETFTASIGQFKEESGWKIVAKPTTFENDYDPFSQFRYWLETNQALPNNCIVCMEATGVYGEALAYFMVSNGFQLVIEAPLKVKRAFDPEGHKSDPVDSRQIAEYAYRFFDQLRDWQPKDVAIEQIKTLLTLREQLVVQKTGHKNANSAIKRKVVRTPLAEGVHQKAIKELEKHIKEIEAEIQRLIDEDPAAKELQKLLETVPGIGKTLATFLVVTMHSAPEPHNPKALAAYIGICPYEDSSGTSRHKKATSRHYGPSAMRRLIHLAAMSVRQHCPMYTHYFIRKVAEGKEKKLVINNIANKLLKMVCAIARTKTPYIPGYRSIHPQRLKQSLKTSHIPLTGS

SEQ ID NO: 352547 - protein, 309 aa, unidentified
MKEELVYCGVDIAKAYLDAAIGKEKRRWPNDSKGHRELISWIKQIEAQVQVICEPSGGYERRLIRALVGAQIKVSLVQANRVRQFARAAGILAKTDTIDARVLCAFGEAMRPQTFSASALEQERLRELESQRRHLTHLLVMEQNRAARVSEVLVRRLNRRLIHQIKKQIEQLDLLIQEHIEASPELSHKASKLTAISGVGERTAALLLAQMPELGQLNRREVAALVGVAPFNRDSGKWRGKRAIFGGRRFVRHGLYMAALVAARHNPILRPFYQRLRVAGKPAKLALTATMRKLLIVLNSALKPQSIYA

SEQ ID NO: 352548 - protein, 332 aa, unidentified
MKYNTFIGVDVSKLTIDAHLHLINLSKTFSNNEKGFASLLIWVKKYGKVPELTKLIICFEHTGMYSIKLAMYLNETNIAFAMLPALQIKQSIGIRRGKNDQIDAQRIAEYAWLHRETLQATVLPAKGILRLQSLLTLRNRLVCDRGGFEATWKEQNKALDDKEYKGMFQIYKSLVKNLTIQIKKLENQIKAVIESDEKIKVNYQLLTSIKCVGPILAANMIACTHNFTRFTNWRKFACYVGTAPFEHQSGTSIKGKTRVSSLSNRQVKKLIHLVAICACAYNPELKVYYKRRVSEGKNKMSTINIIRNKLIARMFAVVNRGSAYVDLMKYAA

SEQ ID NO: 352549 - protein, 332 aa, unidentified
MKTYTSVTVSVAPVLGLDLAKASFVAALRLDSDRVLVADFPNHAGGFRKLQTWLHQHFAGKVRAGLEATGIYGQALAQWLHAQGHTVHVLNPARVAAYARSTGQRNKTDPADARTIAAYVATHTLLGWQPPAPEQLDLQQLCRTRHQLAHQRQQLKNQLGVAAPAMRAYFEHLIAAFDAELLGVEQAMRAHLAAHPAQAEQVRRLTTVPGIGVRTATVVLAELPAITSESDPRALCAWCGLTPARNQSGPREGRAHLSRAGNAYLRDALFMPSLVAKRHNPLLRAFAARLARKPKKQGTILGAVSHKLLCILIGILRHQRDFDPNWSPSPST

SEQ ID NO: 352550 - protein, 422 aa, unidentified
MDYAGPEFEYAAYIGLDWGSEKHSIALKASGFSEIERFTLKQTPEDLHAWLRKLRDKFGGRPVAVAIEQTKGAVIHALLGYDFVHVFRINPKSLADYRKAFSPGGAKDDPTDAEYLLEWVELHRQRIHPWVPDDAQTRTLQKLVEFRRQVVNQRIAFTNQLTQVLKEYFPQALDWAGEIDRVMFCDFLSKWPTLEKIQRAKSDTVRMFYRQHGCRSSERIEERLNAIRTAQALTEDPAVIVTSVCIMHSIIRFLYPIIESIAYLDKEIEERFNGHPDRAIFNSFPGAGAALAPRLLAAMGSDRNRFDSAVEIQKYSGIAPVTERSGKHVWIHRRFACPKFLRQTFHEFAGQSIKFCAWARAYYDMKKSTGMGHQAAVRALAYKWIRIIFRCWQDRIAYDEEIYIRALHQKGSPVVALIKQLA

SEQ ID NO: 352551 - protein, 338 aa, unidentified
MKLYCGIDLHSNNSVVVLLDEVDKVIYQKKLNNDLTSILEQLSVYKNRITAIAIESTFNWYWLVDGLMEAGYTVKLVNTTAVQTYSGLKYTDDKDDARWLAHLLRLNILPTGFIYPREERAVRDLLRKRSQMVRQSSTNILSLQNILARNTAQSLSSYKIKKLDDDQAESLIDDPNITLSLKCNLNVIRCLQITIKEIETTVLKQTQIREEFKKLLTVAGIGEILGLTIMLESGDMSRFAKVGNFSSYCRCVKSERFSNGKKKGEGNRKNGNKYLAWAFIEAANFAIRYNDKIKAFYQKKKSKTNGIIATKAVANKLARACYHILKDQVSFDVDKAFS

SEQ ID NO: 352552 - protein, 325 aa, unidentified
MTRIICGVDVASKSLEARIGQQGAAGSFPNNPEGIAALGAFCQAHQVELVAMEATGGYEQQVFALLSQQGLPAAILNPRAVRQFAESMGSLEKTDRIDAGMIAWYAEVKKSRPACLAPQSQQHLRALVTRLRQLTDIRTAQLNQQRLVTDRAVQASFTKLLAFVNRQIGDLEQRIAKLIEQDPLWRELNQAFRTIKGVADRTVARMMAEMPEVGTLSNKTISKLAGVAPLARDSGKYQGRRVVRGGRASVRDLLFIVASVVGRYEPDFMAFQQRLREAGKPPKVIRIALAHKLLVRLNAKARDVRQRLAAAVQPGPSSLLLEKSN

SEQ ID NO: 352553 - protein, 365 aa, unidentified
MFNPTHLGLDTHKDTIAVAVLRADEAEPDRCTIPNTPEAIRKLVARLGGPSQLIACYESGPTGYDTCRILQDLGVRCDVIAPALIPRRAGQRVKTDQLDARNLARLHRAGELTAIRIPSPQEEALRDFIRVREDLKADLRRARQRMRALLGRQGRRYSARTARWGKQFTAWVRTQRFSDPTLQRTFNHLLAELDTRTVHLQQMDREIEVAAQLPPLAEPVARLRALKGVDTLTAATLVAEVCDFRRFPTAASFMGYTGLVPSEHSSGLSQHRGSITKVGNPHLRRVLVEASWSYRHRPALTKNFKQRSQGLPPDVVAYAWAAQLRLSGRYRKLAVAKGHNKAVVAVARELAGFVWGLMNERTTVN

SEQ ID NO: 352554 - protein, 416 aa, unidentified
MHNAPIFTRSIGLDVHQDLIYVTVISVLGGTADQYQISTRDKDFEAFLDTLQPDDQVALESTRGSSYYVSRLLTRVKAVAVANPTKLQFLTGRTAKNDRNDSFSLALLLAIGTLPTVWPADEETKQDRELLKYRASLIQEQTRLKNRIRALLNEHGMRCPASDIADQGAHHFIVKLRSRLPWVTQEVLTNELDQIGLIAARLQRIDAVVQERAARRPEVALLMTIRGMDVLSAFTVLAMIGPIDRFATPGSLVNYAGLVPRQHSSAGSSHFGRITKAGSKMLRWAIAEAVQSLCRQDGPYRNLCKRLERRKKAKGVAMAACGRKLLEAIWHMLTNGETFRHMEPDLVERKVRRRDQRLEAARLRLAQEKDRHKEFILSQLALVQDLAQRRTKVPVPRQLLATFGRLPIPPTKALAG

SEQ ID NO: 352555 - protein, 388 aa, unidentified
MTQAHGALVTPTVLDYERTLILAIELSNTSWVLAAQIPGLPGVKAKRSIGPTPEALMAAIEGYRARAEKAGRNVDRVVAVYEAGWSGFWLVRWLAKHGVETHVIQPSSVPVDRRARRAKSDGIDAELLLRTLLAWLRGEPRVCSMVPIPAEADEDARRCVRERVELVSERVGLVNRIGAILATLGAGEYNPLRRDRRQRLDELRTALGDSLPTNARAKIVRMLDRLELLLTQITELEQSRDAVLEDEKPDRASSMIQQLATLRGIGVQSATVLVREGFVREFANGKALGSYAGLTSTPYSSGGIEREQGIGKAGNARLRTVMVELAWLWQRYQPGSGQVSWFRERVSGSGRRMRKVMVVALARKLLIALWRFATQGVVPEGAVMKPAS

SEQ ID NO: 352556 - protein, 340 aa, unidentified
MSEITTIGLDLAKHVFQVHGIDAEGTTVLRKRLRRGQVLAFFSRIPRCVVGLEACATAHYWARELGALGHEVRLMPAQYVKAYIKRNKHDAADAEAICEAVQRPTMRFVPVKTAEQQATQLLHRGREQLVRQRTMLVNALRAHLAEFGMVAAQGLRNVGQLIAIVRDDGDTRLPHVARQVLQVLANQIEQIEAAITALERQLLTWHKSNAVSQRLASIPGIGPIIATAIATTVADPKVFRSGREFAAWLGLVPRQNSTGGKTRLGGITKRGNRYLRRLLINGASANLLRSKATKADPWVIGLRRRRPPLVVAVALANKTARIAWAVMLRQKEYQPRAVAA

SEQ ID NO: 352557 - protein, 376 aa, unidentified
MTTAIDTRDVCCVALELSKTSWVCAFAVPGESKVAIHTDRLSAVLTGSKAKAEQQLGPLQIVLCYEVGYDGFWLARYLIARAIHTIVFDPASFLMPRRSRVAKTDRLDAEGMTRILRRWLSGDREMARPVQIPSVEQEDAKRIERERKYLVEERISIIGRIKGLLALHGIWLVKKNIGKGLRQRLDAMKTGDGRPLAPFLRSEIERMLTRYDLISRQIADVEADRKAALNNEKGVFPHADKVRRLTTLGAVGETTATVLVAEIYHRTFLTRRQVASFVGLAPSPYKSGEVDRDRGINKAGSKLARHMLVELAWFWLRYQSNSQLSQWWHSRFGNQGMRGRKVGIVALARKLAIALWRFVEDGIVPEGATLKVRHAS

SEQ ID NO: 352558 - protein, 348 aa, unidentified
MNSEKYIGLDVHQATISVAVMDSRGKVVMESILETKAATLLEFLAGLRGTLSVTFEEGTWAAWLYDLLKPHVQKLVVCNPRKTALLKDGNKNDRIDARKLAELLRLDNLKPVYHGETGVRMLRELARSYLTLVKDLTRVMNRLKAPCAGRDVYYTRHRAQWLSKIREAGVRRRAEHLYQQLDMLQHLRQQARRELLAESRKHSITAKLRQIPSLGPIRSALAVALIQTPNRFRTKRQLWAYSGLALETRTSGEHCYVQGQLRRSKKQVSIRGLNKDHNHDLKGLFKAAATRASVQPGPFQDFYQRSLAKGIKPTMVRLTLARKIAAITLTLWKKGENFDAEKLKSQAA

SEQ ID NO: 352559 - protein, 339 aa, unidentified
MELYAGIDLHSNNAVLMVLDGADRVVFAKRLANDLEAILMALRSCAGSILGVAVESTYNWYWLVDGLQDAGYRVHLVNTAAVKVYDGLKHSGDFSDARHLAHLLRLGILPEGYIYPREQRAVRDLMRKRSQLVRQRSSQILSMQNLVARNLGAQCSGNDIKRWDDEDIDAMNLLDDQKLALKANLAVMDCLDRQVHTLERRILASTKLSESFQALKSVSGVGDVLALTIALETGDIGRFASPGQFASYARTVDSRRESNGKKKGEGNAKCGNKHLAWAFIEAAHFAVRATTRRSSAGTRRSARAACRWWAIKAVAHKLARACWHVMKDGRPFEASRAFG

SEQ ID NO: 352560 - protein, 353 aa, unidentified
MKRTPKYVALDVHQATTVASVREASRRVIARAILPTEAPALAEFFAGMRGSVHVAFEEGTQAQWLHDLLVPLVDRIVVCHRRGEHRGNKADQVDADMLSLRLLTGDLRAVYHGSTDRATLRELTRTYSNLVEDSTRVMLRLKSLFRARAIRTPGKRVYALKERTQWLRKLPDPGARFRAKLLYEELDVLRDLRPKAKAAMIAEARRDAAWPVLRSIPFLGPVRVALILATMKTPWRFRTKRNLWGYAGLAVVTQSSADHEFIAGRAVRRRRKPLTRGLNTNHNRILKEIFKGAATAATARRGPLQDFYRAMLAHGMRDDMARLTLARKFAALTLRLWKRGERYDPTKLSVQPT

SEQ ID NO: 352561 - protein, 428 aa, unidentified
MKQDDLIRVEQFRQLRKQIRGSEDYLIVGIDVAKHKHHAFFGTATGKTLFKRLVFDNGREGFDRLLIQTEAIKVQHGLEEAVFGLEPTANYHKPLGEFLIKRGHSVGLISSVAVKRNRELLDGRWDKHDTKDAANVADLISQGKFLFYELPCQELRDLRSLLSLKRKLKKLEHGLRIRIRNHLVAQYFPELDRLYGQRESENLAIVRWCLNPAVIGALGYEKFFQLVTTRDRGISQHKRLRAIWEKAAASIGCDVGEAVEFEAEVLVETLKGLREAIKTTDYRIKNIGCSLPEFNYLLTIPGFGPDVSAKVIAAIGNPFRFYSAKQVIKLAGFDLSADRSGNRSDAAIPVISKRGKTYLRYALYQAAFIASIRDRHFIVYYTNTLRGRERERGIRTKMRVKLAAKMLVIAWTLMKKKEPFDPDYLNID

SEQ ID NO: 352562 - protein, 448 aa, unidentified
MTIIEGSAAVAVGIDAAVVANHHIVVRRPEAGRPGTVVDDFVVPPTLAGMERLTKRLASWPGAVAVAEPTSMTWLPLSIALRNAGVELSLVGNRHSARLRSALAGKNKSDPIDAAVLSRAGEFFELTPARIPAETELALRRAAQRRGKTIVDANRCLRRVVSQARWAFPDVWNAFAGSRPTALGVLNRWPHLDALARARVSSITEVVAAHTRGVANVEERAQQIRATARAWAEFWTGHLDLDSLAWETTELLADLSAADTRVDRATETTRHHWEQLWGDDPVLLSVPGMGPLTAPTVRAFLADGSHLDDAKAAQSFVGLNPSNWSSGQMESPSREITKEGPPVLRLAFYQAANVARSHDPQLADFYRRLMVERGHCHTKANCAVARKLVARTWATITSGTPYEVRDLDGAPVTRRQATRLAAELAVPDDIRRRTRAHSAATHRARLTR

SEQ ID NO: 352563 - protein, 332 aa, unidentified
MSIIGCDLHSRYQVIAMLETGTGEVITRRLEHEDGEAKGFYAGLAKPVLIGIEATGYTQWFERLAAELGHELWVGDPAEIRARAVRLQKTDTRDAEHLLDLLLSKRFPRVWVPRPEERDFRQLLKHRDKLVKMQTSVRNQLHFLAMSQGVCRKQKLWSVRGRQELEGLELGPWASRRRQELLELLDRLGPRIEELEAAVKAEAARRPEAVLLMEQKGVGPVTALAFVLTVGPVERFATSRKLTSYLGLNPREDSSGGHQRLGHISKQGNEMLRWLLVEAGHTAARLDPELRRVYQRLKFRRGGKVAKVAIARRLAVRLYWSLRRYAAGSHVQ

SEQ ID NO: 352564 - protein, 347 aa, unidentified
MESYVGLDVSLKRTSICVVDRTGKVLCEGTVNSTPEAIVEFVKSKAAGAVRIGLETGPTSTWLWTEIKALGLPVICIDARHAKAVLKMQINKSDRNDAFGIARIMQCGWYKEVRVKGLDSHAIKAVLVSRALLVKIKRDLENQIRGLLKNLGLVIGQAKMNVFVVRAMELIEDRPELVAAVEPLLKVREGVEKQITDLDRKVMRLARNDVQVRRFVTAPGIGPITALCYLATIDDPTRFKRSRSVGAYVGLTSRRYASGEVDWTGRISKCGDPMLRSYLYEAAGVLLTRVAKWSVLKAWGMRIAKRSGLRKAKVAVARKLAVILHRMWVDGTEFKWSSKEEVATQPA

SEQ ID NO: 352565 - protein, 322 aa, unidentified
MRSSIGVDVSKRKFDAALLTEQGKYRCKVFDNDAKGFHAFEDWIKANAAGQVQVCMEATGAYHEALATFLFDHQITVFVVNPLRVKRFVESEGLRNKSDTGDAKALARFASKNELEAWVAPSKGVRELQALVVRLESLQTMRQAELNRLDVAHPSIRGSIETVVAALDREIATVRTSIKKTIDDEPDLKQRKDLLDTIPGLGDATIPSLLAYIGRPERFKTVKALIAYAGLTPAVRQSGSSLDKRHGLHPAGHRDLRKALFYPAMAAGRFNPIVASFWQRLKAQNKPGKVIVVACMHKLLAIAYGVLKSKRPFDASLVSAGA

SEQ ID NO: 352566 - protein, 340 aa, unidentified
MSEITTIGLDLAKHVFQVHGIDAQGTTVLRKRLRRGQVLAFFSRIPRCVVGLEACATAHYWARELGALGHEVRLMPAQYVKAYIKRNKHDAADAEAICEAVQRPTMRFVPVKTAEQQATALLHRGREQLVRQRTMLVNALRAHLAEFGIVAAQGLRNVGELIAIVRDDGDTRLPDVARQVLQVLANQIEQIQTAVAALERQLLAWHKTNPVSQRLASIPGIGPTIATAIATTVADPKAFRSGREFAAWLGLVPRQNSTGGKTRLGGITKRGNRYLRRLLINGASANLLRSKATKADPWVIGLRRRRPPLVVAVALANKTARIAWAVMLREKEYQPRAVAA

SEQ ID NO: 352567 - protein, 365 aa, unidentified
MELRNIFVGIDLGDKNSVARIAVDRGKAERYGFVNNAQGRARLFEEVKRRAAAVNGKVWMAYEASACGFVLADEAQDRQMWCAVLAPTKMEKSVEQRKHKNDDHDADGVVETRRGHVLAGNRLPAVWIPDKQVRDDRELIRTRLELAEKQAKLKSQVQMLLKRYGLEKPSGVGAGWTVGYRQWLQALAETSSPQLGMGGRQALGSLLRQLQLIEEEIQRMDQCVKQLANEVRHKPFMDELMKEPGVGRLTALVYRTEIGYAGRFRRGRQVGKFVGLTPSSYESGQQNDRKGHISHQGPPRIRKMLCQSSWVGIGSGEGGDRRLYDRIVSRNPKRKKIAIVAVMRRLAVRLWHRMRQVEMKLAATA

SEQ ID NO: 352568 - protein, 414 aa, unidentified
MDTIVSRCAALDVHKDTVMGCVRVPDEFGGRVQEVREFRTFTAGLRALRAWLAGHGVTQVAMEATGVYWKPVWHVLEAEPGWALLLANAQHVKNVPGRKTDVADAIWLAQLLECGLLRGSFVPPRVIQRLRDLTRYRKKLIEERTREIQRIQKLLEDAGIKLDSVVSDVMGTSARGMLEALIGGQRDPGVLAELARTRMRPKIPELRLALEGGFDPHHALMLRLHLDHVDQLSVAIEGLDAQVDRVILPFSEQHRRLTTIPGVGKRTAEVIIAEIGVDMSRFPTASHLASWAGICPGNHESAGKRRSGKARKGDAALRAALCESAWSAAKTRGYLGSLYRHLLRRFGKKGQAKAAFAVGHAILVIAWHLLHDERDYQDLGADYLDKRKDNEARKRYLIRQLETLGHRVTIEPAA

SEQ ID NO: 352569 - protein, 351 aa, unidentified
MLIVGCDYHPSFQQIAWVDTESGECGERSLMNSTGEAEMFYRNLKEQGVKVRVGIEATGHSRWFERLLMELEYELWVGDAAEIKAKRVRKQKNDREDARLLRTLLVENRFPRVWLADQLNRDLRQLLWHRHRLVQMRTRVMNQLQAVALNEGVQRKKGLWSQAGRAQLEAFQLLPWAARRREDLLKLLDGLTPRIQALTAEVNKQAEQYPEAQRLMTHPGVGPLTALAYVLIIGSPDRFRCGKQIGCYVGLIPSEESSANRQRLGHITKQGNSLLRFLLLEAAQAAVRSDADWRREFLHLTMRRGRQIAVVALARKLAVRLYWMWRNGRDYQKSLKFSSHVGQPGTGYGVK

SEQ ID NO: 352570 - protein, 407 aa, unidentified
MDLLKTVFGIDISSWKSNVCIMVNGQKVNDYAISNDMVGFNQLLGDLKQVTNPQIIFEATGVYSRRLQAFLDMHELRYVMMNPLEAKRKTKDDLHQNKTDKLDALYLAKLQSEHPQRLAYVQSEEYQELMANNRIYEQASHDLITNRNRLHKAIQLTFPEIEHLMVNPRGKNYWSIVLRFPHPDILLETKEADIIDFLKGLSGIGKKRANDIAQSLIRLAKVACPAVKKNSAHIRGLKMAINNILNAEEECQTALQEMEKLAPKRDLEILTSIPGIGKNTALRIISELGDIRRFNNPSQLNAFVGVDPQVYESGNLTAHLSISKRGTAIGRKVLYLAINQIQSAKKVGNPCHIADYYEKRKRSSETASHKKAAIASIHKLLRTMFALIKNDQLYSYDVAKHNQRLLS

SEQ ID NO: 352571 - protein, 322 aa, unidentified
MSLPSPLCVGIDVSKATLDIAASSAIEQFSVANDADGFDSIIAVLRKHTVALVLMEATGGLEAAVACALQAEGFEIAVVNPRQARDFARAMGYLAKTDRIDARALAQMAEVINRHPERDRFIRALPDADRQVLNAMVVRRRQLITMLVAERNRLHPAHPQSRKSINIIIKALEDELARIDKDMNTHIRNHFKELSERLNSIKGVGTMTVAALLAEVPELGRLSRREISALVGVAPVNRDSGTMRGRRTIFGGRAGVRTALYMAALVATRFNPVIKAFYTRLVAAGKPKKVALVACMRKLLTILNAMLRKNEGWDDSYHHIAP

SEQ ID NO: 352572 - protein, 355 aa, unidentified
MTRIAQLEPTRVTVGVDTHRDAHVAVALDQLGRRLGQLEIATTRAGYAQLLAWAESFGEVVVFAVEGCGCYGAGLARHLGAQHVRVVEVMRANRQTRRRKGKSDPTDAEAAGRAVLAGEAATAPKSGDDVVEMIRVLRVVRVTAMKARTQAINALRSLLVTAPPELRDQLRALSSVKLVRSAARFRPGAQDSPLAASKLALRLLARRYQALDDEIAELDSQLEQLTQASPQLIESFGVGPEAAAALLIAAGDNPGRLHSEAAFSMLCGSSPVAASSGKTIRYRLNRGGNRQANAALYRIVLVRMRYHQPTKDYVDRRTSEGKSKPEIIRCLKRYVAREVYTALKQTGEANLARAV

SEQ ID NO: 352573 - protein, 352 aa, unidentified
MIVLGADMHKQTHTVAAIAAATGELLDDKTVRVGDDGFLALLDWARSLGEQRVWALEDCRHVSGSFERFLMISGERVVRVATKLMSEARRGGRERGKSDRIDALAVARAALREGLDGLPSAQLAGVELDIRLLVDHRERLIRSRVALNNDLLWHLHDLWPELKLPTSALFSKKGSTRIARRLARAEQTARVRIARDELRRLRELTAAANDLEAEIADLVADVAPQLLAEPGFGPLTAAKLLGEIAGAGRFATEAKLARAAGVAPIPVSSGKTNRHRLDRGGNRQLNTAIHRIALTRARCHPETQDYLARKRAEGKTGLQAIRCLKRHLTRRIWHLLQPPTPALETTLSTSIC

SEQ ID NO: 352574 - protein, 338 aa, unidentified
MTIETLGIDIAKNVFQLHGVNRNGRIVLRRRVMRDQLLEVVAQIERCTIVVEACTGAFTWARKFEALGHQVKIISPQYVKPFVRRQKNDGNDAEAICTAARQPHIPFVPKKTVEQQDIQTLHRARQRMVNHRTAIVSQIRGLLLDRGFAIAKSITRARRMIPEILADLDNELTALAREALNELYDLFRDLDRRIHSFDLKIDRVFRGSEACQRIAKIKGIGPKTATAIIAAIGDGSEFKNGRHLAAWVGLVPRQFSSGDRRVLMGISKRGSQHLRSLLVHGARAVVRTAPNKTDPNNQWVNQLRERRGFNRATVAVANKNARIIWAVLRSGEPYRAIF

SEQ ID NO: 352575 - protein, 316 aa, unidentified
MKQYIGIDISKSTIDVYDGEKSYKYENSISGFKEILSLVENIKNAVLIFEPTGIYSYVLTEFCSKKKIAVVMVGPKESRDFARSLKVRSKTDKIDAKVLYKYQSHIEPNMIKVPTVNHHAIKIQEMLNVYEGIQASKQRFKNQLESVNKTHKDLHRTLNRIINDLDTEAMKLFNKIELLLLENEETKERYDAISSIPSVGQKSALYLTAFFLKYPTANAKQITALVGLDPVMKDSGLFRGKQRISKHGGQQLRTLLYLPTLCAIQHNTRIKVFYERLTSQSKTKKLAVIAAMRKLFLMAFSIFKSKENYQQLVGTI

SEQ ID NO: 352576 - protein, 421 aa, unidentified
MPSIAMMGMSGCSGRSRAWSHRCSLSLTPRWESAPVPLTALGRAVERGKDLLGNHGGVMSFIAIAAARRPFMSMLCGLDLHRGQITYDALIEETGEIWRGRIWSPDRARFRHWLEIDVTKRANGAPVAMAVEGCTGWRYVVEEITAAGFEAHLAEPAETQAARGRKKRAKTDRSDACLQRELLARGELTESWIPPHGVLEWRERTRLYKTLVDERRMWVQRIHAELFQHGVALPDGEIRSQEVRAWLASDEVQLTEAARQRIGVGYRVIDAIEGEAVALRRQVQRFASRQPACRALVETHYGIGPLAAVMTWAELGDCRRFSRSMQVVRHCGLDVTVHESDGYRPGGHLSREGPPALRWALYEAGKCGARTTSPDYDYYRAVKKRRDGKLAALAVARKLARRCYHTLRAMDGDLIYAMPEV

SEQ ID NO: 352577 - protein, 346 aa, unidentified
MMIIGCDFHPSWQQVCWLDTETGETGEQKLVQAAGDAERFYRQVPAPALIGMEATGNCHWLVDLLSELGHELWVGDAAQIRASYVRQQKTDKRDAAHILKLLVEGRFPRIWMPSSEVRDLRQLLLHRYKLVIIRARVKNELQHLCLNQGVQRQHKLWSRAGQQVLRELPLKPWAARRREDLLRLMAMLDQQIEPLDQAVKAEAQRDKMALLLQTQPGVGPITALAYVLTMGEVSRFPRGKQVASYLGLIPREHSSGGRQKLGAITKQGNRMMRMLLVEAAQAAVRYDPQFRKEYWHRCHQKPKAVAKVAAARKLAIRLYWMLRTHKPYPEVVRIESSPRVPLVGAS

SEQ ID NO: 352578 - protein, 354 aa, unidentified
MSQTPNTAIAVIGIDIGKNSFHVVGHDVRGAIVLRQKWSRGQVEARLANIPPCLIGMEACVGAHHLSRKLASLGHDARLMPAKYVRPYSKGQKNDFNDAEAIAEAVQRPTMKFVATKTAEQLDLQALHRVRERLVSQRTGIINQIRAFMLERGIAVRQGIGFLRTELPTILATRTDALSPRMLRVIEELAGDWRRLDQRIDGLSGEIEALARQDQACSRLMTVPGIGPIISSAMVAAIGTGDVFSKGRDFGAWLGLVPKQISTGDRTILGKISRRGNRYLRVLFVQAAWVVLVRIKNWERYGLKSWIEAAKRRLHHNVLAIALANKLARIAWAVLAKGRAFELTRTDDAGVRPA

SEQ ID NO: 352579 - protein, 445 aa, unidentified
MRDHSEAFIGIDTSKLRNAIAIAEGGRGGEVRYFGEIDSADAATRKLVSKLAVKYRSLTFCYEAGPTGYGLYRLIRSLGHECVVAAPSLIPKKPGVRVKTNRRDAVELAKLSRAGELTAVWVPDERHEAMRDLSRARQAAKKHLTSKRQQILSLMLRLGRHYPGKKTWGTAHMNWLTQQKLEHREQRIALEELLEGMRQEAERVERLEQAIREAVPEWSLAEVATALQAMRGIDLVAAVTVLAEIGDLSRFQSPRELMGYLGLVPSESSTGDKVKRGGITKAGNGRARRILVEAAWSYRHPARVSREKQPKVAAAPRRVREIAWKAQTRLCGRFRSLTRKGKLPSIVATAIARELSAFIWAINREVMAPGEGLEIRNVPIARSVTPCSPPSRRGLATADEVAGAPRRPALTAAARGVPATARVGTKKRAPRSNKETGSEAESAGL

SEQ ID NO: 352580 - protein, 435 aa, unidentified
MEEVEDEPLFCDRVAGIDIGKATVMVTIRVPSEARAKGRQQETREFGTTRRELLALADWLRGWQVERAGMEATSDYWKPVLFTLEQEGFDCLLYQASQVKALPGRPKTDKLDSVWLARITEQGSLAGSFVPPEEIRRLRTHTRCRRKLVQMRTAQKERCEKLLEDAHLKLSSVISDIHGVSGRDMLRAIAAGERNPKVLAQMARGVMRSKIARLEQALDCSFFTGEHAFILTMMLDSIDSLTAQAGVLDARIADMCQPYQRQLEQLDEIPGFGITTAQDLIAEIGTDMNVFPTAGHLASYARQAPRVKESAGKRKGKNATGRGNPYIGGALGEASISAGRTQTFIGEKYRRLTRRMPKRKAQVAIMRSQLVIAHALLSDPDARYQDLGPDYYERKADIRRRARNHARALERLGYKVTLEAIDPGTGELHLVATAG

SEQ ID NO: 352581 - protein, 342 aa, unidentified
MKEASIIGLDLSKRSFQAHGALADGSVAFRKKLTREKVLGFLAEQPRCTVAMEACGSAHHWGRAIHDAGHEVRLIPPAYVKPFVKRQKNDAADAEAIAEAASRPTMRFVAVKTAEQQARAMLFRTRDLLVRQRTQLINALRGQLSEHGVVAPQGPANVAILAQAIDDMTPSLPLLVVELARVYLDQIDGLSEKVAGLEKAIACEAKRGAMTRRLQTMPGVGPITAMAIETFAPPMEVFRRGRDFAAWLGLVPVQHSTGGKQVLGKTSKMGQRDIRRLLITGAMVIVRWACRKAAQEGTWLHRMLRRKPRMLVAIALANKMARSIWAMLTKGEDYRDPVAATL

SEQ ID NO: 352582 - protein, 337 aa, unidentified
MHYIGIDLHKKTISLCVMSKGRKVLCEKVLRCDNEAEIRDFFGRWTPFRAVVEATASYEWLVQLIEPLAKRVILAYPKKLRVIAETKNKTDRIDARVLAEFLALDMIPQSYRPTPRLRAYRRLVRYRHFVRGRVTSARCKIRHILSDYNLDRPNLFTAEGLEYLQGVAVSPADRWVLEQLLSQWQQHRNQVQAANKQLREFAKRAPLAEREHRELLRSIPMVGTVTLDVVLSELGDVRRFRSQKKAVAYAGLDPGVRASADRRKELHITKEGSRLLRWALVEAAWRLVAKSRRWGLHYERLKRRTGGKKAIVAIARRLLCVMVAMLHSGQRYRLTAV

SEQ ID NO: 352583 - protein, 419 aa, unidentified
MAFKIFRKNCCGLDVHKTWIYACIGITDTNGRTEYKQARFSSFSKGLKELADWLAKYSCTDVCMESTGKYWIPVFNILEKTCFVTLAHPKYTKPQKGNKTDRKDAKWICDLFMCDMIKPSFIPPADIRQLRDLVRYRTKLTNILTGEKNRALNCLTVSNLKLDDVFSDVFGKSSRSIISYILEHPGQSFDVSPFVDRRCKKPIEEIQAAVDGAVSHEQATKLKECLNHIDEIRTHRQNIEFEIQHLAEPYAYALELLQTVPGLNSDPITAISVISEIGVDMSVFPTSKHLVSWAGCCPRNDKSDSKVKSTRISRAGTYLKPLLVQVANAVIRSDKHPEFKERYRRLKARRGHKKAIIAICRMLLTAIWNILYKLEPYSPNGYLNDKLTEHSVVISKAEGLALLRKRGYIFKDEVFSSSP

SEQ ID NO: 352584 - protein, 346 aa, unidentified
MSDIGIDLGRRTSQICILTQEGELLERGVLTERERFAAALKNHPGARILLEAGTESEWVARCLEGLGHEVIVGDPNYAPMYARRQRTVKTNRRDARALAEACRLGAYRPAHRTSEEQRRVRARIAVREALVRTRARHVVLIGSLLRQEGLHMPGGGTATFPARLQAVTVPEPLQQAIAPMLPVLEALNRQIQEADRELAALAGTDPRVRRLRTAPGIGPVTAATFVATVDRVDRFAGPHQLEAYLGLVPRENSTGDQQRRGPITKAGNGRLRWLLIEAAWSIVNYPKPETAALRAWTLRIATRRGRPRAVVALARRLAGILFAMMRDETVYDPNRRTSTMQNVRTV

SEQ ID NO: 352585 - protein, 400 aa, unidentified
MTSVGIDIGKRQHVAAVCRDGERVAQKAVLRFGADRAGFLELTRWLGRQAPIERVVMESSGHYWMPLAAALHRVAVPVAVVNPVSAKHFSKRRLQRTKSDPADARTLAALGMADQPATRQPLAGAELREAARFAMRLVEEQSRIDNRIHRLIDLGFPELARAYEDPTCISALAVLRVAPTAAVVARKRPETLARAARPGGGRPIGARKAAEIIALARDTIAPPELERQVAFEMELLIAQHDLLERQIDDAESRVASLLDGELARRLQTIPGLGPATAATLIAEIGDITRFSEFDKLVAYVGVHPAEKSSGQSGGPETSWQMAKTGNAYLRAALYRMAVVGLTHNPVIRDHYARKRAEGKTKMNALGHCMKKALSLVWGIWRGEHDFTPEPPHHLTTGYGT

SEQ ID NO: 352586 - protein, 402 aa, unidentified
MNCVGIDVSKGKSMIAVMRPFGEVVVSPFEVRHTASELSKLAGLLKSLDGETRVVMESTGNYHAPVAWLLHDAGLYVSVVNAMLVHDYGNNSLRRGKTDKKDAVKLANYGLDHWLTLPRYVPEEDTRLMLKTCYRQYQQYSKVQTMLKNNLISLLDTTFPDANRLFTSPPRTDGSEKWVDFVAAFWHCECVCGLSEKAFAAKYQKWCRKHGYHFSEDKALDIYASACGHFGVIPKTDTAKLLVEQAISQLQTTSSALAALKQEMQSLAASLPEYPVVMGMFGVGPTLGPQLLAEIGDVRRFHSKKALVAFAGIDAPPYQSGQIDVRSRSISKRGSASLRRTLFLVMSVILQCAPIDEPVYQFMDKKRSEGKPYRVYMMASANKFLRIYYASVKAYLESLEHD

SEQ ID NO: 352587 - protein, 409 aa, unidentified
MERVSERVAGLDVHKKSVTVCVRVPGPAGDRRQEVQTFGTTAAALLALRDWLRAHGVTHVAMESTGVYWKPVYYVLEERFTCLLVNAAHVSKVPGRKTDVRDCEWLAQLLEHGLLRGSFVPPVAIRELRDLTRYRAVLVQDRTREANRLHKVLTDAGIQLASVASNVLGASGRAMLTALVEGTTDPTVLADLALGKLRRKLPALREALVGRFRKHHALLVSQLLAHLDYLDEALEVLTAQIEEALGPFANEAARLDAIPGVGPRTAQILIAELGVDMRQFPTARHLASWAGLCPGTHESAGKRRAVRTGKGNRWLRAALIEAALAAINVRESALAGRYRRLVRRCGHKKAIVAVAHKMLTTAFLLLADGRAYQEPGAGYFDAQRKDREVRRALHVLAHHGYRISLEPAA

SEQ ID NO: 352588 - protein, 350 aa, unidentified
MNRYIGLDAHSSSCTVAVVGPSGKRLQSQVIETNAQALINFLLTVPGNRCLCIEEGTHANWLYEVLSPHVQEMVVARVRESREPKSDQIDAFDLAEKLRVGAIKTRIYKKRATFERLAELSHAYTVLVSDTVRVKNRIKGLYRSRGVNVGGTGVYAPAAREDWLQKLPVKARYRGELLYQQCDALSELRQRVEKKMLGEARKHAIYRVLKTCPGMGRIRTAQMLPIVVTPFRFANKRSFWAYSGLAVVMRSSSDWVRTRDGGWVRAPVQQTRGLNRTCNRTLKAIFKGAATTVIQCAKDEPLYGHYLQLLDGGTKPNLAKLTIARQIALIILSMWRSEEVYDPRKLKRKT

SEQ ID NO: 352589 - protein, 352 aa, unidentified
MQHFIGCDVHTRNQMVAWMEAETGEIKTRRLEHAGEEVRKFYAQFPRGTVVGIEATFPAYWFERLLEELGHELWVGDAARIRASEVRYQKTDRRDAEDILDLLRTGRFPRIWVPTLEERDLRQLLIHRMKQVRARTQVKNQLHALAISQGLCRKGRLWSVKGRKELESLALLPWAARRRKELLEGLDRLDEQIRELDRAVEEAGRERPEVALLRTHPGVGMVVALAFVLTVGPIVRFANRRKLVSYLGLNPREDSSAGRQRLGAISKQGNPLMRWLLVEAAQTAGRFDPQLRRIYQRLKNHHHSGVAKVAIARRLTVRLFWMLRTRHNYAQLVHMSGSPSSAVVPPQGGPTV

SEQ ID NO: 352590 - protein, 457 aa, unidentified
MTQRQRKARKSKIKVNNLPPHLRHINLNAAGIDIGTDLHLVAVPEGSDEISVRQFGAFTSDLHEIADWLKKCGVTTVAMESTGVYWIPLFELLEQRGFEVKLVDARHVKNVSGRKSDVLDCQWIQQLHTYGLLQGAFRPTDEVCVLRSYARQKEMLTQASTMHIQHMQKALQQMNLLLHNVVSDITGVTGMRIIKAILAGERDPDVLALNRQEGCRNSKETIAKSLVGNFRDEHMFALKQAVDLYEFYQALIVECEQALIEHLERRPDITDDQPPDSGKHVRLRERMRADVDVREKLFKMTGVDLFAIPGLAADTLLTLASEVGFNMEPWKSEKHFTSWLGLCPGTKISGGKRLDRKSKRNSNRAALAFRIAASSLARSQTALGAFYRRIRSRTDGRRAITATAHKIARIYYSMLTKGTAYIEAGQQTYEQAYKERKINALKKQAHSLGFQLQPCGS

SEQ ID NO: 352591 - protein, 440 aa, unidentified
MGKHKDRVCGADVHKDLIVATITDRDGSYLQESFGTSPPELERFREWLKINNCEQVAFEATGVYWLPVHEVTSQSIDTIVANPYQIKSLPNDKSDAKDADRIAEYCLNGQIKRSRVFSQEYRDLRTLTRARSGYVRTRTQIKNRIHKHLSSNGIKLSSCIGDIFGKSGRHILDGLAHKRKTSDIITGIPSGQVRKKSDLIGVSINNGLDETSRTIVKDLLELLDITESKIEKTANMVANKMLKKSKDLAIVMSIPGIGFTAGTTILSEIGDIRDFKTPESMANWGGLIPGSYESAGKKRSFGITKRGPKQIRTVLVEVAHVIARTGDSRLHRFFQRLRARKNYNVAIVALARKLICLIHHLLTNRELYQENYCKKKKQEASECDVDSSSLTEEGMEDRVAAIVDALYHLKDRSRKRIQRKRTAKTHEFKRLPKWLSNGGG

SEQ ID NO: 352592 - protein, 461 aa, unidentified
MDKKKWKGASTTDPTFPNQREVIKHSEVIMKVTEKRTQVNAQHILNVAVDVASRKLDVHFELPLSPGCQRVYQETIVNSSISIKKSLEKYHNLAVEQGYLNTRVVCEPTGPYSRNLLTLARDRNCLTAYVSGEAVKNAKVIEFNSHNKTDAADAQVIYSLAERNKVLVHREYSRDYACLRVLNTHYEDIDKNCVRARNQVHNTLKHLFPDCSLDSDALYSKTGQAIYSCYRFNPWLITAYGYSKFEARIKKKAKYARKKTLRKIFDEAKASCLKSTQELATSLSMCLSAHYDDFLINDDRKKQLREQMCELLGSIRLEDEQIPAEQKDFVSEFHIARLLAETGPLSDFKNFNQLNNYLGLNLRERQSGTYKGRAKLSKRGRPLARKVLSLIILPLVKESALYGPAYHKEKKRSGKPGKLLMCNYMKKWFKAFFGIYRSHSAFDKSRLFIDRGSYEKLKASA

SEQ ID NO: 352593 - protein, 403 aa, unidentified
MSVFAPEVARPTLVFRGLLGQAEPILITGGRAVADYREAFVGIDVAKLKNAIAVAESGREGEVRYLGEVDASYASMRRIIQRIAAKFDRVHFCYEAGPTGYGLHRLIQSLGHECMVVVPSLNPRKPGDRVKTNRRDALALARLLRAGELTAVWVPDEGHEAMRDLVRARAAAVETLRVHRQQISAFMLKHGRIYPRKKGWTMRYLCWLQEQQFDHPAHQIALQEMVEAVRVSKERVERLEKVIEEFVPNWSLAPVVRALQTLRGVDLIVAVTFATEVGDVSRFESPRQLMGYLGLVPGERSTGETVRRGAITKAGNGRVRHMLVESAWTYRHPPKVGARKLYRLEQAPPKVREIAWKAQTRLTARYRMLTGRGKRTTVVCTAIARELTGFMWAVAREAQAIRS

SEQ ID NO: 352594 - protein, 357 aa, unidentified
MKQQIKEIDFSNQELFIGIDVHKRSWTVTIRIEDLELKTYSMKPSSEELNTHMKKHYPGGKYTSVYEAGFSGYWLHRELTELGFHSIIVSPTDIPTSGKERLRKTDKVDSRKLARELSAGNLKGIYVPSLLFQELRGLSRQRYQQTKKLIRIKNQIKSYLNYYGQDLPENCELLHWSNQFINHLKTLEFSYEMGKEQLKNYIDELLILRKRKMEILQSLKGYLKKHNLYNKVELLLSVPGISYITATTLLTEIADIHRFNNTDSFASYIGLVPSTKSSGEKDKVLGLTVQFNRYLRQLLVEASWVAVRNDPALTLSFNDYSKRMCKQKAIIKIARKLLNRIYYVLKNEKKYIYSVVA

SEQ ID NO: 352595 - protein, 352 aa, unidentified
MTTGTLKRQPEVIVGVDAHKHIHHAVIITSTGQRLTDSEFPATSLGYADMLSWATEHGHVQAFGVESTGSYAAGLARFLIDHHVEVREVNTPHAHTKARVGKDDTIDAEAAARKVLAGVATAIPKRTDSVIESIRFLLLARDSAVKARTAAIVQLQDILVTAPADVRESTPRGGLAAARHCRKFRIDRARLHDPVQAVKLALRVLAVRAADLDSEIKELENALTTLVNATAPTLVSRVGIGTIHAAQLLVTAGENIARFRSEAAFARLCGVAPVPVSSGKSHRMRLHRGGDRKANRALHMIAVVRLRYDARTIDYMQRRLTEGLSKKDVLRCLKRFIAREVFNDLRTDLGTA

SEQ ID NO: 352596 - protein, 337 aa, unidentified
MEYFAGLDVSMAETHVCVVTRNGTVIHQAKVPSTPADIAAELTQVPTCRRVLFETGRMAPMLYHGLSQLGLPVVCVESRQAYQALKSLATHKTDRNDARGLAHLARTGFFKPVHVKSLSAHAVRSLIIARKKLVGQRVTLENQIRGLAVVFGVRLPRALSPAFITQALRASEGIPGLSAAMQGLVAARTAVLAAIVAIDGDIRRMVRASDACRRLMSIPGVGQLTALAFTAAVDDPKRFRRSRDIGAYLGLVPRRHQSGEIDYTGSISKCGDRRVRTLLYEAANVMLTRYKGALKLKEWAFAVAKRSTMRKARIALARRLAIIMHAMLRHGTEFKAA

SEQ ID NO: 352597 - protein, 353 aa, unidentified
MTDTPSIAWLGLDAHSRNCVLGHLDDHGNEIKDWRFPTDPQQLLKHIQAIPATVKHLMLEESNLARWIGQLLKPQVQQLIVCDARRNRLISQDSHKHDRRDAFALARLLRLNEFKPVWQPADDQRVLFKRAAQAYENAVLRQTRLKLQIKSLFQHWGLFPAGASVFAKAGRATWLKQLPYDPLRSQALLLYELLDQALAGQAQARRLMCQAGRLFPEIQRLRTAPGVGLVGAHLFVAYVQDPHRFAKFSRLSKYCRLAIRDRTSDNKPLGFKQLDRQGNGVLKAISYRAFLQAAKRRSGPLWDFYQASLRLTGSTTHARLNTQRKILLVLWTLWLKGEEFDPNQFSRSQPMNV

SEQ ID NO: 352598 - protein, 359 aa, unidentified
MKKISRESVRTKQPSVTVGIDLGDRFSRYCVVNEEGEVVEEGRIQTTASALERHFAKEARQRIAMECGTHSPWVSRLLQGMGHEVWVANARKIRAITASESKNDRNDAEKLARFAAYHPGLLSPIQHRSAERQRDLNLLQARDTLVRVRTLLVNAVRGMVKSAGQRLPKCSTESFAKVVGTAIPPGYELALTPLIKQVGAVTEQVRQMDQQIEAMGKRYPEVERLRSVPGVGPVIAAAYVLTLDSPTAAESSRAVGAFLGLRPRQSQSGDSDPQRRISKTGNEYLRRLLVQAAQYVLGPFGPDSQLRRWGLKLAGSGGKRGKKRAVVAVARKLAVLLHHLWRSGEYYRPFPDLNPAPAA

SEQ ID NO: 352599 - protein, 395 aa, unidentified
MISVGIDVSKGKSTVCILKPGGEVIKPPFDMVHAVENLDFLVSLINSFDEETRVVLEDTGHYHIPVASYLSSHGIFVCCVNALRMKKFCAQSIRRAKTDKIDAVRIASFGITYWSELTRAYDAPDTYGELRFLARQYYQITSILVKAKVNLSNLLDQVMPDISNLLQNQKDNHKLTEFVDRYIHFQTILDMGEKKFTADYCKWAKKKGYRCNERKAAEIFALAQNGIPSLPNSQSVKIAVREAIKLIHSTEESRNTILAQMQEICKTLPEYSVVRDMNCIGDVLAPRIIAEIGDVRRFKNKHSLIAYAGIDAPPYQSGAFNASERKISKRGNSYLRKTGYEIMQSLIQHKPIDDPVYDFIQKKRSEGKCGKEAMIAGLNKFLRVYYGKVMQLYSK

SEQ ID NO: 352600 - protein, 353 aa, unidentified
MRYVGIDWAYRRAQWCALGPGGEIAGEGRIAADRDGLARLVLELGAEVKACLEMMSGALWVRDQLVACGWQVEVADARKVKTVAPLAAKTDKVDARLLAELSRRELVPALWLPSLDERALRERLRRRMHLVRLRTSAKARIAGLQTQWGVRVSLARLRRADGLALLERAGVPEVWRRSVSECLSVIDFLDERIAPLDAELRPFAQADPRAVLLDTIPGVAELLALTIAVEIGEISRFASPEKLVSYGRLAPRVHQSGQARPCSGPLSKSGSRLLGWAAVEAAQQAWRETNPWHDLYADVARRSGNNNSAKAAVARKILIAAWHMLSRNQPFKPAPRCTRGTSVPASSRLALAA

SEQ ID NO: 352601 - protein, 403 aa, unidentified
MAAVMIGVDPHKGSHTAVVISPAEEPLGELRVRASAGQAGKLIGWAAAWPERTWAVEGAAGLGRLLAQQLVAAGERVLDVQPKLASRVRLLQAGDTNKNDPNDALSVAVAALRSTVCREVAAEDHRAVLKVWSKRHRDLARTRNQVACRLHAVLCDLVPGGHQKEISAAHAARILAQATPSGAVALARAELAAEFLADLRHLDGQLRDTRKKLAAAVRASGTTLTQVFGVGPVIAGTVIGDVGDVARFPGRDHFASYNGTAPVEVSSGNRKIHRLSLRGNRRINHAIHMAAITQLRHKHSEGRAYYDKKVAEGKTHKEALRSLKRKVSDAIFARLQADARQARESGPGGQPGNGSDSSAASSHPERQLFGPATPGPDTTIRPGTTAGTPSPSKPALKKTRPAT

SEQ ID NO: 352602 - protein, 402 aa, unidentified
MKYVGIDIGKMNHYASVIDGNNPATKPLKFNSVREGYDSFLAYLAKNDCIKTETIIGLEATGHYWLTLFEKLKHDGYTVYVLNPLQVDSHRNENIRGAKTDEIDCQLIAKVIQFGAGRSTNLPQEDLFALKQLCRFRIDLVKRTTQLKLKIITVLDQVFPEYQTIFKDIFCKTATELLKEYTTADMIAQEDLDKLTQVIRTVSKKQLSAEKAQELHAKAQNTFGIKYGLDAFSLKLRCLIAELEHLDREIALIEKEIEIAVTKQHTSLTSIPGVSITAAGTILGETVEYNKDNPDSRSFLAFAGLDPKIRDSGKYTGRMKMTKRGSPYLRYAINTAAFYAAFNEPMFVKVYKKQVGRGKPKGLALAYVAKKMAYVVAAILRTNEPFVPKGDEEQVIPVTLFA

SEQ ID NO: 352603 - protein, 343 aa, unidentified
MQTITTVGLDIAKSVFQVHGVDAQGEVLIRRQLKRRYVLAFFQKLPPCLVGIEACASSHHWSRELKALGHTVRLMPPAYVKPYVKRQKNDAADAEAICEAVTRANMRFVETKTPEQQSGLVLHRTRHLFIRQQTAVINAIRSHLGEFGIVAPVGRNGVEDLLDVVADPSDKRVPEIARACLAALGAQLHRLKEQILEFDCMIRAWHRSSEMSLRLDDCPGVGPVLATALAATVADPKAFRSARNFSAWIGLVPKQHSSGGKNRLGSISKQGDRYLRSLFVAGALAVIRYAKIHGTKHRPWLTALLARRPTKIAAIALANKIARMAWAMMARSERYKEPVALAA

SEQ ID NO: 352604 - protein, 315 aa, unidentified
MEQSLSSPNFVGIDVSKDRLDVHVRPSGQSFAVTRDGKGLDRLSIDMAALSPALIVMEATGGFEITVAAALGGAGLPLAVVNPRQIRDFARATGQLAKTDALDARIIALFAERIRPEPRPIADADSQTLAELVARRRQVVEMIGMESNRLRQARHARVQRTIKVILKTLEAQLAELDRNIDDTVRGSPIWRAADDLLTSVPGIGEVTSRTLIAELPELGHIDRRRIAALVGVAPINRDSGQMRGRRMIAGGRTEVRSALYMATLSAARWNPVISQHYKALVERGLPKKVALVACMRRLLGILNAILRTQTPWQSA

SEQ ID NO: 352605 - protein, 410 aa, unidentified
MTSHLHQRGFTRIIHVEAKQQESGDYRIQKEVTMYRILKIGMDVHTTNYTLCAMEPVIGEEDRIFATIKVTPDYKNILMFIESLKMKLGIDNKYDIQCGYEAGCLGYSLYNQLTAAGVKCVILAPTTMLTPQGVRIKTDARDALMIAQCLSYGGYHAVYIPTEEDDSVKEYLRMRNDHKLALKKVKQQINAFCIRHGHHYEGTKWTIAHMKWLKQLEVKDLYRETLEEYMASYEEQEAKIERFDQRIEEIAAQERYRERVKRLGCFLGVKTHTALSLIVETGDFMRFAKGNVYAAYLGLAPGENSSSDSINRTGITKAGNSHLRLLLIEAAGGICKGAVGHKSKDLRARQNGNTAEVIAYADKANTRLRSKYYKMIRHGKKRNVAVAAVARELACFVWGMMTDNIGVKAA

SEQ ID NO: 352606 - protein, 341 aa, unidentified
MQITRVGLDLAKRVFQVYGVDVHGKTKLSKKLGRGEMLQFFAQLPACVVGVEACGGAHYWARELGKLGHTVRLMAAQFVNPYRKSGKNDVNDAEAICEAVGRPNMRFVPPKSEEQQALLMVHRARSLVVANRTAQVNQIRGLLGEFGLVVPVGLRRLRTQLPQILEDAENGLPILARHVFAELLQELHALDEKIQRYDRQLQELARQSEPARRVMALEGIGPITATAFVASVGDARVFKNGRQFAAWLGLTPRQYSSGGTTRLGRITKRGDRYLRMLLVHGARAHLRFVERKNDPKSLWIKGLRARRHVNVAAVALAAKHARIIWALLAKGTTYRLPAAAT

SEQ ID NO: 352607 - protein, 345 aa, unidentified
MIIIGCDFHPSFQQIAWVDKETGECGECRLQHVNGEAASFYDSLQGKKVCLGIEATGGMRWFRRLMAASGFDLRIGDPARIRAAMTRKQKTDKRDAEHILQLLLEDRFPAIWVLGVEEEDRRALVLHRGRMIRMRSRVKNQLDGMAKSENLGVKPSTQKGRKQLEAASLTGWDAHRRQELYELLDDLDERIEPLDQAVAQEAEARPEVHRLMTHPGVGPVVALAFVLAIGDWRRFARGKNVATYLGLIPSEESSGQKRRLGRITKQGNSLVRWLLVQAAAKAQQKDPAWHRQYVRLSMNKHHGVAKVAIARKLAVRLYWMLRSGQNYEQVKERGSHAGSPISPVV

SEQ ID NO: 352608 - protein, 349 aa, unidentified
MFAGVDTHKDTLAVAVIDHAGRVVRQLELPNQDSGYVRLLALLSSHNVVRVGIEGSGNYGWPAAIYLLEREVSVVDVPPLMTSRERLSRPGQGKTDPVDAIAIARITAREDALPPVRPMTGHAADLRVLTEYRDQLVNERTATANRVHTDLLWLRPGYQHQLPHLTNMAHLHAALELLDGDDSVRAAVTRARLDRMLTLTEQLGELRIQIDALVRASSSTLPQLYGVGPVVAATIIGHVVDVRRYPTRHHFATANGTAPIPASSGRTVRHRLNRGGNRQLNRAIYTIAITQIRADTEGRAYYQRKRAEGKTSREALRCLKRRLSDLIYRTLRADLANAAQQTPTLNIAA

SEQ ID NO: 352609 - protein, 353 aa, unidentified
MTIVENTHTRTHTITAGIDTHADFHVAAAIDHNGGLLGVETFTTTTGGHRDMVAWLAGFGAIDKIGVEGTGSYGAGIARHLTGKGITVVEVDRPNRQARHRAGKSDAVDAIAAARAALSGTAIGIPKTRDGNIEAIRVLTVARRSAASEWIAIINQIRHVCFTAPEEIRRRFDDLSPIMVARTTAGLRPRSSSDDVVRFTTLMTLRELGQRAMFIHEQRKRLDAQMRPLIRESAPDLLEIYGVGYDVAAKLLIAAGDNPHRIRSEAAWAHLCGVAPIQVSSGKNQRHRLNRGGNRQANSAIYRIMLVRMASHDATRDYIVRRTAEGKTTGEIARMLKRYIAREVYKALPKTMS

SEQ ID NO: 352610 - protein, 343 aa, unidentified
MRHYAGLDVSIKETSVCIVDESGKVCRETKVPSHPEDLARALHDRAWCLERVGLEAGPLSQWLFSGLAATGLPVVCIETRHTKAFLQAQVNKSDRNDARGIAQMMRVNLFRPVHVKTLTSQKRRALLTARKLLQEKALAVDNDIRGLLRNFGLKVGPIGASRFETRTRELVDGMPELAEIIDPLLEARRKLRELFAVLHRKLLVIVRDDTVCRRLMTVPGVGPVVSMAFTATIDVPARFKSSKAVGAALGLTPILNQSGESKRLGRVSLCGDGMTRTLLYEAAQVMLTRTTKWSWLKAWAMKVAARRGIQKAIVALARRLAVILHRIWVSGTDFRWTREVQSP

SEQ ID NO: 352611 - protein, 346 aa, unidentified
MSHYVGLDVSVKSVSICVVNAEGAILARGETTSDPDQIASFIAKHAPDPERVVHESGILAIWLTRELEKRGLPIICIDARLAHKALSGRINKSDAGDAEGLAHLARTGWFTQVHIRSEASERVRVLIGTRERLIRMRKDLEGHVRGVLKVFGICMGAVRRTKQRQGFRDQLAEAGTTDPAISVMVEMFNPIHKALCAATDAMDEELKIITRESELARRLMTVPGVGPIVALSYIATLDDAARFKKSKDVGAFLGLTPRRHQSGDMNWSGRISKCGDRDLRRLLYSAAATLITQVKKPSSLLTWAKRLYERKGFKKAAVATSRKLAVIMHSIWRDGTVFETKVEAIT

SEQ ID NO: 352612 - protein, 412 aa, unidentified
MRVVGLDVSRSVAEIAYLEDGVLHAGGRAGLRRDELERFAASLRSTDHVVLEATGNTAAIVNVLRPHVARVAIANPLLVRLIAEARVKTDKIDAAVLAQLYASHFLPEVWMPDESTLALRRQVSRRSQLVRQRTRLKNEVHAVLAAHLIERCPATDLFGRKGRVWLKAQPLPMDERLGVEQRLRELDRLGEDLHEVDKALAQASIGDERLRRLLTITGVNTTVAIGLLSAIGAVERFPNPEKLVSYFGLNPSVYQSGPTPARHGHITKRGRSYARALLVEAAWGAAQAPGPLRAFFLRVRDRRGQQVAIVATARKLAVIVWYVLTRNEPFAWDRPALTAHKLRALELQSGMPAQHGSRKGTAAAYSLKSVRDQERAVAEQAERTYQRLFSRWKQARPKGHEAPLLWPGTGTS

SEQ ID NO: 352613 - protein, 343 aa, unidentified
MVDRVVFVGVDTHADVHHAAVVDELGRWLGDRGFATTPAGYAELWGWAGSFGAIAVAGVEGTSSYGAGLTRYLRAQAVRVVEVDRPDRKSRRMQGKSDPLDACSAARAVASGRAAGVPKSHDGVVESIRCLHLARRSAIKARTQAVNQIRALLTTGPAVLREQTRGLGRKALISRMVRLRPELNGAQHPEQATKIAVRGLARRCQALNEEIAALEVQLSQLTLAAAPRLLARPGIGIDTAAQLLITAGDNPDRLRSEAAFARLVGVAPIPASSGRTDRHRLSRGGDRQANRALHTIALVRLHRDPRTWAYLNKRTAQGLSKKDILRCLKRAIAREVYHDLRPT

SEQ ID NO: 352614 - protein, 367 aa, unidentified
MLYLGIDQHKRQLTVNLRGEDGSVILKRQVSTRWEKVRAFFADLAERARPEGGFLALLEVCGMNPWLLAMLKEYGCRETVVIQPTERSKQKTDRRDAGQLSHLLWVHRQQFLEGKHPLGLRRVQPPTSQEADDRQITALRARLTKKRTAVLNGLHKILRKHNLEQQCPTKVFQTQKVRRWLGAVELPAVDRLEMDLLLRQWDMLDQQLEAVEAKIAERAEADEQAKLLESVPGMGHYSAVAIASRIGNMERFKGPDSLANYFGLTPGCRNSGEATQRLGSITKQGSKIVRYLLGQAVVKVLRFDSAMRTWFKRIKKRRGAKIARVAVMRRLATILWHMLKNKQKYRYDSPIQKHREFEAFEGRTEAA

SEQ ID NO: 352615 - protein, 366 aa, unidentified
MKKTITVQAFKNEIFKEQKLTIGLDLGDRWSFYCVLDEAGQVILEQKLPTTPEAMKQTFGKIPRSLIALETGTHSPWVSRLLTELGHEVIVAHAQKVQLITKSNRKDDRHDARTLARLARVDPELLGPVRHRSVQAQLHLTVIRARAELVSARTALVNAARGLVKSYGQRLPKCGTYQVNRELAAALSTELRDVLEPLLKEIESLNERVKEYDERMEKIAKEVYPEVSLLKQVKGVGTQIALTYVLTIEDPYRFPKSRQVGCFLGLRPGRRNSGESEPQKGISKEGDRYLRTMMVQGAHYILGPFGEDSDLRRWGRKLAERGGKNAKKRAVVAVARKLAVLLHRLWVGGEVYEPLRNSQKAMREVT

SEQ ID NO: 352616 - protein, 350 aa, unidentified
MTTMPLRVTGGVDTHLDVHVAAALDHRGGLLGVESFETTPAGYRCLLGWLRGFGALELVGVEGTGSYGAGLTRHLHREGICVVEVDRPNRQRRRRRGKSDPQDAITAARAAQSGDARGEAKTRDGNVEAMRVLRVARSSARKARTQALNQMRSIISTAPEPIRAELRNLNVYRLLEHAAAYRPGQRRDVATLTKRTLRMLARRALALEAEVAELDAILEPLIAETAPALAARPGIGTECASALLVAAGDNPERLRNEATFAHLCGAAPIDASSGKHQRHRLNRGGDRQANSALWHIVITRMVNDPHTRRYIDRRMKEGLTKKEAFRCLKRYIAREVYNHLPANHLALDSP

SEQ ID NO: 352617 - protein, 456 aa, unidentified
MSERKSLEIRVSVDVGSRSHQVAIGLSSGEVLEEFEIAHRVEGFEDLFSRIERHRKGNSYRVAVAMEGFNGWARPLDSMVRGRGYRLYNINNLKLARFKEIFPGAAKSDRIDARKGLELFQLRDHLPLAKEVLQEVVGTPHENEVLKRLSRRRRRLVDERVRVVNNLQADLQAVCPGLLEITKEAGNQWFLNFLISADTLPQLARLRRTTLLKIPSVGVKYARLIQDWQERAHFSEEVEWVSAMIQEDARRILELDETIKALEVKTAEVAETSTIAKLLRSIPGYGAICTSELAGEIGTIERFNKEGSLALYLGMATLDNSSGKYQGTKRPKHINTRAKAAMMTALDRHRKYVPQSQKYYEKKRAQGKSHNQAIRALGRHLCRIIYKMLKEKREYEVRPLKRDTQAKVTSRSSRIGQIGKKKFGERIKSQSNKRREEKSPHRLEISSGMFGSLLFY

SEQ ID NO: 352618 - protein, 373 aa, unidentified
MNSMTVTPTEPVASRQIIIGVDTHKYAHVAVAIDHLGARLAAQHVAANREGYAQLEAWAAALAGNGRVIAYGVEGTGSYGVGLASFLRRTGHRVIEVNRGDRRSRRNNGKSDTLDAEAAARAVLGGQAKAVPKSADGTAEMIRQIKIARDTARKAKTSAIITLKALIVTAPADLREHLAGTSDKVLIDRCASLRPGAVNSTTASAKHALRTLAKRYQALEAEIREHDTILDDLTRSHAPTLREGLGIGADTAAEVLIVFGDNPERVHSEAAFAKLCGTSPVPASSGMTNRHRLSRAGHREANAALYRAVIVRMRFHEPTIKYVARRTAEGLSQRDIIRCLKRYLAREVYQAVMTDHRARQALPTSASQQTLDL

SEQ ID NO: 352619 - protein, 400 aa, unidentified
MGKEPKRFIGLDIHKEYFVAVGVNPQREVVFGPQKVSNYQLDNWILRYLTTEDAVVLEMTTNTYLFYDSLLPYVHSVLAVHPPNVNLVTNAQVKTDQKAALALAQLHAVGMLTGVWIPPNHIRDLRALIAQREKMVRLSTIAKNRLHALLHRKHLILPEKPFAPEQRAWWESLPLSATERFLVHSDLDTLEFAQKQVEQIMACLKEQSAQDEQIPFLIQLPGVALLSAITIVAAIGDITRFPSAKKLVGYAGLGTRVHDSGMTHSNGRITKTGRKDLRRVMVNAANHAVEHHPHWKEVFERMEPHLGRSKAIVAIARKLLVAVWHVLTKRVSDRFADPGMVASAFFQHAYKVGVKNLPEGQSALAFTRVQLDRLGIGMDLQEVPWGRSHHKLPPSQCHTP

SEQ ID NO: 352620 - protein, 492 aa, unidentified
MGWCGLESGDAVWRSRVRKLNDSAAQPFRSATGGLVMRRTKRRSSKIRPALPMVHANAAAIDVGARMHVAAVGADRSAEPVRSFGTFTTDLHRLADWFAECGVETVVMESTSVYWIPIFELLEARGFTVFLVNARDAKHVPGRKTDVSDAQWLQRLHSHGLLRASFRPKGEIIELRAYLRQRERLLEYAASHIQHMQKALSEMNLQLHHVVADITGTTGLRIIRAILAGERDPAVLALLRDTRCHASVETITQALTGHYRAEHLFALEQALALYDAYQEKASACDARIEAVLKQLSFRRGRGVGPLPAPRRGMRRQPNGPAFDVRAALFALLGKDLTQINGLGPYLALKLIAECGADLSAWPSAKHFTSWLCLAPSNKISGGKVLSSRTRRSGSRAAALLRLAAVTIGRTDTALGAFYRRLSARIGKIKAITATARKIAVLFYNALRHGMDYIDPGASSYETRYRARVIENLHRRAKAFGFVLHPAAPQAVS

SEQ ID NO: 352621 - protein, 420 aa, unidentified
MTVYLERGYKSKEVCGPEQHQNKYAGGIKMVCVGIDVAKDKHDCCILDSDGMVRADCFTIPNNMDGFKQLLQTIRNCTQKSDKIKVGLEATGHYSYNILGFLLDKDLAVYVMNPLHTNLYRKSLSLRKTKTDRVDARTIATMLLSDVDLKSYTDTAYHNEELKSLTRYRFDKVRERAKLKQSVSRLVTILFPELEKLVTSLHIASVYALLSEYPGAKQISEIHLTKLTNLLATASKGRYEKEKAIQIREAARTSIGSVMSAKSLELKHTIKLIKELTSEIDEIEDSIQQIMDELHPPILSIPGMGVHSAAMILAEIGDFSNFDSPDKVLAYAGCSPSTYQSGKLTNCYAHMEKRGSRYLRYALYNATKYVCHWNPVFAEYLAKKRSEGKHYNVALSHAMKKLVRLIYALQKSGKAYLTAA

SEQ ID NO: 352622 - protein, 346 aa, unidentified
MGKPIINLSSVTTVGLDLAKHVFQVHGVDALGRVVVAKAIRRNKLLEFFASLPPCLVGLEASGSAHHWARELIKLGHDARMMPPAYVKPYIRRQKNDASDASAICEAVTRPSMRFVAVRSLENQAALMRHKAREMLVSQRTQLLNGLRGHLTEVGVIAAQGPRHGRELAELIEACDETVPFEVCEALAPLVVQLRNLDEAIARLERTIAKLAQQDETARRLMSIPGFGPITASAMAATVQDTSGFAGPREFAAFLGLTPKQNSSGGKPKLGRISKMGNRNLRKLLVVGAHAVLFHRKPHTDPLRMWAKKLIEKKPFKLVAVALANKMARIAFTIMRNKTTYREMPA

SEQ ID NO: 352623 - protein, 351 aa, unidentified
MMIIGVDYHPGFQTIAFLMEETGECGEQELNHSDGQAEKFYRDLKQQGICVRVGMEATGYSRWFERLLAELGFEVWIGDPAEIKTKRVKKQKTDREDARLLLRLMREDNFPRIWVPDPENRDLRQLLWHRHRLVQMRTRIMNQLQALAMNEGYRWKKKLFSEQGRAQLEKLTLAPWASRRRQELLELLDRMNPIIEELTAAVEREARKRPDVMRLITHPGVGPLTALAFVLIIGTWERFPRGKQISNYVGMIPSEDSSAGKQRLGHISKQGNSLLRFLLVEAAQAAARIQPDWRRRYVHLAMRRHRSIAKVAMGRRLAVRLYWMWRNGCEYSQSLEFGSYAGQLGTGHGVR

SEQ ID NO: 352624 - protein, 313 aa, unidentified
MTLPQNTIGCDVSGQRLDVYLHPAARSCSFSNDPAGIAALIGLALEHRAFVVLEATAPWDQPLVRALEKAELSFHRANPRRARDFARSIGMLAKTDAVDARMLALYGANLDLPATAPVSPERLKLQGLNSRRDQLVAMRKAERIRLNGVADQVVVESLEAVIALLDVQIRALERQIANAIKETCDLARDAALLRSAAGVGPVCTAIILASLPELGLVDRRAIAALAGVAPIARESGLMRGKRHVQGGRKRVRDALYMAALAAIRTGRWKQAYDHLRSRGKAPKAAIVAIARKLLVALNTAIREQRPILNAQAT

SEQ ID NO: 352625 - protein, 433 aa, unidentified
MNAPTTTPTKNFAAFIGIDWADKEHEIWLRPADGSPARRSTLSQNPVAIQEWISQLRQQFGGQLVALSIELSRGPLLAALMGVEFLVIYPINPKSLARYREAFRPSGAKDDRSDAELLCEFLRHHYAQFKPWQLEDAQTRLLGGLTQVRRHWVDEVTGAVERLRANLKHYYPLILELFADGLAQPMVVHFLQRWPNLKSLQEASQSELRKFFYGHNSRSAQLLQERLQLIVQAKALTEDAGVLGIYQTDTLVITELLSVLIKKISEIQKQITKLFAAHSDAFIFQSLPGAAEVLGPRLLTACGTQRERFAEPVALAQLSGIAPITVQSGQSEYQIFRFTAPHFMHQTFWEFAKSSIKYCLWAKEFVDLKIHKGMGFNAAVRALAFKWIRIIWRLWQNREAYDETKYLAGLRRAKAAFVEPATTSVSSLDSALL

SEQ ID NO: 352626 - protein, 429 aa, unidentified
MNYTQNEKLLQVGEGNLIVGIDVGSSKHYARAFDWRGIEYSKKAFAFSNDAEGFAGFLEWVSLILEKSGKETVIPGMEPTGHYWFDFAKFLQDNGMKPVLVNPLHVKRSKELDDHLPSKNDRKDPKTIAKLIIEGRYAYPYMPEGVYAEIRNASNMRFQVETELTRCKNRIQRWFAVYFPEYSEVYGSFNAISSMMILKQAALPSDIIKLGAEKINQIWRDSKLRAVGKKRAQTMVEAAQRSIGYTEGLDTARIEISLLLEDFERLQKRLEQIIELIEELVGKVPYAEKLLQIKGIGMKTVSGFIAEVGEISRFTNAKQLQKLAGLAIVENSSGKHNGKSRISKRGRKRLRYLLFEAVLSLTASNQEFKEIHRYYTSRKENPLKKMQSLMVLSNKLIRVFYTMLRSGADYDPEKLISDIRRPDNAAEAA

SEQ ID NO: 352627 - protein, 351 aa, unidentified
MFHGTIYVGLDVHLRQITPAVIAADGSERVLGQIPNQPKAIRRLMDRLSPDRSRLQVVYEAGPTGFVIARQLEGLGVACTVAAPGQLAQRPGDRVKTDRKDARKLARALRNDEVSAVAVPSPELEALRSLSRLREEAMHERHRCRQQLLKLLHRLGVTEAAGMRRWGTRYAAWLDALALAEPVDQLVLTELLAELQHRGERLDRITAQLLAAADGPEAALITRLQGLHGIGPLTAIGLVAELGDLRRFAHPRKLMAFAGLVPSEHSTGERIQRGGITRTGNAHVRWLVTEAAWHYARTSTRPLASPVAERARIRLSQRYRDLRARHKHPNVAVVAIARELLGFIWEVATTD

SEQ ID NO: 352628 - protein, 401 aa, unidentified
MEGPIISIDVSNGCSHFRCFIDRNKAFGKVHKIKHDLDGFQYLLDCLGRLNEKTNEEACVVYEATGVYTKPLIRFLNKHKVKHYMVNPLQAAKMRKTDLHSKKTDKNDPNSIAKVYYDKDLYEYVDEEQIYHTLRVMNRNYEDQLEHLRKYKVTFQNILSIVFPGYSSLFKNPYCDIALAILKKYPHPDMIKNKKPETVAKYLEKHTCHHKNSCLKWATKVIEYANKTYPGCDKDEIEVIELLRIIKELEACIDSCDTQLNEMIQLAEQLPNYFLILSIDGLGPNLACRILAEIGDIKRFSNTKQLISYAGIDPHISQSGDVDGLHLSISKKGNKRLRCLLYLAVTCNLRLKKENDPIQQFYKKKKQQSVPLKPKAARVACTNKLLRIIYGMCKNGCLYQN

SEQ ID NO: 352629 - protein, 410 aa, unidentified
MDVFLERCAGLDVHQASVVCCVLIGAPGRKPQKLLRSFGTTTRDLEALRAWLAEHGVTHVGMESTGVYWKPVYAVLEGHVDLTVGNAHHIKNVPGRKTDVKDAEWIAQLVRHGLVAKSFVPPPAIRDLREMVRHRRTLIETRTAVRNRVLKLLEGANIKLSGVASDVFGVSGMAMLEALAAGTNNASEMAGLARGRMRRKHAALEAALEGRMREHQCFLLGMHLRNLKAIDQDLDALDARIEAQLEPYQVQHRLLMQIPGVDWVTAASIIAEIGTDMDVFASARRLAALAGVAPGNYESAGKPKGAGTRRGNVFLKSALFAAASAAVRTKGSYYRDKYNRLRARRGPVRAIMAVAHKLLLAAFHMLSTGEAFRDLGEGYLDQVARKRSTTKLVQRLSNLGYDVMLIPKAA

SEQ ID NO: 352630 - protein, 339 aa, unidentified
MASKVIFAGIDVGASELAVVVRRNGKQGKAKTFTNTPEGHAAIIGYLNPGKHPCKVCLEATGTYHLDIAVALSREPGIMVTVMNPKAVKNFANALMQRNKTDAIDAALLAEIAELLEYKQGFKVWQAPSANVLEIRACSRRLSELSQQKARAKNQLHALNATQQTPEVVLNSVKEDIKHLENQIDALSNHALTVIEQDTEVNQSYQLITGIKGIAKASAISILGEVLVLPDEMTARQWVAHAGLDPREHTSGSSVHKKARLSKAGNRHLRCALFMPALSAIRYIPNVKAFYQHLTDDLGKKKMQAICAVMRKLLHALHGILKNRQAFDSARFYHALPTA

SEQ ID NO: 352631 - protein, 344 aa, unidentified
MGNTIICGIDAHEKTLVTRIGVNQEPAETKRFSNTRSGREALFSYLKKLSGEYAGGKMVMAYEASTLGYGIYDESVASGIECHILAPTKMPAARKDRKKKTDERDAQRVFEIVRAYALAGNELPRIWIPDHQTRDDREVVRGRLDAAQKLTGLKCQVQTLLKRTGVVKPAEAGDSWTQRYRLWLKGLCIKPGAQIALQSLLRQIEGIEAEIKILDQAVEQLAEGERYKAVAGALVRAVKGVGLLTAMVYVTEMGDLSRFNNRKQVGSYLGLVPSSNESGEVADHKGHITREGSARVRKVLCQATWARVAHDKEEAVVYQRLVKKNPKHKKIAVVASMRRLGVLL

SEQ ID NO: 352632 - protein, 405 aa, unidentified
MFMTPQACLEAGTEYPRYKLFVGFDVGKRFHAAHARTGSGRRVLALKVDNDEAAVDAFVARALEAADCEPGACLVVVDQRRNIGTVVVRRALAAGCDVAYITGKREKKARELFPGVAKNDAKDAEVIAAAAAGMPQSLLPVPREDDGLEGARRLRSQLAFSVKQSTQVKNRIRAALVESNAAFERLVDFSRPWQLDVLERLGGPWQVLDAGKGRLARVARDADEEELAGLWESLSRATRPTEEQVRSEARTIPMLARRLRAIEADVDELSDLVAKEVEGDETYRCLLTVPGVGRSTAAQLVAAVQVGAFAGNDKLASYCGLTPRDTRSGATINSTSPSPEGNRCLKSLLIFTCLSLVRSDNEFGRYYRACRSRGMRHTAALKATARKRLKVIYAVMRDVRPYEPR

SEQ ID NO: 352633 - protein, 306 aa, unidentified
MIVQNYVGCDISKQRLDFFDEASGRCQRIANQGDAIEAYVAGLCADRDFVVMEATGIHDRLLRHALAKAGVAFSRHNPAHTHHYAKSTTQRAKTDRLDARMLSDYGRRYQPAPEPAPCEKGEHLQSLARHRDHLVEIRARLKRYLSEAFDADVVDDLQDVIADFDTRIDALESRIVKTIRQAEDTALDYALMVSVPGVSTILSLLAHMPELGQRSPKSIAALAGLAPFDNESGKLKHRSKITGGRPRVRRALYMAALGAIRANDRFKAFYVALAARSGSKKLAIVAVARKLLVTLNAIIRDKTAFA

SEQ ID NO: 352634 - protein, 319 aa, unidentified
MNTIGLDISQKTIDATLKKSDGSAYHIKISNDSEGFQKLKAWIKTNRVRKTVIGMEATGIYYEAVADTLSETHIVYVINPLKIKNYAESQFSRTKTDKADSNLIAEYTKRHIDKLTAYRKPDNRYLQKLLSLKNQLKEQQKQIKNRLHSSESETIKTIHEDLIQTYQEKIDQAQTAIEAEIDRQKDKNAHYRNLQTISGIGKETAAILYAQLTDKDFQTANKFISYIGLSPQIQQSGTSVNKKGKLSRYGHRRLKSALYMPALVAYRTGAFPQLVRNLTNAGKHKMIIIVAIMRKLAKLAYFIVKTGKPYDATRYKSAA

SEQ ID NO: 352635 - protein, 342 aa, unidentified
MEHIAIDLGARESQVCVRAAEGTIVLEARCATAALRPMLSQRPPSRVVVETCAEAFAVAALARELGHEAVVVPASLVRALGVGARGVKSDVRDARQLSEASCRMARLPAVHVPDARSQARKAECALRETLVSTRTKLVNAVRGWLRSQAGGPLPRCTPATLPRRVRGHLAQRGHALPPALARLLLVLETLTEQVRAADAALAALARADDVCRRLMTVPGVGPVTAVRFVAALDDVRRFPHAHAVQSYLGLVPGEDSSAERRRLTAITKAGPSRVRWTLVQAAWCARRLRPHDPAMAWARRIEARRGRPIAAVALARKLAGILYALWRDGTVYDPGYARSRAA

SEQ ID NO: 352636 - protein, 399 aa, unidentified
MKMNLSLELRVSVDVGCHSHSVAIGLSTGEILDEFSIAHEPEGFRQFFSRIEKQERKFGYPVSVAMEGFNGYARPLDTLVRARDYRLFNINNLKLARFKEIFPGAAKTDPIDARKGLELFQLRDHLPMAKDVLQEVRKTPRENEILKRLSRRRRRLVNERVRVLNNLQADLQAVCPGLLKITADAGNLWFLRFVTSTDDFRKLARVREVTIRKIPGIGAKYAGLILSWQKQAQFGHDVEWVGEMIQEDAARVLELHDKIQTIEFRMEEVAQGSEIARTLLTIPGFGDICTAELAGEIGTIERFGSEASLALYLGMTNLDNSSGKQKGSKPPRQVNVRAKAAMMIAVDRHRKKVPQSQKYYEKKRTQGKKHNQALRALGRHLCRIIFKMLKENRGYLLPS

SEQ ID NO: 352637 - protein, 344 aa, unidentified
MSIVGVTGGVDTHADVHVAAAIDHNGGLLGVESFTADQAGYESLVGWLVGFGEVIRIGVEGTGSWGVGLARFLHSQDIVVVEVDRPNRQKRRKVGKSDPTDALAAARAALSGEASVTPKRRNGPVEQIRVLMVARRSARQQRIQTLNQLRHLVFTAPEPIRVRFKDRYKTGLVTEAANMRPGKGSDPVTYTTNLVIRNLARRIRGLNTEMAEIDVMLTGLIAQTAPSLLELHGVGTDTAASLLVAAGDNPERLSSEGSWAHLCGTTPLPANSGKVTNRYRLNRGGDRQANAALYRIVLTRMSSHPDTRRYVTRRRAQGLNTAEIMRCLKRYVARQTFKHLPQAT

SEQ ID NO: 352638 - protein, 349 aa, unidentified
MRVLKQVLGVDVAQKELVVTLGVLNEDLSIDFLLHRVFHNKETGFVALLKWLKKHTDESIKLQVVMEATGVYHQKFAYYLDDNNISLCIVLPNKISSYLRTLETKTITDKTCSEAIAHFGLSRKLDNWTRPNKTYKVLQQLTRERDQLVFERTTIKNQIHAEESESEPNSSSIKRFNARIKFINKQEQEIKKEIDKWLNSDEKIKGQVEKITTIPGIGQLTAVTILAETNGFELIRNKKQLTSYAGFDVKEKQSGTSVKGKPKISKRGNRYLRKCMHLPSLSAVKYNETYKDLYARIVSKSGVKMKALIAVQRKMLELTYVIFKNNTVFEQDYEVKKRVLLLGEDTLTS

SEQ ID NO: 352639 - protein, 401 aa, unidentified
MVSDFRKGRYNLMKIYVGIDIAKLNHFAAAISSDGEIILEPFKFTNDADGFQLLVSKLDSFDKNSIIIGLESTAHYGDNLVRYLVAEFYQVCVLNPIKTCQMRKNNIRKTKTDKVDTYVIAKTLMMQHDLRFVSFYDLDMMDLKALGRFRQKTIKQRTRLKIQLTTYVDQVFPEIQYFFKSGLHQNAVYALLKEAPSPKEIASMHMTHLANLLKVNSHGHFTKEQAKELRVLAQKSVGANDSAISIQITQTIQQIKLLDSQLEKIEAEMTDIMKFNDSVIMTIPGIGYINGGMILGEIGDIHRFSNPNKLLAFAGLDPSVYQSGNFQAKTTRMSKRGFRVLRYALVNAAWNVVRNNATFKAYYDAKRAEGRSHYNALCHCAGKLVRVIWKMLSDKVEFNLE

SEQ ID NO: 352640 - protein, 428 aa, unidentified
MDYTQNAKIAQVTEKSLIIGVDIGSESHYARAFNWRGQEYGKKVFHFNDDVEGYKAFKGWVEAHKARTGAETVIVGFEPTGHYWFSFGRYVKQMGMMLVLVNPYHVKQIKELDDNSPKKTDFKDPKTIAKLVVDGRYSIPYIPEGVYAELRQAVSSRDRIVKEQNALTNRIRRWLKIYFPEYLKVYTKFSAESGLLLLEKAPLPAEIVELGVDGVTQIWREQKLRAVGKKRAETLVEAAKNSVGIDGGACAKLELQLLLSDFRTKQAQLEQVEAVIEAEVLKVPHVEKLLAIKGIGLITVAGFLSEVGEIGRFDSPKQIQKLAGLELKENSSGKHKGQTSISKRGRKKLRKILFQAVLPLIRSNAEFSDVYRYYTTRQKNPLKGKQAVIAVGCKLIRIFYTLLTKGVDYDASRMRLDIIRPADGEQVA

SEQ ID NO: 352641 - protein, 381 aa, unidentified
MLDQTAHNPVPTVYAAIELSKKSWVVAIVQPAKGQPSIYRIKGGAFSDLVMRLRTATPGGERLLVCYEAGYDGFWLARSLQTEKIDCRVLDPASLQVNRRARRVKTDRIDVLMLVRALIAVDRGDRHVCSIVRVPTVEEEDARRSHRERQRLIRERTAHINRIKGLLFGQGIRGVEPRLRRSRIDFSDLRTGEGLPLPARLRAELEREYARLDLVETQLRATETERDTADAQDPSIEYKRNMLIQLRGVGPASAAILTREIFGRRFANRRQLGSYLGLTPSAYDSGSTTRCQGISKAGNSFARRVMIEVAWLWRKYQPNSALAKWYEERAAGQSPRIRRIMLVALARKLIVALWRYVEIGLVPAGAVSCANNGAALDAAAA

SEQ ID NO: 352642 - protein, 410 aa, unidentified
MVERFVGIDVALREHRIAVLDRDGEAVGPSFTIAASKDGVTTLLRTLDARAATAAQTLIGLEASGHLWENLEAALVGAGYRVIVLNPLQTRRYRDVVRRKAKTDDIDAHVIAGLLRSGAAQASYVPDEQIQSLRELARLRARLMADRQDYQRQLSAQLDVVLPEHHAVLGDLLTARARGILAQFPTAQHLAHANPRAIRRAAEEAGARGFSLNDATGVRDSARRSLYSGKAAAARAHVVRTLVSQLERLTSAIDEVDRAATALLPPSEPGTGPSDAELLQTIPGIGPQTAATLLGELGALTRFTDARALVAYVGFYPVINESGDRAAPPRLSPVGSRIARHSLYLAAVNAVRRSGEWRTIYLRKKAQGKTAKQALVVVAVKLLHAVYAMLKHRQPYNPSRLLVAPATIGS

SEQ ID NO: 352643 - protein, 388 aa, unidentified
MDQNLKYSVGIDMSKESFDACISVINSFQVVIIKATRKFNNTGQGFNEFLTWIKKHLKEDLPVVVTLEATGVYYEELAIFLFKNDLQVSVVLPNKAKKYLQSKGLKSKNDKIDAKGLSQMGAEQNLARWEPFSKNTYELRSLTRQNEDLQAQKTMINNRLEAYKFSGYKNKLIEKQLLSMIKFINKQLKEVNTQIEKSVEGDELLKNKFNKICKIKGLGILTVASIVGETNGFKLIKNQRQLVSYAGYDIIENQSGNRIGKTRISKKGNSHIRRALHMPALSVVKYEQAGFKTLYERVYASTGFKMKGYVAVQRKLLMLIYTLWKRDEEYDPNRLIIMDNASGVDESKFLFSLNSEGVAKKIGGIKPPTQDKLRSDESSEVLFSLVQN

SEQ ID NO: 352644 - protein, 370 aa, unidentified
MPKCTPLFVGLDVHKETISVAYAAGGVAEPPQFVGQIGTRQSDIDKLVRRLHTRSSRLVFAYEAGPSGYVLHRHLTGKGLDCRVVAPSLIPKKPGDRVKTDRRDAVELARLLRSGDLTGVHGPSVEDEAIRDVCRARDATRITLKAAKLRLKAFLLRLGFNYVGRADWNDAHRRYLAQVVCPTPAQQIVFQESLRAVDEQVERLARLEDQLRELAPSWRLYPVVEALQALRGVQWIVALTVVAELGDLTRFDNPRQLAAFVGLTPSEYSTGSSRRQGGITKTGNPRARRVLVEGAWAYRYPAKISAHIQRRIDKLPKVAQDIGWKAQLRLCKRYRRLIGRGKHANIVTTAIARELLAFMWAIAKEVPITA

SEQ ID NO: 352645 - protein, 343 aa, unidentified
MDKFAVAGVEVSADVLVVACDNGQQRSSEFPNTATGHQQLLRFLRKHSPQVRVCLESTGLYGLDAALLLHAQPGVEIMVANPRSVRHFAQAMMRRSKTDPLDAALLAEYARRMPFQPWQPPSLAGRQLCALARAIHQITESHTMQKNRLHAASATATTPRIVLRELERSLAQQQRSMQRLTQEALRHIDSDPQLQQRFRLLLSFPGIAQTSALQLLGELVLLAPDFTVRQWVAYAGLDPRQYTSGKSVEKKVRISKVGNRHLRRALFMPALVAVRRHPGFHAYYQQLLAQGKLKMVALVAAMRKLLHGIYGVFHSLQPFDADKLFPLRSPIQSKTAIAQNIAC

SEQ ID NO: 352646 - protein, 342 aa, unidentified
MKHYAGLDVSLEETFICVVDESGKRVWRGATKSDPQTISRVIRKRAPKLVELGFEAGPLCTWFWHEFKEMGLPVVCLDARHAKAALSMQVNKTDANDAYGLARIVRTGWYRAVEVKSIESHVVRSLLAVRSQLVGIRTRLSNQLRGILKTFGLVVGKVSGRSLESRVRELTAGNLMLKDVVESILNVWRTIYDQLAVIDKKLRQFSHSNEVCRRLMSVPGAGPVTAAAFMAAIDDPDRFKRSSSVGAYFGLTPKRYQSGEVDRSGKISKCGDSRVRSYLYEAAGVLLTRVKKWSKLKAWGVRLATRVGLRKAKVAVARKLAVILYRIWVDNSKFQWGDAPSL

SEQ ID NO: 352647 - protein, 347 aa, unidentified
MRFYKQQHKYYCGVDLHARKMYVCIIDQKGKTKVHKNIKTDPELFFELVFPYIDDIVVGVECVFCWYWIADFCEEHKIPFILGHALYMKAIHGGKTKNDKIDSYKIAALIKGGNFPIAYPYPAKWRATRDLLRRWMYISRRCSELVAHIQNTNTQYNLPAFSKKLSRKYNHDGVAERFEDPAVRKSVEVDLAVIESLNQILKKLEWQIEKTARQHDYHTLYLLRSIPGVGPILALVILYEVHDVSRFPMVQNFSSYARLIRPTKESDGKWSGYGNKKIGNHHLKWAIKEAAILMLRESQQAKDFVAKYTRKYNKGKALGIFTHKLGRALYFMLKNNEAFDMKRFFAQ

SEQ ID NO: 352648 - protein, 341 aa, unidentified
MRKFIRIGVDLGKNFFQVHALESEGGPVFRRKVTRAGLRKFFEETEPCLVAMEACGSAHYWGRELAAMGFEARLIPPAYVKPYVKRGKNDAADAAAICEAASRPDMRFVPIKSAQAQAALALHKSRELLVKQRTMTVNALRAHLAEFGVVAAKGSRHVAALIEKAAGDANVPAALRAALDALVQLIETLGREIKALEEQIAKRLAKEETCRRLMRIPGVGKIAATAIVASLPDARVFASGRDFAAWLGLTPRQNSSGGKERLGGVTKRGNRYLRKLLTLGGTSLLAPAHKRKGALADWIVALCARKPKRLVSLAIANKLARIVWATLTSGELFRQENFAKA

SEQ ID NO: 352649 - protein, 411 aa, unidentified
MNGRLLSRPLGRCIGLDVHLDFIEIAICEEGKVYAAGRVPSTPEGLKTLADSLLPTDRVALEVTGSSWEIVRLLEPHVSKVIVVSPGDTGISQARAKTDRLDARTLARMLWTGELEAVWVPPEWIARMRRRLSRRQQLVRARSRAKNEIHAVLMRRLKGRPPVSDLFGVKGREWLRGLELPVEEAETVHAGLRHIEFLDTEIEQVERLICQEALKSRQIRRLLTVPGVNVICAAVFLAAVGDIRRFKGSRPVVAYLGLDPRVYQSGSAPARSGRISKQGSPQARWALVEAAQSVVQQPGPLHAFYERIRARKGHNVAVVAVARKLAVLFWCMLTREEDYAHQQPSLTAQKLRRVELAAGATVRKGQPSGVWATRERMRQAEKQLAAQAEATSARSPTGKPHRPRNRRRSRA

SEQ ID NO: 352650 - protein, 418 aa, unidentified
MKKHSKSSQRSEPTLKRRKARGPVQRDAKEVLAEVLGKLTGKLDAPAVSTSAKENRRRNTVGPNRDRLTVGVDLGDRWSQYCILGLEGETLAEGQLRTTQEDVREFFQALTVARVVIEVGTHSAWMQDVISEWGHEVLVANPRLMEGSKRRKRKSDRIDANKLARLGRVDPQSLYPIRHRSREVRQDLVVLRARDALVSVRTELINTTRGLVKSMGTRLPRCSSPSFADKVKDAIPVEVGEALLPLVQLTETVNDCIARYDQKIEELGQKKYGHTTLLRQVKGVGPITSLAYVLTLENPQRFSSSREVGPYLGLVPKQEDSGDSQPQLGISKTGDRMLRRLLVGSSQYMLGAFGPDTDLRRYGLRLCERGGKNAKKRAVVAVARKLAVLLHHLWVTGDVYEPLHHTGAETRTAQATAA

SEQ ID NO: 352651 - protein, 342 aa, unidentified
MKIHTIGIDLGKTSFHLVGLNERGEVVVRKHFSRAQLLRFTANRKVHLIGMEACGGSHFLGRALQEQGHEVRLIPAQYVKPYVKTNKSDYIDAEAIAEAVGRPTMRFVPIKSDDQLDLQSLHRVRERWVMRRTAVINQIRGLLLERGITLRKGRRYIEAALPGILEDADAKLSGTLRLLLAQLKLELDQTALRLEEAEALIEQTVQENEACQRLVKIPGIGSVTATAVIAAIGNGAAFRKGREFAAWMGVVPREYSTGGKQKLLGISKRGNRYLRRLFVQCARAVLQQKTKQSPGLKAWLEKLTSRTHRNVAGVALANKLARMAWAVLATGEAYRAPLPVAA

SEQ ID NO: 352652 - protein, 336 aa, unidentified
MALYCGIDLHSNNHVICVIDDKDKRLLEVKLDNDPELTIQTLSKYKKRLKGIAVESTYNWYWLVDALMADGFHVELVNTARVVQYSGLKRTNDRYDAFHLAHLMRLDILPTGYIYPKRDRGLRDLLRKRIQLVQDRSSHIVRFKLQVQMHTGKTIRADFIKAKKFQLPVIGDTNVQLALQSHLTIIRALHSQIKELEQVILEQVNTKAKFGYLKTAPGIGDILAESILLETGDISRFKGPGNYASYCRCVDSRRESNGKKKGENNRKNGNKYLAWAFIEAANFAIQHNDKARQFYQKKSKTTNPIVARKALAHKLARACYWIMKKQQAFNEDLIFH

SEQ ID NO: 352653 - protein, 415 aa, unidentified
MALKIVYKICCGIDVHKTFVVACIASTDKQGVTSYERHRFSTFTKGLKNLLHWLLDRNCKDVCMESTGKYWIPIYNILEKDCSIVLAHPKYVKAIRGKKTDKKDAKWIADLFKHDLVAGSFMPPADIRQLRDLMRYRFKLTCFKSSEKHRLQNCLTVSNIQLGNVVSDTFGKSAQAILDKILENSEDTSFDLEPLVFKSLKKKLPELRDAIDGYITPEQAGKLKIIKAHYESLESRKAELEELILALAAPYQQELSILQTAPGIRSEFTAIGIISEIGTNMEAFPSAKHLCSWAGLTPANNESAGKKKSVRVSKAGCYIKPLLVQCANAVVKSSKHPEIRNRYLRIKKRRGHKKAIIAIARMLLTALYHMLRNGENYNAELYRKSDLPPDDREITVEQAILIARNQGYKIKSATA

SEQ ID NO: 352654 - protein, 403 aa, unidentified
MAAVMIGVDPHKGSHTAVVISPAEEPLGELRVRASAGQAGKLIGWAAAWPERTWAVEGAAGLGRLLAQQLVAAGERVLDVQPKLASRVRLLQAGDTNKNDPSDALSVAVAALRSTVCREVIADDYRVVLKVRAERHRDLARTRNQVACRLHSVLCDLVPGGHQKEISAAHAARILAQATPSGAVALARAELAAEFLADLRHLDGQLRDTRKKLAAAVRASGTTLTQVFGVGPVIAGTVIGDVGDVARFPGRDHFASYNGTAPVEVSSGNRKIHRLSLRGNRRINHAIHMAAITQLRHKHSEGRAYYDKKVAEGKTHKEALRSLKRKVSDAIFARLQADARQARESGPGGQPGNGSDSSAASSHPERQLFGPATPGPDTTIRPGTTAGTPSPSKPALKKTRPAT

SEQ ID NO: 352655 - protein, 361 aa, unidentified
MAKVRSWVGLDVHARSVLAVSIDGESGELRTRKLSGATSEVVEFCCSLPGPTRAACEAGPTGYGLARAMHSAGVGCVVAAPGKIERPAADKVKTDQRDAERVLRLLMIDALHPVRVPTGQEEALRDVVRAREAVRGDLMRARQRLGKLLLRHDVRYEDTASAWTVAHRGWLTSLDLGERGAQFTLHEYLGAIDAIVIRRDALEKTIAELIPGSPWELTVARLRCLRGVDTLTAVGLCSEIGDFARFARAEQLMSYVGLVPSEFTTGQQRRLGSITKTGSEHARRLLVEAAWHYRKRPAVGTALTDRQQDQPPEVIAVAWSAQRRLHRTWTRLEQRAKRRTIIAVAAARELAGFAWAICQIE

SEQ ID NO: 352656 - protein, 344 aa, unidentified
MKKITTIVIDLAKQVFQVAVYNKHGVLKSNKAMNVKSMMRIVHQHPEAQIITEACGSAHHFARRFIQLGHDAYLIPPHICAKYRTGNKNDKNDTIAIYEAAKNQRTYFVSVRNLIQQDIALLHKLRKGHVDQRTKVANRIRGFAMEYGVSFPLGINKLRQQLPDALENADNELTDIARSSLRALLDMLLQFDVLEAKVKLQIEQLGKQLKPCKALVKIPGIGWLGATMIYARFGSGEAFKRGRDASASIGIVPSHSGSGGKNRLGSISKRGDTYLRWLIIHGARSVVNNIRDKQDGMSCWIRKQLITKHSNITTVAVANKLIRMAVAILKSGEAYRTPVAQRVS

SEQ ID NO: 352657 - protein, 414 aa, unidentified
MERLYTCCAGLDVHKQTVVACLLHPDDAPERKEIRTFGTTTGALEELRDWLSAAGCTHVAMEATGVYWQPIYHVLEGHYELLVVNAAHMHAVPGRKTDVRDAEWIADLLQHGLLRASFIPSREQRELRDLTRTRTSLIDERSAAVNRIQKVLEDANIKLAGVATDIMGKSGRDILAALVGGESDAAAMADLARGKLRRKHEALEQALRGRMSDHHRMLIALHLEHVDLLDEQIDRLSADIAARLRPYEATLLRLETIPGVGRRTAEILAAEMGLDMTRFPSAGHLASWAGMCPGVHESAGKRKSGKRREGNKALRRALTEAAHAAARTKKPGRTYLRGQYRRLVIRGGKKKAAVAVGHTILRIAHYLLSHDTTYQEQELVYLDERRRARTQQRALDQLKALGYDVTLTPKAPAA

SEQ ID NO: 352658 - protein, 424 aa, unidentified
MNSRVKIACGLDVHRSKIVGSIVTSAGTNETRTFTTNIDDTLALKDWILTHECERVAMEATGIYWYPIYNLLEGHVTVQVANPLFIKGIPGRKTDQLDAEWIATLCLNGLVKPSFVPGLQVRNRRDLVRTLNRLIQIRTRHKNRIHKVMVRAGIRIAAHLSDLFGPSGLRILHGLLEGESIDTILKNLKNAKIAKKREQLAKSICGTLDENDVYLIRLELDAIGSVNRLIDDLRQRITHLMIPENEDLNTLMSIPGIGYDSAVNILAEIGDVRQFPSGKHLVSWAGLAPGMNESAGKQGPAHITKRGSKFLRTFLIEPAHSIAGMKRNNQLKRFFSRMRGKLGYKPAIIALARKLLMLVHHLLVNREPYFEENLPKKKPVKITSSSLVSMTPDQILKILSDAIAELSTDDRVEFVRKLNRIGNS

SEQ ID NO: 352659 - protein, 411 aa, unidentified
MEALYRWVAGIDVHKKMLAVVVRAPQGEYVQRKFGTTKTEIGHLAAWLQDHQVSEVVMESTAQYWRPVWYGLEAHFKLHLTHPLKTRAPRGRKADFRDARRLADRWHSGDLEDSFIPGAEQRSWRWLTRSRVHLKRMLGVIRNQVEGLLEQGGIKLSAVASDIFGVSGWAILERIAAGESDVDKLVDQARGVLKRKKSKLREALQGKLDPIYRLLLQQHLAQAQLLCQQVEELNQALAEALKEHVAVLCRLTKVPGINLYAAQELLAEIGPGAVAFPSPEQFASWVGVCPGSQETAGVNYSRRSAKGNRYLRRLLCQNAWGAIHTKNTFFAGLFARLKPKIKGKGAAWAVAHRIAKLVWLILHEGVEYVEKGTAPLNPRTLVRKFRRLLREFDRHGIDAKSLLEQELVATS

SEQ ID NO: 352660 - protein, 406 aa, unidentified
MEVMYERCCGLDVHKKNVTACVITPEGKEIRTFGTMTDDLLKMADWLKEKGCSHVAMESTGVFWKPVYNLLEMVGIETLVVNAQHIKTVPGRKTDVKDAEWIADLLQHGLLKGSYIPGREQRELRELVTYRRSLIEERAREGNRIQKVLEGANIKLASVAADILGTSARSMIEAIIADIDDPRVLSGLAKGRMKSKREELESALKGLIGPHQKMLLSDQLEHVDFLDRKIAELDAEIERRTRPFEESLEFLDRIPGVGRRTSEEIVAVIGTDMSRFPSDGHLSSWAGVSPGNNESAGKRKPAKSLKGNLLLKRALVSAAHAAARTKDTYLSAQYHRIAARRGAGRAAVAVAHTILVIVYYILKRHEPYKELGADYLEKRKEDTTLRRALATLETLGYRVQIEKVAD

SEQ ID NO: 352661 - protein, 405 aa, unidentified
MEVIIERVCGMDVHKDNITACIMTPEGKEIQTFSTKTVFLIQLMDWIKSHGCTHVAMESTGVFWKPIVNLIEAEEMEFLVVNAQHMKAVPGRKTDVKDAEWIAQLLRHGLLKASFIPDRNQRELRELVRYRRSIIEERARQHNRIQKVLEGANIKLGSVVSDIMGVSSKDMLHAIAHGEDDPEKLANFARRSMKKKKDDLILALNGYVNPHQRMMLKTILTHIDFLTEQIEKLDQEVAQRVSVYQESIERLDSIPGIATRMAEQILAEIGTDVEKQFESAARLCSWAALVPGHNESAGKRKSTRGKKGNKYLKSALTEAAHSVGASKNYLGALYRRTAARKGRKRAGIVVAHAMLRISYYLLTRKEMYVDLGEDYFDKQKQASIVRNSVRRLENLGYTVNISEAS

SEQ ID NO: 352662 - protein, 342 aa, unidentified
MNITTLGIDLAKNTFSIVGMNQHGKVVCRKTLSRNKLLPFISQCPPCLIGMEACSGAHFWARSFEDIGHRVGIIAAKFVAPYRKGGKNDNNDAEAICEAVMRPNIWFVPVKSPNQQAVLCIHRARQGLVKDRTALLNQLRGLLAEFGIVIPKGRYPAQATIPEVLENMNNGLPMLARSIITDLWGRIQVSNKQILSYDRDLAKLVREDPVAKRLMTIPGVGEQVATGVVASVPDPRLFKNSRQFCAWLGLVPRQYSTGGKTRLGRITKHGDKYLRMCLVHGARAVVATLKEKQDHVSCWIRNLVERRGYLRAVVALAARNARLIWTLMIKEENYKAMPIMAA

SEQ ID NO: 352663 - protein, 397 aa, unidentified
MIAVGIDVSKSKSTVAILNGDGTIRAKPFDVHHVAGELHALVDYIKRTSEPPTILMEPTSHYHYPLLKAFQEADLPVCLINPYQMKKYGDTALRKAKTDKRDALRIAQYALEKSYSLVPYTPQDQKYEDLRFLSRQYSQRISTLTVAKVQLLSLLDETMPGITTILPLKSRDPDNCVLLRFIKRFKSFDVIRKMSKTRFLDSYQVLVKKTKDRFAGAKGLAIYELVLNSVTTRGENPLSAMTQDQCVDLVSTSQKAADEINLQMRIIAETMPEYKILRSMAGVGDRLGPIILGEIGDIRRFHSGKALNAYAGNDAPPYQSGQFESRNRHISKRGNPALRKACFEVMQALKLTKPQDDPVYLFLLKKEQEGKPYNVAKMAAVNKFLRIYYARAMELYK

SEQ ID NO: 352664 - protein, 326 aa, unidentified
MMIIGIDYHPSFQEIAFMDQQTGECGERQLNHSDGEAEKFYRELKQRGVSVRVGMEATGHARWFERLLAELGFELWIGDPAEIKTKRVRKKKTDREDARLMLKLLLENRFPRIWVPSPENRDLRQLLWHRHRLVQMRTRIMNQLQAVAMNEGYRWKKKLFSEKGRGLLEKLPLAPWASRRRKELLELLDQLDPKIAELTAAVEQEAEKRPEVLRLMTHPGVGPITGLVYVLVIGTPDRFPCGKQLGSYTGLIPCEDSSAGRQRLGHISKQGNKLLRYLLGEAAQAAARCNPDWRLSVCAPDDAPAKKNCQSGHGQKTRCSVVLDVA

SEQ ID NO: 352665 - protein, 526 aa, unidentified
MTTSTRQPSAPRLRGLGHLGKPHGVLSPRVQAVGPEHFGVVSVDCAKASSKWMLTDFYARLLIPPTVLDHRRDAFDHAIAQIRQAMVDHQLHDLVVAVERTGRYHLPVKRAFTAAGFEVRVVHPMISRHFRCAAHADEKTDDTDLEGIFQAACNGYGLVDPLWEPVYSQLQLWARHRRDLVQKSTLLSCQVLEHLESCLPGYSKCFDNVLNSRIALLVPGTYGTPQAIVEAGLAGLADLASRQGVRFHEATLIRILAWAHDAPQPDREAALHQRLLGELNRDRIAKEEDIEAIERELVTLLVQTPYVRLLALPGVNVVLASELAGELGPMAHYATGRVITGRAGLFPRRHQSGPVDYRRGRLARQGNRRLRQVLLLAAETLCRCNNHFRVLQERWLVQGKDPRDVYVRVAGRLARITFQMVAGSEAFRHPACQGPPEVLSKLMEFHNEHNINLTVTRTNLRHAAAQLPGAEQAREREAWQAKRAEIRGKRGRGPKRLAAILPAVLKQLVGGERADVLESSESGESS

SEQ ID NO: 352666 - protein, 320 aa, unidentified
MAAATEVFVGIDVAGDELVVAIRSGEGVTRWTNDEAGQEGLVRHLRDHRPTLVVLEATGGVEQGIAAALATAGLPTVIANPKQVRDFARGVGKLAKTDPIDAAILARFGEVVRPAPRPSTGEAGRALRALVVRRRQVRDRRVADRQRRLRADPVVRPFLDRAIAAATDELAELDAAIAARLATEPSWQAKRQVLESVPGIGPIIAATLVAELPELGTLGAKQVAALAGSAPRTRESGKMRGAATIGGGRRGVRCALYLAAVTGIRWNPTIRTFYAQLLAAGKPKKLALVAAARKLLGILTAMLRDGTLWDPPTREPAPTP

SEQ ID NO: 352667 - protein, 462 aa, unidentified
MELLHRRCCGLDVHKETVVACLRLVSDGKVTTEVRTFQTTTADLLRLSEWLAANECTHVAMEATGVYWKPVWHILDDGEFALVLANAAHVKNVPGRKTDVNDAMWLAELLAHGLIRASFVPDAQTQEMRNLLRTRKQLVREQSSHVLRVQKTLEDANIKLDSVLTDLMGKSGRAIIEALIAGETNPVKLAGLADRRVKASPEEFREALRGRVTKHHRFLLRLHLNQIDALDAAMATLDAQVEANLGPFRTAVELIGSIPGIKNLGAHVIVSEIGIDMSRFPSAAHLISWACICPRNDESAGKRRSNRVRKGGTWLKTTLVQCAWAAVKKKDSYLQAQFYRIKARRGPKKAIMAVVASILTAIYHMLKDGTMYKDLGRNHFDRRVAFWLSPKRTRIMVPRIRQWLPDRRIGVTFEYQCAGLQSPITGFTDGRIGQIFLNNHKSTSAAIRNACDSAIICSIAFQ

SEQ ID NO: 352668 - protein, 423 aa, unidentified
MMKLKYSICCGLDVHKNVIVATIVTTNKDGISEYLQKSFSTINSDIQRFHNWLIENNCYHVCMESTGKYWIPIFNYLENDIDVCLTHPKYVKAIKGKKTDKKDSKWIADLYKFDLVRCSFIPPKDFRQLRELSRYRFKLVCMKSSEKNRIQNCMTISNVGIASVLSDPFGKTATEIISYLLEHTADSMDEKAVRKLIKKGAKSKSDEIIEAIKGYTIETDQAKKLELARGHLEYLDDMITQTEVELYVRIKPYYEFVEFVSTMPGMTELSSTIVLAETGVDMDIFDDAKHLCSWCGLSPANNESAGKKKSVRIAKAGDYLKPMMVQCALASIKSKKQPYFAIKYGRIKKRRGHKKAIIAIARMMMVCIYHMVSEKKPFTPTDYEELMDPQNHVESVVLNENNVFAYLESLGYDSSKLVKRNDN

SEQ ID NO: 352669 - protein, 373 aa, unidentified
MAGDSQKLNEGELALYSMHLSSGYIPVGVDLAARVFQVCYLNEKQKIKNKALSREAFLDFLKSPPFSQPLMVGFEACGGCNYWARFIEELGHKYKIMPPSAIKSFLGKNKTDKIDAFGIFKGTICPSVRCIRARSEENQTLMNLLATREQLIKQQTQSLNAQRAMLYELGEICGEGAAKIDAATDKLKESLEKSQSEAISNFRMIAEPFKANRDSLEAQIKQIDLYLKQYAKNNRTVQNLMTIPGIGVLSAVTLHAVLGDPDDFPNSRHFASFAGFAPTVKGSGGEIQVDKIPHTGNRQLKKILYMCAIARFAQQSRKASTETEASKLTQLIDNPKISNKKIVCSIANRLARVAWSIAKSGEPFDAKKCRLLG

SEQ ID NO: 352670 - protein, 351 aa, unidentified
MIIGCDFHPRFQQIAYVDRETGEYGEQRLLHTAEAEMFYRSLAGRRVRVGVEATGNFRWFRRLLSELGFELVLGDAAAIRAAQPRKQKTDKRDARHILLLLWEDRFPAVWQPTADNERLRQLLLHRSSLVRMRTRVENQLDSVAKNEGLVGSRRWTAKRRREVEQLPLEGWHAARRRDLLALLDGLQERIRPLELAVRGAAEEDAQARLLMTHPGVGPVVSLAYVLTIGDWQRFPRGKQVASYLGLIPGESSSADKRRLGHISKQGNPMLRWLLVQAAAIAQRYDARWHRQYVRLSMEKHHGVAKLAIAHKLAVRLYWMLRSGQAYRQIVERGSHAGQSACPDGCGVTPRT

SEQ ID NO: 352671 - protein, 343 aa, unidentified
MRLQSYIAMDLHHSHTAIEAQTAGGRVRLRRDGPTEAGFLRAAVKAVRGPKGVVIEEGPMADWAMRLIQPYASEVIICDPRRNRLIAEDGDKSDEIDPGKLIELYRLGALRPVHHPGRVTMMDLRQWVWAYHDQVWLVTAAKNKVKAVLRMAGVSYAHKDVYAPELRGEWLGKLGRPSARAHLRVRYGNLDDLTRRREEVHTRLARLAQRHPVTRRIMGVPGYGPIRALTFMVIVDTPYRFSRVQKLWRYGGLGLEKKQSGDPHRGRLRPGIRYNRRLKAVAKGAAKRALANQDENPFEVVYRRLLKKGVKEPLARLTVSRKMLSVPWGMWKSGKAYDPALVT

SEQ ID NO: 352672 - protein, 351 aa, unidentified
MDYRIGCDAHKHYSQFAVLDEEGRLFHQARVDHQPGAIRTFLEAHPNGTPVALESVGNWYWIADEIEAAGCLPLLTHAAKAKLMMGHVDKTDKLDARGLATLLHNGTLPTVWLPPGAVRDQRELPRTRMALVRIRTALKNRVHSTLAKYALAPEGEIDVFSQKGRTWLQADLGRLPAETALCLTQELELLDQVQAQIVTLEGRIRQAIEDTPAMQLLKTLPGVGNILAVVVEREVGSIERFPSAGHFASYAGATPSVHSSGGKTHYGRMRHQANQYLKWAFIEAANVVARHRTSPGWRSKHVVRLYERIRSRKGHAIAVGAVARHLAEATYSILKKGEAYRELPSSGRARA

SEQ ID NO: 352673 - protein, 350 aa, unidentified
MQVAIFGLDIAKHVFQLHGIDTNGKVVLRRRLRRQEVVPFFANLTPCVVGLEACGGAHYWARRLKATGHTVRLIAPQFVKPFVKSNKNDANDAEAICEAVGRPNMRFVSAKSVEQQDIQSLHRVRSRLVGCRTQLVNQVRGLLMEYGIVMPQHIGQVRRGVPEVLENENNELTCLSRRLLAALYDELVDLDNRVEQIEKELRIVYEASEPCQRIAAVEGIGLLTATAIVAAMSDGKVFQNGRQFAAWLGLVPKQHSSGGKPRLLGISKRGDPYLRTLLIHGARSVVYRACRKKDVRSVWIADKQRRLGTTRACVAVANKNARIVWSLIAREEHYRVPCELAQHGLAIRAS

SEQ ID NO: 352674 - protein, 419 aa, unidentified
MDSENIDYAALIGLDWGSQKHAICLKPADSEAVEHYTLEQKPEALHAWFMNLVARFGGGKLAIAIEQTRGAVIHFLLGLACVHIFTIHPKSLKNYRDAIHPSGAKDDPTDAELLLQFLTLHQDRLKPWIPDEPDVRLLLRLVEFRRKMVGKRVRLTNELTQLLKEYFPAALDYAGDLDKVMACDFLLRWPTLEKLQKSQSETIRRFYREHNARHSNVIEDRLKQIRSALPLTTDDPVIEPSVFLVQSIAPQLHSVINAIAQFDQRIKEVFEKHPDAPIFSSFPGAGPALAPRLLAAMGSDRNRFSSSLQVAEYSGIAPVTERSGKARWVHRRFACSQFVKQSFHEFAGQSIRYCDWARGYYQRKKGEGKGHHAAIRALAYRWIRILYRCWKERIPYDEDKYVKSLRQRKPAWLESLPPQ

SEQ ID NO: 352675 - protein, 394 aa, unidentified
MRFVGIDIAAETHVVAVVDESSALVVKPTPFGEDAAGYATLRALLGAPEDVLVAMEAPGHYWQNLFAVLVAEGFAVALLNPMRTRRFAGEDLARAKTDAIDAVGIARFAAQKRPAVTRLPEAATQELRELVRLRDRLRQEFGDRTRQLHRLVDLGFPEFTRVIPDLKGRLATALLAASPTAAAFRGVSVLRRAALRADGTHRVGAALARALLEAARESVGQHHGPAYQLQVRYLCEDLELLRRRIDALEEDVATTLQTHEVGMLLTTITGIGVQTAARLVGELGDPARFRSAAALAAYVGVVPGTRESGKRRLTHARLAPTGHARLRAALWMPTLVAVRTNPWLRAYYARLRARGTLPKVALIAALHTLLLAIYRVAKHRRPFVPHLTVQGVQA

SEQ ID NO: 352676 - protein, 274 aa, unidentified
MFIDELKNIIIDAILIEHNKNEFDNLFNSIKNYSNLIVVMESTSIYHLPVENYFRSKGIDTVVMNPKLVKQFKDTLNKSKTDKLDCFKIARCYLGTIDNFYYKNDEYFMYNPLARQYWSLFERQTRLKNRYKQLIEIVFPEFNLVFNDLYDDLALNFIHDFPHPILFVNTRFDDKYQFVSFLGIDSVTSQSGISAYHGAISKTGCKFGRTILFNVVTIILQISAHANTSNSIYLFFRKKQSEGKHHYKCIIACETKLYKIIYKLCSSNCLYENK

SEQ ID NO: 352677 - protein, 374 aa, unidentified
MTSTMAAPFCRWGGCQPSPTASQCAKFVVLAPRKGEAGIHGKGYHHWSYLAKLRGAAADGSVVFRKKLSRLQFCKFMASQPACVVAMEACGSSHYWARQMARLGHEPRLIAPAYVKPFVKRQKNDVADAEAIVEAAQRPTMRFVEPKTKEQQSRAIVFRTREQFVNQRTELVNALRAHLYEFGYVAPQGIGHLPRLAEIVEDESADLPDLVRDICSALLDQIEQLSSRLAALKKTIDTLSKQAATSRRANHARCWPYRCPCPFAPPMETFKCGRDFAAWLGLVPRQKSSGGKQRLGKVSKMGQRDIRRLLIIGAMAVVRWASRRRAPDGSWLARLMLKKPRMLVAIALANKMARGIWAMLTKQEDYRDPAKVPA

SEQ ID NO: 352678 - protein, 410 aa, unidentified
MKVLNRRCAGLDVHKVEVVACARVFLGRKVVHEVRRFGTTSRELLALADWLEGLKVSQVAMEATGVYWKPVWHMLEERFALILANAQQVRAVPGRKSDVNDATWIADLLAHGLIAASFVPPRPIRELRDLTRTRRQAVGEVVRHQHRIDKILQDANIKLSSVLSDPMGPSGRRMLKAIIAGESDASKIAELGSSRLECPRGALIEALCGRVSEHHCYLLGWHLRQIEQIEGDIADLDQRIEAQIAPFRAAVERLMSVPGIKETAAPAIIAEIGPDMSVFPSAGHLLSWARIVPRLDESAGKKRSRRVKQGGAWLKPVLVQCARAAVRKRGSYYGAQYRRLKARVGDKKAIIAVAASILTAIYHILRDGTSHHDLGAAYLARREGDKAAIAQRLARHIRALGYQVDLRAAA

SEQ ID NO: 352679 - protein, 387 aa, unidentified
MPQPNDLSRSLVALDQNSTIIAVIEMSQSSWLVAGMLPGIERQPRKKLEPSPERLLALLQRWRDEPVRAGSTITRIALAFEAGRDGFWLARWLEARGVEAHVIHASSIAVSREHRRAKTDRLDTALLQRGFLGWLRGERGHCSMARVPTIAEEDAKRPNRERDCLVGERTRIVNRIKSTLARLGIRNFKPTLRKAAERLATVHTPEGTPLPPNTLAELQRDMARLGVVVSQIRQIEEARQKRLEQQHETGPHAMVRLLARIVGVGVETADMLVHEVLSRPMRDRRAVARYAGLTGSPDESGAQRREQGLARAGNARVRRGMIQLAWRFLMFQKESALALWYRARTTDSRRGTRKTMIVALARKLIIALWRFVTTGEPLEGVILRPAS

SEQ ID NO: 352680 - protein, 417 aa, unidentified
MKKHSNSAKESELRAKRVKSRGPVRLETRDVMAEIVGKLSKKMDAKALSASVGEEHRRSAVCPNLDRLTVGMDLGDQWSHYCILGLGGETLAEGQMRTRPQEMAEFYGGLAESRVVIEVGTHSAWVREAIAECGHEVLVANPRLMEGSKRRKRKNDRIDANKLARLGRVDPQSLHPIEHRSKEVRQDLLVLRARDALVAARTELINTTRGLVKSMGARLPKCSSPSFAAKVEEAVPSEVRKALLPLVRLAAAPSNDIQAYDQQIEKLASKKYGRTKLLRQVKGVGAITALAYVLTLEHPQRFAKSRDVGPYLGLVPKQEDSGESQPQLGISKAGDTMLRKLLVGSAHYILGPFGPDTDLRQYGLRLCERGGKNAKKRAAVAVARKLAVLLHRLWVSGEVYEPLGHTVSTTRAQAAAA

SEQ ID NO: 352681 - protein, 391 aa, unidentified
MKVVFPTCCGVDVHKTFVVATIITTPADSLQPHYQKKRFSTFNSDLNRFADWLLEHNCLDVCMESTGKYWVPAFNILEKRSIRVVIANPKWVKAVKGNKDDTKDSKWIGDLFRIGLVKSSFIPELNIRILREFLRYRYKLVSMKSSEKNRFQNAFTVCNVALDSVVSDMFGKSATAITDYLTSDESFDPDHCVSLLQRSLKKKAEKVLESIEGYSISDEQKARIKIIREHYDFVEKLIAKVDTCVNEMVEKYEGEINLLCTIPGIDRNSAITIISEIGADMSQFGSSKRLCCWAGLTPGNNESAGKKKSVRISRAGVYLKPALVQVAHAAVKDKANPYYALKYERIAKRRGKKRAIIAIARMILTAIYTMLCTGEVWNPVDLFKIDMPEHF

SEQ ID NO: 352682 - protein, 366 aa, unidentified
MRQRTFPTTRPHLLALAREVGTSVPIVLEASTAGKAVATALKEAGSELHMAAPNKVALIAKAPVKTDERDSATLAHLYQAGFLPECYVPPPEIDRLRTLVRARQDLGFKATVVKNQVHALVTRNLLDEEMEGISDWFGVGGIRKLTHLPLSAEERGHLARALEQLSLLAEQEGTLQAELAKTATERPDVQLLMTIPGVDYYTAVAIIAEIGDIRRFANKKQLCSHAGVVPRADNSGEKVSQHRSVKKGDMVLKRFLCIAVQGMLRANRDTSIKRFYEKKAESIGAAKAQIAAARKLACAVWWMLTHNEPFKDEDEGLTARKEQRMEARAREASEEISEAELTEVGERLIAQAPLLERLAREAGNAG

SEQ ID NO: 352683 - protein, 406 aa, unidentified
MNAVGIDVSKGKSMICIMRPFGEVVASPFEVAHTVSELGKLADLLKSLNGETKVIMECTGSYHLPIAKTLHIAGFFVSAVNPLLVHGFGNNTIRKRRNDKADAIKISNYGLSNWLDLPKYTPEEEIRQSLKSFSRQYNKYNKVKTMLTNNLTSLLDQTFPGLRELFTSPARESDGHEKWLDFAARFWHCECVSGMSPKAFTEAYRKWCKRSGYHCVSAIEIHAASRQCTAVIPKSEATKSLITLAVAQINAVAESLATVARKMKQLAELLPEYPVVLAFFGVGEILGPQLIAEIGDVRRYLKKSSLVCFAGLEPTDNQSGKFQGDEDISKKGSPHLRKVLFQVMKCILQNSPANDPIYQLLDRKRAENKHYYSYMCAGAAKFLRIYYARVKEYLDEHYPEQEPSDL

SEQ ID NO: 352684 - protein, 406 aa, unidentified
MEIEAINRRVIGLDIHQAQITACALVEDERGGLRKEHRQFGAFKRDRRALADWCAAIDPAEIVMESTGIYWKSPYAALEKVGIRAKVVNARHVKNVPGRKTDIGDAEWLAMLSRAGLLRGSFVPEADHRELRLVSRQRQKLVGILASEKNRLHKVLTDSGIRLGVVVSDLHGQSARAMVKAFIEGKPPEEVIQLASRRLKASRDEMMDALHGELTPPHRFVLDELMQHIEDIEERIRRFDQKLLEGLSGAGDALMVLQTIPGVDLIGAAMLLVEIGTDMSVWENEERLSSWVGICPENNESAGKRKSGRMRKGNPYVRRLLCEFAHAASRTESTFKAKFQGLLVRRGRKRAIVAIAHKLLRTIFFMLKRGQHYRDTTVNYEEMSVKRNAARWIKKLTEFGFLPKPA

SEQ ID NO: 352685 - protein, 428 aa, unidentified
MNYNTQNAKIASITEKTLIVGIDVGSETHYARAFDWRNYEYTKKPLEFSNTEAGFLTFKAWMEDLAEKHEKNVVIPGMEPTGHYWFTLGKFLQDNGMKPVHVNPHHVKKSKELDDNSPSKNDRKDPKTIAALVNEGRFSYPYIPTGIYAEIRSLSNLRFQTQEELTRIKNRIARWFSIYFPEYKDVYGDVKAVSGRKVLQIAPLPEDIKKLGAEGVNQIWRDAKLRGAGMKRAKTLVSAAEHSVGSKETPEAARIEPRHLLNDLDVYATRLDELLHRIEAILGEIPYVDRLMEIKGIGLITVSGFLAEVGDIKRFDNPKQLQKLAGYAIVADQSGKHNGESRISYRGRKRLRYVLYEAAISVVGKNTEFREIHEYYRTRKKNPLKKMQSVVAVACKIIRIFYAILTKGIVYNAEKVRSDIKRPEIQAA

SEQ ID NO: 352686 - protein, 379 aa, unidentified
MKVITLYIGLDVHKDSITIAIAVGGPKGELRLFGTLTNDLHALEQALKRIRKAHPGALLEVAYEAGPCGFGIARRLKQLKVPCLVAAPSLIPKQPGSPFKTDQRDARAIARLLRAGELIGVYVPEPTDEAIRDLCRARTDAIDDLRRSRFRRKAFLLRHGYRYQGKANWSQPHMRYLRELVLSHPAMKTILEEYLQGIDAAHNRVQRIEASMLTLLETWRLKSAVQALMAFRGFQLVAAMITVSELGDIHRFAHPRQLMTYLGLVPTEHSSGPHQRLGGISRCGNGHQRWLLTECAEHYLLPPKVSKELSARQEGQPQAVRDLSWKAQNRLHRRFTRLLARRLQRNKAKVAIARELCGFIWALLRTQPCYTQPAANAAS

SEQ ID NO: 352687 - protein, 328 aa, unidentified
MTMNPALSAFNHVVAFEVAKDSLVIHVLPGDQQSVVANKPKAIRKALKAEMRRNAEASLGPLLVVCEATGGYERHVLEVCQELGIAAHKAHGSRVRCFARYLGLIAKTDSIDARVLALYGLKTPDLRLYTPPAPELLALRDLKTRRDQLQAMLFAETNRLEHARHASVSRSLKAHIESLRKELAALEAEIAAQIQASEALAQKARLMRTLKGVGPATVSSILAYLPELGSFTRGEAACIAGLAPINNDSGACQGPRHIQAGRAAVRKTLYMTALVAIQHNPTMRLFAEKLRRKGKPSKVVIAAVMRKIIVTLNAILRSGEPWKHAKAA

SEQ ID NO: 352688 - protein, 334 aa, unidentified
MTLNNFIGIDVSKDTFDVALIKDNNQTIIAEDNFANSSAGLVKLQEFLKKQGLNMEETLFCMEHTGIYCRLLSQYLTENKYHVWLEMPVQIIRSMGVQRGKNDKLDARRIAEYACLKKDKAVLWQPPREVLIQINDLLTLRDRLIESRKSLKQPIKELMSAGFKDAAKLIESRCKITLHAIDKEIKQIEKELQDKINKDTNLKRLFGLATSVPGVGKITAMFMLYFTNEFRLINNARKLACYCGVAPFEHKSGTSIKGKTRVSHFANKKLKKLLHLVALSTLASDPELSEYYHRKIAEGKHKMIVINALRNKILHRLCAVIHRGTPYLLEYQLA

SEQ ID NO: 352689 - protein, 391 aa, unidentified
MVCVGIDVAKDKHDCCILDSDGTIRADCFTIPNNMDGFRQLLRTIQDCTKKSDKIKVGLEATGHYSYNILGFLLDNGLPTYVINPLHTNLYRKSLSLRKTKTDRVDARTIATMLLSDVDLKSYTDTAYHNEELKSLTRYRFDKVRERAKLKQSVSRLVTILFPELEKLVPSLHIASVYSLLSEYPGAKQVSEVHLTKLTNLLATASKGHYGKDKAIQIRNAAKTSIGSVMPAKSLELKHTTKLIQELSAEINEIEDSIQQIMDELNPPILSIPGMGIHSAAMILAEIGDFSNFSSPDKILAYAGCSPSTYQSGKLTNCYAHMEKRGSRYLRYALYNATKSICHCNPVFAEYLAKKRAEGKHYNVALSHATKKLVRLIYALQKSGKAYLTAA

SEQ ID NO: 352690 - protein, 418 aa, unidentified
MKKSETFKLKSISSDTLLATVDMGMDSFTGYARCPDRSEIKTSDYANNHGGFQAYWEILVRTMEIKGLKQIVLGFESTGPYARPLMHFFEGKRVRLVQVNPFHTKKLKELTGNSPNKTDQKDPKVIADIIELGHSLSVVIPKGAAAELRQLSEARERANKRLTALFNQLHSLVFFSFPGFLQVIKDIKTKSALHLLKHYGNPQDLLALGPDSLIQVIKQTSRGRFGPEKARALFEAATIWLSSGEGCDSVDLEIKEMVRAIENERSFVAQLESRMPQYLKQIPYSSLLLSMKGVGLITVAGIIGEVSDFTHFKTQKEILKLAGIDLYEISSGKHKGQRRISKRGRPLLRKLLFFAAMNTIRKGGTMHQTYQKHLTKGMPRIKALIAIARKLLCIMLALVRTQSVFSVNRKTGFTAAAV

SEQ ID NO: 352691 - protein, 462 aa, unidentified
MCINKEETSMNVSPPVFNETRRHVAGVDVAGAADHYVCGPRNDDATHDTTHFGTTTSELHKLLAWLKERKVESVAMESTSVYWIPIADLLEANGIEVVLVDTREVRMVPGRKSDVKDCQWLQRLHSCGLLRGGFRPPEKITAIRTVIREKDTLVGARTQFIQQMQKSCDQMNIRIHHAVSDIDGATGMAIVAAIIGGERDAKVLAKLRDKRCKKTEGQIAEELRGTWREEHLFNLERAYRMLVFVDEQIALYDSKIATMYKALAESMDRQPLAPSTDSNQKPGGKTSRDVAEKLVLESITGFNMTQIAGVGYETAAKFISEVGVDLTRFPTERHFFSYLGLAPWLGKSAGKNVRQKKRFKNTSRGGRVLRMAAATLYRSNSELGAYFRSVARRNDRKTAIKATARRMAQIIYRALRHGVAYVEKGAEHFERRMREKTLRTVRNLIKVHGINELELASALKAS

SEQ ID NO: 352692 - protein, 421 aa, unidentified
MKNVTDSGQKVKGQKRMELERATWILGIDVGKESLSCALLLKDETFHCRFDVEASLSGFQMMLEKVKTETKGDGAVVFALEPTGHYWMVLGQFFEDHNQSYVLVHPLVVARSREVKQLNRGKTDALDARLIAELACRGAVTRTQIPENDWATIRFYAREYMDREKEIAREKNRMMSYLETTLPGFLEIFPRPLGMNSRACLRVLTNFREVLQGDIVQFESQVRKHITGKRLLTSRVKRLFEMLQRGDALGLRAGRKTLFWRIINGLDRLELYEKQQDMASNALISLYEQCEFKPYLDSVWGTSPLTNCLVLGFMGDPTSYDSPASLIKMAGCDPVPNESGKFKGKAAISHRGRNLLRKAGDRISFLLEKRNTVFQNFMHHLTVRPKNKLTKRQARIACINKYFRIIWVLCNHRVLFNPALA

SEQ ID NO: 352693 - protein, 338 aa, unidentified
MHTTTLGIDLAKNVFQLHGVDARGCTVLSRRVKRGQLLQVVASLPPCVIGMEAGGSAHHWGRAFEQLGHTVKLMHPKYVKPYVKTNKNDGRDAEAICEAVSRPTMRCVSIKTVEQADLQAVHRTRSLFVKHRTAVINQIRGLLAEYGLVIALSPGKVRPALVRFLDDAASGLTAFARDTFSELYAQLTELDARIERVTHRVERVSRAHPVCQKLAAVPGIGPLTATALVATVGQPQVFHNGRHLAAWLGLVPRQYSSGGKARLGGISKRGSRYVRTLLIHGARAVVQRAERRTDTQGRWLCALKNRKGTNVAAVALANKNARVIWALLAHDETYRQPA

SEQ ID NO: 352694 - protein, 352 aa, unidentified
MDASRTWPTIRALWNREDGTMEMLAVDLSKQSFHVHGVTGDGEVISRRVGRAKLLALVERLGPRTIAMEACATAHHWGRAFIAKGFGVRLVNPRFVKPFVRGSKNDAADAEAIFDAASRPTMRFVPVKTTDQQDLQSLHRVRDRLVAQRTSLINHARGLLAEYGLVYPKGAARFGARARAGLAEAGLSTMARDTFEALLDELDGLEARLAKLDQRLVAICRENEACRRLMSLPGVGPVVATALVAAVGDARQFRSGRELAAWIGLVPRQHSTGGKATLGGVGRRANHYLRRQLVHGARAVALRLATKTDGRSRWFQSVIDRRGFNKGIVAMANKMARAAWAMLTRKETFAPA

SEQ ID NO: 352695 - protein, 317 aa, unidentified
MDSRTAETFAGIDVSKASLEVAVSGGRRVLSFRNDKRGVRALTGYLRDEQPALIVLEASGGYQRLVVAALIAGELPVAVVNPRQVRDFARATGTLAKTDAIDARIICHFAAAVRPELRRLATADEQELSDLQARRQQLVEMITAEKNRLRTSGPRVARQIGRHVRWLEKQLKGVESELRDLVQSSPVWRAKDELLQSVPGIGPALSGALVANLPELGELNRHEIAALVGVAPLNRDSGVFRGKRRVWGGRQNVRTKLFIGALVASRYNPAIKSLYQRLCAAGKPKKVALVACMRKLLTILNSILRTRTPWNPKPAYA

SEQ ID NO: 352696 - protein, 446 aa, unidentified
MVDGTGLSRGDRNRNGRLGRLRALLPAQHAIVGIDLADVKQAAVVTDHDSRVLARRRVSARAWELGTLLDWAVERATAAGFASVTVACEPTGHRWRVLDQLAAERGLPLVCVQPLLVWRAREAEDLTWDKSDPKDAVVIARLAAQLRCYEPERADASWARLRQLGARRARLVTDATAGVQQLRDLLDCVWPAVLDAAGSPFRSASWQAALAVVLDRAGGDLSRVHRLGLARFTVAVRRELPRWGATRPCLRIVRAVFDALVDPAGVATQRPGALERAELVLGDWRDTRRRLAETETRMVAVLDELDLTGLVTSIDGLTAVGAAAILAETGDLVRFGSPRAVVKHAGLCPRDNASGSHQGKTSISGKGRPGLRLAAWRAVWAALPNNRVLAARFRYLTTREHNRLARQQARAACAAALLRWLHVVVTQRVAWDPAIAAGHKALEPAA

SEQ ID NO: 352697 - protein, 481 aa, unidentified
MNPLIKGGVPVSTTPTRGKRRREVSIVAKRKVPLPPQLKRVNLNAAGIDIGSEEHWAAVPPGRDSEGRDVRGFGAFTGDLCALADWLKQCEIETVAMESTGVYWIALYELLVERGFEVLLVDARQAKNVPGRKSDVLDCQWLQELHTYGLLRGAFRPVDQICILRSYLRQRSMLVTYASHHIQHMQKALEQMNLKLAHVVSDITGLTGMGIIRALLSGERDPVKLAKLRDPRCKSSEATVARALQGHYREEHLFALQQAVELVDFYQHQITACDRQIEACLQQFEEKSTEAPVAARSRKHRRGGITFDARSYLYRMTGVDLTQIDSIEANTALTVIGEVGLDMSRWPTEKHFGSWLGLAPGSKVSGGKRLSSRTKPSANRAAAALRLAAQSLNPSQSALGAYFRRLKAHIGAPKALTAAAYKLARILYRMLKYGAGYVDQGEVAYEERYRDRLLRNLKRRAAELGFQLTAIDSNAAQLVLT

SEQ ID NO: 352698 - protein, 371 aa, unidentified
MNNIVYVGMDVHKENYTLCCYCYDTDKVEYKTTIASNYKLILKYMERVRDRYDGDVKFVCGYEAGCLGYSLHNQLKEHGVECKILAPTTMAITNTNRVKTDRRDAANIARCLAFRTYSEVYVPDNEDVSIKEYIRMRDNQKLNLKKTKQQILAFVLRKGKRFEGGKTYWTIAHVKWLKSLELDAIDKETLTEYLITYEYLVEKIRRLDARIEEFAQGEKYCEKVKNMSCFIGIKTHTAMSMLVEVGDFERFESASKFSAFLGLVPSENSSGDSINRYSITKAGNSHLRRLLIEAAQSYTRGNIGHKSIALKRRQQGCMPEVIAYADKANERLRRRFYMLTLKNNVNRNIATTAVARELSCFLWGMNTGNIN

SEQ ID NO: 352699 - protein, 338 aa, unidentified
MKFKRIAIDTSKHVFTLHGVDEQERPVLRRELKRAQVESFFAKQEATEVVLEACGGSQHWGRLLSRLGHRVRLIPPQYVKPFVKRAKNDRNDAEAISEAASRPTMRSVVVKTVDQQADGIILKHREMLVSQRTQAINALRGHAAEFGMVAAKGIVKVAALLGVLAADDAIPASARAMFQQMGAHIEALDQQVEAMDDELAALHKANPVSQLLAAIPGVGPLGAITMVLTVEPGNFASGRHFAAWLGLTPKEHSTGGKQRMGKISKAGNERLRQLLFVGAMSVIRFAKPGSKSASAWLLQLLERKPRKLAAVALANKTARIVWAMMSRGEAYRRQPVAA

SEQ ID NO: 352700 - protein, 371 aa, unidentified
MNHVTSIGLDVHARSVTAVALDSITGEVRSQKFGYSPAEIAGWILQLDSPKAVYESGVTGFHLVRELREMGVDCIVGAVSKMHKPASDRRKKNDRNDAEFLARQLMAHNIVEVFVPDVETEGARNLSRALEDIRDDLTRAKHRLTHLLIRWGYVWNEFNEDGKRRGSWTHAHWEWIRGIELPDAAARESLDYYISEVRHIESQKKAIEKRVAQCASRPRWRDRVEALRCMKGIETVTAFALTVEAGVFSRFDSARAFASWLGLVPSEHSSGERASRGGITKAGNSHLRKLLVEASWHYTRATKERKRSLYDESVPAPISNHAAVGVKRLVERRRHLSCELRKRPVVANVATARELACWIWALGRMSEGALA

SEQ ID NO: 352701 - protein, 341 aa, unidentified
MTLVMGMDQHRAQISAEWIDTVTGEISTARIAPADRATVRRFLTRFDGGELEVALEATTGWRFVVEELQRVGADAHLAEPAETSGLKGNKRRAKTDWADARHLRELLLIGRLPESWIAPAHLLDLRARVRCRHTLVEQRTEWQQRMHALLYHHGVPHSRKLLTLANRERIAALKLPAAAREQLTIALEMIDAIELQVGPVDLALRAYARQHPGCRTLIKEIYGVGPLTSVAILAELGDTRRFANSRDAVRYAGLDITVYQSDTRRSPGHLSRQGPPALRWALYEAAQAARRPSSPERPYYDQLAARIGGNRACIAVARKLLKRSYHLLRNLGDQALKPVTV

SEQ ID NO: 352702 - protein, 386 aa, unidentified
MVNGQKVNDYAISNDMVGFNQLLGDLKQVTKPQIIFEATGVYSRRLQAFLDMHELRYVMMNPLEAKRKTKDDLHQNKTDKLDALYLAKLQSEHPQRLAYVQSEEYQELMANNRIYEQASHDLITNRNRLHKAIQLTFPEIEHLMVNPRGKNYWSIALRFPHPDIVLETKETDIIDFLKGLSGIGKKRANDITQSLIRLAKVACPAVKKNSAHIRGLKMAINNILSAEEECQTALQEMAKLAPKRDLEILTSIPGIGENTALRIISELGDIRRFNNPSQLNAFVGVDPQVYESGNLTAHLSISKRGTAIGRKVLYLAINQIQSAKKAGNPCHIADYYEKRKRSSETASHKKAAIASIHKLLRTIFALIKNDQLYSYDVAKHNQRLLS

SEQ ID NO: 352703 - protein, 483 aa, unidentified
MAKRKMSTFERLQKMNRKQRRELGRRLNSENSGLEVVHPNAAGIDIGNESHFVAIPPDRDTTPIREFGSWTADLHEMASWLKAHGIQTVAMQSTGVYWIAVQEVLEQAGLEVYLVNARGTKNLPGRKSDVQECEWLRKLHTYGLLRNSFRPPEEIRTVRTIWRQRDRWVKEAGRSVQHMQKALTTMNVQLANAISDITGTTGQAILRAIVAGQRDPWELAKLRDIRIAASQDEIANSLHGNWKEDVLFELRQVLEAYDFYQKQIADCDQELKRYTAAVPTREIAEKQDLPTDASPLPPKKIHRSKPKSTNNYKKKPGIDLAPELQRTMGVDLTLIDGIDVITAQVIFSEIGPDFSAFPNEDHFASWLTLSPKRDISGGKVIRHVHATGRQRVANALRMAAQSLSRSNSYLGARYRRLRARLDGPVAVKAMARYLACLIYRMVTKGQAYVDRGADHYEAKRKEKERVALQRRAALLGLKLVPAA

SEQ ID NO: 352704 - protein, 343 aa, unidentified
MEYGAIDLHTKESEIRIVTADGRVGLHRRLATTRESLGSVFAGRPRLRILLESGTESEWVAQHLESLGHEVIVADPNYAPMYGQRTRRIKTDRRDVIALADANRLGIYRRAHRVSAAQRAVRRQLQVRDQLVRMRTQVINLMRGQLRSEGLRMRNGGTERFVARYQALDVPATLRAVLEPLVQALTALEPLIAAADAWAQQTARVDVVTRRLMTAPGVGPITALSFQSTLDTVTRFRGPGAVSAYLGVVPHEDSSGDRQRRGRITKAGPPRMRGVLVQASWAVWRSPRSSATLHAWVHRLADRRGKRIAIVALARRLARILFAMWRDGCDFLPARLGRAAVAA

SEQ ID NO: 352705 - protein, 482 aa, unidentified
MKKRSIFPHQSQGLNTLFEEAGNNSKVMCIPIDYAKKDHVVMFCNGNGNILRKPFPIKNSPEGLEYLTQQVLSSCQHRGIDPKYAFFGGEDVGSYAQNFVNTLRSEGWIVAGVNAHDAKKQRANAQASNDNLDLMGIASMLLNRRANCSPAQTGIYLNLRGLTRHRKKLVDMSTEEKNRIHTVVDQIYPGFLNEKNVGVAPFSQSSLYLMEDRFSPVQIRRRKREKLIETLRRYGTVKPEVAADKLQNYAALVLNAPSEYLSTLQISLTQHIRLLKCLQDSIEQLEKEMALWLAQTQGAFLTTLRGIGIVLAAGATAEIGDPTKQNPVANLVSYSGIIPRNKQSGGPEGKIRTGKVAKRSNRILKNYVVQSANHIGLHGPEDLMADYKRREDSGQHADFGIARRYIRTAMCLMRTSQIYIPKRLRAKGINPEERAGYFLMIWPSLRDKWAKLGALEVAFSNDNPLGRWRNMVQELYEIKLKI

SEQ ID NO: 352706 - protein, 375 aa, unidentified
MGTPSAQTLVDMGVRKIFRELEEVLMTMVGGLDVHRQQITFDYVDDDGLVRWGQIRPATRKTLRSWLSEHCPDGDADFALEGCTGWRYVCEELAAAGVVVHLGDPAEVAALRGRKKRAKTDRADARLLRTLLLQGRFPESWIPPAHVVEMRTLGRLYCALMDERRAWQQRIHAQLFHQGCPPIKALLSAAGRQALASAELSTIGRQYVDTALRRIDELSTEIDPLRTQLVNFAKRQRGCQALQRHYGIGWLSAAIMWAEIGDARRFTSSDQLVRFAGVDITVYSSDGKSSPGHLSRQGSPELRWAAFEAAKCAARRGSPDYGYYRKLAAKRDGHNGKNPTLAVERKILRRSYHTLRELGDAALALPVTEAKEVAA

SEQ ID NO: 352707 - protein, 410 aa, unidentified
MPMLQVALDPSTAVVAIDPGKVANRVWLSNGSGPLAEPVSMPVSRAGIAGLEQLVSGHLEHGLVIAIEATGSLHQAWSAALERRYPGAVRLFAPSETKAARTQLGSGRFKTDDRDCAALTYLARQGAGRRWSEEADVEALRAVVRHRRGLVHDRKIIQQRLHDQLNALAPGLSAPAGHGRSLALTQPSGQAVLACAASFDGRAPTVRSLRARATGRFSLADAQYWVQRWRDCLPPPTDGQQRAARLGRDLIRLQALQADIAGLEAELGQLLNGSAGQVLTSLPGVAVVRAAGFAAHSLPIGRFPDAEHLYSATGLAPALYESATIRRRGRISRQGLAEHREALMGIAWGLSRYSPAFAQRDREYRARGMSPIQARVALARHACRLAYRLLTSQQSFDEEKYGQGRHSRGR

SEQ ID NO: 352708 - protein, 436 aa, unidentified
MRGCRCSMIMGFTKPIEHFNLQRKKVITMNTLYVGIDVSSKSNVVYLMLPNGDKHSNFSVANSHEGSTQLVKRILSALTSHSLDTVLIGLEATSVYGDNLVYFLREDATLAPFNRKIHVLNPKQVKKFHDAYNDLPKNDYVDSFVIADCLRFGRINKEVYMGDYRYKALQNLTRARFFAVQNLVKEKQRFMNVLFKKYSTMTQEKVFSDTFSTTALAVYDEFESAEALANMDLHELTDFIIEKGKNRFPDPDAVAKAIQKAARNSYRLPKTVNDSVNQVLSISITSMKALESQIKEFDKAIKAQMELLPNVLISIPGIGPVYSAGIMAEIGDINRFNSQAALAKYAGLAWKQHQSGGFESEVIRLIPSGNRFLKYYLCEAAFSLVRCDKKYSDFYHLKYKEVNRCQHKRALALTARKFVRLVFRLLKDNRLYCPAK

SEQ ID NO: 352709 - protein, 333 aa, unidentified
MNESFIGVDLHKRFCVFTEIDPKGNVLRRGRFGNNIEEVSAFASTLSPKVKMTVEPLLNYLWFADQVEPYIGSLSPADPYKTRVIAEAKCKTDSYDSLMLAELLRVDFLPRSYLPPKEIRELRELIRQRCYLVRNRAMFKNRIRHLLFLNGGKIEAKDVSSPKARREIRQLYLPDHTRHSIEQCLELIDQTGKIIKPLEKEIVSSCQEIEDVALLETIPGVGRLQAIIIYAGIVDITRFKSARAFASYTGLVPTIRASADNVKTGGITKLGSRLLRTAFVEAAMKAPRYSPDLNRMYWRIAQRSNTKKARVAIARKLATIVYVMLIKREVFRK

SEQ ID NO: 352710 - protein, 454 aa, unidentified
MQKQDSYDYYVGIDCAQNKHDFAMKNNQDKFLIKKGHFSNTLQGYEKFLNTVLSKCLDKDKILFGMEVTGIYGTNLYERLKSDGYHVVMIFPDSVKNYRDYKRLNKTDNIDSACIAELLLNGDAQIVHAEKNGYTDLKAYIRRRNALKVTCTQETNRFLAKVCLYFPDLLKVFPSGRATLKAIFSIYPTPYSIIEADFNELVSVLQKASKNKFGVDKANELIHAARNSIVVRKSISDGELYNIHSLIDSIDSLESEIRHLEKIIDSKAEEFPAYHVLLTLTGCGKITAATIVAEIGDISRFHKASQIVSLAGLYGDNSKSGSSVNKRGKISKKGSRYLRHAIYMVAEFARRNNPIFKAYFTKKKNGDRTKHILAVNAVANKLCKVIYSLMKNQSTYIIQYRDLAKLSESTQNEFFQNAETDFSAKTRRKKYLYEDEYGELHEFVFKSIKTALIE

SEQ ID NO: 352711 - protein, 411 aa, unidentified
MHEKQKYLYVGVDLHKQHHVAVIINCWQEKLGEIKFENKSSAFSTFLLDIDKLIDDGLTPVFGLEDVGGYGRALAQYLTDHGQVVKEVNPALSYAERKSHVTVQKSDSWDAECVARILFNKLNHLPDAKPHDLYWSIQQLVTRRNALVKAQGALKNQLHIQLSHHYPSYKKFFSEVDGKTALAFWERYPSPSCLEGVSVQQLTTFLLEVSNNTCSVKKANDILRLVKEDGHTAKEHQETRDFLVRSIVRDIAFKKKEMNYVERELKELMSLLDFQLDSMPGIDLVTASALIAEIGDVRRFPNANKLARFAGIAPVYFGSGGKGKEQKSKQGNRALHALFYNLAVQQVQVAKGSKLPRNAVFHAYYQRKLKEGKTKGQALVCIMRRLVNLIYGMMKHKTAYKLPIVQEKEVV

SEQ ID NO: 352712 - protein, 387 aa, unidentified
MPQPNDLSRSLVALEQDITLIAVIEMSQSSWLVAGIVPGIERHPLKKLEPDEAALLRLLWRWRDEAAQKGRTIMRIAVAFEAGRDGFWLARWLRARGVEAYVIHSTSIAVPREHRRAKTDRLDTELLKRAFLGWLRGEQDHCSMAALPTLEEEDAKRPTREHQTLVGERTRIVNRMKGTLARLGIRGFKPTLRKAPERLETLRTPESAALPPNTRAELQRDMARLHFVIDQLREIERTRLERLEQRPAEGQNAMVRLVARVVGVGIETADMLVHEVLSRNLRDRRAVARYAGLTGSPDESGSKRREKGLAKAGNARVRRGMIQLAWRFLLHQQNSALAHWYRARTAEARGGMRKTMIVALARKLLVALWSFVRTGEVPSGIVLRPIA

SEQ ID NO: 352713 - protein, 350 aa, unidentified
MLAELVHHVVGVDPDRDWITLAIVDARTTGVVAEGRFAATGDGYREAVEFVDGHSAETERAWIIEGSAGYGRGLTVMLSHLGEWVIEFDRPTRKAKDGAKSDALDAIRAAREILGRDRPSIPRAHNGRREAIRVHAVTRAAAVRARTGAINELKAIIVTADEAIRSPLRGLRTAQQVAACTRFRDRATTSVEQRCTRAALRALGRRIEHLDAEVDDHDRALKELLDQAAPQLLAEHGIGYVTAAQFYIAWSHPGRCHSEAAFARLGGTSPVEATSGQNQTRHRLNRGGDRQLNRALYHVAITKKRCDPATKAYIARRTAAGKTEREAIRCIKRFIARRVWRLLEHPLIAT

SEQ ID NO: 352714 - protein, 405 aa, unidentified
MPLSKASPHRFVGLDVHKHYLVAAAIDQDLNEVLSPRRVRLTRLDDWLRTTLTPQDAVVLEMTTNAFQLYDDLLPHVHSVTIVHPPHVALITRAQVMTDKIAARSLARLLAAGLLPPVWVPPPEVRDARALVAQRSKMMHLATQARNRLHAVLHRHHLLPPGDDPFTTAKHEWWLSLEVSALERARIQCDLDSLVFAQTQIALLENAMKILAAHDERVPLLVQIPGIALLTALTLLAAIGDIARFPTAKHLVGYTGLGTRVHDSGLTHRSGRITKAGRRDIRAAMVEAAHTASRTHPHWRAELARLEPRLGKNKAIVAIARKLLVAVWHVLSNEEADRFADPQQVARMLIQHAYRLGRDLRPDGQTVGEYVRQQLDRLGLGADLTAIRQGRRTIPLPPSLFAQSD

SEQ ID NO: 352715 - protein, 346 aa, unidentified
MEIIRVGVDLAKNVFQLHGVDQHEKPAWKRSLRRGQWLPELQRRVAPGAEIGMEACAGAHHWGRELRARGYRVKLMAPQFVKPYVKSNKSDRNDAEAICEAMSRPSMRYVELKSAEQQDIQAVHRVRAELIKQRTGKANQIRGLVGEYGLVAPVRIGHLRKALPRWLEDATNGLSDRFRRLLAGLAEDLRGLDARIEALDEEMAGIVRETPAAQRLLALRGVGPTTATALVAALGTGESFARGREFAVAVGLTPKHHGTGGKERILGISKRGDAYLRQLLVHGARAAVRTAKGKPDPLSRWINALLAHKHSNVVTVALANKTARMAWALIRHEDSYDPILAVYGMQ

SEQ ID NO: 352716 - protein, 408 aa, unidentified
MKTLHKRCAGLDVHKAEVVACLRVITNRKVGREVRRFPTTTQGLLALAEWLENAGCTHVAMEATGVYWKPVWHILEGHFVLILANAAHVKNVPGRKSDVNDANWLADLLAHGLIQSSFVPPPAIQELRDLTRTRKQLTREIVQHVQRIQAVLEEANIKLCSVITDIMGVSGRRMLKALIAGETDAEKLAALGHERLGCTRAELVQVLTGCVREHHRFLLEQHLRTIEQLEDSVAAFDARIETALSPFHDIVERLKEVPGLGATAIETVIAEIGIDMSQFPSAGHLLSWAGFVPRLDESAGKRRSTRIRKGAPWLKPVLVQAAWGAARKKNSYFQAQFLRLKARHGAKKAAIAVAASILTTVYHMLRDGTYYQDLGPEYFTRRNPAQAAARLANRIRNLGYHVEIRAAA

SEQ ID NO: 352717 - protein, 376 aa, unidentified
MIKTDVQYPTVHLAIELSRSVWLVAARLPGVEKPSLHRIGGGDTAALLALAETLRARAAAKLGAPVRVACCFEAGRDGFWLHRLLTAEGLAAHVLEPTSILVSRRARRAKTDRLDALGMLRVLAAYLGGDRQVCSMVRVPTPEEEDAKRPHREREDLVRERVRLENRIAALLATQGVRERPSLRNWERDLAALRTGDGRPLPPHLRAELDRLRRRLVLALELTREVEAERDAALAAEPRDAVGRKIAALCRIRGVGPNFAAVLTREVFYRAFANRRQLAGYVGLTPVPHQSGEADRDRRISRAGNPRARTTLIQLAWLWLRYQPDSAPARWFRDRVGALRGRTRRIAIVAMARKLLIVLWRYAETGLVPEGVEVAA

SEQ ID NO: 352718 - protein, 381 aa, unidentified
MSVRRILAKTIDTDLEYEAIGIDLAKNCVSAALLTTDGEVVCIDRLDYSELEKSAQALSPTTFAMEPCTEMNYLVQKLEAWGHRCLVIGGKNVQNYVENHFSGQKTDLNDAQALAFLAQDTQLRTIKAKDVEQQKYASLTTLREQYIKQYRQTIVSLKGICQAWGLNISKGISGKARLKDLIENHAAFPEELKESLVDMVTHAQTAQKALNKITKTLEELAKSDKVCQLIQTIPGLGSICSCRLRATVGDIKRFKSPKDFPAYYGLVPRSIATGHNERKGKITHRGDRTMRSLMVQAAGSLVNMATKGKLKSKQLTKWISKKQKEKMPWGKLVCAVAAKLLRIVRAVLISNKPYNSKIAGVAKCSLPKVLIPELMHQAIQS

SEQ ID NO: 352719 - protein, 338 aa, unidentified
MRVYVGIDLHSNNCYLVILDEEGHILFEKKLSNDLSKILQALAPVKERTAGVVVESTFNWYWIVDGLMDEGYRVHLANTSAIKQYEGLKYTDDKSDARWLAQMLKMGILPEGFIYPKEDRPVRDLLRKRSQLVRHKTAHTLSIQNLLARNLGRRFSVQEIRKLSEAEVDDLLPSEGLAMAVKSSLSIFTCLSNEIEILERAILSQVRPIPTFSLIESIAGVGKILGLTILLETGDVKRFVKAGNYASYCRCVGSAKISNGKRKGQGNVKNGNKYLAWAFVEAANFAIRYYPEIKRFYERKKSRTNGIVAIKAVAHKLARAAFHVMKSGTPFDIQRAFA

SEQ ID NO: 352720 - protein, 454 aa, unidentified
MEKSKIKECYIVVMIDPVLKNPPFAIKLRQKEENMSNRKLIKRGRYVKRDILVVGIDIGKFTHVAVGTSLESGFTKPYYIKNNRDSYEAFERVIEEWKERFACRDTVIGFESTGHYWKPLGYHLKNNGQHLVEVSTNHTKKAKEMMDNSPLKCDPKDARIIGDLIKQGKILTPVIPEGKILCLREVIYTRENLIKERTSILNRLHKIMDVTFPERREVIKKVGNKTSLFLLNEAAFPEDIIEKGIEWLKEWMWKKSCGHYKHSDAEKLYKLAIETIGVREGREGSLYELRSLLPRLEKLNKEIDAVEFKIEKMLESIEESKYILSVKGINVITTAAVISESGGVSRYSGIKSLEKVAGLNLYEVSSGEHKGEKHITKRGRSLMRQKLYFAALQQARKGMPLYSFYKRLTDNGVKKTKALIAVAIKILKIMFSLVRDKREFEWDYKRAKKIRSVA

SEQ ID NO: 352721 - protein, 415 aa, unidentified
MEWTERTTFVGFDWARDHHDVVVVNRDGRVIEEFRFDDTAEGWQRLVKTLREHPHPAVAIETSSGAAVERLLEAGFAVYPVNPHAAKRYRERKAPSGTKTDRFDAWSLADALRMDGQTWRALKPDDPLTVELRLLCRDEIALIQQRSSLVCQLRAALAEYYPTVLEAFDDWTVPSAWAFVEAFPTPEALVKAGKRKWEKFLHTHKLYRPATYEKRLSLFAQAQAFCGSPAMTNAKSMLAVALAGQLRVLEGHLDKYRARIQELFAKHPDHELFGSLPGAGPKLAPRLLTELGDDRERFASPQALQCFAGTAPVSYESGQIKKARFRRACQKILRQTVHLWANLSRDKCPWAETYYQRKREQGQSHACAVRCLGQRWLKILWKMWQTGKPYDAELHQRNQMQHGSWIIALMPTPAT

SEQ ID NO: 352722 - protein, 346 aa, unidentified
MKIVGCDFHPSFQQVAILDISTGEVEELKLMHATGEAERFYRDLASPVLVGMESMGNSLWFERLMERLGHELWIGDAAQIRASYVRRQKTDKRDAAHILQLLIEKRFPRIWVPSHLERDQRQLLLHRHRLVQMRTRVKTELQHLALNQGLQQKRSLWSVRGRADLEKLPLEGWTRRRRLDLLKVLDMLETQVGELDEAAGKVASANAGARLPMTQPGVGPITALAFVVTIGDVARFKRGKQVASYLGLIPSERSSGQKRRLGAISKQGNVFLRTMLVEAAQSAVRHDEQFKKEYAHRCHSKPKGVAKVAAARKLAVRLYWMLRNQTPYTHAVHNEGSPSHPVVGAS

SEQ ID NO: 352723 - protein, 400 aa, unidentified
MLSVGIDTHESMHQAEVLNQNGKIMWSGRIRNNREGLQELVDKILQIQRSNSDKVAGIFMNPTGNFHLPVKYFLEKNGFQGVVYLVDPRVSKHMRMINNLGSEKSDPEDAHILASTLWEDRHYAERKGHSRDPLSEITRLRSIVNVNITRIKNLIWADLAAVFPEFGTMFALESKTALVILEKYPLPQDILNLGTGYLASFLSRHSMGHYSNKEASKLTEIARLSIGIPDEQRVYALRIQTNVKRLKQEMETLEKLDREIEMRSSSNTLMGYVSDIRGMGIVNSASIVSEIGRIDQFGTALKLQSYGGKCPDMTGSGGKNYAIRVTRIRNSYLSDSVFESAVSLVNHHSREFEDLYRRSIKKGKTSKEAYIVVGKRLLYHIFTIMKNNKPYRERISRGRW

SEQ ID NO: 352724 - protein, 349 aa, unidentified
MANLTMGMDLGDQYTTVYVLDGEGAEVETARVRTTPAGLARWLRGRARARVVLEAGTHSPWVSRVVEALGHEVLVANPRKLRLIYQNPGKTDRVDAEYLARVGRLDPRLLGGITHRGEAAQAALAVLRARDALVRTRTQLINHVRGVVKAMGARLPGCAAEAFPRKVGPAVPDALRPAVMPVLAHLAQVTQQIRSYDRQLAQLGTEGYPETARLRQVAGVGPVTALAYVLILEDPQRFQRSRMVGAYLGLQPRRRQSGERDPQLRITKAGDAFLRRLLVQGAQYILGPHGRDCDLRRHGERIAARGGTNAKKRAVIAVARKLAVLLHHLWRTGEVYEPLRRDAALATAS

SEQ ID NO: 352725 - protein, 461 aa, unidentified
MTLLAQLAGQQLPERYYLGVDVGYREHVAVVIPLKTFVSGGEAWKKARCLHFPTTHAGLVRLQEYLDRFSKDPARFLGICEPTGGYYGASLYQYLLDHAYAMHMVENATTRTMREKIFGGIPKTDEIDGRVMARIAYLHEAVGEEFSLRPLRLLDPDNHHLHSLCRDSWSLSSLLTRTRNQFAQVMAMVFPELKTFFPSSVSTFAPVSLIAAYPTPALLAEAAEAEVRQVLWQAHAYQHAERVKELQQLARESAGVLPDPGRAWRIQWLTTFLLTNFQAENQLDREIDQAIKKHPSYPLLAKVPYAGPATLGIILSTAGDITRFRNYRRYVAYTGYFAGLETSQTIDRTRMSKQGNRDLKRAYFLIAAPLVWWDPNPNPYKQLYERKKAEGRAWYKAMPFVCAALARHFYHCLKYKEPYKTDKIFKYSLPLPTSIPAADFPRQDLDEQFEIMDAHLSLSEG

SEQ ID NO: 352726 - protein, 319 aa, unidentified
MAQNDLVVVGIDVAKDKVDACIRLRSRRLTCPSSTQGHRKLVAWLRKHQVEKAVMEASGGYERGWARVLREAGIEVRIVDPKRVRSFALSAGRLAKNDAIDAEMIAWFAETFSEAPCQTHDVAREELQTLVKARLGLIDFRMRLVSQSEHAAAGLVQKAHAHILKSLASEIAKLEAAISAKIKSTPDFAERAEIIESVPGLAETSSANLVAGMPELGQVSDEIAAALIGAAPYDDDSGKRRGERHIKGGRRWVRNAIYMPCVGAATQNNPVLKAYYQRLIAKGKEPKVAIIACMRKLIIILNTMIARRQKWDPGRYALN

SEQ ID NO: 352727 - protein, 375 aa, unidentified
MITMTRTSESTAPTGGLLLAFELGQRSWKLGFTVGMGQRPRIRQIPAGAVSALVTEIERAKKRLGLSADAPVTSCYEAGRDGFWLHRYLVAHGITNYVVDSSSIEVNRRARRAKTDRLDLAGLLSLLARYVLGDRRAWRVVRVPTVAEEDGRHLSRTLEALTQHHARLMSRLKSLLATQGVSLPINAQFLHRLEAAQLWDGTPLPPGLRERLTRTWTQLQEVDGQIRDLKGRLAQPENLTSATSRALAQLLTMRAIGPIGASVLATEIFGWRRIRNGRELGALVGLVPAPYQSGETDYDQGITRAGNAHVRRVIVQLAWGWIRHQPDSALTQWYQQRFGAGGKRLRKIGIVALARKLLIALWRYLETGVVPDGRN

SEQ ID NO: 352728 - protein, 347 aa, unidentified
MKDTNTRIASIGIDLGDTDAYYAMLNEAGVFAEEGRVAMTPAGIRKTFATLPPTRIALEAGAQSRWIAKLLGEFGHDVIVANPRQVQLITANQSKNDVNDARLLARLARVDPSLLSPLTHREETEQTALLAIRARAQLVKARVALMHSLRGMVKGFGVRLPHATSDCFLERCRTAVPATLLVHLDGLFTTIANLTGQIEAYDEQIEQLAREAYPATQLLRQVPGVGTLTALTYVLTIGRAERFQKSRQAGAYLGLRPRQQQSGAQDPQLGITKAGDGYLRKLLVQSAHCVLHATAKDSALRQWGKRLCERGGKNAKKRAIVAVARKLAVLLHKLWASGEEYRPFPAR

SEQ ID NO: 352729 - protein, 439 aa, unidentified
MNCTQNEKISQVTENTLVIGIDIASETHYARGFDWRGIELWAESNSLIKKSYVKTALAFTNDAEGFEKFNDWASKIMKNHHKTKVIVGIEPTGHYWFNLGEYLKKAGMKLVLVNPFHVKCSKELDDNIQTKTDQKDPKTIAGLVRDGRYLEPYIPEEIYAELRELCGYRERLLKDVNSAKNQIHKWEDKFFPEYKKVFGDITAKSSIAVMKQTPLPCDVKEIGAEGINKIWRDMKLRAVGMNRARSLCEAAERSVGVTEGLDSARITIAMILETYERLKANLEEIEARMIALCRSIPAVEKAEKIKGVGIITIACFLAEIGDINRFDSPKQIQKLAGLGLRECSSGKNKGKTMISKRGRALLRKILFQAAMPLVAKNPEFAELHHYYTTREDNPLKKKQSIIAISCKLIRILFVVLKNNVEYDSNKMMNDIKRNIIKAA

SEQ ID NO: 352730 - protein, 342 aa, unidentified
MQVTTIGLDIAKNVFQVHGIDANEKVVVRKQLRRSQVIAFFAALAPCLIGMEACATAHYWARELRKLGHKVRLMPAKDVKAYVKRNKNDAADAEAICEAVRRPTMRFVRIKSAEQQGQLMQHRTRDVLIRQRTQIINALRAHLAELGIVAAQGDAGVNELRAIVADDRDERLPIDARASVIVLAAQLEALQTLIGSIEKRIKMQHRSNETSQRVETIPGIGVLGATAIVATAADPTVFRSGRDFAAWIGLVPRQDSTGGKQKLGPISKQGDRYLRRILVVGAIAVLRRAQENPGKYPWLTQLLARRPFKVVAVALANKMARTAWALMVHGGTYRAPELAEAA

SEQ ID NO: 352731 - protein, 364 aa, unidentified
MPMLEGKVDHVIGVDTHRDRHAAAILDPNGGLLAHLEVASEEAGYGMLLGFVAERAPGRRCWALEGTGCYGAGLASFLAAQGEWVIEVDRPKRPRGRSGAKSDALDAIRAGREALSREHLASPRQRGHREALRVLQLARSGAVKVAADARRQLKALLVTAPEPLRQALRGGTWLAQARACASLQPQSAAPVEDRATVRALRLTARRVLAAHAEAEQLEKELRALVAAMAPLLLAQPGVGPVTASQLLVSWSHPGRFRSEAAFAMLAGVAPIEASSGKVVRHRLNRGGDRQLNRALHTIVMIRQRFHQATMTYTTRRTAEGKSEREIRRCLKRTVARQLYRLLERTAAPTTGPGSYGGCGAALPS

SEQ ID NO: 352732 - protein, 354 aa, unidentified
MIIIGMDYHPSFQQIAFVDTETGEYQESRLQHREEAEKFYRDLATRGVKVRVGMEASGQARWFERLLAELNMELWIGDGAEIRAKRVRKKKTNREDARHILRLLLEDRFPRIWVPSWENRDLRQLLWHRHRMVQMRTRIMNQLQAVALNEGLCCKKRLWRESGRKQLEGFPLAPWGSRRRRDLLELLDRLNPTIAELTQTIEQEVEKYPAAQRLMTHPGVGALTALAFVLIIGEAERFRCGKQIASYIGLVPTEESTGERQRLGHISKQGSGLLRFFLVEAAQVTVRSDMEWRSKYFHLAMRRGRKIAKVAMARRLAVRLYWMWREKRDYEHLKKFGSYVGEPGTGVGARQNIA

SEQ ID NO: 352733 - protein, 376 aa, unidentified
MKQFNEIYVGLDVHKDTIAVAIARGLRTKPYYFGEVPNTPTAITKLLKQLSPDGEVLNFCYEAGPCGYEVYHQVTQQGHACDVVAPSLIPKMPGVRIKTDRRDAMSLAKLHADGSLTAVWVPDKEQEGIRDLSRAREDFKQTETKARQRLGAFLLRNGKVFSGKSKWTVAYWRWMETLTFETPTQHIVMQEYVEALKEASRRVLGMEKQILLAVRGWSLEPVLNSLLAMRGVNTITAVTLLAELGDITRFDNPKQLMSYLGLVPSEYSSGGKRQQGAITKTGNGHVRRVLVEAAWNYRFPARKSRTIEMRAEKTSERVQAIAWEGQKRLCGRYQKLLTSGKLKQKVCTAVAREMVGFIWAIACEASGRVHGSRATA

SEQ ID NO: 352734 - protein, 400 aa, unidentified
MIDTGDVDVFLGLDVGKGEHHGTAVTRSGKRVFDKRLPNSEPKMRAVLDKLTAKHGTVLVVVDQPASIGALPLAVARDAGCRVAYLPGLTMRRIADLYPGEAKTDARDAFVIADAARTMPHTLRGIELTDETIAELEMIVGFDDDLAGEATRVANRLRGLLTQIHPHLERVLGPRIDHPAVLALLERFGSPAALRKAGRRRLQSVARPLAPRMFERVVEDILTALDEQTVIVPGTEAAALIVPSLAGSLRAVLDQRKILEKRIQELLDEHPLSEILTSMPGVGTRTGARVLIDVGDASAFPTAAHLASYAGLAPATRSSGSSIRGEQPSRRGNKQLKRAFFLAAFASLSDPASRAYYDKKINQGKRHTQALLCLARRRVDVLFAMLRDGTLYQSRPAGSA

SEQ ID NO: 352735 - protein, 371 aa, unidentified
MTSTKYIGMDVHKESISIAVRNSVGKVVMECVIETKASMILQFIEGLRGDLHVTFEEGTAAAWLYDLLKPHVARLVVCNPRRNALLKVGNKSDRIDARKLTELLRGNQLHPVYHGEHGLRALKELVRSYLTISKDLARVMTRVKAVYRSWGIPCSGTQVYSRLHRLTWLSKITEPGVRLRAAFYFQQLDALRTLRQEVRQELLAESHKHSAWKRLCEIPSIGPIRAAVALGILQTPHRFRTKRQLWSISGFAIETRSSADHRHVNGQLQKVKKRVSIRGLNQNHNHDLKNLFKGAAVIASTKPGPFQEFKKDRHHCMDRVEERSKLRRPIPETTNSLSVSDRVRSIPGFLSGGGRGFLETLGFESESQPVS

SEQ ID NO: 352736 - protein, 346 aa, unidentified
MIIIGCDFHPSWQQVCWLDIETGELVQQTVLHVPGEVEKFYRQFAAPALIGMESTGNCQWFVELLERLGHVVWIGDAAKIRASDVRQQKHDRRDAELLWRLLHEDRFPRIWTPSSEQRDARQLLIHRHKLVRVRAQVKNELQHLAMNRGVQKKRRLWSAAGQQALRELPLATWASRRREDLLKLLSMLDGQIASLDLAVKAAAERDEKARLLMTQPGVGPVTSLAFVLTMGDISRFPRGKQVASYLGLIPREYSSGGHQRFGPISKQGNRFMRMLLVEAAQVAVRCDPQMRSEYLHRCHRKPKGVAKVAAARKLAIRLYWMLGTNRGYPEIVRIESGPRVPLVSAS

SEQ ID NO: 352737 - protein, 305 aa, unidentified
MFNRFIGVDVAKAKVDVFLSETGELLQIKNIETDLKRFVQSLERTEETLVVIDLTGGYETQCVKAFYQAGFTIHRAEGRKVKAFMRACGQLAKTDSIDARALADYGKRLQDKLTLFQPVDNEIKPYVMRLNELKQLLQMEKNRLQSPQTDNKIYEQISRHIAFLKTEINFLAKELQQIIEKMPQLHQKQKVLTSQIGIGETTANLLLALLPELGYLPRRKIAALAGLAPYAKDSGTLNAARHVYGGRKEVKRALFICALTAIKRDKEIKYFYEKLLKNGKKKMVALVAVMRKMIIILNAKCKNLN

SEQ ID NO: 352738 - protein, 377 aa, unidentified
MALKIVYPICCGIDVHKTFVVACIASTNSKGVTTFKSHRFSTFTKGLNELSQWLCEHDCKDVCMESTGKYWIPVFNMLEHSCNITLAHPKYVKAIRGKKTDKKDVKWIADLFKHDLVAGSFMPPLPIRQLRDLMRYRFKLTNFTSSEKNRLQNSLTVSNIQLGSVVSDTFGKSAMNIIDKLLDDPADTSFDLEPLIHGSLKGKLPELALAIDGFITPEQAGKIKVIRQHYEDLESRKAELEAIILSLADAYSEELHLILTVPSFKNIFSAIAVVSEIGVNMDVFLTAKHLCSWAGLTPSNDQSAGKRKSVRISRAGIYIKPLLVQCATAVVKSEKHPEIRNRYLQLKRRRGHKSRDYCDCANAVNGHLSHYEEQRTL

SEQ ID NO: 352739 - protein, 391 aa, unidentified
MILAGIDVAKDKHDCFIMNSDGEILVKAFTFSNNLEGFNFLYEKIRSVTKPKDKIKVGLEATGHYSYNLLGFLLNKGLPTFVINPLHTNLFRKSLSLRKTKTDKVDSRTIAMMLMSDVSLKPYTDTSYHNEELKSLSRYRFTKVQERSKLKTSVSRLVQILFPELEKIVCTIHMSSIYHLLEEYLGASYIASVHLTKLTNLLMEASHGRYNRNTAIKFREAARNSIGSILPAKSLELKHTIKLIRELTVEIDEIDAEIKKMMYSIASPITTIPGIGYSMGAMIISEIGDFSRFSSPDKILAYAGLSPSTYQSGQLNNCYSHMEKRGSRYLRYALFTVAQKVCIWDNTFAEYLSKKRAEGKHYYVAISHAVKKLVRVIFHLERTGQAYLKAA

SEQ ID NO: 352740 - protein, 363 aa, unidentified
MNATAALPIVGVDLAKSVFQLAVADGCWRVVALHRLTRTQFERWFVNRTVGLVVMEACGSAHHWARWLNGLGIEVRLLPAAYLRAYVKRNKTDAADACALLEAARCAEIVPVRVKSIEQQALQGLHRTRSLWMGTRTSRINALRGFCREFGIVIAQGSRLGVEQIGRALADPHAAVPTLIRGTMALLVEEIRLLEVRIAQLERELTAPARTSPACTTLLSIPGVGLLTATAMMAATSGEVSHFRDARHFASWFGLTPKEHSSGNTRHLGRISKRGDRYLRMLLTHGARSVLRAASVAVRAGKTVDGLRQWALGVEHRSNHNKATCALANKLARICYATLRDHQPYGTARLNKKIARTAFALPA

SEQ ID NO: 352741 - protein, 339 aa, unidentified
MNYTTVGVDVAKNVFQLHWVDADTGEIVSKQIKRSGFLEHFANRAPCLIGMEACGGAQHWARRLISMGHLVKLMPAKFVKAFVIGNKNDAADARAIWAATQMQGKEVAVKTEAQQAVLALHRIRQQKVKFRTAQMNSLRGLLTEYGEVMNKSRSALDKAIAGVLGKLSERLPAMLIDSLRELWNELETLDQQIAAIEQRLQRWMKEDRACKAIAEIPGVGLLTATAAVATMGDPKSFKSGREFAAWLGLVPAQTGTGGKVRLLGISKRGDTYLRTLLIHGARSVLFRMKEPGAWLAQMKQRRPANVITVALANKIARTIWAVLAHNTPYQKNHVSVVPG

SEQ ID NO: 352742 - protein, 415 aa, unidentified
MERLYTCCCGLDAHKQTVVACLLRPTPDGQSTRETRTFPTTTDSLLALSDWLRAAECTHVAIESTGVYWKPIFNILDGQCTVLVVNAAHIKNVAGRKTDVSDAAWIADLLQHGLLRPSFIPDRAQRELRDLTRTRTSLVDERTAAVNRIQKVLEDANIKLAGVASNIMGVSGRDILAALLAGSTDAEGMAELARGKLRRKREALAAALRGRMSDHHRLLIALHLEHADLLDEQIAQLSAEITERLRPWEEKLVRLETIPGVGRRTAEILAAEIGLDMSRFPSAAHLASWAGMCPGNYESAGKRKNGPMRLGNRALRRALVEAAHAAARTKKADQGYLRGHYRRLIVRCGAKKAAVAVGHTILRIVYHVLNEQEAYREPVIIAHDERRRAQTQRRAVEQLTALGYAVTITPMVPAA

SEQ ID NO: 352743 - protein, 461 aa, unidentified
MARKSNEGSSDSRRQLQGIPLIRRDVAGIDLGSEQHWVCAPSEDGGSREVAHFGGTTAELIRMAEWLKARHVKSVAMESTGVYWIAPHEILEAQGLEVLLVNARQLARVPGRDDRTDPTDSEWIQRLHSCGLLRGSFRPPETICMLRTLVRDKATLVAESGDWLRRMQKSLDQMNVRVHRAVSDIDGATGMAIVRAIADGERDVKKLAQFRNPHCRQSEEQIAEQLRGHWREDHLFSLQQALKMYDAITERIAAYEKEIQRKLAEMTPPPQRQAPVPPLKNANKARGIKRRGQEPMRQALYRMSGVDAMQIDAIGVETVEVILSEYGSDLSRFATEKEFVSHATLAPRVPKSGGKPIKKKKRQSASTRVANVLRMAALSLGHSDTALGAYYRHISQRKGADVAVFASARKLATYVYRLLRWGQPYVDEGAEAYEKRYQQQRLKALVSKAKTLGYQLVPVSA

SEQ ID NO: 352744 - protein, 320 aa, unidentified
MTGSTNPPVYFVGCDVGKISIVTFDSRDNQTRTIANQPIALAAYAATLDPTGLVSCEATGGHEAALLAAAVAANIPAHRADARKVKSFIRSFGTMAKTDAIDARGLTRYGRERQGELTRWQTPDTNREQLQALVLARRDMIADRVACTNRLAAPGSRWVAAYLEKLRDGIEVQIKAIDAAITAVIHNSEPLKTAVKTLRGVCGIGATTAAALLALMPELGNLDRRQAAALAGLAPHPQQSGMKDAYRRTKGGRPEIRRVLFMAAMSAAKHHKTLHVFYERLLANGKKKLVALVGVMRKLVVICNAMLRPPRKIENFRAPA

SEQ ID NO: 352745 - protein, 411 aa, unidentified
MLVLFIGDDWAEDHHDVEVQDATGRTLATVRLPEGVEGIAKLHALVARHGSDDLEPGQVVVGTETDRGPWVQALIVAGYRVYAVNPRQAARFKERYATSGAKSDKGDAHALADMVRIDRDQLRPIAGDSDQAQAVRVVARAHQTLIWERTRTFQRLRSTLREYFPGALTAYAGLELTSTDAMELLIKAPTPEEATRLTKPQITAVLARHRRRDRDQKAAAIQAALREPQLTLPAPVAAAYGAAALAHARLLIALNEQIQALEEQVSAHFLAHPDAEIYLSMPGIGEITGARVLAEFGDDPTRYTTAKARKNYAGTSPITRASGKVHSVQARFVRNNRLADALQRQAFCSLQRSPGARRYYDKQRARDLDYNPALRQLGNRLVGILHGCLKTRTLYDEATAWSHHATLPAAA

SEQ ID NO: 352746 - protein, 338 aa, unidentified
MKAYAGIDLHSSNNYIGIMDQNNKRIVGRKLPNSLNIILKFLDPFKADLRGVVIESTYNWYWLADGLQDHGYKVHLANPSAIKQYEGIKHTDDRWDSFWLVHMKHLNILPEGYIYPKEQRAVRDLLRRRLLFVRHRTANILSLQSTIARNRGFTMPNNDIKKLNMDDAGDLFDSSNLVFMAQNNISAIKHLGKIIKGIEKEVKSQVQLRKEFAMLHTIPGIGLILCLTIMLEVGDIARFIKVGNYSSYCRCVSSIRLSNGKKKGENNKKNGNKYLAWAYVEAAHFARRYIPKAQRFYQQKMAKANGAVATKALANKLARASYFIMRDQVPFDEDMLFR

SEQ ID NO: 352747 - protein, 377 aa, unidentified
MGTTRQALINDTSVVLMLYMALELSASKWKVALADGQRASSQHTLEAGDVGGLLKLIERAKKRCGLQGTLKVMSCYEAGRDGFWLHRWLLEQGIHNVVVDSSSIEVNRRARRAKSDGLDAVKLYEMLVRYVGGDKRMWRVVRVPSVQQEDERRVHRELERLKRERTAHVNRMRSLAVLHNVRLQRVGGRGWSERLEQLKGQLPGALWAEIERESVREKLVCEQIVALEQERKEQLQAMLEQGGPLVALLKLRAIGLQTAWVLVRELFGWRHFNNRRELAACVGLNPSPYDSGASQREQGISKAGNRRVRALVVEIGWYWLRYQPHSALSEWFNRRFGAGGKRMRRIGIVALARRLLIALWRYVEHGIVPAGAQLKKA

SEQ ID NO: 352748 - protein, 316 aa, unidentified
MRKKEVFVGIDVAKEELEVAVFPRADTETWPNTEEGILRLVDHLKSLCPTLVVLEATGGLEMPCVGALAAEGLPVVVMNPRQIRDFAKATGRLAKTDRIDARTIARFAEAVRPEIRELKTEEMQELTALGLRRRQIIQMITSEKNRLATASKWPREDIKEHISWLEKRLSDVNSELNKVIRTSPVWREKDDLLRSVPGVGPVLSATLLSQLPELGSLNRKQIAALVGVAPLNRDSGQFRGKRCVWGGRASVRSVLYMAALVATRFNPAIAVFYHRLRIAGKEHKVALTACMRKLLTILNAMARDRTHWSPVPLRES

SEQ ID NO: 352749 - protein, 340 aa, unidentified
MQVTTVGLDLAKNIFQAHGVTGDGNVAFNRALRRGQVLAFFEKLEPCLIGMEACGTGHYWARELSKLGHEVRLMPPIYVKPYVKRGKTDAADAAAICEAVTRPTMRFVAMKSPDQQALLSQHRARQLMIGQRTQLSNMIRGLIGEFGYIVPKGLNHIRIFAEAMKTSDAPLLPAAARDVIASLCEQLLALHQRIRLLEKKIFAASRKDARVRLLETIPGIGPVTASAIVATVGTPDQFRTGREFAAWVGLTPLNRSSGGKERLGRISKMGDRYLRQLLVAGMTSRVRAARTRPDRVEPWLASLLERKPVRLATVAMANKAARIVWAVLTRTEPYKSPLAA

SEQ ID NO: 352750 - protein, 355 aa, unidentified
MSVLAKQMDYVIGVDTHFHSHTAAVLTATGAVVASLRIDAEQAGYCRLVRMVERTAPGKRVWAVEGTRSYGAGLTGHLLSLGETVGEVDRPKRPARKRGKSDEIDAVRAAREALSMGQLAAPRSSGRREALRIAASTRQEVMDERTRAMNQLRGLVVTAPEHIASRFRDRSGRSHSLERLTKRCLTLRVAGIADVEDRIRLDTMKRIARRIVELQREASHYEAEMAELIRELAPGLLELPGVGPSTAAMVLTTYSHRGRFHSEAAFASMAGVAPIPASSGKQQRHRLNRGGDRRLNQALDLIVKNRIRYDPETIAYMERNKGGRRTDRDLRRILKRYLARNLYRFLERTNPLDKG

SEQ ID NO: 352751 - protein, 316 aa, unidentified
MQTPSVFVGIDISKVRLDVAVRPVSTPLSVAYDATGITTVLTQLNQWHPTLIVVEATGGLERLLLRALVDAALPVIVVNPRQVRDFAKATGQLAKTDTLDAQVLARFAEVIQPALRVIPDAPTQELAALLARRRQVLAMQGAEQHRLDRAPDRVRKRIEAHLRWLRDELARLDEDLDGLIQQSPVWRAREELLQSVPGIGPVMSRTMLAELPELGLLNRKQIAALVGVAPFNRDSGRLRGHRTIWGGRAPVRRALYMAALVATRWNPVIRVFYQRLRAAGKAPKVALVAAMRKLLTILNAMVQAGTPWQPGVVQEA

SEQ ID NO: 352752 - protein, 424 aa, unidentified
MEVVYSHCCGLDVHSKKILACRTTPGKGSTPTKEIQTFGTMTDELLRLSDWLAQAGVTHVAMESTSVYWKPVFNLLESSFALLLVNAQHIKTVPGRKSDVKDCEWIADLLRHGLLKGSFVPEREQRELRELTRYRTALVRERVAEVNRLQKTLEGANIKLANVASNILGVSARQMLGALIAGQTDAKALAQLAKAKLRQKIPLLERALVGEFRGHQRFLVAQQLAHIEDLDDAIEAVSTEICKRLDTLSVEGEGKEATHPYAAAVEVLITISGVQQRTAEVIVAEIGIDMARFPSAKHLASWAGLVPGLHESGGKRQGNKTRKGNKWLRSALVEAALAASKTKGTYLSSQYHRLAARRGKKKAVVAVAHTILVIAYQLIQKRVPYEELGGLYFDERDRDALERRLVDRLEKLGNKVTIERKLAA

SEQ ID NO: 352753 - protein, 346 aa, unidentified
MKHSVGLDVSVKETAICIVDEAGKVVREGKVATEPQAIIAFLSSAGVEYARIGLEAGPLSQWLVNGLSAAGLPVICVETRHMKAVLKAQQVNKSDRNDARGIAQMMRVGLYKPVHVKTLASQQARMLLTSRKLLRDKLQDMENELRGTLRNFGLKVGVVSSGHFEARIKELVAGQPPLEMIVVPLLAVRRVVREQLAKLDKMVLDQVRDDKLCRRLMTVPGVGPIVALTFRATVDQAQRFARSKTVGAHFGLAPRRFQSGERDYDGGVSKCGDAMMRTALYEAAQVLLTRTRTWSWLKAWGMQVARRRGAKKAIVALARRLAIVMHRMWVDGTEFRWRKEADTAAT

SEQ ID NO: 352754 - protein, 361 aa, unidentified
MAKMNLSRISSFVLGFEKSIFWMGIDVHKKSYSIALRRADGETLTWTSPASPTLIVDQIKQWGIHVGTVAYEAGPTGFSLARTLRAAGVNVIVAAPSRIPRPVTAGAKCDRLDCIKLSEYAAKGMLKAIAVPSVEDEARRVLLRRRHKVVDAVRRCKQRIKSQLLYLGIKAPKEISRWSNASAFALSKLSMHPCARSALESLLRELAFFQEELRQLETELMCAVKDRVNRTTMSCLRSVPGVGSVVAASFALELFRPERFDHADQVSSYLGLAPMIRQSGQSRSSGRLVPVGQSRLRSLLIEAAWSWKSKDAYAASLYKRFVGRMGIAQKAICAVARKLAIILWRLMVEQRAYQPKPALMQ

SEQ ID NO: 352755 - protein, 353 aa, unidentified
MRTYYVGMDVHGASIVIVVLNGAGKVVEQVIVQTSAERVRGYLKQLRGKVYVTFEEGTQAQWLYDVVRPLVTEVVVCDPRHNKLLQSGNKSDRVDAQKLAELLRLGSLKAVYHGNHTVKTLKELVRSYDCLVSDTTRVMNRLKAIYRGRGITCCGHDIYRQDRRTEWLGQLREAGAKQRADFLYQQLAALKPLRHQVKRLMVKEARRQTAYPWLMSVPQLGAVSVAQLIAIVGTPHRFRSKHQFWTYVGLAVVTRSTADYEVVAGVLRRSQRPVATRGLNRNHNHLLKRVFKNAASSACHRGPFAAGYEARVAQGMAPSLARLTIARQLAATTLAIWKRGEHFNPARREKQAA

SEQ ID NO: 352756 - protein, 408 aa, unidentified
MQRMNPRCAGLDVHKDSVWAAVRIDGAEPLIEKFGTSSRELLRLGDWLTGLGVTICAMESTGVYWKPVWNLLEDRLELILVNAQHIRNVPGRKTDVKDCDWISELLEFGLLKPSFVPDRPQRQLRDLTRQRTQLLGDRARVVNRIGKCLEDANIKLASVATDITGKSGRAILDALVEGKQTPEQMAELVHKRMEAKKPALREALRGRVTAHHRFMLRQLLQQIDALDQQIEAFDAHIEEVMSPLMRQAVARLDEVPGFDRRNGECVIAEIGTDMSRFPTPHHLASWAGICPGNNESAGKRKSGRTRHANRWLKAALTQAAWGASRTRRSYFAAQHQRLTKRRGIKRATIAVAHSLLVTSHCLLSNPEPYADLGCGYFQQSPDPSRLAQQLVRRLQKMGYVVDVKQNAA

SEQ ID NO: 352757 - protein, 443 aa, unidentified
MINANTAGIDLGGEYHWVSVPEDRDPECVRRFGCFTSDLHAMATWLQECGIQSVAMEATGVYWIAVFQILETQGFEVKLVNARHVKTVPGRKSDVLDCQWLRQLHSYGLLAGSFRPNDQICVLRSYIRQRDTLVKSASTHIQRMQKALTQMNVQLHRVISDISGTTGLAIIRAIVAGERDLLKLAALKDCRIHASTDEIAAALTGDYRAELVFVLHQELQLYVVFQAQITACDGQVEHCLNQFADQVDLAAAPLPAAKRRGKKQPGNAPTFDLRTHLYRISGVDFTQIDGVGVLTVLTLLSELGLDSSRFPSAKHFASWLGLCPGSRITGGKRKSSKTRQVMNRVANALRMAAQTLVRSHSALGAFYRRMQARMGAHKAITAAAHKLARIFYHLWTSGGTYVDPGMNAHEHQHQERVVKNLKKKAQALGFDLVAKPTAPECVS

SEQ ID NO: 352758 - protein, 431 aa, unidentified
MTKFPREVTHMNFINPRAEKSRSLRKNNQDPKFRISYTATGQELIYGYVPVGIDLAGRKFQVCFYNEDNKLVNTTLDIHELRQFIAGSQQKLLISMEGCTGSSYWANYAITHGHKAVVLDARAIKNRKAQKDDFNDAFFIREALFTHYQTCRIRTQEEIDLKSFYAQKEQYIKSLNAVCSNVRQRLIAAGAYEKVVKDADSALVAIKRYKEQINNKSKVGFSSLTLKTLDCFVEDINYLTKKIDHINQNIIDVKARESQGAKLLMTIPGIGSQLAVLLSLDIADIERFKTARALQAYFGLFTAHSGSGGKIEMGKMARNGDPVVKRMLYQAVLTLLHYGNKIQIAPRSEYIQRMYSRHTVAFKRGVISMCAKIIRVVFGVLHHGTAYDPQIDSSLGNKKTRVHAYSNRCLNKVSADALIQEQYCYTEAALD

SEQ ID NO: 352759 - protein, 351 aa, unidentified
MKIIRIGVDTSKQVFQVHGVDENEQPALRRKLTRGELEKFFAKLPATRVGLEACGASHYWARVLQGMGHEAVLVPPQYVKPYLKRGKSDAKDAEAICEAMSRPGMRFVTPKSAEQQAGLMLLKTRELLVKQRTMLSNAIRGHAAEFGVIGAKGKGKLAELMQRALGEAAGLPALAREMLGVQFAQYQTLDATVDELDRRLLALHQQSPVSQCLATQPGIGPVTAITFTLKISNPQDFKSCRHFAASLGLTPKEHSTAGRQRLGGISRQGDERLRQLLVLGATARIKNAKPGRTPPWLLDLIARRPKKVAAVALANKMARTLWAMMISGELYREPREEAHRNTCRETRPRAA

SEQ ID NO: 352760 - protein, 416 aa, unidentified
MNAAGIDVSSSKSTVAVLRPFGEVVKLPFDVRHSVEELASLAKQLKSIEGETRVVMEHTGCYYESIAKVLHEAGLYVSAVNPLLIKEYGNNSLRKVKTDKADAMKIAKYALDNWSELRDYTPMDTIRYDLKTMNRQFQLAIKQKTATANSLIALQEQSFPGIRKLFDSPVRSDGTQKWVDFTHDFWHVDCVRSGSLNAFTERYRKWCKRNRYQFSTEKAAKVYALAKSAVVLVQKTSVTKTLVQAAADQLTAISRSVETYRSELNKLASQLPEYSVVMEMYGVGESLGPQLMAEIGDVRRFERKQSLVAFAGIDPAPSESGNYCSRSNRTTKRGSPYLRRTLFNIMKVHLQRAPADEPVFQFMDKKRAEGKPYYVYMIAAGNKFLRRYYGKVMAYFSSLEDLPPVDMDSTGLHHTK

SEQ ID NO: 352761 - protein, 346 aa, unidentified
MKISRVGVDLAKNVFQLHGADHKGNAVWKRQLSRGQWLKVLCETVEPGTPVGMEACTGAHHWARQLTLRGYPVPIIPPQFVKPFVKSNKNDANDAQAICEAMERPNMYPVRVKTVEQQDIQAIHRVREEIKSHRIAKANQIRGLVSEYGLVAPQQLSSLRRAIPEWLEDADNGLSLLFRQLLQGLWGDLHVLDQRMAELDNQIDVTAQQDPVAKRLQQLRGVGPLIATALIATVGDAKQYRKGRDMAAAIGLTPGQHSSGGKDRLLGISKRGDAYLRCLLVHGARSAVRTAKDKDDRLSRWIASLQTRRHTNVVAVAMANKMARMAWAMMTKGADYDPNFDPAIAG

SEQ ID NO: 352762 - protein, 323 aa, unidentified
MSQPNLQCMGIDVAKLSLDIATTDTIEPFTVGNDEDGFAVITDKLKHTKINLILMEATGGLEAAIACKLQSEGYDVVVINPRQARDFARSMGYLAKTDKLDAAMLAQLALVIDRHPDRSRYIRHLPDEARAVLAAMVVRRRQLNHMLVAERNRLYPSHPQSRKSIDNIIDALQNELDRINEQMKQHMTAFFQEQARLIGSVKGVGDITVASLIAELPEQGKLNRREISALTGVAPLNRDSGKMRGKRTTFGCRAGVRATLNMAALVATQFNPAIKLFYQRLLAAGKPKKLALVACMRKLITILNTMLRKGEEWNASFQSQVIS

SEQ ID NO: 352763 - protein, 347 aa, unidentified
MNFYKGPHRYYCGVDLHSRTMYICIVGQDGTVLLHRSLPCDPVRFLLAIAPFREDLVVAVECVYSWYWLADLCAREGITFVLGHALYMKAIHGAKAKSDRIDSEKTAVLVRGGLMPLAYAYPADMRATRDLMRRRLLFVRQRGSLLAHIQITHHQYNVAAPGKRITYRANREGLGEAFEDPSVRHSIAADLALADHFEVVIGELELAVLRQARIHDPNALALLMSVPGIGRVLALTILYEIHDISRFPSVRDFASYCRLVKCERSSAGKSLGTGGNKIGNAYLKWAFSESAVLFIAKSEQGRTVLKRLERKYGKPKALSVLAHKLGRAVYYMLARKQAFDPQRFAAA

SEQ ID NO: 352764 - protein, 341 aa, unidentified
MSIITVGIDLAKNVFAVHGVDDNGKAALVKPKVSREHLLPLIAQLPPCVIGMEACSGAHHWARLFRPYGHTVKLMAPKFVTPYRMSGKRGKNDAADAAAICEAVRRPHMRFVPVKEEHQQIILCLHRTRQGFVEERTATYNRLRGLISEFGIVLPQKVANLRRDIIDRLEDLPGYVNQCVGDLLAHADALEVRIGDYDRIIAKAAREDLRSKRLMTLPGIGPNTASAMLASIGGGHDFKNGRQVAAWIGLTPGQYSSGGKARLGRITKAGDRYLRSLLVMGARAVLSGLGDKQDRFSRWARSLVERRGYWKAVVAIAAKNARLAWAVLKFGEDFRLRPAEA

SEQ ID NO: 352765 - protein, 426 aa, unidentified
MEEFNKGEKGDTMKSYLFVGIDTHKDSHTAAVLNGYFEVVATISFDNERSGFTGFERRLKELSLGKSLLFGLEDSQGLGSFLASYLTGKGYETLEINPVTTDRGRKHTVSRDKSDGRDAIVIAKTLIRERTCLHPVRIDRNSVAIREMIGYRQMLVGESTRIKNRLHMVLFNQYKGVLGCFKDPFRKCALAFFKEYPDPSSLEEADPDSLSEFLKTNSNGMFSKKKAKAILSSIDNDIADSLTDTRAHIITAHIERLNCIGKEFKKIQYVLETLVKASSYHSLTSIPGIDIITAAKIISSVADISRFSSASKLARFCGIAPSERSTGRKIRYEKSKYGNKSLRSAIYFVALSHISRTRNGMDKNPISRAYYLKKISEGKTKKEALTCLTRRLVDIIFAVMRDRSIYNFSESEFRKKHDAKLNSVAA

SEQ ID NO: 352766 - protein, 422 aa, unidentified
MLEQTQDSEEIVARVAALDIGKAEVMCCVRVPDQDRSGKRLQEVRPYSTMTRSLLVLADRLTALGVTRVVMESTSDYWKPVFYLLEAHGFDVWLVNARDVKHLPGRPKTDRLDAVWLCKVAERQMIRPSFVPPSPIRRLRDLTRYRRDLVEVCTAEKQRVEKLLEDAQIKLSVVVSDIFGVSGRAMLAALATGERDPKVLAQLARASMRRKIPRLEEAFTGYFTDHHAFLLSTMLARVDAVTADIARVDAKIEELITPFATVVDQLDEITGVGRTAAQVAIAEIGLDMTRFPTPGHLCSWAKFAPGVSESAGKKKGAGATGHGNPYLARILGEAAVAASKTNTFLGERYRRIARRGGAKKAIVAVGRSILVIIWHLLSDPNARFHDLGADYFAQHTNTQRKIRNHISQLNTLGYRVTLEPTA

SEQ ID NO: 352767 - protein, 343 aa, unidentified
MEQYIGMDVSLKETSICVVDGSGEIVSEGTVISEPEEIAKYIKTKAAGAKRIGLETGPTTTWLWHELRALGLPVICIDARHAKAALSMQINKSDRNDAVGLARIMQCGWYKEVRVKSLPCHEVRAVLNSRAQLVKIKRDLENQIRGLLKNLGLRIGKAGGNVFSRRVEELVADQSLLREAVRPLLAVRESVRREVADLHRKLLALAREDNDSRRSMTVPGIGPITALTFRSVIDEPARFRRSRSVGAYLGLTPRRFASGEIDWSGRISKCGDRMLRTYLFEAAGVLLTRVPQWCKLKAWGRRLWKRIGFKKAKIAVARKLAVMLHRMWRDGTDFIWSSKEAAA

SEQ ID NO: 352768 - protein, 350 aa, unidentified
MRPGSLKTVGELGAPLVIPLNPNSRRGREAQSPIRQGRVAMDSIIVGIDVSKNRLDVAVRPSGEVFAIERNPVGLEQLTVRLRALSPALVALEATGGFETIVAAAVAAAQLPVVVVNPAQIRAFAKAVGQRAKTDPIDAAVIAHFAEATRPEPRPLPDEATRLLADLVARRRQIIEMMGAERQREKRVAVPHLRKSIVRLLKALERELSSLDTDINDAVRGSPAWREKEDLLASVPGVGPTIARTLIAELPELGRLSRRQIAALAGLAPFTRQSGQWRGRSFIGGGRTAVRTALFMGAMVAKRYNPIMKAFFDRLVAAGKPKMVALIAVARKLLTILNAIIRDGRPWQTA

SEQ ID NO: 352769 - protein, 367 aa, unidentified
MSDTIVPYQSFIGVDLHKNTVTLAAVRPDGSLIDRVKIPTKCRNRIEEWLLAQPRPSHLAVEAVGFVEWFIDDYRPCVDRIDIADATELANRRGKRRKNDPNDARDIAQRLARGECPLGYIADDELMQLRKLGRHWHQLSRLLTRTKHSMRSMLLAANIAGPKLDGPAAQKWLLAFGHLLKPVQRQAFSNFLDIVQLVERQRAQLHRQITFANRAERFRKTVELLKSVPGIDEIWACVIAAEIGPFDRFPNADALEFWAGLTSDLQESAGRTQSGKITKAGSRTLRWALCKAALTLCRSDKKPEAVRQRLIRRIGKPKANVAMGRRLLRILYAMIRDGKTYVRGPATKHNLAANRARMARKKRKETA

SEQ ID NO: 352770 - protein, 404 aa, unidentified
MSVQIAPVTSSTIVVAVDVGKSSALLSVTDARHHRLFGPSEFAMNRSGLTAVATAAMASMPPLGRVKVGVEAAGHYHRPVLDHQWPSGWEVLELNPAHVAEQRRVQGRRRIKTDVIDLEAITELVLAGHGSPVTDRDVVIGELSAWAAHRSRRVATRTATKNQLLGQLDRAFPGLTLALPDVLGTKIGRLVAAEFADPSRLVALGVNRLIRFAATRNLALRRPVAERLVAAARDALPTRDAVIARRILAADLALLTDLSAQIEAAEAALAALLPRSPYATLISVPGWGVVRVSNYAAALGDPNRFPGPRQIYRASGLSPMQYESAHKRRDGAISREGSVALRRALIDLGMGLWLNETAAKTYAHGLKDRGKHGGIIACALAHRANRIAHALVRDHTTYDPARWA

SEQ ID NO: 352771 - protein, 420 aa, unidentified
MKYAPALVLPDVPPGGVSAGIDWASADHAVCVVDMAGKVTDRFTAAHDKAGIAAMTARLRRAGAAEAAIERGDGPLVEALLAAGFTVVVISSRKVRNLRERHVSSGAKDDRFDAFVLADALRTDRARLRPLVPDTPGLLALREAVRARKDLVAQRVAAANRLRAHLETAFPGAARLFAVLDSRLSLAFLDAFPSREAAAGLDEAAIAAWLGGFPRRGNAAPAGVLAARLAAAAPGTGDDPAQAALTRILAAAVGGLAARIRDLEAEIAALLAACPDGHVFASLPRAGTLRAARLLGEIGDCRARYPDAAALAGAAGVSPVTRRSGKWVSHEFRWHASAHLRDALCDWAGDTRHASPWAAHLYDGARARGKDHPHAVRILACAWTGIIWRCWQDGVPYDPGKHRALQDILARQAGDAGQEQ

SEQ ID NO: 352772 - protein, 345 aa, unidentified
MSIIGGLDVHRKQITFDYLDTDTGRLERGQIRPADRAQLAAWLRKRFTDAGEVHFAVEGCTGWRYVVEELAAAGCVAHLADPAETAAARGRKRRAKTDRADAKLERELLVDGRLPECWIPPAHILDCRALLETYHALHEAHTGWVQRIHAVLFHQGAPSLSGGLGTAEGQERLAKITAGQLSPAAQVQIAVAQQMLAAIEVHLDALRKRIGAAARALPGAKVLHERLFGVGPVTALALTCWLGGAGRFSSARKAVRFVGLDVTVYSSAGKRSPGRLSRQGPPVLRWALYEAGKTHARASAPDHAYYAAVKERIDGKRAALSEARKIVRKAVHILDELGDEALATG

SEQ ID NO: 352773 - protein, 413 aa, unidentified
MGYMVAGVDIHKKVLMVVVTDASTEDLRFERFRCGTSAVERELLLAWLQKHEVQELVMESTAQYWKPIWMELEPHFGPGKLHLAQAHSNRAPQGRKHDFADAQRLTRRLLAGELILSFVPDAEQRGWRTMTRARVQRVSDRVRLQNQLEALLEEMRIKLSSVVSELLGLSARRILRALADGESDPVRLAELGDFRLKCSQEELADALRGHVAPMHRQLLVLFLERLEMLDHQMHSLERMTAAAMKQYQDAVIRLAGVAGFGAESAQQILAEVGPEARSFDSPDQFASWGGCCPGRSESAEKNRSSRCPKGNRFVRRILTQAAQAAVKKKGSSWQRTFRRWLPKLGYPRAIWAIAHKLCRLVWKVLHEGVHYVEQGDESSPKAKQQKAQKMIRALRRMGFAVQVSPLSTLPASG

SEQ ID NO: 352774 - protein, 412 aa, unidentified
MQIIHPCCCGVDVHTKTVVACLIKQGTKQVRTFSTMTDDLLAMSDWLVAEGCTHVAIESTGVYWKPVFNLLEGVLEVILVNARHVKAVPGRKTDVRDCEWLADLLRHGLLKASFIPPLYIREIRELTRYRQTLVKEQTAVANRVQKLIESGNIKLGQVATDVLGVSGRQMLRALADGEHDTEKIADFARGQLKKKKNELQRALEGRLTKAQRFVLGELLKRIDELTAAIVRVNEELRAEVSRSTDPFVAEAVSLLETIPGIGQRIAETIISEIGVDMSRFPTDAHLASWAGMCPGNNESAGKRLSGKTNKGSTYLRDALIQAAWAATHTKQTYLAAQFRRLVRVKGKKRALIAVGHSILVIIYHVLKQRASYQELGGDYFDKQNTEKLRARLIRKLESLGVKVTVEMMAEAA

SEQ ID NO: 352775 - protein, 343 aa, unidentified
MQAVTTIGLDIAKSVFQVHGVDCNGQVVVRRQLKRRYVLAFFEKLAPCLIGIEACASSHHWSRQLQALGHDVRLMPPSYVKPYVKRQKNDATDAEAICEAVSRANMRFVPTKTPEQQSGLVLHRTRHLCIRQQTSVINAIRAHCAEFGIVAPVGRRGIEELLNVIANANDEQVPEIARACLSALGDQLHRIKAQILAFDRMIGAWHRSCAASKRLDEIPGVGPALATALVASIADPRTFRSGRDFAAWIGLVPKQSSSGGKPRLGSISKQGDRYLRGLFTAGALAVIRYAKIHRIGHRPWLTALLARRPTKVAAIALANKIARMAWAMMARGERYREPAALAA

SEQ ID NO: 352776 - protein, 406 aa, unidentified
MPVYIGIDWSQTKHDVCILNEAGAPIARPVLAHSPEGFQKLDAQRQQLGLAASECRVGIETAHNLLIDFLWGHGYQQVFVIPPNVVKSTRGRYRQSGARNDQSDAFVLADVLRTDRARLQPWQPDHVLTRQIRSRVSLLGHLTRNNVRLTNRLRAVLWRYYPAALNVFGALDTRIALEFVRLYSTPQHAAALTLTEFKTFAQGHRYPRPKQLPARFACLQQPQPQADQDTVCVFQGEAVQLASLLLDLVQTKTTVVKELRRLFEQHPDAPIFGSLPGAGELLAPALLAKFGDDRARFPSPASVQALAGTCPVTEASGKKRVIKFRQACDREFRVIAQQWAMASLTNSTWANAYWQQVRPHCDSNSHAYRCLANRWLAVAWKMWQTRQPYNEAYHLQQRAQRSRPRS

SEQ ID NO: 352777 - protein, 445 aa, unidentified
MSDSLPSVNSELEYAAFAAIDWADQKNFWRLRPADSQKEEHGELENTPEAVEVWAASLYQRFGGRPIAICLEQSRGALVYMLIKYPHLVLFPVHPTTAARYRETFCTSGAKDDPSDTASLLDLLLRHPEQLRAQQPDTIHTRLLQFLVEQRRTMVDEKTRQGNRLTDCLKLYFPQLLRWFNDVSSPLVGALLERWPNLLALQRSHPGTLRKFFHEQNCRGEDKIEERIAAIYQAVPATGDAAVCEGVSLMARGLTAVIATLRTHIAEFDRRIAEVVATHPETPIFDSLPGAGKVLVPRLIVAFGTRRERFADAEEIQRYSGIAPVTKASGKTQLVLCRRACPKFLRQTFHEFALHSVGQSEWAKAYYVHLRNDEKKDHHAAVRSLAYKWTRIIYRCWKDGKPYDEQIYLRSLRRRGSLLGGAFAAATSAGWKSVGGFQKLSENNS

SEQ ID NO: 352778 - protein, 423 aa, unidentified
MNKDTLNTLFVGIDVSSKSNYVVAINFNGDSLLDFSVPNDLPGAELMLDRILSVLQDNNLSFVTIVIESTSVYSFHIANFLASNNSLFDFCSKVFVINPKTSSNFRKTYVDIDKTDPLDAFVLADMARCGRISQQPHKAPQLFALQRLTRQRFHLVKTISAEKAYMLTNIYLKYSSLCTSYKEDKPFSNLFGNTSSNLIVDFSPDDIVNMSEDDMINYILDKGKNRFSDPLKNVDLFKKIARDSYRLDQVAYDPINISISSSFNTINALQSNLKTIDKAIEKNIKGLCDNEYNILLSIPGIGPVFAASILAEIGSIKFFKTNNELAKYAGLTWRKTQSGNFEADTTRMTKTGNKYLRYYFIEAIAHVKSQIPEYKQFYTPKYNEVTKTPHKRALALTARKFVRLVFGLLHHNQLYSDEKSVNS

SEQ ID NO: 352779 - protein, 313 aa, unidentified
MSDNLPQTIGIDISKASLDCHVHPVGAERQFANTAKGHKALIAWARQWPVERIAYEATATYHRALEAALADWPCVKLNPERARRFAQATGTLAKTDRIDAMLLARMAATLQPPVRPARSAQQAQMAELINARDGLVRDRTACLNREKNLTIALLKRQCRQRIKQIEQHIKALDTEIATFIAADAELARRHQILTSIAGIGDLTANQLIATMPELGTLDGKQAASLAGLAPVARQSGQWKGKSFIRGGRANVRQALYMPALVAARFNPDLKAKYQQLVTAGKPAKIAITAVMRKLVITANALLKANRLWQQSPA

SEQ ID NO: 352780 - protein, 493 aa, unidentified
MGACELESGDVALAAIPIRKITIGIAQTLLLIIDWRIAMPKRTTGDRPELKPVNVGAAAIDIGSKMHMAAVNPASTDVPVRSFGTFTQDLHDLADWFKACGVTSVAMESTGVYWIPVYEILEQRGFEVILVNARYAKNVPGRKTDVSDAAWLRQLHSYGLLRGSFRPDAEIATLRAYLRQRERLVEYAAAHIQHMQKALMEMNLQLHHVVSDITGATGMRIIRAIVAGERNPGVLATYRDVRCHSSTETICAALVGNDREEHIFALTQSLELYDIYQAKMLDCDRKLEVLIAALNNREAKPAGKLSKARIKTKQVNTPTFDVRTALYAVLGVDLTEIHGLGPSLALKLIGECGTDLRAWPSAKHFTSWLCLAPGNKISGGKVLSSRTRRSSSRAAALLRLAATTVGRSDTALGAFYRRLSSRVGKSKAVTATARKIAVLFYNTLRHGMSYKDPGADQYERQYRSRVLANLQRRAKSLGFVLQAVPGDANPAVS

SEQ ID NO: 352781 - protein, 400 aa, unidentified
MRVVLGIDVSKVSSEVAILVNGEKVHGYTMANDAIGFSRLLGDLKTVHKPEIIFEATGVYSRRLQAFLDEHGYAYTRLNPLEAKKQLDSLRVRKTDKIDAEKLAQSQFVLNRKPTYVQEEVYQNLRDLSRFYQNLTEDIVRAKNRLHKVLQVTFPELETILSTPTGEQYWNLVTAFPCKDLVLELSKDELSKSIRLSTSKRISDKRVAYLAEKLTALANQSYCAVKKTSPIMEEVRYYAKELLRLSEQRQTVLDKMVTLAKPLPEYDILLSIPGIAETTATSIIGELGDIRRFQSANQINAFIGIDLRHYESGNFLAKEHITKRGNPYARKILFKCIHNIASASHTNPCHIADFYEKRKRQSQTTSTKPHTIASIHRLIRTMYYLITHNKLYDYTLTQNQ

SEQ ID NO: 352782 - protein, 373 aa, unidentified
MKYTTVFVGMDVHKESFTLACYTNEKEKAEYVQRTEAHYSKVISYLEAMRFHYGKEVTFVCGYEAGCLGFTLYHQLTEHNIQCEVIAPTTMLVTRGKKKVKTDRRDAELIGRCLAHRDYSTVHVPTAKDEETKEYLRMRNDHKQALKKIKQQILAFCLRHNFHYHAGRSYWTEAHLKWLRSLEVGSMYQEILEEYLLTYQNLLDKITRMDKRIEELAKEEEYAEKVKKLTCFIGIKTQSALSILTETGDFKRFATPQKYASYLGLVPGEDSSGEDQIRLHITKAGNRLLRTILVEAAQSYSRGRVGAKSAELKKRQEGNRPEIIAYADKANERLRRRYYRMVLSENKRHNVAKTAVARELACFIWGMMTGNVA

SEQ ID NO: 352783 - protein, 476 aa, unidentified
MAVPNEDSKKPAKSKKPTNPNRARERSLAVPVPASAAPLTVVNPDAAGIDVHSNMHMVCVPADRDANPVRQFGAYTADLHEIVTWLHKCGVKTVALESTGVYWIPLFELLESEGFEVNLAEPGQLSRCGARPKTDVLDAQWIQRLHSYGLLRGSFRPPESVLALRAYFRQRQMLVRYAASHVQHMQKALEQMNVKLPEVVTDITGLTGMSIIRAILDGERNPVKLAKLRDARCHHSEEQIALALQGTWRPEHLFELRQAYELYQFHHRQISQCDQQLETELGRFPNRAGEKTRTVKPRGRGRKSNDVRFEAKGPLFQALGVDLTMIEGIDVGTVLAIAAEIGPDVSRFPSEKHFASWLRLSPPQNQSNKTNKRRDHRKSTSRVTIALRLAARSVGKTKTPLGMFYRRIRSRIGGLGAVKATAHKLACLVYRMLKYGQEYVTQSMEEYKAKMETSVLNALKRKAAAMGYQLNPLPAK

SEQ ID NO: 352784 - protein, 358 aa, unidentified
MEYFAGLDVSLEETAICVVDGDGRTAGEARVASEASAIATWFEATRLRPARLGLEAGPLAPWLQLGLEERGLPAVCIETRRMRSATLLMAVKTDRGDARAIAHAMRAGWYTAVHVKSMPSQELRLLLRNRKTLLEQRVRLDNVIRGTLKAFGIKLGRVSEARFADRVAALLEEHRPGLLDFVQPLLAVRLTLRRSYQALHRLVLRAVRDNPLCRRFMTVPGVGAVVALSVMTGIDDPRRFSRGRKVGVHFGLTPRKYASGEVDRNGAISRCGDAMVREALFQAAHTLLTRVQRWSALKAWGMRLAKRRGLRRATVAVARKLAVILHRMCVDGTDNEVLYAKIEALEGKRPLTHRRSRR

SEQ ID NO: 352785 - protein, 411 aa, unidentified
MIGDHTLVVGMDIGSEFNAACFMDKEGNVFGRYPTIYNSRKGFDYFQMMLVKTKRKHKFTDVLIGMEPTGHYWRKIAFFAKEKGYEVRFVRTTAVKHQRKLDESSSGKSDIKDAHTIGNIVREGKYIDTVIEDSVFRQLRTLAHARERILRYIVGSTHGLQAVLNDYFPELRHLFWSMKAKGLWTLLETYPFPEDVRNAGLAAVVTLLAKGTGKKRHVREQAEQVYQAAAESVGLKAIGKADRARLTMYLEEIKRSDARRRLLEREMKELLKEIPLAQYILSLPGMGKVGCAVFLGELGNPAHFKNPRQIIKYAGYDPKENDSGLRVGRKIISKKGRWLLRKCLFFMVLRLVHRSSFFKAYYEHKKKGFDRPLEKTEALCAVILKLIRVLFALMRDRRTFTEELPRCEKAA
